United States Patent Application Publication US 2026/0022371 A1 - sequence listing, part 4

SEQ ID NO: 51318 - DNA, 120 bp, synthetic construct
  source 1..120: mol_type = other DNA
ctgtccttttcaccttttctggtcatttggcttgttaaagccatgctgtccattccacttcaaactcatgtgcaaatgtcttccgaaggagccaggaagcagttgctaagatttctaaag

SEQ ID NO: 51319 - DNA, 120 bp, synthetic construct
  source 1..120: mol_type = other DNA
aatgtgatgagacccctgtttctactcctggtgtatgttcacagagttctttttcatactcacaaggggagcattcagggacactaccaaactttggtatccagtacccagaaatttaca

SEQ ID NO: 51320 - DNA, 120 bp, synthetic construct; identical to SEQ ID NO: 14297
  source 1..120: mol_type = other DNA

SEQ ID NO: 51321 - DNA, 120 bp, synthetic construct
  source 1..120: mol_type = other DNA
cctctactaaaaaatacaaaaattagctgggtgtggtggcgcacacctgtaatcccagctactcacgagactgaggcacaagaatcacttaaacccaggaggcggaggctgcagtgagcg

SEQ ID NO: 51322 - DNA, 120 bp, synthetic construct
  source 1..120: mol_type = other DNA
gaaagctggaatgattttaaactgtaacagaaaatctattcaaatgcgaggtgggacattatcctggatttatgacactgttccagctatgaatcaagtgtcatgtttgttttgagaaaa

SEQ ID NO: 51323 - DNA, 120 bp, synthetic construct
  source 1..120: mol_type = other DNA
ggccactctttgccttcctaccttgaataccatagttgacttttgcctgctcatatagcccaggtatttctggcctactctgctcttgtgatactcacattgtcaacacctttgacatct

SEQ ID NO: 51324 - DNA, 120 bp, synthetic construct
  source 1..120: mol_type = other DNA
gcactgaaggacgtggctctgcgggtgccccatggcagcctcgcacgtacctgttcttgagcaggttggatgtgcacagcagtcgtggttgtcctctgagcagtctgctctacagcgctg

SEQ ID NO: 51325 - DNA, 120 bp, synthetic construct; identical to SEQ ID NO: 14298
  source 1..120: mol_type = other DNA

SEQ ID NO: 51326 - DNA, 120 bp, synthetic construct
  source 1..120: mol_type = other DNA
cctccaatttatacagactgagtttcatggcagaaatccagttggagaaactagaatgtgaaataaggaaaaacaaaaccattctgacagtacctctttagcaccagtggcaacagcctc

SEQ ID NO: 51327 - DNA, 120 bp, synthetic construct
  source 1..120: mol_type = other DNA
atctcccttcccatctctcttctgtcctgatctgagtagaggttgtcagcgttgtctctctcatctcagcctcagatgaggaggccacgtagccctcttgcttccaagggggaggcactt

SEQ ID NO: 51328 - DNA, 120 bp, synthetic construct; identical to SEQ ID NO: 14299
  source 1..120: mol_type = other DNA

SEQ ID NO: 51329 - DNA, 120 bp, synthetic construct
  source 1..120: mol_type = other DNA
ataatgtacttggaagtaatttgttttaaatctcaataaacctattcttatctgctgtaaccctgtaagagaatcagctttaattccaaataagctggagattttgtgccttgcaccttc

SEQ ID NO: 51330 - DNA, 120 bp, synthetic construct
  source 1..120: mol_type = other DNA
ctgggggggttagaggatgtcaaataggtgttataagaagaaaggtttctgtaatcaaaatgcttgtgccactcttgactaagcagcttaagccatttttttttttcccctgcaggactt

SEQ ID NO: 51331 - DNA, 120 bp, synthetic construct
  source 1..120: mol_type = other DNA
tgctttagccgaagtgtttgtggacagctacttttaatttcctccatatttgtttacactcgccccccttgtattgcactctggacttattttaaatatctttagagttattgtgggaat

SEQ ID NO: 51332 - DNA, 120 bp, synthetic construct; identical to SEQ ID NO: 14300
  source 1..120: mol_type = other DNA

SEQ ID NO: 51333 - DNA, 120 bp, synthetic construct
  source 1..120: mol_type = other DNA
gaaaatgtttataaatgcatcttgtcactatctaggatatttagcttacactgatcatacatgaaatgattattctaattaagctcaaggtacagttgatattttctctaacttacagag

SEQ ID NO: 51334 - DNA, 120 bp, synthetic construct
  source 1..120: mol_type = other DNA
aaagggaaatctagggaataagcctcttttctgaacatgactgcctttgaaatataacaaaaaccaagttagaataatgtgtggtttccactaactgaagaaaagcaaagagacatgtgc

SEQ ID NO: 51335 - DNA, 120 bp, synthetic construct
  source 1..120: mol_type = other DNA
catgacatgactgattaacagcaggacacaggtaagcccataactgtgaaaatcattgtaattttggtcattataggagagtgcttatttctgtacttacaacaaaaaataatcacctgg

SEQ ID NO: 51336 - DNA, 120 bp, synthetic construct; identical to SEQ ID NO: 14301
  source 1..120: mol_type = other DNA

SEQ ID NO: 51337 - DNA, 120 bp, synthetic construct
  source 1..120: mol_type = other DNA
gcttgtgttgtgatttcatggtgtgcaaacttggatttagcctgagactgaacatttttttttattcgactgctagacatgttttttaaagtaagctttttgttcaaggtttcatgttag

SEQ ID NO: 51338 - DNA, 120 bp, synthetic construct
  source 1..120: mol_type = other DNA
atcttttgtctttttttgtgttgcatttttttcctttaaaaattaatttgtggatgatttttaatgcatttagtgcatttattggttatttgtcgtaagtgttgcaaacattcccccaga

SEQ ID NO: 51339 - DNA, 120 bp, synthetic construct
  source 1..120: mol_type = other DNA
tttatgtttattgtgatacttttatggcagaggcaatgaagtaccttgaggaggagaaaggtcttaaaattttttcacaagtgctgtttggtttagaaatgactttttgcttttgccata

SEQ ID NO: 51340 - DNA, 120 bp, synthetic construct; identical to SEQ ID NO: 14302
  source 1..120: mol_type = other DNA

SEQ ID NO: 51341 - DNA, 120 bp, synthetic construct
  source 1..120: mol_type = other DNA
tatagtaactttacagtatgtttgaatattatttaggtcaactatctccttattattcttttataaaaaattttcttggcagggaacatccatgtgttttttatttcatttaaattgatc

SEQ ID NO: 51342 - DNA, 120 bp, synthetic construct
  source 1..120: mol_type = other DNA
aactttcaaaactgttgtggacaatttacacttgattatataatttctgagccctgatcatgatacatgatcaccttctaaaatacttccatattaagtaagcatagaagtccattttat

SEQ ID NO: 51343 - DNA, 120 bp, synthetic construct
  source 1..120: mol_type = other DNA
attgaagccccaaaatgcagcttgagatcattcttattgtgactctctttaatttacagatgacacaactgaaaccttaaataaactgcttaacttctttaattccagttacctatcaat

SEQ ID NO: 51344 - DNA, 120 bp, synthetic construct
  source 1..120: mol_type = other DNA
attgccctaaatcaaactgttaagtgatcaggctgatttgtccttagggctttgaactctaacttctgtgctcttctcctttcactgtgccatattttggcccctaaagtagatatttat

SEQ ID NO: 51345 - DNA, 120 bp, synthetic construct; identical to SEQ ID NO: 14303
  source 1..120: mol_type = other DNA

SEQ ID NO: 51346 - DNA, 120 bp, synthetic construct
  source 1..120: mol_type = other DNA
gccacgcccacaccctatgcctataaaaacccctgagaccctagtaggcagacacacaagcggctggatgtccagaggaacacggagccccacaacctgcccgtttgtatgctcccctag

SEQ ID NO: 51347 - DNA, 120 bp, synthetic construct
  source 1..120: mol_type = other DNA
tctctatggcagctttacctgaccggagatggggtcggtgcccgcacgtgtctgaccggggaaggggagtgtcttatgggcgatggggactgctgccgagccagctgtgctttggcagca

SEQ ID NO: 51348 - DNA, 120 bp, synthetic construct; identical to SEQ ID NO: 14304
  source 1..120: mol_type = other DNA

SEQ ID NO: 51349 - DNA, 120 bp, synthetic construct
  source 1..120: mol_type = other DNA
acctgtgggaagggaaagatgaatgtttgggagggggcacaatgacccattttaaaagagattctgttaattctgactacaaagtcaaaaagattttctggatatcccaatggagaaaat

SEQ ID NO: 51350 - DNA, 120 bp, synthetic construct
  source 1..120: mol_type = other DNA
gaaatgtagatcacttaattgaaaccctttccagtttataatgagattcataagcacagattgcttctattctgcgctcctgactagaatctcagggacttttcatgggtgtcgaaaagc

SEQ ID NO: 51351 - DNA, 120 bp, synthetic construct
  source 1..120: mol_type = other DNA
acgtaccttgaaccagtaattcagcagtcgaagtagctcttccaacgctattggtggcatttactgaataggtccctgagtcctcagggtatgcttctgcaatcagtaagctgtagaggt

SEQ ID NO: 51352 - DNA, 120 bp, synthetic construct
  source 1..120: mol_type = other DNA
gtctcacggtcatgctctgcagtcgttgaacgaagttgggtggtgctgtctcagctgcggggacaagagaacaaagtcaagagtgagagccagggtgctccctacaaggtatttttaaat

SEQ ID NO: 51353 - DNA, 120 bp, synthetic construct; identical to SEQ ID NO: 14305
  source 1..120: mol_type = other DNA

SEQ ID NO: 51354 - DNA, 120 bp, synthetic construct
  source 1..120: mol_type = other DNA
cattaaaatgaattccagtggttgctacgatgggtgtacctgttacttaaagaatcattacatttttaatttaatttttaaaattctaaaccttctccaacttgataggtattcaaataa

SEQ ID NO: 51355 - DNA, 120 bp, synthetic construct
  source 1..120: mol_type = other DNA
agtgagtggaattaactttgacatgattttgagtaataaacaacagcaggtgctgccaaccctgtgcattttccatttgtgaattttctgggtgcatgctaaagttctacctgatgttac

SEQ ID NO: 51356 - DNA, 120 bp, synthetic construct; identical to SEQ ID NO: 14306
  source 1..120: mol_type = other DNA

SEQ ID NO: 51357 - DNA, 120 bp, synthetic construct
  source 1..120: mol_type = other DNA
attatctggatgcttgttaaagtgtgaattcctggagattcacacttccctggagaatatgtcttattccttaaaggacttataaacaaggctccaagcttttctacttgctgagaaaca

SEQ ID NO: 51358 - DNA, 120 bp, synthetic construct
  source 1..120: mol_type = other DNA
gtactctagaggaaaattaaattccaaaaggcaaacaacttggttataaataattcagcctccagtagacccttctgtagtttaagagctgcatctacctctgcccatagctttttctgg

SEQ ID NO: 51359 - DNA, 120 bp, synthetic construct
  source 1..120: mol_type = other DNA
agctcagcagtactagtcgcttgtccagatccattggtggctttcagggaatatcgtccactgttggctttagtcacggcggggatcgtcagtttagcgcggccatcgctaaaggagatc

SEQ ID NO: 51360 - DNA, 120 bp, synthetic construct
  source 1..120: mol_type = other DNA
gcaagaacaattcacctttatgtttgaatgggcaccacaaagtcctctgctctgtcccatcatgttcactgccttgtccgaatctgtaaaagctttccagcatggaatgccacttaatga

SEQ ID NO: 51361 - DNA, 120 bp, synthetic construct; identical to SEQ ID NO: 14307
  source 1..120: mol_type = other DNA

SEQ ID NO: 51362 - DNA, 120 bp, synthetic construct
  source 1..120: mol_type = other DNA
tggttacagggacactgtcttcttggactcttctgctttcacaagtgcaatcagtaaaaacattgtaacatggacaagcaatttctcataagagactaatccaaacctagtcttccagaa

SEQ ID NO: 51363 - DNA, 120 bp, synthetic construct
  source 1..120: mol_type = other DNA
tgagaatgtacgaggcacattcagggcatgatttatttcacacttggcataaaggttgatgctctatctacttacgctggtaggtaaagataatctagagaaagtctattttgttgttta

SEQ ID NO: 51364 - DNA, 120 bp, synthetic construct; identical to SEQ ID NO: 14308
  source 1..120: mol_type = other DNA

SEQ ID NO: 51365 - DNA, 120 bp, synthetic construct
  source 1..120: mol_type = other DNA
agaaagtattatccagttatgaataagattggtgcatataatagaaaaaaagagaaaaaaagaaattttattttatatctttattataagccataaaattttaaaaaagaagtgggcaat

SEQ ID NO: 51366 - DNA, 120 bp, synthetic construct
  source 1..120: mol_type = other DNA
acaatatagttcatacactactctccattttttcataagatgataccatgcatttttttgaaccatccataaactgagttatgaggaagaaaaagaaggcaaaaaagagatgaacttcct

SEQ ID NO: 51367 - DNA, 120 bp, synthetic construct
  source 1..120: mol_type = other DNA
taaagattgaaaataaaataataaaataatgaggagttggttaattactgaacagctctgcctctgaggaaaattagatgcactgttattttgcgtgtgaaccaactgaagttcaggtgt

SEQ ID NO: 51368 - DNA, 120 bp, synthetic construct
  source 1..120: mol_type = other DNA
ggctctgcagctgagcccaaatatagaatgactaaatttggtcctatttagttgctggattctaacggcaattttaatccaacactaattatttttgctttgtggaataataaatatgaa

SEQ ID NO: 51369 - DNA, 120 bp, synthetic construct; identical to SEQ ID NO: 14309
  source 1..120: mol_type = other DNA

SEQ ID NO: 51370 - DNA, 120 bp, synthetic construct
  source 1..120: mol_type = other DNA
gctgctttgcagatagcagagacacacgtttctccaaatggattgctccataggtcatctgtgggcctagagtgatgggcaggtcttctcttttgtggcttgaacagttttgcatagttc

SEQ ID NO: 51371 - DNA, 120 bp, synthetic construct
  source 1..120: mol_type = other DNA
accaatggtggaaaaccaggttcagagttgaagaagaaaaccacagcaatgcagggttagtgaagtgtaattagagagacaagacatgtgataaatgtaaaataaacctctgggcctggc

SEQ ID NO: 51372 - DNA, 120 bp, synthetic construct
  source 1..120: mol_type = other DNA
caaaaattagccaggcgtggtggcccatgtctgtagtcccagctacttgggaggctgaggcatgagaattgcttaaacccaggaggtggaggttgcagtgagcaaagatggtgccaccac

SEQ ID NO: 51373 - DNA, 120 bp, synthetic construct; identical to SEQ ID NO: 14310
  source 1..120: mol_type = other DNA

SEQ ID NO: 51374 - DNA, 120 bp, synthetic construct
  source 1..120: mol_type = other DNA
tactgtaactgtgcagtaaatgttgttactgctgaagtaaatattcagaaaaatttaaattttagtgaacaggccaaagtttattatagttctgaaagaaaaatgctggcttgagttctt

SEQ ID NO: 51375 - DNA, 120 bp, synthetic construct; identical to SEQ ID NO: 6810
  source 1..120: mol_type = other DNA

SEQ ID NO: 51376 - DNA, 120 bp, synthetic construct
  source 1..120: mol_type = other DNA
tctacttagttaaaaaaatgaaaccagcattctctgagacaataaaatttatatttggaaaaatcagataatatccaaaagctttcataaattttttttgtcagaaactcctttttgtag

SEQ ID NO: 51377 - DNA, 120 bp, synthetic construct; identical to SEQ ID NO: 14311
  source 1..120: mol_type = other DNA

SEQ ID NO: 51378 - DNA, 120 bp, synthetic construct
  source 1..120: mol_type = other DNA
gatcttacattcctattgtctaggtaaattttattgccttagcacttgctcttcacaggcctttgtctaactggggctgaaggtatgcgtctaaaatgtcatgctcttaaaataaactct

SEQ ID NO: 51379 - DNA, 120 bp, synthetic construct
  source 1..120: mol_type = other DNA
tatcagagctattcttggtgtgcttaactttatcattgagtaatataaccttgaacattctcaacaggcaaagagagtctagaaaagaagtaaacatttctctcaacatttcagacctca

SEQ ID NO: 51380 - DNA, 120 bp, synthetic construct
  source 1..120: mol_type = other DNA
cagatttaaataatgggtcagcactggcaagaaatagtcatacaaacacttgtacataggcatttagcacacacaaataatccagagccagagatcaataagaaagtgactctactatta

SEQ ID NO: 51381 - DNA, 120 bp, synthetic construct; identical to SEQ ID NO: 14312
  source 1..120: mol_type = other DNA

SEQ ID NO: 51382 - DNA, 120 bp, synthetic construct
  source 1..120: mol_type = other DNA
tcacataccacctgttcttctgattgacagtgctaaatttagtacctcaaaggagacttcaccaaggaaatagaactgtatttaaagaataactgtgttgaggctcagagaagagcattg

SEQ ID NO: 51383 - DNA, 120 bp, synthetic construct
  source 1..120: mol_type = other DNA
cctgttcccttcccccataaaacaaaccaaatggacctgtcaatcatgacagcagatgaggaaatttatctcaagcataaggcttcatgttctctgaagaatcagttgctataaacctta

SEQ ID NO: 51384 - DNA, 120 bp, synthetic construct
  source 1..120: mol_type = other DNA
aatccacttgtatttcggggacagttacactgatgttaatgagcttattgcttatacaaccctgcaagatataatgttgaaaggcaaaattggaactctgcttaggttagtctgtacagt

SEQ ID NO: 51385 - DNA, 120 bp, synthetic construct; identical to SEQ ID NO: 14313
  source 1..120: mol_type = other DNA

SEQ ID NO: 51386 - DNA, 120 bp, synthetic construct
  source 1..120: mol_type = other DNA
attgtcttgttgataatggaaagagacttttatcaataaaagagactaaaatttttaatttaagttaaatttctttatgtctgtaataaaaatattccctgttatggaagaatttggcca

SEQ ID NO: 51387 - DNA, 120 bp, synthetic construct
  source 1..120: mol_type = other DNA
caagatgacgccatgtacttatttaaacatttttctcctttacttaagtggtggtatctgtattggtggcaccatttccacccccatagatggcatctgctataattctatttgattgct

SEQ ID NO: 51388 - DNA, 120 bp, synthetic construct
  source 1..120: mol_type = other DNA
tgttttggagtgttcaccaattggctatctatttaagatacgtttgtgcatatttgtgtgtgggtatgtagtgtgcgtgtgtgtatttttagactcatttgacctaatgtgaagcacatt

SEQ ID NO: 51389 - DNA, 120 bp, synthetic construct; identical to SEQ ID NO: 14314
  source 1..120: mol_type = other DNA

SEQ ID NO: 51390 - DNA, 120 bp, synthetic construct
  source 1..120: mol_type = other DNA
gattgtgtgaattaatacttaacaaacttccctttatataaatatatatatgtatgtatatattcttccctatatacatattagttctgtccctctagagaaccctaatacaccttgcaa

SEQ ID NO: 51391 - DNA, 120 bp, synthetic construct
  source 1..120: mol_type = other DNA
agtaaataactaatatgctgctctgaaaaagagttcttattattggaatagtaatggacagtatatgatatcatggtatgcattagttttaaaattaaatatgccatcgttagaattagt

SEQ ID NO: 51392 - DNA, 120 bp, synthetic construct
  source 1..120: mol_type = other DNA
cagtggggaggagccacacagataatcccaaacagctgataattcaaatgtaatgcctacttaatttggaatgcatggcatgattctctctttaagcacaatattcaatgaaattcaata

SEQ ID NO: 51393 - DNA, 120 bp, synthetic construct; identical to SEQ ID NO: 14315
  source 1..120: mol_type = other DNA

SEQ ID NO: 51394 - DNA, 120 bp, synthetic construct
  source 1..120: mol_type = other DNA
aggaaggacttactgggagttattcgagaaatgggtacagttttgaaggccaatgcaaggatactagaagagagtaaaactaatgtatcttatgactgattaaatttttttgtgtgttct

SEQ ID NO: 51395 - DNA, 120 bp, synthetic construct
  source 1..120: mol_type = other DNA
ctgtaatttcctttccactcataaaatatatcaaagctgaaatataggctcatcatggagctatttttaaacaaggaaatagaaaagcaaattcaagaagtgcacagggaaaagcgtgct

SEQ ID NO: 51396 - DNA, 120 bp, synthetic construct
  source 1..120: mol_type = other DNA
ttgagttatagaggcggaaaaagctacactgggaatgtgggaggcaagaaattgttgcttacaatttaaaagacttattgtcccatttttttctacatccagttataatttctttagaag

SEQ ID NO: 51397 - DNA, 120 bp, synthetic construct; identical to SEQ ID NO: 14316
  source 1..120: mol_type = other DNA

SEQ ID NO: 51398 - DNA, 120 bp, synthetic construct
  source 1..120: mol_type = other DNA
ccaggaccatgagaatctgacacatggtaggcattttgtttgtttgctgctgccaggcatgacactaagaaaataatttctgtgcttggtagtattgatttgctcaattatctctgacta

SEQ ID NO: 51399 - DNA, 120 bp, synthetic construct
  source 1..120: mol_type = other DNA
cacgtccttccctgaaggccctcagaaggtgacatgacacttatatgtggattaaagcaaagcccaagaaatactggaatcttaaaaaagaaataagttggacttctgaaggcctgtggc

SEQ ID NO: 51400 - DNA, 120 bp, synthetic construct; identical to SEQ ID NO: 14317
  source 1..120: mol_type = other DNA

SEQ ID NO: 51401 - DNA, 120 bp, synthetic construct
  source 1..120: mol_type = other DNA
gcgtctgacaagctcagggatggattttccaaaactgaaacagtctctgtgggacaaaaatctaaaaatggccctcaaagctctacagtctcaaaaaacaaaggttaatctttgtttttt

SEQ ID NO: 51402 - DNA, 120 bp, synthetic construct
  source 1..120: mol_type = other DNA
ctaaagattctttagctaccactttctacctatcttctccaggctttcagggtgttttcttcaaaggccttctcaacatttcctgaagacatcagcatcagaacccctagtgtaagcctt

SEQ ID NO: 51403 - DNA, 120 bp, synthetic construct
  source 1..120: mol_type = other DNA
ccgactttggatcaaatcccagatgcaccagttattagcaaaatgaccctggattaatcattgaagcttcatttcttccttgtaaaatgggaatactcacttcttcgtagtgaatattct

SEQ ID NO: 51404 - DNA, 120 bp, synthetic construct; identical to SEQ ID NO: 14318
  source 1..120: mol_type = other DNA

SEQ ID NO: 51405 - DNA, 120 bp, synthetic construct
  source 1..120: mol_type = other DNA
caccttacctctgtgaccatactttgggtcttgccctcttcaggtctttcttctgtggagttgcttctcttctaacatcaacagagaagttaaagatacatctcttttcatcagtattat

SEQ ID NO: 51406 - DNA, 120 bp, synthetic construct
  source 1..120: mol_type = other DNA
ctactcttgtttcttccaagacacacactattccatataatatgtttaacttctcctatctagaagcttcttccccttaccagccactctacttgatacattgttttcccatttaattat

SEQ ID NO: 51407 - DNA, 120 bp, synthetic construct
  source 1..120: mol_type = other DNA
ctttggcaagtgattaggttatgagggttttgccctcatgaatgggatttgtacccttatgaaagaggcttgaaagagctcctttttctcttctgctatgtgaggtcatagcaagaaggc

SEQ ID NO: 51408 - DNA, 120 bp, synthetic construct; identical to SEQ ID NO: 14319
  source 1..120: mol_type = other DNA

SEQ ID NO: 51409 - DNA, 120 bp, synthetic construct
  source 1..120: mol_type = other DNA
aggaaactcttcaaataaattcacttaaaggacaactatttgtgttgagtgactgaaaagtcaatgagttcatagcactaaacttgaactatttctcaggctatgtcttcctttggcctt

SEQ ID NO: 51410 - DNA, 120 bp, synthetic construct
  source 1..120: mol_type = other DNA
taacttttatacttcatctttctagaagctctctccaaacttgaattccatggcaccagcctctctggactcatacagttctgacttattcatgagcagttctcctcctgttggtcttca

SEQ ID NO: 51411 - DNA, 120 bp, synthetic construct
  source 1..120: mol_type = other DNA
ttccagacttacatttcactcttactggctatctccaagagaatctcagacttaaaacacccagattagactccttataaatctgtccttctcctggatttttccatctgagttaataac

SEQ ID NO: 51412 - DNA, 120 bp, synthetic construct
  source 1..120: mol_type = other DNA
cttgaatctttgtaaacttgtttattgctactaccgtttccaggtccttatttctcacttattctattggatttagcctcttaaccgttcatttctgcctccaatccaagtccacctcaa

SEQ ID NO: 51413 - DNA, 120 bp, synthetic construct; identical to SEQ ID NO: 14320
  source 1..120: mol_type = other DNA

SEQ ID NO: 51414 - DNA, 120 bp, synthetic construct
  source 1..120: mol_type = other DNA
tgtccttataacaacaagagataggaccaggaacagtagctcatgcctgtaatcccaacactttgagagatggaggtgggcagatcgctggagcccaggagttcaacaccaggctgggca

SEQ ID NO: 51415 - DNA, 120 bp, synthetic construct
  source 1..120: mol_type = other DNA
tgggagattgaggctgcagtgagccatgatcacaacactgcactccagcctgggtgacagagtgagattctatctccaaaaataaagaaaaaaaaaaagaacaagagattaagacaaaac

SEQ ID NO: 51416 - DNA, 120 bp, synthetic construct
  source 1..120: mol_type = other DNA
gaaaataaatttcagtaagtttaagttgcccagtctgtagtacatttttatggcagtgctagcaaactaatgatatgctccataacatatatcttaaggacatgaacaactttatcagat

SEQ ID NO: 51417 - DNA, 120 bp, synthetic construct; identical to SEQ ID NO: 14321
  source 1..120: mol_type = other DNA

SEQ ID NO: 51418 - DNA, 120 bp, synthetic construct
  source 1..120: mol_type = other DNA
ttggctccaggaccccctaacccccagcggatatcaaaatatgtggatgctcaagtcgcttatataaaatagcatagtatttgcatttaaactatgcagatcttcacatatgctttaaat

SEQ ID NO: 51419 - DNA, 120 bp, synthetic construct
  source 1..120: mol_type = other DNA
cattttgttgaattcatggatgcagaacatgtgagtagggagaggcaactgtattgttaacccatcagagactacattcattagaggttagttgagtaacaactgttgtaagagtatatg

SEQ ID NO: 51420 - DNA, 120 bp, synthetic construct; identical to SEQ ID NO: 14322
  source 1..120: mol_type = other DNA

SEQ ID NO: 51421 - DNA, 120 bp, synthetic construct
  source 1..120: mol_type = other DNA
tcagattaacttctttcacttagcaatatgcatttaagattccttagtgtctttccatgccttagtcgtgtacttcttattgcctaagattctactgtatgtatgtatctcagtttgttt

SEQ ID NO: 51422 - DNA, 120 bp, synthetic construct
  source 1..120: mol_type = other DNA
aaatgccaaggaaactaattcctggattgtatgacaagagtatgttcagttttgtaagaaactgccgaactgtcttccaaagtggctctgccgttttgcgttcccaccaacagtgagtga

SEQ ID NO: 51423 - DNA, 120 bp, synthetic construct
  source 1..120: mol_type = other DNA
ataattagggagtattctacaataagaagagaatgagggaaataaaacaataactttaaacgtggctcctgggtggtagaccaggctcattccctgagtaaatcattggttttcatattc

SEQ ID NO: 51424 - DNA, 120 bp, synthetic construct
  source 1..120: mol_type = other DNA
ccaggctcattccctgagtaaatcattggttttcatattctagctttctaggatgagattaaaatctgcacctaagagaaataaggaatgagaactttgggttactcattaaggttatat

SEQ ID NO: 51425 - DNA, 120 bp, synthetic construct; identical to SEQ ID NO: 14323
  source 1..120: mol_type = other DNA

SEQ ID NO: 51426 - DNA, 120 bp, synthetic construct
  source 1..120: mol_type = other DNA
cctgagaacatggcctcaaatataagaatttagctgaaactactgttggtttaggacagaagtacttcctagaatcagaaagactcatgctctttttctgtggataatatagaaaaacat

SEQ ID NO: 51427 - DNA, 120 bp, synthetic construct
  source 1..120: mol_type = other DNA
tctggacactgtgcagtgtggaagcagatctcatccttcctggaggttgacaggtctaacactttctaggaacgttagaattttgcttcatactaaaaggaaaaggaaatttgaagttgc

SEQ ID NO: 51428 - DNA, 120 bp, synthetic construct
  source 1..120: mol_type = other DNA
gtctcattctgttgcctaggctggagtgcagtggcacaatctccactcactgcaacctgttcctcccagattcaagtgattctcctgcctcagcctcctgagtagctgggattacaggca

SEQ ID NO: 51429 - DNA, 120 bp, synthetic construct; identical to SEQ ID NO: 14324
  source 1..120: mol_type = other DNA

SEQ ID NO: 51430 - DNA, 120 bp, synthetic construct
  source 1..120: mol_type = other DNA
gtgactttttaaaattttattttaagttccaggatacatgtgcaggatgtgcaggtttgttacataggtaaacatgtgccatggtggtttgctgcacctattaacccatcacctaagtat

SEQ ID NO: 51431 - DNA, 120 bp, synthetic construct
  source 1..120: mol_type = other DNA
ataagtgagaacatgtggtgtttggttttctgttcctgtgttagtttcctgaagataatggcttctagttccatccatgtccctgcaaaggacatgatctcattcctttttatggctgca

SEQ ID NO: 51432 - DNA, 120 bp, synthetic construct
  source 1..120: mol_type = other DNA
gtatctttataacagaatgatttatattcttttgggtatatacccagtaatgggattgctgggtcaaacggtatttctggttctagatctttgaggaatcaccacactgtcttccacaat

SEQ ID NO: 51433 - DNA, 120 bp, synthetic construct; identical to SEQ ID NO: 14325
  source 1..120: mol_type = other DNA

SEQ ID NO: 51434 - DNA, 120 bp, synthetic construct
  source 1..120: mol_type = other DNA
tcaaattccagaatatagacttcagtctgttgaattttgcaggcttttatttgatacatttaattgaacatcatcattatcattttgctgatatgtcagggcagtggtatgtcaggaatt

SEQ ID NO: 51435 - DNA, 120 bp, synthetic construct
  source 1..120: mol_type = other DNA
atagctttgtgaagagcacattatttgctggattttattttctgaattgtactgacaaaacaccagtgtgtaatcttgaccaagcttatgctatcttgtttccttaaatagtggttctca

SEQ ID NO: 51436 - DNA, 120 bp, synthetic construct; identical to SEQ ID NO: 14326
  source 1..120: mol_type = other DNA

SEQ ID NO: 51437 - DNA, 120 bp, synthetic construct
  source 1..120: mol_type = other DNA
tgaaacattcatctcaaaacctaagcaaaatacagttttttatatagaacattttctggtcagtgtacacacaagttgaatggtttttgaaaagcattctactgcattaaaggacataaa

SEQ ID NO: 51438 - DNA, 120 bp, synthetic construct
  source 1..120: mol_type = other DNA
acacggcagttgattagaaagatgtagttacttctgtttgaaaatgtagctgctgctctgccctctggctcactttgaaaatctgtggttctgaaagctcaaggtactatttttactctt

SEQ ID NO: 51439 - DNA, 120 bp, synthetic construct
  source 1..120: mol_type = other DNA
tggtgtgtttttttaaggttgggggaggggttgtagttactcagacaagattctgataagttcacgctcagggtggttttgactgaaaactagaatttataattttacaaatcggattct

SEQ ID NO: 51440 - DNA, 120 bp, synthetic construct
  source 1..120: mol_type = other DNA
tttacatgcaataaagtaatttttccctgagaatgagatctaaagttttcagattaaattgaaatgaaagaatttttttaaaaagttattaattcatatgagctgttctgaagaaagcat

SEQ ID NO: 51441 - DNA, 120 bp, synthetic construct; identical to SEQ ID NO: 14327
  source 1..120: mol_type = other DNA

SEQ ID NO: 51442 - DNA, 120 bp, synthetic construct
  source 1..120: mol_type = other DNA
ttttctaacataggaataaatttttcatcaactagctatattcccagttatttcatcactcaacaaagccacaactgcatgaaagggctttaagcctgggacttttgggggtgaataaga

SEQ ID NO: 51443 - DNA, 120 bp, synthetic construct
  source 1..120: mol_type = other DNA
agtacactattctgagcaaacaaaattattaccttatctgtcttctgcttcccaggaaatttcctttaaattttgttctaaaccttgactgttctcttgatcatttggccccaaacacca

SEQ ID NO: 51444 - DNA, 120 bp, synthetic construct; identical to SEQ ID NO: 14328
  source 1..120: mol_type = other DNA

SEQ ID NO: 51445 - DNA, 120 bp, synthetic construct
  source 1..120: mol_type = other DNA
ttaggaaacaacaggtgctggagaggatgtggagaaataggaacacttttacactgttggtgggactgtaaactagttcaaccattgtggaagactgtggtgattcctcaaggatctaga

SEQ ID NO: 51446 - DNA, 120 bp, synthetic construct
  source 1..120: mol_type = other DNA
aaagacttggaaccagcccaaatgtccatcaatgatagactggattaagaaaatgtggcacatatacaacatggaatactatgcagccataaaaaatgatgagttcatgtcctttgtagg

SEQ ID NO: 51447 - DNA, 120 bp, synthetic construct
  source 1..120: mol_type = other DNA
ggggaacatcacacaccggggcctgttgtggggtggggggagtggggagggatagcattaggagatatacctaatgtaaatgacgagttaatgggtgcagcacagcagcatggcacatgt

SEQ ID NO: 51448 - DNA, 120 bp, synthetic construct
  source 1..120: mol_type = other DNA
agtaacattttaagaggagtaatacagaatactccaattctttaaaacaagtgctcccttctctatgaatacaagattgagaatgggctcaaaagcatgacattttataaaattagtgtt

SEQ ID NO: 51449 - DNA, 120 bp, synthetic construct; identical to SEQ ID NO: 14329
  source 1..120: mol_type = other DNA

SEQ ID NO: 51450 - DNA, 120 bp, synthetic construct
  source 1..120: mol_type = other DNA
tgttattaaaataaccatgtaatctttgcactgtatatggagtctgtttgagccaacctgcaaagtttcagattggtggaaaaagaaatatttctccatgtgtccacatatgaaaaggaa

SEQ ID NO: 51451 - DNA, 120 bp, synthetic construct
  source 1..120: mol_type = other DNA
tatagcacaatgagaagccagtacatttgactgcagaaaactgtcttaacttgctttgattactatccttccataaaacaaaccactactctgcaatgggatgtttaattggtgtacgtt

SEQ ID NO: 51452 - DNA, 120 bp, synthetic construct
  source 1..120: mol_type = other DNA
ttgaatgagataatcagattaaatttattacctttagaggaacttaatgtcaaattatactttaaggaattcccagtaaagctaagaaacaggcaagcaaattctgttgtttccaggtat

SEQ ID NO: 51453 - DNA, 120 bp, synthetic construct
  source 1..120: mol_type = other DNA
gagctagaaaaattcatctttaaagatctagattcagtacttttatggaagcttgaaataccataactaatggattgaaaaaaccaacagctgcttctcaactaagatttatgatgttat

SEQ ID NO: 51454 - DNA, 120 bp, synthetic construct; identical to SEQ ID NO: 14330
  source 1..120: mol_type = other DNA

SEQ ID NO: 51455 - DNA, 120 bp, synthetic construct
  source 1..120: mol_type = other DNA
gctaatggcactggcgccattagcatgaggtgtttttctaacctgatcacatcatatatcacctgggcattttatgtattactgaattcatacaagaactcatacagagaaaaacacaca

SEQ ID NO: 51456 - DNA, 120 bp, synthetic construct
  source 1..120: mol_type = other DNA
ccaacaatttcttatatttaaagaaatggtataggcttttctaattctgagattctctacgagatggtatcattccgctaactgatttaatttttgcctacaatggattagagtcagagc

SEQ ID NO: 51457 - DNA, 120 bp, synthetic construct
  source 1..120: mol_type = other DNA
gaggcaggcggatcacctgaggtcaagagtttgggaccagcctggccaacatggagaaacaccatctctattaaaagcacaaaaattagccagcatggtggtgtgcacctgtgccagcta

SEQ ID NO: 51458 - DNA, 120 bp, synthetic construct; identical to SEQ ID NO: 14331
  source 1..120: mol_type = other DNA

SEQ ID NO: 51459 - DNA, 120 bp, synthetic construct
  source 1..120: mol_type = other DNA
gtactttgtatatccatttataagtcctggatggggtctttacagtgctctactgtttatactactatatttacaaggccttcgataaaatacaagtttaatacttggcttttgtggtac

SEQ ID NO: 51460 - DNA, 120 bp, synthetic construct
  source 1..120: mol_type = other DNA
ttaacatttagacaatacaaaacaattagttgcattgaaaagtttccagttaactaaaagtgccaaaatagccgtttgtattttatcatttaattaattaacaaactaaaatatgacttt

SEQ ID NO: 51461 - DNA, 120 bp, synthetic construct
  source 1..120: mol_type = other DNA
atacccacagtagctacattcattcctgcagcacagcagatgaccaactggtaaatcatccactccaggatgtgatgtcagaggccaaaaggacttcttttattttattttgatcatgtt

SEQ ID NO: 51462 - DNA, 120 bp, synthetic construct; identical to SEQ ID NO: 14332
  source 1..120: mol_type = other DNA

SEQ ID NO: 51463 - DNA, 120 bp, synthetic construct
  source 1..120: mol_type = other DNA
ctttgccatggtctctggagatgcctgatcactgcactgacagctcccaactttttcttgagtgcagttgttgcagatcttctgctttggtgattttgctatactctgattagttccaag

SEQ ID NO: 51464 - DNA, 120 bp, synthetic construct
  source 1..120: mol_type = other DNA
tagtgtttccagtcaacattgaataagagtggtaagagaggatgtccttaagtatgatgttagttacaggtttttataaatgttctttatcaagctgaggaagtttcctctgttactagt

SEQ ID NO: 51465 - DNA, 120 bp, synthetic construct; identical to SEQ ID NO: 14333
  source 1..120: mol_type = other DNA

SEQ ID NO: 51466 - DNA, 120 bp, synthetic construct
  source 1..120: mol_type = other DNA
ttctattttctggaagagactgtggagaatggctatttttttccctttaaatgtttggtaatttaccagtgaaatcatctgggccttgtgttttctttttttggaaagttgttaattatt

SEQ ID NO: 51467 - DNA, 120 bp, synthetic construct
  source 1..120: mol_type = other DNA
ttagagtttctttcatttctattattagtaatttgtgtcttctctcttttggttatcctggctagaagtatatcaattttattgatctgctcagagaacaagcttttggtctcattgatt

SEQ ID NO: 51468 - DNA, 120 bp, synthetic construct
  source 1..120: mol_type = other DNA
cttaggatgattttagatttttttctttctaatatatgcatttaatgctatacattttcctctacacactatttttctacatcccacagattttgataagttatattggtaatttcatat

SEQ ID NO: 51469 - DNA, 120 bp, synthetic construct
  source 1..120: mol_type = other DNA
attccattgtggtctgaaaacctgcttttgtataattactattcttttaaatttttaatggatgatatatggccaagaatgtggtctatcttggaaaatgctccacgtgagcatgagaag

SEQ ID NO: 51470 - DNA, 120 bp, synthetic construct; identical to SEQ ID NO: 14334
  source 1..120: mol_type = other DNA

SEQ ID NO: 51471 - DNA, 120 bp, synthetic construct
  source 1..120: mol_type = other DNA
caccccaggagtgctggtttgaaaggctggctggtgtctagcaatggtctctgggaattttattaccagagacttgtattggttcttctaaaacatggtcattgtagtagcttcctaggg

SEQ ID NO: 51472 - DNA, 120 bp, synthetic construct
  source 1..120: mol_type = other DNA
caaaagtccaaagtctaagccaaaacaagcattctctgtccaagggctttagggaaatatatttcctcacttcttttagcttccagcgattgcaatctctggtgcaccttggcttatagc

SEQ ID NO: 51473 - DNA, 120 bp, synthetic construct; identical to SEQ ID NO: 14335
  source 1..120: mol_type = other DNA

SEQ ID NO: 51474 - DNA, 120 bp, synthetic construct
  source 1..120: mol_type = other DNA
acccctaagtggaacatagcatacaaatctttcagctttccatagaccccattttctcaccagaaattatgttctttgggtggggaagcattcttatttaatctactaacccagaccaga

SEQ ID NO: 51475 - DNA, 120 bp, synthetic construct
  source 1..120: mol_type = other DNA
atgtgataagaaatactgttactcttgtaagagtaatagaaatgaataaaaatgcattttaaaaggcaccttctggagctgcattcacttgaatcaaaggctgaccctgcagggttggca

SEQ ID NO: 51476 - DNA, 120 bp, synthetic construct
  source 1..120: mol_type = other DNA
ttgtttgtgtgtgggtgtgcataatacttattacaaagcgaggtggctgtctgccatcattagcataatatgcgttggagacaatttgccatggataaagtaggtccctttatatttcac

SEQ ID NO: 51477 - DNA, 120 bp, synthetic construct
  source 1..120: mol_type = other DNA
atgggacaaaggaaaaggatttcattttattacctagttctggagctgctattttacaagtattgatgtttacatgcattctaaatggaaaaagagccacggcaagcagccatgagaata

SEQ ID NO: 51478 - DNA, 120 bp, synthetic construct; identical to SEQ ID NO: 14336
  source 1..120: mol_type = other DNA

SEQ ID NO: 51479 - DNA, 120 bp, synthetic construct
  source 1..120: mol_type = other DNA
ctctcaccatcaaaaggaacagtgctgtggagattcatggaaaaaggccaaaatcacagctgtgtgcttcctgtttttgaggttgaattcatgcacaactgataacattcaaatctcatc

SEQ ID NO: 51480 - DNA, 120 bp, synthetic construct
  source 1..120: mol_type = other DNA
aaacagtctgtcatgccttggcatttacattgacacaatatcagagcatactggaaggagatattttattttgtttcaactaacttatttcatggctgcacttaaaatgctgtgcataca

SEQ ID NO: 51481 - DNA, 120 bp, synthetic construct; identical to SEQ ID NO: 14337
  source 1..120: mol_type = other DNA

SEQ ID NO: 51482 - DNA, 120 bp, synthetic construct
  source 1..120: mol_type = other DNA
taaaatgttggaacactttaaaatgttggaacaatattgatccaggaacaacaatcctggacctttcctctttcctccttactattattttagtccgtggagccagcatctatttttaaa

SEQ ID NO: 51483 - DNA, 120 bp, synthetic construct
  source 1..120: mol_type = other DNA
tgtctataagaagggagaatcatctttgtctttttacatttcccctctcctccctctaaaaaggggagaaaaacaagctaggtttatctttgtttacctttggcaacaattcaattcaaa

SEQ ID NO: 51484 - DNA, 120 bp, synthetic construct
  source 1..120: mol_type = other DNA
gattcctttgtgtatattcaggggcgtggctgggcagtgcaggtgctgacagtgcacatggcaggaccatctactctggacttgatgggtcaggaggcttcccaggggaagttgtgtctc

SEQ ID NO: 51485 - DNA, 120 bp, synthetic construct; identical to SEQ ID NO: 14338
  source 1..120: mol_type = other DNA

SEQ ID NO: 51486 - DNA, 120 bp, synthetic construct
  source 1..120: mol_type = other DNA
ctactaaaaatacaaaaattagccgggcgtggtggcgggcgtctgtaatcccagctactcaggaggctgaggcaggagaatcgcttgaacctgggaggcagcggttgcagtgagccaagc

SEQ ID NO: 51487 - DNA, 120 bp, synthetic construct
  source 1..120: mol_type = other DNA
agtaaacaggaggaaggaccacctagatcagaagcttacctcacacaggtgagggtggctagcgggtaagggattagaggcggtgagcacagcagaaggtgtgggtgaagaggcaggtac

SEQ ID NO: 51488 - DNA, 120 bp, synthetic construct; identical to SEQ ID NO: 14339
  source 1..120: mol_type = other DNA

SEQ ID NO: 51489 - DNA, 120 bp, synthetic construct
  source 1..120: mol_type = other DNA
agacagcatttgatgaaagatttttttcctaacttgtgagtttgtttacataaaaacacttacaaaattagtcaatcaaaataacatggagtcatttacttaaagaattccttacgttta

SEQ ID NO: 51490 - DNA, 120 bp, synthetic construct; identical to SEQ ID NO: 14340
  source 1..120: mol_type = other DNA

SEQ ID NO: 51491 - DNA, 120 bp, synthetic construct
  source 1..120: mol_type = other DNA
gccgagatctcaccattgcactccagcctgggcaacaagagtgaaactctgtctcaaaaaaaaaaaaaaaaaaaaaaccgtatgttctcacttataagtggaagctaaacagtgggtaca

SEQ ID NO: 51492 - DNA, 120 bp, synthetic construct
  source 1..120: mol_type = other DNA
actaaaaagcctagatgtaactgttatgcaatccgagcatgtaaacaatctgcagccgggcttggtggttcatgcctgtaatcccatcactttgggaggccaaggcagcaggattgcttg

SEQ ID NO: 51493 - DNA, 120 bp, synthetic construct; identical to SEQ ID NO: 14341
  source 1..120: mol_type = other DNA

SEQ ID NO: 51494 - DNA, 120 bp, synthetic construct
  source 1..120: mol_type = other DNA
gttgacatgtttgttcccctaacaatttggtactttggtctcctttatgaaactgtgaaagctccgagccaaaagctttgtctttcttcattcttgcatctttagtacatatcacaatgc

SEQ ID NO: 51495 - DNA, 120 bp, synthetic construct
  source 1..120: mol_type = other DNA
tttcagtgaacacttgaatttctaccaccaagatttcactattaatattttactgttcttagtttattacatatctatccatgtctgtatccattgatcaatccatcttatttctcttgg

SEQ ID NO: 51496 - DNA, 120 bp, synthetic construct
  source 1..120: mol_type = other DNA
atagcatgaaatgcaccaattttaagtgtacatttgctaagttttgaagaatgcatacacccgtgtaaccaaacccctttcaagatgtgaaaatgaccatgaccccagaaaataccaata

SEQ ID NO: 51497 - DNA, 120 bp, synthetic construct
  source 1..120: mol_type = other DNA
gaatagacttctatcactcagcataattttttgagattcatctaggttgtgtgtaccagtaacacatttctttttgtagaaaagaaactattttgcaatggaatgcagtagcgttctatt

SEQ ID NO: 51498 - DNA, 120 bp, synthetic construct; identical to SEQ ID NO: 14342
  source 1..120: mol_type = other DNA

SEQ ID NO: 51499 - DNA, 120 bp, synthetic construct
  source 1..120: mol_type = other DNA
tcaatctcccagactcaagtgatccttctgcctctgcctccagagtagatgggaccacaggcacgcaccacatcaagctattttttttatatattttttgtagagatggggatttgctat

SEQ ID NO: 51500 - DNA, 120 bp, synthetic construct
  source 1..120: mol_type = other DNA
actagcttgccaatttaaaagaaatccctgagtaagagcacccaaggtccgctgaatgcccttcacctcactcggaattctagagcatccgaggatctttccattccatatgatacacac

SEQ ID NO: 51501 - DNA, 120 bp, synthetic construct; identical to SEQ ID NO: 14343
  source 1..120: mol_type = other DNA

SEQ ID NO: 51502 - DNA, 120 bp, synthetic construct
  source 1..120: mol_type = other DNA
taggagtttctcttgcaaacaaagagaaataaaattcccacataatctggagcactctaaggaagggtagaaaaatccatgttcttgctagtacaggacttagagtcttaaaaattagag

SEQ ID NO: 51503 - DNA, 120 bp, synthetic construct
  source 1..120: mol_type = other DNA
tccactccctgcatccccgacccgtctgcgtctccctctactctcatacatactccagtaatatttggccaaaagtagaagccagggggttagaaaaagaaataggataaaccaagacaa

SEQ ID NO: 51504 - DNA, 120 bp, synthetic construct
  source 1..120: mol_type = other DNA
gaacattccaatgacccgacccatggaaagagaaccaaattcttcagcccagcttctaggatcttacctcaagagagtcttaaaattatgaaaagatatgtatataaggatgtttgctac

SEQ ID NO: 51505 - DNA, 120 bp, synthetic construct
  source 1..120: mol_type = other DNA
tgggaggattacctgaggtcaggagttcaagattagcctagccaacacggtgaaaccccatctctactaaaaatacaaaaagttagccatgtgtggtggcggatgcctgtaatcccagct

SEQ ID NO: 51506 - DNA, 120 bp, synthetic construct; identical to SEQ ID NO: 14344
  source 1..120: mol_type = other DNA

SEQ ID NO: 51507 - DNA, 120 bp, synthetic construct
  source 1..120: mol_type = other DNA
cagtggcctctgttactcaagggttcttaccccagtcaaagggtgttctactgcaagtagttcttaagagagaaaattcaatgtgcatttccctttggaataataatactctgaagcaca

SEQ ID NO: 51508 - DNA, 120 bp, synthetic construct
  source 1..120: mol_type = other DNA
tttgatcctcacaacagtcctagtgatcagtactatctattattttgcccccatttgatgggtgagttggagaagctatacaatatataaagctggtggtttgtctcttggcttttgcat

SEQ ID NO: 51509 - DNA, 120 bp, synthetic construct; identical to SEQ ID NO: 14345
  source 1..120: mol_type = other DNA

SEQ ID NO: 51510 - DNA, 120 bp, synthetic construct
  source 1..120: mol_type = other DNA
ctaagctatttttcatctctaaaaaaaagcacagggtagaaatttccattcacctgtgactggctaatctttagcgatcacttagcaactgggtaacaaatggaggttggcaaagcccag

SEQ ID NO: 51511 - DNA, 120 bp, synthetic construct
  source 1..120: mol_type = other DNA
tttttttccttcagagcaaaacaagttttctttgtttatttggtttaaaaaactcataagatctttgcaagagaacagatcctggattgtgggaagggtccccagcttgctcagtagagc

SEQ ID NO: 51512 - DNA, 120 bp, synthetic construct
  source 1..120: mol_type = other DNA
ataacagcaataatttgcaataagtgaggaaaacacatttacaatcacaaagagaattaaaagaagcttgagagaccaactagtccaatcctcccattaggacatacctcccgaccagtg

SEQ ID NO: 51513 - DNA, 120 bp, synthetic construct; identical to SEQ ID NO: 14346
  source 1..120: mol_type = other DNA

SEQ ID NO: 51514 - DNA, 120 bp, synthetic construct
  source 1..120: mol_type = other DNA
aggagcttatgttttcatggggtaaagtagatgtttaaagaaatgatggcagcagagtgttattgtgtaaagttctgacattctttgtttttgaaactttgcattttgatatctgtccat

SEQ ID NO: 51515 - DNA, 120 bp, synthetic construct
  source 1..120: mol_type = other DNA
cctgccatctagtggcaaaatgagacaaaaagaacaccaaactgtaccagcatccttgtatctataaggaggagaacaaggaatatatttcctggattcaaggtatcaaaaattgtaaga

SEQ ID NO: 51516 - DNA, 120 bp, synthetic construct
  source 1..120: mol_type = other DNA
ctcatttttcactactttctctctaacagttggcagctgatgatgagtagtgagtgcagctaacgatggggattaccatgcacccagtccctgctgtatgctgaatatttcacaattgtc

SEQ ID NO: 51517 - DNA, 120 bp, synthetic construct; identical to SEQ ID NO: 14347
  source 1..120: mol_type = other DNA

SEQ ID NO: 51518 - DNA, 120 bp, synthetic construct
  source 1..120: mol_type = other DNA
acctcttctcttccactttctagtgatttctagaaaacctttcctccctgcttacagatgccccctaacttgcagacaccctctaagtggtcctgagatagcaacctgattccttcacag

SEQ ID NO: 51519 - DNA, 120 bp, synthetic construct
  source 1..120: mol_type = other DNA
catcaatagaggcaaaacatcaggggccttgaaattcagcagcaagtctcagcatattggtccaaaggacaagtgcaattagacacatctcaagaaagaatggtgcggaacattcgggga

SEQ ID NO: 51520 - DNA, 120 bp, synthetic construct
  source 1..120: mol_type = other DNA
cagcttaagttaacccagaaatgactactttaaaccataagaaacagaatattcttgctttggcaagtttaaatagtatcccaccccagcctccagcattggtagaaatggggctctaaa

SEQ ID NO: 51521 - DNA, 120 bp, synthetic construct; identical to SEQ ID NO: 14348
  source 1..120: mol_type = other DNA

SEQ ID NO: 51522 - DNA, 120 bp, synthetic construct
  source 1..120: mol_type = other DNA
gatgtgtgggtagggagtgttggccactgcaggtctacggccaagtggctggtggtgggccaacaatcagaaagaagacctggacatggagaggaacagagcaaagacgggctggggccc

SEQ ID NO: 51523 - DNA, 120 bp, synthetic construct
  source 1..120: mol_type = other DNA
tttaggatccatagagggaagggattctgaaaaacacagttcctaacatagccagaggtgactgtggaacaatccagcacactgagtacatttcaatcctgctccaggatttatagcttt

SEQ ID NO: 51524 - DNA, 120 bp, synthetic construct
  source 1..120: mol_type = other DNA
catgcactgaacattcatcacatagtagctgacgtgtaacagattctccgatgagcaatataattcattacctacacatgctgtgctgataccaacattttccccaaaccttccttcttc

SEQ ID NO: 51525 - DNA, 120 bp, synthetic construct; identical to SEQ ID NO: 14349
  source 1..120: mol_type = other DNA

SEQ ID NO: 51526 - DNA, 120 bp, synthetic construct
  source 1..120: mol_type = other DNA
caggacctgccttgtgtcccaatcctggctcccagcatcagagggaaagttgtgaaaaggtgctgctttctcccagataaaaagaaacatccttttccctcctcaggcttctgcagaaga

SEQ ID NO: 51527 - DNA, 120 bp, synthetic construct
  source 1..120: mol_type = other DNA
tgacattgtgagacaacctgcaaccacccactgcttgattcctctcatgccagatgatcaagccactcttgggcctgatacatttttaacatttccagttttgcaagggattcactgctt

SEQ ID NO: 51528 - DNA, 120 bp, synthetic construct
  source 1..120: mol_type = other DNA
ccagactctgccatctcctggctttgctactttctgttgccagagatttgctctgaaccttggcttctgctgactcaatcatcaggctttggatgtattaacacaactttgccctttgtt

SEQ ID NO: 51529 - DNA, 120 bp, synthetic construct; identical to SEQ ID NO: 14350
  source 1..120: mol_type = other DNA

SEQ ID NO: 51530 - DNA, 120 bp, synthetic construct
  source 1..120: mol_type = other DNA
cttagagttgaatgcatagacaccaaaaaggggaaagtttgaaaaatcagctatagtaccaagaagaaatcaatgcccagagaaggaataataccaaattcattagagtcccagactctt

SEQ ID NO: 51531 - DNA, 120 bp, synthetic construct
  source 1..120: mol_type = other DNA
ctacatgctaaatgctgtcattatcaatatagagaatgtagttaaacttccacagtgggcacaggtgaagatttcactgccatcaatttcaaacctaaaccctgatctcagtcagtattt

SEQ ID NO: 51532 - DNA, 120 bp, synthetic construct
  source 1..120: mol_type = other DNA
tggggaccttaatcttggcttcaactctgacattaaattaaatacacttgcacacaaattattctaactgccttatttagccagagaagaacagggcctgtccgtgaagcatttccccat

SEQ ID NO: 51533 - DNA, 120 bp, synthetic construct; identical to SEQ ID NO: 14351
  source 1..120: mol_type = other DNA

SEQ ID NO: 51534 - DNA, 120 bp, synthetic construct
  source 1..120: mol_type = other DNA
tgagtgagttctcacccttagttcccacgagaactggttgttaaaaagagcctggcaccagccctttctctcctgctccctcgctggccatgggatctctgcacacaccagctccccttc

SEQ ID NO: 51535 - DNA, 120 bp, synthetic construct
  source 1..120: mol_type = other DNA
ggacacctagacatccaggtttataaatgtagacacatatatacgtgcattttcacacatagcttgttagaatgtgtgtgtcgctggggctcttttatctatacacttggaaaaaggcgt

SEQ ID NO: 51536 - DNA, 120 bp, synthetic construct
  source 1..120: mol_type = other DNA
ttcaatcaaccaagaaaatcaatcccaattgacctcgggaccatatttttattttcattgaaagttaactaaaattattgaaaagaatgaaaaataataagaaacagaaaaacctaatag

SEQ ID NO: 51537 - DNA, 120 bp, synthetic construct
  source 1..120: mol_type = other DNA
tcagtcatccaagctagagtgcagtggtgccatctcagcccactgcaacctctgcctcccaggttccagtgattctcctgcctcagcctcctgggtagctgggattacaggcacatacca

SEQ ID NO: 51538 - DNA, 120 bp, synthetic construct; identical to SEQ ID NO: 14352
  source 1..120: mol_type = other DNA

SEQ ID NO: 51539 - DNA, 120 bp, synthetic construct
  source 1..120: mol_type = other DNA
acaaaaaattagctgggtgtggtggtgggcacctgtaatcccagctactcaggaggctgaggcaggagaatcgcttgaacccgggaggcagaggttgcagtgagccaagatcacgcctag

SEQ ID NO: 51540 - DNA, 120 bp, synthetic construct
  source 1..120: mol_type = other DNA
ctattgcctaaatagggagggacaaacaagattcaggcatttccctcttggtctacatgtggattaggtcccccaccagtaaaaactcctccctaatagttctcacagttgttcacctaa

SEQ ID NO: 51541 - DNA, 120 bp, synthetic construct; identical to SEQ ID NO: 14353
  source 1..120: mol_type = other DNA

SEQ ID NO: 51542 - DNA, 120 bp, synthetic construct
  source 1..120: mol_type = other DNA
gtggggtgcagtggcttgatcacagctcactgcagactcacactcctgagctcaagcaatcctcctgcctcagcctcctaagtagctgggactatgggatatgccactatgcccagctaa

SEQ ID NO: 51543 - DNA, 120 bp, synthetic construct
  source 1..120: mol_type = other DNA
tgcctgcagttatatgacaatgattgtttctctttaaacgaggaagcattagctcagagaaatgagaaatctctgtatgtagtagatgatgcaaaccatgctaaaataaacacatataat

SEQ ID NO: 51544 - DNA, 120 bp, synthetic construct
  source 1..120: mol_type = other DNA
gttgatgccaaaacttggaagcaatcaagttgcccttcaataggtgagtggataaacaaattgtagtgcatccacacaacaaaatacgattcaacgataaaaagaaatgaggtatcaggc

SEQ ID NO: 51545 - DNA, 120 bp, synthetic construct
  source 1..120: mol_type = other DNA
acagtcaaaagaccagtggttgccaggggttgcaggggaggtagggaaagagagggggataactaggcggaatacagggggattttagggcagtgaaactattccatatgatacggtgat

SEQ ID NO: 51546 - DNA, 120 bp, synthetic construct; identical to SEQ ID NO: 14354
  source 1..120: mol_type = other DNA

SEQ ID NO: 51547 - DNA, 120 bp, synthetic construct
  source 1..120: mol_type = other DNA
ttaccaatcttcagcaatgcagaggaggaaccagagactctgggagacctgagattcatctgcacacccagaaggtggtaaaagcagggtttggacgaggtctgtctgcctcacagctcc

SEQ ID NO: 51548 - DNA, 120 bp, synthetic construct
  source 1..120: mol_type = other DNA
ctgcctaaggagattttctctgcaagaacagaggataatgaattctcctaaagaatgagagaaatcccagaggtaaacagagatgcaaacacccaaaaaggtcacagtcacaacgatagc

SEQ ID NO: 51549 - DNA, 120 bp, synthetic construct; identical to SEQ ID NO: 14355
  source 1..120: mol_type = other DNA

SEQ ID NO: 51550 - DNA, 120 bp, synthetic construct
  source 1..120: mol_type = other DNA
tcaagccctagactgaaggaacacatgaagtaaaattgatggctttgaatggaaaatcccagccaagaatccaaccgaacatggtgtaccagggccccaagcatgcttcctgttccccac

SEQ ID NO: 51551 - DNA, 120 bp, synthetic construct
  source 1..120: mol_type = other DNA
agtgcagactcctcccgcgagctcaggtcagggcacagtctggctgccgtcaaggtttggatcttaatctccgatttggctctaaaagctgctcaggcagcacccagtgcaataactgtg

SEQ ID NO: 51552 - DNA, 120 bp, synthetic construct
  source 1..120: mol_type = other DNA
cctactttaacctgttctcccagccaagcaggagcaaaccacatctgacttaatatactcttgtggaagatctacctgctgtatgcttcctcacagtctctgctagagccactagcatgg

SEQ ID NO: 51553 - DNA, 120 bp, synthetic construct; identical to SEQ ID NO: 14356
  source 1..120: mol_type = other DNA

SEQ ID NO: 51554 - DNA, 120 bp, synthetic construct
  source 1..120: mol_type = other DNA
aacaggaggcttcacttgctcaaggacagttatgctagacactttccttgtagccaagatctaggactgcacttcacccttcaagaggggcattcgctcactgattgaactccctcccca

SEQ ID NO: 51555 - DNA, 120 bp, synthetic construct
  source 1..120: mol_type = other DNA
acaaaggtacagcagagggcctgccaatccttggcctaggcatttcaggtggtctggagctgatattcatccagaaatgggttactatttttcaaacatacatacacacatttgatttat

SEQ ID NO: 51556 - DNA, 120 bp, synthetic construct
  source 1..120: mol_type = other DNA
tcttttctttgctttttttttttttttttttttttgaaacggggtctcactctgtcacccaggctggggtgcagtggcgcgatctcggctcactacagccttcacctcctgggttcaagt

SEQ ID NO: 51557 - DNA, 120 bp, synthetic construct
  source 1..120: mol_type = other DNA
tcctgaccacaggtgttccacccacctcagcctcccaaagtgctgggattacaggcgtgagccaccatgcctggccaagaggcattgtctttacaaaaaaaaattgtttaaaaattagcc

SEQ ID NO: 51558 - DNA, 120 bp, synthetic construct; identical to SEQ ID NO: 14357
  source 1..120: mol_type = other DNA

SEQ ID NO: 51559 - DNA, 120 bp, synthetic construct
  source 1..120: mol_type = other DNA
aacttcaatgtcatattagaacattttggaactactgatccatacatgaatgctgttcctctcctcattcacagtcaggtggcatgctgctagctgcagtccagaatccaggttccccat

SEQ ID NO: 51560 - DNA, 120 bp, synthetic construct
  source 1..120: mol_type = other DNA
agctgaaatcatacacaatctataaatatgacttaaactgttctatttcagtttataataaacaataaggctcagctccaatccttccctctccccagtgaggatttttttttttttttt

SEQ ID NO: 51561 - DNA, 120 bp, synthetic construct
  source 1..120: mol_type = other DNA
cagtagctaattttttgtattacgcccggctaattttttgtatttttagtggagacggggttccaccatgttagccgggatggactcgatctcctgatctcgtgatctccccgcccgcct

SEQ ID NO: 51562 - DNA, 120 bp, synthetic construct; identical to SEQ ID NO: 14358
  source 1..120: mol_type = other DNA

SEQ ID NO: 51563 - DNA, 120 bp, synthetic construct
  source 1..120: mol_type = other DNA
ttgcattcagagcaaaaatgaaatgggtcttaaaatgagtcgtgataaagtgattgctatcaaaaggctggaagatggatccagacagccgtgggcttgcaactttctctgtcgaacaac

SEQ ID NO: 51564 - DNA, 120 bp, synthetic construct
  source 1..120: mol_type = other DNA
gcttcttatccactattgaattcaatcctccctaacaagcagatgctattcttgtcactatttaacagataaggacactaagcctcggttgtgtaagaaaacacaagtaaacaatctagt

SEQ ID NO: 51565 - DNA, 120 bp, synthetic construct; identical to SEQ ID NO: 14359
  source 1..120: mol_type = other DNA

SEQ ID NO: 51566 - DNA, 120 bp, synthetic construct
  source 1..120: mol_type = other DNA
taaaaactcggcaatgaattaccatatggagctccaagtacaaatgctgtgtctatcgcctttgaggtctccaggcagaggtgagcagtgaaggaaggactctaggggatgggcataatg

SEQ ID NO: 51567 - DNA, 120 bp, synthetic construct
  source 1..120: mol_type = other DNA
accccaatcagcagcaatcacacttgatcttcaggatgactttggagcagttctcagaactaagcagtggagagaaggccaaatgaggttatacatgactcagataaagctatggataaa

SEQ ID NO: 51568 - DNA, 120 bp, synthetic construct
  source 1..120: mol_type = other DNA
gcagctaatgacatggtttacttctctggaagaatcagcactcattttcagagtgaccttatagtttaaattctttgaattgagagcacaatgaacaagctcctctactgaatttataag

SEQ ID NO: 51569 - DNA, 120 bp, synthetic construct
  source 1..120: mol_type = other DNA
tctgtgcagattaaagagagcctgattcagtagaacccacatgtcacagatcatttgctttgcctctctcgacacagaacttcagcatctgattaaaggaggccaggtgtccaacatctg

SEQ ID NO: 51570 - DNA, 120 bp, synthetic construct; identical to SEQ ID NO: 14360
  source 1..120: mol_type = other DNA

SEQ ID NO: 51571 - DNA, 120 bp, synthetic construct
  source 1..120: mol_type = other DNA
gagatggcaaagcttttaaagacaccagactctagattccatggcccaacctcactcctggttattagttgcatctaagacaatggctttcaaactttagcatcagaatcatctggaggg

SEQ ID NO: 51572 - DNA, 120 bp, synthetic construct
  source 1..120: mol_type = other DNA
tagggcccatatgtggagatccactgaggtagcatgtgtgattagataggaggaaaagttgctcatctgaccccagggacacaaaagatttatctaaaaactcagaataaagaagtttgt

SEQ ID NO: 51573 - DNA, 120 bp, synthetic construct; identical to SEQ ID NO: 14361
  source 1..120: mol_type = other DNA

SEQ ID NO: 51574 - DNA, 120 bp, synthetic construct
  source 1..120: mol_type = other DNA
actgttctcgcggtagtgaataagtctcatgagatctggttttataagaggtttcccctttcccttggctctcattctctcttgcctgctgccatgttagatgtgccttttgccttctgc

SEQ ID NO: 51575 - DNA, 120 bp, synthetic construct
  source 1..120: mol_type = other DNA
aatcaagaacatgggaaaatggcagctggattgttgagctggaatcaggaatgccagaaataggatagagggcaatgccagtgttggttcactaagagagaaagcaagacccagctgcga

SEQ ID NO: 51576 - DNA, 120 bp, synthetic construct; identical to SEQ ID NO: 14362
  source 1..120: mol_type = other DNA

SEQ ID NO: 51577 - DNA, 120 bp, synthetic construct
  source 1..120: mol_type = other DNA
ggcgggaggatcacttgaggccaggagttcaagaccaatctggggaacatagtgagacccttatctctacaaaagtgagtaaataaattagctgggtgttgtggcacgagcctcacttga

SEQ ID NO: 51578 - DNA, 120 bp, synthetic construct
  source 1..120: mol_type = other DNA
gtgaactccaaatgctatacttgaactcacatgctgaatctccatctccaacctgatttcctccaagctccatctcctaggctgtcacttccagctgtcctctaggcatggatgcctaca

SEQ ID NO: 51579 - DNA, 120 bp, synthetic construct
  source 1..120: mol_type = other DNA
ctatctaaacatccttccagacatttttggctcttctcactcactttccatttctgatgtcaccagaatctcttattcctactcccataactatctctcatctggccttttctctctgta

SEQ ID NO: 51580 - DNA, 120 bp, synthetic construct; identical to SEQ ID NO: 14363
  source 1..120: mol_type = other DNA

SEQ ID NO: 51581 - DNA, 120 bp, synthetic construct
  source 1..120: mol_type = other DNA
ccatatgattaacagggaaggtttgcattcagttggcagttgtggaaacagaaagtaagagatgagggaaatattttggaaatagagttggtattactttttgaagtctgatgttaaggg

SEQ ID NO: 51582 - DNA, 120 bp, synthetic construct
  source 1..120: mol_type = other DNA
agatttaggcatgttgagcttgaggcactattgcgatgctaagagagttgagggattctgattgtgaggctgggacagaaagaccagagcctcatggccctacttagaggtgaagagaag

SEQ ID NO: 51583 - DNA, 120 bp, synthetic construct
  source 1..120: mol_type = other DNA
tagactgccatcactgctgttcatgatgagaaagtagaagtggcacagtagattaatcattagcagtgatagaagtaagagaggcagaatcctagtcaaaggctgtagaaagattgggaa

SEQ ID NO: 51584 - DNA, 120 bp, synthetic construct
  source 1..120: mol_type = other DNA
aaataaattaagatcaatgtcaaaataggaacaatagtctggaagaatgaaagatgggggtaacccagaagaaacaatgaactttcttctgaatgggagacgaaagcaaaagaagggtca

SEQ ID NO: 51585 - DNA, 120 bp, synthetic construct; identical to SEQ ID NO: 14364
  source 1..120: mol_type = other DNA

SEQ ID NO: 51586 - DNA, 120 bp, synthetic construct
  source 1..120: mol_type = other DNA
atctcttgatcagatgagggaactggtaccactgaagaaagctcaagagaagtgcacttgctaggagaacccagatcccaactaagacgaagtacagagagcacttagggcactgattga

SEQ ID NO: 51587 - DNA, 120 bp, synthetic construct
  source 1..120: mol_type = other DNA
aggagtttgcacctgtgaggataaaggcgatggagcctgagttgtaggtcaatcccttttgttcactcaggtctcaggatccagccaactggaaaaatcagtcatacttctccatctcag

SEQ ID NO: 51588 - DNA, 120 bp, synthetic construct; identical to SEQ ID NO: 6859
  source 1..120: mol_type = other DNA

SEQ ID NO: 51589 - DNA, 120 bp, synthetic construct
  source 1..120: mol_type = other DNA
caccttcctcaacaccctgtccctctgctattagtccttgctcaacactgtctgttgcatccaacccttccttctataaccagtggtactacccccacccagattactattgttgacatt

SEQ ID NO: 51590 - DNA, 120 bp, synthetic construct
  source 1..120: mol_type = other DNA
ggaggctcagaatcacagtttcattagaaatctcagaaacggactcactaaccaagctcacaaatgctaaagcataagtaagaatctcaatgtagtaatattccgtaagaaatcctgcag

SEQ ID NO: 51591 - DNA, 120 bp, synthetic construct
  source 1..120: mol_type = other DNA
aaaagccaacacactacaactgccttttttatttccttccactgctaacaaattccagggatgactgccattttctttacatgtgctcgtagattccattcgattacagccaagccttga

SEQ ID NO: 51592 - DNA, 120 bp, synthetic construct
  source 1..120: mol_type = other DNA
tttaaatcgccatatagtaatatatgtgcatctttattagttagaaaatctagccctgggtgtcataattttaaagtagtgatgagcataaagaatatttcaaaatgtatccatcaacta

SEQ ID NO: 51593 - DNA, 120 bp, synthetic construct; identical to SEQ ID NO: 14366
  source 1..120: mol_type = other DNA

SEQ ID NO: 51594 - DNA, 120 bp, synthetic construct
  source 1..120: mol_type = other DNA
tctctgctttcctcgcgacatgctgatttcttagtgtatctctcacatcacagtttctaagttcttgggcaagtcattccatttcataaatactacctatcattattaggtatattctcc

SEQ ID NO: 51595 - DNA, 120 bp, synthetic construct
  source 1..120: mol_type = other DNA
gaatactactagtaaattaaagaaaaaattaataaaaacatgcaacaacatagaggaatgttaaaaggaattatgccaacttcaagaagccacactgacaacgctatttactgcaggact

SEQ ID NO: 51596 - DNA, 120 bp, synthetic construct
  source 1..120: mol_type = other DNA
aggaaattcactacaaaatggtgtgagaaaactttctggatggaaatattacaactcttgattctgttgttaattacatgacttacatacatttgtcaaaattcatataactgtacacct

SEQ ID NO: 51597 - DNA, 120 bp, synthetic construct; identical to SEQ ID NO: 14367
  source 1..120: mol_type = other DNA

SEQ ID NO: 51598 - DNA, 120 bp, synthetic construct
  source 1..120: mol_type = other DNA
gtctctccagtttccatcctgttgttctgtcagtaacccagaactctcaataacctcttttaatttttgttctgtcaataacccagaactctcagaactctcaataacccctttatatag

SEQ ID NO: 51599 - DNA, 120 bp, synthetic construct
  source 1..120: mol_type = other DNA
tggggttccccacctcatgaggtagagtgctctatgggtaataaccctgaattactagataggtttatgttcttacttacagagaaaactcaaacttctcgggagagcactaaagatctt

SEQ ID NO: 51600 - DNA, 120 bp, synthetic construct
  source 1..120: mol_type = other DNA
ctgcactcattctggtttctatgtcttgtaaaacagattgtcttgtcctgtaaactcagtgctcagagacactccctcatccttccttctctaaagagactccaagagtccaataacatc

SEQ ID NO: 51601 - DNA, 120 bp, synthetic construct
  source 1..120: mol_type = other DNA
gtaataaatggtttacaggaatggtcccttctgcccttggagttgccaaatgaggcctggggaagctggattccctgggctcattatctccaaatggagaaatctcttccatttatccca

SEQ ID NO: 51602 - DNA, 120 bp, synthetic construct; identical to SEQ ID NO: 14368
  source 1..120: mol_type = other DNA

SEQ ID NO: 51603 - DNA, 120 bp, synthetic construct
  source 1..120: mol_type = other DNA
acattgatgcttcgtcagattctacgcttggttactactcctaggttctggattttcctccattcctagtgccacagcactcatgccattaatttcttcttccatccccatcaacttgaa

SEQ ID NO: 51604 - DNA, 120 bp, synthetic construct
  source 1..120: mol_type = other DNA
tgatgatcaagcttcaatctcacctcttcacagacagcttccgagatcccaaagtcacttcctccctctgtgaattaccatccacctcatcaactgtttcctgttgactgggcatatttt

SEQ ID NO: 51605 - DNA, 120 bp, synthetic construct; identical to SEQ ID NO: 14369
  source 1..120: mol_type = other DNA

SEQ ID NO: 51606 - DNA, 120 bp, synthetic construct
  source 1..120: mol_type = other DNA
atttctgcatagcattccatggtgtgtgtatgccacattttctttattcaatttatcattgatgggcatttgggttgattccatgtctctgctattgtgaatagtgctgcaatgaatata

SEQ ID NO: 51607 - DNA, 120 bp, synthetic construct
  source 1..120: mol_type = other DNA
ttccacaattgttgaactaatttacactcacaccaacagtgtaaaagcgttcctttttctctgcaacctcaccagcatctgttgttttttgactttttaatagtagccattctgacaggt

SEQ ID NO: 51608 - DNA, 120 bp, synthetic construct
  source 1..120: mol_type = other DNA
ctctcttgatagctcccatagtgatggctagctagcacagtggctcacattaggaagatgcttaatagttgcttcttttaaattagttgctgaatttaaaatatctctctcagttccaag

SEQ ID NO: 51609 - DNA, 120 bp, synthetic construct
  source 1..120: mol_type = other DNA
taaatcctctttaattctggctggcgcgattgacacataccccaatgcagtctcttggtaaatggggtaagttattaaatatcgcaaggatgtgtttggagaggaaatggtatatatcat

SEQ ID NO: 51610 - DNA, 120 bp, synthetic construct; identical to SEQ ID NO: 14370
  source 1..120: mol_type = other DNA

SEQ ID NO: 51611 - DNA, 120 bp, synthetic construct
  source 1..120: mol_type = other DNA
agacatgggtgtcttgcctgaatcatcagagctactgatatacaacaaaatcccccagatagtgacaggtgtgttctcaagccatgggtgagactgaagttgccactcttggttatacag

SEQ ID NO: 51612 - DNA, 120 bp, synthetic construct
  source 1..120: mol_type = other DNA
tcctagataatgtttgcctttacttggatggctatttacatggacaagggaagaagggaagataagggaaaaggctttttatgtgtttattcaacaatggcggaggagaggcatgccaga

SEQ ID NO: 51613 - DNA, 120 bp, synthetic construct; identical to SEQ ID NO: 14371
  source 1..120: mol_type = other DNA

SEQ ID NO: 51614 - DNA, 120 bp, synthetic construct
  source 1..120: mol_type = other DNA
tatgcccaactcggggtaatcagcttagacatattaatattagtgggcatttcagtatcaacagatcactgtctagcagctgacaggcaccctcagaaaataaaccaagaagaaagggtt

SEQ ID NO: 51615 - DNA, 120 bp, synthetic construct
  source 1..120: mol_type = other DNA
ggagaaatgttgtcatcaaattcatctttttcacctcaattaaacatctatgctacagctccacagtcagattgagaggaaaaacagtacgtagctaagaaaagacatagacttgtaact

SEQ ID NO: 51616 - DNA, 120 bp, synthetic construct
  source 1..120: mol_type = other DNA
accctaattcattccccttcatggatcctatgtaaccatcctccaaaaagagctttcgcaaactcaaataaacacaggaaaggaagaccttcttatctttgagagtatatgtttagccct

SEQ ID NO: 51617 - DNA, 120 bp, synthetic construct; identical to SEQ ID NO: 14372
  source 1..120: mol_type = other DNA

SEQ ID NO: 51618 - DNA, 120 bp, synthetic construct
  source 1..120: mol_type = other DNA
taaggacatcatggagaatggggtatccatctcctcaagcatttatcttttcagttacaaacaatccaattacactctttattttaaaatatacaattattaattatagtcactctgttg

SEQ ID NO: 51619 - DNA, 120 bp, synthetic construct
  source 1..120: mol_type = other DNA
tctctataccctgaattgccttactttctccccacttccttgtcttattcaaatgcagatttcattaatgatttccagatcaatgatagttcagaaagcaagcaagtcaaagtgaccaag

SEQ ID NO: 51620 - DNA, 120 bp, synthetic construct
  source 1..120: mol_type = other DNA
tataaaggaaagaggtttaattgactcacagttcagcacaactgggcaggcctcaggaaacttacaatcatggtagaaggtgaaggggaagcaaagcaccttcctcacaaggcgtcagga

SEQ ID NO: 51621 - DNA, 120 bp, synthetic construct
  source 1..120: mol_type = other DNA
ggtctctcccttgacacatggggattatgggtgttacaattcaagatgagatttgggtggggacacaaagcctaaccatatcaaggatcaagtggtgggttgaaactaacaggatgagat

SEQ ID NO: 51622 - DNA, 120 bp, synthetic construct; identical to SEQ ID NO: 14373
  source 1..120: mol_type = other DNA

SEQ ID NO: 51623 - DNA, 120 bp, synthetic construct
  source 1..120: mol_type = other DNA
gggatgctgaggatcttaggaactatgtctaaacaagattcattcacagaagtgggaatgtctatttggcaaaaagaaaatactacttacatggctgttggaagaccagcaatcacaaac

SEQ ID NO: 51624 - DNA, 120 bp, synthetic construct
  source 1..120: mol_type = other DNA
aggcctggggagtcttgatgtctgagagtgacattctgatgatcactgtcatgtgtaaatgttggcctaaagctgccaatatttttgatttaagagaagcaagaaatgcaaatttttatg

SEQ ID NO: 51625 - DNA, 120 bp, synthetic construct; identical to SEQ ID NO: 14374
  source 1..120: mol_type = other DNA

SEQ ID NO: 51626 - DNA, 120 bp, synthetic construct
  source 1..120: mol_type = other DNA
tctctcctgaggcatagatgttgaaccaaattctattagttatgcttttacagcaagatagtggtttacagcttacaaaaggcttgtacatcctctcatattaaaagttattagaacagt

SEQ ID NO: 51627 - DNA, 120 bp, synthetic construct
  source 1..120: mol_type = other DNA
ctctggtcatccaactccaaatgcaaaagtctttctgctgctgcttcctagttaaactctaagggtctaagactccattcctagttatggtctcaactacatttgctcattgctgtgagg

SEQ ID NO: 51628 - DNA, 120 bp, synthetic construct
  source 1..120: mol_type = other DNA
aatctgactctatcagttatgggaatgttccctcaattcttagtgctccaaaccggacttgctcttggcttgtatttgtccaaaatatttgtcttctctatgttttctacatgtttgtct

SEQ ID NO: 51629 - DNA, 120 bp, synthetic construct
  source 1..120: mol_type = other DNA
caaaatatttgtcttctctatgttttctacatgtttgtcttataaggacaaaaacctgccttagtttatccatgaacaaagccacgcatgctagtggacacacacacacatgcgcgtgcg

SEQ ID NO: 51630 - DNA, 120 bp, synthetic construct; identical to SEQ ID NO: 14375
  source 1..120: mol_type = other DNA

SEQ ID NO: 51631 - DNA, 120 bp, synthetic construct
  source 1..120: mol_type = other DNA
tgagctcaggagttcgagaccagcctgggcaagaggctgaggtgggaggatgacctgagcccgggaggtcaaggctgcagcgagctgtgatcgtgccactgcactcgagccagggcgttg

SEQ ID NO: 51632 - DNA, 120 bp, synthetic construct
  source 1..120: mol_type = other DNA
catacacacatgcacacacacattgtggagaaattgctgactaagcaaagcttccaaatgacttagtttggctaaaatgtaggcttttaaaaatgtgagcactgccaagggtttttcctt

SEQ ID NO: 51633 - DNA, 120 bp, synthetic construct
  source 1..120: mol_type = other DNA
atctaaaatgagagacaaaaaatctataaaaatggaaaacatgcatagaaatatgtgagggaggaaaaaattacccccaagaatgttagtgcacgcagtcacacagggagaagactattt

SEQ ID NO: 51634 - DNA, 120 bp, synthetic construct; identical to SEQ ID NO: 14376
  source 1..120: mol_type = other DNA

SEQ ID NO: 51635 - DNA, 120 bp, synthetic construct
  source 1..120: mol_type = other DNA
acggtgagtgtttctgtgacatcccattcctacatttaagattcacgctaaatgaagtagaagtgactccttccagctttgccaaccagcttttattactagggcaagggtacccagcat

SEQ ID NO: 51636 - DNA, 120 bp, synthetic construct
  source 1..120: mol_type = other DNA
ctggtacctctgtttcctcagatagatgatagaaataaagatatgatattaaggaagctgttaatactgaattttcagaaaagtatccctccataaaatgtatttgggggacaaactgca

SEQ ID NO: 51637 - DNA, 120 bp, synthetic construct
  source 1..120: mol_type = other DNA
aatactataaaatgggtctggatgtagttctgacattattttataacaactggtaagagggagtgactatagcaacaactaaaatgatctcaggaaaacctgtttggccctatgtatggt

SEQ ID NO: 51638 - DNA, 120 bp, synthetic construct
  source 1..120: mol_type = other DNA
ctggaggcagaaaccattcttgctttggaaacaattacgtctgtgttatactgagtagggaagctcattaattgtcgacacttacgttcctgataatgggatcagtgtgtaattcttgtt

SEQ ID NO: 51639 - DNA, 120 bp, synthetic construct; identical to SEQ ID NO: 14377
  source 1..120: mol_type = other DNA

SEQ ID NO: 51640 - DNA, 120 bp, synthetic construct
  source 1..120: mol_type = other DNA
cacaggacttggttttatcttcccgtttgcccctcacttggtagagagaggctcacatcatctgctaaagaatttacaagtagattgaaaaacgtaggcagaggtcaagtatgccctctg

SEQ ID NO: 51641 - DNA, 120 bp, synthetic construct
  source 1..120: mol_type = other DNA
agaaggaatcagaactcctctcctctagctgtggtttgcaacccttttgggtcacagaacactttatgtaggtgatgaaaagtaaacattctatgcccagaaaaaatgcacagatacaca

SEQ ID NO: 51642 - DNA, 120 bp, synthetic construct
  source 1..120: mol_type = other DNA
ccattaacaaaaggaaaggaattcagaaatattattaaccaggcatctgtctgtagttaatatggatcacccaaaacccaaggcttttgcctaatgaacactttggggcacctactgtgt

SEQ ID NO: 51643 - DNA, 120 bp, synthetic construct; identical to SEQ ID NO: 14378
  source 1..120: mol_type = other DNA

SEQ ID NO: 51644 - DNA, 120 bp, synthetic construct
  source 1..120: mol_type = other DNA
tgaaccccaagaaccacatgattcttcaaccattattgggaagatcattttcttaggtctggttttaactggctttttatttgggaattcatttatgtttatataaaatgccaagcataa

SEQ ID NO: 51645 - DNA, 120 bp, synthetic construct
  source 1..120: mol_type = other DNA
aaaggaggaggggcataatcagagtcagtaaagacaactgctatttttatctatcgtagctgttgcagtcaaatgggaagcaatttccaacattcaactatggagctggtacttacatgg

SEQ ID NO: 51646 - DNA, 120 bp, synthetic construct; identical to SEQ ID NO: 14379
  source 1..120: mol_type = other DNA

SEQ ID NO: 51647 - DNA, 120 bp, synthetic construct
  source 1..120: mol_type = other DNA
aggtcaggagttcaagaccagcctggccaacatggcaaaactccgtctttatgaaaaatacaaaaattagccaggcatggtggcaggcgcctgtaatcccagctaattgggaggctgagg

SEQ ID NO: 51648 - DNA, 120 bp, synthetic construct
  source 1..120: mol_type = other DNA
tctcttcttatcagagaaaaaaatctacagtgagcttttcaaaaagtttttacaaactttttgccatttaatttcagttaggagttttccctacttctgacttagttgaggggaaatgtt

SEQ ID NO: 51649 - DNA, 120 bp, synthetic construct
  source 1..120: mol_type = other DNA
gtaacttaatccagactttcacaccttataggaaaaccagtgagtctggagagctgcatgggctcacaactgaggaggaatttgtagaagggatatacaaagtggaaatagacaccaaat

SEQ ID NO: 51650 - DNA, 120 bp, synthetic construct
  source 1..120: mol_type = other DNA
tttggtttttgcttttggcattccaggaaatgcacagttttactcagtgtaccacagaaatgtcctaaggaaggtgatgaatgaccaaaggttccctttcctattatacaagaaaaaatt

SEQ ID NO: 51651 - DNA, 120 bp, synthetic construct; identical to SEQ ID NO: 14380
  source 1..120: mol_type = other DNA

SEQ ID NO: 51652 - DNA, 120 bp, synthetic construct
  source 1..120: mol_type = other DNA
aacacaatagataacatttaccaagcatacaccatgtggcagacacaattataagtgttttccatatttaacctacttaatcctcaggaataagccactgaggtcagtcctattattatc

SEQ ID NO: 51653 - DNA, 120 bp, synthetic construct
  source 1..120: mol_type = other DNA
cagttctgctatgcctcgcattatgccccaggaaactttttcccttgtgaaagccaagcttaaaaaaagaaaagccacatttgtaacgtgctctgttcccctgcctatggtgaggatctt

SEQ ID NO: 51654 - DNA, 120 bp, synthetic construct; identical to SEQ ID NO: 14381
  source 1..120: mol_type = other DNA

SEQ ID NO: 51655 - DNA, 120 bp, synthetic construct
  source 1..120: mol_type = other DNA
ttcggcggcgcccagcacaagacattgcccctagagtctcagcccctaccctcgagtaatagatctgcctacctgagactgttgtttgcccaagagctgggtctcagcctgatgggaacc

SEQ ID NO: 51656 - DNA, 120 bp, synthetic construct
  source 1..120: mol_type = other DNA
cattctatgtgtggaacactctgctagatgctgtggatttagaaatgaaaatacatcccgacccttggaatggaagggaaaggactgaagtaagacagattaagcaggaccgtcagccca

SEQ ID NO: 51657 - DNA, 120 bp, synthetic construct
  source 1..120: mol_type = other DNA
tccttcagaactggtcaactctaccttggccagtgacccaggtggtcatagtagatttaccaagggaaaatggaaacttttattaggagctcttaggcctcttcacttcatggatttttt

SEQ ID NO: 51658 - DNA, 120 bp, synthetic construct
  source 1..120: mol_type = other DNA
cgagtagctgggactacaggtgtgcgccaccacaccaggctaatttttgtattttttgtaaagacaggttttcaccacgttggccaggctggtctgaactccagacctcaggtgattcac

SEQ ID NO: 51659 - DNA, 120 bp, synthetic construct; identical to SEQ ID NO: 14382
  source 1..120: mol_type = other DNA

SEQ ID NO: 51660 - DNA, 120 bp, synthetic construct
  source 1..120: mol_type = other DNA
tcaacccaaggcctgtatacaaaataaatcaaattaaacacatctttactgtcttctacctctttcctgacctcaatatatcccaacttgcctcactctgagaaccaaggctgtcccagc

SEQ ID NO: 51661 - DNA, 120 bp, synthetic construct
  source 1..120: mol_type = other DNA
acctgagtcgcagatattctactgatttgacagaactgtgtgactatctggaacagcattttgatccacaatttgcccagttacaaagcttaaatgagctctagtgcatgcatatatatt

SEQ ID NO: 51662 - DNA, 120 bp, synthetic construct; identical to SEQ ID NO: 14383
  source 1..120: mol_type = other DNA

SEQ ID NO: 51663 - DNA, 120 bp, synthetic construct
  source 1..120: mol_type = other DNA
cttcaatgactcaatgcagttttgcattctccctaccttttttttctaaaaccaataaaatagatacagcctttaggctttctgggatttcccttagtcaagctagggtcatcctgactt

SEQ ID NO: 51664 - DNA, 120 bp, synthetic construct
  source 1..120: mol_type = other DNA
aaatataaaagaataaaattaattaagttggcactggacttccggtggtcagtcatgtgtgtcatctgtcacgtttttcgggctctggtggaaatggatctgtctgtcttctctcatagg

SEQ ID NO: 51665 - DNA, 120 bp, synthetic construct
  source 1..120: mol_type = other DNA
cagtggacctgaaggacgagggatgggatttcatgtaaccaagagtattccatttttactaaagcagtgttttcacctcatatgctatgttagaagtccaggcagagacaataaaacatt

SEQ ID NO: 51666 - DNA, 120 bp, synthetic construct; identical to SEQ ID NO: 14384
  source 1..120: mol_type = other DNA

SEQ ID NO: 51667 - DNA, 120 bp, synthetic construct
  source 1..120: mol_type = other DNA
ctcgcgcgagccctcccaggtcatcttctgcaatcgcagtccgcgcgtcgtgctgcccgtatggctcaacttcgacggcgagccgcagccctacccaacgctgccgcctggcacgggccg

SEQ ID NO: 51668 - DNA, 120 bp, synthetic construct
  source 1..120: mol_type = other DNA
cccttgaggcaggacacatccagggtgacgctgctcgtaagcgtcagagcattcttttttttttttttttttttctgagacggagtctcgctctgtcgcccaggctggagtgcagtggcg

SEQ ID NO: 51669 - DNA, 120 bp, synthetic construct
  source 1..120: mol_type = other DNA
tagagacggggtttcaccatgttggtcaggctggtctcgaactgctgacctcgtgatccgcccgcctcggcctcccaaagtgctgggcttatgggcatgagcctccgcgcccggcccaga

SEQ ID NO: 51670 - DNA, 120 bp, synthetic construct; identical to SEQ ID NO: 14385
  source 1..120: mol_type = other DNA

SEQ ID NO: 51671 - DNA, 120 bp, synthetic construct; identical to SEQ ID NO: 6878
  source 1..120: mol_type = other DNA

SEQ ID NO: 51672 - DNA, 120 bp, synthetic construct
  source 1..120: mol_type = other DNA
agcctcccgaggagcggggattacaggcgtgcgccaccactcctggctaattttttttttagtagagacgggggtttcgtcattttggccaggctggtctcgaactcctgacctcagatg

SEQ ID NO: 51673 - DNA, 120 bp, synthetic construct
  source 1..120: mol_type = other DNA
gccagactggagtgctgttgcacaatcttggctcactgcaatctccgactccctggttcaagcgattctcctgcctcagcctcccaagtaactgggattacaggcacgcactaccattcc

SEQ ID NO: 51674 - DNA, 120 bp, synthetic construct
  source 1..120: mol_type = other DNA
tgctgggatttcggccacaacgtccgaccgaaagtttttaagcagggacatgacattgtcagatttatatactgaaaagctcacccaggttgccaagtggtttggaggggaaagactgct

SEQ ID NO: 51675 - DNA, 120 bp, synthetic construct; identical to SEQ ID NO: 14387
  source 1..120: mol_type = other DNA

SEQ ID NO: 51676 - DNA, 120 bp, synthetic construct
  source 1..120: mol_type = other DNA
cagggatcaacatttctgtaggctcctattttatataggaaattgtatgaattttgtattttactccaaaatttttctgtgcccgatttaatataaaaatttactgagcctgggtgcagt

SEQ ID NO: 51677 - DNA, 120 bp, synthetic construct
  source 1..120: mol_type = other DNA
aattcttgaaaaattagcagggcacattcctgcctttagtcccagctacttgggaagctgaggcaggaagatcacccgaacccaggagttggaggctacagtgaactatgatggtgcctc

SEQ ID NO: 51678 - DNA, 120 bp, synthetic construct
  source 1..120: mol_type = other DNA
tggagtttggtggcatgatcacggctcattgcacccttaacctgggctcaagcagtcctcccagagcttcagcttcccaaagtagctgggactataggcatgctccactatgtctggcta

SEQ ID NO: 51679 - DNA, 120 bp, synthetic construct; identical to SEQ ID NO: 14388
  source 1..120: mol_type = other DNA

SEQ ID NO: 51680 - DNA, 120 bp, synthetic construct
  source 1..120: mol_type = other DNA
aaaagttagctgcatgtggtggcatgcgcctgtttagtcccagctactcgggaggctgaggcaggagaattgcttgaacctgggaggcggaggtggcagtgagccaagatcacaccacta

SEQ ID NO: 51681 - DNA, 120 bp, synthetic construct; identical to SEQ ID NO: 6880
  source 1..120: mol_type = other DNA

SEQ ID NO: 51682 - DNA, 120 bp, synthetic construct
  source 1..120: mol_type = other DNA
atacggtgaaaccctgtctctactgaaaataacaaaaaattagccgggcgtggtggcgggcacctgtggtcccagctatttgggaggctgtggcaggagaatggcataaacctgggaggc

SEQ ID NO: 51683 - DNA, 120 bp, synthetic construct; identical to SEQ ID NO: 14389
  source 1..120: mol_type = other DNA

SEQ ID NO: 51684 - DNA, 120 bp, synthetic construct
  source 1..120: mol_type = other DNA
ctcagacttgttttctcatctgtaaatggatctgttgtgaggactgactgagataatgttactagaagggctttgtataatatttaagcagagtgagaggtaagctttttgtgtaggtca

SEQ ID NO: 51685 - DNA, 120 bp, synthetic construct
  source 1..120: mol_type = other DNA
acggcaagctccacctcctgggttcacaccattctcctgcctcagcctcccgagtagctgggactacaggcgctcgccaccacacctggctaatttttttgtatttttagtagagacgag

SEQ ID NO: 51686 - DNA, 120 bp, synthetic construct
  source 1..120: mol_type = other DNA
ttaacaacctttgcttgtcccgataggtcacctttggctcttcagagatgcagggacacacgatgggcttctggttaaccaaactgaattatttgtgccatctctcaatgttgacggaca

SEQ ID NO: 51687 - DNA, 120 bp, synthetic construct
  source 1..120: mol_type = other DNA
cctgatgtcaggcacgttatccaatctttttgtatcctattctctaccataaataaaatggaagtgatgtatttgtacgttatgtgttaaaggtgttatggtgtctcaaaagcactttgg

SEQ ID NO: 51688 - DNA, 120 bp, synthetic construct; identical to SEQ ID NO: 14390
  source 1..120: mol_type = other DNA

SEQ ID NO: 51689 - DNA, 120 bp, synthetic construct
  source 1..120: mol_type = other DNA
caccgtgttagccaggatggtctccatctcctgacctcatgatctgcccgcctacgcctcccaaagtgctgggattacaggcatcagccacagcacctggcctatgtattttcaatttaa

SEQ ID NO: 51690 - DNA, 120 bp, synthetic construct
  source 1..120: mol_type = other DNA
tctgcatcctgggttcaagtgattctcctgcctcagcctcctgggtagctggggttataggtgcctgtcaccacacctggctaatttttgtatttttagtagagatgaggtttcaccatg

SEQ ID NO: 51691 - DNA, 120 bp, synthetic construct; identical to SEQ ID NO: 14391
  source 1..120: mol_type = other DNA

SEQ ID NO: 51692 - DNA, 120 bp, synthetic construct
  source 1..120: mol_type = other DNA
tttttttaattacctgggcatcttagcatatgcctgtggtcacagctatttgggaggcttaggtgggaggatcccttgagcccaggagtttgaggctgcagtgagccatgatcataccac

SEQ ID NO: 51693 - DNA, 120 bp, synthetic construct; identical to SEQ ID NO: 6883
  source 1..120: mol_type = other DNA

SEQ ID NO: 51694 - DNA, 120 bp, synthetic construct
  source 1..120: mol_type = other DNA
cctcagcctcccaagtagctgggactacaggcgcccgccactacgcccggctaattttttgtatttttagtagagacggggtttcaccgttttagccgggatggtctcgatctcctgacc

SEQ ID NO: 51695 - DNA, 120 bp, synthetic construct; identical to SEQ ID NO: 14392
  source 1..120: mol_type = other DNA

SEQ ID NO: 51696 - DNA, 120 bp, synthetic construct
  source 1..120: mol_type = other DNA
ccactgcgcccagcccaccattttatttgttcataattctgtagtccaggctgggctcagctaggcagttactctgctggtggtagtcgttggtgtggctgccttttgctggcagctggg

SEQ ID NO: 51697 - DNA, 120 bp, synthetic construct
  source 1..120: mol_type = other DNA
tgcctccagggctcaagtgatcctcccacctcagcctccccagtcgctgggaccacaggcatgtgccaccatgcctggctaattttttgtgtattttgtagagacggggtttcgccatgt

SEQ ID NO: 51698 - DNA, 120 bp, synthetic construct
  source 1..120: mol_type = other DNA
tctctagcagggtagctcagggctttcaaaagtataaaagcagaagtcagcaggcctttttaaggcttcggcctagaattgccagtgtcgcttcatccacattcagttagttaaagcaat

SEQ ID NO: 51699 - DNA, 120 bp, synthetic construct; identical to SEQ ID NO: 14393
  source 1..120: mol_type = other DNA

SEQ ID NO: 51700 - DNA, 120 bp, synthetic construct
  source 1..120: mol_type = other DNA
caaatgtgcagaaagacctggagcggctgacacaggagcgcattgcacatcaacggatgggagattgaagatttctgttgaaacttacactgtttcatctcagcttttgatggtactgat

SEQ ID NO: 51701 - DNA, 120 bp, synthetic construct; identical to SEQ ID NO: 6885
  source 1..120: mol_type = other DNA

SEQ ID NO: 51702 - DNA, 120 bp, synthetic construct
  source 1..120: mol_type = other DNA
attcagtgggaattgcagcatatcgtttaattttaagaaggcattggcatctgcttttaatggatgtataatacatccattctacatccgtagcggttggtgacttgtctgcctcctgct

SEQ ID NO: 51703 - DNA, 120 bp, synthetic construct; identical to SEQ ID NO: 14394
  source 1..120: mol_type = other DNA

SEQ ID NO: 51704 - DNA, 120 bp, synthetic construct
  source 1..120: mol_type = other DNA
aacttgccatccgcacagaaaatacgagaaaatctgcatgtttgattatagtattaatggacaaataagtttttgctaaatgtgagtatttctgttcctttttgtaaatatgtgacattc

SEQ ID NO: 51705 - DNA, 120 bp, synthetic construct
  source 1..120: mol_type = other DNA
ctgcctcctgggttcacgtaatcctcctgagtagctgggattacaggcgcctgccaccacgctggccaatttttgtacttttagtagagacagtgtttcgtcatgttggccaggctggtt

SEQ ID NO: 51706 - DNA, 120 bp, synthetic construct; identical to SEQ ID NO: 6886
  source 1..120: mol_type = other DNA

SEQ ID NO: 51707 - DNA, 120 bp, synthetic construct
  source 1..120: mol_type = other DNA
aaaagacagaaaactaaaaaggaagaaaaaagatccctattagatacacttcttaaatacaatcacattaacattttgagctatttccttccagcctttttagggcagattttggttggt

SEQ ID NO: 51708 - DNA, 120 bp, synthetic construct; identical to SEQ ID NO: 14395
  source 1..120: mol_type = other DNA

SEQ ID NO: 51709 - DNA, 120 bp, synthetic construct
  source 1..120: mol_type = other DNA
ttttaaaaattagcatggcggcacacatctgtaatcctagctacttggcaggctgaggtgagaagatcattggagtttaggaattggaggctgcagtgagccatgagtatgccactgcac

SEQ ID NO: 51710 - DNA, 120 bp, synthetic construct
  source 1..120: mol_type = other DNA
tgggcagatcacctgaggtcaggagttcgagaccagcctggccaacatggtaaaaccccatttctactaaaaaatacaagaattagctgggtgtggtggcgcatgcctgtaatcctagct

SEQ ID NO: 51711 - DNA, 120 bp, synthetic construct; identical to SEQ ID NO: 6887
  source 1..120: mol_type = other DNA

SEQ ID NO: 51712 - DNA, 120 bp, synthetic construct
  source 1..120: mol_type = other DNA
ttctcctggctcaccctcctgagtagctgggattacaggcgcctgccaccatgcctggctaattttgtgtttttagtggagacggggtttcaccatgttgtccaggatggtcttgatctc

SEQ ID NO: 51713 - DNA, 120 bp, synthetic construct
  source 1..120: mol_type = other DNA
tgatagttcatgctcctcttgttaaaacctgcaggccgagcacagtggctcatgcctgtaatcccagcattttgggagaccaaggcggatggatcacctgaggtcaggagctgaagacca

SEQ ID NO: 51714 - DNA, 120 bp, synthetic construct
  source 1..120: mol_type = other DNA
aaatcgagaccatcctggctaacacgggtgaaaccccgtctctattaaaaaatagaaaaaattaggcgggcgtggtggtgagcgcctgtagtcccagctactcgagagcctgaggcagga

SEQ ID NO: 51715 - DNA, 120 bp, synthetic construct
  source 1..120: mol_type = other DNA
aaaattatccaggtgtggcggtgggcgcctgtgaggcaggcgaatctcttgaacccgggaggcggaggttgcagtgagccaagatcacaccattgcactccagcctgggcaacaagagtg

SEQ ID NO: 51716 - DNA, 120 bp, synthetic construct; identical to SEQ ID NO: 14397
  source 1..120: mol_type = other DNA

SEQ ID NO: 51717 - DNA, 120 bp, synthetic construct; identical to SEQ ID NO: 14398
  source 1..120: mol_type = other DNA

SEQ ID NO: 51718 - DNA, 120 bp, synthetic construct
  source 1..120: mol_type = other DNA
ggatttcctcacccagtaagtctcatttttttcacatatacttgtagacccaaaggtccttaagttacttaaaaacagtcttatcagtggagatcctggaccatcccctattttctttta

SEQ ID NO: 51719 - DNA, 120 bp, synthetic construct
  source 1..120: mol_type = other DNA
aagtcactttcatttttacaacttgaagccatataccagcatggtttttatacactaaggacactcccagtgatgaaaatgaattcccctccatttgtgcaaggaggtatgtacatctat

SEQ ID NO: 51720 - DNA, 120 bp, synthetic construct
  source 1..120: mol_type = other DNA
tcttttagatttctatacagaggtactggttagttctgattttttcttcagctgcttgaaatgcatgagctttaaaagttgcctggcagaactacatcctgctttccaggttagcagcct

SEQ ID NO: 51721 - DNA, 120 bp, synthetic construct; identical to SEQ ID NO: 14399
  source 1..120: mol_type = other DNA

SEQ ID NO: 51722 - DNA, 120 bp, synthetic construct
  source 1..120: mol_type = other DNA
cacacctggtagtttccagaagcaccggtatcttgtcttggaagttggatgaagaagatcaactgaagtttcctttttagtgaggaggagtggagagtcagacttgaaagcagttcacac

SEQ ID NO: 51723 - DNA, 120 bp, synthetic construct
  source 1..120: mol_type = other DNA
actttttctgacaacttggccaccgacagctgaagggcttttcacctgttgacacaattgccagtcagagacacttgcaacaaagagacaggcacaagttcaactatcaaggcccgagtg

SEQ ID NO: 51724 - DNA, 120 bp, synthetic construct
  source 1..120: mol_type = other DNA
tattgtaaaaagttatattcttaggtcagaaaacttggaaagtgggagataaagaatgagtcaagttgggggaaatgtctgagcaattcataattaaggggaaaaacgtttgtttcagtc

SEQ ID NO: 51725 - DNA, 120 bp, synthetic construct; identical to SEQ ID NO: 14400
  source 1..120: mol_type = other DNA

SEQ ID NO: 51726 - DNA, 120 bp, synthetic construct
  source 1..120: mol_type = other DNA
aaagagccctcagacattctttccaagcctcattctcattagggagaataactaccatttatttgatgcttaacatatgccaagccttgtgctgggcttcacacacgcacacacacaacc

SEQ ID NO: 51727 - DNA, 120 bp, synthetic construct
  source 1..120: mol_type = other DNA
cagagcccgtgctcttccctgtatcacacctcccaggcctagccatgatggaaaagcagctgcagctccatcttaaggaagaatgcacagaagctaaaccctgtgccacctgacggatct

SEQ ID NO: 51728 - DNA, 120 bp, synthetic construct; identical to SEQ ID NO: 14401
  source 1..120: mol_type = other DNA

SEQ ID NO: 51729 - DNA, 120 bp, synthetic construct
  source 1..120: mol_type = other DNA
tttgtgatgtcatgttttccttcactcgctgttcctctgctcttcctggcctggctctcactctccaaccccacctccagcagtgctgttaagggctggctcctaatggactaatcccaa

SEQ ID NO: 51730 - DNA, 120 bp, synthetic construct
  source 1..120: mol_type = other DNA
ccaataaagaagcaagtgggacaaggtgggctggaagcagacagaactggatttgctccttactagctttgtgactttagataagccattgaattattattgcctcagtctcctcatctg

SEQ ID NO: 51731 - DNA, 120 bp, synthetic construct
  source 1..120: mol_type = other DNA
tgcagcctcagcctcccaagcaaggtctagtgagcgtcctacctcagcctcccccaaatagctgggactataggtccacaccaccatgcccagctagtttttgtattttttgtagagaca

SEQ ID NO: 51732 - DNA, 120 bp, synthetic construct
  source 1..120: mol_type = other DNA
cttacaagcatgttgtgaagatagacttagataagctaaatattaacgctctttccaaaggtagaaaatatgcaacaaaggtggtgctatttttattatgaatcacaccagccttgcaga

SEQ ID NO: 51733 - DNA, 120 bp, synthetic construct; identical to SEQ ID NO: 14402
  source 1..120: mol_type = other DNA

SEQ ID NO: 51734 - DNA, 120 bp, synthetic construct
  source 1..120: mol_type = other DNA
tggaaacagtagggacctggcttatctcttcattttcattctgcacactccagccattcttttcccatctttctccttctctgtatttccaccctccccttctttaaaaaatgttattat

SEQ ID NO: 51735 - DNA, 120 bp, synthetic construct; identical to SEQ ID NO: 6893
  source 1..120: mol_type = other DNA

SEQ ID NO: 51736 - DNA, 120 bp, synthetic construct
  source 1..120: mol_type = other DNA
aatgtctgcatctgcctcacccttagatttccccagtcccccaggcccaacaagaatcactgattctgcacagtaatcttcaaggacctgcttctgtcttgggaacaaccattccttaac

SEQ ID NO: 51737 - DNA, 120 bp, synthetic construct; identical to SEQ ID NO: 14403
  source 1..120: mol_type = other DNA

SEQ ID NO: 51738 - DNA, 120 bp, synthetic construct
  source 1..120: mol_type = other DNA
tctcattcatattcaacaacaaagagaatcatgaaatcaaccctagcccaagggaacacagctgccagcaatgagaagtgaacctacaaacctgtatgtctcctttggtgtcttttgagc

SEQ ID NO: 51739 - DNA, 120 bp, synthetic construct
  source 1..120: mol_type = other DNA
ctatttgaaaatgatactggaaaaggggatctcattaaaggcaacctctcctactaggactgaacagatcccaaaatgcctaaggcacttcgctggagcttgttagggtaggatgatccc

SEQ ID NO: 51740 - DNA, 120 bp, synthetic construct
  source 1..120: mol_type = other DNA
tgtaaaatgggtccaataatccaacaactttaaaggatttatgaccttcacataaagggctcagcccagagcctggcatagaaggcgtgctcaaaaactattagcaaataaaaaacaaaa

SEQ ID NO: 51741 - DNA, 120 bp, synthetic construct; identical to SEQ ID NO: 14404
  source 1..120: mol_type = other DNA

SEQ ID NO: 51742 - DNA, 120 bp, synthetic construct
  source 1..120: mol_type = other DNA
gagaatcctgagtcacaggcatctgggatggaaacaagccattctagaatcagtcaggtctttctgttgcaaaggcagccccctgttacctttccaatctcaaagcctgggctatttccc

SEQ ID NO: 51743 - DNA, 120 bp, synthetic construct
  source 1..120: mol_type = other DNA
tcttctgcaatgcctgcttggaaactgcatgggccaatttcccttccttccctcattacgacatttattccaggctgtctaatgtggtgagctgtgtctgggtctacaattctacaattc

SEQ ID NO: 51744 - DNA, 120 bp, synthetic construct; identical to SEQ ID NO: 14405
  source 1..120: mol_type = other DNA

SEQ ID NO: 51745 - DNA, 120 bp, synthetic construct
  source 1..120: mol_type = other DNA
ggttggtgccttatgtttcacctctgtgagctggagaagatgttacccctattgagtctgatttccttcccctgcctttgagcttctgctcatctatcactttctctgcccaaactacca

SEQ ID NO: 51746 - DNA, 120 bp, synthetic construct
  source 1..120: mol_type = other DNA
gtactctctcagtcacttttcatttctttatatcctagctcccaaacaaaccaggaactctttgagaaggaggattataacctgcagttaaaaagaaggagtttgagtcctctttctgct

SEQ ID NO: 51747 - DNA, 120 bp, synthetic construct
  source 1..120: mol_type = other DNA
gaaaatattgctctctttcaagggggactgtaggattgttaaataccaacctgccctcatcttctgcaaggaagagtttcttaaaggctccagtgggtctggggttttggctgtcttgtt

SEQ ID NO: 51748 - DNA, 120 bp, synthetic construct; identical to SEQ ID NO: 14406
  source 1..120: mol_type = other DNA

SEQ ID NO: 51749 - DNA, 120 bp, synthetic construct
  source 1..120: mol_type = other DNA
atctgaatgcagctcacttttttctccagcttcccaagagcaaaatcagcagtaataacacagttgcaacagtgatcctataataatgctgttcttcgattgtggaaaaggcagcagtag

SEQ ID NO: 51750 - DNA, 120 bp, synthetic construct
  source 1..120: mol_type = other DNA
tgacatggctgtccacattcaaggtggccaacaccaaacaatgccagttctctgtttcccagaagcagcctctctgacctgggggaaaatccagtttcattggcgtatcttcaaagataa

SEQ ID NO: 51751 - DNA, 120 bp, synthetic construct
  source 1..120: mol_type = other DNA
aattctcctgccccagcctcccaagtacaggtgcgtgccaccacacccggctcatttttgtatttttagtagagacggggtttcaccttgttggccaggctggtctccaactcctgacct

SEQ ID NO: 51752 - DNA, 120 bp, synthetic construct
  source 1..120: mol_type = other DNA
cctgtctagttgattattactgacccaagcaggtaagtttttctttggaccatctcttctaaaatttcacaatgatcttgcccatcgacctcctaaaaccatctgatgactatattccca

SEQ ID NO: 51753 - DNA, 120 bp, synthetic construct; identical to SEQ ID NO: 6897
  source 1..120: mol_type = other DNA

SEQ ID NO: 51754 - DNA, 120 bp, synthetic construct
  source 1..120: mol_type = other DNA
ttaaaatatctcttattgcagcctgggtaagcacacatgaaggggcgtttctcactggtctcagatgccgaccgtacaagagtcggggctactccaggcacacgtcgcacatcctgcagg

SEQ ID NO: 51755 - DNA, 120 bp, synthetic construct
  source 1..120: mol_type = other DNA
ccattcacactccagatccccatggcagacatcagtaatggatgctagatcaggacattctacaatgcagtgctctaagatcatcactactgagcaaccagaagtggctgttgagatgaa

SEQ ID NO: 51756 - DNA, 120 bp, synthetic construct; identical to SEQ ID NO: 14408
  source 1..120: mol_type = other DNA

SEQ ID NO: 51757 - DNA, 120 bp, synthetic construct
  source 1..120: mol_type = other DNA
aatagtgaggccagaaagcactggaatccatctgccttctgtgctctgcacacgtcctttgcagggcatctgttgctcccctttatcttgtggaagtgcagtgtgtgtgttgtcagtctt

SEQ ID NO: 51758 - DNA, 120 bp, synthetic construct
  source 1..120: mol_type = other DNA
gagcaagtgcctgagtggccactaaattctcctcattcctttatagatgagtaaatcaaccccaaaggcggtgagatgctgacacaagagtgcatccatgttttggttttgtttgttctt

SEQ ID NO: 51759 - DNA, 120 bp, synthetic construct
  source 1..120: mol_type = other DNA
acaggtgagagtcatcatgcccagctaatttttttttttttttttggtagagatagggtctccctatgttgctcaggctggtctcaaactcttgagctgaagggatccttccaccttggc

SEQ ID NO: 51760 - DNA, 120 bp, synthetic construct
  source 1..120: mol_type = other DNA
ccactctaccccatgcttatgttctagtccctatttcacattgccctgcactgaaaggtcattttcttttttggaagaataaatgctgcagtgacatacaacacaacattgatgttaata

SEQ ID NO: 51761 - DNA, 120 bp, synthetic construct; identical to SEQ ID NO: 14409
  source 1..120: mol_type = other DNA

SEQ ID NO: 51762 - DNA, 120 bp, synthetic construct
  source 1..120: mol_type = other DNA
actgttctttcttcgtgacacttctggaaacattaatcagaacatctcagagctacttgccccacgtatcatgtggggtctggcccagatacaacttatatctagagtactgaccattct

SEQ ID NO: 51763 - DNA, 120 bp, synthetic construct
  source 1..120: mol_type = other DNA
tatgtgcttctgaccacccaaaacagagactctgcagggaaggcagactgaaggtctacggaggtggcagaccaaaagtgtctattgaattctccaaaacttttacctttatactttact

SEQ ID NO: 51764 - DNA, 120 bp, synthetic construct
  source 1..120: mol_type = other DNA
taggtataaacagggggtctgaagtcaggcaagacctgtgttattagtctcggctccaatatttactagcgatgtgattctgacattattcatcacctctgggcttcagtttccccatcc

SEQ ID NO: 51765 - DNA, 120 bp, synthetic construct; identical to SEQ ID NO: 14410
  source 1..120: mol_type = other DNA

SEQ ID NO: 51766 - DNA, 120 bp, synthetic construct
  source 1..120: mol_type = other DNA
ctgaggcaggagaatggtgtgaaccctggaggcggagcttgcagtgagccaagatagcgccactgtactccagcctgggtgacagagcgagactcccatctcaaaaaaaaaaaaaagaaa

SEQ ID NO: 51767 - DNA, 120 bp, synthetic construct
  source 1..120: mol_type = other DNA
atggcattatgcatttttcaaaacccatagaactgtacaacacaaaaagtgaaccctaatgtaaactatgggctttagttaacaataatttatcaatattggctcatcaattataacaaa

SEQ ID NO: 51768 - DNA, 120 bp, synthetic construct
  source 1..120: mol_type = other DNA
gtatgatgatcatcaacacttggcaagatgtgagtctacctgtggacactttacgatgtagaccaaatcttagaagtcaaaggtccaagcggttaattcaagcccaattagcttaaatac

SEQ ID NO: 51769 - DNA, 120 bp, synthetic construct
  source 1..120: mol_type = other DNA
cacagccgccttatcagacccaggggacgagcaggtgtccctgatgttaaaggagcctgcagtgaagaagaggctgccagggccaaagagtccatcagtaaggaactaaagggccggtaa

SEQ ID NO: 51770 - DNA, 120 bp, synthetic construct; identical to SEQ ID NO: 14411
  source 1..120: mol_type = other DNA

SEQ ID NO: 51771 - DNA, 120 bp, synthetic construct
  source 1..120: mol_type = other DNA
catcctccgattctcgtaggcgtgcaccgtcacggtctaggtctcgctcagacaagccgaggaagaccacagtggcagggtttcatcctcggcaagttgtttaccatctagacggcaggg

SEQ ID NO: 51772 - DNA, 120 bp, synthetic construct
  source 1..120: mol_type = other DNA
gactcagtttttaccagatagcaccaaaaaagtgatgacgcaagaagagatgtcatgtcctcagaagtggggattacatatctgtggcctcactctgcttaaatgacaggtcagttttcc

SEQ ID NO: 51773 - DNA, 120 bp, synthetic construct
  source 1..120: mol_type = other DNA
agagctgaaagatgtgcaatgctgaaaaggacaacttgaaaggaacgaatgttctgttctaaaattattctctccttcagatacaatgcctctatctgctctacagttattttacttcca

SEQ ID NO: 51774 - DNA, 120 bp, synthetic construct; identical to SEQ ID NO: 14412
  source 1..120: mol_type = other DNA

SEQ ID NO: 51775 - DNA, 120 bp, synthetic construct
  source 1..120: mol_type = other DNA
aaaggaataaagtaccaatacatgctacaatatggatgaacctttaaaataccgtgctaagaagccattcacagaagaccacatgtagtatgattgcatttctataaaatgtccagaata

SEQ ID NO: 51776 - DNA, 120 bp, synthetic construct
  source 1..120: mol_type = other DNA
gtgaatatactaaaaaccattgcattgtacactctaaatcggtgaatcatacggtccgtgcaatctataaatctgcttttaaaaaattatcgggggggggtgtggtccgagaaggatgca

SEQ ID NO: 51777 - DNA, 120 bp, synthetic construct; identical to SEQ ID NO: 14413
  source 1..120: mol_type = other DNA

SEQ ID NO: 51778 - DNA, 120 bp, synthetic construct
  source 1..120: mol_type = other DNA
aattccattctctgcctccattactctaacagttggttccaggggtcctgggcagggaggcaggtaagctggtgggtggatcagcccactccatctggtgtggtgtggggaagcctggag

SEQ ID NO: 51779 - DNA, 120 bp, synthetic construct
  source 1..120: mol_type = other DNA
tggctctaagcattttagaaagaactgcctgcccctctaacctaccatatcttgtctccacatccttcaagtaatttttgacttatctagggcagggggaatgtctcaaagaagtagccc

SEQ ID NO: 51780 - DNA, 120 bp, synthetic construct
  source 1..120: mol_type = other DNA
ggtacagacagtgggaaagtgagaggtgatgacaatggccatttggcagcagaaagagggcagtaccagaatggtgccatggtgctgccagaacattttgcctcaaaggctgtgaagaga

SEQ ID NO: 51781 - DNA, 120 bp, synthetic construct
  source 1..120: mol_type = other DNA
agctcactgcagccttgaattccctggctcaattgttcctcctgcttccatctcccaaagagctaggactataggtgccccgcaccatgcccagctgatttttatttttatctttgtaga

SEQ ID NO: 51782 - DNA, 120 bp, synthetic construct; identical to SEQ ID NO: 14414
  source 1..120: mol_type = other DNA

SEQ ID NO: 51783 - DNA, 120 bp, synthetic construct
  source 1..120: mol_type = other DNA
aatttgcacagctggatgcaaaccacaaacaaaagaagcaacaagcaacaagactgtacctgccaaatatgccagtggattctcctacaaggtccatgaggaaaaaaaaaacagccaggc

SEQ ID NO: 51784 - DNA, 120 bp, synthetic construct
  source 1..120: mol_type = other DNA
ttcccaatgtagtgtgcccagaacaccaagtacaacgtactggcatctgatgtggtagcaattctctctaaataagtttttaaaaagcaactcggtctgggaaccatagactaatagaga

SEQ ID NO: 51785 - DNA, 120 bp, synthetic construct; identical to SEQ ID NO: 14415
  source 1..120: mol_type = other DNA

SEQ ID NO: 51786 - DNA, 120 bp, synthetic construct
  source 1..120: mol_type = other DNA
acccccgcctcctgggttcacgccattctcctgcctcagtcttctgagtagctgggaatgcaggcacccgccaccacgcccggctaatttttttgtagttttagtagagacggggtttca

SEQ ID NO: 51787 - DNA, 120 bp, synthetic construct
  source 1..120: mol_type = other DNA
agctactgcaccgcgcccagccgcaaatattactattttacagccatctgtgtgtatctcctctgccccattgtaaacttggccttgaatacaaagactctctgctcttctctgcatcct

SEQ ID NO: 51788 - DNA, 120 bp, synthetic construct
  source 1..120: mol_type = other DNA
aacccatctctacaaaaatacaaaaattagttgggcatggtggcacgtgcctctaatcctatctgcttgggaggctgaggcaggagaatcgcttgaacccgggaggcggagttgcagtga

SEQ ID NO: 51789 - DNA, 120 bp, synthetic construct
  source 1..120: mol_type = other DNA
cttccttttgagacataagataattgaccctgctgaatgacagggagaagggatttatgagtccttggccaagatagtcaggaagatcacaggaattgacagcaaggtgtcatgaggcta

SEQ ID NO: 51790 - DNA, 120 bp, synthetic construct; identical to SEQ ID NO: 14416
  source 1..120: mol_type = other DNA

SEQ ID NO: 51791 - DNA, 120 bp, synthetic construct
  source 1..120: mol_type = other DNA
aaccaaccttggtcatgatccctgttttctccccagcttgttctcaaagatctggcctaataacttttccaagaattcatgctaactctgtggtttccagaatccactgggtttttttcc

SEQ ID NO: 51792 - DNA, 120 bp, synthetic construct
  source 1..120: mol_type = other DNA
atatggattgactctttttaatttaaaacagagccatgaactcaaatattcctataggggccaagtaagacaagtaaaatgaaggcgaccctaaagaatgagacgatattgaactcacag

SEQ ID NO: 51793 - DNA, 120 bp, synthetic construct; identical to SEQ ID NO: 14417
  source 1..120: mol_type = other DNA

SEQ ID NO: 51794 - DNA, 120 bp, synthetic construct
  source 1..120: mol_type = other DNA
ttttcaatccttagaaccctaggagtcattcattaagttccatcaccttacacaaatgacaacttcctccctggcctcagcttcatgtaaaatgaaaattacagcacttcccgcatcaga

SEQ ID NO: 51795 - DNA, 120 bp, synthetic construct
  source 1..120: mol_type = other DNA
atgcactcaataagtgttaaactgttgcttatgtagtattatccccattttacagcaaagaatactgaggtttaaggagacattgcgttatttgcccacagtcagatggcaagtggcaga

SEQ ID NO: 51796 - DNA, 120 bp, synthetic construct
  source 1..120: mol_type = other DNA
aggttcacttttatcatcatgagacttgaacgactcccagctcttttctccagcgggatgaatgaaattaggcatgctgaaggttttaaaggtgaactggggtagagggaaaggactagg

SEQ ID NO: 51797 - DNA, 120 bp, synthetic construct; identical to SEQ ID NO: 14418
  source 1..120: mol_type = other DNA

SEQ ID NO: 51798 - DNA, 120 bp, synthetic construct
  source 1..120: mol_type = other DNA
gagggatggtgtggctataaatacagatcaagctttgctacctcgcctgccgctcacctcctgctgcaaggaccaattcctaactggccacagaccactaccggtccatggcccgggggt

SEQ ID NO: 51799 - DNA, 120 bp, synthetic construct
  source 1..120: mol_type = other DNA
ctgggaaaataagcagaagcagttatcagcagagcatgcactttggcgcttcacttctggcagtggcctggactgtacattttgctaaacagctttaagatgcataaaaatgtatcctga

SEQ ID NO: 51800 - DNA, 120 bp, synthetic construct
  source 1..120: mol_type = other DNA
tcgagaccagcctggccaacatggtgaaaccccatctctaccaaaaatacaaaaattagccgggtggggtggtgggcgcctgtaatcccagctacttgggaggctgagtcgagagaatcg

SEQ ID NO: 51801 - DNA, 120 bp, synthetic construct
  source 1..120: mol_type = other DNA
cactttccttagaaagtttgcaaaaagagaaaaatgtccctcatataacacaaattgtgagccctcttcccgctaaaaacacgtacattgagatttggctcaggaaaaacaaaaaaacaa

SEQ ID NO: 51802 - DNA, 120 bp, synthetic construct; identical to SEQ ID NO: 14419
  source 1..120: mol_type = other DNA

SEQ ID NO: 51803 - DNA, 120 bp, synthetic construct
  source 1..120: mol_type = other DNA
ttgtgtctctaaaacatggaatttacccatcaacccctcttctctccccaccctcgatactcagggctcatacgtgagatgctgaaatgcctgattcttttcagtgttgacaataaaccc

SEQ ID NO: 51804 - DNA, 120 bp, synthetic construct
  source 1..120: mol_type = other DNA
tacctaaaaaagaaagaaagaaaaaggaaaaaagaaaataaaaaaagaaacccaaatcgaatcaagcctctaggaaatacaggggaggccaggcgcggtggatcatgcctgtaatcccag

SEQ ID NO: 51805 - DNA, 120 bp, synthetic construct; identical to SEQ ID NO: 14420
  source 1..120: mol_type = other DNA

SEQ ID NO: 51806 - DNA, 120 bp, synthetic construct
  source 1..120: mol_type = other DNA
tgtcgtggcgggcacctgtagtcccagctacttgggaggctgaagcaggagaatcacttgaacccaggaggtggaggttgcggtgagccaagattgggccatttcactccagcctgggca

SEQ ID NO: 51807 - DNA, 120 bp, synthetic construct
  source 1..120: mol_type = other DNA
gagaaagaacagaaaaaaagaaacacaggggagagaggaccaagtttaaaagactgtaagataaaacaatctgccaaatccagactgtgggatattctaccagaaaactgacctgctatt

SEQ ID NO: 51808 - DNA, 120 bp, synthetic construct
  source 1..120: mol_type = other DNA
aaatactgtactctgtacttactgtgtactcgtatgaaccacagattgctggacttgaattaatcagccctaagagacttagggtcaaaagatccaggagtattccctaggaattctcag

SEQ ID NO: 51809 - DNA, 120 bp, synthetic construct; identical to SEQ ID NO: 14421
  source 1..120: mol_type = other DNA

SEQ ID NO: 51810 - DNA, 120 bp, synthetic construct
  source 1..120: mol_type = other DNA
tattttaaaatgcttgggatgggaaaagtctaagcatgatcgaaaagtcaaaaacttgaaactgtaagacaaaaacttactatttttaccataaaataaaaatatctgacagaaaaaaac

SEQ ID NO: 51811 - DNA, 120 bp, synthetic construct
  source 1..120: mol_type = other DNA
gttgcccaggctggagtgcagtggcatcatcatagctcactgcagcctcaaactcctgggcccaagcactcctcccacctcagcctcccaagtagctgggactataggcatgccaatatg

SEQ ID NO: 51812 - DNA, 120 bp, synthetic construct
  source 1..120: mol_type = other DNA
cgagcctggcagaaagaactcttataaattaatattgttactagatgatctatcccagcttctggctaaagccagccccaccaacttatctatggagccccttctctcccacctccttca

SEQ ID NO: 51813 - DNA, 120 bp, synthetic construct
  source 1..120: mol_type = other DNA
ggagtgcagtggcacgatctcggctcactgcaacctccgcctcctgggttcaagcaattaattctcttgcctcagcctcccgagcagctgggattacaggtgtgtgcaactatgctcagc

SEQ ID NO: 51814 - DNA, 120 bp, synthetic construct; identical to SEQ ID NO: 14422
  source 1..120: mol_type = other DNA

SEQ ID NO: 51815 - DNA, 120 bp, synthetic construct
  source 1..120: mol_type = other DNA
catgatctttacctcctctccttgtctcttaaatccatctgtttcaggcttttgtctcttccgtctaatatatttagaggtaactgcaattaatagtctgataaatgtttccagaatttt

SEQ ID NO: 51816 - DNA, 120 bp, synthetic construct
  source 1..120: mol_type = other DNA
aaaaatgataagcctgtgtgacttttataatcaaggagaaaataactgttttcattttagataaagtcgccatctaggcatacagaactacatctgttgttttaaaaatgaagagttaga

SEQ ID NO: 51817 - DNA, 120 bp, synthetic construct
  source 1..120: mol_type = other DNA
agatcaatgttcttctacctagaggttatgatcttttcttgggcagatgacaggcagaaggataaatggtgagtagagggtctcagaagagatcagggataggagaagtccaaatactgc

SEQ ID NO: 51818 - DNA, 120 bp, synthetic construct; identical to SEQ ID NO: 14423
  source 1..120: mol_type = other DNA

SEQ ID NO: 51819 - DNA, 120 bp, synthetic construct
  source 1..120: mol_type = other DNA
agctatcatgacaacttcgtgatggcctataaatatgcatttgctgaattgaatctcacctgaagccaatcatttttgtaagaaagaaaatgacacaaatgtacatgcatggacaggaaa

SEQ ID NO: 51820 - DNA, 120 bp, synthetic construct
  source 1..120: mol_type = other DNA
acttacataataaaaaaattcaatacattcatcaaatgcatgtccaaaaataaaaggatagaaaaggccaacagccagggaggagaaagaagaagcagaaaagtgagaagcaaaggaaag

SEQ ID NO: 51821 - DNA, 120 bp, synthetic construct
  source 1..120: mol_type = other DNA
gccaagtccaatgcaaggcaataataaagaaaaaaaactctttaaatggcattaaatgaaactttaaacggtggaaaattaataacttgttgctgggggtggagatggagtaggctcggc

SEQ ID NO: 51822 - DNA, 120 bp, synthetic construct; identical to SEQ ID NO: 14424
  source 1..120: mol_type = other DNA

SEQ ID NO: 51823 - DNA, 120 bp, synthetic construct
  source 1..120: mol_type = other DNA
agattcgacagccttggccctaccaaaacgcacagctttgttttcaccacacatcactcattgttgagtcttttttgtttttcctctcaagcatccacaggttgaatactgtgtgttccc

SEQ ID NO: 51824 - DNA, 120 bp, synthetic construct
  source 1..120: mol_type = other DNA
tccttgttttaataacttggatcacagtcaaggttgatgtgtttctccattttgcaggatattttcttcagaagagacaaaacagaggccaacagggtaggagaggcttgttcggaaatc

SEQ ID NO: 51825 - DNA, 120 bp, synthetic construct
  source 1..120: mol_type = other DNA
gttttctcccagggacccactttaaaaatctaatttcatttgtttgggggtgagggagaagaaagtactttccgtaaagtaccttctcactgacttaaattgaaatacattctcccattg

SEQ ID NO: 51826 - DNA, 120 bp, synthetic construct; identical to SEQ ID NO: 14425
  source 1..120: mol_type = other DNA

SEQ ID NO: 51827 - DNA, 120 bp, synthetic construct
  source 1..120: mol_type = other DNA
caaggaaagaagacccgaaccagcatttagtggggtttagtctgaggtgcatgatcttttaataaaaaattgataatgcctcttttttatgagtgatatggaaattacatctttcttctc

SEQ ID NO: 51828 - DNA, 120 bp, synthetic construct
  source 1..120: mol_type = other DNA
gtgtctgaatttgtcttcatggaataccttttctcaaatgtattctccatattaatacttttcataccatggcaaaagaaagtaaatccagtatcacaaagaacaatgaccccaacccag

SEQ ID NO: 51829 - DNA, 120 bp, synthetic construct; identical to SEQ ID NO: 14426
  source 1..120: mol_type = other DNA

SEQ ID NO: 51830 - DNA, 120 bp, synthetic construct
  source 1..120: mol_type = other DNA
gtaaagggtatttctaactgtggtcacagtctaaaaggtttccacccatttaagaagctctaatctagggcccaggtcctggagtcagacagaactgattccaacatggctctgccactc

SEQ ID NO: 51831 - DNA, 120 bp, synthetic construct
  source 1..120: mol_type = other DNA
gcccctcacacggcacccaatactgtttatatacatccttagataaatgtccagttcacaaaatggaagcggaaattcgtggatttacagtatgttctacagtgtgagagaagatggtag

SEQ ID NO: 51832 - DNA, 120 bp, synthetic construct
  source 1..120: mol_type = other DNA
tataacagctccctgaataaagttaatattcgagaaatatacatatatattgtgtttgtttgttttgttttgttttgtggaagggtctcactctatcgcccaggctggaatgcagtggcc

SEQ ID NO: 51833 - DNA, 120 bp, synthetic construct; identical to SEQ ID NO: 14427
  source 1..120: mol_type = other DNA

SEQ ID NO: 51834 - DNA, 120 bp, synthetic construct
  source 1..120: mol_type = other DNA
aaaacctgtctctaccaaaaatacaaaaattaaccaggtatggtggcagatgcctgtaatcccagctactcaggaggctgaggcaggagaatcacttgaacccaggaggcagaggttcca

SEQ ID NO: 51835 - DNA, 120 bp, synthetic construct
  source 1..120: mol_type = other DNA
ggaccaatgaaaactcttctcatttttttcttatgtaggattgaacagaacaaattgttcacactttgtgcttcatccttataatacagcttctgcctcctcagcaagtgactaacagta

SEQ ID NO: 51836 - DNA, 120 bp, synthetic construct
  source 1..120: mol_type = other DNA
cagcatgaagaagtttttgaaactgaaatgtactgctcacttcacaatcatgttctgtctatccttgctatttagcttggggaaggttatcaagttctgaggagaggagaaaggagaaaa

SEQ ID NO: 51837 - DNA, 120 bp, synthetic construct
  source 1..120: mol_type = other DNA
aaggtgggcggatcacctgaggtcgggagtttgacaccagactgaccaacatggagaaaccccatctctactaaaaatacaaaattagccgggcgtggtggcacatgcctgtaatcccag

SEQ ID NO: 51838 - DNA, 120 bp, synthetic construct; identical to SEQ ID NO: 14428
  source 1..120: mol_type = other DNA

SEQ ID NO: 51839 - DNA, 120 bp, synthetic construct
  source 1..120: mol_type = other DNA
tacaactctgttgattactgaaggatgaaccaaataacaggactgggcccacacaataaagaagaaaagagggcggctggttgtggagttaaagcagagagaagaaaaagaaacagctac

SEQ ID NO: 51840 - DNA, 120 bp, synthetic construct
  source 1..120: mol_type = other DNA
aaaaacaagtcttttcaaagcctggcctcagacttagggtaagttctccctgagagatttaaaggtaaataaagaagaagcaagttaagactgaaagctttgactgatctaacaggaaca

SEQ ID NO: 51841 - DNA, 120 bp, synthetic construct; identical to SEQ ID NO: 14429
  source 1..120: mol_type = other DNA

SEQ ID NO: 51842 - DNA, 120 bp, synthetic construct
  source 1..120: mol_type = other DNA
ctgcccttctgtccatttcactgagctggagctcccagcagcaactctagaaaagaagaagaggtggggagtggggaatggagcatgcatggatctggcaagccccccagatcccagaat

SEQ ID NO: 51843 - DNA, 120 bp, synthetic construct
  source 1..120: mol_type = other DNA
gcttgggctttggaatcagatctggacttggcatcccagctctagcacttagtaggatgtgaacctgggaagtaacttaaccctctgagcttggtttacttatctgtaaaccaagcagta

SEQ ID NO: 51844 - DNA, 120 bp, synthetic construct
  source 1..120: mol_type = other DNA
acctggaaggacacctgacacgctgcaggcacttcatgagtgttctatgctactgcccatctcttcacacttggtagaaaatgaaaagtgagctctttcaatggtgaaagcaagtcccac

SEQ ID NO: 51845 - DNA, 120 bp, synthetic construct; identical to SEQ ID NO: 14430
  source 1..120: mol_type = other DNA

SEQ ID NO: 51846 - DNA, 120 bp, synthetic construct
  source 1..120: mol_type = other DNA
aacaacccacatttatgtttttgaaaatttaatactgaacacaactcaccaactaggggaaggaggaaagcgttctaatgtcacagagagctttgccctttcttctaaaactgtactttc

SEQ ID NO: 51847 - DNA, 120 bp, synthetic construct
  source 1..120: mol_type = other DNA
catgcattcaagctgggatgtcatttggtataaattgtcactgttagaaaaacatctagagttagaaacacataaccacaaaataatacacaactgtttcttcaaaagcaatggagtttt

SEQ ID NO: 51848 - DNA, 120 bp, synthetic construct
  source 1..120: mol_type = other DNA
ggatgtgagagtaactcagaagcattttttaaaacctttgtatagcaactattgaagtttctaaagaagtattaaacctttgaggggaaaaggctaaggggagtgaaactttgaaaggca

SEQ ID NO: 51849 - DNA, 120 bp, synthetic construct; identical to SEQ ID NO: 14431
  source 1..120: mol_type = other DNA

SEQ ID NO: 51850 - DNA, 120 bp, synthetic construct
  source 1..120: mol_type = other DNA
ctatgtaaaccaacaaaaagctgttctgtcccctctgtatttatctcattcctagaaaattagcacatgaatcaattgccagaaatctcctaaattaccaagctccatcaggaataaatt

SEQ ID NO: 51851 - DNA, 120 bp, synthetic construct
  source 1..120: mol_type = other DNA
aatgaaaaaagataagaggcatttaatatccgatgtgtggtatcagattgcagatataggaccatctctgtctggtcatggcattcttttaagctgcttcactgggcagaggcaacacca

SEQ ID NO: 51852 - DNA, 120 bp, synthetic construct
  source 1..120: mol_type = other DNA
aaatcatggcagagtccatctgactctcatataataactctgaaaattatttggaactccttagtggtgggtacacaggataaggaggaaatcagattccaggagggaattttgcatatg

SEQ ID NO: 51853 - DNA, 120 bp, synthetic construct; identical to SEQ ID NO: 14432
  source 1..120: mol_type = other DNA

SEQ ID NO: 51854 - DNA, 120 bp, synthetic construct
  source 1..120: mol_type = other DNA
tactggtttttgttctcctgcgccttttcatcaagcaatccatttattaatcttaccattaatctcagccaacaggcattgtattccccaggcagctctatatttttgtcactaattttt

SEQ ID NO: 51855 - DNA, 120 bp, synthetic construct
  source 1..120: mol_type = other DNA
tcaagagaactgggaaagaaagatgagtgacagacgctgatgcagaagggtgaatgaatcccaaatatctaactttatgagttggaaattttctcacagacttaaagaatagtctggttg

SEQ ID NO: 51856 - DNA, 120 bp, synthetic construct
  source 1..120: mol_type = other DNA
cctcagtctcccatgcgcaagcaattctcctgcctcagccacccaagtagctgggactacaggcatctgccaccatgcccggctaatttttgtatttttagtagacatggggtttcacca

SEQ ID NO: 51857 - DNA, 120 bp, synthetic construct; identical to SEQ ID NO: 14433
  source 1..120: mol_type = other DNA

SEQ ID NO: 51858 - DNA, 120 bp, synthetic construct
  source 1..120: mol_type = other DNA
tgtgttatgtttctattggacagtgatgttctataagttttgggacattgagcaaatcagttcagctccctgcccctcagttttctcatctgttcaatgggaatattaatctccatcagt

SEQ ID NO: 51859 - DNA, 120 bp, synthetic construct
  source 1..120: mol_type = other DNA
ttaattactttaatttgttctaacctaccaaattttgcacagcactttcacacattctcaatactgctcacaactttgtgaggcagatgtaattctgagtccccatttattagatgaggg

SEQ ID NO: 51860 - DNA, 120 bp, synthetic construct
  source 1..120: mol_type = other DNA
aacaataatacagacaagagtctggaggtgaaagagaatatgctcaagggagcatcatgacctactcagtctctagaaaatgacgatgctgcaagatgccccatgtgtcctcttcagctc

SEQ ID NO: 51861 - DNA, 120 bp, synthetic construct
  source 1..120: mol_type = other DNA
ggactttcagaaaatccccaagctactaataggtttcctgaggccagagataggatcagagcacagttttaaccacatcctgccttttgctggctggggctcctcagctgctcagtcagt

SEQ ID NO: 51862 - DNA, 120 bp, synthetic construct; identical to SEQ ID NO: 14434
  source 1..120: mol_type = other DNA

SEQ ID NO: 51863 - DNA, 120 bp, synthetic construct
  source 1..120: mol_type = other DNA
ggaagtgaactttcaaattgcaggctgccaaaatgtattccaaaagtcatggtgtcctttatattttttaagtagattttttttaaagtcacttgtttcctatgtaagaatgtttgaagt

SEQ ID NO: 51864 - DNA, 120 bp, synthetic construct
  source 1..120: mol_type = other DNA
atatagagtttgttttggcctgaactgcagtattattaagttctcgacctctgcacaaaaagaaaggaagaaaaaaagcctcagctgttatctagatgagaactcctccactcttcaaac

SEQ ID NO: 51865 - DNA, 120 bp, synthetic construct; identical to SEQ ID NO: 14435
  source 1..120: mol_type = other DNA

SEQ ID NO: 51866 - DNA, 120 bp, synthetic construct
  source 1..120: mol_type = other DNA
cctttgaggtgctttgcagcctgcctgcctagaaatttctgcccagcaggccataatgaataattatttcacagtcactctcttggtattgtaatttctctcaagctcaccagctaacca

SEQ ID NO: 51867 - DNA, 120 bp, synthetic construct
  source 1..120: mol_type = other DNA
ggctttgataacattgcccatcaccctggaagccgtttcagaccttccaccttctgcctatcattgcaggaaacaaatattgattttctactaagggaaaaggcagtgtacaatgtacat

SEQ ID NO: 51868 - DNA, 120 bp, synthetic construct
  source 1..120: mol_type = other DNA
agttatggaacccaagatttcccagaaactctatggctgctgaggaagtttctctcatatgaaaaataatctacttgtaacaggctccactgtcaatgtcaccatttgtgaatcatcaca

SEQ ID NO: 51869 - DNA, 120 bp, synthetic construct; identical to SEQ ID NO: 14436
  source 1..120: mol_type = other DNA

SEQ ID NO: 51870 - DNA, 120 bp, synthetic construct
  source 1..120: mol_type = other DNA
agctgccttttctaggtagaaattaggggggaaattgtgcctagtaaggttggaccccactactccctacactgacagaagaacttttccctggtaccttccctctgggcaagcccaaac

SEQ ID NO: 51871 - DNA, 120 bp, synthetic construct
  source 1..120: mol_type = other DNA
taaagacaaaactggaggagtctggagtttgaaagacaactgctctgtgtgttagaacttcaggagaatgctcaagcctgcttctgataatggccttcagggaaaacgctgtcccaaacc

SEQ ID NO: 51872 - DNA, 120 bp, synthetic construct
  source 1..120: mol_type = other DNA
gataactgacttctttcacaactgtgggaaataggagaccatccttgagtgagactgaggacagatgccaccttcacaaagagaatggcacttatccatctagagagaaagcaagtgcag

SEQ ID NO: 51873 - DNA, 120 bp, synthetic construct; identical to SEQ ID NO: 14437
  source 1..120: mol_type = other DNA

SEQ ID NO: 51874 - DNA, 120 bp, synthetic construct
  source 1..120: mol_type = other DNA
ggtggatcacaaggtcaggagtttgagaccatcctggctaacacggtgaaaccccctctctactaaaaatacaaaaaattagccaggcgtggtggcacatgcctgtagtcccagctactt

SEQ ID NO: 51875 - DNA, 120 bp, synthetic construct
  source 1..120: mol_type = other DNA
aaaaaagtgatacattgcctatacaaggggagtaatcagatagggaatcctgcgtggtctggtgtcactcagtgattcagagcacagctgggctgtgaagtcagagagactaaggatcaa

SEQ ID NO: 51876 - DNA, 120 bp, synthetic construct
  source 1..120: mol_type = other DNA
acctgcctcaacgagtagtcaaaagggttaaatgggtaaactgagtgaaccatttaacgtcatgcacagcaacatatagtcagcatgcaataaattccagttattacattataaggactc

SEQ ID NO: 51877 - DNA, 120 bp, synthetic construct; identical to SEQ ID NO: 14438
  source 1..120: mol_type = other DNA

SEQ ID NO: 51878 - DNA, 120 bp, synthetic construct
  source 1..120: mol_type = other DNA
tgggattttgagaatgtcctcaaagcacactccacactgtattttgcttatttaatgtcagatctgtaccattacctttctttagactgacaagggaaagtatatccaaagactgggaag

SEQ ID NO: 51879 - DNA, 120 bp, synthetic construct
  source 1..120: mol_type = other DNA
taaaaatacaaaaattagctgggcatggtggccagcacctataatctcagctacttgggaggctgaggcacaagaatcacttgaatctgggagatggagttgcagtgagccaagattgtg

SEQ ID NO: 51880 - DNA, 120 bp, synthetic construct
  source 1..120: mol_type = other DNA
ctcagagggtcaaatgcaacaaggcaaacaaaatacaagcaagctttccccagaaagtcccaaactttagagagaaaaaatgaatgaaaccagggaccagtagaagcaccactgaatacc

SEQ ID NO: 51881 - DNA, 120 bp, synthetic construct; identical to SEQ ID NO: 14439
  source 1..120: mol_type = other DNA

SEQ ID NO: 51882 - DNA, 120 bp, synthetic construct
  source 1..120: mol_type = other DNA
agcacaaattccaagggaacaaactcttcctacaggggtcacaaattcttttttgagatgttactacttgggaaattttctgtgagagggaaaaatagtatttttattggatttgtgtaa

SEQ ID NO: 51883 - DNA, 120 bp, synthetic construct
  source 1..120: mol_type = other DNA
gaaaacgtgaaaatttatgtgatgtttcctacttccctagcaaccacaaaatcagacctaagtcaaaatccaccataggcaccctggagaattgctattaaaccagtggtaatgatcgct

SEQ ID NO: 51884 - DNA, 120 bp, synthetic construct
  source 1..120: mol_type = other DNA
ctgaggcaccagactgcaaggtcttccagtccccaacccccaagaacacctcccatatcgacagtgcccactcccgcatcaaggtcttctctcagcctagtgtgacacaccaactgagtc

SEQ ID NO: 51885 - DNA, 120 bp, synthetic construct
  source 1..120: mol_type = other DNA
cacaagaagaatggcaatggccccgctgccagttttgctagggaaggagattcacctcagagaataggtgcgaatcctgcccccattccaaagactttacccaccgaagggaggcgctga

SEQ ID NO: 51886 - DNA, 120 bp, synthetic construct; identical to SEQ ID NO: 14440
  source 1..120: mol_type = other DNA

SEQ ID NO: 51887 - DNA, 120 bp, synthetic construct
  source 1..120: mol_type = other DNA
cgggactggacagtcccccaggcgcggccactcccccacccaatctcccagggcaggcgcttttccttccttcatgacctcactacctccttcccttgacgtcagccccgggtccccgcg

SEQ ID NO: 51888 - DNA, 120 bp, synthetic construct
  source 1..120: mol_type = other DNA
tgctgctccccggcccccgccccaacttccagccccgtgcgggctggtgtgcgccgcagttactaggcaaccctatcgcagacgcgggcggccggccaagttcacccaaagttgaagaaa

SEQ ID NO: 51889 - DNA, 120 bp, synthetic construct; identical to SEQ ID NO: 14441
  source 1..120: mol_type = other DNA

SEQ ID NO: 51890 - DNA, 120 bp, synthetic construct
  source 1..120: mol_type = other DNA
accgagtgggagtggactccgtgtttaatatttagtcccgatgaaggtaaattcctcccagtaaagaccttctaaaaataataacttctcgagcgccgctccttcttcagctcgaaagag

SEQ ID NO: 51891 - DNA, 120 bp, synthetic construct
  source 1..120: mol_type = other DNA
cgcagtcagggctgcccggctggggcgttcccaagtccgccggctcatgcgtcccctccggggtcccaaggacccagacgcagagcccagcgccttcctacctgctgtagggcgtcctca

SEQ ID NO: 51892 - DNA, 120 bp, synthetic construct
  source 1..120: mol_type = other DNA
cccaagggctcggggtgcgaggctgcgggcaggggttgggggagacacgagatcctgagcctggggcactggggcctggatgagcggcgtgcagagcgaggccgtccagaatgcaagaag

SEQ ID NO: 51893 - DNA, 120 bp, synthetic construct; identical to SEQ ID NO: 14442
  source 1..120: mol_type = other DNA

SEQ ID NO: 51894 - DNA, 120 bp, synthetic construct
  source 1..120: mol_type = other DNA
tgtgaccgtagctgggcgtcccgtcgaaggtgaccgtgctgtaacctgcgggagcggcggagagaagcacagtgtcagcggtgctctcgcaagacggggcagtgggtctgaaccagccac

SEQ ID NO: 51895 - DNA, 120 bp, synthetic construct
  source 1..120: mol_type = other DNA
acaggcttctccatccttttctgactaaaacccccacctcgctttttcccaatttatttatgccgcagtcttctacggtctctgccgcttctgcagcgaacccctggcaaattaagtata

SEQ ID NO: 51896 - DNA, 120 bp, synthetic construct
  source 1..120: mol_type = other DNA
gagctgtaaatcaggggcccgcgcaccaactttcattaattactcggagccagttaaatggcctggtcttaaaaatgggaagagtaattaccgagtaatgttatctgtctggggctaccc

SEQ ID NO: 51897 - DNA, 120 bp, synthetic construct
  source 1..120: mol_type = other DNA
tgcgcccaggggtccgaccctgaccactgctgtaggagccaacttcctcactccccaggctggacaaccaatttcctttagagtgtgcctgacactgtatctccctttccctccatggta

SEQ ID NO: 51898 - DNA, 120 bp, synthetic construct; identical to SEQ ID NO: 14443
  source 1..120: mol_type = other DNA

SEQ ID NO: 51899 - DNA, 120 bp, synthetic construct
  source 1..120: mol_type = other DNA
gccctgggtctccaaacttcacaaaattctcaggagtaaattgggtcaaacagcacccattctcccactcttgcactatttgaccaaagtgcctccaaagacttaagcaggactcagccg

SEQ ID NO: 51900 - DNA, 120 bp, synthetic construct
  source 1..120: mol_type = other DNA
tctggggcaacagaggcatgagcctggagggtggtgtggcagagtgcaagggagggaaggagggggcaaatcctaactcccggatagtacaggtccaggcttaagtctcacacactgctc

SEQ ID NO: 51901 - DNA, 120 bp, synthetic construct; identical to SEQ ID NO: 14444
  source 1..120: mol_type = other DNA

SEQ ID NO: 51902 - DNA, 120 bp, synthetic construct
  source 1..120: mol_type = other DNA
aatagaagctacgaagaagttttctctagacgaacccttctccattcctgagcccaggagtaggcagggacccagggcactgcacaatcctcagagccctgctccgcaactgtccgtgcc

SEQ ID NO: 51903 - DNA, 120 bp, synthetic construct
  source 1..120: mol_type = other DNA
gacacgcagacctcggcgggcaaagaccggcctcaaaccctctccttcaggtccccccgggaggggcagtggtgaaagcgcctgcggagcggagggaggtctcttttaattagaagctta

SEQ ID NO: 51904 - DNA, 120 bp, synthetic construct
  source 1..120: mol_type = other DNA
aaggctccttgtacaggccttggagggagagaatcgagtggccaaggtagcgcctttcccacggttagtcccggcccgggaggggagcgcaaccttgaccgtgcgctaagaggcgagacg

SEQ ID NO: 51905 - DNA, 120 bp, synthetic construct; identical to SEQ ID NO: 14445
  source 1..120: mol_type = other DNA

SEQ ID NO: 51906 - DNA, 120 bp, synthetic construct
  source 1..120: mol_type = other DNA
gagacggagtttcgctctgtcgcccaggctgcagtgcagtggcgcgatctcagctcacttcaacctcagcctcccgggttcaaacgattcttgtgcctcagcctcccgagtagctgggat

SEQ ID NO: 51907 - DNA, 120 bp, synthetic construct
  source 1..120: mol_type = other DNA
gagccaccgcgtccggcccaagcaagcttttttcccctcctccttaagccttgcatctagtctggggctactcaagtcctcaccccacatctgccctcacaaacccgtcaacccccacac

SEQ ID NO: 51908 - DNA, 120 bp, synthetic construct
  source 1..120: mol_type = other DNA
ctgccacctaatctcatagaacctggatttcctcatccaaaacaaggggcctctccaggattagctggtgagcttcttgcaaaggttctcgaggccattgtcttaattaatattcagaac

SEQ ID NO: 51909 - DNA, 120 bp, synthetic construct; identical to SEQ ID NO: 14446
  source 1..120: mol_type = other DNA

SEQ ID NO: 51910 - DNA, 120 bp, synthetic construct
  source 1..120: mol_type = other DNA
accctggaaatccaaagaataaacccagaatctcgagggccacccttgcccactccaggatagcagccggagcgcttctcacatccaagctgcccaatgagcctcaagggctgggtaaga

SEQ ID NO: 51911 - DNA, 120 bp, synthetic construct
  source 1..120: mol_type = other DNA
gatacattcacctactagtcctggtccccttttaactttttctccatggcagccacgcctgtatattacagaagaatccagatattttccagaagtgtaatgcctgctggctgcaaaacc

SEQ ID NO: 51912 - DNA, 120 bp, synthetic construct
  source 1..120: mol_type = other DNA
actaaaaagataatggcgtagtagtattttgtgccccaggggcatggattcgatggtttctcaaccgcctccaaatagcacacatgcagacagtgctctcggattcattgtttctcagtc

SEQ ID NO: 51913 - DNA, 120 bp, synthetic construct; identical to SEQ ID NO: 14447
  source 1..120: mol_type = other DNA

SEQ ID NO: 51914 - DNA, 120 bp, synthetic construct
  source 1..120: mol_type = other DNA
aaagggcggtttcgatttctccaaggcttcgcgggggccgggtgctcctggttaggctaaggtaggagcggcctgaagacgcgcgtttagaaggcgcgggtgaaggcgggcaacaagggc

SEQ ID NO: 51915 - DNA, 120 bp, synthetic construct
  source 1..120: mol_type = other DNA
atccgccattgtattagtaaagcgtttactaaattaccgaatcaaaccgaactggcttaggttctcaatagcgtggaaatccactgaaaataaatgaagagggcaaactacaggggctcc

SEQ ID NO: 51916 - DNA, 120 bp, synthetic construct
  source 1..120: mol_type = other DNA
gcgaataaccctgtccttgttctaaccccaggtcttgaagaaatactgtcccagctgagccccgcgtttacaagatgaagaggcgccccagatgcgctgaaagaaaggccaaagctcgtg

SEQ ID NO: 51917 - DNA, 120 bp, synthetic construct; identical to SEQ ID NO: 14448
  source 1..120: mol_type = other DNA

SEQ ID NO: 51918 - DNA, 120 bp, synthetic construct
  source 1..120: mol_type = other DNA
tcacccccgcgctggtcccactccgaatccagagtccagacgtctgaaaagcgctacgcttggtgacaatttggcgtttccttaattaacaaaactctccccaaggcagagccagacact

SEQ ID NO: 51919 - DNA, 120 bp, synthetic construct
  source 1..120: mol_type = other DNA
tttggaggatgtcgggggccagtgcctgcgtgcactcccactctccggcctcctccccagccgccgcttccgctatcctcacggcccttgggaagcagctgggtaagagctgcggtcaaa

SEQ ID NO: 51920 - DNA, 120 bp, synthetic construct
  source 1..120: mol_type = other DNA
cttaccctgattgcgaatagcgggctggctctcgaggcagctgggcaggtagggcgcgttaggaaacatcctggcctggccggatgacgcctggctgggcggaggaggaccgaagggccc

SEQ ID NO: 51921 - DNA, 120 bp, synthetic construct
  source 1..120: mol_type = other DNA
gtgaggcggcggcggcgggggtggcggcggagccggtggcggcgcggggccgcccaacgacccgtaagccgaagcgcccgggggcgcaaagtccagcaccggcgcccactgcgccgcgcc

SEQ ID NO: 51922 - DNA, 120 bp, synthetic construct; identical to SEQ ID NO: 14449
  source 1..120: mol_type = other DNA

SEQ ID NO: 51923 - DNA, 120 bp, synthetic construct
  source 1..120: mol_type = other DNA
gggtgggtgggtgggtgaatgagtaggtgggagggagggcgggaagtgggggagcggacaggcggtcgggttgcggagagcccccgggtgtgggcgctgccttgaactccttaccccagc

SEQ ID NO: 51924 - DNA, 120 bp, synthetic construct; identical to SEQ ID NO: 21970
  source 1..120: mol_type = other DNA

SEQ ID NO: 51925 - DNA, 120 bp, synthetic construct; identical to SEQ ID NO: 21971
  source 1..120: mol_type = other DNA

SEQ ID NO: 51926 - DNA, 120 bp, synthetic construct; identical to SEQ ID NO: 2
  source 1..120: mol_type = other DNA

SEQ ID NO: 51927 - DNA, 120 bp, synthetic construct; identical to SEQ ID NO: 21973
  source 1..120: mol_type = other DNA

SEQ ID NO: 51928 - DNA, 120 bp, synthetic construct; identical to SEQ ID NO: 21974
  source 1..120: mol_type = other DNA

SEQ ID NO: 51929 - DNA, 120 bp, synthetic construct; identical to SEQ ID NO: 21975
  source 1..120: mol_type = other DNA

SEQ ID NO: 51930 - DNA, 120 bp, synthetic construct; identical to SEQ ID NO: 21976
  source 1..120: mol_type = other DNA

SEQ ID NO: 51931 - DNA, 120 bp, synthetic construct; identical to SEQ ID NO: 6938
  source 1..120: mol_type = other DNA

SEQ ID NO: 51932 - DNA, 120 bp, synthetic construct; identical to SEQ ID NO: 21978
  source 1..120: mol_type = other DNA

SEQ ID NO: 51933 - DNA, 120 bp, synthetic construct; identical to SEQ ID NO: 21979
  source 1..120: mol_type = other DNA

SEQ ID NO: 51934 - DNA, 120 bp, synthetic construct; identical to SEQ ID NO: 21980
  source 1..120: mol_type = other DNA

SEQ ID NO: 51935 - DNA, 120 bp, synthetic construct; identical to SEQ ID NO: 6939
  source 1..120: mol_type = other DNA

SEQ ID NO: 51936 - DNA, 120 bp, synthetic construct; identical to SEQ ID NO: 21982
  source 1..120: mol_type = other DNA

SEQ ID NO: 51937 - DNA, 120 bp, synthetic construct; identical to SEQ ID NO: 21983
  source 1..120: mol_type = other DNA

SEQ ID NO: 51938 - DNA, 120 bp, synthetic construct; identical to SEQ ID NO: 6940
  source 1..120: mol_type = other DNA

SEQ ID NO: 51939 - DNA, 120 bp, synthetic construct; identical to SEQ ID NO: 21985
  source 1..120: mol_type = other DNA

SEQ ID NO: 51940 - DNA, 120 bp, synthetic construct; identical to SEQ ID NO: 21986
  source 1..120: mol_type = other DNA

SEQ ID NO: 51941 - DNA, 120 bp, synthetic construct; identical to SEQ ID NO: 21987
  source 1..120: mol_type = other DNA

SEQ ID NO: 51942 - DNA, 120 bp, synthetic construct; identical to SEQ ID NO: 21988
  source 1..120: mol_type = other DNA

SEQ ID NO: 51943 - DNA, 120 bp, synthetic construct; identical to SEQ ID NO: 6941
  source 1..120: mol_type = other DNA

SEQ ID NO: 51944 - DNA, 120 bp, synthetic construct; identical to SEQ ID NO: 21990
  source 1..120: mol_type = other DNA

SEQ ID NO: 51945 - DNA, 120 bp, synthetic construct; identical to SEQ ID NO: 21991
  source 1..120: mol_type = other DNA

SEQ ID NO: 51946 - DNA, 120 bp, synthetic construct; identical to SEQ ID NO: 21992
  source 1..120: mol_type = other DNA

SEQ ID NO: 51947 - DNA, 120 bp, synthetic construct; identical to SEQ ID NO: 6942
  source 1..120: mol_type = other DNA

SEQ ID NO: 51948 - DNA, 120 bp, synthetic construct; identical to SEQ ID NO: 21994
  source 1..120: mol_type = other DNA

SEQ ID NO: 51949 - DNA, 120 bp, synthetic construct; identical to SEQ ID NO: 21995
  source 1..120: mol_type = other DNA

SEQ ID NO: 51950 - DNA, 120 bp, synthetic construct; identical to SEQ ID NO: 6943
  source 1..120: mol_type = other DNA

SEQ ID NO: 51951 - DNA, 120 bp, synthetic construct; identical to SEQ ID NO: 21997
  source 1..120: mol_type = other DNA

SEQ ID NO: 51952 - DNA, 120 bp, synthetic construct; identical to SEQ ID NO: 21998
  source 1..120: mol_type = other DNA

SEQ ID NO: 51953 - DNA, 120 bp, synthetic construct; identical to SEQ ID NO: 21999
  source 1..120: mol_type = other DNA

SEQ ID NO: 51954 - DNA, 120 bp, synthetic construct; identical to SEQ ID NO: 22000
  source 1..120: mol_type = other DNA

SEQ ID NO: 51955 - DNA, 120 bp, synthetic construct; identical to SEQ ID NO: 6944
  source 1..120: mol_type = other DNA

SEQ ID NO: 51956 - DNA, 120 bp, synthetic construct; identical to SEQ ID NO: 22002
  source 1..120: mol_type = other DNA

SEQ ID NO: 51957 - DNA, 120 bp, synthetic construct; identical to SEQ ID NO: 22003
  source 1..120: mol_type = other DNA

SEQ ID NO: 51958 - DNA, 120 bp, synthetic construct; identical to SEQ ID NO: 6945
  source 1..120: mol_type = other DNA

SEQ ID NO: 51959 - DNA, 120 bp, synthetic construct; identical to SEQ ID NO: 22005
  source 1..120: mol_type = other DNA

SEQ ID NO: 51960 - DNA, 120 bp, synthetic construct; identical to SEQ ID NO: 22006
  source 1..120: mol_type = other DNA

SEQ ID NO: 51961 - DNA, 120 bp, synthetic construct; identical to SEQ ID NO: 22007
  source 1..120: mol_type = other DNA

SEQ ID NO: 51962 - DNA, 120 bp, synthetic construct; identical to SEQ ID NO: 22008
  source 1..120: mol_type = other DNA

SEQ ID NO: 51963 - DNA, 120 bp, synthetic construct; identical to SEQ ID NO: 6946
  source 1..120: mol_type = other DNA

SEQ ID NO: 51964 - DNA, 120 bp, synthetic construct; identical to SEQ ID NO: 22010
  source 1..120: mol_type = other DNA

SEQ ID NO: 51965 - DNA, 120 bp, synthetic construct; identical to SEQ ID NO: 22011
  source 1..120: mol_type = other DNA

SEQ ID NO: 51966 - DNA, 120 bp, synthetic construct; identical to SEQ ID NO: 6947
  source 1..120: mol_type = other DNA

SEQ ID NO: 51967 - DNA, 120 bp, synthetic construct; identical to SEQ ID NO: 22013
  source 1..120: mol_type = other DNA

SEQ ID NO: 51968 - DNA, 120 bp, synthetic construct; identical to SEQ ID NO: 4
  source 1..120: mol_type = other DNA

SEQ ID NO: 51969 - DNA, 120 bp, synthetic construct; identical to SEQ ID NO: 22015
  source 1..120: mol_type = other DNA

SEQ ID NO: 51970 - DNA, 120 bp, synthetic construct; identical to SEQ ID NO: 22016
  source 1..120: mol_type = other DNA

SEQ ID NO: 51971 - DNA, 120 bp, synthetic construct; identical to SEQ ID NO: 6948
  source 1..120: mol_type = other DNA

SEQ ID NO: 51972 - DNA, 120 bp, synthetic construct; identical to SEQ ID NO: 22018
  source 1..120: mol_type = other DNA

SEQ ID NO: 51973 - DNA, 120 bp, synthetic construct; identical to SEQ ID NO: 22019
  source 1..120: mol_type = other DNA

SEQ ID NO: 51974 - DNA, 120 bp, synthetic construct; identical to SEQ ID NO: 6949
  source 1..120: mol_type = other DNA

SEQ ID NO: 51975 - DNA, 120 bp, synthetic construct; identical to SEQ ID NO: 22021
  source 1..120: mol_type = other DNA

SEQ ID NO: 51976 - DNA, 120 bp, synthetic construct; identical to SEQ ID NO: 22022
  source 1..120: mol_type = other DNA

SEQ ID NO: 51977 - DNA, 120 bp, synthetic construct; identical to SEQ ID NO: 22023
  source 1..120: mol_type = other DNA

SEQ ID NO: 51978 - DNA, 120 bp, synthetic construct; identical to SEQ ID NO: 6950
  source 1..120: mol_type = other DNA

SEQ ID NO: 51979 - DNA, 120 bp, synthetic construct; identical to SEQ ID NO: 22025
  source 1..120: mol_type = other DNA

SEQ ID NO: 51980 - DNA, 120 bp, synthetic construct; identical to SEQ ID NO: 22026
  source 1..120: mol_type = other DNA

SEQ ID NO: 51981 - DNA, 120 bp, synthetic construct; identical to SEQ ID NO: 22027
  source 1..120: mol_type = other DNA

SEQ ID NO: 51982 - DNA, 120 bp, synthetic construct; identical to SEQ ID NO: 22028
  source 1..120: mol_type = other DNA

SEQ ID NO: 51983 - DNA, 120 bp, synthetic construct; identical to SEQ ID NO: 6951
  source 1..120: mol_type = other DNA

SEQ ID NO: 51984 - DNA, 120 bp, synthetic construct; identical to SEQ ID NO: 22030
  source 1..120: mol_type = other DNA

SEQ ID NO: 51985 - DNA, 120 bp, synthetic construct; identical to SEQ ID NO: 22031
  source 1..120: mol_type = other DNA

SEQ ID NO: 51986 - DNA, 120 bp, synthetic construct; identical to SEQ ID NO: 6952
  source 1..120: mol_type = other DNA

SEQ ID NO: 51987 - DNA, 120 bp, synthetic construct; identical to SEQ ID NO: 22033
  source 1..120: mol_type = other DNA

SEQ ID NO: 51988 - DNA, 120 bp, synthetic construct; identical to SEQ ID NO: 22034
  source 1..120: mol_type = other DNA

SEQ ID NO: 51989 - DNA, 120 bp, synthetic construct; identical to SEQ ID NO: 22035
  source 1..120: mol_type = other DNA

SEQ ID NO: 51990 - DNA, 120 bp, synthetic construct; identical to SEQ ID NO: 6953
  source 1..120: mol_type = other DNA

SEQ ID NO: 51991 - DNA, 120 bp, synthetic construct; identical to SEQ ID NO: 22037
  source 1..120: mol_type = other DNA

SEQ ID NO: 51992 - DNA, 120 bp, synthetic construct; identical to SEQ ID NO: 22038
  source 1..120: mol_type = other DNA

SEQ ID NO: 51993 - DNA, 120 bp, synthetic construct; identical to SEQ ID NO: 22039
  source 1..120: mol_type = other DNA

SEQ ID NO: 51994 - DNA, 120 bp, synthetic construct; identical to SEQ ID NO: 6954
  source 1..120: mol_type = other DNA

SEQ ID NO: 51995 - DNA, 120 bp, synthetic construct; identical to SEQ ID NO: 22041
  source 1..120: mol_type = other DNA

SEQ ID NO: 51996 - DNA, 120 bp, synthetic construct; identical to SEQ ID NO: 22042
  source 1..120: mol_type = other DNA

SEQ ID NO: 51997 - DNA, 120 bp, synthetic construct; identical to SEQ ID NO: 22043
  source 1..120: mol_type = other DNA

SEQ ID NO: 51998 - DNA, 120 bp, synthetic construct; identical to SEQ ID NO: 6955
  source 1..120: mol_type = other DNA

SEQ ID NO: 51999 - DNA, 120 bp, synthetic construct; identical to SEQ ID NO: 22045
  source 1..120: mol_type = other DNA

SEQ ID NO: 52000 - DNA, 120 bp, synthetic construct; identical to SEQ ID NO: 22046
  source 1..120: mol_type = other DNA

SEQ ID NO: 52001 - DNA, 120 bp, synthetic construct; identical to SEQ ID NO: 22047
  source 1..120: mol_type = other DNA

SEQ ID NO: 52002 - DNA, 120 bp, synthetic construct; identical to SEQ ID NO: 22048
  source 1..120: mol_type = other DNA

SEQ ID NO: 52003 - DNA, 120 bp, synthetic construct; identical to SEQ ID NO: 6956
  source 1..120: mol_type = other DNA

SEQ ID NO: 52004 - DNA, 120 bp, synthetic construct; identical to SEQ ID NO: 22050
  source 1..120: mol_type = other DNA

SEQ ID NO: 52005 - DNA, 120 bp, synthetic construct; identical to SEQ ID NO: 22051
  source 1..120: mol_type = other DNA

SEQ ID NO: 52006 - DNA, 120 bp, synthetic construct; identical to SEQ ID NO: 22052
  source 1..120: mol_type = other DNA

SEQ ID NO: 52007 - DNA, 120 bp, synthetic construct; identical to SEQ ID NO: 6957
  source 1..120: mol_type = other DNA

SEQ ID NO: 52008 - DNA, 120 bp, synthetic construct; identical to SEQ ID NO: 22054
  source 1..120: mol_type = other DNA

SEQ ID NO: 52009 - DNA, 120 bp, synthetic construct; identical to SEQ ID NO: 22055
  source 1..120: mol_type = other DNA

SEQ ID NO: 52010 - DNA, 120 bp, synthetic construct; identical to SEQ ID NO: 6958
  source 1..120: mol_type = other DNA

SEQ ID NO: 52011 - DNA, 120 bp, synthetic construct; identical to SEQ ID NO: 22057
  source 1..120: mol_type = other DNA

SEQ ID NO: 52012 - DNA, 120 bp, synthetic construct; identical to SEQ ID NO: 22058
  source 1..120: mol_type = other DNA

SEQ ID NO: 52013 - DNA, 120 bp, synthetic construct; identical to SEQ ID NO: 22059
  source 1..120: mol_type = other DNA

SEQ ID NO: 52014 - DNA, 120 bp, synthetic construct; identical to SEQ ID NO: 22060
  source 1..120: mol_type = other DNA

SEQ ID NO: 52015 - DNA, 120 bp, synthetic construct; identical to SEQ ID NO: 6959
  source 1..120: mol_type = other DNA

SEQ ID NO: 52016 - DNA, 120 bp, synthetic construct; identical to SEQ ID NO: 22062
  source 1..120: mol_type = other DNA

SEQ ID NO: 52017 - DNA, 120 bp, synthetic construct; identical to SEQ ID NO: 22063
  source 1..120: mol_type = other DNA

SEQ ID NO: 52018 - DNA, 120 bp, synthetic construct; identical to SEQ ID NO: 6960
  source 1..120: mol_type = other DNA

SEQ ID NO: 52019 - DNA, 120 bp, synthetic construct; identical to SEQ ID NO: 22065
  source 1..120: mol_type = other DNA

SEQ ID NO: 52020 - DNA, 120 bp, synthetic construct; identical to SEQ ID NO: 22066
  source 1..120: mol_type = other DNA

SEQ ID NO: 52021 - DNA, 120 bp, synthetic construct; identical to SEQ ID NO: 22067
  source 1..120: mol_type = other DNA

SEQ ID NO: 52022 - DNA, 120 bp, synthetic construct; identical to SEQ ID NO: 6961
  source 1..120: mol_type = other DNA

SEQ ID NO: 52023 - DNA, 120 bp, synthetic construct; identical to SEQ ID NO: 22069
  source 1..120: mol_type = other DNA

SEQ ID NO: 52024 - DNA, 120 bp, synthetic construct; identical to SEQ ID NO: 22070
  source 1..120: mol_type = other DNA

SEQ ID NO: 52025 - DNA, 120 bp, synthetic construct; identical to SEQ ID NO: 22071
  source 1..120: mol_type = other DNA

SEQ ID NO: 52026 - DNA, 120 bp, synthetic construct; identical to SEQ ID NO: 6962
  source 1..120: mol_type = other DNA

SEQ ID NO: 52027 - DNA, 120 bp, synthetic construct; identical to SEQ ID NO: 22073
  source 1..120: mol_type = other DNA

SEQ ID NO: 52028 - DNA, 120 bp, synthetic construct; identical to SEQ ID NO: 22074
  source 1..120: mol_type = other DNA

SEQ ID NO: 52029 - DNA, 120 bp, synthetic construct; identical to SEQ ID NO: 22075
  source 1..120: mol_type = other DNA

SEQ ID NO: 52030 - DNA, 120 bp, synthetic construct; identical to SEQ ID NO: 6963
  source 1..120: mol_type = other DNA

SEQ ID NO: 52031 - DNA, 120 bp, synthetic construct; identical to SEQ ID NO: 22077
  source 1..120: mol_type = other DNA

SEQ ID NO: 52032 - DNA, 120 bp, synthetic construct; identical to SEQ ID NO: 22078
  source 1..120: mol_type = other DNA

SEQ ID NO: 52033 - DNA, 120 bp, synthetic construct; identical to SEQ ID NO: 22079
  source 1..120: mol_type = other DNA

SEQ ID NO: 52034 - DNA, 120 bp, synthetic construct; identical to SEQ ID NO: 22080
  source 1..120: mol_type = other DNA

SEQ ID NO: 52035 - DNA, 120 bp, synthetic construct; identical to SEQ ID NO: 6964
  source 1..120: mol_type = other DNA

SEQ ID NO: 52036 - DNA, 120 bp, synthetic construct; identical to SEQ ID NO: 22082
  source 1..120: mol_type = other DNA

SEQ ID NO: 52037 - DNA, 120 bp, synthetic construct; identical to SEQ ID NO: 22083
  source 1..120: mol_type = other DNA

SEQ ID NO: 52038 - DNA, 120 bp, synthetic construct; identical to SEQ ID NO: 22084
  source 1..120: mol_type = other DNA

SEQ ID NO: 52039 - DNA, 120 bp, synthetic construct; identical to SEQ ID NO: 6965
  source 1..120: mol_type = other DNA

SEQ ID NO: 52040 - DNA, 120 bp, synthetic construct; identical to SEQ ID NO: 22086
  source 1..120: mol_type = other DNA

SEQ ID NO: 52041 - DNA, 120 bp, synthetic construct; identical to SEQ ID NO: 22087
  source 1..120: mol_type = other DNA

SEQ ID NO: 52042 - DNA, 120 bp, synthetic construct; identical to SEQ ID NO: 22088
  source 1..120: mol_type = other DNA

SEQ ID NO: 52043 - DNA, 120 bp, synthetic construct; identical to SEQ ID NO: 6966
  source 1..120: mol_type = other DNA

SEQ ID NO: 52044 - DNA, 120 bp, synthetic construct; identical to SEQ ID NO: 22090
  source 1..120: mol_type = other DNA

SEQ ID NO: 52045 - DNA, 120 bp, synthetic construct; identical to SEQ ID NO: 22091
  source 1..120: mol_type = other DNA

SEQ ID NO: 52046 - DNA, 120 bp, synthetic construct; identical to SEQ ID NO: 6967
  source 1..120: mol_type = other DNA

SEQ ID NO: 52047 - DNA, 120 bp, synthetic construct; identical to SEQ ID NO: 22093
  source 1..120: mol_type = other DNA

SEQ ID NO: 52048 - DNA, 120 bp, synthetic construct; identical to SEQ ID NO: 22094
  source 1..120: mol_type = other DNA

SEQ ID NO: 52049 - DNA, 120 bp, synthetic construct; identical to SEQ ID NO: 22095
  source 1..120: mol_type = other DNA

SEQ ID NO: 52050 - DNA, 120 bp, synthetic construct; identical to SEQ ID NO: 22096
  source 1..120: mol_type = other DNA

SEQ ID NO: 52051 - DNA, 120 bp, synthetic construct; identical to SEQ ID NO: 6968
  source 1..120: mol_type = other DNA

SEQ ID NO: 52052 - DNA, 120 bp, synthetic construct; identical to SEQ ID NO: 22098
  source 1..120: mol_type = other DNA

SEQ ID NO: 52053 - DNA, 120 bp, synthetic construct; identical to SEQ ID NO: 22099
  source 1..120: mol_type = other DNA

SEQ ID NO: 52054 - DNA, 120 bp, synthetic construct; identical to SEQ ID NO: 22100
  source 1..120: mol_type = other DNA

SEQ ID NO: 52055 - DNA, 120 bp, synthetic construct; identical to SEQ ID NO: 6969
  source 1..120: mol_type = other DNA

SEQ ID NO: 52056 - DNA, 120 bp, synthetic construct; identical to SEQ ID NO: 22102
  source 1..120: mol_type = other DNA

SEQ ID NO: 52057 - DNA, 120 bp, synthetic construct; identical to SEQ ID NO: 22103
  source 1..120: mol_type = other DNA

SEQ ID NO: 52058 - DNA, 120 bp, synthetic construct; identical to SEQ ID NO: 22104
  source 1..120: mol_type = other DNA

SEQ ID NO: 52059 - DNA, 120 bp, synthetic construct; identical to SEQ ID NO: 6970
  source 1..120: mol_type = other DNA

SEQ ID NO: 52060 - DNA, 120 bp, synthetic construct; identical to SEQ ID NO: 22106
  source 1..120: mol_type = other DNA

SEQ ID NO: 52061 - DNA, 120 bp, synthetic construct; identical to SEQ ID NO: 22107
  source 1..120: mol_type = other DNA

SEQ ID NO: 52062 - DNA, 120 bp, synthetic construct; identical to SEQ ID NO: 6971
  source 1..120: mol_type = other DNA

SEQ ID NO: 52063 - DNA, 120 bp, synthetic construct; identical to SEQ ID NO: 22109
  source 1..120: mol_type = other DNA

SEQ ID NO: 52064 - DNA, 120 bp, synthetic construct; identical to SEQ ID NO: 22110
  source 1..120: mol_type = other DNA

SEQ ID NO: 52065 - DNA, 120 bp, synthetic construct; identical to SEQ ID NO: 22111
  source 1..120: mol_type = other DNA

SEQ ID NO: 52066 - DNA, 120 bp, synthetic construct; identical to SEQ ID NO: 6972
  source 1..120: mol_type = other DNA

SEQ ID NO: 52067 - DNA, 120 bp, synthetic construct; identical to SEQ ID NO: 22113
  source 1..120: mol_type = other DNA

SEQ ID NO: 52068 - DNA, 120 bp, synthetic construct; identical to SEQ ID NO: 22114
  source 1..120: mol_type = other DNA

SEQ ID NO: 52069 - DNA, 120 bp, synthetic construct; identical to SEQ ID NO: 22115
  source 1..120: mol_type = other DNA

SEQ ID NO: 52070 - DNA, 120 bp, synthetic construct; identical to SEQ ID NO: 22116
  source 1..120: mol_type = other DNA

SEQ ID NO: 52071 - DNA, 120 bp, synthetic construct; identical to SEQ ID NO: 6973
  source 1..120: mol_type = other DNA

SEQ ID NO: 52072 - DNA, 120 bp, synthetic construct; identical to SEQ ID NO: 22118
  source 1..120: mol_type = other DNA

SEQ ID NO: 52073 - DNA, 120 bp, synthetic construct; identical to SEQ ID NO: 22119
  source 1..120: mol_type = other DNA

SEQ ID NO: 52074 - DNA, 120 bp, synthetic construct; identical to SEQ ID NO: 6974
  source 1..120: mol_type = other DNA

SEQ ID NO: 52075 - DNA, 120 bp, synthetic construct; identical to SEQ ID NO: 22121
  source 1..120: mol_type = other DNA

SEQ ID NO: 52076 - DNA, 120 bp, synthetic construct; identical to SEQ ID NO: 22122
  source 1..120: mol_type = other DNA

SEQ ID NO: 52077 - DNA, 120 bp, synthetic construct; identical to SEQ ID NO: 22123
  source 1..120: mol_type = other DNA

SEQ ID NO: 52078 - DNA, 120 bp, synthetic construct; identical to SEQ ID NO: 6975
  source 1..120: mol_type = other DNA

SEQ ID NO: 52079 - DNA, 120 bp, synthetic construct; identical to SEQ ID NO: 22125
  source 1..120: mol_type = other DNA

SEQ ID NO: 52080 - DNA, 120 bp, synthetic construct; identical to SEQ ID NO: 22126
  source 1..120: mol_type = other DNA

SEQ ID NO: 52081 - DNA, 120 bp, synthetic construct; identical to SEQ ID NO: 22127
  source 1..120: mol_type = other DNA

SEQ ID NO: 52082 - DNA, 120 bp, synthetic construct; identical to SEQ ID NO: 6976
  source 1..120: mol_type = other DNA

SEQ ID NO: 52083 - DNA, 120 bp, synthetic construct; identical to SEQ ID NO: 22129
  source 1..120: mol_type = other DNA

SEQ ID NO: 52084 - DNA, 120 bp, synthetic construct; identical to SEQ ID NO: 22130
  source 1..120: mol_type = other DNA

SEQ ID NO: 52085 - DNA, 120 bp, synthetic construct; identical to SEQ ID NO: 22131
  source 1..120: mol_type = other DNA

SEQ ID NO: 52086 - DNA, 120 bp, synthetic construct; identical to SEQ ID NO: 6977
  source 1..120: mol_type = other DNA

SEQ ID NO: 52087 - DNA, 120 bp, synthetic construct; identical to SEQ ID NO: 22133
  source 1..120: mol_type = other DNA

SEQ ID NO: 52088 - DNA, 120 bp, synthetic construct; identical to SEQ ID NO: 22134
  source 1..120: mol_type = other DNA

SEQ ID NO: 52089 - DNA, 120 bp, synthetic construct; identical to SEQ ID NO: 22135
  source 1..120: mol_type = other DNA

SEQ ID NO: 52090 - DNA, 120 bp, synthetic construct; identical to SEQ ID NO: 6978
  source 1..120: mol_type = other DNA

SEQ ID NO: 52091 - DNA, 120 bp, synthetic construct; identical to SEQ ID NO: 22137
  source 1..120: mol_type = other DNA

SEQ ID NO: 52092 - DNA, 120 bp, synthetic construct; identical to SEQ ID NO: 22138
  source 1..120: mol_type = other DNA

SEQ ID NO: 52093 - DNA, 120 bp, synthetic construct; identical to SEQ ID NO: 22139
  source 1..120: mol_type = other DNA

SEQ ID NO: 52094 - DNA, 120 bp, synthetic construct; identical to SEQ ID NO: 6979
  source 1..120: mol_type = other DNA

SEQ ID NO: 52095 - DNA, 120 bp, synthetic construct; identical to SEQ ID NO: 22141
  source 1..120: mol_type = other DNA

SEQ ID NO: 52096 - DNA, 120 bp, synthetic construct; identical to SEQ ID NO: 22142
  source 1..120: mol_type = other DNA

SEQ ID NO: 52097 - DNA, 120 bp, synthetic construct; identical to SEQ ID NO: 37
  source 1..120: mol_type = other DNA

SEQ ID NO: 52098 - DNA, 120 bp, synthetic construct; identical to SEQ ID NO: 6980
  source 1..120: mol_type = other DNA

SEQ ID NO: 52099 - DNA, 120 bp, synthetic construct; identical to SEQ ID NO: 22145
  source 1..120: mol_type = other DNA

SEQ ID NO: 52100 - DNA, 120 bp, synthetic construct; identical to SEQ ID NO: 22146
  source 1..120: mol_type = other DNA

SEQ ID NO: 52101 - DNA, 120 bp, synthetic construct; identical to SEQ ID NO: 22147
  source 1..120: mol_type = other DNA

SEQ ID NO: 52102 - DNA, 120 bp, synthetic construct; identical to SEQ ID NO: 22148
  source 1..120: mol_type = other DNA

SEQ ID NO: 52103 - DNA, 120 bp, synthetic construct; identical to SEQ ID NO: 6981
  source 1..120: mol_type = other DNA

SEQ ID NO: 52104 - DNA, 120 bp, synthetic construct; identical to SEQ ID NO: 22150
  source 1..120: mol_type = other DNA

SEQ ID NO: 52105 - DNA, 120 bp, synthetic construct; identical to SEQ ID NO: 22151
  source 1..120: mol_type = other DNA

SEQ ID NO: 52106 - DNA, 120 bp, synthetic construct; identical to SEQ ID NO: 6982
  source 1..120: mol_type = other DNA

SEQ ID NO: 52107 - DNA, 120 bp, synthetic construct; identical to SEQ ID NO: 22153
  source 1..120: mol_type = other DNA

SEQ ID NO: 52108 - DNA, 120 bp, synthetic construct; identical to SEQ ID NO: 6983
  source 1..120: mol_type = other DNA

SEQ ID NO: 52109 - DNA, 120 bp, synthetic construct; identical to SEQ ID NO: 22155
  source 1..120: mol_type = other DNA

SEQ ID NO: 52110 - DNA, 120 bp, synthetic construct; identical to SEQ ID NO: 22156
  source 1..120: mol_type = other DNA

SEQ ID NO: 52111 - DNA, 120 bp, synthetic construct; identical to SEQ ID NO: 22157
  source 1..120: mol_type = other DNA

SEQ ID NO: 52112 - DNA, 120 bp, synthetic construct; identical to SEQ ID NO: 6984
  source 1..120: mol_type = other DNA

SEQ ID NO: 52113 - DNA, 120 bp, synthetic construct; identical to SEQ ID NO: 22159
  source 1..120: mol_type = other DNA

SEQ ID NO: 52114 - DNA, 120 bp, synthetic construct; identical to SEQ ID NO: 22160
  source 1..120: mol_type = other DNA

SEQ ID NO: 52115 - DNA, 120 bp, synthetic construct; identical to SEQ ID NO: 22161
  source 1..120: mol_type = other DNA

SEQ ID NO: 52116 - DNA, 120 bp, synthetic construct; identical to SEQ ID NO: 22162
  source 1..120: mol_type = other DNA

SEQ ID NO: 52117 - DNA, 120 bp, synthetic construct; identical to SEQ ID NO: 6985
  source 1..120: mol_type = other DNA

SEQ ID NO: 52118 - DNA, 120 bp, synthetic construct; identical to SEQ ID NO: 22164
  source 1..120: mol_type = other DNA

SEQ ID NO: 52119 - DNA, 120 bp, synthetic construct; identical to SEQ ID NO: 22165
  source 1..120: mol_type = other DNA

SEQ ID NO: 52120 - DNA, 120 bp, synthetic construct; identical to SEQ ID NO: 22166
  source 1..120: mol_type = other DNA

SEQ ID NO: 52121 - DNA, 120 bp, synthetic construct; identical to SEQ ID NO: 22167
  source 1..120: mol_type = other DNA

SEQ ID NO: 52122 - DNA, 120 bp, synthetic construct; identical to SEQ ID NO: 6986
  source 1..120: mol_type = other DNA

SEQ ID NO: 52123 - DNA, 120 bp, synthetic construct; identical to SEQ ID NO: 22169
  source 1..120: mol_type = other DNA

SEQ ID NO: 52124 - DNA, 120 bp, synthetic construct; identical to SEQ ID NO: 22170
  source 1..120: mol_type = other DNA

SEQ ID NO: 52125 - DNA, 120 bp, synthetic construct; identical to SEQ ID NO: 22171
  source 1..120: mol_type = other DNA

SEQ ID NO: 52126 - DNA, 120 bp, synthetic construct; identical to SEQ ID NO: 6987
  source 1..120: mol_type = other DNA

SEQ ID NO: 52127 - DNA, 120 bp, synthetic construct; identical to SEQ ID NO: 22173
  source 1..120: mol_type = other DNA

SEQ ID NO: 52128 - DNA, 120 bp, synthetic construct; identical to SEQ ID NO: 22174
  source 1..120: mol_type = other DNA

SEQ ID NO: 52129 - DNA, 120 bp, synthetic construct; identical to SEQ ID NO: 22175
  source 1..120: mol_type = other DNA

SEQ ID NO: 52130 - DNA, 120 bp, synthetic construct; identical to SEQ ID NO: 22176
  source 1..120: mol_type = other DNA

SEQ ID NO: 52131 - DNA, 120 bp, synthetic construct; identical to SEQ ID NO: 6988
  source 1..120: mol_type = other DNA

SEQ ID NO: 52132 - DNA, 120 bp, synthetic construct; identical to SEQ ID NO: 22178
  source 1..120: mol_type = other DNA

SEQ ID NO: 52133 - DNA, 120 bp, synthetic construct; identical to SEQ ID NO: 22179
  source 1..120: mol_type = other DNA

SEQ ID NO: 52134 - DNA, 120 bp, synthetic construct; identical to SEQ ID NO: 22180
  source 1..120: mol_type = other DNA

SEQ ID NO: 52135 - DNA, 120 bp, synthetic construct; identical to SEQ ID NO: 6989
  source 1..120: mol_type = other DNA

SEQ ID NO: 52136 - DNA, 120 bp, synthetic construct; identical to SEQ ID NO: 22182
  source 1..120: mol_type = other DNA

SEQ ID NO: 52137 - DNA, 120 bp, synthetic construct; identical to SEQ ID NO: 22183
  source 1..120: mol_type = other DNA

SEQ ID NO: 52138 - DNA, 120 bp, synthetic construct; identical to SEQ ID NO: 6990
  source 1..120: mol_type = other DNA

SEQ ID NO: 52139 - DNA, 120 bp, synthetic construct; identical to SEQ ID NO: 22185
  source 1..120: mol_type = other DNA

SEQ ID NO: 52140 - DNA, 120 bp, synthetic construct; identical to SEQ ID NO: 22186
  source 1..120: mol_type = other DNA

SEQ ID NO: 52141 - DNA, 120 bp, synthetic construct; identical to SEQ ID NO: 22187
  source 1..120: mol_type = other DNA

SEQ ID NO: 52142 - DNA, 120 bp, synthetic construct; identical to SEQ ID NO: 22188
  source 1..120: mol_type = other DNA

SEQ ID NO: 52143 - DNA, 120 bp, synthetic construct; identical to SEQ ID NO: 6991
  source 1..120: mol_type = other DNA

SEQ ID NO: 52144 - DNA, 120 bp, synthetic construct; identical to SEQ ID NO: 22190
  source 1..120: mol_type = other DNA

SEQ ID NO: 52145 - DNA, 120 bp, synthetic construct; identical to SEQ ID NO: 22191
  source 1..120: mol_type = other DNA

SEQ ID NO: 52146 - DNA, 120 bp, synthetic construct; identical to SEQ ID NO: 6992
  source 1..120: mol_type = other DNA

SEQ ID NO: 52147 - DNA, 120 bp, synthetic construct; identical to SEQ ID NO: 22193
  source 1..120: mol_type = other DNA

SEQ ID NO: 52148 - DNA, 120 bp, synthetic construct; identical to SEQ ID NO: 22194
  source 1..120: mol_type = other DNA

SEQ ID NO: 52149 - DNA, 120 bp, synthetic construct; identical to SEQ ID NO: 22195
  source 1..120: mol_type = other DNA

SEQ ID NO: 52150 - DNA, 120 bp, synthetic construct; identical to SEQ ID NO: 6993
  source 1..120: mol_type = other DNA

SEQ ID NO: 52151 - DNA, 120 bp, synthetic construct; identical to SEQ ID NO: 22197
  source 1..120: mol_type = other DNA

SEQ ID NO: 52152 - DNA, 120 bp, synthetic construct; identical to SEQ ID NO: 22198
  source 1..120: mol_type = other DNA

SEQ ID NO: 52153 - DNA, 120 bp, synthetic construct; identical to SEQ ID NO: 22199
  source 1..120: mol_type = other DNA

SEQ ID NO: 52154 - DNA, 120 bp, synthetic construct; identical to SEQ ID NO: 22200
  source 1..120: mol_type = other DNA

SEQ ID NO: 52155 - DNA, 120 bp, synthetic construct; identical to SEQ ID NO: 6994
  source 1..120: mol_type = other DNA

SEQ ID NO: 52156 - DNA, 120 bp, synthetic construct; identical to SEQ ID NO: 22202
  source 1..120: mol_type = other DNA

SEQ ID NO: 52157 - DNA, 120 bp, synthetic construct; identical to SEQ ID NO: 22203
  source 1..120: mol_type = other DNA

SEQ ID NO: 52158 - DNA, 120 bp, synthetic construct; identical to SEQ ID NO: 6995
  source 1..120: mol_type = other DNA

SEQ ID NO: 52159 - DNA, 120 bp, synthetic construct; identical to SEQ ID NO: 22205
  source 1..120: mol_type = other DNA

SEQ ID NO: 52160 - DNA, 120 bp, synthetic construct; identical to SEQ ID NO: 22206
  source 1..120: mol_type = other DNA

SEQ ID NO: 52161 - DNA, 120 bp, synthetic construct; identical to SEQ ID NO: 22207
  source 1..120: mol_type = other DNA

SEQ ID NO: 52162 - DNA, 120 bp, synthetic construct; identical to SEQ ID NO: 6996
  source 1..120: mol_type = other DNA

SEQ ID NO: 52163 - DNA, 120 bp, synthetic construct; identical to SEQ ID NO: 22209
  source 1..120: mol_type = other DNA

SEQ ID NO: 52164 - DNA, 120 bp, synthetic construct; identical to SEQ ID NO: 22210
  source 1..120: mol_type = other DNA

SEQ ID NO: 52165 - DNA, 120 bp, synthetic construct; identical to SEQ ID NO: 22211
  source 1..120: mol_type = other DNA

SEQ ID NO: 52166 - DNA, 120 bp, synthetic construct; identical to SEQ ID NO: 22212
  source 1..120: mol_type = other DNA

SEQ ID NO: 52167 - DNA, 120 bp, synthetic construct; identical to SEQ ID NO: 6997
  source 1..120: mol_type = other DNA

SEQ ID NO: 52168 - DNA, 120 bp, synthetic construct; identical to SEQ ID NO: 22214
  source 1..120: mol_type = other DNA

SEQ ID NO: 52169 - DNA, 120 bp, synthetic construct; identical to SEQ ID NO: 59
  source 1..120: mol_type = other DNA

SEQ ID NO: 52170 - DNA, 120 bp, synthetic construct; identical to SEQ ID NO: 22216
  source 1..120: mol_type = other DNA

SEQ ID NO: 52171 - DNA, 120 bp, synthetic construct; identical to SEQ ID NO: 6998
  source 1..120: mol_type = other DNA

SEQ ID NO: 52172 - DNA, 120 bp, synthetic construct; identical to SEQ ID NO: 22218
  source 1..120: mol_type = other DNA

SEQ ID NO: 52173 - DNA, 120 bp, synthetic construct; identical to SEQ ID NO: 22219
  source 1..120: mol_type = other DNA

SEQ ID NO: 52174 - DNA, 120 bp, synthetic construct; identical to SEQ ID NO: 22220
  source 1..120: mol_type = other DNA

SEQ ID NO: 52175 - DNA, 120 bp, synthetic construct; identical to SEQ ID NO: 6999
  source 1..120: mol_type = other DNA

SEQ ID NO: 52176 - DNA, 120 bp, synthetic construct; identical to SEQ ID NO: 22222
  source 1..120: mol_type = other DNA

SEQ ID NO: 52177 - DNA, 120 bp, synthetic construct; identical to SEQ ID NO: 22223
  source 1..120: mol_type = other DNA

SEQ ID NO: 52178 - DNA, 120 bp, synthetic construct; identical to SEQ ID NO: 22224
  source 1..120: mol_type = other DNA

SEQ ID NO: 52179 - DNA, 120 bp, synthetic construct; identical to SEQ ID NO: 7000
  source 1..120: mol_type = other DNA

SEQ ID NO: 52180 - DNA, 120 bp, synthetic construct; identical to SEQ ID NO: 22226
  source 1..120: mol_type = other DNA

SEQ ID NO: 52181 - DNA, 120 bp, synthetic construct; identical to SEQ ID NO: 22227
  source 1..120: mol_type = other DNA

SEQ ID NO: 52182 - DNA, 120 bp, synthetic construct; identical to SEQ ID NO: 22228
  source 1..120: mol_type = other DNA

SEQ ID NO: 52183 - DNA, 120 bp, synthetic construct; identical to SEQ ID NO: 7001
  source 1..120: mol_type = other DNA

SEQ ID NO: 52184 - DNA, 120 bp, synthetic construct; identical to SEQ ID NO: 22230
  source 1..120: mol_type = other DNA

SEQ ID NO: 52185 - DNA, 120 bp, synthetic construct; identical to SEQ ID NO: 22231
  source 1..120: mol_type = other DNA

SEQ ID NO: 52186 - DNA, 120 bp, synthetic construct; identical to SEQ ID NO: 22232
  source 1..120: mol_type = other DNA

SEQ ID NO: 52187 - DNA, 120 bp, synthetic construct; identical to SEQ ID NO: 7002
  source 1..120: mol_type = other DNA

SEQ ID NO: 52188 - DNA, 120 bp, synthetic construct; identical to SEQ ID NO: 22234
  source 1..120: mol_type = other DNA

SEQ ID NO: 52189 - DNA, 120 bp, synthetic construct; identical to SEQ ID NO: 64
  source 1..120: mol_type = other DNA

SEQ ID NO: 52190 - DNA, 120 bp, synthetic construct; identical to SEQ ID NO: 22236
  source 1..120: mol_type = other DNA

SEQ ID NO: 52191 - DNA, 120 bp, synthetic construct; identical to SEQ ID NO: 7003
  source 1..120: mol_type = other DNA

SEQ ID NO: 52192 - DNA, 120 bp, synthetic construct; identical to SEQ ID NO: 22238
  source 1..120: mol_type = other DNA

SEQ ID NO: 52193 - DNA, 120 bp, synthetic construct; identical to SEQ ID NO: 22239
  source 1..120: mol_type = other DNA

SEQ ID NO: 52194 - DNA, 120 bp, synthetic construct; identical to SEQ ID NO: 22240
  source 1..120: mol_type = other DNA

SEQ ID NO: 52195 - DNA, 120 bp, synthetic construct; identical to SEQ ID NO: 7004
  source 1..120: mol_type = other DNA

SEQ ID NO: 52196 - DNA, 120 bp, synthetic construct; identical to SEQ ID NO: 22242
  source 1..120: mol_type = other DNA

SEQ ID NO: 52197 - DNA, 120 bp, synthetic construct; identical to SEQ ID NO: 22243
  source 1..120: mol_type = other DNA

SEQ ID NO: 52198 - DNA, 120 bp, synthetic construct; identical to SEQ ID NO: 7005
  source 1..120: mol_type = other DNA

SEQ ID NO: 52199 - DNA, 120 bp, synthetic construct; identical to SEQ ID NO: 22245
  source 1..120: mol_type = other DNA

SEQ ID NO: 52200 - DNA, 120 bp, synthetic construct; identical to SEQ ID NO: 22246
  source 1..120: mol_type = other DNA

SEQ ID NO: 52201 - DNA, 120 bp, synthetic construct; identical to SEQ ID NO: 22247
  source 1..120: mol_type = other DNA

SEQ ID NO: 52202 - DNA, 120 bp, synthetic construct; identical to SEQ ID NO: 7006
  source 1..120: mol_type = other DNA

SEQ ID NO: 52203 - DNA, 120 bp, synthetic construct; identical to SEQ ID NO: 22249
  source 1..120: mol_type = other DNA

SEQ ID NO: 52204 - DNA, 120 bp, synthetic construct; identical to SEQ ID NO: 22250
  source 1..120: mol_type = other DNA

SEQ ID NO: 52205 - DNA, 120 bp, synthetic construct; identical to SEQ ID NO: 22251
  source 1..120: mol_type = other DNA

SEQ ID NO: 52206 - DNA, 120 bp, synthetic construct; identical to SEQ ID NO: 7007
  source 1..120: mol_type = other DNA

SEQ ID NO: 52207 - DNA, 120 bp, synthetic construct; identical to SEQ ID NO: 22253
  source 1..120: mol_type = other DNA

SEQ ID NO: 52208 - DNA, 120 bp, synthetic construct; identical to SEQ ID NO: 22254
  source 1..120: mol_type = other DNA

SEQ ID NO: 52209 - DNA, 120 bp, synthetic construct; identical to SEQ ID NO: 22255
  source 1..120: mol_type = other DNA

SEQ ID NO: 52210 - DNA, 120 bp, synthetic construct; identical to SEQ ID NO: 7008
  source 1..120: mol_type = other DNA

SEQ ID NO: 52211 - DNA, 120 bp, synthetic construct; identical to SEQ ID NO: 22257
  source 1..120: mol_type = other DNA

SEQ ID NO: 52212 - DNA, 120 bp, synthetic construct; identical to SEQ ID NO: 22258
  source 1..120: mol_type = other DNA

SEQ ID NO: 52213 - DNA, 120 bp, synthetic construct; identical to SEQ ID NO: 22259
  source 1..120: mol_type = other DNA

SEQ ID NO: 52214 - DNA, 120 bp, synthetic construct; identical to SEQ ID NO: 7009
  source 1..120: mol_type = other DNA

SEQ ID NO: 52215 - DNA, 120 bp, synthetic construct; identical to SEQ ID NO: 22261
  source 1..120: mol_type = other DNA

SEQ ID NO: 52216 - DNA, 120 bp, synthetic construct; identical to SEQ ID NO: 22262
  source 1..120: mol_type = other DNA

SEQ ID NO: 52217 - DNA, 120 bp, synthetic construct; identical to SEQ ID NO: 22263
  source 1..120: mol_type = other DNA

SEQ ID NO: 52218 - DNA, 120 bp, synthetic construct; identical to SEQ ID NO: 7010
  source 1..120: mol_type = other DNA

SEQ ID NO: 52219 - DNA, 120 bp, synthetic construct; identical to SEQ ID NO: 22265
  source 1..120: mol_type = other DNA

SEQ ID NO: 52220 - DNA, 120 bp, synthetic construct; identical to SEQ ID NO: 22266
  source 1..120: mol_type = other DNA

SEQ ID NO: 52221 - DNA, 120 bp, synthetic construct; identical to SEQ ID NO: 22267
  source 1..120: mol_type = other DNA

SEQ ID NO: 52222 - DNA, 120 bp, synthetic construct; identical to SEQ ID NO: 7011
  source 1..120: mol_type = other DNA

SEQ ID NO: 52223 - DNA, 120 bp, synthetic construct; identical to SEQ ID NO: 22269
  source 1..120: mol_type = other DNA

SEQ ID NO: 52224 - DNA, 120 bp, synthetic construct; identical to SEQ ID NO: 22270
  source 1..120: mol_type = other DNA

SEQ ID NO: 52225 - DNA, 120 bp, synthetic construct; identical to SEQ ID NO: 22271
  source 1..120: mol_type = other DNA

SEQ ID NO: 52226 - DNA, 120 bp, synthetic construct; identical to SEQ ID NO: 7012
  source 1..120: mol_type = other DNA

SEQ ID NO: 52227 - DNA, 120 bp, synthetic construct; identical to SEQ ID NO: 22273
  source 1..120: mol_type = other DNA

SEQ ID NO: 52228 - DNA, 120 bp, synthetic construct; identical to SEQ ID NO: 22274
  source 1..120: mol_type = other DNA

SEQ ID NO: 52229 - DNA, 120 bp, synthetic construct; identical to SEQ ID NO: 22275
  source 1..120: mol_type = other DNA

SEQ ID NO: 52230 - DNA, 120 bp, synthetic construct; identical to SEQ ID NO: 22276
  source 1..120: mol_type = other DNA

SEQ ID NO: 52231 - DNA, 120 bp, synthetic construct; identical to SEQ ID NO: 7013
  source 1..120: mol_type = other DNA

SEQ ID NO: 52232 - DNA, 120 bp, synthetic construct; identical to SEQ ID NO: 22278
  source 1..120: mol_type = other DNA

SEQ ID NO: 52233 - DNA, 120 bp, synthetic construct; identical to SEQ ID NO: 22279
  source 1..120: mol_type = other DNA

SEQ ID NO: 52234 - DNA, 120 bp, synthetic construct; identical to SEQ ID NO: 22280
  source 1..120: mol_type = other DNA

SEQ ID NO: 52235 - DNA, 120 bp, synthetic construct; identical to SEQ ID NO: 7014
  source 1..120: mol_type = other DNA

SEQ ID NO: 52236 - DNA, 120 bp, synthetic construct; identical to SEQ ID NO: 22282
  source 1..120: mol_type = other DNA

SEQ ID NO: 52237 - DNA, 120 bp, synthetic construct; identical to SEQ ID NO: 22283
  source 1..120: mol_type = other DNA

SEQ ID NO: 52238 - DNA, 120 bp, synthetic construct; identical to SEQ ID NO: 7015
  source 1..120: mol_type = other DNA

SEQ ID NO: 52239 - DNA, 120 bp, synthetic construct; identical to SEQ ID NO: 22285
  source 1..120: mol_type = other DNA

SEQ ID NO: 52240 - DNA, 120 bp, synthetic construct; identical to SEQ ID NO: 22286
  source 1..120: mol_type = other DNA

SEQ ID NO: 52241 - DNA, 120 bp, synthetic construct; identical to SEQ ID NO: 22287
  source 1..120: mol_type = other DNA

SEQ ID NO: 52242 - DNA, 120 bp, synthetic construct; identical to SEQ ID NO: 7016
  source 1..120: mol_type = other DNA

SEQ ID NO: 52243 - DNA, 120 bp, synthetic construct; identical to SEQ ID NO: 22289
  source 1..120: mol_type = other DNA

SEQ ID NO: 52244 - DNA, 120 bp, synthetic construct; identical to SEQ ID NO: 22290
  source 1..120: mol_type = other DNA

SEQ ID NO: 52245 - DNA, 120 bp, synthetic construct; identical to SEQ ID NO: 22291
  source 1..120: mol_type = other DNA

SEQ ID NO: 52246 - DNA, 120 bp, synthetic construct; identical to SEQ ID NO: 22292
  source 1..120: mol_type = other DNA

SEQ ID NO: 52247 - DNA, 120 bp, synthetic construct; identical to SEQ ID NO: 7017
  source 1..120: mol_type = other DNA

SEQ ID NO: 52248 - DNA, 120 bp, synthetic construct; identical to SEQ ID NO: 22294
  source 1..120: mol_type = other DNA

SEQ ID NO: 52249 - DNA, 120 bp, synthetic construct; identical to SEQ ID NO: 22295
  source 1..120: mol_type = other DNA

SEQ ID NO: 52250 - DNA, 120 bp, synthetic construct; identical to SEQ ID NO: 7018
  source 1..120: mol_type = other DNA

SEQ ID NO: 52251 - DNA, 120 bp, synthetic construct; identical to SEQ ID NO: 22297
  source 1..120: mol_type = other DNA

SEQ ID NO: 52252 - DNA, 120 bp, synthetic construct; identical to SEQ ID NO: 22298
  source 1..120: mol_type = other DNA

SEQ ID NO: 52253 - DNA, 120 bp, synthetic construct; identical to SEQ ID NO: 22299
  source 1..120: mol_type = other DNA

SEQ ID NO: 52254 - DNA, 120 bp, synthetic construct; identical to SEQ ID NO: 7019
  source 1..120: mol_type = other DNA

SEQ ID NO: 52255 - DNA, 120 bp, synthetic construct; identical to SEQ ID NO: 22301
  source 1..120: mol_type = other DNA

SEQ ID NO: 52256 - DNA, 120 bp, synthetic construct; identical to SEQ ID NO: 22302
  source 1..120: mol_type = other DNA

SEQ ID NO: 52257 - DNA, 120 bp, synthetic construct; identical to SEQ ID NO: 22303
  source 1..120: mol_type = other DNA

SEQ ID NO: 52258 - DNA, 120 bp, synthetic construct; identical to SEQ ID NO: 7020
  source 1..120: mol_type = other DNA

SEQ ID NO: 52259 - DNA, 120 bp, synthetic construct; identical to SEQ ID NO: 22305
  source 1..120: mol_type = other DNA

SEQ ID NO: 52260 - DNA, 120 bp, synthetic construct; identical to SEQ ID NO: 22306
  source 1..120: mol_type = other DNA

SEQ ID NO: 52261 - DNA, 120 bp, synthetic construct; identical to SEQ ID NO: 22307
  source 1..120: mol_type = other DNA

SEQ ID NO: 52262 - DNA, 120 bp, synthetic construct; identical to SEQ ID NO: 7021
  source 1..120: mol_type = other DNA

SEQ ID NO: 52263 - DNA, 120 bp, synthetic construct; identical to SEQ ID NO: 22309
  source 1..120: mol_type = other DNA

SEQ ID NO: 52264 - DNA, 120 bp, synthetic construct; identical to SEQ ID NO: 22310
  source 1..120: mol_type = other DNA

SEQ ID NO: 52265 - DNA, 120 bp, synthetic construct; identical to SEQ ID NO: 22311
  source 1..120: mol_type = other DNA

SEQ ID NO: 52266 - DNA, 120 bp, synthetic construct; identical to SEQ ID NO: 7022
  source 1..120: mol_type = other DNA

SEQ ID NO: 52267 - DNA, 120 bp, synthetic construct; identical to SEQ ID NO: 22313
  source 1..120: mol_type = other DNA

SEQ ID NO: 52268 - DNA, 120 bp, synthetic construct; identical to SEQ ID NO: 22314
  source 1..120: mol_type = other DNA

SEQ ID NO: 52269 - DNA, 120 bp, synthetic construct; identical to SEQ ID NO: 22315
  source 1..120: mol_type = other DNA

SEQ ID NO: 52270 - DNA, 120 bp, synthetic construct; identical to SEQ ID NO: 7023
  source 1..120: mol_type = other DNA

SEQ ID NO: 52271 - DNA, 120 bp, synthetic construct; identical to SEQ ID NO: 22317
  source 1..120: mol_type = other DNA

SEQ ID NO: 52272 - DNA, 120 bp, synthetic construct; identical to SEQ ID NO: 22318
  source 1..120: mol_type = other DNA

SEQ ID NO: 52273 - DNA, 120 bp, synthetic construct; identical to SEQ ID NO: 7024
  source 1..120: mol_type = other DNA

SEQ ID NO: 52274 - DNA, 120 bp, synthetic construct; identical to SEQ ID NO: 22320
  source 1..120: mol_type = other DNA

SEQ ID NO: 52275 - DNA, 120 bp, synthetic construct; identical to SEQ ID NO: 22321
  source 1..120: mol_type = other DNA

SEQ ID NO: 52276 - DNA, 120 bp, synthetic construct; identical to SEQ ID NO: 22322
  source 1..120: mol_type = other DNA

SEQ ID NO: 52277 - DNA, 120 bp, synthetic construct; identical to SEQ ID NO: 7025
  source 1..120: mol_type = other DNA

SEQ ID NO: 52278 - DNA, 120 bp, synthetic construct; identical to SEQ ID NO: 22324
  source 1..120: mol_type = other DNA

SEQ ID NO: 52279 - DNA, 120 bp, synthetic construct; identical to SEQ ID NO: 22325
  source 1..120: mol_type = other DNA

SEQ ID NO: 52280 - DNA, 120 bp, synthetic construct; identical to SEQ ID NO: 22326
  source 1..120: mol_type = other DNA

SEQ ID NO: 52281 - DNA, 120 bp, synthetic construct; identical to SEQ ID NO: 22327
  source 1..120: mol_type = other DNA

SEQ ID NO: 52282 - DNA, 120 bp, synthetic construct; identical to SEQ ID NO: 7026
  source 1..120: mol_type = other DNA

SEQ ID NO: 52283 - DNA, 120 bp, synthetic construct; identical to SEQ ID NO: 22329
  source 1..120: mol_type = other DNA

SEQ ID NO: 52284 - DNA, 120 bp, synthetic construct; identical to SEQ ID NO: 22330
  source 1..120: mol_type = other DNA

SEQ ID NO: 52285 - DNA, 120 bp, synthetic construct; identical to SEQ ID NO: 7027
  source 1..120: mol_type = other DNA

SEQ ID NO: 52286 - DNA, 120 bp, synthetic construct; identical to SEQ ID NO: 22332
  source 1..120: mol_type = other DNA

SEQ ID NO: 52287 - DNA, 120 bp, synthetic construct; identical to SEQ ID NO: 22333
  source 1..120: mol_type = other DNA

SEQ ID NO: 52288 - DNA, 120 bp, synthetic construct; identical to SEQ ID NO: 22334
  source 1..120: mol_type = other DNA

SEQ ID NO: 52289 - DNA, 120 bp, synthetic construct; identical to SEQ ID NO: 22335
  source 1..120: mol_type = other DNA

SEQ ID NO: 52290 - DNA, 120 bp, synthetic construct; identical to SEQ ID NO: 7028
  source 1..120: mol_type = other DNA

SEQ ID NO: 52291 - DNA, 120 bp, synthetic construct; identical to SEQ ID NO: 22337
  source 1..120: mol_type = other DNA

SEQ ID NO: 52292 - DNA, 120 bp, synthetic construct; identical to SEQ ID NO: 22338
  source 1..120: mol_type = other DNA

SEQ ID NO: 52293 - DNA, 120 bp, synthetic construct; identical to SEQ ID NO: 7029
  source 1..120: mol_type = other DNA

SEQ ID NO: 52294 - DNA, 120 bp, synthetic construct; identical to SEQ ID NO: 22340
  source 1..120: mol_type = other DNA

SEQ ID NO: 52295 - DNA, 120 bp, synthetic construct; identical to SEQ ID NO: 22341
  source 1..120: mol_type = other DNA

SEQ ID NO: 52296 - DNA, 120 bp, synthetic construct; identical to SEQ ID NO: 22342
  source 1..120: mol_type = other DNA

SEQ ID NO: 52297 - DNA, 120 bp, synthetic construct; identical to SEQ ID NO: 7030
  source 1..120: mol_type = other DNA

SEQ ID NO: 52298 - DNA, 120 bp, synthetic construct; identical to SEQ ID NO: 22344
  source 1..120: mol_type = other DNA

SEQ ID NO: 52299 - DNA, 120 bp, synthetic construct; identical to SEQ ID NO: 22345
  source 1..120: mol_type = other DNA

SEQ ID NO: 52300 - DNA, 120 bp, synthetic construct; identical to SEQ ID NO: 22346
  source 1..120: mol_type = other DNA

SEQ ID NO: 52301 - DNA, 120 bp, synthetic construct; identical to SEQ ID NO: 7031
  source 1..120: mol_type = other DNA

SEQ ID NO: 52302 - DNA, 120 bp, synthetic construct; identical to SEQ ID NO: 22348
  source 1..120: mol_type = other DNA

SEQ ID NO: 52303 - DNA, 120 bp, synthetic construct; identical to SEQ ID NO: 22349
  source 1..120: mol_type = other DNA

SEQ ID NO: 52304 - DNA, 120 bp, synthetic construct; identical to SEQ ID NO: 22350
  source 1..120: mol_type = other DNA

SEQ ID NO: 52305 - DNA, 120 bp, synthetic construct; identical to SEQ ID NO: 7032
  source 1..120: mol_type = other DNA

SEQ ID NO: 52306 - DNA, 120 bp, synthetic construct; identical to SEQ ID NO: 212
  source 1..120: mol_type = other DNA

SEQ ID NO: 52307 - DNA, 120 bp, synthetic construct; identical to SEQ ID NO: 22353
  source 1..120: mol_type = other DNA

SEQ ID NO: 52308 - DNA, 120 bp, synthetic construct; identical to SEQ ID NO: 22354
  source 1..120: mol_type = other DNA

SEQ ID NO: 52309 - DNA, 120 bp, synthetic construct; identical to SEQ ID NO: 22355
  source 1..120: mol_type = other DNA

SEQ ID NO: 52310 - DNA, 120 bp, synthetic construct; identical to SEQ ID NO: 7033
  source 1..120: mol_type = other DNA

SEQ ID NO: 52311 - DNA, 120 bp, synthetic construct; identical to SEQ ID NO: 22357
  source 1..120: mol_type = other DNA

SEQ ID NO: 52312 - DNA, 120 bp, synthetic construct; identical to SEQ ID NO: 22358
  source 1..120: mol_type = other DNA

SEQ ID NO: 52313 - DNA, 120 bp, synthetic construct; identical to SEQ ID NO: 22359
  source 1..120: mol_type = other DNA

SEQ ID NO: 52314 - DNA, 120 bp, synthetic construct; identical to SEQ ID NO: 7034
  source 1..120: mol_type = other DNA

SEQ ID NO: 52315 - DNA, 120 bp, synthetic construct; identical to SEQ ID NO: 22361
  source 1..120: mol_type = other DNA

SEQ ID NO: 52316 - DNA, 120 bp, synthetic construct; identical to SEQ ID NO: 22362
  source 1..120: mol_type = other DNA

SEQ ID NO: 52317 - DNA, 120 bp, synthetic construct; identical to SEQ ID NO: 22363
  source 1..120: mol_type = other DNA

SEQ ID NO: 52318 - DNA, 120 bp, synthetic construct; identical to SEQ ID NO: 7035
  source 1..120: mol_type = other DNA

SEQ ID NO: 52319 - DNA, 120 bp, synthetic construct; identical to SEQ ID NO: 22365
  source 1..120: mol_type = other DNA

SEQ ID NO: 52320 - DNA, 120 bp, synthetic construct; identical to SEQ ID NO: 22366
  source 1..120: mol_type = other DNA

SEQ ID NO: 52321 - DNA, 120 bp, synthetic construct; identical to SEQ ID NO: 22367
  source 1..120: mol_type = other DNA

SEQ ID NO: 52322 - DNA, 120 bp, synthetic construct; identical to SEQ ID NO: 7036
  source 1..120: mol_type = other DNA

SEQ ID NO: 52323 - DNA, 120 bp, synthetic construct; identical to SEQ ID NO: 22369
  source 1..120: mol_type = other DNA

SEQ ID NO: 52324 - DNA, 120 bp, synthetic construct; identical to SEQ ID NO: 22370
  source 1..120: mol_type = other DNA

SEQ ID NO: 52325 - DNA, 120 bp, synthetic construct; identical to SEQ ID NO: 22371
  source 1..120: mol_type = other DNA

SEQ ID NO: 52326 - DNA, 120 bp, synthetic construct; identical to SEQ ID NO: 7037
  source 1..120: mol_type = other DNA

SEQ ID NO: 52327 - DNA, 120 bp, synthetic construct; identical to SEQ ID NO: 22373
  source 1..120: mol_type = other DNA

SEQ ID NO: 52328 - DNA, 120 bp, synthetic construct; identical to SEQ ID NO: 22374
  source 1..120: mol_type = other DNA

SEQ ID NO: 52329 - DNA, 120 bp, synthetic construct; identical to SEQ ID NO: 7038
  source 1..120: mol_type = other DNA

SEQ ID NO: 52330 - DNA, 120 bp, synthetic construct; identical to SEQ ID NO: 22376
  source 1..120: mol_type = other DNA

SEQ ID NO: 52331 - DNA, 120 bp, synthetic construct; identical to SEQ ID NO: 22377
  source 1..120: mol_type = other DNA

SEQ ID NO: 52332 - DNA, 120 bp, synthetic construct; identical to SEQ ID NO: 22378
  source 1..120: mol_type = other DNA

SEQ ID NO: 52333 - DNA, 120 bp, synthetic construct; identical to SEQ ID NO: 7039
  source 1..120: mol_type = other DNA

SEQ ID NO: 52334 - DNA, 120 bp, synthetic construct; identical to SEQ ID NO: 22380
  source 1..120: mol_type = other DNA

SEQ ID NO: 52335 - DNA, 120 bp, synthetic construct; identical to SEQ ID NO: 22381
  source 1..120: mol_type = other DNA

SEQ ID NO: 52336 - DNA, 120 bp, synthetic construct; identical to SEQ ID NO: 22382
  source 1..120: mol_type = other DNA

SEQ ID NO: 52337 - DNA, 120 bp, synthetic construct; identical to SEQ ID NO: 7040
  source 1..120: mol_type = other DNA

SEQ ID NO: 52338 - DNA, 120 bp, synthetic construct; identical to SEQ ID NO: 22384
  source 1..120: mol_type = other DNA

SEQ ID NO: 52339 - DNA, 120 bp, synthetic construct; identical to SEQ ID NO: 22385
  source 1..120: mol_type = other DNA

SEQ ID NO: 52340 - DNA, 120 bp, synthetic construct; identical to SEQ ID NO: 22386
  source 1..120: mol_type = other DNA

SEQ ID NO: 52341 - DNA, 120 bp, synthetic construct; identical to SEQ ID NO: 7041
  source 1..120: mol_type = other DNA

SEQ ID NO: 52342 - DNA, 120 bp, synthetic construct; identical to SEQ ID NO: 22388
  source 1..120: mol_type = other DNA

SEQ ID NO: 52343 - DNA, 120 bp, synthetic construct; identical to SEQ ID NO: 22389
  source 1..120: mol_type = other DNA

SEQ ID NO: 52344 - DNA, 120 bp, synthetic construct; identical to SEQ ID NO: 22390
  source 1..120: mol_type = other DNA

SEQ ID NO: 52345 - DNA, 120 bp, synthetic construct; identical to SEQ ID NO: 7042
  source 1..120: mol_type = other DNA

SEQ ID NO: 52346 - DNA, 120 bp, synthetic construct; identical to SEQ ID NO: 22392
  source 1..120: mol_type = other DNA

SEQ ID NO: 52347 - DNA, 120 bp, synthetic construct; identical to SEQ ID NO: 22393
  source 1..120: mol_type = other DNA

SEQ ID NO: 52348 - DNA, 120 bp, synthetic construct; identical to SEQ ID NO: 22394
  source 1..120: mol_type = other DNA

SEQ ID NO: 52349 - DNA, 120 bp, synthetic construct; identical to SEQ ID NO: 22395
  source 1..120: mol_type = other DNA

SEQ ID NO: 52350 - DNA, 120 bp, synthetic construct; identical to SEQ ID NO: 7043
  source 1..120: mol_type = other DNA

SEQ ID NO: 52351 - DNA, 120 bp, synthetic construct; identical to SEQ ID NO: 22397
  source 1..120: mol_type = other DNA

SEQ ID NO: 52352 - DNA, 120 bp, synthetic construct; identical to SEQ ID NO: 22398
  source 1..120: mol_type = other DNA

SEQ ID NO: 52353 - DNA, 120 bp, synthetic construct; identical to SEQ ID NO: 22399
  source 1..120: mol_type = other DNA

SEQ ID NO: 52354 - DNA, 120 bp, synthetic construct; identical to SEQ ID NO: 7044
  source 1..120: mol_type = other DNA

SEQ ID NO: 52355 - DNA, 120 bp, synthetic construct; identical to SEQ ID NO: 22401
  source 1..120: mol_type = other DNA

SEQ ID NO: 52356 - DNA, 120 bp, synthetic construct; identical to SEQ ID NO: 22402
  source 1..120: mol_type = other DNA

SEQ ID NO: 52357 - DNA, 120 bp, synthetic construct; identical to SEQ ID NO: 7045
  source 1..120: mol_type = other DNA

SEQ ID NO: 52358 - DNA, 120 bp, synthetic construct; identical to SEQ ID NO: 22404
  source 1..120: mol_type = other DNA

SEQ ID NO: 52359 - DNA, 120 bp, synthetic construct; identical to SEQ ID NO: 22405
  source 1..120: mol_type = other DNA

SEQ ID NO: 52360 - DNA, 120 bp, synthetic construct; identical to SEQ ID NO: 22406
  source 1..120: mol_type = other DNA

SEQ ID NO: 52361 - DNA, 120 bp, synthetic construct; identical to SEQ ID NO: 7046
  source 1..120: mol_type = other DNA

SEQ ID NO: 52362 - DNA, 120 bp, synthetic construct; identical to SEQ ID NO: 22408
  source 1..120: mol_type = other DNA

SEQ ID NO: 52363 - DNA, 120 bp, synthetic construct; identical to SEQ ID NO: 22409
  source 1..120: mol_type = other DNA

SEQ ID NO: 52364 - DNA, 120 bp, synthetic construct; identical to SEQ ID NO: 22410
  source 1..120: mol_type = other DNA

SEQ ID NO: 52365 - DNA, 120 bp, synthetic construct; identical to SEQ ID NO: 22411
  source 1..120: mol_type = other DNA

SEQ ID NO: 52366 - DNA, 120 bp, synthetic construct; identical to SEQ ID NO: 7047
  source 1..120: mol_type = other DNA

SEQ ID NO: 52367 - DNA, 120 bp, synthetic construct; identical to SEQ ID NO: 22413
  source 1..120: mol_type = other DNA

SEQ ID NO: 52368 - DNA, 120 bp, synthetic construct; identical to SEQ ID NO: 22414
  source 1..120: mol_type = other DNA

SEQ ID NO: 52369 - DNA, 120 bp, synthetic construct; identical to SEQ ID NO: 22415
  source 1..120: mol_type = other DNA

SEQ ID NO: 52370 - DNA, 120 bp, synthetic construct; identical to SEQ ID NO: 7048
  source 1..120: mol_type = other DNA

SEQ ID NO: 52371 - DNA, 120 bp, synthetic construct; identical to SEQ ID NO: 22417
  source 1..120: mol_type = other DNA

SEQ ID NO: 52372 - DNA, 120 bp, synthetic construct; identical to SEQ ID NO: 22418
  source 1..120: mol_type = other DNA

SEQ ID NO: 52373 - DNA, 120 bp, synthetic construct; identical to SEQ ID NO: 7049
  source 1..120: mol_type = other DNA

SEQ ID NO: 52374 - DNA, 120 bp, synthetic construct; identical to SEQ ID NO: 22420
  source 1..120: mol_type = other DNA

SEQ ID NO: 52375 - DNA, 120 bp, synthetic construct; identical to SEQ ID NO: 22421
  source 1..120: mol_type = other DNA

SEQ ID NO: 52376 - DNA, 120 bp, synthetic construct; identical to SEQ ID NO: 22422
  source 1..120: mol_type = other DNA

SEQ ID NO: 52377 - DNA, 120 bp, synthetic construct; identical to SEQ ID NO: 7050
  source 1..120: mol_type = other DNA

SEQ ID NO: 52378 - DNA, 120 bp, synthetic construct; identical to SEQ ID NO: 22424
  source 1..120: mol_type = other DNA

SEQ ID NO: 52379 - DNA, 120 bp, synthetic construct; identical to SEQ ID NO: 22425
  source 1..120: mol_type = other DNA

SEQ ID NO: 52380 - DNA, 120 bp, synthetic construct; identical to SEQ ID NO: 22426
  source 1..120: mol_type = other DNA

SEQ ID NO: 52381 - DNA, 120 bp, synthetic construct; identical to SEQ ID NO: 22427
  source 1..120: mol_type = other DNA

SEQ ID NO: 52382 - DNA, 120 bp, synthetic construct; identical to SEQ ID NO: 7051
  source 1..120: mol_type = other DNA

SEQ ID NO: 52383 - DNA, 120 bp, synthetic construct; identical to SEQ ID NO: 22429
  source 1..120: mol_type = other DNA

SEQ ID NO: 52384 - DNA, 120 bp, synthetic construct; identical to SEQ ID NO: 22430
  source 1..120: mol_type = other DNA

SEQ ID NO: 52385 - DNA, 120 bp, synthetic construct; identical to SEQ ID NO: 22431
  source 1..120: mol_type = other DNA

SEQ ID NO: 52386 - DNA, 120 bp, synthetic construct; identical to SEQ ID NO: 7052
  source 1..120: mol_type = other DNA

SEQ ID NO: 52387 - DNA, 120 bp, synthetic construct; identical to SEQ ID NO: 22433
  source 1..120: mol_type = other DNA

SEQ ID NO: 52388 - DNA, 120 bp, synthetic construct; identical to SEQ ID NO: 22434
  source 1..120: mol_type = other DNA

SEQ ID NO: 52389 - DNA, 120 bp, synthetic construct; identical to SEQ ID NO: 22435
  source 1..120: mol_type = other DNA

SEQ ID NO: 52390 - DNA, 120 bp, synthetic construct; identical to SEQ ID NO: 7053
  source 1..120: mol_type = other DNA

SEQ ID NO: 52391 - DNA, 120 bp, synthetic construct; identical to SEQ ID NO: 22437
  source 1..120: mol_type = other DNA

SEQ ID NO: 52392 - DNA, 120 bp, synthetic construct; identical to SEQ ID NO: 22438
  source 1..120: mol_type = other DNA

SEQ ID NO: 52393 - DNA, 120 bp, synthetic construct; identical to SEQ ID NO: 22439
  source 1..120: mol_type = other DNA

SEQ ID NO: 52394 - DNA, 120 bp, synthetic construct; identical to SEQ ID NO: 7054
  source 1..120: mol_type = other DNA

SEQ ID NO: 52395 - DNA, 120 bp, synthetic construct; identical to SEQ ID NO: 22441
  source 1..120: mol_type = other DNA

SEQ ID NO: 52396 - DNA, 120 bp, synthetic construct; identical to SEQ ID NO: 22442
  source 1..120: mol_type = other DNA

SEQ ID NO: 52397 - DNA, 120 bp, synthetic construct; identical to SEQ ID NO: 7055
  source 1..120: mol_type = other DNA

SEQ ID NO: 52398 - DNA, 120 bp, synthetic construct; identical to SEQ ID NO: 22444
  source 1..120: mol_type = other DNA

SEQ ID NO: 52399 - DNA, 120 bp, synthetic construct; identical to SEQ ID NO: 22445
  source 1..120: mol_type = other DNA

SEQ ID NO: 52400 - DNA, 120 bp, synthetic construct; identical to SEQ ID NO: 22446
  source 1..120: mol_type = other DNA

SEQ ID NO: 52401 - DNA, 120 bp, synthetic construct; identical to SEQ ID NO: 7056
  source 1..120: mol_type = other DNA

SEQ ID NO: 52402 - DNA, 120 bp, synthetic construct; identical to SEQ ID NO: 22448
  source 1..120: mol_type = other DNA

SEQ ID NO: 52403 - DNA, 120 bp, synthetic construct; identical to SEQ ID NO: 22449
  source 1..120: mol_type = other DNA

SEQ ID NO: 52404 - DNA, 120 bp, synthetic construct; identical to SEQ ID NO: 22450
  source 1..120: mol_type = other DNA

SEQ ID NO: 52405 - DNA, 120 bp, synthetic construct; identical to SEQ ID NO: 7057
  source 1..120: mol_type = other DNA

SEQ ID NO: 52406 - DNA, 120 bp, synthetic construct; identical to SEQ ID NO: 22452
  source 1..120: mol_type = other DNA

SEQ ID NO: 52407 - DNA, 120 bp, synthetic construct; identical to SEQ ID NO: 22453
  source 1..120: mol_type = other DNA

SEQ ID NO: 52408 - DNA, 120 bp, synthetic construct; identical to SEQ ID NO: 22454
  source 1..120: mol_type = other DNA

SEQ ID NO: 52409 - DNA, 120 bp, synthetic construct; identical to SEQ ID NO: 22455
  source 1..120: mol_type = other DNA

SEQ ID NO: 52410 - DNA, 120 bp, synthetic construct; identical to SEQ ID NO: 7058
  source 1..120: mol_type = other DNA

SEQ ID NO: 52411 - DNA, 120 bp, synthetic construct; identical to SEQ ID NO: 22457
  source 1..120: mol_type = other DNA

SEQ ID NO: 52412 - DNA, 120 bp, synthetic construct; identical to SEQ ID NO: 22458
  source 1..120: mol_type = other DNA

SEQ ID NO: 52413 - DNA, 120 bp, synthetic construct; identical to SEQ ID NO: 22459
  source 1..120: mol_type = other DNA

SEQ ID NO: 52414 - DNA, 120 bp, synthetic construct; identical to SEQ ID NO: 7059
  source 1..120: mol_type = other DNA

SEQ ID NO: 52415 - DNA, 120 bp, synthetic construct; identical to SEQ ID NO: 22461
  source 1..120: mol_type = other DNA

SEQ ID NO: 52416 - DNA, 120 bp, synthetic construct; identical to SEQ ID NO: 22462
  source 1..120: mol_type = other DNA

SEQ ID NO: 52417 - DNA, 120 bp, synthetic construct; identical to SEQ ID NO: 22463
  source 1..120: mol_type = other DNA

SEQ ID NO: 52418 - DNA, 120 bp, synthetic construct; identical to SEQ ID NO: 7060
  source 1..120: mol_type = other DNA

SEQ ID NO: 52419 - DNA, 120 bp, synthetic construct; identical to SEQ ID NO: 22465
  source 1..120: mol_type = other DNA

SEQ ID NO: 52420 - DNA, 120 bp, synthetic construct; identical to SEQ ID NO: 22466
  source 1..120: mol_type = other DNA

SEQ ID NO: 52421 - DNA, 120 bp, synthetic construct; identical to SEQ ID NO: 22467
  source 1..120: mol_type = other DNA

SEQ ID NO: 52422 - DNA, 120 bp, synthetic construct; identical to SEQ ID NO: 7061
  source 1..120: mol_type = other DNA

SEQ ID NO: 52423 - DNA, 120 bp, synthetic construct; identical to SEQ ID NO: 22469
  source 1..120: mol_type = other DNA

SEQ ID NO: 52424 - DNA, 120 bp, synthetic construct; identical to SEQ ID NO: 22470
  source 1..120: mol_type = other DNA

SEQ ID NO: 52425 - DNA, 120 bp, synthetic construct; identical to SEQ ID NO: 22471
  source 1..120: mol_type = other DNA

SEQ ID NO: 52426 - DNA, 120 bp, synthetic construct; identical to SEQ ID NO: 22472
  source 1..120: mol_type = other DNA

SEQ ID NO: 52427 - DNA, 120 bp, synthetic construct; identical to SEQ ID NO: 7062
  source 1..120: mol_type = other DNA

SEQ ID NO: 52428 - DNA, 120 bp, synthetic construct; identical to SEQ ID NO: 22474
  source 1..120: mol_type = other DNA

SEQ ID NO: 52429 - DNA, 120 bp, synthetic construct; identical to SEQ ID NO: 22475
  source 1..120: mol_type = other DNA

SEQ ID NO: 52430 - DNA, 120 bp, synthetic construct; identical to SEQ ID NO: 7063
  source 1..120: mol_type = other DNA

SEQ ID NO: 52431 - DNA, 120 bp, synthetic construct; identical to SEQ ID NO: 22477
  source 1..120: mol_type = other DNA

SEQ ID NO: 52432 - DNA, 120 bp, synthetic construct; identical to SEQ ID NO: 22478
  source 1..120: mol_type = other DNA

SEQ ID NO: 52433 - DNA, 120 bp, synthetic construct; identical to SEQ ID NO: 22479
  source 1..120: mol_type = other DNA

SEQ ID NO: 52434 - DNA, 120 bp, synthetic construct; identical to SEQ ID NO: 7064
  source 1..120: mol_type = other DNA

SEQ ID NO: 52435 - DNA, 120 bp, synthetic construct; identical to SEQ ID NO: 22481
  source 1..120: mol_type = other DNA

SEQ ID NO: 52436 - DNA, 120 bp, synthetic construct; identical to SEQ ID NO: 22482
  source 1..120: mol_type = other DNA

SEQ ID NO: 52437 - DNA, 120 bp, synthetic construct; identical to SEQ ID NO: 22483
  source 1..120: mol_type = other DNA

SEQ ID NO: 52438 - DNA, 120 bp, synthetic construct; identical to SEQ ID NO: 7065
  source 1..120: mol_type = other DNA

SEQ ID NO: 52439 - DNA, 120 bp, synthetic construct; identical to SEQ ID NO: 22485
  source 1..120: mol_type = other DNA

SEQ ID NO: 52440 - DNA, 120 bp, synthetic construct; identical to SEQ ID NO: 22486
  source 1..120: mol_type = other DNA

SEQ ID NO: 52441 - DNA, 120 bp, synthetic construct; identical to SEQ ID NO: 22487
  source 1..120: mol_type = other DNA

SEQ ID NO: 52442 - DNA, 120 bp, synthetic construct; identical to SEQ ID NO: 22488
  source 1..120: mol_type = other DNA

SEQ ID NO: 52443 - DNA, 120 bp, synthetic construct; identical to SEQ ID NO: 7066
  source 1..120: mol_type = other DNA

SEQ ID NO: 52444 - DNA, 120 bp, synthetic construct; identical to SEQ ID NO: 22490
  source 1..120: mol_type = other DNA

SEQ ID NO: 52445 - DNA, 120 bp, synthetic construct; identical to SEQ ID NO: 22491
  source 1..120: mol_type = other DNA

SEQ ID NO: 52446 - DNA, 120 bp, synthetic construct; identical to SEQ ID NO: 22492
  source 1..120: mol_type = other DNA

SEQ ID NO: 52447 - DNA, 120 bp, synthetic construct; identical to SEQ ID NO: 7067
  source 1..120: mol_type = other DNA

SEQ ID NO: 52448 - DNA, 120 bp, synthetic construct; identical to SEQ ID NO: 22494
  source 1..120: mol_type = other DNA

SEQ ID NO: 52449 - DNA, 120 bp, synthetic construct; identical to SEQ ID NO: 22495
  source 1..120: mol_type = other DNA

SEQ ID NO: 52450 - DNA, 120 bp, synthetic construct; identical to SEQ ID NO: 7068
  source 1..120: mol_type = other DNA

SEQ ID NO: 52451 - DNA, 120 bp, synthetic construct; identical to SEQ ID NO: 22497
  source 1..120: mol_type = other DNA

SEQ ID NO: 52452 - DNA, 120 bp, synthetic construct; identical to SEQ ID NO: 22498
  source 1..120: mol_type = other DNA

SEQ ID NO: 52453 - DNA, 120 bp, synthetic construct; identical to SEQ ID NO: 22499
  source 1..120: mol_type = other DNA

SEQ ID NO: 52454 - DNA, 120 bp, synthetic construct; identical to SEQ ID NO: 7069
  source 1..120: mol_type = other DNA

SEQ ID NO: 52455 - DNA, 120 bp, synthetic construct; identical to SEQ ID NO: 22501
  source 1..120: mol_type = other DNA

SEQ ID NO: 52456 - DNA, 120 bp, synthetic construct; identical to SEQ ID NO: 22502
  source 1..120: mol_type = other DNA

SEQ ID NO: 52457 - DNA, 120 bp, synthetic construct; identical to SEQ ID NO: 22503
  source 1..120: mol_type = other DNA

SEQ ID NO: 52458 - DNA, 120 bp, synthetic construct; identical to SEQ ID NO: 22504
  source 1..120: mol_type = other DNA

SEQ ID NO: 52459 - DNA, 120 bp, synthetic construct; identical to SEQ ID NO: 7070
  source 1..120: mol_type = other DNA

SEQ ID NO: 52460 - DNA, 120 bp, synthetic construct; identical to SEQ ID NO: 22506
  source 1..120: mol_type = other DNA

SEQ ID NO: 52461 - DNA, 120 bp, synthetic construct; identical to SEQ ID NO: 22507
  source 1..120: mol_type = other DNA

SEQ ID NO: 52462 - DNA, 120 bp, synthetic construct; identical to SEQ ID NO: 22508
  source 1..120: mol_type = other DNA

SEQ ID NO: 52463 - DNA, 120 bp, synthetic construct; identical to SEQ ID NO: 7071
  source 1..120: mol_type = other DNA

SEQ ID NO: 52464 - DNA, 120 bp, synthetic construct; identical to SEQ ID NO: 22510
  source 1..120: mol_type = other DNA

SEQ ID NO: 52465 - DNA, 120 bp, synthetic construct; identical to SEQ ID NO: 22511
  source 1..120: mol_type = other DNA

SEQ ID NO: 52466 - DNA, 120 bp, synthetic construct; identical to SEQ ID NO: 22512
  source 1..120: mol_type = other DNA

SEQ ID NO: 52467 - DNA, 120 bp, synthetic construct; identical to SEQ ID NO: 22513
  source 1..120: mol_type = other DNA

SEQ ID NO: 52468 - DNA, 120 bp, synthetic construct; identical to SEQ ID NO: 7072
  source 1..120: mol_type = other DNA

SEQ ID NO: 52469 - DNA, 120 bp, synthetic construct; identical to SEQ ID NO: 22515
  source 1..120: mol_type = other DNA

SEQ ID NO: 52470 - DNA, 120 bp, synthetic construct; identical to SEQ ID NO: 22516
  source 1..120: mol_type = other DNA

SEQ ID NO: 52471 - DNA, 120 bp, synthetic construct; identical to SEQ ID NO: 7073
  source 1..120: mol_type = other DNA

SEQ ID NO: 52472 - DNA, 120 bp, synthetic construct; identical to SEQ ID NO: 22518
  source 1..120: mol_type = other DNA

SEQ ID NO: 52473 - DNA, 120 bp, synthetic construct; identical to SEQ ID NO: 22519
  source 1..120: mol_type = other DNA

SEQ ID NO: 52474 - DNA, 120 bp, synthetic construct; identical to SEQ ID NO: 22520
  source 1..120: mol_type = other DNA

SEQ ID NO: 52475 - DNA, 120 bp, synthetic construct; identical to SEQ ID NO: 7074
  source 1..120: mol_type = other DNA

SEQ ID NO: 52476 - DNA, 120 bp, synthetic construct; identical to SEQ ID NO: 22522
  source 1..120: mol_type = other DNA

SEQ ID NO: 52477 - DNA, 120 bp, synthetic construct; identical to SEQ ID NO: 22523
  source 1..120: mol_type = other DNA

SEQ ID NO: 52478 - DNA, 120 bp, synthetic construct; identical to SEQ ID NO: 22524
  source 1..120: mol_type = other DNA

SEQ ID NO: 52479 - DNA, 120 bp, synthetic construct; identical to SEQ ID NO: 7075
  source 1..120: mol_type = other DNA

SEQ ID NO: 52480 - DNA, 120 bp, synthetic construct; identical to SEQ ID NO: 22526
  source 1..120: mol_type = other DNA

SEQ ID NO: 52481 - DNA, 120 bp, synthetic construct; identical to SEQ ID NO: 22527
  source 1..120: mol_type = other DNA

SEQ ID NO: 52482 - DNA, 120 bp, synthetic construct; identical to SEQ ID NO: 22528
  source 1..120: mol_type = other DNA

SEQ ID NO: 52483 - DNA, 120 bp, synthetic construct; identical to SEQ ID NO: 7076
  source 1..120: mol_type = other DNA

SEQ ID NO: 52484 - DNA, 120 bp, synthetic construct; identical to SEQ ID NO: 22530
  source 1..120: mol_type = other DNA

SEQ ID NO: 52485 - DNA, 120 bp, synthetic construct; identical to SEQ ID NO: 22531
  source 1..120: mol_type = other DNA

SEQ ID NO: 52486 - DNA, 120 bp, synthetic construct; identical to SEQ ID NO: 22532
  source 1..120: mol_type = other DNA

SEQ ID NO: 52487 - DNA, 120 bp, synthetic construct; identical to SEQ ID NO: 22533
  source 1..120: mol_type = other DNA

SEQ ID NO: 52488 - DNA, 120 bp, synthetic construct; identical to SEQ ID NO: 7077
  source 1..120: mol_type = other DNA

SEQ ID NO: 52489 - DNA, 120 bp, synthetic construct; identical to SEQ ID NO: 22535
  source 1..120: mol_type = other DNA

SEQ ID NO: 52490 - DNA, 120 bp, synthetic construct; identical to SEQ ID NO: 22536
  source 1..120: mol_type = other DNA

SEQ ID NO: 52491 - DNA, 120 bp, synthetic construct; identical to SEQ ID NO: 22537
  source 1..120: mol_type = other DNA

SEQ ID NO: 52492 - DNA, 120 bp, synthetic construct; identical to SEQ ID NO: 7078
  source 1..120: mol_type = other DNA

SEQ ID NO: 52493 - DNA, 120 bp, synthetic construct; identical to SEQ ID NO: 22539
  source 1..120: mol_type = other DNA

SEQ ID NO: 52494 - DNA, 120 bp, synthetic construct; identical to SEQ ID NO: 22540
  source 1..120: mol_type = other DNA

SEQ ID NO: 52495 - DNA, 120 bp, synthetic construct; identical to SEQ ID NO: 7079
  source 1..120: mol_type = other DNA

SEQ ID NO: 52496 - DNA, 120 bp, synthetic construct; identical to SEQ ID NO: 22542
  source 1..120: mol_type = other DNA

SEQ ID NO: 52497 - DNA, 120 bp, synthetic construct; identical to SEQ ID NO: 22543
  source 1..120: mol_type = other DNA

SEQ ID NO: 52498 - DNA, 120 bp, synthetic construct; identical to SEQ ID NO: 22544
  source 1..120: mol_type = other DNA

SEQ ID NO: 52499 - DNA, 120 bp, synthetic construct; identical to SEQ ID NO: 22545
  source 1..120: mol_type = other DNA

SEQ ID NO: 52500 - DNA, 120 bp, synthetic construct; identical to SEQ ID NO: 7080
  source 1..120: mol_type = other DNA

SEQ ID NO: 52501 - DNA, 120 bp, synthetic construct; identical to SEQ ID NO: 22547
  source 1..120: mol_type = other DNA

SEQ ID NO: 52502 - DNA, 120 bp, synthetic construct; identical to SEQ ID NO: 22548
  source 1..120: mol_type = other DNA

SEQ ID NO: 52503 - DNA, 120 bp, synthetic construct; identical to SEQ ID NO: 7081
  source 1..120: mol_type = other DNA

SEQ ID NO: 52504 - DNA, 120 bp, synthetic construct; identical to SEQ ID NO: 22550
  source 1..120: mol_type = other DNA

SEQ ID NO: 52505 - DNA, 120 bp, synthetic construct; identical to SEQ ID NO: 22551
  source 1..120: mol_type = other DNA

SEQ ID NO: 52506 - DNA, 120 bp, synthetic construct; identical to SEQ ID NO: 22552
  source 1..120: mol_type = other DNA

SEQ ID NO: 52507 - DNA, 120 bp, synthetic construct; identical to SEQ ID NO: 7082
  source 1..120: mol_type = other DNA

SEQ ID NO: 52508 - DNA, 120 bp, synthetic construct; identical to SEQ ID NO: 22554
  source 1..120: mol_type = other DNA

SEQ ID NO: 52509 - DNA, 120 bp, synthetic construct; identical to SEQ ID NO: 22555
  source 1..120: mol_type = other DNA

SEQ ID NO: 52510 - DNA, 120 bp, synthetic construct; identical to SEQ ID NO: 22556
  source 1..120: mol_type = other DNA

SEQ ID NO: 52511 - DNA, 120 bp, synthetic construct; identical to SEQ ID NO: 7083
  source 1..120: mol_type = other DNA

SEQ ID NO: 52512 - DNA, 120 bp, synthetic construct; identical to SEQ ID NO: 22558
  source 1..120: mol_type = other DNA

SEQ ID NO: 52513 - DNA, 120 bp, synthetic construct; identical to SEQ ID NO: 22559
  source 1..120: mol_type = other DNA

SEQ ID NO: 52514 - DNA, 120 bp, synthetic construct; identical to SEQ ID NO: 22560
  source 1..120: mol_type = other DNA

SEQ ID NO: 52515 - DNA, 120 bp, synthetic construct; identical to SEQ ID NO: 22561
  source 1..120: mol_type = other DNA

SEQ ID NO: 52516 - DNA, 120 bp, synthetic construct; identical to SEQ ID NO: 7084
  source 1..120: mol_type = other DNA

SEQ ID NO: 52517 - DNA, 120 bp, synthetic construct; identical to SEQ ID NO: 22563
  source 1..120: mol_type = other DNA

SEQ ID NO: 52518 - DNA, 120 bp, synthetic construct; identical to SEQ ID NO: 22564
  source 1..120: mol_type = other DNA

SEQ ID NO: 52519 - DNA, 120 bp, synthetic construct; identical to SEQ ID NO: 7085
  source 1..120: mol_type = other DNA

SEQ ID NO: 52520 - DNA, 120 bp, synthetic construct; identical to SEQ ID NO: 22566
  source 1..120: mol_type = other DNA

SEQ ID NO: 52521 - DNA, 120 bp, synthetic construct; identical to SEQ ID NO: 22567
  source 1..120: mol_type = other DNA

SEQ ID NO: 52522 - DNA, 120 bp, synthetic construct; identical to SEQ ID NO: 22568
  source 1..120: mol_type = other DNA

SEQ ID NO: 52523 - DNA, 120 bp, synthetic construct; identical to SEQ ID NO: 22569
  source 1..120: mol_type = other DNA

SEQ ID NO: 52524 - DNA, 120 bp, synthetic construct; identical to SEQ ID NO: 7086
  source 1..120: mol_type = other DNA

SEQ ID NO: 52525 - DNA, 120 bp, synthetic construct; identical to SEQ ID NO: 22571
  source 1..120: mol_type = other DNA

SEQ ID NO: 52526 - DNA, 120 bp, synthetic construct; identical to SEQ ID NO: 22572
  source 1..120: mol_type = other DNA

SEQ ID NO: 52527 - DNA, 120 bp, synthetic construct; identical to SEQ ID NO: 22573
  source 1..120: mol_type = other DNA

SEQ ID NO: 52528 - DNA, 120 bp, synthetic construct; identical to SEQ ID NO: 7087
  source 1..120: mol_type = other DNA

SEQ ID NO: 52529 - DNA, 120 bp, synthetic construct; identical to SEQ ID NO: 22575
  source 1..120: mol_type = other DNA

SEQ ID NO: 52530 - DNA, 120 bp, synthetic construct; identical to SEQ ID NO: 22576
  source 1..120: mol_type = other DNA

SEQ ID NO: 52531 - DNA, 120 bp, synthetic construct; identical to SEQ ID NO: 22577
  source 1..120: mol_type = other DNA

SEQ ID NO: 52532 - DNA, 120 bp, synthetic construct; identical to SEQ ID NO: 22578
  source 1..120: mol_type = other DNA

SEQ ID NO: 52533 - DNA, 120 bp, synthetic construct; identical to SEQ ID NO: 7088
  source 1..120: mol_type = other DNA

SEQ ID NO: 52534 - DNA, 120 bp, synthetic construct; identical to SEQ ID NO: 22580
  source 1..120: mol_type = other DNA

SEQ ID NO: 52535 - DNA, 120 bp, synthetic construct; identical to SEQ ID NO: 22581
  source 1..120: mol_type = other DNA

SEQ ID NO: 52536 - DNA, 120 bp, synthetic construct; identical to SEQ ID NO: 22582
  source 1..120: mol_type = other DNA

SEQ ID NO: 52537 - DNA, 120 bp, synthetic construct; identical to SEQ ID NO: 7089
  source 1..120: mol_type = other DNA

SEQ ID NO: 52538 - DNA, 120 bp, synthetic construct; identical to SEQ ID NO: 22584
  source 1..120: mol_type = other DNA

SEQ ID NO: 52539 - DNA, 120 bp, synthetic construct; identical to SEQ ID NO: 22585
  source 1..120: mol_type = other DNA

SEQ ID NO: 52540 - DNA, 120 bp, synthetic construct; identical to SEQ ID NO: 22586
  source 1..120: mol_type = other DNA

SEQ ID NO: 52541 - DNA, 120 bp, synthetic construct; identical to SEQ ID NO: 7090
  source 1..120: mol_type = other DNA

SEQ ID NO: 52542 - DNA, 120 bp, synthetic construct; identical to SEQ ID NO: 22588
  source 1..120: mol_type = other DNA

SEQ ID NO: 52543 - DNA, 120 bp, synthetic construct; identical to SEQ ID NO: 22589
  source 1..120: mol_type = other DNA

SEQ ID NO: 52544 - DNA, 120 bp, synthetic construct; identical to SEQ ID NO: 22590
  source 1..120: mol_type = other DNA

SEQ ID NO: 52545 - DNA, 120 bp, synthetic construct; identical to SEQ ID NO: 128
  source 1..120: mol_type = other DNA

SEQ ID NO: 52546 - DNA, 120 bp, synthetic construct; identical to SEQ ID NO: 22592
  source 1..120: mol_type = other DNA

SEQ ID NO: 52547 - DNA, 120 bp, synthetic construct; identical to SEQ ID NO: 22593
  source 1..120: mol_type = other DNA

SEQ ID NO: 52548 - DNA, 120 bp, synthetic construct; identical to SEQ ID NO: 7092
  source 1..120: mol_type = other DNA

SEQ ID NO: 52549 - DNA, 120 bp, synthetic construct; identical to SEQ ID NO: 22595
  source 1..120: mol_type = other DNA

SEQ ID NO: 52550 - DNA, 120 bp, synthetic construct; identical to SEQ ID NO: 22596
  source 1..120: mol_type = other DNA

SEQ ID NO: 52551 - DNA, 120 bp, synthetic construct; identical to SEQ ID NO: 22597
  source 1..120: mol_type = other DNA

SEQ ID NO: 52552 - DNA, 120 bp, synthetic construct; identical to SEQ ID NO: 22598
  source 1..120: mol_type = other DNA

SEQ ID NO: 52553 - DNA, 120 bp, synthetic construct; identical to SEQ ID NO: 7093
  source 1..120: mol_type = other DNA

SEQ ID NO: 52554 - DNA, 120 bp, synthetic construct; identical to SEQ ID NO: 22600
  source 1..120: mol_type = other DNA

SEQ ID NO: 52555 - DNA, 120 bp, synthetic construct; identical to SEQ ID NO: 22601
  source 1..120: mol_type = other DNA

SEQ ID NO: 52556 - DNA, 120 bp, synthetic construct; identical to SEQ ID NO: 22602
  source 1..120: mol_type = other DNA

SEQ ID NO: 52557 - DNA, 120 bp, synthetic construct; identical to SEQ ID NO: 7094
  source 1..120: mol_type = other DNA

SEQ ID NO: 52558 - DNA, 120 bp, synthetic construct; identical to SEQ ID NO: 22604
  source 1..120: mol_type = other DNA

SEQ ID NO: 52559 - DNA, 120 bp, synthetic construct; identical to SEQ ID NO: 22605
  source 1..120: mol_type = other DNA

SEQ ID NO: 52560 - DNA, 120 bp, synthetic construct; identical to SEQ ID NO: 22606
  source 1..120: mol_type = other DNA

SEQ ID NO: 52561 - DNA, 120 bp, synthetic construct; identical to SEQ ID NO: 7095
  source 1..120: mol_type = other DNA

SEQ ID NO: 52562 - DNA, 120 bp, synthetic construct; identical to SEQ ID NO: 22608
  source 1..120: mol_type = other DNA

SEQ ID NO: 52563 - DNA, 120 bp, synthetic construct; identical to SEQ ID NO: 22609
  source 1..120: mol_type = other DNA

SEQ ID NO: 52564 - DNA, 120 bp, synthetic construct; identical to SEQ ID NO: 22610
  source 1..120: mol_type = other DNA

SEQ ID NO: 52565 - DNA, 120 bp, synthetic construct; identical to SEQ ID NO: 7096
  source 1..120: mol_type = other DNA

SEQ ID NO: 52566 - DNA, 120 bp, synthetic construct; identical to SEQ ID NO: 22612
  source 1..120: mol_type = other DNA

SEQ ID NO: 52567 - DNA, 120 bp, synthetic construct; identical to SEQ ID NO: 22613
  source 1..120: mol_type = other DNA

SEQ ID NO: 52568 - DNA, 120 bp, synthetic construct; identical to SEQ ID NO: 22614
  source 1..120: mol_type = other DNA

SEQ ID NO: 52569 - DNA, 120 bp, synthetic construct; identical to SEQ ID NO: 7097
  source 1..120: mol_type = other DNA

SEQ ID NO: 52570 - DNA, 120 bp, synthetic construct; identical to SEQ ID NO: 22616
  source 1..120: mol_type = other DNA

SEQ ID NO: 52571 - DNA, 120 bp, synthetic construct; identical to SEQ ID NO: 22617
  source 1..120: mol_type = other DNA

SEQ ID NO: 52572 - DNA, 120 bp, synthetic construct; identical to SEQ ID NO: 7098
  source 1..120: mol_type = other DNA

SEQ ID NO: 52573 - DNA, 120 bp, synthetic construct; identical to SEQ ID NO: 22619
  source 1..120: mol_type = other DNA

SEQ ID NO: 52574 - DNA, 120 bp, synthetic construct; identical to SEQ ID NO: 22620
  source 1..120: mol_type = other DNA

SEQ ID NO: 52575 - DNA, 120 bp, synthetic construct; identical to SEQ ID NO: 22621
  source 1..120: mol_type = other DNA

SEQ ID NO: 52576 - DNA, 120 bp, synthetic construct; identical to SEQ ID NO: 7099
  source 1..120: mol_type = other DNA

SEQ ID NO: 52577 - DNA, 120 bp, synthetic construct; identical to SEQ ID NO: 22623
  source 1..120: mol_type = other DNA

SEQ ID NO: 52578 - DNA, 120 bp, synthetic construct; identical to SEQ ID NO: 22624
  source 1..120: mol_type = other DNA

SEQ ID NO: 52579 - DNA, 120 bp, synthetic construct; identical to SEQ ID NO: 22625
  source 1..120: mol_type = other DNA

SEQ ID NO: 52580 - DNA, 120 bp, synthetic construct; identical to SEQ ID NO: 7100
  source 1..120: mol_type = other DNA

SEQ ID NO: 52581 - DNA, 120 bp, synthetic construct; identical to SEQ ID NO: 22627
  source 1..120: mol_type = other DNA

SEQ ID NO: 52582 - DNA, 120 bp, synthetic construct; identical to SEQ ID NO: 22628
  source 1..120: mol_type = other DNA

SEQ ID NO: 52583 - DNA, 120 bp, synthetic construct; identical to SEQ ID NO: 22629
  source 1..120: mol_type = other DNA

SEQ ID NO: 52584 - DNA, 120 bp, synthetic construct; identical to SEQ ID NO: 22630
  source 1..120: mol_type = other DNA

SEQ ID NO: 52585 - DNA, 120 bp, synthetic construct; identical to SEQ ID NO: 7101
  source 1..120: mol_type = other DNA

SEQ ID NO: 52586 - DNA, 120 bp, synthetic construct; identical to SEQ ID NO: 22632
  source 1..120: mol_type = other DNA

SEQ ID NO: 52587 - DNA, 120 bp, synthetic construct; identical to SEQ ID NO: 22633
  source 1..120: mol_type = other DNA

SEQ ID NO: 52588 - DNA, 120 bp, synthetic construct; identical to SEQ ID NO: 7102
  source 1..120: mol_type = other DNA

SEQ ID NO: 52589 - DNA, 120 bp, synthetic construct; identical to SEQ ID NO: 22635
  source 1..120: mol_type = other DNA

SEQ ID NO: 52590 - DNA, 120 bp, synthetic construct; identical to SEQ ID NO: 22636
  source 1..120: mol_type = other DNA

SEQ ID NO: 52591 - DNA, 120 bp, synthetic construct; identical to SEQ ID NO: 22637
  source 1..120: mol_type = other DNA

SEQ ID NO: 52592 - DNA, 120 bp, synthetic construct; identical to SEQ ID NO: 7103
  source 1..120: mol_type = other DNA

SEQ ID NO: 52593 - DNA, 120 bp, synthetic construct; identical to SEQ ID NO: 22639
  source 1..120: mol_type = other DNA

SEQ ID NO: 52594 - DNA, 120 bp, synthetic construct; identical to SEQ ID NO: 22640
  source 1..120: mol_type = other DNA

SEQ ID NO: 52595 - DNA, 120 bp, synthetic construct; identical to SEQ ID NO: 22641
  source 1..120: mol_type = other DNA

SEQ ID NO: 52596 - DNA, 120 bp, synthetic construct; identical to SEQ ID NO: 7104
  source 1..120: mol_type = other DNA

SEQ ID NO: 52597 - DNA, 120 bp, synthetic construct; identical to SEQ ID NO: 22643
  source 1..120: mol_type = other DNA

SEQ ID NO: 52598 - DNA, 120 bp, synthetic construct; identical to SEQ ID NO: 22644
  source 1..120: mol_type = other DNA

SEQ ID NO: 52599 - DNA, 120 bp, synthetic construct; identical to SEQ ID NO: 22645
  source 1..120: mol_type = other DNA

SEQ ID NO: 52600 - DNA, 120 bp, synthetic construct; identical to SEQ ID NO: 7105
  source 1..120: mol_type = other DNA

SEQ ID NO: 52601 - DNA, 120 bp, synthetic construct; identical to SEQ ID NO: 22647
  source 1..120: mol_type = other DNA

SEQ ID NO: 52602 - DNA, 120 bp, synthetic construct; identical to SEQ ID NO: 22648
  source 1..120: mol_type = other DNA

SEQ ID NO: 52603 - DNA, 120 bp, synthetic construct; identical to SEQ ID NO: 22649
  source 1..120: mol_type = other DNA

SEQ ID NO: 52604 - DNA, 120 bp, synthetic construct; identical to SEQ ID NO: 7106
  source 1..120: mol_type = other DNA

SEQ ID NO: 52605 - DNA, 120 bp, synthetic construct; identical to SEQ ID NO: 22651
  source 1..120: mol_type = other DNA

SEQ ID NO: 52606 - DNA, 120 bp, synthetic construct; identical to SEQ ID NO: 22652
  source 1..120: mol_type = other DNA

SEQ ID NO: 52607 - DNA, 120 bp, synthetic construct; identical to SEQ ID NO: 22653
  source 1..120: mol_type = other DNA

SEQ ID NO: 52608 - DNA, 120 bp, synthetic construct; identical to SEQ ID NO: 22654
  source 1..120: mol_type = other DNA

SEQ ID NO: 52609 - DNA, 120 bp, synthetic construct; identical to SEQ ID NO: 7107
  source 1..120: mol_type = other DNA

SEQ ID NO: 52610 - DNA, 120 bp, synthetic construct; identical to SEQ ID NO: 22656
  source 1..120: mol_type = other DNA

SEQ ID NO: 52611 - DNA, 120 bp, synthetic construct; identical to SEQ ID NO: 22657
  source 1..120: mol_type = other DNA

SEQ ID NO: 52612 - DNA, 120 bp, synthetic construct; identical to SEQ ID NO: 7108
  source 1..120: mol_type = other DNA

SEQ ID NO: 52613 - DNA, 120 bp, synthetic construct; identical to SEQ ID NO: 22659
  source 1..120: mol_type = other DNA

SEQ ID NO: 52614 - DNA, 120 bp, synthetic construct; identical to SEQ ID NO: 22660
  source 1..120: mol_type = other DNA

SEQ ID NO: 52615 - DNA, 120 bp, synthetic construct; identical to SEQ ID NO: 22661
  source 1..120: mol_type = other DNA

SEQ ID NO: 52616 - DNA, 120 bp, synthetic construct; identical to SEQ ID NO: 22662
  source 1..120: mol_type = other DNA

SEQ ID NO: 52617 - DNA, 120 bp, synthetic construct; identical to SEQ ID NO: 7109
  source 1..120: mol_type = other DNA

SEQ ID NO: 52618 - DNA, 120 bp, synthetic construct; identical to SEQ ID NO: 22664
  source 1..120: mol_type = other DNA

SEQ ID NO: 52619 - DNA, 120 bp, synthetic construct; identical to SEQ ID NO: 22665
  source 1..120: mol_type = other DNA

SEQ ID NO: 52620 - DNA, 120 bp, synthetic construct; identical to SEQ ID NO: 22666
  source 1..120: mol_type = other DNA

SEQ ID NO: 52621 - DNA, 120 bp, synthetic construct; identical to SEQ ID NO: 22667
  source 1..120: mol_type = other DNA

SEQ ID NO: 52622 - DNA, 120 bp, synthetic construct; identical to SEQ ID NO: 7110
  source 1..120: mol_type = other DNA

SEQ ID NO: 52623 - DNA, 120 bp, synthetic construct; identical to SEQ ID NO: 22669
  source 1..120: mol_type = other DNA

SEQ ID NO: 52624 - DNA, 120 bp, synthetic construct; identical to SEQ ID NO: 22670
  source 1..120: mol_type = other DNA

SEQ ID NO: 52625 - DNA, 120 bp, synthetic construct; identical to SEQ ID NO: 7111
  source 1..120: mol_type = other DNA

SEQ ID NO: 52626 - DNA, 120 bp, synthetic construct; identical to SEQ ID NO: 22672
  source 1..120: mol_type = other DNA

SEQ ID NO: 52627 - DNA, 120 bp, synthetic construct; identical to SEQ ID NO: 22673
  source 1..120: mol_type = other DNA

SEQ ID NO: 52628 - DNA, 120 bp, synthetic construct; identical to SEQ ID NO: 22674
  source 1..120: mol_type = other DNA

SEQ ID NO: 52629 - DNA, 120 bp, synthetic construct; identical to SEQ ID NO: 7112
  source 1..120: mol_type = other DNA

SEQ ID NO: 52630 - DNA, 120 bp, synthetic construct; identical to SEQ ID NO: 22676
  source 1..120: mol_type = other DNA

SEQ ID NO: 52631 - DNA, 120 bp, synthetic construct; identical to SEQ ID NO: 22677
  source 1..120: mol_type = other DNA

SEQ ID NO: 52632 - DNA, 120 bp, synthetic construct; identical to SEQ ID NO: 7113
  source 1..120: mol_type = other DNA

SEQ ID NO: 52633 - DNA, 120 bp, synthetic construct; identical to SEQ ID NO: 22679
  source 1..120: mol_type = other DNA

SEQ ID NO: 52634 - DNA, 120 bp, synthetic construct; identical to SEQ ID NO: 22680
  source 1..120: mol_type = other DNA

SEQ ID NO: 52635 - DNA, 120 bp, synthetic construct; identical to SEQ ID NO: 22681
  source 1..120: mol_type = other DNA

SEQ ID NO: 52636 - DNA, 120 bp, synthetic construct; identical to SEQ ID NO: 22682
  source 1..120: mol_type = other DNA

SEQ ID NO: 52637 - DNA, 120 bp, synthetic construct; identical to SEQ ID NO: 7114
  source 1..120: mol_type = other DNA

SEQ ID NO: 52638 - DNA, 120 bp, synthetic construct; identical to SEQ ID NO: 22684
  source 1..120: mol_type = other DNA

SEQ ID NO: 52639 - DNA, 120 bp, synthetic construct; identical to SEQ ID NO: 22685
  source 1..120: mol_type = other DNA

SEQ ID NO: 52640 - DNA, 120 bp, synthetic construct; identical to SEQ ID NO: 22686
  source 1..120: mol_type = other DNA

SEQ ID NO: 52641 - DNA, 120 bp, synthetic construct; identical to SEQ ID NO: 7115
  source 1..120: mol_type = other DNA

SEQ ID NO: 52642 - DNA, 120 bp, synthetic construct; identical to SEQ ID NO: 22688
  source 1..120: mol_type = other DNA

SEQ ID NO: 52643 - DNA, 120 bp, synthetic construct; identical to SEQ ID NO: 22689
  source 1..120: mol_type = other DNA

SEQ ID NO: 52644 - DNA, 120 bp, synthetic construct; identical to SEQ ID NO: 22690
  source 1..120: mol_type = other DNA

SEQ ID NO: 52645 - DNA, 120 bp, synthetic construct; identical to SEQ ID NO: 7116
  source 1..120: mol_type = other DNA

SEQ ID NO: 52646 - DNA, 120 bp, synthetic construct; identical to SEQ ID NO: 22692
  source 1..120: mol_type = other DNA

SEQ ID NO: 52647 - DNA, 120 bp, synthetic construct; identical to SEQ ID NO: 22693
  source 1..120: mol_type = other DNA

SEQ ID NO: 52648 - DNA, 120 bp, synthetic construct; identical to SEQ ID NO: 7117
  source 1..120: mol_type = other DNA

SEQ ID NO: 52649 - DNA, 120 bp, synthetic construct; identical to SEQ ID NO: 22695
  source 1..120: mol_type = other DNA

SEQ ID NO: 52650 - DNA, 120 bp, synthetic construct; identical to SEQ ID NO: 22696
  source 1..120: mol_type = other DNA

SEQ ID NO: 52651 - DNA, 120 bp, synthetic construct; identical to SEQ ID NO: 22697
  source 1..120: mol_type = other DNA

SEQ ID NO: 52652 - DNA, 120 bp, synthetic construct; identical to SEQ ID NO: 7118
  source 1..120: mol_type = other DNA

SEQ ID NO: 52653 - DNA, 120 bp, synthetic construct; identical to SEQ ID NO: 22699
  source 1..120: mol_type = other DNA

SEQ ID NO: 52654 - DNA, 120 bp, synthetic construct; identical to SEQ ID NO: 22700
  source 1..120: mol_type = other DNA

SEQ ID NO: 52655 - DNA, 120 bp, synthetic construct; identical to SEQ ID NO: 22701
  source 1..120: mol_type = other DNA

SEQ ID NO: 52656 - DNA, 120 bp, synthetic construct; identical to SEQ ID NO: 22702
  source 1..120: mol_type = other DNA

SEQ ID NO: 52657 - DNA, 120 bp, synthetic construct; identical to SEQ ID NO: 7119
  source 1..120: mol_type = other DNA

SEQ ID NO: 52658 - DNA, 120 bp, synthetic construct; identical to SEQ ID NO: 22704
  source 1..120: mol_type = other DNA

SEQ ID NO: 52659 - DNA, 120 bp, synthetic construct; identical to SEQ ID NO: 22705
  source 1..120: mol_type = other DNA

SEQ ID NO: 52660 - DNA, 120 bp, synthetic construct; identical to SEQ ID NO: 7120
  source 1..120: mol_type = other DNA

SEQ ID NO: 52661 - DNA, 120 bp, synthetic construct; identical to SEQ ID NO: 22707
  source 1..120: mol_type = other DNA

SEQ ID NO: 52662 - DNA, 120 bp, synthetic construct; identical to SEQ ID NO: 22708
  source 1..120: mol_type = other DNA

SEQ ID NO: 52663 - DNA, 120 bp, synthetic construct; identical to SEQ ID NO: 22709
  source 1..120: mol_type = other DNA

SEQ ID NO: 52664 - DNA, 120 bp, synthetic construct; identical to SEQ ID NO: 7121
  source 1..120: mol_type = other DNA

SEQ ID NO: 52665 - DNA, 120 bp, synthetic construct; identical to SEQ ID NO: 22711
  source 1..120: mol_type = other DNA

SEQ ID NO: 52666 - DNA, 120 bp, synthetic construct; identical to SEQ ID NO: 22712
  source 1..120: mol_type = other DNA

SEQ ID NO: 52667 - DNA, 120 bp, synthetic construct; identical to SEQ ID NO: 22713
  source 1..120: mol_type = other DNA

SEQ ID NO: 52668 - DNA, 120 bp, synthetic construct; identical to SEQ ID NO: 7122
  source 1..120: mol_type = other DNA

SEQ ID NO: 52669 - DNA, 120 bp, synthetic construct; identical to SEQ ID NO: 22715
  source 1..120: mol_type = other DNA

SEQ ID NO: 52670 - DNA, 120 bp, synthetic construct; identical to SEQ ID NO: 22716
  source 1..120: mol_type = other DNA

SEQ ID NO: 52671 - DNA, 120 bp, synthetic construct; identical to SEQ ID NO: 22717
  source 1..120: mol_type = other DNA

SEQ ID NO: 52672 - DNA, 120 bp, synthetic construct; identical to SEQ ID NO: 22718
  source 1..120: mol_type = other DNA

SEQ ID NO: 52673 - DNA, 120 bp, synthetic construct; identical to SEQ ID NO: 7123
  source 1..120: mol_type = other DNA

SEQ ID NO: 52674 - DNA, 120 bp, synthetic construct; identical to SEQ ID NO: 22720
  source 1..120: mol_type = other DNA

SEQ ID NO: 52675 - DNA, 120 bp, synthetic construct; identical to SEQ ID NO: 22721
  source 1..120: mol_type = other DNA

SEQ ID NO: 52676 - DNA, 120 bp, synthetic construct; identical to SEQ ID NO: 22722
  source 1..120: mol_type = other DNA

SEQ ID NO: 52677 - DNA, 120 bp, synthetic construct; identical to SEQ ID NO: 7124
  source 1..120: mol_type = other DNA

SEQ ID NO: 52678 - DNA, 120 bp, synthetic construct; identical to SEQ ID NO: 22724
  source 1..120: mol_type = other DNA

SEQ ID NO: 52679 - DNA, 120 bp, synthetic construct; identical to SEQ ID NO: 22725
  source 1..120: mol_type = other DNA

SEQ ID NO: 52680 - DNA, 120 bp, synthetic construct; identical to SEQ ID NO: 22726
  source 1..120: mol_type = other DNA

SEQ ID NO: 52681 - DNA, 120 bp, synthetic construct; identical to SEQ ID NO: 22727
  source 1..120: mol_type = other DNA

SEQ ID NO: 52682 - DNA, 120 bp, synthetic construct; identical to SEQ ID NO: 7125
  source 1..120: mol_type = other DNA

SEQ ID NO: 52683 - DNA, 120 bp, synthetic construct; identical to SEQ ID NO: 22729
  source 1..120: mol_type = other DNA

SEQ ID NO: 52684 - DNA, 120 bp, synthetic construct; identical to SEQ ID NO: 22730
  source 1..120: mol_type = other DNA

SEQ ID NO: 52685 - DNA, 120 bp, synthetic construct; identical to SEQ ID NO: 22731
  source 1..120: mol_type = other DNA

SEQ ID NO: 52686 - DNA, 120 bp, synthetic construct; identical to SEQ ID NO: 7126
  source 1..120: mol_type = other DNA

SEQ ID NO: 52687 - DNA, 120 bp, synthetic construct; identical to SEQ ID NO: 22733
  source 1..120: mol_type = other DNA

SEQ ID NO: 52688 - DNA, 120 bp, synthetic construct; identical to SEQ ID NO: 22734
  source 1..120: mol_type = other DNA

SEQ ID NO: 52689 - DNA, 120 bp, synthetic construct; identical to SEQ ID NO: 7127
  source 1..120: mol_type = other DNA

SEQ ID NO: 52690 - DNA, 120 bp, synthetic construct; identical to SEQ ID NO: 22736
  source 1..120: mol_type = other DNA

SEQ ID NO: 52691 - DNA, 120 bp, synthetic construct; identical to SEQ ID NO: 22737
  source 1..120: mol_type = other DNA

SEQ ID NO: 52692 - DNA, 120 bp, synthetic construct; identical to SEQ ID NO: 22738
  source 1..120: mol_type = other DNA

SEQ ID NO: 52693 - DNA, 120 bp, synthetic construct; identical to SEQ ID NO: 22739
  source 1..120: mol_type = other DNA

SEQ ID NO: 52694 - DNA, 120 bp, synthetic construct; identical to SEQ ID NO: 7128
  source 1..120: mol_type = other DNA

SEQ ID NO: 52695 - DNA, 120 bp, synthetic construct; identical to SEQ ID NO: 22741
  source 1..120: mol_type = other DNA

SEQ ID NO: 52696 - DNA, 120 bp, synthetic construct; identical to SEQ ID NO: 22742
  source 1..120: mol_type = other DNA

SEQ ID NO: 52697 - DNA, 120 bp, synthetic construct; identical to SEQ ID NO: 22743
  source 1..120: mol_type = other DNA

SEQ ID NO: 52698 - DNA, 120 bp, synthetic construct; identical to SEQ ID NO: 7129
  source 1..120: mol_type = other DNA

SEQ ID NO: 52699 - DNA, 120 bp, synthetic construct; identical to SEQ ID NO: 22745
  source 1..120: mol_type = other DNA

SEQ ID NO: 52700 - DNA, 120 bp, synthetic construct; identical to SEQ ID NO: 22746
  source 1..120: mol_type = other DNA

SEQ ID NO: 52701 - DNA, 120 bp, synthetic construct; identical to SEQ ID NO: 22747
  source 1..120: mol_type = other DNA

SEQ ID NO: 52702 - DNA, 120 bp, synthetic construct; identical to SEQ ID NO: 7130
  source 1..120: mol_type = other DNA

SEQ ID NO: 52703 - DNA, 120 bp, synthetic construct; identical to SEQ ID NO: 22749
  source 1..120: mol_type = other DNA

SEQ ID NO: 52704 - DNA, 120 bp, synthetic construct; identical to SEQ ID NO: 22750
  source 1..120: mol_type = other DNA

SEQ ID NO: 52705 - DNA, 120 bp, synthetic construct; identical to SEQ ID NO: 22751
  source 1..120: mol_type = other DNA

SEQ ID NO: 52706 - DNA, 120 bp, synthetic construct; identical to SEQ ID NO: 7131
  source 1..120: mol_type = other DNA

SEQ ID NO: 52707 - DNA, 120 bp, synthetic construct; identical to SEQ ID NO: 22753
  source 1..120: mol_type = other DNA

SEQ ID NO: 52708 - DNA, 120 bp, synthetic construct; identical to SEQ ID NO: 22754
  source 1..120: mol_type = other DNA

SEQ ID NO: 52709 - DNA, 120 bp, synthetic construct; identical to SEQ ID NO: 7132
  source 1..120: mol_type = other DNA

SEQ ID NO: 52710 - DNA, 120 bp, synthetic construct; identical to SEQ ID NO: 22756
  source 1..120: mol_type = other DNA

SEQ ID NO: 52711 - DNA, 120 bp, synthetic construct; identical to SEQ ID NO: 22757
  source 1..120: mol_type = other DNA

SEQ ID NO: 52712 - DNA, 120 bp, synthetic construct; identical to SEQ ID NO: 22758
  source 1..120: mol_type = other DNA

SEQ ID NO: 52713 - DNA, 120 bp, synthetic construct; identical to SEQ ID NO: 22759
  source 1..120: mol_type = other DNA

SEQ ID NO: 52714 - DNA, 120 bp, synthetic construct; identical to SEQ ID NO: 7133
  source 1..120: mol_type = other DNA

SEQ ID NO: 52715 - DNA, 120 bp, synthetic construct; identical to SEQ ID NO: 22761
  source 1..120: mol_type = other DNA

SEQ ID NO: 52716 - DNA, 120 bp, synthetic construct; identical to SEQ ID NO: 22762
  source 1..120: mol_type = other DNA

SEQ ID NO: 52717 - DNA, 120 bp, synthetic construct; identical to SEQ ID NO: 7134
  source 1..120: mol_type = other DNA

SEQ ID NO: 52718 - DNA, 120 bp, synthetic construct; identical to SEQ ID NO: 22764
  source 1..120: mol_type = other DNA

SEQ ID NO: 52719 - DNA, 120 bp, synthetic construct; identical to SEQ ID NO: 22765
  source 1..120: mol_type = other DNA

SEQ ID NO: 52720 - DNA, 120 bp, synthetic construct; identical to SEQ ID NO: 22766
  source 1..120: mol_type = other DNA

SEQ ID NO: 52721 - DNA, 120 bp, synthetic construct; identical to SEQ ID NO: 22767
  source 1..120: mol_type = other DNA

SEQ ID NO: 52722 - DNA, 120 bp, synthetic construct; identical to SEQ ID NO: 7135
  source 1..120: mol_type = other DNA

SEQ ID NO: 52723 - DNA, 120 bp, synthetic construct; identical to SEQ ID NO: 22769
  source 1..120: mol_type = other DNA

SEQ ID NO: 52724 - DNA, 120 bp, synthetic construct; identical to SEQ ID NO: 22770
  source 1..120: mol_type = other DNA

SEQ ID NO: 52725 - DNA, 120 bp, synthetic construct; identical to SEQ ID NO: 7136
  source 1..120: mol_type = other DNA

SEQ ID NO: 52726 - DNA, 120 bp, synthetic construct; identical to SEQ ID NO: 22772
  source 1..120: mol_type = other DNA

SEQ ID NO: 52727 - DNA, 120 bp, synthetic construct; identical to SEQ ID NO: 22773
  source 1..120: mol_type = other DNA

SEQ ID NO: 52728 - DNA, 120 bp, synthetic construct; identical to SEQ ID NO: 22774
  source 1..120: mol_type = other DNA

SEQ ID NO: 52729 - DNA, 120 bp, synthetic construct; identical to SEQ ID NO: 7137
  source 1..120: mol_type = other DNA

SEQ ID NO: 52730 - DNA, 120 bp, synthetic construct; identical to SEQ ID NO: 22776
  source 1..120: mol_type = other DNA

SEQ ID NO: 52731 - DNA, 120 bp, synthetic construct; identical to SEQ ID NO: 22777
  source 1..120: mol_type = other DNA

SEQ ID NO: 52732 - DNA, 120 bp, synthetic construct; identical to SEQ ID NO: 22778
  source 1..120: mol_type = other DNA

SEQ ID NO: 52733 - DNA, 120 bp, synthetic construct; identical to SEQ ID NO: 22779
  source 1..120: mol_type = other DNA

SEQ ID NO: 52734 - DNA, 120 bp, synthetic construct; identical to SEQ ID NO: 7138
  source 1..120: mol_type = other DNA

SEQ ID NO: 52735 - DNA, 120 bp, synthetic construct; identical to SEQ ID NO: 22781
  source 1..120: mol_type = other DNA

SEQ ID NO: 52736 - DNA, 120 bp, synthetic construct; identical to SEQ ID NO: 22782
  source 1..120: mol_type = other DNA

SEQ ID NO: 52737 - DNA, 120 bp, synthetic construct; identical to SEQ ID NO: 22783
  source 1..120: mol_type = other DNA

SEQ ID NO: 52738 - DNA, 120 bp, synthetic construct; identical to SEQ ID NO: 7139
  source 1..120: mol_type = other DNA

SEQ ID NO: 52739 - DNA, 120 bp, synthetic construct; identical to SEQ ID NO: 22785
  source 1..120: mol_type = other DNA

SEQ ID NO: 52740 - DNA, 120 bp, synthetic construct; identical to SEQ ID NO: 22786
  source 1..120: mol_type = other DNA

SEQ ID NO: 52741 - DNA, 120 bp, synthetic construct; identical to SEQ ID NO: 173
  source 1..120: mol_type = other DNA

SEQ ID NO: 52742 - DNA, 120 bp, synthetic construct; identical to SEQ ID NO: 22788
  source 1..120: mol_type = other DNA

SEQ ID NO: 52743 - DNA, 120 bp, synthetic construct; identical to SEQ ID NO: 22789
  source 1..120: mol_type = other DNA

SEQ ID NO: 52744 - DNA, 120 bp, synthetic construct; identical to SEQ ID NO: 22790
  source 1..120: mol_type = other DNA

SEQ ID NO: 52745 - DNA, 120 bp, synthetic construct; identical to SEQ ID NO: 7141
  source 1..120: mol_type = other DNA

SEQ ID NO: 52746 - DNA, 120 bp, synthetic construct; identical to SEQ ID NO: 22792
  source 1..120: mol_type = other DNA

SEQ ID NO: 52747 - DNA, 120 bp, synthetic construct; identical to SEQ ID NO: 22793
  source 1..120: mol_type = other DNA

SEQ ID NO: 52748 - DNA, 120 bp, synthetic construct; identical to SEQ ID NO: 22794
  source 1..120: mol_type = other DNA

SEQ ID NO: 52749 - DNA, 120 bp, synthetic construct; identical to SEQ ID NO: 22795
  source 1..120: mol_type = other DNA

SEQ ID NO: 52750 - DNA, 120 bp, synthetic construct; identical to SEQ ID NO: 7142
  source 1..120: mol_type = other DNA

SEQ ID NO: 52751 - DNA, 120 bp, synthetic construct; identical to SEQ ID NO: 22797
  source 1..120: mol_type = other DNA

SEQ ID NO: 52752 - DNA, 120 bp, synthetic construct; identical to SEQ ID NO: 22798
  source 1..120: mol_type = other DNA

SEQ ID NO: 52753 - DNA, 120 bp, synthetic construct; identical to SEQ ID NO: 7143
  source 1..120: mol_type = other DNA

SEQ ID NO: 52754 - DNA, 120 bp, synthetic construct; identical to SEQ ID NO: 22800
  source 1..120: mol_type = other DNA

SEQ ID NO: 52755 - DNA, 120 bp, synthetic construct; identical to SEQ ID NO: 22801
  source 1..120: mol_type = other DNA

SEQ ID NO: 52756 - DNA, 120 bp, synthetic construct; identical to SEQ ID NO: 22802
  source 1..120: mol_type = other DNA

SEQ ID NO: 52757 - DNA, 120 bp, synthetic construct; identical to SEQ ID NO: 7144
  source 1..120: mol_type = other DNA

SEQ ID NO: 52758 - DNA, 120 bp, synthetic construct; identical to SEQ ID NO: 22804
  source 1..120: mol_type = other DNA

SEQ ID NO: 52759 - DNA, 120 bp, synthetic construct; identical to SEQ ID NO: 22805
  source 1..120: mol_type = other DNA

SEQ ID NO: 52760 - DNA, 120 bp, synthetic construct; identical to SEQ ID NO: 22806
  source 1..120: mol_type = other DNA

SEQ ID NO: 52761 - DNA, 120 bp, synthetic construct; identical to SEQ ID NO: 7145
  source 1..120: mol_type = other DNA

SEQ ID NO: 52762 - DNA, 120 bp, synthetic construct; identical to SEQ ID NO: 22808
  source 1..120: mol_type = other DNA

SEQ ID NO: 52763 - DNA, 120 bp, synthetic construct; identical to SEQ ID NO: 22809
  source 1..120: mol_type = other DNA

SEQ ID NO: 52764 - DNA, 120 bp, synthetic construct; identical to SEQ ID NO: 22810
  source 1..120: mol_type = other DNA

SEQ ID NO: 52765 - DNA, 120 bp, synthetic construct; identical to SEQ ID NO: 7146
  source 1..120: mol_type = other DNA

SEQ ID NO: 52766 - DNA, 120 bp, synthetic construct; identical to SEQ ID NO: 22812
  source 1..120: mol_type = other DNA

SEQ ID NO: 52767 - DNA, 120 bp, synthetic construct; identical to SEQ ID NO: 22813
  source 1..120: mol_type = other DNA

SEQ ID NO: 52768 - DNA, 120 bp, synthetic construct; identical to SEQ ID NO: 22814
  source 1..120: mol_type = other DNA

SEQ ID NO: 52769 - DNA, 120 bp, synthetic construct; identical to SEQ ID NO: 7147
  source 1..120: mol_type = other DNA

SEQ ID NO: 52770 - DNA, 120 bp, synthetic construct; identical to SEQ ID NO: 22816
  source 1..120: mol_type = other DNA

SEQ ID NO: 52771 - DNA, 120 bp, synthetic construct; identical to SEQ ID NO: 22817
  source 1..120: mol_type = other DNA

SEQ ID NO: 52772 - DNA, 120 bp, synthetic construct; identical to SEQ ID NO: 22818
  source 1..120: mol_type = other DNA

SEQ ID NO: 52773 - DNA, 120 bp, synthetic construct; identical to SEQ ID NO: 22819
  source 1..120: mol_type = other DNA

SEQ ID NO: 52774 - DNA, 120 bp, synthetic construct; identical to SEQ ID NO: 7148
  source 1..120: mol_type = other DNA

SEQ ID NO: 52775 - DNA, 120 bp, synthetic construct; identical to SEQ ID NO: 22821
  source 1..120: mol_type = other DNA

SEQ ID NO: 52776 - DNA, 120 bp, synthetic construct; identical to SEQ ID NO: 22822
  source 1..120: mol_type = other DNA

SEQ ID NO: 52777 - DNA, 120 bp, synthetic construct; identical to SEQ ID NO: 22823
  source 1..120: mol_type = other DNA

SEQ ID NO: 52778 - DNA, 120 bp, synthetic construct; identical to SEQ ID NO: 7149
  source 1..120: mol_type = other DNA

SEQ ID NO: 52779 - DNA, 120 bp, synthetic construct; identical to SEQ ID NO: 22825
  source 1..120: mol_type = other DNA

SEQ ID NO: 52780 - DNA, 120 bp, synthetic construct; identical to SEQ ID NO: 22826
  source 1..120: mol_type = other DNA

SEQ ID NO: 52781 - DNA, 120 bp, synthetic construct; identical to SEQ ID NO: 22827
  source 1..120: mol_type = other DNA

SEQ ID NO: 52782 - DNA, 120 bp, synthetic construct; identical to SEQ ID NO: 7150
  source 1..120: mol_type = other DNA

SEQ ID NO: 52783 - DNA, 120 bp, synthetic construct; identical to SEQ ID NO: 22829
  source 1..120: mol_type = other DNA

SEQ ID NO: 52784 - DNA, 120 bp, synthetic construct; identical to SEQ ID NO: 22830
  source 1..120: mol_type = other DNA

SEQ ID NO: 52785 - DNA, 120 bp, synthetic construct; identical to SEQ ID NO: 183
  source 1..120: mol_type = other DNA

SEQ ID NO: 52786 - DNA, 120 bp, synthetic construct; identical to SEQ ID NO: 22832
  source 1..120: mol_type = other DNA

SEQ ID NO: 52787 - DNA, 120 bp, synthetic construct; identical to SEQ ID NO: 22833
  source 1..120: mol_type = other DNA

SEQ ID NO: 52788 - DNA, 120 bp, synthetic construct; identical to SEQ ID NO: 22834
  source 1..120: mol_type = other DNA

SEQ ID NO: 52789 - DNA, 120 bp, synthetic construct; identical to SEQ ID NO: 7152
  source 1..120: mol_type = other DNA

SEQ ID NO: 52790 - DNA, 120 bp, synthetic construct; identical to SEQ ID NO: 22836
  source 1..120: mol_type = other DNA

SEQ ID NO: 52791 - DNA, 120 bp, synthetic construct; identical to SEQ ID NO: 22837
  source 1..120: mol_type = other DNA

SEQ ID NO: 52792 - DNA, 120 bp, synthetic construct; identical to SEQ ID NO: 22838
  source 1..120: mol_type = other DNA

SEQ ID NO: 52793 - DNA, 120 bp, synthetic construct; identical to SEQ ID NO: 7153
  source 1..120: mol_type = other DNA

SEQ ID NO: 52794 - DNA, 120 bp, synthetic construct; identical to SEQ ID NO: 22840
  source 1..120: mol_type = other DNA

SEQ ID NO: 52795 - DNA, 120 bp, synthetic construct; identical to SEQ ID NO: 22841
  source 1..120: mol_type = other DNA

SEQ ID NO: 52796 - DNA, 120 bp, synthetic construct; identical to SEQ ID NO: 7154
  source 1..120: mol_type = other DNA

SEQ ID NO: 52797 - DNA, 120 bp, synthetic construct; identical to SEQ ID NO: 22843
  source 1..120: mol_type = other DNA

SEQ ID NO: 52798 - DNA, 120 bp, synthetic construct; identical to SEQ ID NO: 22844
  source 1..120: mol_type = other DNA

SEQ ID NO: 52799 - DNA, 120 bp, synthetic construct; identical to SEQ ID NO: 22845
  source 1..120: mol_type = other DNA

SEQ ID NO: 52800 - DNA, 120 bp, synthetic construct; identical to SEQ ID NO: 22846
  source 1..120: mol_type = other DNA

SEQ ID NO: 52801 - DNA, 120 bp, synthetic construct; identical to SEQ ID NO: 7155
  source 1..120: mol_type = other DNA

SEQ ID NO: 52802 - DNA, 120 bp, synthetic construct; identical to SEQ ID NO: 22848
  source 1..120: mol_type = other DNA

SEQ ID NO: 52803 - DNA, 120 bp, synthetic construct; identical to SEQ ID NO: 22849
  source 1..120: mol_type = other DNA

SEQ ID NO: 52804 - DNA, 120 bp, synthetic construct; identical to SEQ ID NO: 7156
  source 1..120: mol_type = other DNA

SEQ ID NO: 52805 - DNA, 120 bp, synthetic construct; identical to SEQ ID NO: 22851
  source 1..120: mol_type = other DNA

SEQ ID NO: 52806 - DNA, 120 bp, synthetic construct; identical to SEQ ID NO: 22852
  source 1..120: mol_type = other DNA

SEQ ID NO: 52807 - DNA, 120 bp, synthetic construct; identical to SEQ ID NO: 22853
  source 1..120: mol_type = other DNA

SEQ ID NO: 52808 - DNA, 120 bp, synthetic construct; identical to SEQ ID NO: 7157
  source 1..120: mol_type = other DNA

SEQ ID NO: 52809 - DNA, 120 bp, synthetic construct; identical to SEQ ID NO: 22855
  source 1..120: mol_type = other DNA

SEQ ID NO: 52810 - DNA, 120 bp, synthetic construct; identical to SEQ ID NO: 22856
  source 1..120: mol_type = other DNA

SEQ ID NO: 52811 - DNA, 120 bp, synthetic construct; identical to SEQ ID NO: 22857
  source 1..120: mol_type = other DNA

SEQ ID NO: 52812 - DNA, 120 bp, synthetic construct; identical to SEQ ID NO: 22858
  source 1..120: mol_type = other DNA

SEQ ID NO: 52813 - DNA, 120 bp, synthetic construct; identical to SEQ ID NO: 7158
  source 1..120: mol_type = other DNA

SEQ ID NO: 52814 - DNA, 120 bp, synthetic construct; identical to SEQ ID NO: 22860
  source 1..120: mol_type = other DNA

SEQ ID NO: 52815 - DNA, 120 bp, synthetic construct; identical to SEQ ID NO: 22861
  source 1..120: mol_type = other DNA

SEQ ID NO: 52816 - DNA, 120 bp, synthetic construct; identical to SEQ ID NO: 7159
  source 1..120: mol_type = other DNA

SEQ ID NO: 52817 - DNA, 120 bp, synthetic construct; identical to SEQ ID NO: 22863
  source 1..120: mol_type = other DNA

SEQ ID NO: 52818 - DNA, 120 bp, synthetic construct; identical to SEQ ID NO: 22864
  source 1..120: mol_type = other DNA

SEQ ID NO: 52819 - DNA, 120 bp, synthetic construct; identical to SEQ ID NO: 22865
  source 1..120: mol_type = other DNA

SEQ ID NO: 52820 - DNA, 120 bp, synthetic construct; identical to SEQ ID NO: 22866
  source 1..120: mol_type = other DNA

SEQ ID NO: 52821 - DNA, 120 bp, synthetic construct; identical to SEQ ID NO: 7160
  source 1..120: mol_type = other DNA

SEQ ID NO: 52822 - DNA, 120 bp, synthetic construct; identical to SEQ ID NO: 22868
  source 1..120: mol_type = other DNA

SEQ ID NO: 52823 - DNA, 120 bp, synthetic construct; identical to SEQ ID NO: 22869
  source 1..120: mol_type = other DNA

SEQ ID NO: 52824 - DNA, 120 bp, synthetic construct; identical to SEQ ID NO: 7161
  source 1..120: mol_type = other DNA

SEQ ID NO: 52825 - DNA, 120 bp, synthetic construct; identical to SEQ ID NO: 22871
  source 1..120: mol_type = other DNA

SEQ ID NO: 52826 - DNA, 120 bp, synthetic construct; identical to SEQ ID NO: 22872
  source 1..120: mol_type = other DNA

SEQ ID NO: 52827 - DNA, 120 bp, synthetic construct; identical to SEQ ID NO: 22873
  source 1..120: mol_type = other DNA

SEQ ID NO: 52828 - DNA, 120 bp, synthetic construct; identical to SEQ ID NO: 22874
  source 1..120: mol_type = other DNA

SEQ ID NO: 52829 - DNA, 120 bp, synthetic construct; identical to SEQ ID NO: 7162
  source 1..120: mol_type = other DNA

SEQ ID NO: 52830 - DNA, 120 bp, synthetic construct; identical to SEQ ID NO: 22876
  source 1..120: mol_type = other DNA

SEQ ID NO: 52831 - DNA, 120 bp, synthetic construct; identical to SEQ ID NO: 22877
  source 1..120: mol_type = other DNA

SEQ ID NO: 52832 - DNA, 120 bp, synthetic construct; identical to SEQ ID NO: 7163
  source 1..120: mol_type = other DNA

SEQ ID NO: 52833 - DNA, 120 bp, synthetic construct; identical to SEQ ID NO: 22879
  source 1..120: mol_type = other DNA

SEQ ID NO: 52834 - DNA, 120 bp, synthetic construct; identical to SEQ ID NO: 22880
  source 1..120: mol_type = other DNA

SEQ ID NO: 52835 - DNA, 120 bp, synthetic construct; identical to SEQ ID NO: 22881
  source 1..120: mol_type = other DNA

SEQ ID NO: 52836 - DNA, 120 bp, synthetic construct; identical to SEQ ID NO: 22882
  source 1..120: mol_type = other DNA

SEQ ID NO: 52837 - DNA, 120 bp, synthetic construct; identical to SEQ ID NO: 7164
  source 1..120: mol_type = other DNA

SEQ ID NO: 52838 - DNA, 120 bp, synthetic construct; identical to SEQ ID NO: 22884
  source 1..120: mol_type = other DNA

SEQ ID NO: 52839 - DNA, 120 bp, synthetic construct; identical to SEQ ID NO: 22885
  source 1..120: mol_type = other DNA

SEQ ID NO: 52840 - DNA, 120 bp, synthetic construct; identical to SEQ ID NO: 7165
  source 1..120: mol_type = other DNA

SEQ ID NO: 52841 - DNA, 120 bp, synthetic construct; identical to SEQ ID NO: 22887
  source 1..120: mol_type = other DNA

SEQ ID NO: 52842 - DNA, 120 bp, synthetic construct; identical to SEQ ID NO: 22888
  source 1..120: mol_type = other DNA

SEQ ID NO: 52843 - DNA, 120 bp, synthetic construct; identical to SEQ ID NO: 22889
  source 1..120: mol_type = other DNA

SEQ ID NO: 52844 - DNA, 120 bp, synthetic construct; identical to SEQ ID NO: 22890
  source 1..120: mol_type = other DNA

SEQ ID NO: 52845 - DNA, 120 bp, synthetic construct; identical to SEQ ID NO: 7166
  source 1..120: mol_type = other DNA

SEQ ID NO: 52846 - DNA, 120 bp, synthetic construct; identical to SEQ ID NO: 22892
  source 1..120: mol_type = other DNA

SEQ ID NO: 52847 - DNA, 120 bp, synthetic construct; identical to SEQ ID NO: 22893
  source 1..120: mol_type = other DNA

SEQ ID NO: 52848 - DNA, 120 bp, synthetic construct; identical to SEQ ID NO: 22894
  source 1..120: mol_type = other DNA

SEQ ID NO: 52849 - DNA, 120 bp, synthetic construct; identical to SEQ ID NO: 7167
  source 1..120: mol_type = other DNA

SEQ ID NO: 52850 - DNA, 120 bp, synthetic construct; identical to SEQ ID NO: 22896
  source 1..120: mol_type = other DNA

SEQ ID NO: 52851 - DNA, 120 bp, synthetic construct; identical to SEQ ID NO: 22897
  source 1..120: mol_type = other DNA

SEQ ID NO: 52852 - DNA, 120 bp, synthetic construct; identical to SEQ ID NO: 22898
  source 1..120: mol_type = other DNA

SEQ ID NO: 52853 - DNA, 120 bp, synthetic construct; identical to SEQ ID NO: 7168
  source 1..120: mol_type = other DNA

SEQ ID NO: 52854 - DNA, 120 bp, synthetic construct; identical to SEQ ID NO: 22900
  source 1..120: mol_type = other DNA

SEQ ID NO: 52855 - DNA, 120 bp, synthetic construct; identical to SEQ ID NO: 22901
  source 1..120: mol_type = other DNA

SEQ ID NO: 52856 - DNA, 120 bp, synthetic construct; identical to SEQ ID NO: 22902
  source 1..120: mol_type = other DNA

SEQ ID NO: 52857 - DNA, 120 bp, synthetic construct; identical to SEQ ID NO: 7169
  source 1..120: mol_type = other DNA

SEQ ID NO: 52858 - DNA, 120 bp, synthetic construct; identical to SEQ ID NO: 22904
  source 1..120: mol_type = other DNA

SEQ ID NO: 52859 - DNA, 120 bp, synthetic construct; identical to SEQ ID NO: 22905
  source 1..120: mol_type = other DNA

SEQ ID NO: 52860 - DNA, 120 bp, synthetic construct; identical to SEQ ID NO: 22906
  source 1..120: mol_type = other DNA

SEQ ID NO: 52861 - DNA, 120 bp, synthetic construct; identical to SEQ ID NO: 7170
  source 1..120: mol_type = other DNA

SEQ ID NO: 52862 - DNA, 120 bp, synthetic construct; identical to SEQ ID NO: 22908
  source 1..120: mol_type = other DNA

SEQ ID NO: 52863 - DNA, 120 bp, synthetic construct; identical to SEQ ID NO: 22909
  source 1..120: mol_type = other DNA

SEQ ID NO: 52864 - DNA, 120 bp, synthetic construct; identical to SEQ ID NO: 7171
  source 1..120: mol_type = other DNA

SEQ ID NO: 52865 - DNA, 120 bp, synthetic construct; identical to SEQ ID NO: 22911
  source 1..120: mol_type = other DNA

SEQ ID NO: 52866 - DNA, 120 bp, synthetic construct; identical to SEQ ID NO: 22912
  source 1..120: mol_type = other DNA

SEQ ID NO: 52867 - DNA, 120 bp, synthetic construct; identical to SEQ ID NO: 22913
  source 1..120: mol_type = other DNA

SEQ ID NO: 52868 - DNA, 120 bp, synthetic construct; identical to SEQ ID NO: 7172
  source 1..120: mol_type = other DNA

SEQ ID NO: 52869 - DNA, 120 bp, synthetic construct; identical to SEQ ID NO: 22915
  source 1..120: mol_type = other DNA

SEQ ID NO: 52870 - DNA, 120 bp, synthetic construct; identical to SEQ ID NO: 22916
  source 1..120: mol_type = other DNA

SEQ ID NO: 52871 - DNA, 120 bp, synthetic construct; identical to SEQ ID NO: 22917
  source 1..120: mol_type = other DNA

SEQ ID NO: 52872 - DNA, 120 bp, synthetic construct; identical to SEQ ID NO: 7173
  source 1..120: mol_type = other DNA

SEQ ID NO: 52873 - DNA, 120 bp, synthetic construct; identical to SEQ ID NO: 22919
  source 1..120: mol_type = other DNA

SEQ ID NO: 52874 - DNA, 120 bp, synthetic construct; identical to SEQ ID NO: 22920
  source 1..120: mol_type = other DNA

SEQ ID NO: 52875 - DNA, 120 bp, synthetic construct; identical to SEQ ID NO: 22921
  source 1..120: mol_type = other DNA

SEQ ID NO: 52876 - DNA, 120 bp, synthetic construct; identical to SEQ ID NO: 22922
  source 1..120: mol_type = other DNA

SEQ ID NO: 52877 - DNA, 120 bp, synthetic construct; identical to SEQ ID NO: 7174
  source 1..120: mol_type = other DNA

SEQ ID NO: 52878 - DNA, 120 bp, synthetic construct; identical to SEQ ID NO: 22924
  source 1..120: mol_type = other DNA

SEQ ID NO: 52879 - DNA, 120 bp, synthetic construct; identical to SEQ ID NO: 22925
  source 1..120: mol_type = other DNA

SEQ ID NO: 52880 - DNA, 120 bp, synthetic construct; identical to SEQ ID NO: 7175
  source 1..120: mol_type = other DNA

SEQ ID NO: 52881 - DNA, 120 bp, synthetic construct; identical to SEQ ID NO: 22927
  source 1..120: mol_type = other DNA

SEQ ID NO: 52882 - DNA, 120 bp, synthetic construct; identical to SEQ ID NO: 22928
  source 1..120: mol_type = other DNA

SEQ ID NO: 52883 - DNA, 120 bp, synthetic construct; identical to SEQ ID NO: 22929
  source 1..120: mol_type = other DNA

SEQ ID NO: 52884 - DNA, 120 bp, synthetic construct; identical to SEQ ID NO: 22930
  source 1..120: mol_type = other DNA

SEQ ID NO: 52885 - DNA, 120 bp, synthetic construct; identical to SEQ ID NO: 7176
  source 1..120: mol_type = other DNA

SEQ ID NO: 52886 - DNA, 120 bp, synthetic construct; identical to SEQ ID NO: 22932
  source 1..120: mol_type = other DNA

SEQ ID NO: 52887 - DNA, 120 bp, synthetic construct; identical to SEQ ID NO: 22933
  source 1..120: mol_type = other DNA

SEQ ID NO: 52888 - DNA, 120 bp, synthetic construct; identical to SEQ ID NO: 7177
  source 1..120: mol_type = other DNA

SEQ ID NO: 52889 - DNA, 120 bp, synthetic construct; identical to SEQ ID NO: 22935
  source 1..120: mol_type = other DNA

SEQ ID NO: 52890 - DNA, 120 bp, synthetic construct; identical to SEQ ID NO: 22936
  source 1..120: mol_type = other DNA

SEQ ID NO: 52891 - DNA, 120 bp, synthetic construct; identical to SEQ ID NO: 22937
  source 1..120: mol_type = other DNA

SEQ ID NO: 52892 - DNA, 120 bp, synthetic construct; identical to SEQ ID NO: 7178
  source 1..120: mol_type = other DNA

SEQ ID NO: 52893 - DNA, 120 bp, synthetic construct; identical to SEQ ID NO: 22939
  source 1..120: mol_type = other DNA

SEQ ID NO: 52894 - DNA, 120 bp, synthetic construct; identical to SEQ ID NO: 22940
  source 1..120: mol_type = other DNA

SEQ ID NO: 52895 - DNA, 120 bp, synthetic construct; identical to SEQ ID NO: 22941
  source 1..120: mol_type = other DNA

SEQ ID NO: 52896 - DNA, 120 bp, synthetic construct; identical to SEQ ID NO: 7179
  source 1..120: mol_type = other DNA

SEQ ID NO: 52897 - DNA, 120 bp, synthetic construct; identical to SEQ ID NO: 22943
  source 1..120: mol_type = other DNA

SEQ ID NO: 52898 - DNA, 120 bp, synthetic construct; identical to SEQ ID NO: 22944
  source 1..120: mol_type = other DNA

SEQ ID NO: 52899 - DNA, 120 bp, synthetic construct; identical to SEQ ID NO: 22945
  source 1..120: mol_type = other DNA

SEQ ID NO: 52900 - DNA, 120 bp, synthetic construct; identical to SEQ ID NO: 7180
  source 1..120: mol_type = other DNA

SEQ ID NO: 52901 - DNA, 120 bp, synthetic construct; identical to SEQ ID NO: 22947
  source 1..120: mol_type = other DNA

SEQ ID NO: 52902 - DNA, 120 bp, synthetic construct; identical to SEQ ID NO: 22948
  source 1..120: mol_type = other DNA

SEQ ID NO: 52903 - DNA, 120 bp, synthetic construct; identical to SEQ ID NO: 22949
  source 1..120: mol_type = other DNA

SEQ ID NO: 52904 - DNA, 120 bp, synthetic construct; identical to SEQ ID NO: 22950
  source 1..120: mol_type = other DNA

SEQ ID NO: 52905 - DNA, 120 bp, synthetic construct; identical to SEQ ID NO: 7181
  source 1..120: mol_type = other DNA

SEQ ID NO: 52906 - DNA, 120 bp, synthetic construct; identical to SEQ ID NO: 22952
  source 1..120: mol_type = other DNA

SEQ ID NO: 52907 - DNA, 120 bp, synthetic construct; identical to SEQ ID NO: 22953
  source 1..120: mol_type = other DNA

SEQ ID NO: 52908 - DNA, 120 bp, synthetic construct; identical to SEQ ID NO: 22954
  source 1..120: mol_type = other DNA

SEQ ID NO: 52909 - DNA, 120 bp, synthetic construct; identical to SEQ ID NO: 22955
  source 1..120: mol_type = other DNA

SEQ ID NO: 52910 - DNA, 120 bp, synthetic construct; identical to SEQ ID NO: 7182
  source 1..120: mol_type = other DNA

SEQ ID NO: 52911 - DNA, 120 bp, synthetic construct; identical to SEQ ID NO: 22957
  source 1..120: mol_type = other DNA

SEQ ID NO: 52912 - DNA, 120 bp, synthetic construct; identical to SEQ ID NO: 22958
  source 1..120: mol_type = other DNA

SEQ ID NO: 52913 - DNA, 120 bp, synthetic construct; identical to SEQ ID NO: 7183
  source 1..120: mol_type = other DNA

SEQ ID NO: 52914 - DNA, 120 bp, synthetic construct; identical to SEQ ID NO: 22960
  source 1..120: mol_type = other DNA

SEQ ID NO: 52915 - DNA, 120 bp, synthetic construct; identical to SEQ ID NO: 22961
  source 1..120: mol_type = other DNA

SEQ ID NO: 52916 - DNA, 120 bp, synthetic construct; identical to SEQ ID NO: 22962
  source 1..120: mol_type = other DNA

SEQ ID NO: 52917 - DNA, 120 bp, synthetic construct; identical to SEQ ID NO: 22963
  source 1..120: mol_type = other DNA

SEQ ID NO: 52918 - DNA, 120 bp, synthetic construct; identical to SEQ ID NO: 7184
  source 1..120: mol_type = other DNA

SEQ ID NO: 52919 - DNA, 120 bp, synthetic construct; identical to SEQ ID NO: 22965
  source 1..120: mol_type = other DNA

SEQ ID NO: 52920 - DNA, 120 bp, synthetic construct; identical to SEQ ID NO: 22966
  source 1..120: mol_type = other DNA

SEQ ID NO: 52921 - DNA, 120 bp, synthetic construct; identical to SEQ ID NO: 22967
  source 1..120: mol_type = other DNA

SEQ ID NO: 52922 - DNA, 120 bp, synthetic construct; identical to SEQ ID NO: 7185
  source 1..120: mol_type = other DNA

SEQ ID NO: 52923 - DNA, 120 bp, synthetic construct; identical to SEQ ID NO: 22969
  source 1..120: mol_type = other DNA

SEQ ID NO: 52924 - DNA, 120 bp, synthetic construct; identical to SEQ ID NO: 22970
  source 1..120: mol_type = other DNA

SEQ ID NO: 52925 - DNA, 120 bp, synthetic construct; identical to SEQ ID NO: 7186
  source 1..120: mol_type = other DNA

SEQ ID NO: 52926 - DNA, 120 bp, synthetic construct; identical to SEQ ID NO: 22972
  source 1..120: mol_type = other DNA

SEQ ID NO: 52927 - DNA, 120 bp, synthetic construct; identical to SEQ ID NO: 22973
  source 1..120: mol_type = other DNA

SEQ ID NO: 52928 - DNA, 120 bp, synthetic construct; identical to SEQ ID NO: 22974
  source 1..120: mol_type = other DNA

SEQ ID NO: 52929 - DNA, 120 bp, synthetic construct; identical to SEQ ID NO: 7187
  source 1..120: mol_type = other DNA

SEQ ID NO: 52930 - DNA, 120 bp, synthetic construct; identical to SEQ ID NO: 22976
  source 1..120: mol_type = other DNA

SEQ ID NO: 52931 - DNA, 120 bp, synthetic construct; identical to SEQ ID NO: 22977
  source 1..120: mol_type = other DNA

SEQ ID NO: 52932 - DNA, 120 bp, synthetic construct; identical to SEQ ID NO: 22978
  source 1..120: mol_type = other DNA

SEQ ID NO: 52933 - DNA, 120 bp, synthetic construct; identical to SEQ ID NO: 22979
  source 1..120: mol_type = other DNA

SEQ ID NO: 52934 - DNA, 120 bp, synthetic construct; identical to SEQ ID NO: 7188
  source 1..120: mol_type = other DNA

SEQ ID NO: 52935 - DNA, 120 bp, synthetic construct; identical to SEQ ID NO: 22981
  source 1..120: mol_type = other DNA

SEQ ID NO: 52936 - DNA, 120 bp, synthetic construct; identical to SEQ ID NO: 22982
  source 1..120: mol_type = other DNA

SEQ ID NO: 52937 - DNA, 120 bp, synthetic construct; identical to SEQ ID NO: 7189
  source 1..120: mol_type = other DNA

SEQ ID NO: 52938 - DNA, 120 bp, synthetic construct; identical to SEQ ID NO: 22984
  source 1..120: mol_type = other DNA

SEQ ID NO: 52939 - DNA, 120 bp, synthetic construct; identical to SEQ ID NO: 22985
  source 1..120: mol_type = other DNA

SEQ ID NO: 52940 - DNA, 120 bp, synthetic construct; identical to SEQ ID NO: 22986
  source 1..120: mol_type = other DNA

SEQ ID NO: 52941 - DNA, 120 bp, synthetic construct; identical to SEQ ID NO: 22987
  source 1..120: mol_type = other DNA

SEQ ID NO: 52942 - DNA, 120 bp, synthetic construct; identical to SEQ ID NO: 7190
  source 1..120: mol_type = other DNA

SEQ ID NO: 52943 - DNA, 120 bp, synthetic construct; identical to SEQ ID NO: 22989
  source 1..120: mol_type = other DNA

SEQ ID NO: 52944 - DNA, 120 bp, synthetic construct; identical to SEQ ID NO: 22990
  source 1..120: mol_type = other DNA

SEQ ID NO: 52945 - DNA, 120 bp, synthetic construct; identical to SEQ ID NO: 7191
  source 1..120: mol_type = other DNA

SEQ ID NO: 52946 - DNA, 120 bp, synthetic construct; identical to SEQ ID NO: 22992
  source 1..120: mol_type = other DNA

SEQ ID NO: 52947 - DNA, 120 bp, synthetic construct; identical to SEQ ID NO: 22993
  source 1..120: mol_type = other DNA

SEQ ID NO: 52948 - DNA, 120 bp, synthetic construct; identical to SEQ ID NO: 22994
  source 1..120: mol_type = other DNA

SEQ ID NO: 52949 - DNA, 120 bp, synthetic construct; identical to SEQ ID NO: 22995
  source 1..120: mol_type = other DNA

SEQ ID NO: 52950 - DNA, 120 bp, synthetic construct; identical to SEQ ID NO: 7192
  source 1..120: mol_type = other DNA

SEQ ID NO: 52951 - DNA, 120 bp, synthetic construct; identical to SEQ ID NO: 22997
  source 1..120: mol_type = other DNA

SEQ ID NO: 52952 - DNA, 120 bp, synthetic construct; identical to SEQ ID NO: 22998
  source 1..120: mol_type = other DNA

SEQ ID NO: 52953 - DNA, 120 bp, synthetic construct; identical to SEQ ID NO: 22999
  source 1..120: mol_type = other DNA

SEQ ID NO: 52954 - DNA, 120 bp, synthetic construct; identical to SEQ ID NO: 7193
  source 1..120: mol_type = other DNA

SEQ ID NO: 52955 - DNA, 120 bp, synthetic construct; identical to SEQ ID NO: 23001
  source 1..120: mol_type = other DNA

SEQ ID NO: 52956 - DNA, 120 bp, synthetic construct; identical to SEQ ID NO: 23002
  source 1..120: mol_type = other DNA

SEQ ID NO: 52957 - DNA, 120 bp, synthetic construct; identical to SEQ ID NO: 7194
  source 1..120: mol_type = other DNA

SEQ ID NO: 52958 - DNA, 120 bp, synthetic construct; identical to SEQ ID NO: 23004
  source 1..120: mol_type = other DNA

SEQ ID NO: 52959 - DNA, 120 bp, synthetic construct; identical to SEQ ID NO: 23005
  source 1..120: mol_type = other DNA

SEQ ID NO: 52960 - DNA, 120 bp, synthetic construct; identical to SEQ ID NO: 23006
  source 1..120: mol_type = other DNA

SEQ ID NO: 52961 - DNA, 120 bp, synthetic construct; identical to SEQ ID NO: 23007
  source 1..120: mol_type = other DNA

SEQ ID NO: 52962 - DNA, 120 bp, synthetic construct; identical to SEQ ID NO: 7195
  source 1..120: mol_type = other DNA

SEQ ID NO: 52963 - DNA, 120 bp, synthetic construct; identical to SEQ ID NO: 23009
  source 1..120: mol_type = other DNA

SEQ ID NO: 52964 - DNA, 120 bp, synthetic construct; identical to SEQ ID NO: 23010
  source 1..120: mol_type = other DNA

SEQ ID NO: 52965 - DNA, 120 bp, synthetic construct; identical to SEQ ID NO: 23011
  source 1..120: mol_type = other DNA

SEQ ID NO: 52966 - DNA, 120 bp, synthetic construct; identical to SEQ ID NO: 7196
  source 1..120: mol_type = other DNA

SEQ ID NO: 52967 - DNA, 120 bp, synthetic construct; identical to SEQ ID NO: 23013
  source 1..120: mol_type = other DNA

SEQ ID NO: 52968 - DNA, 120 bp, synthetic construct; identical to SEQ ID NO: 23014
  source 1..120: mol_type = other DNA

SEQ ID NO: 52969 - DNA, 120 bp, synthetic construct; identical to SEQ ID NO: 23015
  source 1..120: mol_type = other DNA

SEQ ID NO: 52970 - DNA, 120 bp, synthetic construct; identical to SEQ ID NO: 7197
  source 1..120: mol_type = other DNA

SEQ ID NO: 52971 - DNA, 120 bp, synthetic construct; identical to SEQ ID NO: 23017
  source 1..120: mol_type = other DNA

SEQ ID NO: 52972 - DNA, 120 bp, synthetic construct; identical to SEQ ID NO: 23018
  source 1..120: mol_type = other DNA

SEQ ID NO: 52973 - DNA, 120 bp, synthetic construct; identical to SEQ ID NO: 23019
  source 1..120: mol_type = other DNA

SEQ ID NO: 52974 - DNA, 120 bp, synthetic construct; identical to SEQ ID NO: 7198
  source 1..120: mol_type = other DNA

SEQ ID NO: 52975 - DNA, 120 bp, synthetic construct; identical to SEQ ID NO: 23021
  source 1..120: mol_type = other DNA

SEQ ID NO: 52976 - DNA, 120 bp, synthetic construct; identical to SEQ ID NO: 23022
  source 1..120: mol_type = other DNA

SEQ ID NO: 52977 - DNA, 120 bp, synthetic construct; identical to SEQ ID NO: 23023
  source 1..120: mol_type = other DNA

SEQ ID NO: 52978 - DNA, 120 bp, synthetic construct; identical to SEQ ID NO: 23024
  source 1..120: mol_type = other DNA

SEQ ID NO: 52979 - DNA, 120 bp, synthetic construct; identical to SEQ ID NO: 7199
  source 1..120: mol_type = other DNA

SEQ ID NO: 52980 - DNA, 120 bp, synthetic construct; identical to SEQ ID NO: 23026
  source 1..120: mol_type = other DNA

SEQ ID NO: 52981 - DNA, 120 bp, synthetic construct; identical to SEQ ID NO: 23027
  source 1..120: mol_type = other DNA

SEQ ID NO: 52982 - DNA, 120 bp, synthetic construct; identical to SEQ ID NO: 23028
  source 1..120: mol_type = other DNA

SEQ ID NO: 52983 - DNA, 120 bp, synthetic construct; identical to SEQ ID NO: 23029
  source 1..120: mol_type = other DNA

SEQ ID NO: 52984 - DNA, 120 bp, synthetic construct; identical to SEQ ID NO: 7200
  source 1..120: mol_type = other DNA

SEQ ID NO: 52985 - DNA, 120 bp, synthetic construct; identical to SEQ ID NO: 23031
  source 1..120: mol_type = other DNA

SEQ ID NO: 52986 - DNA, 120 bp, synthetic construct; identical to SEQ ID NO: 23032
  source 1..120: mol_type = other DNA

SEQ ID NO: 52987 - DNA, 120 bp, synthetic construct; identical to SEQ ID NO: 7201
  source 1..120: mol_type = other DNA

SEQ ID NO: 52988 - DNA, 120 bp, synthetic construct; identical to SEQ ID NO: 23034
  source 1..120: mol_type = other DNA

SEQ ID NO: 52989 - DNA, 120 bp, synthetic construct; identical to SEQ ID NO: 23035
  source 1..120: mol_type = other DNA

SEQ ID NO: 52990 - DNA, 120 bp, synthetic construct; identical to SEQ ID NO: 23036
  source 1..120: mol_type = other DNA

SEQ ID NO: 52991 - DNA, 120 bp, synthetic construct; identical to SEQ ID NO: 7202
  source 1..120: mol_type = other DNA

SEQ ID NO: 52992 - DNA, 120 bp, synthetic construct; identical to SEQ ID NO: 23038
  source 1..120: mol_type = other DNA

SEQ ID NO: 52993 - DNA, 120 bp, synthetic construct; identical to SEQ ID NO: 23039
  source 1..120: mol_type = other DNA

SEQ ID NO: 52994 - DNA, 120 bp, synthetic construct; identical to SEQ ID NO: 23040
  source 1..120: mol_type = other DNA

SEQ ID NO: 52995 - DNA, 120 bp, synthetic construct; identical to SEQ ID NO: 7203
  source 1..120: mol_type = other DNA

SEQ ID NO: 52996 - DNA, 120 bp, synthetic construct; identical to SEQ ID NO: 23042
  source 1..120: mol_type = other DNA

SEQ ID NO: 52997 - DNA, 120 bp, synthetic construct; identical to SEQ ID NO: 23043
  source 1..120: mol_type = other DNA

SEQ ID NO: 52998 - DNA, 120 bp, synthetic construct; identical to SEQ ID NO: 23044
  source 1..120: mol_type = other DNA

SEQ ID NO: 52999 - DNA, 120 bp, synthetic construct; identical to SEQ ID NO: 7204
  source 1..120: mol_type = other DNA

SEQ ID NO: 53000 - DNA, 120 bp, synthetic construct; identical to SEQ ID NO: 23046
  source 1..120: mol_type = other DNA

SEQ ID NO: 53001 - DNA, 120 bp, synthetic construct; identical to SEQ ID NO: 23047
  source 1..120: mol_type = other DNA

SEQ ID NO: 53002 - DNA, 120 bp, synthetic construct; identical to SEQ ID NO: 23048
  source 1..120: mol_type = other DNA

SEQ ID NO: 53003 - DNA, 120 bp, synthetic construct; identical to SEQ ID NO: 7205
  source 1..120: mol_type = other DNA

SEQ ID NO: 53004 - DNA, 120 bp, synthetic construct; identical to SEQ ID NO: 23050
  source 1..120: mol_type = other DNA

SEQ ID NO: 53005 - DNA, 120 bp, synthetic construct; identical to SEQ ID NO: 23051
  source 1..120: mol_type = other DNA

SEQ ID NO: 53006 - DNA, 120 bp, synthetic construct; identical to SEQ ID NO: 23052
  source 1..120: mol_type = other DNA

SEQ ID NO: 53007 - DNA, 120 bp, synthetic construct; identical to SEQ ID NO: 23053
  source 1..120: mol_type = other DNA

SEQ ID NO: 53008 - DNA, 120 bp, synthetic construct; identical to SEQ ID NO: 7206
  source 1..120: mol_type = other DNA

SEQ ID NO: 53009 - DNA, 120 bp, synthetic construct; identical to SEQ ID NO: 23055
  source 1..120: mol_type = other DNA

SEQ ID NO: 53010 - DNA, 120 bp, synthetic construct; identical to SEQ ID NO: 23056
  source 1..120: mol_type = other DNA

SEQ ID NO: 53011 - DNA, 120 bp, synthetic construct; identical to SEQ ID NO: 23057
  source 1..120: mol_type = other DNA

SEQ ID NO: 53012 - DNA, 120 bp, synthetic construct; identical to SEQ ID NO: 7207
  source 1..120: mol_type = other DNA

SEQ ID NO: 53013 - DNA, 120 bp, synthetic construct; identical to SEQ ID NO: 23059
  source 1..120: mol_type = other DNA

SEQ ID NO: 53014 - DNA, 120 bp, synthetic construct; identical to SEQ ID NO: 23060
  source 1..120: mol_type = other DNA

SEQ ID NO: 53015 - DNA, 120 bp, synthetic construct; identical to SEQ ID NO: 7208
  source 1..120: mol_type = other DNA

SEQ ID NO: 53016 - DNA, 120 bp, synthetic construct; identical to SEQ ID NO: 23062
  source 1..120: mol_type = other DNA

SEQ ID NO: 53017 - DNA, 120 bp, synthetic construct; identical to SEQ ID NO: 23063
  source 1..120: mol_type = other DNA

SEQ ID NO: 53018 - DNA, 120 bp, synthetic construct; identical to SEQ ID NO: 23064
  source 1..120: mol_type = other DNA

SEQ ID NO: 53019 - DNA, 120 bp, synthetic construct; identical to SEQ ID NO: 7209
  source 1..120: mol_type = other DNA

SEQ ID NO: 53020 - DNA, 120 bp, synthetic construct; identical to SEQ ID NO: 23066
  source 1..120: mol_type = other DNA

SEQ ID NO: 53021 - DNA, 120 bp, synthetic construct; identical to SEQ ID NO: 23067
  source 1..120: mol_type = other DNA

SEQ ID NO: 53022 - DNA, 120 bp, synthetic construct; identical to SEQ ID NO: 23068
  source 1..120: mol_type = other DNA

SEQ ID NO: 53023 - DNA, 120 bp, synthetic construct; identical to SEQ ID NO: 23069
  source 1..120: mol_type = other DNA

SEQ ID NO: 53024 - DNA, 120 bp, synthetic construct; identical to SEQ ID NO: 7210
  source 1..120: mol_type = other DNA

SEQ ID NO: 53025 - DNA, 120 bp, synthetic construct; identical to SEQ ID NO: 23071
  source 1..120: mol_type = other DNA

SEQ ID NO: 53026 - DNA, 120 bp, synthetic construct; identical to SEQ ID NO: 23072
  source 1..120: mol_type = other DNA

SEQ ID NO: 53027 - DNA, 120 bp, synthetic construct; identical to SEQ ID NO: 7211
  source 1..120: mol_type = other DNA

SEQ ID NO: 53028 - DNA, 120 bp, synthetic construct; identical to SEQ ID NO: 23074
  source 1..120: mol_type = other DNA

SEQ ID NO: 53029 - DNA, 120 bp, synthetic construct; identical to SEQ ID NO: 23075
  source 1..120: mol_type = other DNA

SEQ ID NO: 53030 - DNA, 120 bp, synthetic construct; identical to SEQ ID NO: 23076
  source 1..120: mol_type = other DNA

SEQ ID NO: 53031 - DNA, 120 bp, synthetic construct; identical to SEQ ID NO: 23077
  source 1..120: mol_type = other DNA

SEQ ID NO: 53032 - DNA, 120 bp, synthetic construct; identical to SEQ ID NO: 7212
  source 1..120: mol_type = other DNA

SEQ ID NO: 53033 - DNA, 120 bp, synthetic construct; identical to SEQ ID NO: 23079
  source 1..120: mol_type = other DNA

SEQ ID NO: 53034 - DNA, 120 bp, synthetic construct; identical to SEQ ID NO: 23080
  source 1..120: mol_type = other DNA

SEQ ID NO: 53035 - DNA, 120 bp, synthetic construct; identical to SEQ ID NO: 7213
  source 1..120: mol_type = other DNA

SEQ ID NO: 53036 - DNA, 120 bp, synthetic construct; identical to SEQ ID NO: 23082
  source 1..120: mol_type = other DNA

SEQ ID NO: 53037 - DNA, 120 bp, synthetic construct; identical to SEQ ID NO: 23083
  source 1..120: mol_type = other DNA

SEQ ID NO: 53038 - DNA, 120 bp, synthetic construct; identical to SEQ ID NO: 23084
  source 1..120: mol_type = other DNA

SEQ ID NO: 53039 - DNA, 120 bp, synthetic construct; identical to SEQ ID NO: 7214
  source 1..120: mol_type = other DNA

SEQ ID NO: 53040 - DNA, 120 bp, synthetic construct; identical to SEQ ID NO: 23086
  source 1..120: mol_type = other DNA

SEQ ID NO: 53041 - DNA, 120 bp, synthetic construct; identical to SEQ ID NO: 23087
  source 1..120: mol_type = other DNA

SEQ ID NO: 53042 - DNA, 120 bp, synthetic construct; identical to SEQ ID NO: 23088
  source 1..120: mol_type = other DNA

SEQ ID NO: 53043 - DNA, 120 bp, synthetic construct; identical to SEQ ID NO: 23089
  source 1..120: mol_type = other DNA

SEQ ID NO: 53044 - DNA, 120 bp, synthetic construct; identical to SEQ ID NO: 7215
  source 1..120: mol_type = other DNA

SEQ ID NO: 53045 - DNA, 120 bp, synthetic construct; identical to SEQ ID NO: 23091
  source 1..120: mol_type = other DNA

SEQ ID NO: 53046 - DNA, 120 bp, synthetic construct; identical to SEQ ID NO: 23092
  source 1..120: mol_type = other DNA

SEQ ID NO: 53047 - DNA, 120 bp, synthetic construct; identical to SEQ ID NO: 7216
  source 1..120: mol_type = other DNA

SEQ ID NO: 53048 - DNA, 120 bp, synthetic construct; identical to SEQ ID NO: 23094
  source 1..120: mol_type = other DNA

SEQ ID NO: 53049 - DNA, 120 bp, synthetic construct; identical to SEQ ID NO: 23095
  source 1..120: mol_type = other DNA

SEQ ID NO: 53050 - DNA, 120 bp, synthetic construct; identical to SEQ ID NO: 7217
  source 1..120: mol_type = other DNA

SEQ ID NO: 53051 - DNA, 120 bp, synthetic construct; identical to SEQ ID NO: 23097
  source 1..120: mol_type = other DNA

SEQ ID NO: 53052 - DNA, 120 bp, synthetic construct; identical to SEQ ID NO: 23098
  source 1..120: mol_type = other DNA

SEQ ID NO: 53053 - DNA, 120 bp, synthetic construct; identical to SEQ ID NO: 23099
  source 1..120: mol_type = other DNA

SEQ ID NO: 53054 - DNA, 120 bp, synthetic construct; identical to SEQ ID NO: 23100
  source 1..120: mol_type = other DNA

SEQ ID NO: 53055 - DNA, 120 bp, synthetic construct; identical to SEQ ID NO: 7218
  source 1..120: mol_type = other DNA

SEQ ID NO: 53056 - DNA, 120 bp, synthetic construct; identical to SEQ ID NO: 23102
  source 1..120: mol_type = other DNA

SEQ ID NO: 53057 - DNA, 120 bp, synthetic construct; identical to SEQ ID NO: 23103
  source 1..120: mol_type = other DNA

SEQ ID NO: 53058 - DNA, 120 bp, synthetic construct; identical to SEQ ID NO: 23104
  source 1..120: mol_type = other DNA

SEQ ID NO: 53059 - DNA, 120 bp, synthetic construct; identical to SEQ ID NO: 7219
  source 1..120: mol_type = other DNA

SEQ ID NO: 53060 - DNA, 120 bp, synthetic construct; identical to SEQ ID NO: 23106
  source 1..120: mol_type = other DNA

SEQ ID NO: 53061 - DNA, 120 bp, synthetic construct; identical to SEQ ID NO: 23107
  source 1..120: mol_type = other DNA

SEQ ID NO: 53062 - DNA, 120 bp, synthetic construct; identical to SEQ ID NO: 23108
  source 1..120: mol_type = other DNA

SEQ ID NO: 53063 - DNA, 120 bp, synthetic construct; identical to SEQ ID NO: 7220
  source 1..120: mol_type = other DNA

SEQ ID NO: 53064 - DNA, 120 bp, synthetic construct; identical to SEQ ID NO: 23110
  source 1..120: mol_type = other DNA

SEQ ID NO: 53065 - DNA, 120 bp, synthetic construct; identical to SEQ ID NO: 23111
  source 1..120: mol_type = other DNA

SEQ ID NO: 53066 - DNA, 120 bp, synthetic construct; identical to SEQ ID NO: 23112
  source 1..120: mol_type = other DNA

SEQ ID NO: 53067 - DNA, 120 bp, synthetic construct; identical to SEQ ID NO: 7221
  source 1..120: mol_type = other DNA

SEQ ID NO: 53068 - DNA, 120 bp, synthetic construct; identical to SEQ ID NO: 23114
  source 1..120: mol_type = other DNA

SEQ ID NO: 53069 - DNA, 120 bp, synthetic construct; identical to SEQ ID NO: 23115
  source 1..120: mol_type = other DNA

SEQ ID NO: 53070 - DNA, 120 bp, synthetic construct; identical to SEQ ID NO: 23116
  source 1..120: mol_type = other DNA

SEQ ID NO: 53071 - DNA, 120 bp, synthetic construct; identical to SEQ ID NO: 7222
  source 1..120: mol_type = other DNA

SEQ ID NO: 53072 - DNA, 120 bp, synthetic construct; identical to SEQ ID NO: 23118
  source 1..120: mol_type = other DNA

SEQ ID NO: 53073 - DNA, 120 bp, synthetic construct; identical to SEQ ID NO: 23119
  source 1..120: mol_type = other DNA

SEQ ID NO: 53074 - DNA, 120 bp, synthetic construct; identical to SEQ ID NO: 23120
  source 1..120: mol_type = other DNA

SEQ ID NO: 53075 - DNA, 120 bp, synthetic construct; identical to SEQ ID NO: 23121
  source 1..120: mol_type = other DNA

SEQ ID NO: 53076 - DNA, 120 bp, synthetic construct; identical to SEQ ID NO: 7223
  source 1..120: mol_type = other DNA

SEQ ID NO: 53077 - DNA, 120 bp, synthetic construct; identical to SEQ ID NO: 23123
  source 1..120: mol_type = other DNA

SEQ ID NO: 53078 - DNA, 120 bp, synthetic construct; identical to SEQ ID NO: 23124
  source 1..120: mol_type = other DNA

SEQ ID NO: 53079 - DNA, 120 bp, synthetic construct; identical to SEQ ID NO: 7224
  source 1..120: mol_type = other DNA

SEQ ID NO: 53080 - DNA, 120 bp, synthetic construct; identical to SEQ ID NO: 23126
  source 1..120: mol_type = other DNA

SEQ ID NO: 53081 - DNA, 120 bp, synthetic construct; identical to SEQ ID NO: 23127
  source 1..120: mol_type = other DNA

SEQ ID NO: 53082 - DNA, 120 bp, synthetic construct; identical to SEQ ID NO: 23128
  source 1..120: mol_type = other DNA

SEQ ID NO: 53083 - DNA, 120 bp, synthetic construct; identical to SEQ ID NO: 23129
  source 1..120: mol_type = other DNA

SEQ ID NO: 53084 - DNA, 120 bp, synthetic construct; identical to SEQ ID NO: 7225
  source 1..120: mol_type = other DNA

SEQ ID NO: 53085 - DNA, 120 bp, synthetic construct; identical to SEQ ID NO: 23131
  source 1..120: mol_type = other DNA

SEQ ID NO: 53086 - DNA, 120 bp, synthetic construct; identical to SEQ ID NO: 23132
  source 1..120: mol_type = other DNA

SEQ ID NO: 53087 - DNA, 120 bp, synthetic construct; identical to SEQ ID NO: 7226
  source 1..120: mol_type = other DNA

SEQ ID NO: 53088 - DNA, 120 bp, synthetic construct; identical to SEQ ID NO: 23134
  source 1..120: mol_type = other DNA

SEQ ID NO: 53089 - DNA, 120 bp, synthetic construct; identical to SEQ ID NO: 23135
  source 1..120: mol_type = other DNA

SEQ ID NO: 53090 - DNA, 120 bp, synthetic construct; identical to SEQ ID NO: 23136
  source 1..120: mol_type = other DNA

SEQ ID NO: 53091 - DNA, 120 bp, synthetic construct; identical to SEQ ID NO: 7227
  source 1..120: mol_type = other DNA

SEQ ID NO: 53092 - DNA, 120 bp, synthetic construct; identical to SEQ ID NO: 23138
  source 1..120: mol_type = other DNA

SEQ ID NO: 53093 - DNA, 120 bp, synthetic construct; identical to SEQ ID NO: 23139
  source 1..120: mol_type = other DNA

SEQ ID NO: 53094 - DNA, 120 bp, synthetic construct; identical to SEQ ID NO: 23140
  source 1..120: mol_type = other DNA

SEQ ID NO: 53095 - DNA, 120 bp, synthetic construct; identical to SEQ ID NO: 23141
  source 1..120: mol_type = other DNA

SEQ ID NO: 53096 - DNA, 120 bp, synthetic construct; identical to SEQ ID NO: 7228
  source 1..120: mol_type = other DNA

SEQ ID NO: 53097 - DNA, 120 bp, synthetic construct; identical to SEQ ID NO: 23143
  source 1..120: mol_type = other DNA

SEQ ID NO: 53098 - DNA, 120 bp, synthetic construct; identical to SEQ ID NO: 23144
  source 1..120: mol_type = other DNA

SEQ ID NO: 53099 - DNA, 120 bp, synthetic construct; identical to SEQ ID NO: 23145
  source 1..120: mol_type = other DNA

SEQ ID NO: 53100 - DNA, 120 bp, synthetic construct; identical to SEQ ID NO: 7229
  source 1..120: mol_type = other DNA

SEQ ID NO: 53101 - DNA, 120 bp, synthetic construct; identical to SEQ ID NO: 23147
  source 1..120: mol_type = other DNA

SEQ ID NO: 53102 - DNA, 120 bp, synthetic construct; identical to SEQ ID NO: 23148
  source 1..120: mol_type = other DNA

SEQ ID NO: 53103 - DNA, 120 bp, synthetic construct; identical to SEQ ID NO: 23149
  source 1..120: mol_type = other DNA

SEQ ID NO: 53104 - DNA, 120 bp, synthetic construct; identical to SEQ ID NO: 7230
  source 1..120: mol_type = other DNA

SEQ ID NO: 53105 - DNA, 120 bp, synthetic construct; identical to SEQ ID NO: 23151
  source 1..120: mol_type = other DNA

SEQ ID NO: 53106 - DNA, 120 bp, synthetic construct; identical to SEQ ID NO: 23152
  source 1..120: mol_type = other DNA

SEQ ID NO: 53107 - DNA, 120 bp, synthetic construct; identical to SEQ ID NO: 7231
  source 1..120: mol_type = other DNA

SEQ ID NO: 53108 - DNA, 120 bp, synthetic construct; identical to SEQ ID NO: 23154
  source 1..120: mol_type = other DNA

SEQ ID NO: 53109 - DNA, 120 bp, synthetic construct; identical to SEQ ID NO: 23155
  source 1..120: mol_type = other DNA

SEQ ID NO: 53110 - DNA, 120 bp, synthetic construct; identical to SEQ ID NO: 23156
  source 1..120: mol_type = other DNA

SEQ ID NO: 53111 - DNA, 120 bp, synthetic construct; identical to SEQ ID NO: 23157
  source 1..120: mol_type = other DNA

SEQ ID NO: 53112 - DNA, 120 bp, synthetic construct; identical to SEQ ID NO: 7232
  source 1..120: mol_type = other DNA

SEQ ID NO: 53113 - DNA, 120 bp, synthetic construct; identical to SEQ ID NO: 23159
  source 1..120: mol_type = other DNA

SEQ ID NO: 53114 - DNA, 120 bp, synthetic construct; identical to SEQ ID NO: 23160
  source 1..120: mol_type = other DNA

SEQ ID NO: 53115 - DNA, 120 bp, synthetic construct; identical to SEQ ID NO: 7233
  source 1..120: mol_type = other DNA

SEQ ID NO: 53116 - DNA, 120 bp, synthetic construct; identical to SEQ ID NO: 23162
  source 1..120: mol_type = other DNA

SEQ ID NO: 53117 - DNA, 120 bp, synthetic construct; identical to SEQ ID NO: 23163
  source 1..120: mol_type = other DNA

SEQ ID NO: 53118 - DNA, 120 bp, synthetic construct; identical to SEQ ID NO: 23164
  source 1..120: mol_type = other DNA

SEQ ID NO: 53119 - DNA, 120 bp, synthetic construct; identical to SEQ ID NO: 23165
  source 1..120: mol_type = other DNA

SEQ ID NO: 53120 - DNA, 120 bp, synthetic construct; identical to SEQ ID NO: 7234
  source 1..120: mol_type = other DNA

SEQ ID NO: 53121 - DNA, 120 bp, synthetic construct; identical to SEQ ID NO: 23167
  source 1..120: mol_type = other DNA

SEQ ID NO: 53122 - DNA, 120 bp, synthetic construct; identical to SEQ ID NO: 23168
  source 1..120: mol_type = other DNA

SEQ ID NO: 53123 - DNA, 120 bp, synthetic construct; identical to SEQ ID NO: 23169
  source 1..120: mol_type = other DNA

SEQ ID NO: 53124 - DNA, 120 bp, synthetic construct; identical to SEQ ID NO: 7235
  source 1..120: mol_type = other DNA

SEQ ID NO: 53125 - DNA, 120 bp, synthetic construct; identical to SEQ ID NO: 23171
  source 1..120: mol_type = other DNA

SEQ ID NO: 53126 - DNA, 120 bp, synthetic construct; identical to SEQ ID NO: 23172
  source 1..120: mol_type = other DNA

SEQ ID NO: 53127 - DNA, 120 bp, synthetic construct; identical to SEQ ID NO: 7236
  source 1..120: mol_type = other DNA

SEQ ID NO: 53128 - DNA, 120 bp, synthetic construct; identical to SEQ ID NO: 23174
  source 1..120: mol_type = other DNA

SEQ ID NO: 53129 - DNA, 120 bp, synthetic construct; identical to SEQ ID NO: 23175
  source 1..120: mol_type = other DNA

SEQ ID NO: 53130 - DNA, 120 bp, synthetic construct; identical to SEQ ID NO: 23176
  source 1..120: mol_type = other DNA

SEQ ID NO: 53131 - DNA, 120 bp, synthetic construct; identical to SEQ ID NO: 23177
  source 1..120: mol_type = other DNA

SEQ ID NO: 53132 - DNA, 120 bp, synthetic construct; identical to SEQ ID NO: 7237
  source 1..120: mol_type = other DNA

SEQ ID NO: 53133 - DNA, 120 bp, synthetic construct; identical to SEQ ID NO: 23179
  source 1..120: mol_type = other DNA

SEQ ID NO: 53134 - DNA, 120 bp, synthetic construct; identical to SEQ ID NO: 23180
  source 1..120: mol_type = other DNA

SEQ ID NO: 53135 - DNA, 120 bp, synthetic construct; identical to SEQ ID NO: 7238
  source 1..120: mol_type = other DNA

SEQ ID NO: 53136 - DNA, 120 bp, synthetic construct; identical to SEQ ID NO: 23182
  source 1..120: mol_type = other DNA

SEQ ID NO: 53137 - DNA, 120 bp, synthetic construct; identical to SEQ ID NO: 23183
  source 1..120: mol_type = other DNA

SEQ ID NO: 53138 - DNA, 120 bp, synthetic construct; identical to SEQ ID NO: 23184
  source 1..120: mol_type = other DNA

SEQ ID NO: 53139 - DNA, 120 bp, synthetic construct; identical to SEQ ID NO: 23185
  source 1..120: mol_type = other DNA

SEQ ID NO: 53140 - DNA, 120 bp, synthetic construct; identical to SEQ ID NO: 7239
  source 1..120: mol_type = other DNA

SEQ ID NO: 53141 - DNA, 120 bp, synthetic construct; identical to SEQ ID NO: 23187
  source 1..120: mol_type = other DNA

SEQ ID NO: 53142 - DNA, 120 bp, synthetic construct; identical to SEQ ID NO: 23188
  source 1..120: mol_type = other DNA

SEQ ID NO: 53143 - DNA, 120 bp, synthetic construct; identical to SEQ ID NO: 23189
  source 1..120: mol_type = other DNA

SEQ ID NO: 53144 - DNA, 120 bp, synthetic construct; identical to SEQ ID NO: 7240
  source 1..120: mol_type = other DNA

SEQ ID NO: 53145 - DNA, 120 bp, synthetic construct; identical to SEQ ID NO: 23191
  source 1..120: mol_type = other DNA

SEQ ID NO: 53146 - DNA, 120 bp, synthetic construct; identical to SEQ ID NO: 23192
  source 1..120: mol_type = other DNA

SEQ ID NO: 53147 - DNA, 120 bp, synthetic construct; identical to SEQ ID NO: 7241
  source 1..120: mol_type = other DNA

SEQ ID NO: 53148 - DNA, 120 bp, synthetic construct; identical to SEQ ID NO: 23194
  source 1..120: mol_type = other DNA

SEQ ID NO: 53149 - DNA, 120 bp, synthetic construct; identical to SEQ ID NO: 23195
  source 1..120: mol_type = other DNA

SEQ ID NO: 53150 - DNA, 120 bp, synthetic construct; identical to SEQ ID NO: 23196
  source 1..120: mol_type = other DNA

SEQ ID NO: 53151 - DNA, 120 bp, synthetic construct; identical to SEQ ID NO: 23197
  source 1..120: mol_type = other DNA

SEQ ID NO: 53152 - DNA, 120 bp, synthetic construct; identical to SEQ ID NO: 7242
  source 1..120: mol_type = other DNA

SEQ ID NO: 53153 - DNA, 120 bp, synthetic construct; identical to SEQ ID NO: 23199
  source 1..120: mol_type = other DNA

SEQ ID NO: 53154 - DNA, 120 bp, synthetic construct; identical to SEQ ID NO: 23200
  source 1..120: mol_type = other DNA

SEQ ID NO: 53155 - DNA, 120 bp, synthetic construct; identical to SEQ ID NO: 7243
  source 1..120: mol_type = other DNA

SEQ ID NO: 53156 - DNA, 120 bp, synthetic construct; identical to SEQ ID NO: 23202
  source 1..120: mol_type = other DNA

SEQ ID NO: 53157 - DNA, 120 bp, synthetic construct; identical to SEQ ID NO: 23203
  source 1..120: mol_type = other DNA

SEQ ID NO: 53158 - DNA, 120 bp, synthetic construct; identical to SEQ ID NO: 23204
  source 1..120: mol_type = other DNA

SEQ ID NO: 53159 - DNA, 120 bp, synthetic construct; identical to SEQ ID NO: 7244
  source 1..120: mol_type = other DNA

SEQ ID NO: 53160 - DNA, 120 bp, synthetic construct; identical to SEQ ID NO: 23206
  source 1..120: mol_type = other DNA

SEQ ID NO: 53161 - DNA, 120 bp, synthetic construct; identical to SEQ ID NO: 23207
  source 1..120: mol_type = other DNA

SEQ ID NO: 53162 - DNA, 120 bp, synthetic construct; identical to SEQ ID NO: 23208
  source 1..120: mol_type = other DNA

SEQ ID NO: 53163 - DNA, 120 bp, synthetic construct; identical to SEQ ID NO: 7245
  source 1..120: mol_type = other DNA

SEQ ID NO: 53164 - DNA, 120 bp, synthetic construct; identical to SEQ ID NO: 23210
  source 1..120: mol_type = other DNA

SEQ ID NO: 53165 - DNA, 120 bp, synthetic construct; identical to SEQ ID NO: 23211
  source 1..120: mol_type = other DNA

SEQ ID NO: 53166 - DNA, 120 bp, synthetic construct; identical to SEQ ID NO: 23212
  source 1..120: mol_type = other DNA

SEQ ID NO: 53167 - DNA, 120 bp, synthetic construct; identical to SEQ ID NO: 23213
  source 1..120: mol_type = other DNA

SEQ ID NO: 53168 - DNA, 120 bp, synthetic construct; identical to SEQ ID NO: 7246
  source 1..120: mol_type = other DNA

SEQ ID NO: 53169 - DNA, 120 bp, synthetic construct; identical to SEQ ID NO: 23215
  source 1..120: mol_type = other DNA

SEQ ID NO: 53170 - DNA, 120 bp, synthetic construct; identical to SEQ ID NO: 23216
  source 1..120: mol_type = other DNA

SEQ ID NO: 53171 - DNA, 120 bp, synthetic construct; identical to SEQ ID NO: 23217
  source 1..120: mol_type = other DNA

SEQ ID NO: 53172 - DNA, 120 bp, synthetic construct; identical to SEQ ID NO: 7247
  source 1..120: mol_type = other DNA

SEQ ID NO: 53173 - DNA, 120 bp, synthetic construct; identical to SEQ ID NO: 23219
  source 1..120: mol_type = other DNA

SEQ ID NO: 53174 - DNA, 120 bp, synthetic construct; identical to SEQ ID NO: 23220
  source 1..120: mol_type = other DNA

SEQ ID NO: 53175 - DNA, 120 bp, synthetic construct; identical to SEQ ID NO: 23221
  source 1..120: mol_type = other DNA

SEQ ID NO: 53176 - DNA, 120 bp, synthetic construct; identical to SEQ ID NO: 7248
  source 1..120: mol_type = other DNA

SEQ ID NO: 53177 - DNA, 120 bp, synthetic construct; identical to SEQ ID NO: 23223
  source 1..120: mol_type = other DNA

SEQ ID NO: 53178 - DNA, 120 bp, synthetic construct; identical to SEQ ID NO: 23224
  source 1..120: mol_type = other DNA

SEQ ID NO: 53179 - DNA, 120 bp, synthetic construct; identical to SEQ ID NO: 23225
  source 1..120: mol_type = other DNA

SEQ ID NO: 53180 - DNA, 120 bp, synthetic construct; identical to SEQ ID NO: 7249
  source 1..120: mol_type = other DNA

SEQ ID NO: 53181 - DNA, 120 bp, synthetic construct; identical to SEQ ID NO: 23227
  source 1..120: mol_type = other DNA

SEQ ID NO: 53182 - DNA, 120 bp, synthetic construct; identical to SEQ ID NO: 23228
  source 1..120: mol_type = other DNA

SEQ ID NO: 53183 - DNA, 120 bp, synthetic construct; identical to SEQ ID NO: 23229
  source 1..120: mol_type = other DNA

SEQ ID NO: 53184 - DNA, 120 bp, synthetic construct; identical to SEQ ID NO: 7250
  source 1..120: mol_type = other DNA

SEQ ID NO: 53185 - DNA, 120 bp, synthetic construct; identical to SEQ ID NO: 23231
  source 1..120: mol_type = other DNA

SEQ ID NO: 53186 - DNA, 120 bp, synthetic construct; identical to SEQ ID NO: 23232
  source 1..120: mol_type = other DNA

SEQ ID NO: 53187 - DNA, 120 bp, synthetic construct; identical to SEQ ID NO: 23233
  source 1..120: mol_type = other DNA

SEQ ID NO: 53188 - DNA, 120 bp, synthetic construct; identical to SEQ ID NO: 7251
  source 1..120: mol_type = other DNA

SEQ ID NO: 53189 - DNA, 120 bp, synthetic construct; identical to SEQ ID NO: 23235
  source 1..120: mol_type = other DNA

SEQ ID NO: 53190 - DNA, 120 bp, synthetic construct; identical to SEQ ID NO: 23236
  source 1..120: mol_type = other DNA

SEQ ID NO: 53191 - DNA, 120 bp, synthetic construct; identical to SEQ ID NO: 23237
  source 1..120: mol_type = other DNA

SEQ ID NO: 53192 - DNA, 120 bp, synthetic construct; identical to SEQ ID NO: 7252
  source 1..120: mol_type = other DNA

SEQ ID NO: 53193 - DNA, 120 bp, synthetic construct; identical to SEQ ID NO: 23239
  source 1..120: mol_type = other DNA

SEQ ID NO: 53194 - DNA, 120 bp, synthetic construct; identical to SEQ ID NO: 23240
  source 1..120: mol_type = other DNA

SEQ ID NO: 53195 - DNA, 120 bp, synthetic construct; identical to SEQ ID NO: 23241
  source 1..120: mol_type = other DNA

SEQ ID NO: 53196 - DNA, 120 bp, synthetic construct; identical to SEQ ID NO: 7253
  source 1..120: mol_type = other DNA

SEQ ID NO: 53197 - DNA, 120 bp, synthetic construct; identical to SEQ ID NO: 23243
  source 1..120: mol_type = other DNA

SEQ ID NO: 53198 - DNA, 120 bp, synthetic construct; identical to SEQ ID NO: 23244
  source 1..120: mol_type = other DNA

SEQ ID NO: 53199 - DNA, 120 bp, synthetic construct; identical to SEQ ID NO: 7254
  source 1..120: mol_type = other DNA

SEQ ID NO: 53200 - DNA, 120 bp, synthetic construct; identical to SEQ ID NO: 23246
  source 1..120: mol_type = other DNA

SEQ ID NO: 53201 - DNA, 120 bp, synthetic construct; identical to SEQ ID NO: 23247
  source 1..120: mol_type = other DNA

SEQ ID NO: 53202 - DNA, 120 bp, synthetic construct; identical to SEQ ID NO: 23248
  source 1..120: mol_type = other DNA

SEQ ID NO: 53203 - DNA, 120 bp, synthetic construct; identical to SEQ ID NO: 23249
  source 1..120: mol_type = other DNA

SEQ ID NO: 53204 - DNA, 120 bp, synthetic construct; identical to SEQ ID NO: 7255
  source 1..120: mol_type = other DNA

SEQ ID NO: 53205 - DNA, 120 bp, synthetic construct; identical to SEQ ID NO: 23251
  source 1..120: mol_type = other DNA

SEQ ID NO: 53206 - DNA, 120 bp, synthetic construct; identical to SEQ ID NO: 23252
  source 1..120: mol_type = other DNA

SEQ ID NO: 53207 - DNA, 120 bp, synthetic construct; identical to SEQ ID NO: 7256
  source 1..120: mol_type = other DNA

SEQ ID NO: 53208 - DNA, 120 bp, synthetic construct; identical to SEQ ID NO: 23254
  source 1..120: mol_type = other DNA

SEQ ID NO: 53209 - DNA, 120 bp, synthetic construct; identical to SEQ ID NO: 23255
  source 1..120: mol_type = other DNA

SEQ ID NO: 53210 - DNA, 120 bp, synthetic construct; identical to SEQ ID NO: 23256
  source 1..120: mol_type = other DNA

SEQ ID NO: 53211 - DNA, 120 bp, synthetic construct; identical to SEQ ID NO: 23257
  source 1..120: mol_type = other DNA

SEQ ID NO: 53212 - DNA, 120 bp, synthetic construct; identical to SEQ ID NO: 7257
  source 1..120: mol_type = other DNA

SEQ ID NO: 53213 - DNA, 120 bp, synthetic construct; identical to SEQ ID NO: 23259
  source 1..120: mol_type = other DNA

SEQ ID NO: 53214 - DNA, 120 bp, synthetic construct; identical to SEQ ID NO: 23260
  source 1..120: mol_type = other DNA

SEQ ID NO: 53215 - DNA, 120 bp, synthetic construct; identical to SEQ ID NO: 23261
  source 1..120: mol_type = other DNA

SEQ ID NO: 53216 - DNA, 120 bp, synthetic construct; identical to SEQ ID NO: 7258
  source 1..120: mol_type = other DNA

SEQ ID NO: 53217 - DNA, 120 bp, synthetic construct; identical to SEQ ID NO: 23263
  source 1..120: mol_type = other DNA

SEQ ID NO: 53218 - DNA, 120 bp, synthetic construct; identical to SEQ ID NO: 23264
  source 1..120: mol_type = other DNA

SEQ ID NO: 53219 - DNA, 120 bp, synthetic construct; identical to SEQ ID NO: 7259
  source 1..120: mol_type = other DNA

SEQ ID NO: 53220 - DNA, 120 bp, synthetic construct; identical to SEQ ID NO: 23266
  source 1..120: mol_type = other DNA

SEQ ID NO: 53221 - DNA, 120 bp, synthetic construct; identical to SEQ ID NO: 23267
  source 1..120: mol_type = other DNA

SEQ ID NO: 53222 - DNA, 120 bp, synthetic construct; identical to SEQ ID NO: 23268
  source 1..120: mol_type = other DNA

SEQ ID NO: 53223 - DNA, 120 bp, synthetic construct; identical to SEQ ID NO: 23269
  source 1..120: mol_type = other DNA

SEQ ID NO: 53224 - DNA, 120 bp, synthetic construct; identical to SEQ ID NO: 7260
  source 1..120: mol_type = other DNA

SEQ ID NO: 53225 - DNA, 120 bp, synthetic construct; identical to SEQ ID NO: 23271
  source 1..120: mol_type = other DNA

SEQ ID NO: 53226 - DNA, 120 bp, synthetic construct; identical to SEQ ID NO: 23272
  source 1..120: mol_type = other DNA

SEQ ID NO: 53227 - DNA, 120 bp, synthetic construct; identical to SEQ ID NO: 7261
  source 1..120: mol_type = other DNA

SEQ ID NO: 53228 - DNA, 120 bp, synthetic construct; identical to SEQ ID NO: 23274
  source 1..120: mol_type = other DNA

SEQ ID NO: 53229 - DNA, 120 bp, synthetic construct; identical to SEQ ID NO: 23275
  source 1..120: mol_type = other DNA

SEQ ID NO: 53230 - DNA, 120 bp, synthetic construct; identical to SEQ ID NO: 23276
  source 1..120: mol_type = other DNA

SEQ ID NO: 53231 - DNA, 120 bp, synthetic construct; identical to SEQ ID NO: 7262
  source 1..120: mol_type = other DNA

SEQ ID NO: 53232 - DNA, 120 bp, synthetic construct; identical to SEQ ID NO: 23278
  source 1..120: mol_type = other DNA

SEQ ID NO: 53233 - DNA, 120 bp, synthetic construct; identical to SEQ ID NO: 23279
  source 1..120: mol_type = other DNA

SEQ ID NO: 53234 - DNA, 120 bp, synthetic construct; identical to SEQ ID NO: 23280
  source 1..120: mol_type = other DNA

SEQ ID NO: 53235 - DNA, 120 bp, synthetic construct; identical to SEQ ID NO: 23281
  source 1..120: mol_type = other DNA

SEQ ID NO: 53236 - DNA, 120 bp, synthetic construct; identical to SEQ ID NO: 7263
  source 1..120: mol_type = other DNA

SEQ ID NO: 53237 - DNA, 120 bp, synthetic construct; identical to SEQ ID NO: 23283
  source 1..120: mol_type = other DNA

SEQ ID NO: 53238 - DNA, 120 bp, synthetic construct; identical to SEQ ID NO: 23284
  source 1..120: mol_type = other DNA

SEQ ID NO: 53239 - DNA, 120 bp, synthetic construct; identical to SEQ ID NO: 7264
  source 1..120: mol_type = other DNA

SEQ ID NO: 53240 - DNA, 120 bp, synthetic construct; identical to SEQ ID NO: 23286
  source 1..120: mol_type = other DNA

SEQ ID NO: 53241 - DNA, 120 bp, synthetic construct; identical to SEQ ID NO: 23287
  source 1..120: mol_type = other DNA

SEQ ID NO: 53242 - DNA, 120 bp, synthetic construct; identical to SEQ ID NO: 23288
  source 1..120: mol_type = other DNA

SEQ ID NO: 53243 - DNA, 120 bp, synthetic construct; identical to SEQ ID NO: 7265
  source 1..120: mol_type = other DNA

SEQ ID NO: 53244 - DNA, 120 bp, synthetic construct; identical to SEQ ID NO: 23290
  source 1..120: mol_type = other DNA

SEQ ID NO: 53245 - DNA, 120 bp, synthetic construct; identical to SEQ ID NO: 23291
  source 1..120: mol_type = other DNA

SEQ ID NO: 53246 - DNA, 120 bp, synthetic construct; identical to SEQ ID NO: 23292
  source 1..120: mol_type = other DNA

SEQ ID NO: 53247 - DNA, 120 bp, synthetic construct; identical to SEQ ID NO: 7266
  source 1..120: mol_type = other DNA

SEQ ID NO: 53248 - DNA, 120 bp, synthetic construct; identical to SEQ ID NO: 23294
  source 1..120: mol_type = other DNA

SEQ ID NO: 53249 - DNA, 120 bp, synthetic construct; identical to SEQ ID NO: 23295
  source 1..120: mol_type = other DNA

SEQ ID NO: 53250 - DNA, 120 bp, synthetic construct; identical to SEQ ID NO: 23296
  source 1..120: mol_type = other DNA

SEQ ID NO: 53251 - DNA, 120 bp, synthetic construct; identical to SEQ ID NO: 7267
  source 1..120: mol_type = other DNA

SEQ ID NO: 53252 - DNA, 120 bp, synthetic construct; identical to SEQ ID NO: 23298
  source 1..120: mol_type = other DNA

SEQ ID NO: 53253 - DNA, 120 bp, synthetic construct; identical to SEQ ID NO: 23299
  source 1..120: mol_type = other DNA

SEQ ID NO: 53254 - DNA, 120 bp, synthetic construct; identical to SEQ ID NO: 23300
  source 1..120: mol_type = other DNA

SEQ ID NO: 53255 - DNA, 120 bp, synthetic construct; identical to SEQ ID NO: 7268
  source 1..120: mol_type = other DNA

SEQ ID NO: 53256 - DNA, 120 bp, synthetic construct; identical to SEQ ID NO: 23302
  source 1..120: mol_type = other DNA

SEQ ID NO: 53257 - DNA, 120 bp, synthetic construct; identical to SEQ ID NO: 23303
  source 1..120: mol_type = other DNA

SEQ ID NO: 53258 - DNA, 120 bp, synthetic construct; identical to SEQ ID NO: 23304
  source 1..120: mol_type = other DNA

SEQ ID NO: 53259 - DNA, 120 bp, synthetic construct; identical to SEQ ID NO: 7269
  source 1..120: mol_type = other DNA

SEQ ID NO: 53260 - DNA, 120 bp, synthetic construct; identical to SEQ ID NO: 23306
  source 1..120: mol_type = other DNA

SEQ ID NO: 53261 - DNA, 120 bp, synthetic construct; identical to SEQ ID NO: 23307
  source 1..120: mol_type = other DNA

SEQ ID NO: 53262 - DNA, 120 bp, synthetic construct; identical to SEQ ID NO: 23308
  source 1..120: mol_type = other DNA

SEQ ID NO: 53263 - DNA, 120 bp, synthetic construct; identical to SEQ ID NO: 23309
  source 1..120: mol_type = other DNA

SEQ ID NO: 53264 - DNA, 120 bp, synthetic construct; identical to SEQ ID NO: 7270
  source 1..120: mol_type = other DNA

SEQ ID NO: 53265 - DNA, 120 bp, synthetic construct; identical to SEQ ID NO: 23311
  source 1..120: mol_type = other DNA

SEQ ID NO: 53266 - DNA, 120 bp, synthetic construct; identical to SEQ ID NO: 23312
  source 1..120: mol_type = other DNA

SEQ ID NO: 53267 - DNA, 120 bp, synthetic construct; identical to SEQ ID NO: 23313
  source 1..120: mol_type = other DNA

SEQ ID NO: 53268 - DNA, 120 bp, synthetic construct; identical to SEQ ID NO: 7271
  source 1..120: mol_type = other DNA

SEQ ID NO: 53269 - DNA, 120 bp, synthetic construct; identical to SEQ ID NO: 23315
  source 1..120: mol_type = other DNA

SEQ ID NO: 53270 - DNA, 120 bp, synthetic construct; identical to SEQ ID NO: 23316
  source 1..120: mol_type = other DNA

SEQ ID NO: 53271 - DNA, 120 bp, synthetic construct; identical to SEQ ID NO: 23317
  source 1..120: mol_type = other DNA

SEQ ID NO: 53272 - DNA, 120 bp, synthetic construct; identical to SEQ ID NO: 7272
  source 1..120: mol_type = other DNA

SEQ ID NO: 53273 - DNA, 120 bp, synthetic construct; identical to SEQ ID NO: 23319
  source 1..120: mol_type = other DNA

SEQ ID NO: 53274 - DNA, 120 bp, synthetic construct; identical to SEQ ID NO: 23320
  source 1..120: mol_type = other DNA

SEQ ID NO: 53275 - DNA, 120 bp, synthetic construct; identical to SEQ ID NO: 23321
  source 1..120: mol_type = other DNA

SEQ ID NO: 53276 - DNA, 120 bp, synthetic construct; identical to SEQ ID NO: 7273
  source 1..120: mol_type = other DNA

SEQ ID NO: 53277 - DNA, 120 bp, synthetic construct; identical to SEQ ID NO: 23323
  source 1..120: mol_type = other DNA

SEQ ID NO: 53278 - DNA, 120 bp, synthetic construct; identical to SEQ ID NO: 23324
  source 1..120: mol_type = other DNA

SEQ ID NO: 53279 - DNA, 120 bp, synthetic construct; identical to SEQ ID NO: 23325
  source 1..120: mol_type = other DNA

SEQ ID NO: 53280 - DNA, 120 bp, synthetic construct; identical to SEQ ID NO: 7274
  source 1..120: mol_type = other DNA

SEQ ID NO: 53281 - DNA, 120 bp, synthetic construct; identical to SEQ ID NO: 23327
  source 1..120: mol_type = other DNA

SEQ ID NO: 53282 - DNA, 120 bp, synthetic construct; identical to SEQ ID NO: 7275
  source 1..120: mol_type = other DNA

SEQ ID NO: 53283 - DNA, 120 bp, synthetic construct; identical to SEQ ID NO: 23329
  source 1..120: mol_type = other DNA

SEQ ID NO: 53284 - DNA, 120 bp, synthetic construct; identical to SEQ ID NO: 23330
  source 1..120: mol_type = other DNA

SEQ ID NO: 53285 - DNA, 120 bp, synthetic construct; identical to SEQ ID NO: 23331
  source 1..120: mol_type = other DNA

SEQ ID NO: 53286 - DNA, 120 bp, synthetic construct; identical to SEQ ID NO: 23332
  source 1..120: mol_type = other DNA

SEQ ID NO: 53287 - DNA, 120 bp, synthetic construct; identical to SEQ ID NO: 7276
  source 1..120: mol_type = other DNA

SEQ ID NO: 53288 - DNA, 120 bp, synthetic construct; identical to SEQ ID NO: 23334
  source 1..120: mol_type = other DNA

SEQ ID NO: 53289 - DNA, 120 bp, synthetic construct; identical to SEQ ID NO: 23335
  source 1..120: mol_type = other DNA

SEQ ID NO: 53290 - DNA, 120 bp, synthetic construct; identical to SEQ ID NO: 7277
  source 1..120: mol_type = other DNA

SEQ ID NO: 53291 - DNA, 120 bp, synthetic construct; identical to SEQ ID NO: 23337
  source 1..120: mol_type = other DNA

SEQ ID NO: 53292 - DNA, 120 bp, synthetic construct; identical to SEQ ID NO: 23338
  source 1..120: mol_type = other DNA

SEQ ID NO: 53293 - DNA, 120 bp, synthetic construct; identical to SEQ ID NO: 7278
  source 1..120: mol_type = other DNA

SEQ ID NO: 53294 - DNA, 120 bp, synthetic construct; identical to SEQ ID NO: 23340
  source 1..120: mol_type = other DNA

SEQ ID NO: 53295 - DNA, 120 bp, synthetic construct; identical to SEQ ID NO: 23341
  source 1..120: mol_type = other DNA

SEQ ID NO: 53296 - DNA, 120 bp, synthetic construct; identical to SEQ ID NO: 23342
  source 1..120: mol_type = other DNA

SEQ ID NO: 53297 - DNA, 120 bp, synthetic construct; identical to SEQ ID NO: 23343
  source 1..120: mol_type = other DNA

SEQ ID NO: 53298 - DNA, 120 bp, synthetic construct; identical to SEQ ID NO: 7279
  source 1..120: mol_type = other DNA

SEQ ID NO: 53299 - DNA, 120 bp, synthetic construct; identical to SEQ ID NO: 23345
  source 1..120: mol_type = other DNA

SEQ ID NO: 53300 - DNA, 120 bp, synthetic construct; identical to SEQ ID NO: 23346
  source 1..120: mol_type = other DNA

SEQ ID NO: 53301 - DNA, 120 bp, synthetic construct; identical to SEQ ID NO: 23347
  source 1..120: mol_type = other DNA

SEQ ID NO: 53302 - DNA, 120 bp, synthetic construct; identical to SEQ ID NO: 23348
  source 1..120: mol_type = other DNA

SEQ ID NO: 53303 - DNA, 120 bp, synthetic construct; identical to SEQ ID NO: 7280
  source 1..120: mol_type = other DNA

SEQ ID NO: 53304 - DNA, 120 bp, synthetic construct; identical to SEQ ID NO: 23350
  source 1..120: mol_type = other DNA

SEQ ID NO: 53305 - DNA, 120 bp, synthetic construct; identical to SEQ ID NO: 23351
  source 1..120: mol_type = other DNA

SEQ ID NO: 53306 - DNA, 120 bp, synthetic construct; identical to SEQ ID NO: 23352
  source 1..120: mol_type = other DNA

SEQ ID NO: 53307 - DNA, 120 bp, synthetic construct; identical to SEQ ID NO: 23353
  source 1..120: mol_type = other DNA

SEQ ID NO: 53308 - DNA, 120 bp, synthetic construct; identical to SEQ ID NO: 7281
  source 1..120: mol_type = other DNA

SEQ ID NO: 53309 - DNA, 120 bp, synthetic construct; identical to SEQ ID NO: 23355
  source 1..120: mol_type = other DNA

SEQ ID NO: 53310 - DNA, 120 bp, synthetic construct; identical to SEQ ID NO: 23356
  source 1..120: mol_type = other DNA

SEQ ID NO: 53311 - DNA, 120 bp, synthetic construct; identical to SEQ ID NO: 23357
  source 1..120: mol_type = other DNA

SEQ ID NO: 53312 - DNA, 120 bp, synthetic construct; identical to SEQ ID NO: 7282
  source 1..120: mol_type = other DNA

SEQ ID NO: 53313 - DNA, 120 bp, synthetic construct; identical to SEQ ID NO: 23359
  source 1..120: mol_type = other DNA

SEQ ID NO: 53314 - DNA, 120 bp, synthetic construct; identical to SEQ ID NO: 23360
  source 1..120: mol_type = other DNA

SEQ ID NO: 53315 - DNA, 120 bp, synthetic construct; identical to SEQ ID NO: 23361
  source 1..120: mol_type = other DNA

SEQ ID NO: 53316 - DNA, 120 bp, synthetic construct; identical to SEQ ID NO: 7283
  source 1..120: mol_type = other DNA

SEQ ID NO: 53317 - DNA, 120 bp, synthetic construct; identical to SEQ ID NO: 23363
  source 1..120: mol_type = other DNA

SEQ ID NO: 53318 - DNA, 120 bp, synthetic construct; identical to SEQ ID NO: 23364
  source 1..120: mol_type = other DNA

SEQ ID NO: 53319 - DNA, 120 bp, synthetic construct; identical to SEQ ID NO: 7284
  source 1..120: mol_type = other DNA

SEQ ID NO: 53320 - DNA, 120 bp, synthetic construct; identical to SEQ ID NO: 23366
  source 1..120: mol_type = other DNA

SEQ ID NO: 53321 - DNA, 120 bp, synthetic construct; identical to SEQ ID NO: 23367
  source 1..120: mol_type = other DNA

SEQ ID NO: 53322 - DNA, 120 bp, synthetic construct; identical to SEQ ID NO: 23368
  source 1..120: mol_type = other DNA

SEQ ID NO: 53323 - DNA, 120 bp, synthetic construct; identical to SEQ ID NO: 23369
  source 1..120: mol_type = other DNA

SEQ ID NO: 53324 - DNA, 120 bp, synthetic construct; identical to SEQ ID NO: 7285
  source 1..120: mol_type = other DNA

SEQ ID NO: 53325 - DNA, 120 bp, synthetic construct; identical to SEQ ID NO: 23371
  source 1..120: mol_type = other DNA

SEQ ID NO: 53326 - DNA, 120 bp, synthetic construct; identical to SEQ ID NO: 23372
  source 1..120: mol_type = other DNA

SEQ ID NO: 53327 - DNA, 120 bp, synthetic construct; identical to SEQ ID NO: 7286
  source 1..120: mol_type = other DNA

SEQ ID NO: 53328 - DNA, 120 bp, synthetic construct; identical to SEQ ID NO: 23374
  source 1..120: mol_type = other DNA

SEQ ID NO: 53329 - DNA, 120 bp, synthetic construct; identical to SEQ ID NO: 23375
  source 1..120: mol_type = other DNA

SEQ ID NO: 53330 - DNA, 120 bp, synthetic construct; identical to SEQ ID NO: 23376
  source 1..120: mol_type = other DNA

SEQ ID NO: 53331 - DNA, 120 bp, synthetic construct; identical to SEQ ID NO: 23377
  source 1..120: mol_type = other DNA

SEQ ID NO: 53332 - DNA, 120 bp, synthetic construct; identical to SEQ ID NO: 7287
  source 1..120: mol_type = other DNA

SEQ ID NO: 53333 - DNA, 120 bp, synthetic construct; identical to SEQ ID NO: 23379
  source 1..120: mol_type = other DNA

SEQ ID NO: 53334 - DNA, 120 bp, synthetic construct; identical to SEQ ID NO: 23380
  source 1..120: mol_type = other DNA

SEQ ID NO: 53335 - DNA, 120 bp, synthetic construct; identical to SEQ ID NO: 23381
  source 1..120: mol_type = other DNA

SEQ ID NO: 53336 - DNA, 120 bp, synthetic construct; identical to SEQ ID NO: 7288
  source 1..120: mol_type = other DNA

SEQ ID NO: 53337 - DNA, 120 bp, synthetic construct; identical to SEQ ID NO: 23383
  source 1..120: mol_type = other DNA

SEQ ID NO: 53338 - DNA, 120 bp, synthetic construct; identical to SEQ ID NO: 23384
  source 1..120: mol_type = other DNA

SEQ ID NO: 53339 - DNA, 120 bp, synthetic construct; identical to SEQ ID NO: 23385
  source 1..120: mol_type = other DNA

SEQ ID NO: 53340 - DNA, 120 bp, synthetic construct; identical to SEQ ID NO: 7289
  source 1..120: mol_type = other DNA

SEQ ID NO: 53341 - DNA, 120 bp, synthetic construct; identical to SEQ ID NO: 23387
  source 1..120: mol_type = other DNA

SEQ ID NO: 53342 - DNA, 120 bp, synthetic construct; identical to SEQ ID NO: 23388
  source 1..120: mol_type = other DNA

SEQ ID NO: 53343 - DNA, 120 bp, synthetic construct; identical to SEQ ID NO: 23389
  source 1..120: mol_type = other DNA

SEQ ID NO: 53344 - DNA, 120 bp, synthetic construct; identical to SEQ ID NO: 7290
  source 1..120: mol_type = other DNA

SEQ ID NO: 53345 - DNA, 120 bp, synthetic construct; identical to SEQ ID NO: 23391
  source 1..120: mol_type = other DNA

SEQ ID NO: 53346 - DNA, 120 bp, synthetic construct; identical to SEQ ID NO: 23392
  source 1..120: mol_type = other DNA

SEQ ID NO: 53347 - DNA, 120 bp, synthetic construct; identical to SEQ ID NO: 23393
  source 1..120: mol_type = other DNA

SEQ ID NO: 53348 - DNA, 120 bp, synthetic construct; identical to SEQ ID NO: 7291
  source 1..120: mol_type = other DNA

SEQ ID NO: 53349 - DNA, 120 bp, synthetic construct; identical to SEQ ID NO: 23395
  source 1..120: mol_type = other DNA

SEQ ID NO: 53350 - DNA, 120 bp, synthetic construct; identical to SEQ ID NO: 23396
  source 1..120: mol_type = other DNA

SEQ ID NO: 53351 - DNA, 120 bp, synthetic construct; identical to SEQ ID NO: 23397
  source 1..120: mol_type = other DNA

SEQ ID NO: 53352 - DNA, 120 bp, synthetic construct; identical to SEQ ID NO: 7292
  source 1..120: mol_type = other DNA

SEQ ID NO: 53353 - DNA, 120 bp, synthetic construct; identical to SEQ ID NO: 23399
  source 1..120: mol_type = other DNA

SEQ ID NO: 53354 - DNA, 120 bp, synthetic construct; identical to SEQ ID NO: 23400
  source 1..120: mol_type = other DNA

SEQ ID NO: 53355 - DNA, 120 bp, synthetic construct; identical to SEQ ID NO: 23401
  source 1..120: mol_type = other DNA

SEQ ID NO: 53356 - DNA, 120 bp, synthetic construct; identical to SEQ ID NO: 7293
  source 1..120: mol_type = other DNA

SEQ ID NO: 53357 - DNA, 120 bp, synthetic construct; identical to SEQ ID NO: 23403
  source 1..120: mol_type = other DNA

SEQ ID NO: 53358 - DNA, 120 bp, synthetic construct; identical to SEQ ID NO: 23404
  source 1..120: mol_type = other DNA

SEQ ID NO: 53359 - DNA, 120 bp, synthetic construct; identical to SEQ ID NO: 7294
  source 1..120: mol_type = other DNA

SEQ ID NO: 53360 - DNA, 120 bp, synthetic construct; identical to SEQ ID NO: 23406
  source 1..120: mol_type = other DNA

SEQ ID NO: 53361 - DNA, 120 bp, synthetic construct; identical to SEQ ID NO: 23407
  source 1..120: mol_type = other DNA

SEQ ID NO: 53362 - DNA, 120 bp, synthetic construct; identical to SEQ ID NO: 23408
  source 1..120: mol_type = other DNA

SEQ ID NO: 53363 - DNA, 120 bp, synthetic construct; identical to SEQ ID NO: 7295
  source 1..120: mol_type = other DNA

SEQ ID NO: 53364 - DNA, 120 bp, synthetic construct; identical to SEQ ID NO: 23410
  source 1..120: mol_type = other DNA

SEQ ID NO: 53365 - DNA, 120 bp, synthetic construct; identical to SEQ ID NO: 23411
  source 1..120: mol_type = other DNA

SEQ ID NO: 53366 - DNA, 120 bp, synthetic construct; identical to SEQ ID NO: 23412
  source 1..120: mol_type = other DNA

SEQ ID NO: 53367 - DNA, 120 bp, synthetic construct; identical to SEQ ID NO: 23413
  source 1..120: mol_type = other DNA

SEQ ID NO: 53368 - DNA, 120 bp, synthetic construct; identical to SEQ ID NO: 7296
  source 1..120: mol_type = other DNA

SEQ ID NO: 53369 - DNA, 120 bp, synthetic construct; identical to SEQ ID NO: 23415
  source 1..120: mol_type = other DNA

SEQ ID NO: 53370 - DNA, 120 bp, synthetic construct; identical to SEQ ID NO: 23416
  source 1..120: mol_type = other DNA

SEQ ID NO: 53371 - DNA, 120 bp, synthetic construct; identical to SEQ ID NO: 23417
  source 1..120: mol_type = other DNA

SEQ ID NO: 53372 - DNA, 120 bp, synthetic construct; identical to SEQ ID NO: 7297
  source 1..120: mol_type = other DNA

SEQ ID NO: 53373 - DNA, 120 bp, synthetic construct; identical to SEQ ID NO: 23419
  source 1..120: mol_type = other DNA

SEQ ID NO: 53374 - DNA, 120 bp, synthetic construct; identical to SEQ ID NO: 23420
  source 1..120: mol_type = other DNA

SEQ ID NO: 53375 - DNA, 120 bp, synthetic construct; identical to SEQ ID NO: 23421
  source 1..120: mol_type = other DNA

SEQ ID NO: 53376 - DNA, 120 bp, synthetic construct; identical to SEQ ID NO: 7298
  source 1..120: mol_type = other DNA

SEQ ID NO: 53377 - DNA, 120 bp, synthetic construct; identical to SEQ ID NO: 23423
  source 1..120: mol_type = other DNA

SEQ ID NO: 53378 - DNA, 120 bp, synthetic construct; identical to SEQ ID NO: 23424
  source 1..120: mol_type = other DNA

SEQ ID NO: 53379 - DNA, 120 bp, synthetic construct; identical to SEQ ID NO: 23425
  source 1..120: mol_type = other DNA

SEQ ID NO: 53380 - DNA, 120 bp, synthetic construct; identical to SEQ ID NO: 7299
  source 1..120: mol_type = other DNA

SEQ ID NO: 53381 - DNA, 120 bp, synthetic construct; identical to SEQ ID NO: 23427
  source 1..120: mol_type = other DNA

SEQ ID NO: 53382 - DNA, 120 bp, synthetic construct; identical to SEQ ID NO: 23428
  source 1..120: mol_type = other DNA

SEQ ID NO: 53383 - DNA, 120 bp, synthetic construct; identical to SEQ ID NO: 23429
  source 1..120: mol_type = other DNA

SEQ ID NO: 53384 - DNA, 120 bp, synthetic construct; identical to SEQ ID NO: 7300
  source 1..120: mol_type = other DNA

SEQ ID NO: 53385 - DNA, 120 bp, synthetic construct; identical to SEQ ID NO: 23431
  source 1..120: mol_type = other DNA

SEQ ID NO: 53386 - DNA, 120 bp, synthetic construct; identical to SEQ ID NO: 23432
  source 1..120: mol_type = other DNA

SEQ ID NO: 53387 - DNA, 120 bp, synthetic construct; identical to SEQ ID NO: 23433
  source 1..120: mol_type = other DNA

SEQ ID NO: 53388 - DNA, 120 bp, synthetic construct; identical to SEQ ID NO: 7301
  source 1..120: mol_type = other DNA

SEQ ID NO: 53389 - DNA, 120 bp, synthetic construct; identical to SEQ ID NO: 23435
  source 1..120: mol_type = other DNA

SEQ ID NO: 53390 - DNA, 120 bp, synthetic construct; identical to SEQ ID NO: 23436
  source 1..120: mol_type = other DNA

SEQ ID NO: 53391 - DNA, 120 bp, synthetic construct; identical to SEQ ID NO: 7302
  source 1..120: mol_type = other DNA

SEQ ID NO: 53392 - DNA, 120 bp, synthetic construct; identical to SEQ ID NO: 23438
  source 1..120: mol_type = other DNA

SEQ ID NO: 53393 - DNA, 120 bp, synthetic construct; identical to SEQ ID NO: 23439
  source 1..120: mol_type = other DNA

SEQ ID NO: 53394 - DNA, 120 bp, synthetic construct; identical to SEQ ID NO: 23440
  source 1..120: mol_type = other DNA

SEQ ID NO: 53395 - DNA, 120 bp, synthetic construct; identical to SEQ ID NO: 23441
  source 1..120: mol_type = other DNA

SEQ ID NO: 53396 - DNA, 120 bp, synthetic construct; identical to SEQ ID NO: 7303
  source 1..120: mol_type = other DNA

SEQ ID NO: 53397 - DNA, 120 bp, synthetic construct; identical to SEQ ID NO: 23443
  source 1..120: mol_type = other DNA

SEQ ID NO: 53398 - DNA, 120 bp, synthetic construct; identical to SEQ ID NO: 23444
  source 1..120: mol_type = other DNA

SEQ ID NO: 53399 - DNA, 120 bp, synthetic construct; identical to SEQ ID NO: 7304
  source 1..120: mol_type = other DNA

SEQ ID NO: 53400 - DNA, 120 bp, synthetic construct; identical to SEQ ID NO: 23446
  source 1..120: mol_type = other DNA

SEQ ID NO: 53401 - DNA, 120 bp, synthetic construct; identical to SEQ ID NO: 23447
  source 1..120: mol_type = other DNA

SEQ ID NO: 53402 - DNA, 120 bp, synthetic construct; identical to SEQ ID NO: 23448
  source 1..120: mol_type = other DNA

SEQ ID NO: 53403 - DNA, 120 bp, synthetic construct; identical to SEQ ID NO: 23449
  source 1..120: mol_type = other DNA

SEQ ID NO: 53404 - DNA, 120 bp, synthetic construct; identical to SEQ ID NO: 7305
  source 1..120: mol_type = other DNA

SEQ ID NO: 53405 - DNA, 120 bp, synthetic construct; identical to SEQ ID NO: 7306
  source 1..120: mol_type = other DNA

SEQ ID NO: 53406 - DNA, 120 bp, synthetic construct; identical to SEQ ID NO: 23452
  source 1..120: mol_type = other DNA

SEQ ID NO: 53407 - DNA, 120 bp, synthetic construct; identical to SEQ ID NO: 23453
  source 1..120: mol_type = other DNA

SEQ ID NO: 53408 - DNA, 120 bp, synthetic construct; identical to SEQ ID NO: 23454
  source 1..120: mol_type = other DNA

SEQ ID NO: 53409 - DNA, 120 bp, synthetic construct; identical to SEQ ID NO: 7307
  source 1..120: mol_type = other DNA

SEQ ID NO: 53410 - DNA, 120 bp, synthetic construct; identical to SEQ ID NO: 7308
  source 1..120: mol_type = other DNA

SEQ ID NO: 53411 - DNA, 120 bp, synthetic construct; identical to SEQ ID NO: 23457
  source 1..120: mol_type = other DNA

SEQ ID NO: 53412 - DNA, 120 bp, synthetic construct; identical to SEQ ID NO: 23458
  source 1..120: mol_type = other DNA

SEQ ID NO: 53413 - DNA, 120 bp, synthetic construct; identical to SEQ ID NO: 23459
  source 1..120: mol_type = other DNA

SEQ ID NO: 53414 - DNA, 120 bp, synthetic construct; identical to SEQ ID NO: 23460
  source 1..120: mol_type = other DNA

SEQ ID NO: 53415 - DNA, 120 bp, synthetic construct; identical to SEQ ID NO: 7309
  source 1..120: mol_type = other DNA

SEQ ID NO: 53416 - DNA, 120 bp, synthetic construct; identical to SEQ ID NO: 23462
  source 1..120: mol_type = other DNA

SEQ ID NO: 53417 - DNA, 120 bp, synthetic construct; identical to SEQ ID NO: 23463
  source 1..120: mol_type = other DNA

SEQ ID NO: 53418 - DNA, 120 bp, synthetic construct; identical to SEQ ID NO: 7310
  source 1..120: mol_type = other DNA

SEQ ID NO: 53419 - DNA, 120 bp, synthetic construct; identical to SEQ ID NO: 23465
  source 1..120: mol_type = other DNA

SEQ ID NO: 53420 - DNA, 120 bp, synthetic construct; identical to SEQ ID NO: 23466
  source 1..120: mol_type = other DNA

SEQ ID NO: 53421 - DNA, 120 bp, synthetic construct; identical to SEQ ID NO: 23467
  source 1..120: mol_type = other DNA

SEQ ID NO: 53422 - DNA, 120 bp, synthetic construct; identical to SEQ ID NO: 7311
  source 1..120: mol_type = other DNA

SEQ ID NO: 53423 - DNA, 120 bp, synthetic construct; identical to SEQ ID NO: 23469
  source 1..120: mol_type = other DNA

SEQ ID NO: 53424 - DNA, 120 bp, synthetic construct; identical to SEQ ID NO: 23470
  source 1..120: mol_type = other DNA

SEQ ID NO: 53425 - DNA, 120 bp, synthetic construct; identical to SEQ ID NO: 23471
  source 1..120: mol_type = other DNA

SEQ ID NO: 53426 - DNA, 120 bp, synthetic construct; identical to SEQ ID NO: 7312
  source 1..120: mol_type = other DNA

SEQ ID NO: 53427 - DNA, 120 bp, synthetic construct; identical to SEQ ID NO: 23473
  source 1..120: mol_type = other DNA

SEQ ID NO: 53428 - DNA, 120 bp, synthetic construct; identical to SEQ ID NO: 23474
  source 1..120: mol_type = other DNA

SEQ ID NO: 53429 - DNA, 120 bp, synthetic construct; identical to SEQ ID NO: 23475
  source 1..120: mol_type = other DNA

SEQ ID NO: 53430 - DNA, 120 bp, synthetic construct; identical to SEQ ID NO: 7313
  source 1..120: mol_type = other DNA

SEQ ID NO: 53431 - DNA, 120 bp, synthetic construct; identical to SEQ ID NO: 23477
  source 1..120: mol_type = other DNA

SEQ ID NO: 53432 - DNA, 120 bp, synthetic construct; identical to SEQ ID NO: 23478
  source 1..120: mol_type = other DNA

SEQ ID NO: 53433 - DNA, 120 bp, synthetic construct; identical to SEQ ID NO: 23479
  source 1..120: mol_type = other DNA

SEQ ID NO: 53434 - DNA, 120 bp, synthetic construct; identical to SEQ ID NO: 23480
  source 1..120: mol_type = other DNA

SEQ ID NO: 53435 - DNA, 120 bp, synthetic construct; identical to SEQ ID NO: 7314
  source 1..120: mol_type = other DNA

SEQ ID NO: 53436 - DNA, 120 bp, synthetic construct; identical to SEQ ID NO: 23482
  source 1..120: mol_type = other DNA

SEQ ID NO: 53437 - DNA, 120 bp, synthetic construct; identical to SEQ ID NO: 23483
  source 1..120: mol_type = other DNA

SEQ ID NO: 53438 - DNA, 120 bp, synthetic construct; identical to SEQ ID NO: 7315
  source 1..120: mol_type = other DNA

SEQ ID NO: 53439 - DNA, 120 bp, synthetic construct; identical to SEQ ID NO: 23485
  source 1..120: mol_type = other DNA

SEQ ID NO: 53440 - DNA, 120 bp, synthetic construct; identical to SEQ ID NO: 23486
  source 1..120: mol_type = other DNA

SEQ ID NO: 53441 - DNA, 120 bp, synthetic construct; identical to SEQ ID NO: 23487
  source 1..120: mol_type = other DNA

SEQ ID NO: 53442 - DNA, 120 bp, synthetic construct; identical to SEQ ID NO: 7316
  source 1..120: mol_type = other DNA

SEQ ID NO: 53443 - DNA, 120 bp, synthetic construct; identical to SEQ ID NO: 23489
  source 1..120: mol_type = other DNA

SEQ ID NO: 53444 - DNA, 120 bp, synthetic construct; identical to SEQ ID NO: 23490
  source 1..120: mol_type = other DNA

SEQ ID NO: 53445 - DNA, 120 bp, synthetic construct; identical to SEQ ID NO: 23491
  source 1..120: mol_type = other DNA

SEQ ID NO: 53446 - DNA, 120 bp, synthetic construct; identical to SEQ ID NO: 23492
  source 1..120: mol_type = other DNA

SEQ ID NO: 53447 - DNA, 120 bp, synthetic construct; identical to SEQ ID NO: 7317
  source 1..120: mol_type = other DNA

SEQ ID NO: 53448 - DNA, 120 bp, synthetic construct; identical to SEQ ID NO: 23494
  source 1..120: mol_type = other DNA

SEQ ID NO: 53449 - DNA, 120 bp, synthetic construct; identical to SEQ ID NO: 23495
  source 1..120: mol_type = other DNA

SEQ ID NO: 53450 - DNA, 120 bp, synthetic construct; identical to SEQ ID NO: 7318
  source 1..120: mol_type = other DNA

SEQ ID NO: 53451 - DNA, 120 bp, synthetic construct; identical to SEQ ID NO: 23497
  source 1..120: mol_type = other DNA

SEQ ID NO: 53452 - DNA, 120 bp, synthetic construct; identical to SEQ ID NO: 23498
  source 1..120: mol_type = other DNA

SEQ ID NO: 53453 - DNA, 120 bp, synthetic construct; identical to SEQ ID NO: 23499
  source 1..120: mol_type = other DNA

SEQ ID NO: 53454 - DNA, 120 bp, synthetic construct; identical to SEQ ID NO: 7319
  source 1..120: mol_type = other DNA

SEQ ID NO: 53455 - DNA, 120 bp, synthetic construct; identical to SEQ ID NO: 23501
  source 1..120: mol_type = other DNA

SEQ ID NO: 53456 - DNA, 120 bp, synthetic construct; identical to SEQ ID NO: 23502
  source 1..120: mol_type = other DNA

SEQ ID NO: 53457 - DNA, 120 bp, synthetic construct; identical to SEQ ID NO: 23503
  source 1..120: mol_type = other DNA

SEQ ID NO: 53458 - DNA, 120 bp, synthetic construct; identical to SEQ ID NO: 7320
  source 1..120: mol_type = other DNA

SEQ ID NO: 53459 - DNA, 120 bp, synthetic construct; identical to SEQ ID NO: 23505
  source 1..120: mol_type = other DNA

SEQ ID NO: 53460 - DNA, 120 bp, synthetic construct; identical to SEQ ID NO: 23506
  source 1..120: mol_type = other DNA

SEQ ID NO: 53461 - DNA, 120 bp, synthetic construct; identical to SEQ ID NO: 23507
  source 1..120: mol_type = other DNA

SEQ ID NO: 53462 - DNA, 120 bp, synthetic construct; identical to SEQ ID NO: 7321
  source 1..120: mol_type = other DNA

SEQ ID NO: 53463 - DNA, 120 bp, synthetic construct; identical to SEQ ID NO: 23509
  source 1..120: mol_type = other DNA

SEQ ID NO: 53464 - DNA, 120 bp, synthetic construct; identical to SEQ ID NO: 23510
  source 1..120: mol_type = other DNA

SEQ ID NO: 53465 - DNA, 120 bp, synthetic construct; identical to SEQ ID NO: 23511
  source 1..120: mol_type = other DNA

SEQ ID NO: 53466 - DNA, 120 bp, synthetic construct; identical to SEQ ID NO: 7322
  source 1..120: mol_type = other DNA

SEQ ID NO: 53467 - DNA, 120 bp, synthetic construct; identical to SEQ ID NO: 23513
  source 1..120: mol_type = other DNA

SEQ ID NO: 53468 - DNA, 120 bp, synthetic construct; identical to SEQ ID NO: 23514
  source 1..120: mol_type = other DNA

SEQ ID NO: 53469 - DNA, 120 bp, synthetic construct; identical to SEQ ID NO: 23515
  source 1..120: mol_type = other DNA

SEQ ID NO: 53470 - DNA, 120 bp, synthetic construct; identical to SEQ ID NO: 23516
  source 1..120: mol_type = other DNA

SEQ ID NO: 53471 - DNA, 120 bp, synthetic construct; identical to SEQ ID NO: 7323
  source 1..120: mol_type = other DNA

SEQ ID NO: 53472 - DNA, 120 bp, synthetic construct; identical to SEQ ID NO: 23518
  source 1..120: mol_type = other DNA

SEQ ID NO: 53473 - DNA, 120 bp, synthetic construct; identical to SEQ ID NO: 23519
  source 1..120: mol_type = other DNA

SEQ ID NO: 53474 - DNA, 120 bp, synthetic construct; identical to SEQ ID NO: 23520
  source 1..120: mol_type = other DNA

SEQ ID NO: 53475 - DNA, 120 bp, synthetic construct; identical to SEQ ID NO: 7324
  source 1..120: mol_type = other DNA

SEQ ID NO: 53476 - DNA, 120 bp, synthetic construct; identical to SEQ ID NO: 23522
  source 1..120: mol_type = other DNA

SEQ ID NO: 53477 - DNA, 120 bp, synthetic construct; identical to SEQ ID NO: 23523
  source 1..120: mol_type = other DNA

SEQ ID NO: 53478 - DNA, 120 bp, synthetic construct; identical to SEQ ID NO: 7325
  source 1..120: mol_type = other DNA

SEQ ID NO: 53479 - DNA, 120 bp, synthetic construct; identical to SEQ ID NO: 23525
  source 1..120: mol_type = other DNA

SEQ ID NO: 53480 - DNA, 120 bp, synthetic construct; identical to SEQ ID NO: 23526
  source 1..120: mol_type = other DNA

SEQ ID NO: 53481 - DNA, 120 bp, synthetic construct; identical to SEQ ID NO: 23527
  source 1..120: mol_type = other DNA

SEQ ID NO: 53482 - DNA, 120 bp, synthetic construct; identical to SEQ ID NO: 23528
  source 1..120: mol_type = other DNA

SEQ ID NO: 53483 - DNA, 120 bp, synthetic construct; identical to SEQ ID NO: 7326
  source 1..120: mol_type = other DNA

SEQ ID NO: 53484 - DNA, 120 bp, synthetic construct; identical to SEQ ID NO: 23530
  source 1..120: mol_type = other DNA

SEQ ID NO: 53485 - DNA, 120 bp, synthetic construct; identical to SEQ ID NO: 23531
  source 1..120: mol_type = other DNA

SEQ ID NO: 53486 - DNA, 120 bp, synthetic construct; identical to SEQ ID NO: 23532
  source 1..120: mol_type = other DNA

SEQ ID NO: 53487 - DNA, 120 bp, synthetic construct; identical to SEQ ID NO: 7327
  source 1..120: mol_type = other DNA

SEQ ID NO: 53488 - DNA, 120 bp, synthetic construct; identical to SEQ ID NO: 23534
  source 1..120: mol_type = other DNA

SEQ ID NO: 53489 - DNA, 120 bp, synthetic construct; identical to SEQ ID NO: 23535
  source 1..120: mol_type = other DNA

SEQ ID NO: 53490 - DNA, 120 bp, synthetic construct; identical to SEQ ID NO: 23536
  source 1..120: mol_type = other DNA

SEQ ID NO: 53491 - DNA, 120 bp, synthetic construct; identical to SEQ ID NO: 7328
  source 1..120: mol_type = other DNA

SEQ ID NO: 53492 - DNA, 120 bp, synthetic construct; identical to SEQ ID NO: 23538
  source 1..120: mol_type = other DNA

SEQ ID NO: 53493 - DNA, 120 bp, synthetic construct; identical to SEQ ID NO: 23539
  source 1..120: mol_type = other DNA

SEQ ID NO: 53494 - DNA, 120 bp, synthetic construct; identical to SEQ ID NO: 7329
  source 1..120: mol_type = other DNA

SEQ ID NO: 53495 - DNA, 120 bp, synthetic construct; identical to SEQ ID NO: 23541
  source 1..120: mol_type = other DNA

SEQ ID NO: 53496 - DNA, 120 bp, synthetic construct; identical to SEQ ID NO: 23542
  source 1..120: mol_type = other DNA

SEQ ID NO: 53497 - DNA, 120 bp, synthetic construct; identical to SEQ ID NO: 23543
  source 1..120: mol_type = other DNA

SEQ ID NO: 53498 - DNA, 120 bp, synthetic construct; identical to SEQ ID NO: 23544
  source 1..120: mol_type = other DNA

SEQ ID NO: 53499 - DNA, 120 bp, synthetic construct; identical to SEQ ID NO: 7330
  source 1..120: mol_type = other DNA

SEQ ID NO: 53500 - DNA, 120 bp, synthetic construct; identical to SEQ ID NO: 23546
  source 1..120: mol_type = other DNA

SEQ ID NO: 53501 - DNA, 120 bp, synthetic construct; identical to SEQ ID NO: 23547
  source 1..120: mol_type = other DNA

SEQ ID NO: 53502 - DNA, 120 bp, synthetic construct; identical to SEQ ID NO: 7331
  source 1..120: mol_type = other DNA

SEQ ID NO: 53503 - DNA, 120 bp, synthetic construct; identical to SEQ ID NO: 23549
  source 1..120: mol_type = other DNA

SEQ ID NO: 53504 - DNA, 120 bp, synthetic construct; identical to SEQ ID NO: 23550
  source 1..120: mol_type = other DNA

SEQ ID NO: 53505 - DNA, 120 bp, synthetic construct; identical to SEQ ID NO: 23551
  source 1..120: mol_type = other DNA

SEQ ID NO: 53506 - DNA, 120 bp, synthetic construct; identical to SEQ ID NO: 7332
  source 1..120: mol_type = other DNA

SEQ ID NO: 53507 - DNA, 120 bp, synthetic construct; identical to SEQ ID NO: 23553
  source 1..120: mol_type = other DNA

SEQ ID NO: 53508 - DNA, 120 bp, synthetic construct; identical to SEQ ID NO: 23554
  source 1..120: mol_type = other DNA

SEQ ID NO: 53509 - DNA, 120 bp, synthetic construct; identical to SEQ ID NO: 23555
  source 1..120: mol_type = other DNA

SEQ ID NO: 53510 - DNA, 120 bp, synthetic construct; identical to SEQ ID NO: 23556
  source 1..120: mol_type = other DNA

SEQ ID NO: 53511 - DNA, 120 bp, synthetic construct; identical to SEQ ID NO: 7333
  source 1..120: mol_type = other DNA

SEQ ID NO: 53512 - DNA, 120 bp, synthetic construct; identical to SEQ ID NO: 23558
  source 1..120: mol_type = other DNA

SEQ ID NO: 53513 - DNA, 120 bp, synthetic construct; identical to SEQ ID NO: 23559
  source 1..120: mol_type = other DNA

SEQ ID NO: 53514 - DNA, 120 bp, synthetic construct; identical to SEQ ID NO: 7334
  source 1..120: mol_type = other DNA

SEQ ID NO: 53515 - DNA, 120 bp, synthetic construct; identical to SEQ ID NO: 23561
  source 1..120: mol_type = other DNA

SEQ ID NO: 53516 - DNA, 120 bp, synthetic construct; identical to SEQ ID NO: 23562
  source 1..120: mol_type = other DNA

SEQ ID NO: 53517 - DNA, 120 bp, synthetic construct; identical to SEQ ID NO: 23563
  source 1..120: mol_type = other DNA

SEQ ID NO: 53518 - DNA, 120 bp, synthetic construct; identical to SEQ ID NO: 7335
  source 1..120: mol_type = other DNA

SEQ ID NO: 53519 - DNA, 120 bp, synthetic construct; identical to SEQ ID NO: 7336
  source 1..120: mol_type = other DNA

SEQ ID NO: 53520 - DNA, 120 bp, synthetic construct; identical to SEQ ID NO: 23566
  source 1..120: mol_type = other DNA

SEQ ID NO: 53521 - DNA, 120 bp, synthetic construct; identical to SEQ ID NO: 23567
  source 1..120: mol_type = other DNA

SEQ ID NO: 53522 - DNA, 120 bp, synthetic construct; identical to SEQ ID NO: 23568
  source 1..120: mol_type = other DNA

SEQ ID NO: 53523 - DNA, 120 bp, synthetic construct; identical to SEQ ID NO: 7337
  source 1..120: mol_type = other DNA

SEQ ID NO: 53524 - DNA, 120 bp, synthetic construct; identical to SEQ ID NO: 23570
  source 1..120: mol_type = other DNA

SEQ ID NO: 53525 - DNA, 120 bp, synthetic construct; identical to SEQ ID NO: 23571
  source 1..120: mol_type = other DNA

SEQ ID NO: 53526 - DNA, 120 bp, synthetic construct; identical to SEQ ID NO: 7338
  source 1..120: mol_type = other DNA

SEQ ID NO: 53527 - DNA, 120 bp, synthetic construct; identical to SEQ ID NO: 23573
  source 1..120: mol_type = other DNA

SEQ ID NO: 53528 - DNA, 120 bp, synthetic construct; identical to SEQ ID NO: 23574
  source 1..120: mol_type = other DNA

SEQ ID NO: 53529 - DNA, 120 bp, synthetic construct; identical to SEQ ID NO: 23575
  source 1..120: mol_type = other DNA

SEQ ID NO: 53530 - DNA, 120 bp, synthetic construct; identical to SEQ ID NO: 375
  source 1..120: mol_type = other DNA

SEQ ID NO: 53531 - DNA, 120 bp, synthetic construct; identical to SEQ ID NO: 23577
  source 1..120: mol_type = other DNA

SEQ ID NO: 53532 - DNA, 120 bp, synthetic construct; identical to SEQ ID NO: 23578
  source 1..120: mol_type = other DNA

SEQ ID NO: 53533 - DNA, 120 bp, synthetic construct; identical to SEQ ID NO: 23579
  source 1..120: mol_type = other DNA

SEQ ID NO: 53534 - DNA, 120 bp, synthetic construct; identical to SEQ ID NO: 7340
  source 1..120: mol_type = other DNA

SEQ ID NO: 53535 - DNA, 120 bp, synthetic construct; identical to SEQ ID NO: 23581
  source 1..120: mol_type = other DNA

SEQ ID NO: 53536 - DNA, 120 bp, synthetic construct; identical to SEQ ID NO: 23582
  source 1..120: mol_type = other DNA

SEQ ID NO: 53537 - DNA, 120 bp, synthetic construct; identical to SEQ ID NO: 23583
  source 1..120: mol_type = other DNA

SEQ ID NO: 53538 - DNA, 120 bp, synthetic construct; identical to SEQ ID NO: 23584
  source 1..120: mol_type = other DNA

SEQ ID NO: 53539 - DNA, 120 bp, synthetic construct; identical to SEQ ID NO: 7341
  source 1..120: mol_type = other DNA

SEQ ID NO: 53540 - DNA, 120 bp, synthetic construct; identical to SEQ ID NO: 23586
  source 1..120: mol_type = other DNA

SEQ ID NO: 53541 - DNA, 120 bp, synthetic construct; identical to SEQ ID NO: 23587
  source 1..120: mol_type = other DNA

SEQ ID NO: 53542 - DNA, 120 bp, synthetic construct; identical to SEQ ID NO: 23588
  source 1..120: mol_type = other DNA

SEQ ID NO: 53543 - DNA, 120 bp, synthetic construct; identical to SEQ ID NO: 7342
  source 1..120: mol_type = other DNA

SEQ ID NO: 53544 - DNA, 120 bp, synthetic construct; identical to SEQ ID NO: 23590
  source 1..120: mol_type = other DNA

SEQ ID NO: 53545 - DNA, 120 bp, synthetic construct; identical to SEQ ID NO: 23591
  source 1..120: mol_type = other DNA

SEQ ID NO: 53546 - DNA, 120 bp, synthetic construct; identical to SEQ ID NO: 23592
  source 1..120: mol_type = other DNA

SEQ ID NO: 53547 - DNA, 120 bp, synthetic construct; identical to SEQ ID NO: 7343
  source 1..120: mol_type = other DNA

SEQ ID NO: 53548 - DNA, 120 bp, synthetic construct; identical to SEQ ID NO: 23594
  source 1..120: mol_type = other DNA

SEQ ID NO: 53549 - DNA, 120 bp, synthetic construct; identical to SEQ ID NO: 23595
  source 1..120: mol_type = other DNA

SEQ ID NO: 53550 - DNA, 120 bp, synthetic construct; identical to SEQ ID NO: 23596
  source 1..120: mol_type = other DNA

SEQ ID NO: 53551 - DNA, 120 bp, synthetic construct; identical to SEQ ID NO: 7344
  source 1..120: mol_type = other DNA

SEQ ID NO: 53552 - DNA, 120 bp, synthetic construct; identical to SEQ ID NO: 23598
  source 1..120: mol_type = other DNA

SEQ ID NO: 53553 - DNA, 120 bp, synthetic construct; identical to SEQ ID NO: 23599
  source 1..120: mol_type = other DNA

SEQ ID NO: 53554 - DNA, 120 bp, synthetic construct; identical to SEQ ID NO: 23600
  source 1..120: mol_type = other DNA

SEQ ID NO: 53555 - DNA, 120 bp, synthetic construct; identical to SEQ ID NO: 7345
  source 1..120: mol_type = other DNA

SEQ ID NO: 53556 - DNA, 120 bp, synthetic construct; identical to SEQ ID NO: 23602
  source 1..120: mol_type = other DNA

SEQ ID NO: 53557 - DNA, 120 bp, synthetic construct; identical to SEQ ID NO: 23603
  source 1..120: mol_type = other DNA

SEQ ID NO: 53558 - DNA, 120 bp, synthetic construct; identical to SEQ ID NO: 23604
  source 1..120: mol_type = other DNA

SEQ ID NO: 53559 - DNA, 120 bp, synthetic construct; identical to SEQ ID NO: 7346
  source 1..120: mol_type = other DNA

SEQ ID NO: 53560 - DNA, 120 bp, synthetic construct; identical to SEQ ID NO: 23606
  source 1..120: mol_type = other DNA

SEQ ID NO: 53561 - DNA, 120 bp, synthetic construct; identical to SEQ ID NO: 23607
  source 1..120: mol_type = other DNA

SEQ ID NO: 53562 - DNA, 120 bp, synthetic construct; identical to SEQ ID NO: 23608
  source 1..120: mol_type = other DNA

SEQ ID NO: 53563 - DNA, 120 bp, synthetic construct; identical to SEQ ID NO: 7347
  source 1..120: mol_type = other DNA

SEQ ID NO: 53564 - DNA, 120 bp, synthetic construct; identical to SEQ ID NO: 23610
  source 1..120: mol_type = other DNA

SEQ ID NO: 53565 - DNA, 120 bp, synthetic construct; identical to SEQ ID NO: 23611
  source 1..120: mol_type = other DNA

SEQ ID NO: 53566 - DNA, 120 bp, synthetic construct; identical to SEQ ID NO: 23612
  source 1..120: mol_type = other DNA

SEQ ID NO: 53567 - DNA, 120 bp, synthetic construct; identical to SEQ ID NO: 7348
  source 1..120: mol_type = other DNA

SEQ ID NO: 53568 - DNA, 120 bp, synthetic construct; identical to SEQ ID NO: 23614
  source 1..120: mol_type = other DNA

SEQ ID NO: 53569 - DNA, 120 bp, synthetic construct; identical to SEQ ID NO: 23615
  source 1..120: mol_type = other DNA

SEQ ID NO: 53570 - DNA, 120 bp, synthetic construct; identical to SEQ ID NO: 23616
  source 1..120: mol_type = other DNA

SEQ ID NO: 53571 - DNA, 120 bp, synthetic construct; identical to SEQ ID NO: 7349
  source 1..120: mol_type = other DNA

SEQ ID NO: 53572 - DNA, 120 bp, synthetic construct; identical to SEQ ID NO: 23618
  source 1..120: mol_type = other DNA

SEQ ID NO: 53573 - DNA, 120 bp, synthetic construct; identical to SEQ ID NO: 23619
  source 1..120: mol_type = other DNA

SEQ ID NO: 53574 - DNA, 120 bp, synthetic construct; identical to SEQ ID NO: 7350
  source 1..120: mol_type = other DNA

SEQ ID NO: 53575 - DNA, 120 bp, synthetic construct; identical to SEQ ID NO: 23621
  source 1..120: mol_type = other DNA

SEQ ID NO: 53576 - DNA, 120 bp, synthetic construct; identical to SEQ ID NO: 23622
  source 1..120: mol_type = other DNA

SEQ ID NO: 53577 - DNA, 120 bp, synthetic construct; identical to SEQ ID NO: 23623
  source 1..120: mol_type = other DNA

SEQ ID NO: 53578 - DNA, 120 bp, synthetic construct; identical to SEQ ID NO: 7351
  source 1..120: mol_type = other DNA

SEQ ID NO: 53579 - DNA, 120 bp, synthetic construct; identical to SEQ ID NO: 23625
  source 1..120: mol_type = other DNA

SEQ ID NO: 53580 - DNA, 120 bp, synthetic construct; identical to SEQ ID NO: 23626
  source 1..120: mol_type = other DNA

SEQ ID NO: 53581 - DNA, 120 bp, synthetic construct; identical to SEQ ID NO: 23627
  source 1..120: mol_type = other DNA

SEQ ID NO: 53582 - DNA, 120 bp, synthetic construct; identical to SEQ ID NO: 7352
  source 1..120: mol_type = other DNA

SEQ ID NO: 53583 - DNA, 120 bp, synthetic construct; identical to SEQ ID NO: 23629
  source 1..120: mol_type = other DNA

SEQ ID NO: 53584 - DNA, 120 bp, synthetic construct; identical to SEQ ID NO: 23630
  source 1..120: mol_type = other DNA

SEQ ID NO: 53585 - DNA, 120 bp, synthetic construct; identical to SEQ ID NO: 23631
  source 1..120: mol_type = other DNA

SEQ ID NO: 53586 - DNA, 120 bp, synthetic construct; identical to SEQ ID NO: 23632
  source 1..120: mol_type = other DNA

SEQ ID NO: 53587 - DNA, 120 bp, synthetic construct; identical to SEQ ID NO: 7353
  source 1..120: mol_type = other DNA

SEQ ID NO: 53588 - DNA, 120 bp, synthetic construct; identical to SEQ ID NO: 23634
  source 1..120: mol_type = other DNA

SEQ ID NO: 53589 - DNA, 120 bp, synthetic construct; identical to SEQ ID NO: 23635
  source 1..120: mol_type = other DNA

SEQ ID NO: 53590 - DNA, 120 bp, synthetic construct; identical to SEQ ID NO: 23636
  source 1..120: mol_type = other DNA

SEQ ID NO: 53591 - DNA, 120 bp, synthetic construct; identical to SEQ ID NO: 7354
  source 1..120: mol_type = other DNA

SEQ ID NO: 53592 - DNA, 120 bp, synthetic construct; identical to SEQ ID NO: 23638
  source 1..120: mol_type = other DNA

SEQ ID NO: 53593 - DNA, 120 bp, synthetic construct; identical to SEQ ID NO: 23639
  source 1..120: mol_type = other DNA

SEQ ID NO: 53594 - DNA, 120 bp, synthetic construct; identical to SEQ ID NO: 7355
  source 1..120: mol_type = other DNA

SEQ ID NO: 53595 - DNA, 120 bp, synthetic construct; identical to SEQ ID NO: 23641
  source 1..120: mol_type = other DNA

SEQ ID NO: 53596 - DNA, 120 bp, synthetic construct; identical to SEQ ID NO: 23642
  source 1..120: mol_type = other DNA

SEQ ID NO: 53597 - DNA, 120 bp, synthetic construct; identical to SEQ ID NO: 23643
  source 1..120: mol_type = other DNA

SEQ ID NO: 53598 - DNA, 120 bp, synthetic construct; identical to SEQ ID NO: 7356
  source 1..120: mol_type = other DNA

SEQ ID NO: 53599 - DNA, 120 bp, synthetic construct; identical to SEQ ID NO: 23645
  source 1..120: mol_type = other DNA

SEQ ID NO: 53600 - DNA, 120 bp, synthetic construct; identical to SEQ ID NO: 23646
  source 1..120: mol_type = other DNA

SEQ ID NO: 53601 - DNA, 120 bp, synthetic construct; identical to SEQ ID NO: 23647
  source 1..120: mol_type = other DNA

SEQ ID NO: 53602 - DNA, 120 bp, synthetic construct; identical to SEQ ID NO: 7357
  source 1..120: mol_type = other DNA

SEQ ID NO: 53603 - DNA, 120 bp, synthetic construct; identical to SEQ ID NO: 23649
  source 1..120: mol_type = other DNA

SEQ ID NO: 53604 - DNA, 120 bp, synthetic construct; identical to SEQ ID NO: 23650
  source 1..120: mol_type = other DNA

SEQ ID NO: 53605 - DNA, 120 bp, synthetic construct; identical to SEQ ID NO: 23651
  source 1..120: mol_type = other DNA

SEQ ID NO: 53606 - DNA, 120 bp, synthetic construct; identical to SEQ ID NO: 7358
  source 1..120: mol_type = other DNA

SEQ ID NO: 53607 - DNA, 120 bp, synthetic construct; identical to SEQ ID NO: 23653
  source 1..120: mol_type = other DNA

SEQ ID NO: 53608 - DNA, 120 bp, synthetic construct; identical to SEQ ID NO: 23654
  source 1..120: mol_type = other DNA

SEQ ID NO: 53609 - DNA, 120 bp, synthetic construct; identical to SEQ ID NO: 23655
  source 1..120: mol_type = other DNA

SEQ ID NO: 53610 - DNA, 120 bp, synthetic construct; identical to SEQ ID NO: 7359
  source 1..120: mol_type = other DNA

SEQ ID NO: 53611 - DNA, 120 bp, synthetic construct; identical to SEQ ID NO: 23657
  source 1..120: mol_type = other DNA

SEQ ID NO: 53612 - DNA, 120 bp, synthetic construct; identical to SEQ ID NO: 23658
  source 1..120: mol_type = other DNA

SEQ ID NO: 53613 - DNA, 120 bp, synthetic construct; identical to SEQ ID NO: 23659
  source 1..120: mol_type = other DNA

SEQ ID NO: 53614 - DNA, 120 bp, synthetic construct; identical to SEQ ID NO: 7360
  source 1..120: mol_type = other DNA

SEQ ID NO: 53615 - DNA, 120 bp, synthetic construct; identical to SEQ ID NO: 23661
  source 1..120: mol_type = other DNA

SEQ ID NO: 53616 - DNA, 120 bp, synthetic construct; identical to SEQ ID NO: 23662
  source 1..120: mol_type = other DNA

SEQ ID NO: 53617 - DNA, 120 bp, synthetic construct; identical to SEQ ID NO: 395
  source 1..120: mol_type = other DNA

SEQ ID NO: 53618 - DNA, 120 bp, synthetic construct; identical to SEQ ID NO: 23664
  source 1..120: mol_type = other DNA

SEQ ID NO: 53619 - DNA, 120 bp, synthetic construct; identical to SEQ ID NO: 7361
  source 1..120: mol_type = other DNA

SEQ ID NO: 53620 - DNA, 120 bp, synthetic construct; identical to SEQ ID NO: 23666
  source 1..120: mol_type = other DNA

SEQ ID NO: 53621 - DNA, 120 bp, synthetic construct; identical to SEQ ID NO: 23667
  source 1..120: mol_type = other DNA

SEQ ID NO: 53622 - DNA, 120 bp, synthetic construct; identical to SEQ ID NO: 7362
  source 1..120: mol_type = other DNA

SEQ ID NO: 53623 - DNA, 120 bp, synthetic construct; identical to SEQ ID NO: 23669
  source 1..120: mol_type = other DNA

SEQ ID NO: 53624 - DNA, 120 bp, synthetic construct; identical to SEQ ID NO: 397
  source 1..120: mol_type = other DNA

SEQ ID NO: 53625 - DNA, 120 bp, synthetic construct; identical to SEQ ID NO: 23671
  source 1..120: mol_type = other DNA

SEQ ID NO: 53626 - DNA, 120 bp, synthetic construct; identical to SEQ ID NO: 23672
  source 1..120: mol_type = other DNA

SEQ ID NO: 53627 - DNA, 120 bp, synthetic construct; identical to SEQ ID NO: 7363
  source 1..120: mol_type = other DNA

SEQ ID NO: 53628 - DNA, 120 bp, synthetic construct; identical to SEQ ID NO: 23674
  source 1..120: mol_type = other DNA

SEQ ID NO: 53629 - DNA, 120 bp, synthetic construct; identical to SEQ ID NO: 23675
  source 1..120: mol_type = other DNA

SEQ ID NO: 53630 - DNA, 120 bp, synthetic construct; identical to SEQ ID NO: 7364
  source 1..120: mol_type = other DNA

SEQ ID NO: 53631 - DNA, 120 bp, synthetic construct; identical to SEQ ID NO: 23677
  source 1..120: mol_type = other DNA

SEQ ID NO: 53632 - DNA, 120 bp, synthetic construct; identical to SEQ ID NO: 23678
  source 1..120: mol_type = other DNA

SEQ ID NO: 53633 - DNA, 120 bp, synthetic construct; identical to SEQ ID NO: 23679
  source 1..120: mol_type = other DNA

SEQ ID NO: 53634 - DNA, 120 bp, synthetic construct; identical to SEQ ID NO: 7365
  source 1..120: mol_type = other DNA

SEQ ID NO: 53635 - DNA, 120 bp, synthetic construct; identical to SEQ ID NO: 23681
  source 1..120: mol_type = other DNA

SEQ ID NO: 53636 - DNA, 120 bp, synthetic construct; identical to SEQ ID NO: 23682
  source 1..120: mol_type = other DNA

SEQ ID NO: 53637 - DNA, 120 bp, synthetic construct; identical to SEQ ID NO: 23683
  source 1..120: mol_type = other DNA

SEQ ID NO: 53638 - DNA, 120 bp, synthetic construct; identical to SEQ ID NO: 23684
  source 1..120: mol_type = other DNA

SEQ ID NO: 53639 - DNA, 120 bp, synthetic construct; identical to SEQ ID NO: 7366
  source 1..120: mol_type = other DNA

SEQ ID NO: 53640 - DNA, 120 bp, synthetic construct; identical to SEQ ID NO: 23686
  source 1..120: mol_type = other DNA

SEQ ID NO: 53641 - DNA, 120 bp, synthetic construct; identical to SEQ ID NO: 23687
  source 1..120: mol_type = other DNA

SEQ ID NO: 53642 - DNA, 120 bp, synthetic construct; identical to SEQ ID NO: 23688
  source 1..120: mol_type = other DNA

SEQ ID NO: 53643 - DNA, 120 bp, synthetic construct; identical to SEQ ID NO: 7367
  source 1..120: mol_type = other DNA

SEQ ID NO: 53644 - DNA, 120 bp, synthetic construct; identical to SEQ ID NO: 23690
  source 1..120: mol_type = other DNA

SEQ ID NO: 53645 - DNA, 120 bp, synthetic construct; identical to SEQ ID NO: 23691
  source 1..120: mol_type = other DNA

SEQ ID NO: 53646 - DNA, 120 bp, synthetic construct; identical to SEQ ID NO: 23692
  source 1..120: mol_type = other DNA

SEQ ID NO: 53647 - DNA, 120 bp, synthetic construct; identical to SEQ ID NO: 7368
  source 1..120: mol_type = other DNA

SEQ ID NO: 53648 - DNA, 120 bp, synthetic construct; identical to SEQ ID NO: 23694
  source 1..120: mol_type = other DNA

SEQ ID NO: 53649 - DNA, 120 bp, synthetic construct; identical to SEQ ID NO: 23695
  source 1..120: mol_type = other DNA

SEQ ID NO: 53650 - DNA, 120 bp, synthetic construct; identical to SEQ ID NO: 7369
  source 1..120: mol_type = other DNA

SEQ ID NO: 53651 - DNA, 120 bp, synthetic construct; identical to SEQ ID NO: 23697
  source 1..120: mol_type = other DNA

SEQ ID NO: 53652 - DNA, 120 bp, synthetic construct; identical to SEQ ID NO: 23698
  source 1..120: mol_type = other DNA

SEQ ID NO: 53653 - DNA, 120 bp, synthetic construct; identical to SEQ ID NO: 23699
  source 1..120: mol_type = other DNA

SEQ ID NO: 53654 - DNA, 120 bp, synthetic construct; identical to SEQ ID NO: 7370
  source 1..120: mol_type = other DNA

SEQ ID NO: 53655 - DNA, 120 bp, synthetic construct; identical to SEQ ID NO: 23701
  source 1..120: mol_type = other DNA

SEQ ID NO: 53656 - DNA, 120 bp, synthetic construct; identical to SEQ ID NO: 23702
  source 1..120: mol_type = other DNA

SEQ ID NO: 53657 - DNA, 120 bp, synthetic construct; identical to SEQ ID NO: 23703
  source 1..120: mol_type = other DNA

SEQ ID NO: 53658 - DNA, 120 bp, synthetic construct; identical to SEQ ID NO: 7371
  source 1..120: mol_type = other DNA

SEQ ID NO: 53659 - DNA, 120 bp, synthetic construct; identical to SEQ ID NO: 23705
  source 1..120: mol_type = other DNA

SEQ ID NO: 53660 - DNA, 120 bp, synthetic construct; identical to SEQ ID NO: 23706
  source 1..120: mol_type = other DNA

SEQ ID NO: 53661 - DNA, 120 bp, synthetic construct; identical to SEQ ID NO: 23707
  source 1..120: mol_type = other DNA

SEQ ID NO: 53662 - DNA, 120 bp, synthetic construct; identical to SEQ ID NO: 23708
  source 1..120: mol_type = other DNA

SEQ ID NO: 53663 - DNA, 120 bp, synthetic construct; identical to SEQ ID NO: 7372
  source 1..120: mol_type = other DNA

SEQ ID NO: 53664 - DNA, 120 bp, synthetic construct; identical to SEQ ID NO: 23710
  source 1..120: mol_type = other DNA

SEQ ID NO: 53665 - DNA, 120 bp, synthetic construct; identical to SEQ ID NO: 23711
  source 1..120: mol_type = other DNA

SEQ ID NO: 53666 - DNA, 120 bp, synthetic construct; identical to SEQ ID NO: 7373
  source 1..120: mol_type = other DNA

SEQ ID NO: 53667 - DNA, 120 bp, synthetic construct; identical to SEQ ID NO: 23713
  source 1..120: mol_type = other DNA

SEQ ID NO: 53668 - DNA, 120 bp, synthetic construct; identical to SEQ ID NO: 407
  source 1..120: mol_type = other DNA

SEQ ID NO: 53669 - DNA, 120 bp, synthetic construct; identical to SEQ ID NO: 23715
  source 1..120: mol_type = other DNA

SEQ ID NO: 53670 - DNA, 120 bp, synthetic construct; identical to SEQ ID NO: 23716
  source 1..120: mol_type = other DNA

SEQ ID NO: 53671 - DNA, 120 bp, synthetic construct; identical to SEQ ID NO: 7374
  source 1..120: mol_type = other DNA

SEQ ID NO: 53672 - DNA, 120 bp, synthetic construct; identical to SEQ ID NO: 23718
  source 1..120: mol_type = other DNA

SEQ ID NO: 53673 - DNA, 120 bp, synthetic construct; identical to SEQ ID NO: 23719
  source 1..120: mol_type = other DNA

SEQ ID NO: 53674 - DNA, 120 bp, synthetic construct; identical to SEQ ID NO: 23720
  source 1..120: mol_type = other DNA

SEQ ID NO: 53675 - DNA, 120 bp, synthetic construct; identical to SEQ ID NO: 7375
  source 1..120: mol_type = other DNA

SEQ ID NO: 53676 - DNA, 120 bp, synthetic construct; identical to SEQ ID NO: 23722
  source 1..120: mol_type = other DNA

SEQ ID NO: 53677 - DNA, 120 bp, synthetic construct; identical to SEQ ID NO: 23723
  source 1..120: mol_type = other DNA

SEQ ID NO: 53678 - DNA, 120 bp, synthetic construct; identical to SEQ ID NO: 7376
  source 1..120: mol_type = other DNA

SEQ ID NO: 53679 - DNA, 120 bp, synthetic construct; identical to SEQ ID NO: 23725
  source 1..120: mol_type = other DNA

SEQ ID NO: 53680 - DNA, 120 bp, synthetic construct; identical to SEQ ID NO: 23726
  source 1..120: mol_type = other DNA

SEQ ID NO: 53681 - DNA, 120 bp, synthetic construct; identical to SEQ ID NO: 23727
  source 1..120: mol_type = other DNA

SEQ ID NO: 53682 - DNA, 120 bp, synthetic construct; identical to SEQ ID NO: 7377
  source 1..120: mol_type = other DNA

SEQ ID NO: 53683 - DNA, 120 bp, synthetic construct; identical to SEQ ID NO: 23729
  source 1..120: mol_type = other DNA

SEQ ID NO: 53684 - DNA, 120 bp, synthetic construct; identical to SEQ ID NO: 411
  source 1..120: mol_type = other DNA

SEQ ID NO: 53685 - DNA, 120 bp, synthetic construct; identical to SEQ ID NO: 23731
  source 1..120: mol_type = other DNA

SEQ ID NO: 53686 - DNA, 120 bp, synthetic construct; identical to SEQ ID NO: 23732
  source 1..120: mol_type = other DNA

SEQ ID NO: 53687 - DNA, 120 bp, synthetic construct; identical to SEQ ID NO: 7378
  source 1..120: mol_type = other DNA

SEQ ID NO: 53688 - DNA, 120 bp, synthetic construct; identical to SEQ ID NO: 23734
  source 1..120: mol_type = other DNA

SEQ ID NO: 53689 - DNA, 120 bp, synthetic construct; identical to SEQ ID NO: 23735
  source 1..120: mol_type = other DNA

SEQ ID NO: 53690 - DNA, 120 bp, synthetic construct; identical to SEQ ID NO: 7379
  source 1..120: mol_type = other DNA

SEQ ID NO: 53691 - DNA, 120 bp, synthetic construct; identical to SEQ ID NO: 23737
  source 1..120: mol_type = other DNA

SEQ ID NO: 53692 - DNA, 120 bp, synthetic construct; identical to SEQ ID NO: 23738
  source 1..120: mol_type = other DNA

SEQ ID NO: 53693 - DNA, 120 bp, synthetic construct; identical to SEQ ID NO: 23739
  source 1..120: mol_type = other DNA

SEQ ID NO: 53694 - DNA, 120 bp, synthetic construct; identical to SEQ ID NO: 7380
  source 1..120: mol_type = other DNA

SEQ ID NO: 53695 - DNA, 120 bp, synthetic construct; identical to SEQ ID NO: 23741
  source 1..120: mol_type = other DNA

SEQ ID NO: 53696 - DNA, 120 bp, synthetic construct; identical to SEQ ID NO: 23742
  source 1..120: mol_type = other DNA

SEQ ID NO: 53697 - DNA, 120 bp, synthetic construct; identical to SEQ ID NO: 23743
  source 1..120: mol_type = other DNA

SEQ ID NO: 53698 - DNA, 120 bp, synthetic construct; identical to SEQ ID NO: 7381
  source 1..120: mol_type = other DNA

SEQ ID NO: 53699 - DNA, 120 bp, synthetic construct; identical to SEQ ID NO: 23745
  source 1..120: mol_type = other DNA

SEQ ID NO: 53700 - DNA, 120 bp, synthetic construct; identical to SEQ ID NO: 23746
  source 1..120: mol_type = other DNA

SEQ ID NO: 53701 - DNA, 120 bp, synthetic construct; identical to SEQ ID NO: 23747
  source 1..120: mol_type = other DNA

SEQ ID NO: 53702 - DNA, 120 bp, synthetic construct; identical to SEQ ID NO: 7382
  source 1..120: mol_type = other DNA

SEQ ID NO: 53703 - DNA, 120 bp, synthetic construct; identical to SEQ ID NO: 23749
  source 1..120: mol_type = other DNA

SEQ ID NO: 53704 - DNA, 120 bp, synthetic construct; identical to SEQ ID NO: 23750
  source 1..120: mol_type = other DNA

SEQ ID NO: 53705 - DNA, 120 bp, synthetic construct; identical to SEQ ID NO: 23751
  source 1..120: mol_type = other DNA

SEQ ID NO: 53706 - DNA, 120 bp, synthetic construct; identical to SEQ ID NO: 7383
  source 1..120: mol_type = other DNA

SEQ ID NO: 53707 - DNA, 120 bp, synthetic construct; identical to SEQ ID NO: 23753
  source 1..120: mol_type = other DNA

SEQ ID NO: 53708 - DNA, 120 bp, synthetic construct; identical to SEQ ID NO: 23754
  source 1..120: mol_type = other DNA

SEQ ID NO: 53709 - DNA, 120 bp, synthetic construct; identical to SEQ ID NO: 23755
  source 1..120: mol_type = other DNA

SEQ ID NO: 53710 - DNA, 120 bp, synthetic construct; identical to SEQ ID NO: 23756
  source 1..120: mol_type = other DNA

SEQ ID NO: 53711 - DNA, 120 bp, synthetic construct; identical to SEQ ID NO: 7384
  source 1..120: mol_type = other DNA

SEQ ID NO: 53712 - DNA, 120 bp, synthetic construct; identical to SEQ ID NO: 23758
  source 1..120: mol_type = other DNA

SEQ ID NO: 53713 - DNA, 120 bp, synthetic construct; identical to SEQ ID NO: 23759
  source 1..120: mol_type = other DNA

SEQ ID NO: 53714 - DNA, 120 bp, synthetic construct; identical to SEQ ID NO: 23760
  source 1..120: mol_type = other DNA

SEQ ID NO: 53715 - DNA, 120 bp, synthetic construct; identical to SEQ ID NO: 7385
  source 1..120: mol_type = other DNA

SEQ ID NO: 53716 - DNA, 120 bp, synthetic construct; identical to SEQ ID NO: 23762
  source 1..120: mol_type = other DNA

SEQ ID NO: 53717 - DNA, 120 bp, synthetic construct; identical to SEQ ID NO: 23763
  source 1..120: mol_type = other DNA

SEQ ID NO: 53718 - DNA, 120 bp, synthetic construct; identical to SEQ ID NO: 7386
  source 1..120: mol_type = other DNA

SEQ ID NO: 53719 - DNA, 120 bp, synthetic construct; identical to SEQ ID NO: 23765
  source 1..120: mol_type = other DNA

SEQ ID NO: 53720 - DNA, 120 bp, synthetic construct; identical to SEQ ID NO: 23766
  source 1..120: mol_type = other DNA

SEQ ID NO: 53721 - DNA, 120 bp, synthetic construct; identical to SEQ ID NO: 23767
  source 1..120: mol_type = other DNA

SEQ ID NO: 53722 - DNA, 120 bp, synthetic construct; identical to SEQ ID NO: 23768
  source 1..120: mol_type = other DNA

SEQ ID NO: 53723 - DNA, 120 bp, synthetic construct; identical to SEQ ID NO: 7387
  source 1..120: mol_type = other DNA

SEQ ID NO: 53724 - DNA, 120 bp, synthetic construct; identical to SEQ ID NO: 23770
  source 1..120: mol_type = other DNA

SEQ ID NO: 53725 - DNA, 120 bp, synthetic construct; identical to SEQ ID NO: 23771
  source 1..120: mol_type = other DNA

SEQ ID NO: 53726 - DNA, 120 bp, synthetic construct; identical to SEQ ID NO: 23772
  source 1..120: mol_type = other DNA

SEQ ID NO: 53727 - DNA, 120 bp, synthetic construct; identical to SEQ ID NO: 23773
  source 1..120: mol_type = other DNA

SEQ ID NO: 53728 - DNA, 120 bp, synthetic construct; identical to SEQ ID NO: 7388
  source 1..120: mol_type = other DNA

SEQ ID NO: 53729 - DNA, 120 bp, synthetic construct; identical to SEQ ID NO: 23775
  source 1..120: mol_type = other DNA

SEQ ID NO: 53730 - DNA, 120 bp, synthetic construct; identical to SEQ ID NO: 23776
  source 1..120: mol_type = other DNA

SEQ ID NO: 53731 - DNA, 120 bp, synthetic construct; identical to SEQ ID NO: 7389
  source 1..120: mol_type = other DNA

SEQ ID NO: 53732 - DNA, 120 bp, synthetic construct; identical to SEQ ID NO: 23778
  source 1..120: mol_type = other DNA

SEQ ID NO: 53733 - DNA, 120 bp, synthetic construct; identical to SEQ ID NO: 23779
  source 1..120: mol_type = other DNA

SEQ ID NO: 53734 - DNA, 120 bp, synthetic construct; identical to SEQ ID NO: 23780
  source 1..120: mol_type = other DNA

SEQ ID NO: 53735 - DNA, 120 bp, synthetic construct; identical to SEQ ID NO: 7390
  source 1..120: mol_type = other DNA

SEQ ID NO: 53736 - DNA, 120 bp, synthetic construct; identical to SEQ ID NO: 23782
  source 1..120: mol_type = other DNA

SEQ ID NO: 53737 - DNA, 120 bp, synthetic construct; identical to SEQ ID NO: 23783
  source 1..120: mol_type = other DNA

SEQ ID NO: 53738 - DNA, 120 bp, synthetic construct; identical to SEQ ID NO: 23784
  source 1..120: mol_type = other DNA

SEQ ID NO: 53739 - DNA, 120 bp, synthetic construct; identical to SEQ ID NO: 23785
  source 1..120: mol_type = other DNA

SEQ ID NO: 53740 - DNA, 120 bp, synthetic construct; identical to SEQ ID NO: 7391
  source 1..120: mol_type = other DNA

SEQ ID NO: 53741 - DNA, 120 bp, synthetic construct; identical to SEQ ID NO: 23787
  source 1..120: mol_type = other DNA

SEQ ID NO: 53742 - DNA, 120 bp, synthetic construct; identical to SEQ ID NO: 23788
  source 1..120: mol_type = other DNA

SEQ ID NO: 53743 - DNA, 120 bp, synthetic construct; identical to SEQ ID NO: 7392
  source 1..120: mol_type = other DNA

SEQ ID NO: 53744 - DNA, 120 bp, synthetic construct; identical to SEQ ID NO: 23790
  source 1..120: mol_type = other DNA

SEQ ID NO: 53745 - DNA, 120 bp, synthetic construct; identical to SEQ ID NO: 23791
  source 1..120: mol_type = other DNA

SEQ ID NO: 53746 - DNA, 120 bp, synthetic construct; identical to SEQ ID NO: 23792
  source 1..120: mol_type = other DNA

SEQ ID NO: 53747 - DNA, 120 bp, synthetic construct; identical to SEQ ID NO: 7393
  source 1..120: mol_type = other DNA

SEQ ID NO: 53748 - DNA, 120 bp, synthetic construct; identical to SEQ ID NO: 23794
  source 1..120: mol_type = other DNA

SEQ ID NO: 53749 - DNA, 120 bp, synthetic construct; identical to SEQ ID NO: 23795
  source 1..120: mol_type = other DNA

SEQ ID NO: 53750 - DNA, 120 bp, synthetic construct; identical to SEQ ID NO: 23796
  source 1..120: mol_type = other DNA

SEQ ID NO: 53751 - DNA, 120 bp, synthetic construct; identical to SEQ ID NO: 7394
  source 1..120: mol_type = other DNA

SEQ ID NO: 53752 - DNA, 120 bp, synthetic construct; identical to SEQ ID NO: 23798
  source 1..120: mol_type = other DNA

SEQ ID NO: 53753 - DNA, 120 bp, synthetic construct; identical to SEQ ID NO: 23799
  source 1..120: mol_type = other DNA

SEQ ID NO: 53754 - DNA, 120 bp, synthetic construct; identical to SEQ ID NO: 23800
  source 1..120: mol_type = other DNA

SEQ ID NO: 53755 - DNA, 120 bp, synthetic construct; identical to SEQ ID NO: 23801
  source 1..120: mol_type = other DNA

SEQ ID NO: 53756 - DNA, 120 bp, synthetic construct; identical to SEQ ID NO: 7395
  source 1..120: mol_type = other DNA

SEQ ID NO: 53757 - DNA, 120 bp, synthetic construct; identical to SEQ ID NO: 23803
  source 1..120: mol_type = other DNA

SEQ ID NO: 53758 - DNA, 120 bp, synthetic construct; identical to SEQ ID NO: 23804
  source 1..120: mol_type = other DNA

SEQ ID NO: 53759 - DNA, 120 bp, synthetic construct; identical to SEQ ID NO: 23805
  source 1..120: mol_type = other DNA

SEQ ID NO: 53760 - DNA, 120 bp, synthetic construct; identical to SEQ ID NO: 7396
  source 1..120: mol_type = other DNA

SEQ ID NO: 53761 - DNA, 120 bp, synthetic construct; identical to SEQ ID NO: 23807
  source 1..120: mol_type = other DNA

SEQ ID NO: 53762 - DNA, 120 bp, synthetic construct; identical to SEQ ID NO: 23808
  source 1..120: mol_type = other DNA

SEQ ID NO: 53763 - DNA, 120 bp, synthetic construct; identical to SEQ ID NO: 23809
  source 1..120: mol_type = other DNA

SEQ ID NO: 53764 - DNA, 120 bp, synthetic construct; identical to SEQ ID NO: 7397
  source 1..120: mol_type = other DNA

SEQ ID NO: 53765 - DNA, 120 bp, synthetic construct; identical to SEQ ID NO: 23811
  source 1..120: mol_type = other DNA

SEQ ID NO: 53766 - DNA, 120 bp, synthetic construct; identical to SEQ ID NO: 23812
  source 1..120: mol_type = other DNA

SEQ ID NO: 53767 - DNA, 120 bp, synthetic construct; identical to SEQ ID NO: 7398
  source 1..120: mol_type = other DNA

SEQ ID NO: 53768 - DNA, 120 bp, synthetic construct; identical to SEQ ID NO: 23814
  source 1..120: mol_type = other DNA

SEQ ID NO: 53769 - DNA, 120 bp, synthetic construct; identical to SEQ ID NO: 23815
  source 1..120: mol_type = other DNA

SEQ ID NO: 53770 - DNA, 120 bp, synthetic construct; identical to SEQ ID NO: 23816
  source 1..120: mol_type = other DNA

SEQ ID NO: 53771 - DNA, 120 bp, synthetic construct; identical to SEQ ID NO: 7399
  source 1..120: mol_type = other DNA

SEQ ID NO: 53772 - DNA, 120 bp, synthetic construct; identical to SEQ ID NO: 23818
  source 1..120: mol_type = other DNA

SEQ ID NO: 53773 - DNA, 120 bp, synthetic construct; identical to SEQ ID NO: 23819
  source 1..120: mol_type = other DNA

SEQ ID NO: 53774 - DNA, 120 bp, synthetic construct; identical to SEQ ID NO: 23820
  source 1..120: mol_type = other DNA

SEQ ID NO: 53775 - DNA, 120 bp, synthetic construct; identical to SEQ ID NO: 7400
  source 1..120: mol_type = other DNA

SEQ ID NO: 53776 - DNA, 120 bp, synthetic construct; identical to SEQ ID NO: 23822
  source 1..120: mol_type = other DNA

SEQ ID NO: 53777 - DNA, 120 bp, synthetic construct; identical to SEQ ID NO: 23823
  source 1..120: mol_type = other DNA

SEQ ID NO: 53778 - DNA, 120 bp, synthetic construct; identical to SEQ ID NO: 23824
  source 1..120: mol_type = other DNA

SEQ ID NO: 53779 - DNA, 120 bp, synthetic construct; identical to SEQ ID NO: 7401
  source 1..120: mol_type = other DNA

SEQ ID NO: 53780 - DNA, 120 bp, synthetic construct; identical to SEQ ID NO: 23826
  source 1..120: mol_type = other DNA

SEQ ID NO: 53781 - DNA, 120 bp, synthetic construct; identical to SEQ ID NO: 23827
  source 1..120: mol_type = other DNA

SEQ ID NO: 53782 - DNA, 120 bp, synthetic construct; identical to SEQ ID NO: 23828
  source 1..120: mol_type = other DNA

SEQ ID NO: 53783 - DNA, 120 bp, synthetic construct; identical to SEQ ID NO: 7402
  source 1..120: mol_type = other DNA

SEQ ID NO: 53784 - DNA, 120 bp, synthetic construct; identical to SEQ ID NO: 23830
  source 1..120: mol_type = other DNA

SEQ ID NO: 53785 - DNA, 120 bp, synthetic construct; identical to SEQ ID NO: 23831
  source 1..120: mol_type = other DNA

SEQ ID NO: 53786 - DNA, 120 bp, synthetic construct; identical to SEQ ID NO: 23832
  source 1..120: mol_type = other DNA

SEQ ID NO: 53787 - DNA, 120 bp, synthetic construct; identical to SEQ ID NO: 23833
  source 1..120: mol_type = other DNA

SEQ ID NO: 53788 - DNA, 120 bp, synthetic construct; identical to SEQ ID NO: 7403
  source 1..120: mol_type = other DNA

SEQ ID NO: 53789 - DNA, 120 bp, synthetic construct; identical to SEQ ID NO: 23835
  source 1..120: mol_type = other DNA

SEQ ID NO: 53790 - DNA, 120 bp, synthetic construct; identical to SEQ ID NO: 23836
  source 1..120: mol_type = other DNA

SEQ ID NO: 53791 - DNA, 120 bp, synthetic construct; identical to SEQ ID NO: 23837
  source 1..120: mol_type = other DNA

SEQ ID NO: 53792 - DNA, 120 bp, synthetic construct; identical to SEQ ID NO: 23838
  source 1..120: mol_type = other DNA

SEQ ID NO: 53793 - DNA, 120 bp, synthetic construct; identical to SEQ ID NO: 7404
  source 1..120: mol_type = other DNA

SEQ ID NO: 53794 - DNA, 120 bp, synthetic construct; identical to SEQ ID NO: 23840
  source 1..120: mol_type = other DNA

SEQ ID NO: 53795 - DNA, 120 bp, synthetic construct; identical to SEQ ID NO: 23841
  source 1..120: mol_type = other DNA

SEQ ID NO: 53796 - DNA, 120 bp, synthetic construct; identical to SEQ ID NO: 23842
  source 1..120: mol_type = other DNA

SEQ ID NO: 53797 - DNA, 120 bp, synthetic construct; identical to SEQ ID NO: 7405
  source 1..120: mol_type = other DNA

SEQ ID NO: 53798 - DNA, 120 bp, synthetic construct; identical to SEQ ID NO: 23844
  source 1..120: mol_type = other DNA

SEQ ID NO: 53799 - DNA, 120 bp, synthetic construct; identical to SEQ ID NO: 23845
  source 1..120: mol_type = other DNA

SEQ ID NO: 53800 - DNA, 120 bp, synthetic construct; identical to SEQ ID NO: 7406
  source 1..120: mol_type = other DNA

SEQ ID NO: 53801 - DNA, 120 bp, synthetic construct; identical to SEQ ID NO: 23847
  source 1..120: mol_type = other DNA

SEQ ID NO: 53802 - DNA, 120 bp, synthetic construct; identical to SEQ ID NO: 23848
  source 1..120: mol_type = other DNA

SEQ ID NO: 53803 - DNA, 120 bp, synthetic construct; identical to SEQ ID NO: 23849
  source 1..120: mol_type = other DNA

SEQ ID NO: 53804 - DNA, 120 bp, synthetic construct; identical to SEQ ID NO: 7407
  source 1..120: mol_type = other DNA

SEQ ID NO: 53805 - DNA, 120 bp, synthetic construct; identical to SEQ ID NO: 23851
  source 1..120: mol_type = other DNA

SEQ ID NO: 53806 - DNA, 120 bp, synthetic construct; identical to SEQ ID NO: 23852
  source 1..120: mol_type = other DNA

SEQ ID NO: 53807 - DNA, 120 bp, synthetic construct; identical to SEQ ID NO: 23853
  source 1..120: mol_type = other DNA

SEQ ID NO: 53808 - DNA, 120 bp, synthetic construct; identical to SEQ ID NO: 23854
  source 1..120: mol_type = other DNA

SEQ ID NO: 53809 - DNA, 120 bp, synthetic construct; identical to SEQ ID NO: 7408
  source 1..120: mol_type = other DNA

SEQ ID NO: 53810 - DNA, 120 bp, synthetic construct; identical to SEQ ID NO: 23856
  source 1..120: mol_type = other DNA

SEQ ID NO: 53811 - DNA, 120 bp, synthetic construct; identical to SEQ ID NO: 23857
  source 1..120: mol_type = other DNA

SEQ ID NO: 53812 - DNA, 120 bp, synthetic construct; identical to SEQ ID NO: 7409
  source 1..120: mol_type = other DNA

SEQ ID NO: 53813 - DNA, 120 bp, synthetic construct; identical to SEQ ID NO: 23859
  source 1..120: mol_type = other DNA

SEQ ID NO: 53814 - DNA, 120 bp, synthetic construct; identical to SEQ ID NO: 23860
  source 1..120: mol_type = other DNA

SEQ ID NO: 53815 - DNA, 120 bp, synthetic construct; identical to SEQ ID NO: 23861
  source 1..120: mol_type = other DNA

SEQ ID NO: 53816 - DNA, 120 bp, synthetic construct; identical to SEQ ID NO: 7410
  source 1..120: mol_type = other DNA

SEQ ID NO: 53817 - DNA, 120 bp, synthetic construct; identical to SEQ ID NO: 23863
  source 1..120: mol_type = other DNA

SEQ ID NO: 53818 - DNA, 120 bp, synthetic construct; identical to SEQ ID NO: 23864
  source 1..120: mol_type = other DNA

SEQ ID NO: 53819 - DNA, 120 bp, synthetic construct; identical to SEQ ID NO: 23865
  source 1..120: mol_type = other DNA

SEQ ID NO: 53820 - DNA, 120 bp, synthetic construct; identical to SEQ ID NO: 7411
  source 1..120: mol_type = other DNA

SEQ ID NO: 53821 - DNA, 120 bp, synthetic construct; identical to SEQ ID NO: 23867
  source 1..120: mol_type = other DNA

SEQ ID NO: 53822 - DNA, 120 bp, synthetic construct; identical to SEQ ID NO: 23868
  source 1..120: mol_type = other DNA

SEQ ID NO: 53823 - DNA, 120 bp, synthetic construct; identical to SEQ ID NO: 23869
  source 1..120: mol_type = other DNA

SEQ ID NO: 53824 - DNA, 120 bp, synthetic construct; identical to SEQ ID NO: 7412
  source 1..120: mol_type = other DNA

SEQ ID NO: 53825 - DNA, 120 bp, synthetic construct; identical to SEQ ID NO: 23871
  source 1..120: mol_type = other DNA

SEQ ID NO: 53826 - DNA, 120 bp, synthetic construct; identical to SEQ ID NO: 23872
  source 1..120: mol_type = other DNA

SEQ ID NO: 53827 - DNA, 120 bp, synthetic construct; identical to SEQ ID NO: 23873
  source 1..120: mol_type = other DNA

SEQ ID NO: 53828 - DNA, 120 bp, synthetic construct; identical to SEQ ID NO: 23874
  source 1..120: mol_type = other DNA

SEQ ID NO: 53829 - DNA, 120 bp, synthetic construct; identical to SEQ ID NO: 7413
  source 1..120: mol_type = other DNA

SEQ ID NO: 53830 - DNA, 120 bp, synthetic construct; identical to SEQ ID NO: 23876
  source 1..120: mol_type = other DNA

SEQ ID NO: 53831 - DNA, 120 bp, synthetic construct; identical to SEQ ID NO: 23877
  source 1..120: mol_type = other DNA

SEQ ID NO: 53832 - DNA, 120 bp, synthetic construct; identical to SEQ ID NO: 23878
  source 1..120: mol_type = other DNA

SEQ ID NO: 53833 - DNA, 120 bp, synthetic construct; identical to SEQ ID NO: 7414
  source 1..120: mol_type = other DNA

SEQ ID NO: 53834 - DNA, 120 bp, synthetic construct; identical to SEQ ID NO: 23880
  source 1..120: mol_type = other DNA

SEQ ID NO: 53835 - DNA, 120 bp, synthetic construct; identical to SEQ ID NO: 23881
  source 1..120: mol_type = other DNA

SEQ ID NO: 53836 - DNA, 120 bp, synthetic construct; identical to SEQ ID NO: 7415
  source 1..120: mol_type = other DNA

SEQ ID NO: 53837 - DNA, 120 bp, synthetic construct; identical to SEQ ID NO: 23883
  source 1..120: mol_type = other DNA

SEQ ID NO: 53838 - DNA, 120 bp, synthetic construct; identical to SEQ ID NO: 23884
  source 1..120: mol_type = other DNA

SEQ ID NO: 53839 - DNA, 120 bp, synthetic construct; identical to SEQ ID NO: 447
  source 1..120: mol_type = other DNA

SEQ ID NO: 53840 - DNA, 120 bp, synthetic construct; identical to SEQ ID NO: 23886
  source 1..120: mol_type = other DNA

SEQ ID NO: 53841 - DNA, 120 bp, synthetic construct; identical to SEQ ID NO: 7416
  source 1..120: mol_type = other DNA

SEQ ID NO: 53842 - DNA, 120 bp, synthetic construct; identical to SEQ ID NO: 23888
  source 1..120: mol_type = other DNA

SEQ ID NO: 53843 - DNA, 120 bp, synthetic construct; identical to SEQ ID NO: 23889
  source 1..120: mol_type = other DNA

SEQ ID NO: 53844 - DNA, 120 bp, synthetic construct; identical to SEQ ID NO: 23890
  source 1..120: mol_type = other DNA

SEQ ID NO: 53845 - DNA, 120 bp, synthetic construct; identical to SEQ ID NO: 7417
  source 1..120: mol_type = other DNA

SEQ ID NO: 53846 - DNA, 120 bp, synthetic construct; identical to SEQ ID NO: 23892
  source 1..120: mol_type = other DNA

SEQ ID NO: 53847 - DNA, 120 bp, synthetic construct; identical to SEQ ID NO: 23893
  source 1..120: mol_type = other DNA

SEQ ID NO: 53848 - DNA, 120 bp, synthetic construct; identical to SEQ ID NO: 7418
  source 1..120: mol_type = other DNA

SEQ ID NO: 53849 - DNA, 120 bp, synthetic construct; identical to SEQ ID NO: 23895
  source 1..120: mol_type = other DNA

SEQ ID NO: 53850 - DNA, 120 bp, synthetic construct; identical to SEQ ID NO: 23896
  source 1..120: mol_type = other DNA

SEQ ID NO: 53851 - DNA, 120 bp, synthetic construct; identical to SEQ ID NO: 23897
  source 1..120: mol_type = other DNA

SEQ ID NO: 53852 - DNA, 120 bp, synthetic construct; identical to SEQ ID NO: 7419
  source 1..120: mol_type = other DNA

SEQ ID NO: 53853 - DNA, 120 bp, synthetic construct; identical to SEQ ID NO: 23899
  source 1..120: mol_type = other DNA

SEQ ID NO: 53854 - DNA, 120 bp, synthetic construct; identical to SEQ ID NO: 23900
  source 1..120: mol_type = other DNA

SEQ ID NO: 53855 - DNA, 120 bp, synthetic construct; identical to SEQ ID NO: 23901
  source 1..120: mol_type = other DNA

SEQ ID NO: 53856 - DNA, 120 bp, synthetic construct; identical to SEQ ID NO: 23902
  source 1..120: mol_type = other DNA

SEQ ID NO: 53857 - DNA, 120 bp, synthetic construct; identical to SEQ ID NO: 7420
  source 1..120: mol_type = other DNA

SEQ ID NO: 53858 - DNA, 120 bp, synthetic construct; identical to SEQ ID NO: 23904
  source 1..120: mol_type = other DNA

SEQ ID NO: 53859 - DNA, 120 bp, synthetic construct; identical to SEQ ID NO: 23905
  source 1..120: mol_type = other DNA

SEQ ID NO: 53860 - DNA, 120 bp, synthetic construct; identical to SEQ ID NO: 7421
  source 1..120: mol_type = other DNA

SEQ ID NO: 53861 - DNA, 120 bp, synthetic construct; identical to SEQ ID NO: 23907
  source 1..120: mol_type = other DNA

SEQ ID NO: 53862 - DNA, 120 bp, synthetic construct; identical to SEQ ID NO: 23908
  source 1..120: mol_type = other DNA

SEQ ID NO: 53863 - DNA, 120 bp, synthetic construct; identical to SEQ ID NO: 23909
  source 1..120: mol_type = other DNA

SEQ ID NO: 53864 - DNA, 120 bp, synthetic construct; identical to SEQ ID NO: 23910
  source 1..120: mol_type = other DNA

SEQ ID NO: 53865 - DNA, 120 bp, synthetic construct; identical to SEQ ID NO: 7422
  source 1..120: mol_type = other DNA

SEQ ID NO: 53866 - DNA, 120 bp, synthetic construct; identical to SEQ ID NO: 23912
  source 1..120: mol_type = other DNA

SEQ ID NO: 53867 - DNA, 120 bp, synthetic construct; identical to SEQ ID NO: 23913
  source 1..120: mol_type = other DNA

SEQ ID NO: 53868 - DNA, 120 bp, synthetic construct; identical to SEQ ID NO: 7423
  source 1..120: mol_type = other DNA

SEQ ID NO: 53869 - DNA, 120 bp, synthetic construct; identical to SEQ ID NO: 23915
  source 1..120: mol_type = other DNA

SEQ ID NO: 53870 - DNA, 120 bp, synthetic construct; identical to SEQ ID NO: 23916
  source 1..120: mol_type = other DNA

SEQ ID NO: 53871 - DNA, 120 bp, synthetic construct; identical to SEQ ID NO: 23917
  source 1..120: mol_type = other DNA

SEQ ID NO: 53872 - DNA, 120 bp, synthetic construct; identical to SEQ ID NO: 7424
  source 1..120: mol_type = other DNA

SEQ ID NO: 53873 - DNA, 120 bp, synthetic construct; identical to SEQ ID NO: 23919
  source 1..120: mol_type = other DNA

SEQ ID NO: 53874 - DNA, 120 bp, synthetic construct; identical to SEQ ID NO: 23920
  source 1..120: mol_type = other DNA

SEQ ID NO: 53875 - DNA, 120 bp, synthetic construct; identical to SEQ ID NO: 23921
  source 1..120: mol_type = other DNA

SEQ ID NO: 53876 - DNA, 120 bp, synthetic construct; identical to SEQ ID NO: 7425
  source 1..120: mol_type = other DNA

SEQ ID NO: 53877 - DNA, 120 bp, synthetic construct; identical to SEQ ID NO: 23923
  source 1..120: mol_type = other DNA

SEQ ID NO: 53878 - DNA, 120 bp, synthetic construct; identical to SEQ ID NO: 23924
  source 1..120: mol_type = other DNA

SEQ ID NO: 53879 - DNA, 120 bp, synthetic construct; identical to SEQ ID NO: 23925
  source 1..120: mol_type = other DNA

SEQ ID NO: 53880 - DNA, 120 bp, synthetic construct; identical to SEQ ID NO: 23926
  source 1..120: mol_type = other DNA

SEQ ID NO: 53881 - DNA, 120 bp, synthetic construct; identical to SEQ ID NO: 7426
  source 1..120: mol_type = other DNA

SEQ ID NO: 53882 - DNA, 120 bp, synthetic construct; identical to SEQ ID NO: 23928
  source 1..120: mol_type = other DNA

SEQ ID NO: 53883 - DNA, 120 bp, synthetic construct; identical to SEQ ID NO: 23929
  source 1..120: mol_type = other DNA

SEQ ID NO: 53884 - DNA, 120 bp, synthetic construct; identical to SEQ ID NO: 23930
  source 1..120: mol_type = other DNA

SEQ ID NO: 53885 - DNA, 120 bp, synthetic construct; identical to SEQ ID NO: 7427
  source 1..120: mol_type = other DNA

SEQ ID NO: 53886 - DNA, 120 bp, synthetic construct; identical to SEQ ID NO: 23932
  source 1..120: mol_type = other DNA

SEQ ID NO: 53887 - DNA, 120 bp, synthetic construct; identical to SEQ ID NO: 23933
  source 1..120: mol_type = other DNA

SEQ ID NO: 53888 - DNA, 120 bp, synthetic construct; identical to SEQ ID NO: 7428
  source 1..120: mol_type = other DNA

SEQ ID NO: 53889 - DNA, 120 bp, synthetic construct; identical to SEQ ID NO: 23935
  source 1..120: mol_type = other DNA

SEQ ID NO: 53890 - DNA, 120 bp, synthetic construct; identical to SEQ ID NO: 23936
  source 1..120: mol_type = other DNA

SEQ ID NO: 53891 - DNA, 120 bp, synthetic construct; identical to SEQ ID NO: 23937
  source 1..120: mol_type = other DNA

SEQ ID NO: 53892 - DNA, 120 bp, synthetic construct; identical to SEQ ID NO: 23938
  source 1..120: mol_type = other DNA

SEQ ID NO: 53893 - DNA, 120 bp, synthetic construct; identical to SEQ ID NO: 7429
  source 1..120: mol_type = other DNA

SEQ ID NO: 53894 - DNA, 120 bp, synthetic construct; identical to SEQ ID NO: 23940
  source 1..120: mol_type = other DNA

SEQ ID NO: 53895 - DNA, 120 bp, synthetic construct; identical to SEQ ID NO: 23941
  source 1..120: mol_type = other DNA

SEQ ID NO: 53896 - DNA, 120 bp, synthetic construct; identical to SEQ ID NO: 23942
  source 1..120: mol_type = other DNA

SEQ ID NO: 53897 - DNA, 120 bp, synthetic construct; identical to SEQ ID NO: 7430
  source 1..120: mol_type = other DNA

SEQ ID NO: 53898 - DNA, 120 bp, synthetic construct; identical to SEQ ID NO: 23944
  source 1..120: mol_type = other DNA

SEQ ID NO: 53899 - DNA, 120 bp, synthetic construct; identical to SEQ ID NO: 23945
  source 1..120: mol_type = other DNA

SEQ ID NO: 53900 - DNA, 120 bp, synthetic construct; identical to SEQ ID NO: 23946
  source 1..120: mol_type = other DNA

SEQ ID NO: 53901 - DNA, 120 bp, synthetic construct; identical to SEQ ID NO: 7431
  source 1..120: mol_type = other DNA

SEQ ID NO: 53902 - DNA, 120 bp, synthetic construct; identical to SEQ ID NO: 23948
  source 1..120: mol_type = other DNA

SEQ ID NO: 53903 - DNA, 120 bp, synthetic construct; identical to SEQ ID NO: 23949
  source 1..120: mol_type = other DNA

SEQ ID NO: 53904 - DNA, 120 bp, synthetic construct; identical to SEQ ID NO: 7432
  source 1..120: mol_type = other DNA

SEQ ID NO: 53905 - DNA, 120 bp, synthetic construct; identical to SEQ ID NO: 23951
  source 1..120: mol_type = other DNA

SEQ ID NO: 53906 - DNA, 120 bp, synthetic construct; identical to SEQ ID NO: 23952
  source 1..120: mol_type = other DNA

SEQ ID NO: 53907 - DNA, 120 bp, synthetic construct; identical to SEQ ID NO: 23953
  source 1..120: mol_type = other DNA

SEQ ID NO: 53908 - DNA, 120 bp, synthetic construct; identical to SEQ ID NO: 7433
  source 1..120: mol_type = other DNA

SEQ ID NO: 53909 - DNA, 120 bp, synthetic construct; identical to SEQ ID NO: 23955
  source 1..120: mol_type = other DNA

SEQ ID NO: 53910 - DNA, 120 bp, synthetic construct; identical to SEQ ID NO: 23956
  source 1..120: mol_type = other DNA

SEQ ID NO: 53911 - DNA, 120 bp, synthetic construct; identical to SEQ ID NO: 463
  source 1..120: mol_type = other DNA

SEQ ID NO: 53912 - DNA, 120 bp, synthetic construct; identical to SEQ ID NO: 23958
  source 1..120: mol_type = other DNA

SEQ ID NO: 53913 - DNA, 120 bp, synthetic construct; identical to SEQ ID NO: 7434
  source 1..120: mol_type = other DNA

SEQ ID NO: 53914 - DNA, 120 bp, synthetic construct; identical to SEQ ID NO: 23960
  source 1..120: mol_type = other DNA

SEQ ID NO: 53915 - DNA, 120 bp, synthetic construct; identical to SEQ ID NO: 23961
  source 1..120: mol_type = other DNA

SEQ ID NO: 53916 - DNA, 120 bp, synthetic construct; identical to SEQ ID NO: 7435
  source 1..120: mol_type = other DNA

SEQ ID NO: 53917 - DNA, 120 bp, synthetic construct; identical to SEQ ID NO: 23963
  source 1..120: mol_type = other DNA

SEQ ID NO: 53918 - DNA, 120 bp, synthetic construct; identical to SEQ ID NO: 23964
  source 1..120: mol_type = other DNA

SEQ ID NO: 53919 - DNA, 120 bp, synthetic construct; identical to SEQ ID NO: 23965
  source 1..120: mol_type = other DNA

SEQ ID NO: 53920 - DNA, 120 bp, synthetic construct; identical to SEQ ID NO: 7436
  source 1..120: mol_type = other DNA

SEQ ID NO: 53921 - DNA, 120 bp, synthetic construct; identical to SEQ ID NO: 23967
  source 1..120: mol_type = other DNA

SEQ ID NO: 53922 - DNA, 120 bp, synthetic construct; identical to SEQ ID NO: 23968
  source 1..120: mol_type = other DNA

SEQ ID NO: 53923 - DNA, 120 bp, synthetic construct; identical to SEQ ID NO: 23969
  source 1..120: mol_type = other DNA

SEQ ID NO: 53924 - DNA, 120 bp, synthetic construct; identical to SEQ ID NO: 23970
  source 1..120: mol_type = other DNA

SEQ ID NO: 53925 - DNA, 120 bp, synthetic construct; identical to SEQ ID NO: 7437
  source 1..120: mol_type = other DNA

SEQ ID NO: 53926 - DNA, 120 bp, synthetic construct; identical to SEQ ID NO: 23972
  source 1..120: mol_type = other DNA

SEQ ID NO: 53927 - DNA, 120 bp, synthetic construct; identical to SEQ ID NO: 23973
  source 1..120: mol_type = other DNA

SEQ ID NO: 53928 - DNA, 120 bp, synthetic construct; identical to SEQ ID NO: 7438
  source 1..120: mol_type = other DNA

SEQ ID NO: 53929 - DNA, 120 bp, synthetic construct; identical to SEQ ID NO: 23975
  source 1..120: mol_type = other DNA

SEQ ID NO: 53930 - DNA, 120 bp, synthetic construct; identical to SEQ ID NO: 23976
  source 1..120: mol_type = other DNA

SEQ ID NO: 53931 - DNA, 120 bp, synthetic construct; identical to SEQ ID NO: 23977
  source 1..120: mol_type = other DNA

SEQ ID NO: 53932 - DNA, 120 bp, synthetic construct; identical to SEQ ID NO: 7439
  source 1..120: mol_type = other DNA

SEQ ID NO: 53933 - DNA, 120 bp, synthetic construct; identical to SEQ ID NO: 23979
  source 1..120: mol_type = other DNA

SEQ ID NO: 53934 - DNA, 120 bp, synthetic construct; identical to SEQ ID NO: 23980
  source 1..120: mol_type = other DNA

SEQ ID NO: 53935 - DNA, 120 bp, synthetic construct; identical to SEQ ID NO: 23981
  source 1..120: mol_type = other DNA

SEQ ID NO: 53936 - DNA, 120 bp, synthetic construct; identical to SEQ ID NO: 23982
  source 1..120: mol_type = other DNA

SEQ ID NO: 53937 - DNA, 120 bp, synthetic construct; identical to SEQ ID NO: 469
  source 1..120: mol_type = other DNA

SEQ ID NO: 53938 - DNA, 120 bp, synthetic construct; identical to SEQ ID NO: 23984
  source 1..120: mol_type = other DNA

SEQ ID NO: 53939 - DNA, 120 bp, synthetic construct; identical to SEQ ID NO: 23985
  source 1..120: mol_type = other DNA

SEQ ID NO: 53940 - DNA, 120 bp, synthetic construct; identical to SEQ ID NO: 7441
  source 1..120: mol_type = other DNA

SEQ ID NO: 53941 - DNA, 120 bp, synthetic construct; identical to SEQ ID NO: 23987
  source 1..120: mol_type = other DNA

SEQ ID NO: 53942 - DNA, 120 bp, synthetic construct; identical to SEQ ID NO: 23988
  source 1..120: mol_type = other DNA

SEQ ID NO: 53943 - DNA, 120 bp, synthetic construct; identical to SEQ ID NO: 23989
  source 1..120: mol_type = other DNA

SEQ ID NO: 53944 - DNA, 120 bp, synthetic construct; identical to SEQ ID NO: 23990
  source 1..120: mol_type = other DNA

SEQ ID NO: 53945 - DNA, 120 bp, synthetic construct; identical to SEQ ID NO: 7442
  source 1..120: mol_type = other DNA

SEQ ID NO: 53946 - DNA, 120 bp, synthetic construct; identical to SEQ ID NO: 23992
  source 1..120: mol_type = other DNA

SEQ ID NO: 53947 - DNA, 120 bp, synthetic construct; identical to SEQ ID NO: 23993
  source 1..120: mol_type = other DNA

SEQ ID NO: 53948 - DNA, 120 bp, synthetic construct; identical to SEQ ID NO: 7443
  source 1..120: mol_type = other DNA

SEQ ID NO: 53949 - DNA, 120 bp, synthetic construct; identical to SEQ ID NO: 23995
  source 1..120: mol_type = other DNA

SEQ ID NO: 53950 - DNA, 120 bp, synthetic construct; identical to SEQ ID NO: 23996
  source 1..120: mol_type = other DNA

SEQ ID NO: 53951 - DNA, 120 bp, synthetic construct; identical to SEQ ID NO: 23997
  source 1..120: mol_type = other DNA

SEQ ID NO: 53952 - DNA, 120 bp, synthetic construct; identical to SEQ ID NO: 23998
  source 1..120: mol_type = other DNA

SEQ ID NO: 53953 - DNA, 120 bp, synthetic construct; identical to SEQ ID NO: 7444
  source 1..120: mol_type = other DNA

SEQ ID NO: 53954 - DNA, 120 bp, synthetic construct; identical to SEQ ID NO: 24000
  source 1..120: mol_type = other DNA

SEQ ID NO: 53955 - DNA, 120 bp, synthetic construct; identical to SEQ ID NO: 24001
  source 1..120: mol_type = other DNA

SEQ ID NO: 53956 - DNA, 120 bp, synthetic construct; identical to SEQ ID NO: 7445
  source 1..120: mol_type = other DNA

SEQ ID NO: 53957 - DNA, 120 bp, synthetic construct; identical to SEQ ID NO: 24003
  source 1..120: mol_type = other DNA

SEQ ID NO: 53958 - DNA, 120 bp, synthetic construct; identical to SEQ ID NO: 24004
  source 1..120: mol_type = other DNA

SEQ ID NO: 53959 - DNA, 120 bp, synthetic construct; identical to SEQ ID NO: 24005
  source 1..120: mol_type = other DNA

SEQ ID NO: 53960 - DNA, 120 bp, synthetic construct; identical to SEQ ID NO: 7446
  source 1..120: mol_type = other DNA

SEQ ID NO: 53961 - DNA, 120 bp, synthetic construct; identical to SEQ ID NO: 24007
  source 1..120: mol_type = other DNA

SEQ ID NO: 53962 - DNA, 120 bp, synthetic construct; identical to SEQ ID NO: 24008
  source 1..120: mol_type = other DNA

SEQ ID NO: 53963 - DNA, 120 bp, synthetic construct; identical to SEQ ID NO: 24009
  source 1..120: mol_type = other DNA

SEQ ID NO: 53964 - DNA, 120 bp, synthetic construct; identical to SEQ ID NO: 7447
  source 1..120: mol_type = other DNA

SEQ ID NO: 53965 - DNA, 120 bp, synthetic construct; identical to SEQ ID NO: 24011
  source 1..120: mol_type = other DNA

SEQ ID NO: 53966 - DNA, 120 bp, synthetic construct; identical to SEQ ID NO: 24012
  source 1..120: mol_type = other DNA

SEQ ID NO: 53967 - DNA, 120 bp, synthetic construct; identical to SEQ ID NO: 24013
  source 1..120: mol_type = other DNA

SEQ ID NO: 53968 - DNA, 120 bp, synthetic construct; identical to SEQ ID NO: 7448
  source 1..120: mol_type = other DNA

SEQ ID NO: 53969 - DNA, 120 bp, synthetic construct; identical to SEQ ID NO: 24015
  source 1..120: mol_type = other DNA

SEQ ID NO: 53970 - DNA, 120 bp, synthetic construct; identical to SEQ ID NO: 24016
  source 1..120: mol_type = other DNA

SEQ ID NO: 53971 - DNA, 120 bp, synthetic construct; identical to SEQ ID NO: 24017
  source 1..120: mol_type = other DNA

SEQ ID NO: 53972 - DNA, 120 bp, synthetic construct; identical to SEQ ID NO: 7449
  source 1..120: mol_type = other DNA

SEQ ID NO: 53973 - DNA, 120 bp, synthetic construct; identical to SEQ ID NO: 24019
  source 1..120: mol_type = other DNA

SEQ ID NO: 53974 - DNA, 120 bp, synthetic construct; identical to SEQ ID NO: 24020
  source 1..120: mol_type = other DNA

SEQ ID NO: 53975 - DNA, 120 bp, synthetic construct; identical to SEQ ID NO: 24021
  source 1..120: mol_type = other DNA

SEQ ID NO: 53976 - DNA, 120 bp, synthetic construct; identical to SEQ ID NO: 7450
  source 1..120: mol_type = other DNA

SEQ ID NO: 53977 - DNA, 120 bp, synthetic construct; identical to SEQ ID NO: 24023
  source 1..120: mol_type = other DNA

SEQ ID NO: 53978 - DNA, 120 bp, synthetic construct; identical to SEQ ID NO: 24024
  source 1..120: mol_type = other DNA

SEQ ID NO: 53979 - DNA, 120 bp, synthetic construct; identical to SEQ ID NO: 24025
  source 1..120: mol_type = other DNA

SEQ ID NO: 53980 - DNA, 120 bp, synthetic construct; identical to SEQ ID NO: 7451
  source 1..120: mol_type = other DNA

SEQ ID NO: 53981 - DNA, 120 bp, synthetic construct; identical to SEQ ID NO: 24027
  source 1..120: mol_type = other DNA

SEQ ID NO: 53982 - DNA, 120 bp, synthetic construct; identical to SEQ ID NO: 24028
  source 1..120: mol_type = other DNA

SEQ ID NO: 53983 - DNA, 120 bp, synthetic construct; identical to SEQ ID NO: 24029
  source 1..120: mol_type = other DNA

SEQ ID NO: 53984 - DNA, 120 bp, synthetic construct; identical to SEQ ID NO: 7452
  source 1..120: mol_type = other DNA

SEQ ID NO: 53985 - DNA, 120 bp, synthetic construct; identical to SEQ ID NO: 24031
  source 1..120: mol_type = other DNA

SEQ ID NO: 53986 - DNA, 120 bp, synthetic construct; identical to SEQ ID NO: 24032
  source 1..120: mol_type = other DNA

SEQ ID NO: 53987 - DNA, 120 bp, synthetic construct; identical to SEQ ID NO: 24033
  source 1..120: mol_type = other DNA

SEQ ID NO: 53988 - DNA, 120 bp, synthetic construct; identical to SEQ ID NO: 24034
  source 1..120: mol_type = other DNA

SEQ ID NO: 53989 - DNA, 120 bp, synthetic construct; identical to SEQ ID NO: 7453
  source 1..120: mol_type = other DNA

SEQ ID NO: 53990 - DNA, 120 bp, synthetic construct; identical to SEQ ID NO: 24036
  source 1..120: mol_type = other DNA

SEQ ID NO: 53991 - DNA, 120 bp, synthetic construct; identical to SEQ ID NO: 24037
  source 1..120: mol_type = other DNA

SEQ ID NO: 53992 - DNA, 120 bp, synthetic construct; identical to SEQ ID NO: 24038
  source 1..120: mol_type = other DNA

SEQ ID NO: 53993 - DNA, 120 bp, synthetic construct; identical to SEQ ID NO: 7454
  source 1..120: mol_type = other DNA

SEQ ID NO: 53994 - DNA, 120 bp, synthetic construct; identical to SEQ ID NO: 24040
  source 1..120: mol_type = other DNA

SEQ ID NO: 53995 - DNA, 120 bp, synthetic construct; identical to SEQ ID NO: 24041
  source 1..120: mol_type = other DNA

SEQ ID NO: 53996 - DNA, 120 bp, synthetic construct; identical to SEQ ID NO: 7455
  source 1..120: mol_type = other DNA

SEQ ID NO: 53997 - DNA, 120 bp, synthetic construct; identical to SEQ ID NO: 24043
  source 1..120: mol_type = other DNA

SEQ ID NO: 53998 - DNA, 120 bp, synthetic construct; identical to SEQ ID NO: 24044
  source 1..120: mol_type = other DNA

SEQ ID NO: 53999 - DNA, 120 bp, synthetic construct; identical to SEQ ID NO: 24045
  source 1..120: mol_type = other DNA

SEQ ID NO: 54000 - DNA, 120 bp, synthetic construct; identical to SEQ ID NO: 24046
  source 1..120: mol_type = other DNA

SEQ ID NO: 54001 - DNA, 120 bp, synthetic construct; identical to SEQ ID NO: 7456
  source 1..120: mol_type = other DNA

SEQ ID NO: 54002 - DNA, 120 bp, synthetic construct; identical to SEQ ID NO: 24048
  source 1..120: mol_type = other DNA

SEQ ID NO: 54003 - DNA, 120 bp, synthetic construct; identical to SEQ ID NO: 24049
  source 1..120: mol_type = other DNA

SEQ ID NO: 54004 - DNA, 120 bp, synthetic construct; identical to SEQ ID NO: 7457
  source 1..120: mol_type = other DNA

SEQ ID NO: 54005 - DNA, 120 bp, synthetic construct; identical to SEQ ID NO: 24051
  source 1..120: mol_type = other DNA

SEQ ID NO: 54006 - DNA, 120 bp, synthetic construct; identical to SEQ ID NO: 24052
  source 1..120: mol_type = other DNA

SEQ ID NO: 54007 - DNA, 120 bp, synthetic construct; identical to SEQ ID NO: 24053
  source 1..120: mol_type = other DNA

SEQ ID NO: 54008 - DNA, 120 bp, synthetic construct; identical to SEQ ID NO: 7458
  source 1..120: mol_type = other DNA

SEQ ID NO: 54009 - DNA, 120 bp, synthetic construct; identical to SEQ ID NO: 24055
  source 1..120: mol_type = other DNA

SEQ ID NO: 54010 - DNA, 120 bp, synthetic construct; identical to SEQ ID NO: 24056
  source 1..120: mol_type = other DNA

SEQ ID NO: 54011 - DNA, 120 bp, synthetic construct; identical to SEQ ID NO: 24057
  source 1..120: mol_type = other DNA

SEQ ID NO: 54012 - DNA, 120 bp, synthetic construct; identical to SEQ ID NO: 7459
  source 1..120: mol_type = other DNA

SEQ ID NO: 54013 - DNA, 120 bp, synthetic construct; identical to SEQ ID NO: 24059
  source 1..120: mol_type = other DNA

SEQ ID NO: 54014 - DNA, 120 bp, synthetic construct; identical to SEQ ID NO: 24060
  source 1..120: mol_type = other DNA

SEQ ID NO: 54015 - DNA, 120 bp, synthetic construct; identical to SEQ ID NO: 24061
  source 1..120: mol_type = other DNA

SEQ ID NO: 54016 - DNA, 120 bp, synthetic construct; identical to SEQ ID NO: 24062
  source 1..120: mol_type = other DNA

SEQ ID NO: 54017 - DNA, 120 bp, synthetic construct; identical to SEQ ID NO: 7460
  source 1..120: mol_type = other DNA

SEQ ID NO: 54018 - DNA, 120 bp, synthetic construct; identical to SEQ ID NO: 24064
  source 1..120: mol_type = other DNA

SEQ ID NO: 54019 - DNA, 120 bp, synthetic construct; identical to SEQ ID NO: 24065
  source 1..120: mol_type = other DNA

SEQ ID NO: 54020 - DNA, 120 bp, synthetic construct; identical to SEQ ID NO: 7461
  source 1..120: mol_type = other DNA

SEQ ID NO: 54021 - DNA, 120 bp, synthetic construct; identical to SEQ ID NO: 24067
  source 1..120: mol_type = other DNA

SEQ ID NO: 54022 - DNA, 120 bp, synthetic construct; identical to SEQ ID NO: 24068
  source 1..120: mol_type = other DNA

SEQ ID NO: 54023 - DNA, 120 bp, synthetic construct; identical to SEQ ID NO: 24069
  source 1..120: mol_type = other DNA

SEQ ID NO: 54024 - DNA, 120 bp, synthetic construct; identical to SEQ ID NO: 7462
  source 1..120: mol_type = other DNA

SEQ ID NO: 54025 - DNA, 120 bp, synthetic construct; identical to SEQ ID NO: 24071
  source 1..120: mol_type = other DNA

SEQ ID NO: 54026 - DNA, 120 bp, synthetic construct; identical to SEQ ID NO: 24072
  source 1..120: mol_type = other DNA

SEQ ID NO: 54027 - DNA, 120 bp, synthetic construct; identical to SEQ ID NO: 24073
  source 1..120: mol_type = other DNA

SEQ ID NO: 54028 - DNA, 120 bp, synthetic construct; identical to SEQ ID NO: 7463
  source 1..120: mol_type = other DNA

SEQ ID NO: 54029 - DNA, 120 bp, synthetic construct; identical to SEQ ID NO: 24075
  source 1..120: mol_type = other DNA

SEQ ID NO: 54030 - DNA, 120 bp, synthetic construct; identical to SEQ ID NO: 491
  source 1..120: mol_type = other DNA

SEQ ID NO: 54031 - DNA, 120 bp, synthetic construct; identical to SEQ ID NO: 24077
  source 1..120: mol_type = other DNA

SEQ ID NO: 54032 - DNA, 120 bp, synthetic construct; identical to SEQ ID NO: 7464
  source 1..120: mol_type = other DNA

SEQ ID NO: 54033 - DNA, 120 bp, synthetic construct; identical to SEQ ID NO: 24079
  source 1..120: mol_type = other DNA

SEQ ID NO: 54034 - DNA, 120 bp, synthetic construct; identical to SEQ ID NO: 24080
  source 1..120: mol_type = other DNA

SEQ ID NO: 54035 - DNA, 120 bp, synthetic construct; identical to SEQ ID NO: 7465
  source 1..120: mol_type = other DNA

SEQ ID NO: 54036 - DNA, 120 bp, synthetic construct; identical to SEQ ID NO: 24082
  source 1..120: mol_type = other DNA

SEQ ID NO: 54037 - DNA, 120 bp, synthetic construct; identical to SEQ ID NO: 24083
  source 1..120: mol_type = other DNA

SEQ ID NO: 54038 - DNA, 120 bp, synthetic construct; identical to SEQ ID NO: 24084
  source 1..120: mol_type = other DNA

SEQ ID NO: 54039 - DNA, 120 bp, synthetic construct; identical to SEQ ID NO: 7466
  source 1..120: mol_type = other DNA

SEQ ID NO: 54040 - DNA, 120 bp, synthetic construct; identical to SEQ ID NO: 24086
  source 1..120: mol_type = other DNA

SEQ ID NO: 54041 - DNA, 120 bp, synthetic construct; identical to SEQ ID NO: 7467
  source 1..120: mol_type = other DNA

SEQ ID NO: 54042 - DNA, 120 bp, synthetic construct; identical to SEQ ID NO: 24088
  source 1..120: mol_type = other DNA

SEQ ID NO: 54043 - DNA, 120 bp, synthetic construct; identical to SEQ ID NO: 24089
  source 1..120: mol_type = other DNA

SEQ ID NO: 54044 - DNA, 120 bp, synthetic construct; identical to SEQ ID NO: 7468
  source 1..120: mol_type = other DNA

SEQ ID NO: 54045 - DNA, 120 bp, synthetic construct; identical to SEQ ID NO: 24091
  source 1..120: mol_type = other DNA

SEQ ID NO: 54046 - DNA, 120 bp, synthetic construct; identical to SEQ ID NO: 24092
  source 1..120: mol_type = other DNA

SEQ ID NO: 54047 - DNA, 120 bp, synthetic construct; identical to SEQ ID NO: 24093
  source 1..120: mol_type = other DNA

SEQ ID NO: 54048 - DNA, 120 bp, synthetic construct; identical to SEQ ID NO: 7469
  source 1..120: mol_type = other DNA

SEQ ID NO: 54049 - DNA, 120 bp, synthetic construct; identical to SEQ ID NO: 24095
  source 1..120: mol_type = other DNA

SEQ ID NO: 54050 - DNA, 120 bp, synthetic construct; identical to SEQ ID NO: 24096
  source 1..120: mol_type = other DNA

SEQ ID NO: 54051 - DNA, 120 bp, synthetic construct; identical to SEQ ID NO: 24097
  source 1..120: mol_type = other DNA

SEQ ID NO: 54052 - DNA, 120 bp, synthetic construct; identical to SEQ ID NO: 7470
  source 1..120: mol_type = other DNA

SEQ ID NO: 54053 - DNA, 120 bp, synthetic construct; identical to SEQ ID NO: 24099
  source 1..120: mol_type = other DNA

SEQ ID NO: 54054 - DNA, 120 bp, synthetic construct; identical to SEQ ID NO: 24100
  source 1..120: mol_type = other DNA

SEQ ID NO: 54055 - DNA, 120 bp, synthetic construct; identical to SEQ ID NO: 24101
  source 1..120: mol_type = other DNA

SEQ ID NO: 54056 - DNA, 120 bp, synthetic construct; identical to SEQ ID NO: 7471
  source 1..120: mol_type = other DNA

SEQ ID NO: 54057 - DNA, 120 bp, synthetic construct; identical to SEQ ID NO: 24103
  source 1..120: mol_type = other DNA

SEQ ID NO: 54058 - DNA, 120 bp, synthetic construct; identical to SEQ ID NO: 24104
  source 1..120: mol_type = other DNA

SEQ ID NO: 54059 - DNA, 120 bp, synthetic construct; identical to SEQ ID NO: 24105
  source 1..120: mol_type = other DNA

SEQ ID NO: 54060 - DNA, 120 bp, synthetic construct; identical to SEQ ID NO: 7472
  source 1..120: mol_type = other DNA

SEQ ID NO: 54061 - DNA, 120 bp, synthetic construct; identical to SEQ ID NO: 24107
  source 1..120: mol_type = other DNA

SEQ ID NO: 54062 - DNA, 120 bp, synthetic construct; identical to SEQ ID NO: 24108
  source 1..120: mol_type = other DNA

SEQ ID NO: 54063 - DNA, 120 bp, synthetic construct; identical to SEQ ID NO: 24109
  source 1..120: mol_type = other DNA

SEQ ID NO: 54064 - DNA, 120 bp, synthetic construct; identical to SEQ ID NO: 7473
  source 1..120: mol_type = other DNA

SEQ ID NO: 54065 - DNA, 120 bp, synthetic construct; identical to SEQ ID NO: 24111
  source 1..120: mol_type = other DNA

SEQ ID NO: 54066 - DNA, 120 bp, synthetic construct; identical to SEQ ID NO: 24112
  source 1..120: mol_type = other DNA

SEQ ID NO: 54067 - DNA, 120 bp, synthetic construct; identical to SEQ ID NO: 24113
  source 1..120: mol_type = other DNA

SEQ ID NO: 54068 - DNA, 120 bp, synthetic construct; identical to SEQ ID NO: 7474
  source 1..120: mol_type = other DNA

SEQ ID NO: 54069 - DNA, 120 bp, synthetic construct; identical to SEQ ID NO: 24115
  source 1..120: mol_type = other DNA

SEQ ID NO: 54070 - DNA, 120 bp, synthetic construct; identical to SEQ ID NO: 24116
  source 1..120: mol_type = other DNA

SEQ ID NO: 54071 - DNA, 120 bp, synthetic construct; identical to SEQ ID NO: 24117
  source 1..120: mol_type = other DNA

SEQ ID NO: 54072 - DNA, 120 bp, synthetic construct; identical to SEQ ID NO: 24118
  source 1..120: mol_type = other DNA

SEQ ID NO: 54073 - DNA, 120 bp, synthetic construct; identical to SEQ ID NO: 7475
  source 1..120: mol_type = other DNA

SEQ ID NO: 54074 - DNA, 120 bp, synthetic construct; identical to SEQ ID NO: 24120
  source 1..120: mol_type = other DNA

SEQ ID NO: 54075 - DNA, 120 bp, synthetic construct; identical to SEQ ID NO: 24121
  source 1..120: mol_type = other DNA

SEQ ID NO: 54076 - DNA, 120 bp, synthetic construct; identical to SEQ ID NO: 7476
  source 1..120: mol_type = other DNA

SEQ ID NO: 54077 - DNA, 120 bp, synthetic construct; identical to SEQ ID NO: 24123
  source 1..120: mol_type = other DNA

SEQ ID NO: 54078 - DNA, 120 bp, synthetic construct; identical to SEQ ID NO: 24124
  source 1..120: mol_type = other DNA

SEQ ID NO: 54079 - DNA, 120 bp, synthetic construct; identical to SEQ ID NO: 24125
  source 1..120: mol_type = other DNA

SEQ ID NO: 54080 - DNA, 120 bp, synthetic construct; identical to SEQ ID NO: 24126
  source 1..120: mol_type = other DNA

SEQ ID NO: 54081 - DNA, 120 bp, synthetic construct; identical to SEQ ID NO: 7477
  source 1..120: mol_type = other DNA

SEQ ID NO: 54082 - DNA, 120 bp, synthetic construct; identical to SEQ ID NO: 24128
  source 1..120: mol_type = other DNA

SEQ ID NO: 54083 - DNA, 120 bp, synthetic construct; identical to SEQ ID NO: 503
  source 1..120: mol_type = other DNA

SEQ ID NO: 54084 - DNA, 120 bp, synthetic construct; identical to SEQ ID NO: 7478
  source 1..120: mol_type = other DNA

SEQ ID NO: 54085 - DNA, 120 bp, synthetic construct; identical to SEQ ID NO: 24131
  source 1..120: mol_type = other DNA

SEQ ID NO: 54086 - DNA, 120 bp, synthetic construct; identical to SEQ ID NO: 24132
  source 1..120: mol_type = other DNA

SEQ ID NO: 54087 - DNA, 120 bp, synthetic construct; identical to SEQ ID NO: 24133
  source 1..120: mol_type = other DNA

SEQ ID NO: 54088 - DNA, 120 bp, synthetic construct; identical to SEQ ID NO: 7479
  source 1..120: mol_type = other DNA

SEQ ID NO: 54089 - DNA, 120 bp, synthetic construct; identical to SEQ ID NO: 24135
  source 1..120: mol_type = other DNA

SEQ ID NO: 54090 - DNA, 120 bp, synthetic construct; identical to SEQ ID NO: 24136
  source 1..120: mol_type = other DNA

SEQ ID NO: 54091 - DNA, 120 bp, synthetic construct; identical to SEQ ID NO: 505
  source 1..120: mol_type = other DNA

SEQ ID NO: 54092 - DNA, 120 bp, synthetic construct; identical to SEQ ID NO: 24138
  source 1..120: mol_type = other DNA

SEQ ID NO: 54093 - DNA, 120 bp, synthetic construct; identical to SEQ ID NO: 7480
  source 1..120: mol_type = other DNA

SEQ ID NO: 54094 - DNA, 120 bp, synthetic construct; identical to SEQ ID NO: 24140
  source 1..120: mol_type = other DNA

SEQ ID NO: 54095 - DNA, 120 bp, synthetic construct; identical to SEQ ID NO: 24141
  source 1..120: mol_type = other DNA

SEQ ID NO: 54096 - DNA, 120 bp, synthetic construct; identical to SEQ ID NO: 24142
  source 1..120: mol_type = other DNA

SEQ ID NO: 54097 - DNA, 120 bp, synthetic construct; identical to SEQ ID NO: 7481
  source 1..120: mol_type = other DNA

SEQ ID NO: 54098 - DNA, 120 bp, synthetic construct; identical to SEQ ID NO: 24144
  source 1..120: mol_type = other DNA

SEQ ID NO: 54099 - DNA, 120 bp, synthetic construct; identical to SEQ ID NO: 24145
  source 1..120: mol_type = other DNA

SEQ ID NO: 54100 - DNA, 120 bp, synthetic construct; identical to SEQ ID NO: 24146
  source 1..120: mol_type = other DNA

SEQ ID NO: 54101 - DNA, 120 bp, synthetic construct; identical to SEQ ID NO: 7482
  source 1..120: mol_type = other DNA

SEQ ID NO: 54102 - DNA, 120 bp, synthetic construct; identical to SEQ ID NO: 24148
  source 1..120: mol_type = other DNA

SEQ ID NO: 54103 - DNA, 120 bp, synthetic construct; identical to SEQ ID NO: 24149
  source 1..120: mol_type = other DNA

SEQ ID NO: 54104 - DNA, 120 bp, synthetic construct; identical to SEQ ID NO: 24150
  source 1..120: mol_type = other DNA

SEQ ID NO: 54105 - DNA, 120 bp, synthetic construct; identical to SEQ ID NO: 7483
  source 1..120: mol_type = other DNA

SEQ ID NO: 54106 - DNA, 120 bp, synthetic construct; identical to SEQ ID NO: 24152
  source 1..120: mol_type = other DNA

SEQ ID NO: 54107 - DNA, 120 bp, synthetic construct; identical to SEQ ID NO: 24153
  source 1..120: mol_type = other DNA

SEQ ID NO: 54108 - DNA, 120 bp, synthetic construct; identical to SEQ ID NO: 24154
  source 1..120: mol_type = other DNA

SEQ ID NO: 54109 - DNA, 120 bp, synthetic construct; identical to SEQ ID NO: 7484
  source 1..120: mol_type = other DNA

SEQ ID NO: 54110 - DNA, 120 bp, synthetic construct; identical to SEQ ID NO: 24156
  source 1..120: mol_type = other DNA

SEQ ID NO: 54111 - DNA, 120 bp, synthetic construct; identical to SEQ ID NO: 24157
  source 1..120: mol_type = other DNA

SEQ ID NO: 54112 - DNA, 120 bp, synthetic construct; identical to SEQ ID NO: 24158
  source 1..120: mol_type = other DNA

SEQ ID NO: 54113 - DNA, 120 bp, synthetic construct; identical to SEQ ID NO: 7485
  source 1..120: mol_type = other DNA

SEQ ID NO: 54114 - DNA, 120 bp, synthetic construct; identical to SEQ ID NO: 24160
  source 1..120: mol_type = other DNA

SEQ ID NO: 54115 - DNA, 120 bp, synthetic construct; identical to SEQ ID NO: 24161
  source 1..120: mol_type = other DNA

SEQ ID NO: 54116 - DNA, 120 bp, synthetic construct; identical to SEQ ID NO: 24162
  source 1..120: mol_type = other DNA

SEQ ID NO: 54117 - DNA, 120 bp, synthetic construct; identical to SEQ ID NO: 7486
  source 1..120: mol_type = other DNA

SEQ ID NO: 54118 - DNA, 120 bp, synthetic construct; identical to SEQ ID NO: 24164
  source 1..120: mol_type = other DNA

SEQ ID NO: 54119 - DNA, 120 bp, synthetic construct; identical to SEQ ID NO: 24165
  source 1..120: mol_type = other DNA

SEQ ID NO: 54120 - DNA, 120 bp, synthetic construct; identical to SEQ ID NO: 24166
  source 1..120: mol_type = other DNA

SEQ ID NO: 54121 - DNA, 120 bp, synthetic construct; identical to SEQ ID NO: 7487
  source 1..120: mol_type = other DNA

SEQ ID NO: 54122 - DNA, 120 bp, synthetic construct; identical to SEQ ID NO: 24168
  source 1..120: mol_type = other DNA

SEQ ID NO: 54123 - DNA, 120 bp, synthetic construct; identical to SEQ ID NO: 24169
  source 1..120: mol_type = other DNA

SEQ ID NO: 54124 - DNA, 120 bp, synthetic construct; identical to SEQ ID NO: 24170
  source 1..120: mol_type = other DNA

SEQ ID NO: 54125 - DNA, 120 bp, synthetic construct; identical to SEQ ID NO: 7488
  source 1..120: mol_type = other DNA

SEQ ID NO: 54126 - DNA, 120 bp, synthetic construct; identical to SEQ ID NO: 24172
  source 1..120: mol_type = other DNA

SEQ ID NO: 54127 - DNA, 120 bp, synthetic construct; identical to SEQ ID NO: 24173
  source 1..120: mol_type = other DNA

SEQ ID NO: 54128 - DNA, 120 bp, synthetic construct; identical to SEQ ID NO: 24174
  source 1..120: mol_type = other DNA

SEQ ID NO: 54129 - DNA, 120 bp, synthetic construct; identical to SEQ ID NO: 7489
  source 1..120: mol_type = other DNA

SEQ ID NO: 54130 - DNA, 120 bp, synthetic construct; identical to SEQ ID NO: 24176
  source 1..120: mol_type = other DNA

SEQ ID NO: 54131 - DNA, 120 bp, synthetic construct; identical to SEQ ID NO: 24177
  source 1..120: mol_type = other DNA

SEQ ID NO: 54132 - DNA, 120 bp, synthetic construct; identical to SEQ ID NO: 24178
  source 1..120: mol_type = other DNA

SEQ ID NO: 54133 - DNA, 120 bp, synthetic construct; identical to SEQ ID NO: 7490
  source 1..120: mol_type = other DNA

SEQ ID NO: 54134 - DNA, 120 bp, synthetic construct; identical to SEQ ID NO: 24180
  source 1..120: mol_type = other DNA

SEQ ID NO: 54135 - DNA, 120 bp, synthetic construct; identical to SEQ ID NO: 24181
  source 1..120: mol_type = other DNA

SEQ ID NO: 54136 - DNA, 120 bp, synthetic construct; identical to SEQ ID NO: 24182
  source 1..120: mol_type = other DNA

SEQ ID NO: 54137 - DNA, 120 bp, synthetic construct; identical to SEQ ID NO: 24183
  source 1..120: mol_type = other DNA

SEQ ID NO: 54138 - DNA, 120 bp, synthetic construct; identical to SEQ ID NO: 7491
  source 1..120: mol_type = other DNA

SEQ ID NO: 54139 - DNA, 120 bp, synthetic construct; identical to SEQ ID NO: 24185
  source 1..120: mol_type = other DNA

SEQ ID NO: 54140 - DNA, 120 bp, synthetic construct; identical to SEQ ID NO: 24186
  source 1..120: mol_type = other DNA

SEQ ID NO: 54141 - DNA, 120 bp, synthetic construct; identical to SEQ ID NO: 24187
  source 1..120: mol_type = other DNA

SEQ ID NO: 54142 - DNA, 120 bp, synthetic construct; identical to SEQ ID NO: 7492
  source 1..120: mol_type = other DNA

SEQ ID NO: 54143 - DNA, 120 bp, synthetic construct; identical to SEQ ID NO: 24189
  source 1..120: mol_type = other DNA

SEQ ID NO: 54144 - DNA, 120 bp, synthetic construct; identical to SEQ ID NO: 24190
  source 1..120: mol_type = other DNA

SEQ ID NO: 54145 - DNA, 120 bp, synthetic construct; identical to SEQ ID NO: 7493
  source 1..120: mol_type = other DNA

SEQ ID NO: 54146 - DNA, 120 bp, synthetic construct; identical to SEQ ID NO: 24192
  source 1..120: mol_type = other DNA

SEQ ID NO: 54147 - DNA, 120 bp, synthetic construct; identical to SEQ ID NO: 24193
  source 1..120: mol_type = other DNA

SEQ ID NO: 54148 - DNA, 120 bp, synthetic construct; identical to SEQ ID NO: 24194
  source 1..120: mol_type = other DNA

SEQ ID NO: 54149 - DNA, 120 bp, synthetic construct; identical to SEQ ID NO: 7494
  source 1..120: mol_type = other DNA

SEQ ID NO: 54150 - DNA, 120 bp, synthetic construct; identical to SEQ ID NO: 24196
  source 1..120: mol_type = other DNA

SEQ ID NO: 54151 - DNA, 120 bp, synthetic construct; identical to SEQ ID NO: 24197
  source 1..120: mol_type = other DNA

SEQ ID NO: 54152 - DNA, 120 bp, synthetic construct; identical to SEQ ID NO: 24198
  source 1..120: mol_type = other DNA

SEQ ID NO: 54153 - DNA, 120 bp, synthetic construct; identical to SEQ ID NO: 7495
  source 1..120: mol_type = other DNA

SEQ ID NO: 54154 - DNA, 120 bp, synthetic construct; identical to SEQ ID NO: 24200
  source 1..120: mol_type = other DNA

SEQ ID NO: 54155 - DNA, 120 bp, synthetic construct; identical to SEQ ID NO: 24201
  source 1..120: mol_type = other DNA

SEQ ID NO: 54156 - DNA, 120 bp, synthetic construct; identical to SEQ ID NO: 24202
  source 1..120: mol_type = other DNA

SEQ ID NO: 54157 - DNA, 120 bp, synthetic construct; identical to SEQ ID NO: 7496
  source 1..120: mol_type = other DNA

SEQ ID NO: 54158 - DNA, 120 bp, synthetic construct; identical to SEQ ID NO: 24204
  source 1..120: mol_type = other DNA

SEQ ID NO: 54159 - DNA, 120 bp, synthetic construct; identical to SEQ ID NO: 24205
  source 1..120: mol_type = other DNA

SEQ ID NO: 54160 - DNA, 120 bp, synthetic construct; identical to SEQ ID NO: 24206
  source 1..120: mol_type = other DNA

SEQ ID NO: 54161 - DNA, 120 bp, synthetic construct; identical to SEQ ID NO: 7497
  source 1..120: mol_type = other DNA

SEQ ID NO: 54162 - DNA, 120 bp, synthetic construct; identical to SEQ ID NO: 24208
  source 1..120: mol_type = other DNA

SEQ ID NO: 54163 - DNA, 120 bp, synthetic construct; identical to SEQ ID NO: 24209
  source 1..120: mol_type = other DNA

SEQ ID NO: 54164 - DNA, 120 bp, synthetic construct; identical to SEQ ID NO: 24210
  source 1..120: mol_type = other DNA

SEQ ID NO: 54165 - DNA, 120 bp, synthetic construct; identical to SEQ ID NO: 24211
  source 1..120: mol_type = other DNA

SEQ ID NO: 54166 - DNA, 120 bp, synthetic construct; identical to SEQ ID NO: 7498
  source 1..120: mol_type = other DNA

SEQ ID NO: 54167 - DNA, 120 bp, synthetic construct; identical to SEQ ID NO: 24213
  source 1..120: mol_type = other DNA

SEQ ID NO: 54168 - DNA, 120 bp, synthetic construct; identical to SEQ ID NO: 24214
  source 1..120: mol_type = other DNA

SEQ ID NO: 54169 - DNA, 120 bp, synthetic construct; identical to SEQ ID NO: 7499
  source 1..120: mol_type = other DNA

SEQ ID NO: 54170 - DNA, 120 bp, synthetic construct; identical to SEQ ID NO: 24216
  source 1..120: mol_type = other DNA

SEQ ID NO: 54171 - DNA, 120 bp, synthetic construct; identical to SEQ ID NO: 24217
  source 1..120: mol_type = other DNA

SEQ ID NO: 54172 - DNA, 120 bp, synthetic construct; identical to SEQ ID NO: 24218
  source 1..120: mol_type = other DNA

SEQ ID NO: 54173 - DNA, 120 bp, synthetic construct; identical to SEQ ID NO: 24219
  source 1..120: mol_type = other DNA

SEQ ID NO: 54174 - DNA, 120 bp, synthetic construct; identical to SEQ ID NO: 7500
  source 1..120: mol_type = other DNA

SEQ ID NO: 54175 - DNA, 120 bp, synthetic construct; identical to SEQ ID NO: 24221
  source 1..120: mol_type = other DNA

SEQ ID NO: 54176 - DNA, 120 bp, synthetic construct; identical to SEQ ID NO: 24222
  source 1..120: mol_type = other DNA

SEQ ID NO: 54177 - DNA, 120 bp, synthetic construct; identical to SEQ ID NO: 24223
  source 1..120: mol_type = other DNA

SEQ ID NO: 54178 - DNA, 120 bp, synthetic construct; identical to SEQ ID NO: 7501
  source 1..120: mol_type = other DNA

SEQ ID NO: 54179 - DNA, 120 bp, synthetic construct; identical to SEQ ID NO: 24225
  source 1..120: mol_type = other DNA

SEQ ID NO: 54180 - DNA, 120 bp, synthetic construct; identical to SEQ ID NO: 24226
  source 1..120: mol_type = other DNA

SEQ ID NO: 54181 - DNA, 120 bp, synthetic construct; identical to SEQ ID NO: 24227
  source 1..120: mol_type = other DNA

SEQ ID NO: 54182 - DNA, 120 bp, synthetic construct; identical to SEQ ID NO: 7502
  source 1..120: mol_type = other DNA

SEQ ID NO: 54183 - DNA, 120 bp, synthetic construct; identical to SEQ ID NO: 24229
  source 1..120: mol_type = other DNA

SEQ ID NO: 54184 - DNA, 120 bp, synthetic construct; identical to SEQ ID NO: 24230
  source 1..120: mol_type = other DNA

SEQ ID NO: 54185 - DNA, 120 bp, synthetic construct; identical to SEQ ID NO: 7503
  source 1..120: mol_type = other DNA

SEQ ID NO: 54186 - DNA, 120 bp, synthetic construct; identical to SEQ ID NO: 24232
  source 1..120: mol_type = other DNA

SEQ ID NO: 54187 - DNA, 120 bp, synthetic construct; identical to SEQ ID NO: 24233
  source 1..120: mol_type = other DNA

SEQ ID NO: 54188 - DNA, 120 bp, synthetic construct; identical to SEQ ID NO: 24234
  source 1..120: mol_type = other DNA

SEQ ID NO: 54189 - DNA, 120 bp, synthetic construct; identical to SEQ ID NO: 7504
  source 1..120: mol_type = other DNA

SEQ ID NO: 54190 - DNA, 120 bp, synthetic construct; identical to SEQ ID NO: 24236
  source 1..120: mol_type = other DNA

SEQ ID NO: 54191 - DNA, 120 bp, synthetic construct; identical to SEQ ID NO: 24237
  source 1..120: mol_type = other DNA

SEQ ID NO: 54192 - DNA, 120 bp, synthetic construct; identical to SEQ ID NO: 24238
  source 1..120: mol_type = other DNA

SEQ ID NO: 54193 - DNA, 120 bp, synthetic construct; identical to SEQ ID NO: 7505
  source 1..120: mol_type = other DNA

SEQ ID NO: 54194 - DNA, 120 bp, synthetic construct; identical to SEQ ID NO: 24240
  source 1..120: mol_type = other DNA

SEQ ID NO: 54195 - DNA, 120 bp, synthetic construct; identical to SEQ ID NO: 24241
  source 1..120: mol_type = other DNA

SEQ ID NO: 54196 - DNA, 120 bp, synthetic construct; identical to SEQ ID NO: 24242
  source 1..120: mol_type = other DNA

SEQ ID NO: 54197 - DNA, 120 bp, synthetic construct; identical to SEQ ID NO: 24243
  source 1..120: mol_type = other DNA

SEQ ID NO: 54198 - DNA, 120 bp, synthetic construct; identical to SEQ ID NO: 7506
  source 1..120: mol_type = other DNA

SEQ ID NO: 54199 - DNA, 120 bp, synthetic construct; identical to SEQ ID NO: 24245
  source 1..120: mol_type = other DNA

SEQ ID NO: 54200 - DNA, 120 bp, synthetic construct; identical to SEQ ID NO: 24246
  source 1..120: mol_type = other DNA

SEQ ID NO: 54201 - DNA, 120 bp, synthetic construct; identical to SEQ ID NO: 7507
  source 1..120: mol_type = other DNA

SEQ ID NO: 54202 - DNA, 120 bp, synthetic construct; identical to SEQ ID NO: 24248
  source 1..120: mol_type = other DNA

SEQ ID NO: 54203 - DNA, 120 bp, synthetic construct; identical to SEQ ID NO: 24249
  source 1..120: mol_type = other DNA

SEQ ID NO: 54204 - DNA, 120 bp, synthetic construct; identical to SEQ ID NO: 24250
  source 1..120: mol_type = other DNA

SEQ ID NO: 54205 - DNA, 120 bp, synthetic construct; identical to SEQ ID NO: 7508
  source 1..120: mol_type = other DNA

SEQ ID NO: 54206 - DNA, 120 bp, synthetic construct; identical to SEQ ID NO: 24252
  source 1..120: mol_type = other DNA

SEQ ID NO: 54207 - DNA, 120 bp, synthetic construct; identical to SEQ ID NO: 24253
  source 1..120: mol_type = other DNA

SEQ ID NO: 54208 - DNA, 120 bp, synthetic construct; identical to SEQ ID NO: 24254
  source 1..120: mol_type = other DNA

SEQ ID NO: 54209 - DNA, 120 bp, synthetic construct; identical to SEQ ID NO: 7509
  source 1..120: mol_type = other DNA

SEQ ID NO: 54210 - DNA, 120 bp, synthetic construct; identical to SEQ ID NO: 24256
  source 1..120: mol_type = other DNA

SEQ ID NO: 54211 - DNA, 120 bp, synthetic construct; identical to SEQ ID NO: 24257
  source 1..120: mol_type = other DNA

SEQ ID NO: 54212 - DNA, 120 bp, synthetic construct; identical to SEQ ID NO: 24258
  source 1..120: mol_type = other DNA

SEQ ID NO: 54213 - DNA, 120 bp, synthetic construct; identical to SEQ ID NO: 24259
  source 1..120: mol_type = other DNA

SEQ ID NO: 54214 - DNA, 120 bp, synthetic construct; identical to SEQ ID NO: 7510
  source 1..120: mol_type = other DNA

SEQ ID NO: 54215 - DNA, 120 bp, synthetic construct; identical to SEQ ID NO: 24261
  source 1..120: mol_type = other DNA

SEQ ID NO: 54216 - DNA, 120 bp, synthetic construct; identical to SEQ ID NO: 24262
  source 1..120: mol_type = other DNA

SEQ ID NO: 54217 - DNA, 120 bp, synthetic construct; identical to SEQ ID NO: 7511
  source 1..120: mol_type = other DNA

SEQ ID NO: 54218 - DNA, 120 bp, synthetic construct; identical to SEQ ID NO: 24264
  source 1..120: mol_type = other DNA

SEQ ID NO: 54219 - DNA, 120 bp, synthetic construct; identical to SEQ ID NO: 24265
  source 1..120: mol_type = other DNA

SEQ ID NO: 54220 - DNA, 120 bp, synthetic construct; identical to SEQ ID NO: 24266
  source 1..120: mol_type = other DNA

SEQ ID NO: 54221 - DNA, 120 bp, synthetic construct; identical to SEQ ID NO: 24267
  source 1..120: mol_type = other DNA

SEQ ID NO: 54222 - DNA, 120 bp, synthetic construct; identical to SEQ ID NO: 7512
  source 1..120: mol_type = other DNA

SEQ ID NO: 54223 - DNA, 120 bp, synthetic construct; identical to SEQ ID NO: 535
  source 1..120: mol_type = other DNA

SEQ ID NO: 54224 - DNA, 120 bp, synthetic construct; identical to SEQ ID NO: 24270
  source 1..120: mol_type = other DNA

SEQ ID NO: 54225 - DNA, 120 bp, synthetic construct; identical to SEQ ID NO: 7513
  source 1..120: mol_type = other DNA

SEQ ID NO: 54226 - DNA, 120 bp, synthetic construct; identical to SEQ ID NO: 24272
  source 1..120: mol_type = other DNA

SEQ ID NO: 54227 - DNA, 120 bp, synthetic construct; identical to SEQ ID NO: 24273
  source 1..120: mol_type = other DNA

SEQ ID NO: 54228 - DNA, 120 bp, synthetic construct; identical to SEQ ID NO: 24274
  source 1..120: mol_type = other DNA

SEQ ID NO: 54229 - DNA, 120 bp, synthetic construct; identical to SEQ ID NO: 24275
  source 1..120: mol_type = other DNA

SEQ ID NO: 54230 - DNA, 120 bp, synthetic construct; identical to SEQ ID NO: 7514
  source 1..120: mol_type = other DNA

SEQ ID NO: 54231 - DNA, 120 bp, synthetic construct; identical to SEQ ID NO: 24277
  source 1..120: mol_type = other DNA

SEQ ID NO: 54232 - DNA, 120 bp, synthetic construct; identical to SEQ ID NO: 24278
  source 1..120: mol_type = other DNA

SEQ ID NO: 54233 - DNA, 120 bp, synthetic construct; identical to SEQ ID NO: 24279
  source 1..120: mol_type = other DNA

SEQ ID NO: 54234 - DNA, 120 bp, synthetic construct; identical to SEQ ID NO: 7515
  source 1..120: mol_type = other DNA

SEQ ID NO: 54235 - DNA, 120 bp, synthetic construct; identical to SEQ ID NO: 24281
  source 1..120: mol_type = other DNA

SEQ ID NO: 54236 - DNA, 120 bp, synthetic construct; identical to SEQ ID NO: 24282
  source 1..120: mol_type = other DNA

SEQ ID NO: 54237 - DNA, 120 bp, synthetic construct; identical to SEQ ID NO: 7516
  source 1..120: mol_type = other DNA

SEQ ID NO: 54238 - DNA, 120 bp, synthetic construct; identical to SEQ ID NO: 539
  source 1..120: mol_type = other DNA

SEQ ID NO: 54239 - DNA, 120 bp, synthetic construct; identical to SEQ ID NO: 24285
  source 1..120: mol_type = other DNA

SEQ ID NO: 54240 - DNA, 120 bp, synthetic construct; identical to SEQ ID NO: 24286
  source 1..120: mol_type = other DNA

SEQ ID NO: 54241 - DNA, 120 bp, synthetic construct; identical to SEQ ID NO: 7517
  source 1..120: mol_type = other DNA

SEQ ID NO: 54242 - DNA, 120 bp, synthetic construct; identical to SEQ ID NO: 24288
  source 1..120: mol_type = other DNA

SEQ ID NO: 54243 - DNA, 120 bp, synthetic construct; identical to SEQ ID NO: 24289
  source 1..120: mol_type = other DNA

SEQ ID NO: 54244 - DNA, 120 bp, synthetic construct; identical to SEQ ID NO: 24290
  source 1..120: mol_type = other DNA

SEQ ID NO: 54245 - DNA, 120 bp, synthetic construct; identical to SEQ ID NO: 7518
  source 1..120: mol_type = other DNA

SEQ ID NO: 54246 - DNA, 120 bp, synthetic construct; identical to SEQ ID NO: 24292
  source 1..120: mol_type = other DNA

SEQ ID NO: 54247 - DNA, 120 bp, synthetic construct; identical to SEQ ID NO: 24293
  source 1..120: mol_type = other DNA

SEQ ID NO: 54248 - DNA, 120 bp, synthetic construct; identical to SEQ ID NO: 7519
  source 1..120: mol_type = other DNA

SEQ ID NO: 54249 - DNA, 120 bp, synthetic construct; identical to SEQ ID NO: 24295
  source 1..120: mol_type = other DNA

SEQ ID NO: 54250 - DNA, 120 bp, synthetic construct; identical to SEQ ID NO: 24296
  source 1..120: mol_type = other DNA

SEQ ID NO: 54251 - DNA, 120 bp, synthetic construct; identical to SEQ ID NO: 24297
  source 1..120: mol_type = other DNA

SEQ ID NO: 54252 - DNA, 120 bp, synthetic construct; identical to SEQ ID NO: 24298
  source 1..120: mol_type = other DNA

SEQ ID NO: 54253 - DNA, 120 bp, synthetic construct; identical to SEQ ID NO: 7520
  source 1..120: mol_type = other DNA

SEQ ID NO: 54254 - DNA, 120 bp, synthetic construct; identical to SEQ ID NO: 24300
  source 1..120: mol_type = other DNA

SEQ ID NO: 54255 - DNA, 120 bp, synthetic construct; identical to SEQ ID NO: 24301
  source 1..120: mol_type = other DNA

SEQ ID NO: 54256 - DNA, 120 bp, synthetic construct; identical to SEQ ID NO: 7521
  source 1..120: mol_type = other DNA

SEQ ID NO: 54257 - DNA, 120 bp, synthetic construct; identical to SEQ ID NO: 24303
  source 1..120: mol_type = other DNA

SEQ ID NO: 54258 - DNA, 120 bp, synthetic construct; identical to SEQ ID NO: 24304
  source 1..120: mol_type = other DNA

SEQ ID NO: 54259 - DNA, 120 bp, synthetic construct; identical to SEQ ID NO: 24305
  source 1..120: mol_type = other DNA

SEQ ID NO: 54260 - DNA, 120 bp, synthetic construct; identical to SEQ ID NO: 7522
  source 1..120: mol_type = other DNA

SEQ ID NO: 54261 - DNA, 120 bp, synthetic construct; identical to SEQ ID NO: 24307
  source 1..120: mol_type = other DNA

SEQ ID NO: 54262 - DNA, 120 bp, synthetic construct; identical to SEQ ID NO: 24308
  source 1..120: mol_type = other DNA

SEQ ID NO: 54263 - DNA, 120 bp, synthetic construct; identical to SEQ ID NO: 24309
  source 1..120: mol_type = other DNA

SEQ ID NO: 54264 - DNA, 120 bp, synthetic construct; identical to SEQ ID NO: 7523
  source 1..120: mol_type = other DNA

SEQ ID NO: 54265 - DNA, 120 bp, synthetic construct; identical to SEQ ID NO: 24311
  source 1..120: mol_type = other DNA

SEQ ID NO: 54266 - DNA, 120 bp, synthetic construct; identical to SEQ ID NO: 24312
  source 1..120: mol_type = other DNA

SEQ ID NO: 54267 - DNA, 120 bp, synthetic construct; identical to SEQ ID NO: 24313
  source 1..120: mol_type = other DNA

SEQ ID NO: 54268 - DNA, 120 bp, synthetic construct; identical to SEQ ID NO: 24314
  source 1..120: mol_type = other DNA

SEQ ID NO: 54269 - DNA, 120 bp, synthetic construct; identical to SEQ ID NO: 7524
  source 1..120: mol_type = other DNA

SEQ ID NO: 54270 - DNA, 120 bp, synthetic construct; identical to SEQ ID NO: 24316
  source 1..120: mol_type = other DNA

SEQ ID NO: 54271 - DNA, 120 bp, synthetic construct; identical to SEQ ID NO: 24317
  source 1..120: mol_type = other DNA

SEQ ID NO: 54272 - DNA, 120 bp, synthetic construct; identical to SEQ ID NO: 7525
  source 1..120: mol_type = other DNA

SEQ ID NO: 54273 - DNA, 120 bp, synthetic construct; identical to SEQ ID NO: 24319
  source 1..120: mol_type = other DNA

SEQ ID NO: 54274 - DNA, 120 bp, synthetic construct; identical to SEQ ID NO: 24320
  source 1..120: mol_type = other DNA

SEQ ID NO: 54275 - DNA, 120 bp, synthetic construct; identical to SEQ ID NO: 24321
  source 1..120: mol_type = other DNA

SEQ ID NO: 54276 - DNA, 120 bp, synthetic construct; identical to SEQ ID NO: 7526
  source 1..120: mol_type = other DNA

SEQ ID NO: 54277 - DNA, 120 bp, synthetic construct; identical to SEQ ID NO: 24323
  source 1..120: mol_type = other DNA

SEQ ID NO: 54278 - DNA, 120 bp, synthetic construct; identical to SEQ ID NO: 24324
  source 1..120: mol_type = other DNA

SEQ ID NO: 54279 - DNA, 120 bp, synthetic construct; identical to SEQ ID NO: 24325
  source 1..120: mol_type = other DNA

SEQ ID NO: 54280 - DNA, 120 bp, synthetic construct; identical to SEQ ID NO: 24326
  source 1..120: mol_type = other DNA

SEQ ID NO: 54281 - DNA, 120 bp, synthetic construct; identical to SEQ ID NO: 7527
  source 1..120: mol_type = other DNA

SEQ ID NO: 54282 - DNA, 120 bp, synthetic construct; identical to SEQ ID NO: 24328
  source 1..120: mol_type = other DNA

SEQ ID NO: 54283 - DNA, 120 bp, synthetic construct; identical to SEQ ID NO: 24329
  source 1..120: mol_type = other DNA

SEQ ID NO: 54284 - DNA, 120 bp, synthetic construct; identical to SEQ ID NO: 7528
  source 1..120: mol_type = other DNA

SEQ ID NO: 54285 - DNA, 120 bp, synthetic construct; identical to SEQ ID NO: 7529
  source 1..120: mol_type = other DNA

SEQ ID NO: 54286 - DNA, 120 bp, synthetic construct; identical to SEQ ID NO: 550
  source 1..120: mol_type = other DNA

SEQ ID NO: 54287 - DNA, 120 bp, synthetic construct; identical to SEQ ID NO: 24333
  source 1..120: mol_type = other DNA

SEQ ID NO: 54288 - DNA, 120 bp, synthetic construct; identical to SEQ ID NO: 24334
  source 1..120: mol_type = other DNA

SEQ ID NO: 54289 - DNA, 120 bp, synthetic construct; identical to SEQ ID NO: 7530
  source 1..120: mol_type = other DNA

SEQ ID NO: 54290 - DNA, 120 bp, synthetic construct; identical to SEQ ID NO: 7531
  source 1..120: mol_type = other DNA

SEQ ID NO: 54291 - DNA, 120 bp, synthetic construct; identical to SEQ ID NO: 24337
  source 1..120: mol_type = other DNA

SEQ ID NO: 54292 - DNA, 120 bp, synthetic construct; identical to SEQ ID NO: 24338
  source 1..120: mol_type = other DNA

SEQ ID NO: 54293 - DNA, 120 bp, synthetic construct; identical to SEQ ID NO: 24339
  source 1..120: mol_type = other DNA

SEQ ID NO: 54294 - DNA, 120 bp, synthetic construct; identical to SEQ ID NO: 24340
  source 1..120: mol_type = other DNA

SEQ ID NO: 54295 - DNA, 120 bp, synthetic construct; identical to SEQ ID NO: 7532
  source 1..120: mol_type = other DNA

SEQ ID NO: 54296 - DNA, 120 bp, synthetic construct; identical to SEQ ID NO: 24342
  source 1..120: mol_type = other DNA

SEQ ID NO: 54297 - DNA, 120 bp, synthetic construct; identical to SEQ ID NO: 24343
  source 1..120: mol_type = other DNA

SEQ ID NO: 54298 - DNA, 120 bp, synthetic construct; identical to SEQ ID NO: 7533
  source 1..120: mol_type = other DNA

SEQ ID NO: 54299 - DNA, 120 bp, synthetic construct; identical to SEQ ID NO: 24345
  source 1..120: mol_type = other DNA

SEQ ID NO: 54300 - DNA, 120 bp, synthetic construct; identical to SEQ ID NO: 24346
  source 1..120: mol_type = other DNA

SEQ ID NO: 54301 - DNA, 120 bp, synthetic construct; identical to SEQ ID NO: 24347
  source 1..120: mol_type = other DNA

SEQ ID NO: 54302 - DNA, 120 bp, synthetic construct; identical to SEQ ID NO: 7534
  source 1..120: mol_type = other DNA

SEQ ID NO: 54303 - DNA, 120 bp, synthetic construct; identical to SEQ ID NO: 24349
  source 1..120: mol_type = other DNA

SEQ ID NO: 54304 - DNA, 120 bp, synthetic construct; identical to SEQ ID NO: 24350
  source 1..120: mol_type = other DNA

SEQ ID NO: 54305 - DNA, 120 bp, synthetic construct; identical to SEQ ID NO: 24351
  source 1..120: mol_type = other DNA

SEQ ID NO: 54306 - DNA, 120 bp, synthetic construct; identical to SEQ ID NO: 7535
  source 1..120: mol_type = other DNA

SEQ ID NO: 54307 - DNA, 120 bp, synthetic construct; identical to SEQ ID NO: 24353
  source 1..120: mol_type = other DNA

SEQ ID NO: 54308 - DNA, 120 bp, synthetic construct; identical to SEQ ID NO: 24354
  source 1..120: mol_type = other DNA

SEQ ID NO: 54309 - DNA, 120 bp, synthetic construct; identical to SEQ ID NO: 24355
  source 1..120: mol_type = other DNA

SEQ ID NO: 54310 - DNA, 120 bp, synthetic construct; identical to SEQ ID NO: 24356
  source 1..120: mol_type = other DNA

SEQ ID NO: 54311 - DNA, 120 bp, synthetic construct; identical to SEQ ID NO: 7536
  source 1..120: mol_type = other DNA

SEQ ID NO: 54312 - DNA, 120 bp, synthetic construct; identical to SEQ ID NO: 24358
  source 1..120: mol_type = other DNA

SEQ ID NO: 54313 - DNA, 120 bp, synthetic construct; identical to SEQ ID NO: 24359
  source 1..120: mol_type = other DNA

SEQ ID NO: 54314 - DNA, 120 bp, synthetic construct; identical to SEQ ID NO: 7537
  source 1..120: mol_type = other DNA

SEQ ID NO: 54315 - DNA, 120 bp, synthetic construct; identical to SEQ ID NO: 24361
  source 1..120: mol_type = other DNA

SEQ ID NO: 54316 - DNA, 120 bp, synthetic construct; identical to SEQ ID NO: 24362
  source 1..120: mol_type = other DNA

SEQ ID NO: 54317 - DNA, 120 bp, synthetic construct; identical to SEQ ID NO: 24363
  source 1..120: mol_type = other DNA

SEQ ID NO: 54318 - DNA, 120 bp, synthetic construct; identical to SEQ ID NO: 24364
  source 1..120: mol_type = other DNA

SEQ ID NO: 54319 - DNA, 120 bp, synthetic construct; identical to SEQ ID NO: 7538
  source 1..120: mol_type = other DNA

SEQ ID NO: 54320 - DNA, 120 bp, synthetic construct; identical to SEQ ID NO: 24366
  source 1..120: mol_type = other DNA

SEQ ID NO: 54321 - DNA, 120 bp, synthetic construct; identical to SEQ ID NO: 24367
  source 1..120: mol_type = other DNA

SEQ ID NO: 54322 - DNA, 120 bp, synthetic construct; identical to SEQ ID NO: 7539
  source 1..120: mol_type = other DNA

SEQ ID NO: 54323 - DNA, 120 bp, synthetic construct; identical to SEQ ID NO: 24369
  source 1..120: mol_type = other DNA

SEQ ID NO: 54324 - DNA, 120 bp, synthetic construct; identical to SEQ ID NO: 24370
  source 1..120: mol_type = other DNA

SEQ ID NO: 54325 - DNA, 120 bp, synthetic construct; identical to SEQ ID NO: 24371
  source 1..120: mol_type = other DNA

SEQ ID NO: 54326 - DNA, 120 bp, synthetic construct; identical to SEQ ID NO: 7540
  source 1..120: mol_type = other DNA

SEQ ID NO: 54327 - DNA, 120 bp, synthetic construct; identical to SEQ ID NO: 24373
  source 1..120: mol_type = other DNA

SEQ ID NO: 54328 - DNA, 120 bp, synthetic construct; identical to SEQ ID NO: 24374
  source 1..120: mol_type = other DNA

SEQ ID NO: 54329 - DNA, 120 bp, synthetic construct; identical to SEQ ID NO: 24375
  source 1..120: mol_type = other DNA

SEQ ID NO: 54330 - DNA, 120 bp, synthetic construct; identical to SEQ ID NO: 24376
  source 1..120: mol_type = other DNA

SEQ ID NO: 54331 - DNA, 120 bp, synthetic construct; identical to SEQ ID NO: 7541
  source 1..120: mol_type = other DNA

SEQ ID NO: 54332 - DNA, 120 bp, synthetic construct; identical to SEQ ID NO: 24378
  source 1..120: mol_type = other DNA

SEQ ID NO: 54333 - DNA, 120 bp, synthetic construct; identical to SEQ ID NO: 24379
  source 1..120: mol_type = other DNA

SEQ ID NO: 54334 - DNA, 120 bp, synthetic construct; identical to SEQ ID NO: 7542
  source 1..120: mol_type = other DNA

SEQ ID NO: 54335 - DNA, 120 bp, synthetic construct; identical to SEQ ID NO: 24381
  source 1..120: mol_type = other DNA

SEQ ID NO: 54336 - DNA, 120 bp, synthetic construct; identical to SEQ ID NO: 24382
  source 1..120: mol_type = other DNA

SEQ ID NO: 54337 - DNA, 120 bp, synthetic construct; identical to SEQ ID NO: 24383
  source 1..120: mol_type = other DNA

SEQ ID NO: 54338 - DNA, 120 bp, synthetic construct; identical to SEQ ID NO: 24384
  source 1..120: mol_type = other DNA

SEQ ID NO: 54339 - DNA, 120 bp, synthetic construct; identical to SEQ ID NO: 7543
  source 1..120: mol_type = other DNA

SEQ ID NO: 54340 - DNA, 120 bp, synthetic construct; identical to SEQ ID NO: 24386
  source 1..120: mol_type = other DNA

SEQ ID NO: 54341 - DNA, 120 bp, synthetic construct; identical to SEQ ID NO: 24387
  source 1..120: mol_type = other DNA

SEQ ID NO: 54342 - DNA, 120 bp, synthetic construct; identical to SEQ ID NO: 7544
  source 1..120: mol_type = other DNA

SEQ ID NO: 54343 - DNA, 120 bp, synthetic construct; identical to SEQ ID NO: 24389
  source 1..120: mol_type = other DNA

SEQ ID NO: 54344 - DNA, 120 bp, synthetic construct; identical to SEQ ID NO: 24390
  source 1..120: mol_type = other DNA

SEQ ID NO: 54345 - DNA, 120 bp, synthetic construct; identical to SEQ ID NO: 24391
  source 1..120: mol_type = other DNA

SEQ ID NO: 54346 - DNA, 120 bp, synthetic construct; identical to SEQ ID NO: 7545
  source 1..120: mol_type = other DNA

SEQ ID NO: 54347 - DNA, 120 bp, synthetic construct; identical to SEQ ID NO: 24393
  source 1..120: mol_type = other DNA

SEQ ID NO: 54348 - DNA, 120 bp, synthetic construct; identical to SEQ ID NO: 24394
  source 1..120: mol_type = other DNA

SEQ ID NO: 54349 - DNA, 120 bp, synthetic construct; identical to SEQ ID NO: 24395
  source 1..120: mol_type = other DNA

SEQ ID NO: 54350 - DNA, 120 bp, synthetic construct; identical to SEQ ID NO: 24396
  source 1..120: mol_type = other DNA

SEQ ID NO: 54351 - DNA, 120 bp, synthetic construct; identical to SEQ ID NO: 7546
  source 1..120: mol_type = other DNA

SEQ ID NO: 54352 - DNA, 120 bp, synthetic construct; identical to SEQ ID NO: 24398
  source 1..120: mol_type = other DNA

SEQ ID NO: 54353 - DNA, 120 bp, synthetic construct; identical to SEQ ID NO: 24399
  source 1..120: mol_type = other DNA

SEQ ID NO: 54354 - DNA, 120 bp, synthetic construct; identical to SEQ ID NO: 24400
  source 1..120: mol_type = other DNA

SEQ ID NO: 54355 - DNA, 120 bp, synthetic construct; identical to SEQ ID NO: 7547
  source 1..120: mol_type = other DNA

SEQ ID NO: 54356 - DNA, 120 bp, synthetic construct; identical to SEQ ID NO: 24402
  source 1..120: mol_type = other DNA

SEQ ID NO: 54357 - DNA, 120 bp, synthetic construct; identical to SEQ ID NO: 24403
  source 1..120: mol_type = other DNA

SEQ ID NO: 54358 - DNA, 120 bp, synthetic construct; identical to SEQ ID NO: 24404
  source 1..120: mol_type = other DNA

SEQ ID NO: 54359 - DNA, 120 bp, synthetic construct; identical to SEQ ID NO: 7548
  source 1..120: mol_type = other DNA

SEQ ID NO: 54360 - DNA, 120 bp, synthetic construct; identical to SEQ ID NO: 24406
  source 1..120: mol_type = other DNA

SEQ ID NO: 54361 - DNA, 120 bp, synthetic construct; identical to SEQ ID NO: 24407
  source 1..120: mol_type = other DNA

SEQ ID NO: 54362 - DNA, 120 bp, synthetic construct; identical to SEQ ID NO: 24408
  source 1..120: mol_type = other DNA

SEQ ID NO: 54363 - DNA, 120 bp, synthetic construct; identical to SEQ ID NO: 7549
  source 1..120: mol_type = other DNA

SEQ ID NO: 54364 - DNA, 120 bp, synthetic construct; identical to SEQ ID NO: 24410
  source 1..120: mol_type = other DNA

SEQ ID NO: 54365 - DNA, 120 bp, synthetic construct; identical to SEQ ID NO: 24411
  source 1..120: mol_type = other DNA

SEQ ID NO: 54366 - DNA, 120 bp, synthetic construct; identical to SEQ ID NO: 24412
  source 1..120: mol_type = other DNA

SEQ ID NO: 54367 - DNA, 120 bp, synthetic construct; identical to SEQ ID NO: 24413
  source 1..120: mol_type = other DNA

SEQ ID NO: 54368 - DNA, 120 bp, synthetic construct; identical to SEQ ID NO: 7550
  source 1..120: mol_type = other DNA

SEQ ID NO: 54369 - DNA, 120 bp, synthetic construct; identical to SEQ ID NO: 24415
  source 1..120: mol_type = other DNA

SEQ ID NO: 54370 - DNA, 120 bp, synthetic construct; identical to SEQ ID NO: 24416
  source 1..120: mol_type = other DNA

SEQ ID NO: 54371 - DNA, 120 bp, synthetic construct; identical to SEQ ID NO: 24417
  source 1..120: mol_type = other DNA

SEQ ID NO: 54372 - DNA, 120 bp, synthetic construct; identical to SEQ ID NO: 7551
  source 1..120: mol_type = other DNA

SEQ ID NO: 54373 - DNA, 120 bp, synthetic construct; identical to SEQ ID NO: 24419
  source 1..120: mol_type = other DNA

SEQ ID NO: 54374 - DNA, 120 bp, synthetic construct; identical to SEQ ID NO: 24420
  source 1..120: mol_type = other DNA

SEQ ID NO: 54375 - DNA, 120 bp, synthetic construct; identical to SEQ ID NO: 24421
  source 1..120: mol_type = other DNA

SEQ ID NO: 54376 - DNA, 120 bp, synthetic construct; identical to SEQ ID NO: 7552
  source 1..120: mol_type = other DNA

SEQ ID NO: 54377 - DNA, 120 bp, synthetic construct; identical to SEQ ID NO: 24423
  source 1..120: mol_type = other DNA

SEQ ID NO: 54378 - DNA, 120 bp, synthetic construct; identical to SEQ ID NO: 24424
  source 1..120: mol_type = other DNA

SEQ ID NO: 54379 - DNA, 120 bp, synthetic construct; identical to SEQ ID NO: 24425
  source 1..120: mol_type = other DNA

SEQ ID NO: 54380 - DNA, 120 bp, synthetic construct; identical to SEQ ID NO: 24426
  source 1..120: mol_type = other DNA

SEQ ID NO: 54381 - DNA, 120 bp, synthetic construct; identical to SEQ ID NO: 7553
  source 1..120: mol_type = other DNA

SEQ ID NO: 54382 - DNA, 120 bp, synthetic construct; identical to SEQ ID NO: 24428
  source 1..120: mol_type = other DNA

SEQ ID NO: 54383 - DNA, 120 bp, synthetic construct; identical to SEQ ID NO: 7554
  source 1..120: mol_type = other DNA

SEQ ID NO: 54384 - DNA, 120 bp, synthetic construct; identical to SEQ ID NO: 24430
  source 1..120: mol_type = other DNA

SEQ ID NO: 54385 - DNA, 120 bp, synthetic construct; identical to SEQ ID NO: 24431
  source 1..120: mol_type = other DNA

SEQ ID NO: 54386 - DNA, 120 bp, synthetic construct; identical to SEQ ID NO: 7555
  source 1..120: mol_type = other DNA

SEQ ID NO: 54387 - DNA, 120 bp, synthetic construct; identical to SEQ ID NO: 24433
  source 1..120: mol_type = other DNA

SEQ ID NO: 54388 - DNA, 120 bp, synthetic construct; identical to SEQ ID NO: 24434
  source 1..120: mol_type = other DNA

SEQ ID NO: 54389 - DNA, 120 bp, synthetic construct; identical to SEQ ID NO: 24435
  source 1..120: mol_type = other DNA

SEQ ID NO: 54390 - DNA, 120 bp, synthetic construct; identical to SEQ ID NO: 24436
  source 1..120: mol_type = other DNA

SEQ ID NO: 54391 - DNA, 120 bp, synthetic construct; identical to SEQ ID NO: 7556
  source 1..120: mol_type = other DNA

SEQ ID NO: 54392 - DNA, 120 bp, synthetic construct; identical to SEQ ID NO: 24438
  source 1..120: mol_type = other DNA

SEQ ID NO: 54393 - DNA, 120 bp, synthetic construct; identical to SEQ ID NO: 24439
  source 1..120: mol_type = other DNA

SEQ ID NO: 54394 - DNA, 120 bp, synthetic construct; identical to SEQ ID NO: 24440
  source 1..120: mol_type = other DNA

SEQ ID NO: 54395 - DNA, 120 bp, synthetic construct; identical to SEQ ID NO: 7557
  source 1..120: mol_type = other DNA

SEQ ID NO: 54396 - DNA, 120 bp, synthetic construct; identical to SEQ ID NO: 24442
  source 1..120: mol_type = other DNA

SEQ ID NO: 54397 - DNA, 120 bp, synthetic construct; identical to SEQ ID NO: 24443
  source 1..120: mol_type = other DNA

SEQ ID NO: 54398 - DNA, 120 bp, synthetic construct; identical to SEQ ID NO: 24444
  source 1..120: mol_type = other DNA

SEQ ID NO: 54399 - DNA, 120 bp, synthetic construct; identical to SEQ ID NO: 24445
  source 1..120: mol_type = other DNA

SEQ ID NO: 54400 - DNA, 120 bp, synthetic construct; identical to SEQ ID NO: 7558
  source 1..120: mol_type = other DNA

SEQ ID NO: 54401 - DNA, 120 bp, synthetic construct; identical to SEQ ID NO: 24447
  source 1..120: mol_type = other DNA

SEQ ID NO: 54402 - DNA, 120 bp, synthetic construct; identical to SEQ ID NO: 24448
  source 1..120: mol_type = other DNA

SEQ ID NO: 54403 - DNA, 120 bp, synthetic construct; identical to SEQ ID NO: 7559
  source 1..120: mol_type = other DNA

SEQ ID NO: 54404 - DNA, 120 bp, synthetic construct; identical to SEQ ID NO: 24450
  source 1..120: mol_type = other DNA

SEQ ID NO: 54405 - DNA, 120 bp, synthetic construct; identical to SEQ ID NO: 24451
  source 1..120: mol_type = other DNA

SEQ ID NO: 54406 - DNA, 120 bp, synthetic construct; identical to SEQ ID NO: 24452
  source 1..120: mol_type = other DNA

SEQ ID NO: 54407 - DNA, 120 bp, synthetic construct; identical to SEQ ID NO: 7560
  source 1..120: mol_type = other DNA

SEQ ID NO: 54408 - DNA, 120 bp, synthetic construct; identical to SEQ ID NO: 24454
  source 1..120: mol_type = other DNA

SEQ ID NO: 54409 - DNA, 120 bp, synthetic construct; identical to SEQ ID NO: 24455
  source 1..120: mol_type = other DNA

SEQ ID NO: 54410 - DNA, 120 bp, synthetic construct; identical to SEQ ID NO: 24456
  source 1..120: mol_type = other DNA

SEQ ID NO: 54411 - DNA, 120 bp, synthetic construct; identical to SEQ ID NO: 24457
  source 1..120: mol_type = other DNA

SEQ ID NO: 54412 - DNA, 120 bp, synthetic construct; identical to SEQ ID NO: 7561
  source 1..120: mol_type = other DNA

SEQ ID NO: 54413 - DNA, 120 bp, synthetic construct; identical to SEQ ID NO: 24459
  source 1..120: mol_type = other DNA

SEQ ID NO: 54414 - DNA, 120 bp, synthetic construct; identical to SEQ ID NO: 24460
  source 1..120: mol_type = other DNA

SEQ ID NO: 54415 - DNA, 120 bp, synthetic construct; identical to SEQ ID NO: 24461
  source 1..120: mol_type = other DNA

SEQ ID NO: 54416 - DNA, 120 bp, synthetic construct; identical to SEQ ID NO: 7562
  source 1..120: mol_type = other DNA

SEQ ID NO: 54417 - DNA, 120 bp, synthetic construct; identical to SEQ ID NO: 24463
  source 1..120: mol_type = other DNA

SEQ ID NO: 54418 - DNA, 120 bp, synthetic construct; identical to SEQ ID NO: 24464
  source 1..120: mol_type = other DNA

SEQ ID NO: 54419 - DNA, 120 bp, synthetic construct; identical to SEQ ID NO: 24465
  source 1..120: mol_type = other DNA

SEQ ID NO: 54420 - DNA, 120 bp, synthetic construct; identical to SEQ ID NO: 7563
  source 1..120: mol_type = other DNA

SEQ ID NO: 54421 - DNA, 120 bp, synthetic construct; identical to SEQ ID NO: 24467
  source 1..120: mol_type = other DNA

SEQ ID NO: 54422 - DNA, 120 bp, synthetic construct; identical to SEQ ID NO: 24468
  source 1..120: mol_type = other DNA

SEQ ID NO: 54423 - DNA, 120 bp, synthetic construct; identical to SEQ ID NO: 24469
  source 1..120: mol_type = other DNA

SEQ ID NO: 54424 - DNA, 120 bp, synthetic construct; identical to SEQ ID NO: 7564
  source 1..120: mol_type = other DNA

SEQ ID NO: 54425 - DNA, 120 bp, synthetic construct; identical to SEQ ID NO: 24471
  source 1..120: mol_type = other DNA

SEQ ID NO: 54426 - DNA, 120 bp, synthetic construct; identical to SEQ ID NO: 24472
  source 1..120: mol_type = other DNA

SEQ ID NO: 54427 - DNA, 120 bp, synthetic construct; identical to SEQ ID NO: 7565
  source 1..120: mol_type = other DNA

SEQ ID NO: 54428 - DNA, 120 bp, synthetic construct; identical to SEQ ID NO: 24474
  source 1..120: mol_type = other DNA

SEQ ID NO: 54429 - DNA, 120 bp, synthetic construct; identical to SEQ ID NO: 24475
  source 1..120: mol_type = other DNA

SEQ ID NO: 54430 - DNA, 120 bp, synthetic construct; identical to SEQ ID NO: 24476
  source 1..120: mol_type = other DNA

SEQ ID NO: 54431 - DNA, 120 bp, synthetic construct; identical to SEQ ID NO: 24477
  source 1..120: mol_type = other DNA

SEQ ID NO: 54432 - DNA, 120 bp, synthetic construct; identical to SEQ ID NO: 7566
  source 1..120: mol_type = other DNA

SEQ ID NO: 54433 - DNA, 120 bp, synthetic construct; identical to SEQ ID NO: 24479
  source 1..120: mol_type = other DNA

SEQ ID NO: 54434 - DNA, 120 bp, synthetic construct; identical to SEQ ID NO: 24480
  source 1..120: mol_type = other DNA

SEQ ID NO: 54435 - DNA, 120 bp, synthetic construct; identical to SEQ ID NO: 24481
  source 1..120: mol_type = other DNA

SEQ ID NO: 54436 - DNA, 120 bp, synthetic construct; identical to SEQ ID NO: 7567
  source 1..120: mol_type = other DNA

SEQ ID NO: 54437 - DNA, 120 bp, synthetic construct; identical to SEQ ID NO: 24483
  source 1..120: mol_type = other DNA

SEQ ID NO: 54438 - DNA, 120 bp, synthetic construct; identical to SEQ ID NO: 24484
  source 1..120: mol_type = other DNA

SEQ ID NO: 54439 - DNA, 120 bp, synthetic construct; identical to SEQ ID NO: 24485
  source 1..120: mol_type = other DNA

SEQ ID NO: 54440 - DNA, 120 bp, synthetic construct; identical to SEQ ID NO: 24486
  source 1..120: mol_type = other DNA

SEQ ID NO: 54441 - DNA, 120 bp, synthetic construct; identical to SEQ ID NO: 7568
  source 1..120: mol_type = other DNA

SEQ ID NO: 54442 - DNA, 120 bp, synthetic construct; identical to SEQ ID NO: 24488
  source 1..120: mol_type = other DNA

SEQ ID NO: 54443 - DNA, 120 bp, synthetic construct; identical to SEQ ID NO: 24489
  source 1..120: mol_type = other DNA

SEQ ID NO: 54444 - DNA, 120 bp, synthetic construct; identical to SEQ ID NO: 7569
  source 1..120: mol_type = other DNA

SEQ ID NO: 54445 - DNA, 120 bp, synthetic construct; identical to SEQ ID NO: 24491
  source 1..120: mol_type = other DNA

SEQ ID NO: 54446 - DNA, 120 bp, synthetic construct; identical to SEQ ID NO: 24492
  source 1..120: mol_type = other DNA

SEQ ID NO: 54447 - DNA, 120 bp, synthetic construct; identical to SEQ ID NO: 24493
  source 1..120: mol_type = other DNA

SEQ ID NO: 54448 - DNA, 120 bp, synthetic construct; identical to SEQ ID NO: 24494
  source 1..120: mol_type = other DNA

SEQ ID NO: 54449 - DNA, 120 bp, synthetic construct; identical to SEQ ID NO: 7570
  source 1..120: mol_type = other DNA

SEQ ID NO: 54450 - DNA, 120 bp, synthetic construct; identical to SEQ ID NO: 24496
  source 1..120: mol_type = other DNA

SEQ ID NO: 54451 - DNA, 120 bp, synthetic construct; identical to SEQ ID NO: 24497
  source 1..120: mol_type = other DNA

SEQ ID NO: 54452 - DNA, 120 bp, synthetic construct; identical to SEQ ID NO: 7571
  source 1..120: mol_type = other DNA

SEQ ID NO: 54453 - DNA, 120 bp, synthetic construct; identical to SEQ ID NO: 24499
  source 1..120: mol_type = other DNA

SEQ ID NO: 54454 - DNA, 120 bp, synthetic construct; identical to SEQ ID NO: 24500
  source 1..120: mol_type = other DNA

SEQ ID NO: 54455 - DNA, 120 bp, synthetic construct; identical to SEQ ID NO: 24501
  source 1..120: mol_type = other DNA

SEQ ID NO: 54456 - DNA, 120 bp, synthetic construct; identical to SEQ ID NO: 24502
  source 1..120: mol_type = other DNA

SEQ ID NO: 54457 - DNA, 120 bp, synthetic construct; identical to SEQ ID NO: 7572
  source 1..120: mol_type = other DNA

SEQ ID NO: 54458 - DNA, 120 bp, synthetic construct; identical to SEQ ID NO: 24504
  source 1..120: mol_type = other DNA

SEQ ID NO: 54459 - DNA, 120 bp, synthetic construct; identical to SEQ ID NO: 24505
  source 1..120: mol_type = other DNA

SEQ ID NO: 54460 - DNA, 120 bp, synthetic construct; identical to SEQ ID NO: 24506
  source 1..120: mol_type = other DNA

SEQ ID NO: 54461 - DNA, 120 bp, synthetic construct; identical to SEQ ID NO: 24507
  source 1..120: mol_type = other DNA

SEQ ID NO: 54462 - DNA, 120 bp, synthetic construct; identical to SEQ ID NO: 7573
  source 1..120: mol_type = other DNA

SEQ ID NO: 54463 - DNA, 120 bp, synthetic construct; identical to SEQ ID NO: 24509
  source 1..120: mol_type = other DNA

SEQ ID NO: 54464 - DNA, 120 bp, synthetic construct; identical to SEQ ID NO: 590
  source 1..120: mol_type = other DNA

SEQ ID NO: 54465 - DNA, 120 bp, synthetic construct; identical to SEQ ID NO: 24511
  source 1..120: mol_type = other DNA

SEQ ID NO: 54466 - DNA, 120 bp, synthetic construct; identical to SEQ ID NO: 24512
  source 1..120: mol_type = other DNA

SEQ ID NO: 54467 - DNA, 120 bp, synthetic construct; identical to SEQ ID NO: 24513
  source 1..120: mol_type = other DNA

SEQ ID NO: 54468 - DNA, 120 bp, synthetic construct; identical to SEQ ID NO: 24514
  source 1..120: mol_type = other DNA

SEQ ID NO: 54469 - DNA, 120 bp, synthetic construct; identical to SEQ ID NO: 7575
  source 1..120: mol_type = other DNA

SEQ ID NO: 54470 - DNA, 120 bp, synthetic construct; identical to SEQ ID NO: 24516
  source 1..120: mol_type = other DNA

SEQ ID NO: 54471 - DNA, 120 bp, synthetic construct; identical to SEQ ID NO: 24517
  source 1..120: mol_type = other DNA

SEQ ID NO: 54472 - DNA, 120 bp, synthetic construct; identical to SEQ ID NO: 24518
  source 1..120: mol_type = other DNA

SEQ ID NO: 54473 - DNA, 120 bp, synthetic construct; identical to SEQ ID NO: 24519
  source 1..120: mol_type = other DNA

SEQ ID NO: 54474 - DNA, 120 bp, synthetic construct; identical to SEQ ID NO: 24520
  source 1..120: mol_type = other DNA

SEQ ID NO: 54475 - DNA, 120 bp, synthetic construct; identical to SEQ ID NO: 7576
  source 1..120: mol_type = other DNA

SEQ ID NO: 54476 - DNA, 120 bp, synthetic construct; identical to SEQ ID NO: 24522
  source 1..120: mol_type = other DNA

SEQ ID NO: 54477 - DNA, 120 bp, synthetic construct; identical to SEQ ID NO: 24523
  source 1..120: mol_type = other DNA

SEQ ID NO: 54478 - DNA, 120 bp, synthetic construct; identical to SEQ ID NO: 24524
  source 1..120: mol_type = other DNA

SEQ ID NO: 54479 - DNA, 120 bp, synthetic construct; identical to SEQ ID NO: 7577
  source 1..120: mol_type = other DNA

SEQ ID NO: 54480 - DNA, 120 bp, synthetic construct; identical to SEQ ID NO: 24526
  source 1..120: mol_type = other DNA

SEQ ID NO: 54481 - DNA, 120 bp, synthetic construct; identical to SEQ ID NO: 24527
  source 1..120: mol_type = other DNA

SEQ ID NO: 54482 - DNA, 120 bp, synthetic construct; identical to SEQ ID NO: 7578
  source 1..120: mol_type = other DNA

SEQ ID NO: 54483 - DNA, 120 bp, synthetic construct; identical to SEQ ID NO: 24529
  source 1..120: mol_type = other DNA

SEQ ID NO: 54484 - DNA, 120 bp, synthetic construct; identical to SEQ ID NO: 24530
  source 1..120: mol_type = other DNA

SEQ ID NO: 54485 - DNA, 120 bp, synthetic construct; identical to SEQ ID NO: 24531
  source 1..120: mol_type = other DNA

SEQ ID NO: 54486 - DNA, 120 bp, synthetic construct; identical to SEQ ID NO: 24532
  source 1..120: mol_type = other DNA

SEQ ID NO: 54487 - DNA, 120 bp, synthetic construct; identical to SEQ ID NO: 7579
  source 1..120: mol_type = other DNA

SEQ ID NO: 54488 - DNA, 120 bp, synthetic construct; identical to SEQ ID NO: 24534
  source 1..120: mol_type = other DNA

SEQ ID NO: 54489 - DNA, 120 bp, synthetic construct; identical to SEQ ID NO: 24535
  source 1..120: mol_type = other DNA

SEQ ID NO: 54490 - DNA, 120 bp, synthetic construct; identical to SEQ ID NO: 24536
  source 1..120: mol_type = other DNA

SEQ ID NO: 54491 - DNA, 120 bp, synthetic construct; identical to SEQ ID NO: 7580
  source 1..120: mol_type = other DNA

SEQ ID NO: 54492 - DNA, 120 bp, synthetic construct; identical to SEQ ID NO: 24538
  source 1..120: mol_type = other DNA

SEQ ID NO: 54493 - DNA, 120 bp, synthetic construct; identical to SEQ ID NO: 24539
  source 1..120: mol_type = other DNA

SEQ ID NO: 54494 - DNA, 120 bp, synthetic construct; identical to SEQ ID NO: 7581
  source 1..120: mol_type = other DNA

SEQ ID NO: 54495 - DNA, 120 bp, synthetic construct; identical to SEQ ID NO: 24541
  source 1..120: mol_type = other DNA

SEQ ID NO: 54496 - DNA, 120 bp, synthetic construct; identical to SEQ ID NO: 24542
  source 1..120: mol_type = other DNA

SEQ ID NO: 54497 - DNA, 120 bp, synthetic construct; identical to SEQ ID NO: 24543
  source 1..120: mol_type = other DNA

SEQ ID NO: 54498 - DNA, 120 bp, synthetic construct; identical to SEQ ID NO: 24544
  source 1..120: mol_type = other DNA

SEQ ID NO: 54499 - DNA, 120 bp, synthetic construct; identical to SEQ ID NO: 7582
  source 1..120: mol_type = other DNA

SEQ ID NO: 54500 - DNA, 120 bp, synthetic construct; identical to SEQ ID NO: 24546
  source 1..120: mol_type = other DNA

SEQ ID NO: 54501 - DNA, 120 bp, synthetic construct; identical to SEQ ID NO: 24547
  source 1..120: mol_type = other DNA

SEQ ID NO: 54502 - DNA, 120 bp, synthetic construct; identical to SEQ ID NO: 24548
  source 1..120: mol_type = other DNA

SEQ ID NO: 54503 - DNA, 120 bp, synthetic construct; identical to SEQ ID NO: 7583
  source 1..120: mol_type = other DNA

SEQ ID NO: 54504 - DNA, 120 bp, synthetic construct; identical to SEQ ID NO: 24550
  source 1..120: mol_type = other DNA

SEQ ID NO: 54505 - DNA, 120 bp, synthetic construct; identical to SEQ ID NO: 24551
  source 1..120: mol_type = other DNA

SEQ ID NO: 54506 - DNA, 120 bp, synthetic construct; identical to SEQ ID NO: 24552
  source 1..120: mol_type = other DNA

SEQ ID NO: 54507 - DNA, 120 bp, synthetic construct; identical to SEQ ID NO: 7584
  source 1..120: mol_type = other DNA

SEQ ID NO: 54508 - DNA, 120 bp, synthetic construct; identical to SEQ ID NO: 24554
  source 1..120: mol_type = other DNA

SEQ ID NO: 54509 - DNA, 120 bp, synthetic construct; identical to SEQ ID NO: 24555
  source 1..120: mol_type = other DNA

SEQ ID NO: 54510 - DNA, 120 bp, synthetic construct; identical to SEQ ID NO: 7585
  source 1..120: mol_type = other DNA

SEQ ID NO: 54511 - DNA, 120 bp, synthetic construct; identical to SEQ ID NO: 24557
  source 1..120: mol_type = other DNA

SEQ ID NO: 54512 - DNA, 120 bp, synthetic construct; identical to SEQ ID NO: 24558
  source 1..120: mol_type = other DNA

SEQ ID NO: 54513 - DNA, 120 bp, synthetic construct; identical to SEQ ID NO: 24559
  source 1..120: mol_type = other DNA

SEQ ID NO: 54514 - DNA, 120 bp, synthetic construct; identical to SEQ ID NO: 24560
  source 1..120: mol_type = other DNA

SEQ ID NO: 54515 - DNA, 120 bp, synthetic construct; identical to SEQ ID NO: 7586
  source 1..120: mol_type = other DNA

SEQ ID NO: 54516 - DNA, 120 bp, synthetic construct; identical to SEQ ID NO: 24562
  source 1..120: mol_type = other DNA

SEQ ID NO: 54517 - DNA, 120 bp, synthetic construct; identical to SEQ ID NO: 24563
  source 1..120: mol_type = other DNA

SEQ ID NO: 54518 - DNA, 120 bp, synthetic construct; identical to SEQ ID NO: 7587
  source 1..120: mol_type = other DNA

SEQ ID NO: 54519 - DNA, 120 bp, synthetic construct; identical to SEQ ID NO: 24565
  source 1..120: mol_type = other DNA

SEQ ID NO: 54520 - DNA, 120 bp, synthetic construct; identical to SEQ ID NO: 24566
  source 1..120: mol_type = other DNA

SEQ ID NO: 54521 - DNA, 120 bp, synthetic construct; identical to SEQ ID NO: 24567
  source 1..120: mol_type = other DNA

SEQ ID NO: 54522 - DNA, 120 bp, synthetic construct; identical to SEQ ID NO: 7588
  source 1..120: mol_type = other DNA

SEQ ID NO: 54523 - DNA, 120 bp, synthetic construct; identical to SEQ ID NO: 24569
  source 1..120: mol_type = other DNA

SEQ ID NO: 54524 - DNA, 120 bp, synthetic construct; identical to SEQ ID NO: 24570
  source 1..120: mol_type = other DNA

SEQ ID NO: 54525 - DNA, 120 bp, synthetic construct; identical to SEQ ID NO: 24571
  source 1..120: mol_type = other DNA

SEQ ID NO: 54526 - DNA, 120 bp, synthetic construct; identical to SEQ ID NO: 24572
  source 1..120: mol_type = other DNA

SEQ ID NO: 54527 - DNA, 120 bp, synthetic construct; identical to SEQ ID NO: 7589
  source 1..120: mol_type = other DNA

SEQ ID NO: 54528 - DNA, 120 bp, synthetic construct; identical to SEQ ID NO: 24574
  source 1..120: mol_type = other DNA

SEQ ID NO: 54529 - DNA, 120 bp, synthetic construct; identical to SEQ ID NO: 24575
  source 1..120: mol_type = other DNA

SEQ ID NO: 54530 - DNA, 120 bp, synthetic construct; identical to SEQ ID NO: 7590
  source 1..120: mol_type = other DNA

SEQ ID NO: 54531 - DNA, 120 bp, synthetic construct; identical to SEQ ID NO: 24577
  source 1..120: mol_type = other DNA

SEQ ID NO: 54532 - DNA, 120 bp, synthetic construct; identical to SEQ ID NO: 24578
  source 1..120: mol_type = other DNA

SEQ ID NO: 54533 - DNA, 120 bp, synthetic construct; identical to SEQ ID NO: 24579
  source 1..120: mol_type = other DNA

SEQ ID NO: 54534 - DNA, 120 bp, synthetic construct; identical to SEQ ID NO: 24580
  source 1..120: mol_type = other DNA

SEQ ID NO: 54535 - DNA, 120 bp, synthetic construct; identical to SEQ ID NO: 7591
  source 1..120: mol_type = other DNA

SEQ ID NO: 54536 - DNA, 120 bp, synthetic construct; identical to SEQ ID NO: 24582
  source 1..120: mol_type = other DNA

SEQ ID NO: 54537 - DNA, 120 bp, synthetic construct; identical to SEQ ID NO: 24583
  source 1..120: mol_type = other DNA

SEQ ID NO: 54538 - DNA, 120 bp, synthetic construct; identical to SEQ ID NO: 7592
  source 1..120: mol_type = other DNA

SEQ ID NO: 54539 - DNA, 120 bp, synthetic construct; identical to SEQ ID NO: 24585
  source 1..120: mol_type = other DNA

SEQ ID NO: 54540 - DNA, 120 bp, synthetic construct; identical to SEQ ID NO: 24586
  source 1..120: mol_type = other DNA

SEQ ID NO: 54541 - DNA, 120 bp, synthetic construct; identical to SEQ ID NO: 24587
  source 1..120: mol_type = other DNA

SEQ ID NO: 54542 - DNA, 120 bp, synthetic construct; identical to SEQ ID NO: 7593
  source 1..120: mol_type = other DNA

SEQ ID NO: 54543 - DNA, 120 bp, synthetic construct; identical to SEQ ID NO: 24589
  source 1..120: mol_type = other DNA

SEQ ID NO: 54544 - DNA, 120 bp, synthetic construct; identical to SEQ ID NO: 24590
  source 1..120: mol_type = other DNA

SEQ ID NO: 54545 - DNA, 120 bp, synthetic construct; identical to SEQ ID NO: 24591
  source 1..120: mol_type = other DNA

SEQ ID NO: 54546 - DNA, 120 bp, synthetic construct; identical to SEQ ID NO: 7594
  source 1..120: mol_type = other DNA

SEQ ID NO: 54547 - DNA, 120 bp, synthetic construct; identical to SEQ ID NO: 24593
  source 1..120: mol_type = other DNA

SEQ ID NO: 54548 - DNA, 120 bp, synthetic construct; identical to SEQ ID NO: 24594
  source 1..120: mol_type = other DNA

SEQ ID NO: 54549 - DNA, 120 bp, synthetic construct; identical to SEQ ID NO: 24595
  source 1..120: mol_type = other DNA

SEQ ID NO: 54550 - DNA, 120 bp, synthetic construct; identical to SEQ ID NO: 24596
  source 1..120: mol_type = other DNA

SEQ ID NO: 54551 - DNA, 120 bp, synthetic construct; identical to SEQ ID NO: 7595
  source 1..120: mol_type = other DNA

SEQ ID NO: 54552 - DNA, 120 bp, synthetic construct; identical to SEQ ID NO: 24598
  source 1..120: mol_type = other DNA

SEQ ID NO: 54553 - DNA, 120 bp, synthetic construct; identical to SEQ ID NO: 24599
  source 1..120: mol_type = other DNA

SEQ ID NO: 54554 - DNA, 120 bp, synthetic construct; identical to SEQ ID NO: 24600
  source 1..120: mol_type = other DNA

SEQ ID NO: 54555 - DNA, 120 bp, synthetic construct; identical to SEQ ID NO: 24601
  source 1..120: mol_type = other DNA

SEQ ID NO: 54556 - DNA, 120 bp, synthetic construct; identical to SEQ ID NO: 7596
  source 1..120: mol_type = other DNA

SEQ ID NO: 54557 - DNA, 120 bp, synthetic construct; identical to SEQ ID NO: 24603
  source 1..120: mol_type = other DNA

SEQ ID NO: 54558 - DNA, 120 bp, synthetic construct; identical to SEQ ID NO: 24604
  source 1..120: mol_type = other DNA

SEQ ID NO: 54559 - DNA, 120 bp, synthetic construct; identical to SEQ ID NO: 24605
  source 1..120: mol_type = other DNA

SEQ ID NO: 54560 - DNA, 120 bp, synthetic construct; identical to SEQ ID NO: 7597
  source 1..120: mol_type = other DNA

SEQ ID NO: 54561 - DNA, 120 bp, synthetic construct; identical to SEQ ID NO: 24607
  source 1..120: mol_type = other DNA

SEQ ID NO: 54562 - DNA, 120 bp, synthetic construct; identical to SEQ ID NO: 24608
  source 1..120: mol_type = other DNA

SEQ ID NO: 54563 - DNA, 120 bp, synthetic construct; identical to SEQ ID NO: 24609
  source 1..120: mol_type = other DNA

SEQ ID NO: 54564 - DNA, 120 bp, synthetic construct; identical to SEQ ID NO: 7598
  source 1..120: mol_type = other DNA

SEQ ID NO: 54565 - DNA, 120 bp, synthetic construct; identical to SEQ ID NO: 24611
  source 1..120: mol_type = other DNA

SEQ ID NO: 54566 - DNA, 120 bp, synthetic construct; identical to SEQ ID NO: 24612
  source 1..120: mol_type = other DNA

SEQ ID NO: 54567 - DNA, 120 bp, synthetic construct; identical to SEQ ID NO: 24613
  source 1..120: mol_type = other DNA

SEQ ID NO: 54568 - DNA, 120 bp, synthetic construct; identical to SEQ ID NO: 7599
  source 1..120: mol_type = other DNA

SEQ ID NO: 54569 - DNA, 120 bp, synthetic construct; identical to SEQ ID NO: 24615
  source 1..120: mol_type = other DNA

SEQ ID NO: 54570 - DNA, 120 bp, synthetic construct; identical to SEQ ID NO: 24616
  source 1..120: mol_type = other DNA

SEQ ID NO: 54571 - DNA, 120 bp, synthetic construct; identical to SEQ ID NO: 24617
  source 1..120: mol_type = other DNA

SEQ ID NO: 54572 - DNA, 120 bp, synthetic construct; identical to SEQ ID NO: 7600
  source 1..120: mol_type = other DNA

SEQ ID NO: 54573 - DNA, 120 bp, synthetic construct; identical to SEQ ID NO: 24619
  source 1..120: mol_type = other DNA

SEQ ID NO: 54574 - DNA, 120 bp, synthetic construct; identical to SEQ ID NO: 24620
  source 1..120: mol_type = other DNA

SEQ ID NO: 54575 - DNA, 120 bp, synthetic construct; identical to SEQ ID NO: 24621
  source 1..120: mol_type = other DNA

SEQ ID NO: 54576 - DNA, 120 bp, synthetic construct; identical to SEQ ID NO: 24622
  source 1..120: mol_type = other DNA

SEQ ID NO: 54577 - DNA, 120 bp, synthetic construct; identical to SEQ ID NO: 7601
  source 1..120: mol_type = other DNA

SEQ ID NO: 54578 - DNA, 120 bp, synthetic construct; identical to SEQ ID NO: 24624
  source 1..120: mol_type = other DNA

SEQ ID NO: 54579 - DNA, 120 bp, synthetic construct; identical to SEQ ID NO: 7602
  source 1..120: mol_type = other DNA

SEQ ID NO: 54580 - DNA, 120 bp, synthetic construct; identical to SEQ ID NO: 24626
  source 1..120: mol_type = other DNA

SEQ ID NO: 54581 - DNA, 120 bp, synthetic construct; identical to SEQ ID NO: 24627
  source 1..120: mol_type = other DNA

SEQ ID NO: 54582 - DNA, 120 bp, synthetic construct; identical to SEQ ID NO: 7603
  source 1..120: mol_type = other DNA

SEQ ID NO: 54583 - DNA, 120 bp, synthetic construct; identical to SEQ ID NO: 24629
  source 1..120: mol_type = other DNA

SEQ ID NO: 54584 - DNA, 120 bp, synthetic construct; identical to SEQ ID NO: 24630
  source 1..120: mol_type = other DNA

SEQ ID NO: 54585 - DNA, 120 bp, synthetic construct; identical to SEQ ID NO: 7604
  source 1..120: mol_type = other DNA

SEQ ID NO: 54586 - DNA, 120 bp, synthetic construct; identical to SEQ ID NO: 24632
  source 1..120: mol_type = other DNA

SEQ ID NO: 54587 - DNA, 120 bp, synthetic construct; identical to SEQ ID NO: 24633
  source 1..120: mol_type = other DNA

SEQ ID NO: 54588 - DNA, 120 bp, synthetic construct; identical to SEQ ID NO: 7605
  source 1..120: mol_type = other DNA

SEQ ID NO: 54589 - DNA, 120 bp, synthetic construct; identical to SEQ ID NO: 24635
  source 1..120: mol_type = other DNA

SEQ ID NO: 54590 - DNA, 120 bp, synthetic construct; identical to SEQ ID NO: 24636
  source 1..120: mol_type = other DNA

SEQ ID NO: 54591 - DNA, 120 bp, synthetic construct; identical to SEQ ID NO: 24637
  source 1..120: mol_type = other DNA

SEQ ID NO: 54592 - DNA, 120 bp, synthetic construct; identical to SEQ ID NO: 7606
  source 1..120: mol_type = other DNA

SEQ ID NO: 54593 - DNA, 120 bp, synthetic construct; identical to SEQ ID NO: 24639
  source 1..120: mol_type = other DNA

SEQ ID NO: 54594 - DNA, 120 bp, synthetic construct; identical to SEQ ID NO: 24640
  source 1..120: mol_type = other DNA

SEQ ID NO: 54595 - DNA, 120 bp, synthetic construct; identical to SEQ ID NO: 24641
  source 1..120: mol_type = other DNA

SEQ ID NO: 54596 - DNA, 120 bp, synthetic construct; identical to SEQ ID NO: 7607
  source 1..120: mol_type = other DNA

SEQ ID NO: 54597 - DNA, 120 bp, synthetic construct; identical to SEQ ID NO: 24643
  source 1..120: mol_type = other DNA

SEQ ID NO: 54598 - DNA, 120 bp, synthetic construct; identical to SEQ ID NO: 24644
  source 1..120: mol_type = other DNA

SEQ ID NO: 54599 - DNA, 120 bp, synthetic construct; identical to SEQ ID NO: 24645
  source 1..120: mol_type = other DNA

SEQ ID NO: 54600 - DNA, 120 bp, synthetic construct; identical to SEQ ID NO: 7608
  source 1..120: mol_type = other DNA

SEQ ID NO: 54601 - DNA, 120 bp, synthetic construct; identical to SEQ ID NO: 24647
  source 1..120: mol_type = other DNA

SEQ ID NO: 54602 - DNA, 120 bp, synthetic construct; identical to SEQ ID NO: 24648
  source 1..120: mol_type = other DNA

SEQ ID NO: 54603 - DNA, 120 bp, synthetic construct; identical to SEQ ID NO: 24649
  source 1..120: mol_type = other DNA

SEQ ID NO: 54604 - DNA, 120 bp, synthetic construct; identical to SEQ ID NO: 7609
  source 1..120: mol_type = other DNA

SEQ ID NO: 54605 - DNA, 120 bp, synthetic construct; identical to SEQ ID NO: 24651
  source 1..120: mol_type = other DNA

SEQ ID NO: 54606 - DNA, 120 bp, synthetic construct; identical to SEQ ID NO: 24652
  source 1..120: mol_type = other DNA

SEQ ID NO: 54607 - DNA, 120 bp, synthetic construct; identical to SEQ ID NO: 24653
  source 1..120: mol_type = other DNA

SEQ ID NO: 54608 - DNA, 120 bp, synthetic construct; identical to SEQ ID NO: 7610
  source 1..120: mol_type = other DNA

SEQ ID NO: 54609 - DNA, 120 bp, synthetic construct; identical to SEQ ID NO: 24655
  source 1..120: mol_type = other DNA

SEQ ID NO: 54610 - DNA, 120 bp, synthetic construct; identical to SEQ ID NO: 24656
  source 1..120: mol_type = other DNA

SEQ ID NO: 54611 - DNA, 120 bp, synthetic construct; identical to SEQ ID NO: 24657
  source 1..120: mol_type = other DNA

SEQ ID NO: 54612 - DNA, 120 bp, synthetic construct; identical to SEQ ID NO: 7611
  source 1..120: mol_type = other DNA

SEQ ID NO: 54613 - DNA, 120 bp, synthetic construct; identical to SEQ ID NO: 24659
  source 1..120: mol_type = other DNA

SEQ ID NO: 54614 - DNA, 120 bp, synthetic construct; identical to SEQ ID NO: 24660
  source 1..120: mol_type = other DNA

SEQ ID NO: 54615 - DNA, 120 bp, synthetic construct; identical to SEQ ID NO: 24661
  source 1..120: mol_type = other DNA

SEQ ID NO: 54616 - DNA, 120 bp, synthetic construct; identical to SEQ ID NO: 7612
  source 1..120: mol_type = other DNA

SEQ ID NO: 54617 - DNA, 120 bp, synthetic construct; identical to SEQ ID NO: 24663
  source 1..120: mol_type = other DNA

SEQ ID NO: 54618 - DNA, 120 bp, synthetic construct; identical to SEQ ID NO: 24664
  source 1..120: mol_type = other DNA

SEQ ID NO: 54619 - DNA, 120 bp, synthetic construct; identical to SEQ ID NO: 7613
  source 1..120: mol_type = other DNA

SEQ ID NO: 54620 - DNA, 120 bp, synthetic construct; identical to SEQ ID NO: 24666
  source 1..120: mol_type = other DNA

SEQ ID NO: 54621 - DNA, 120 bp, synthetic construct; identical to SEQ ID NO: 24667
  source 1..120: mol_type = other DNA

SEQ ID NO: 54622 - DNA, 120 bp, synthetic construct; identical to SEQ ID NO: 24668
  source 1..120: mol_type = other DNA

SEQ ID NO: 54623 - DNA, 120 bp, synthetic construct; identical to SEQ ID NO: 7614
  source 1..120: mol_type = other DNA

SEQ ID NO: 54624 - DNA, 120 bp, synthetic construct; identical to SEQ ID NO: 24670
  source 1..120: mol_type = other DNA

SEQ ID NO: 54625 - DNA, 120 bp, synthetic construct; identical to SEQ ID NO: 24671
  source 1..120: mol_type = other DNA

SEQ ID NO: 54626 - DNA, 120 bp, synthetic construct; identical to SEQ ID NO: 24672
  source 1..120: mol_type = other DNA

SEQ ID NO: 54627 - DNA, 120 bp, synthetic construct; identical to SEQ ID NO: 24673
  source 1..120: mol_type = other DNA

SEQ ID NO: 54628 - DNA, 120 bp, synthetic construct; identical to SEQ ID NO: 7615
  source 1..120: mol_type = other DNA

SEQ ID NO: 54629 - DNA, 120 bp, synthetic construct; identical to SEQ ID NO: 24675
  source 1..120: mol_type = other DNA

SEQ ID NO: 54630 - DNA, 120 bp, synthetic construct; identical to SEQ ID NO: 24676
  source 1..120: mol_type = other DNA

SEQ ID NO: 54631 - DNA, 120 bp, synthetic construct; identical to SEQ ID NO: 24677
  source 1..120: mol_type = other DNA

SEQ ID NO: 54632 - DNA, 120 bp, synthetic construct; identical to SEQ ID NO: 24678
  source 1..120: mol_type = other DNA

SEQ ID NO: 54633 - DNA, 120 bp, synthetic construct; identical to SEQ ID NO: 7616
  source 1..120: mol_type = other DNA

SEQ ID NO: 54634 - DNA, 120 bp, synthetic construct; identical to SEQ ID NO: 24680
  source 1..120: mol_type = other DNA

SEQ ID NO: 54635 - DNA, 120 bp, synthetic construct; identical to SEQ ID NO: 24681
  source 1..120: mol_type = other DNA

SEQ ID NO: 54636 - DNA, 120 bp, synthetic construct; identical to SEQ ID NO: 24682
  source 1..120: mol_type = other DNA

SEQ ID NO: 54637 - DNA, 120 bp, synthetic construct; identical to SEQ ID NO: 7617
  source 1..120: mol_type = other DNA

SEQ ID NO: 54638 - DNA, 120 bp, synthetic construct; identical to SEQ ID NO: 24684
  source 1..120: mol_type = other DNA

SEQ ID NO: 54639 - DNA, 120 bp, synthetic construct; identical to SEQ ID NO: 24685
  source 1..120: mol_type = other DNA

SEQ ID NO: 54640 - DNA, 120 bp, synthetic construct; identical to SEQ ID NO: 24686
  source 1..120: mol_type = other DNA

SEQ ID NO: 54641 - DNA, 120 bp, synthetic construct; identical to SEQ ID NO: 7618
  source 1..120: mol_type = other DNA

SEQ ID NO: 54642 - DNA, 120 bp, synthetic construct; identical to SEQ ID NO: 24688
  source 1..120: mol_type = other DNA

SEQ ID NO: 54643 - DNA, 120 bp, synthetic construct; identical to SEQ ID NO: 24689
  source 1..120: mol_type = other DNA

SEQ ID NO: 54644 - DNA, 120 bp, synthetic construct; identical to SEQ ID NO: 24690
  source 1..120: mol_type = other DNA

SEQ ID NO: 54645 - DNA, 120 bp, synthetic construct; identical to SEQ ID NO: 24691
  source 1..120: mol_type = other DNA

SEQ ID NO: 54646 - DNA, 120 bp, synthetic construct; identical to SEQ ID NO: 7619
  source 1..120: mol_type = other DNA

SEQ ID NO: 54647 - DNA, 120 bp, synthetic construct; identical to SEQ ID NO: 24693
  source 1..120: mol_type = other DNA

SEQ ID NO: 54648 - DNA, 120 bp, synthetic construct; identical to SEQ ID NO: 24694
  source 1..120: mol_type = other DNA

SEQ ID NO: 54649 - DNA, 120 bp, synthetic construct; identical to SEQ ID NO: 24695
  source 1..120: mol_type = other DNA

SEQ ID NO: 54650 - DNA, 120 bp, synthetic construct; identical to SEQ ID NO: 7620
  source 1..120: mol_type = other DNA

SEQ ID NO: 54651 - DNA, 120 bp, synthetic construct; identical to SEQ ID NO: 24697
  source 1..120: mol_type = other DNA

SEQ ID NO: 54652 - DNA, 120 bp, synthetic construct; identical to SEQ ID NO: 24698
  source 1..120: mol_type = other DNA

SEQ ID NO: 54653 - DNA, 120 bp, synthetic construct; identical to SEQ ID NO: 24699
  source 1..120: mol_type = other DNA

SEQ ID NO: 54654 - DNA, 120 bp, synthetic construct; identical to SEQ ID NO: 7621
  source 1..120: mol_type = other DNA

SEQ ID NO: 54655 - DNA, 120 bp, synthetic construct; identical to SEQ ID NO: 24701
  source 1..120: mol_type = other DNA

SEQ ID NO: 54656 - DNA, 120 bp, synthetic construct; identical to SEQ ID NO: 24702
  source 1..120: mol_type = other DNA

SEQ ID NO: 54657 - DNA, 120 bp, synthetic construct; identical to SEQ ID NO: 7622
  source 1..120: mol_type = other DNA

SEQ ID NO: 54658 - DNA, 120 bp, synthetic construct; identical to SEQ ID NO: 24704
  source 1..120: mol_type = other DNA

SEQ ID NO: 54659 - DNA, 120 bp, synthetic construct; identical to SEQ ID NO: 24705
  source 1..120: mol_type = other DNA

SEQ ID NO: 54660 - DNA, 120 bp, synthetic construct; identical to SEQ ID NO: 24706
  source 1..120: mol_type = other DNA

SEQ ID NO: 54661 - DNA, 120 bp, synthetic construct; identical to SEQ ID NO: 7623
  source 1..120: mol_type = other DNA

SEQ ID NO: 54662 - DNA, 120 bp, synthetic construct; identical to SEQ ID NO: 24708
  source 1..120: mol_type = other DNA

SEQ ID NO: 54663 - DNA, 120 bp, synthetic construct; identical to SEQ ID NO: 24709
  source 1..120: mol_type = other DNA

SEQ ID NO: 54664 - DNA, 120 bp, synthetic construct; identical to SEQ ID NO: 24710
  source 1..120: mol_type = other DNA

SEQ ID NO: 54665 - DNA, 120 bp, synthetic construct; identical to SEQ ID NO: 24711
  source 1..120: mol_type = other DNA

SEQ ID NO: 54666 - DNA, 120 bp, synthetic construct; identical to SEQ ID NO: 7624
  source 1..120: mol_type = other DNA

SEQ ID NO: 54667 - DNA, 120 bp, synthetic construct; identical to SEQ ID NO: 24713
  source 1..120: mol_type = other DNA

SEQ ID NO: 54668 - DNA, 120 bp, synthetic construct; identical to SEQ ID NO: 24714
  source 1..120: mol_type = other DNA

SEQ ID NO: 54669 - DNA, 120 bp, synthetic construct; identical to SEQ ID NO: 24715
  source 1..120: mol_type = other DNA

SEQ ID NO: 54670 - DNA, 120 bp, synthetic construct; identical to SEQ ID NO: 7625
  source 1..120: mol_type = other DNA

SEQ ID NO: 54671 - DNA, 120 bp, synthetic construct; identical to SEQ ID NO: 24717
  source 1..120: mol_type = other DNA

SEQ ID NO: 54672 - DNA, 120 bp, synthetic construct; identical to SEQ ID NO: 24718
  source 1..120: mol_type = other DNA

SEQ ID NO: 54673 - DNA, 120 bp, synthetic construct; identical to SEQ ID NO: 24719
  source 1..120: mol_type = other DNA

SEQ ID NO: 54674 - DNA, 120 bp, synthetic construct; identical to SEQ ID NO: 7626
  source 1..120: mol_type = other DNA

SEQ ID NO: 54675 - DNA, 120 bp, synthetic construct; identical to SEQ ID NO: 24721
  source 1..120: mol_type = other DNA

SEQ ID NO: 54676 - DNA, 120 bp, synthetic construct; identical to SEQ ID NO: 24722
  source 1..120: mol_type = other DNA

SEQ ID NO: 54677 - DNA, 120 bp, synthetic construct; identical to SEQ ID NO: 7627
  source 1..120: mol_type = other DNA

SEQ ID NO: 54678 - DNA, 120 bp, synthetic construct; identical to SEQ ID NO: 24724
  source 1..120: mol_type = other DNA

SEQ ID NO: 54679 - DNA, 120 bp, synthetic construct; identical to SEQ ID NO: 24725
  source 1..120: mol_type = other DNA

SEQ ID NO: 54680 - DNA, 120 bp, synthetic construct; identical to SEQ ID NO: 24726
  source 1..120: mol_type = other DNA

SEQ ID NO: 54681 - DNA, 120 bp, synthetic construct; identical to SEQ ID NO: 24727
  source 1..120: mol_type = other DNA

SEQ ID NO: 54682 - DNA, 120 bp, synthetic construct; identical to SEQ ID NO: 7628
  source 1..120: mol_type = other DNA

SEQ ID NO: 54683 - DNA, 120 bp, synthetic construct; identical to SEQ ID NO: 24729
  source 1..120: mol_type = other DNA

SEQ ID NO: 54684 - DNA, 120 bp, synthetic construct; identical to SEQ ID NO: 24730
  source 1..120: mol_type = other DNA

SEQ ID NO: 54685 - DNA, 120 bp, synthetic construct; identical to SEQ ID NO: 24731
  source 1..120: mol_type = other DNA

SEQ ID NO: 54686 - DNA, 120 bp, synthetic construct; identical to SEQ ID NO: 7629
  source 1..120: mol_type = other DNA

SEQ ID NO: 54687 - DNA, 120 bp, synthetic construct; identical to SEQ ID NO: 24733
  source 1..120: mol_type = other DNA

SEQ ID NO: 54688 - DNA, 120 bp, synthetic construct; identical to SEQ ID NO: 7630
  source 1..120: mol_type = other DNA

SEQ ID NO: 54689 - DNA, 120 bp, synthetic construct; identical to SEQ ID NO: 24735
  source 1..120: mol_type = other DNA

SEQ ID NO: 54690 - DNA, 120 bp, synthetic construct; identical to SEQ ID NO: 24736
  source 1..120: mol_type = other DNA

SEQ ID NO: 54691 - DNA, 120 bp, synthetic construct; identical to SEQ ID NO: 24737
  source 1..120: mol_type = other DNA

SEQ ID NO: 54692 - DNA, 120 bp, synthetic construct; identical to SEQ ID NO: 7631
  source 1..120: mol_type = other DNA

SEQ ID NO: 54693 - DNA, 120 bp, synthetic construct; identical to SEQ ID NO: 24739
  source 1..120: mol_type = other DNA

SEQ ID NO: 54694 - DNA, 120 bp, synthetic construct; identical to SEQ ID NO: 24740
  source 1..120: mol_type = other DNA

SEQ ID NO: 54695 - DNA, 120 bp, synthetic construct; identical to SEQ ID NO: 7632
  source 1..120: mol_type = other DNA

SEQ ID NO: 54696 - DNA, 120 bp, synthetic construct; identical to SEQ ID NO: 24742
  source 1..120: mol_type = other DNA

SEQ ID NO: 54697 - DNA, 120 bp, synthetic construct; identical to SEQ ID NO: 24743
  source 1..120: mol_type = other DNA

SEQ ID NO: 54698 - DNA, 120 bp, synthetic construct; identical to SEQ ID NO: 7633
  source 1..120: mol_type = other DNA

SEQ ID NO: 54699 - DNA, 120 bp, synthetic construct; identical to SEQ ID NO: 24745
  source 1..120: mol_type = other DNA

SEQ ID NO: 54700 - DNA, 120 bp, synthetic construct; identical to SEQ ID NO: 24746
  source 1..120: mol_type = other DNA

SEQ ID NO: 54701 - DNA, 120 bp, synthetic construct; identical to SEQ ID NO: 7634
  source 1..120: mol_type = other DNA

SEQ ID NO: 54702 - DNA, 120 bp, synthetic construct; identical to SEQ ID NO: 24748
  source 1..120: mol_type = other DNA

SEQ ID NO: 54703 - DNA, 120 bp, synthetic construct; identical to SEQ ID NO: 24749
  source 1..120: mol_type = other DNA

SEQ ID NO: 54704 - DNA, 120 bp, synthetic construct; identical to SEQ ID NO: 24750
  source 1..120: mol_type = other DNA

SEQ ID NO: 54705 - DNA, 120 bp, synthetic construct; identical to SEQ ID NO: 24751
  source 1..120: mol_type = other DNA

SEQ ID NO: 54706 - DNA, 120 bp, synthetic construct; identical to SEQ ID NO: 7635
  source 1..120: mol_type = other DNA

SEQ ID NO: 54707 - DNA, 120 bp, synthetic construct; identical to SEQ ID NO: 24753
  source 1..120: mol_type = other DNA

SEQ ID NO: 54708 - DNA, 120 bp, synthetic construct; identical to SEQ ID NO: 24754
  source 1..120: mol_type = other DNA

SEQ ID NO: 54709 - DNA, 120 bp, synthetic construct; identical to SEQ ID NO: 24755
  source 1..120: mol_type = other DNA

SEQ ID NO: 54710 - DNA, 120 bp, synthetic construct; identical to SEQ ID NO: 7636
  source 1..120: mol_type = other DNA

SEQ ID NO: 54711 - DNA, 120 bp, synthetic construct; identical to SEQ ID NO: 24757
  source 1..120: mol_type = other DNA

SEQ ID NO: 54712 - DNA, 120 bp, synthetic construct; identical to SEQ ID NO: 24758
  source 1..120: mol_type = other DNA

SEQ ID NO: 54713 - DNA, 120 bp, synthetic construct; identical to SEQ ID NO: 7637
  source 1..120: mol_type = other DNA

SEQ ID NO: 54714 - DNA, 120 bp, synthetic construct; identical to SEQ ID NO: 24760
  source 1..120: mol_type = other DNA

SEQ ID NO: 54715 - DNA, 120 bp, synthetic construct; identical to SEQ ID NO: 24761
  source 1..120: mol_type = other DNA

SEQ ID NO: 54716 - DNA, 120 bp, synthetic construct; identical to SEQ ID NO: 24762
  source 1..120: mol_type = other DNA

SEQ ID NO: 54717 - DNA, 120 bp, synthetic construct; identical to SEQ ID NO: 24763
  source 1..120: mol_type = other DNA

SEQ ID NO: 54718 - DNA, 120 bp, synthetic construct; identical to SEQ ID NO: 7638
  source 1..120: mol_type = other DNA

SEQ ID NO: 54719 - DNA, 120 bp, synthetic construct; identical to SEQ ID NO: 24765
  source 1..120: mol_type = other DNA

SEQ ID NO: 54720 - DNA, 120 bp, synthetic construct; identical to SEQ ID NO: 24766
  source 1..120: mol_type = other DNA

SEQ ID NO: 54721 - DNA, 120 bp, synthetic construct; identical to SEQ ID NO: 24767
  source 1..120: mol_type = other DNA

SEQ ID NO: 54722 - DNA, 120 bp, synthetic construct; identical to SEQ ID NO: 650
  source 1..120: mol_type = other DNA

SEQ ID NO: 54723 - DNA, 120 bp, synthetic construct; identical to SEQ ID NO: 24769
  source 1..120: mol_type = other DNA

SEQ ID NO: 54724 - DNA, 120 bp, synthetic construct; identical to SEQ ID NO: 24770
  source 1..120: mol_type = other DNA

SEQ ID NO: 54725 - DNA, 120 bp, synthetic construct; identical to SEQ ID NO: 7640
  source 1..120: mol_type = other DNA

SEQ ID NO: 54726 - DNA, 120 bp, synthetic construct; identical to SEQ ID NO: 24772
  source 1..120: mol_type = other DNA

SEQ ID NO: 54727 - DNA, 120 bp, synthetic construct; identical to SEQ ID NO: 24773
  source 1..120: mol_type = other DNA

SEQ ID NO: 54728 - DNA, 120 bp, synthetic construct; identical to SEQ ID NO: 24774
  source 1..120: mol_type = other DNA

SEQ ID NO: 54729 - DNA, 120 bp, synthetic construct; identical to SEQ ID NO: 7641
  source 1..120: mol_type = other DNA

SEQ ID NO: 54730 - DNA, 120 bp, synthetic construct; identical to SEQ ID NO: 24776
  source 1..120: mol_type = other DNA

SEQ ID NO: 54731 - DNA, 120 bp, synthetic construct; identical to SEQ ID NO: 24777
  source 1..120: mol_type = other DNA

SEQ ID NO: 54732 - DNA, 120 bp, synthetic construct; identical to SEQ ID NO: 24778
  source 1..120: mol_type = other DNA

SEQ ID NO: 54733 - DNA, 120 bp, synthetic construct; identical to SEQ ID NO: 7642
  source 1..120: mol_type = other DNA

SEQ ID NO: 54734 - DNA, 120 bp, synthetic construct; identical to SEQ ID NO: 24780
  source 1..120: mol_type = other DNA

SEQ ID NO: 54735 - DNA, 120 bp, synthetic construct; identical to SEQ ID NO: 24781
  source 1..120: mol_type = other DNA

SEQ ID NO: 54736 - DNA, 120 bp, synthetic construct; identical to SEQ ID NO: 24782
  source 1..120: mol_type = other DNA

SEQ ID NO: 54737 - DNA, 120 bp, synthetic construct; identical to SEQ ID NO: 24783
  source 1..120: mol_type = other DNA

SEQ ID NO: 54738 - DNA, 120 bp, synthetic construct; identical to SEQ ID NO: 7643
  source 1..120: mol_type = other DNA

SEQ ID NO: 54739 - DNA, 120 bp, synthetic construct; identical to SEQ ID NO: 24785
  source 1..120: mol_type = other DNA

SEQ ID NO: 54740 - DNA, 120 bp, synthetic construct; identical to SEQ ID NO: 24786
  source 1..120: mol_type = other DNA

SEQ ID NO: 54741 - DNA, 120 bp, synthetic construct; identical to SEQ ID NO: 7644
  source 1..120: mol_type = other DNA

SEQ ID NO: 54742 - DNA, 120 bp, synthetic construct; identical to SEQ ID NO: 24788
  source 1..120: mol_type = other DNA

SEQ ID NO: 54743 - DNA, 120 bp, synthetic construct; identical to SEQ ID NO: 24789
  source 1..120: mol_type = other DNA

SEQ ID NO: 54744 - DNA, 120 bp, synthetic construct; identical to SEQ ID NO: 7645
  source 1..120: mol_type = other DNA

SEQ ID NO: 54745 - DNA, 120 bp, synthetic construct; identical to SEQ ID NO: 24791
  source 1..120: mol_type = other DNA

SEQ ID NO: 54746 - DNA, 120 bp, synthetic construct; identical to SEQ ID NO: 24792
  source 1..120: mol_type = other DNA

SEQ ID NO: 54747 - DNA, 120 bp, synthetic construct; identical to SEQ ID NO: 24793
  source 1..120: mol_type = other DNA

SEQ ID NO: 54748 - DNA, 120 bp, synthetic construct; identical to SEQ ID NO: 24794
  source 1..120: mol_type = other DNA

SEQ ID NO: 54749 - DNA, 120 bp, synthetic construct; identical to SEQ ID NO: 7646
  source 1..120: mol_type = other DNA

SEQ ID NO: 54750 - DNA, 120 bp, synthetic construct; identical to SEQ ID NO: 24796
  source 1..120: mol_type = other DNA

SEQ ID NO: 54751 - DNA, 120 bp, synthetic construct; identical to SEQ ID NO: 24797
  source 1..120: mol_type = other DNA

SEQ ID NO: 54752 - DNA, 120 bp, synthetic construct; identical to SEQ ID NO: 24798
  source 1..120: mol_type = other DNA

SEQ ID NO: 54753 - DNA, 120 bp, synthetic construct; identical to SEQ ID NO: 24799
  source 1..120: mol_type = other DNA

SEQ ID NO: 54754 - DNA, 120 bp, synthetic construct; identical to SEQ ID NO: 7647
  source 1..120: mol_type = other DNA

SEQ ID NO: 54755 - DNA, 120 bp, synthetic construct; identical to SEQ ID NO: 24801
  source 1..120: mol_type = other DNA

SEQ ID NO: 54756 - DNA, 120 bp, synthetic construct; identical to SEQ ID NO: 24802
  source 1..120: mol_type = other DNA

SEQ ID NO: 54757 - DNA, 120 bp, synthetic construct; identical to SEQ ID NO: 24803
  source 1..120: mol_type = other DNA

SEQ ID NO: 54758 - DNA, 120 bp, synthetic construct; identical to SEQ ID NO: 7648
  source 1..120: mol_type = other DNA

SEQ ID NO: 54759 - DNA, 120 bp, synthetic construct; identical to SEQ ID NO: 24805
  source 1..120: mol_type = other DNA

SEQ ID NO: 54760 - DNA, 120 bp, synthetic construct; identical to SEQ ID NO: 24806
  source 1..120: mol_type = other DNA

SEQ ID NO: 54761 - DNA, 120 bp, synthetic construct; identical to SEQ ID NO: 24807
  source 1..120: mol_type = other DNA

SEQ ID NO: 54762 - DNA, 120 bp, synthetic construct; identical to SEQ ID NO: 7649
  source 1..120: mol_type = other DNA

SEQ ID NO: 54763 - DNA, 120 bp, synthetic construct; identical to SEQ ID NO: 24809
  source 1..120: mol_type = other DNA

SEQ ID NO: 54764 - DNA, 120 bp, synthetic construct; identical to SEQ ID NO: 7650
  source 1..120: mol_type = other DNA

SEQ ID NO: 54765 - DNA, 120 bp, synthetic construct; identical to SEQ ID NO: 24811
  source 1..120: mol_type = other DNA

SEQ ID NO: 54766 - DNA, 120 bp, synthetic construct; identical to SEQ ID NO: 24812
  source 1..120: mol_type = other DNA

SEQ ID NO: 54767 - DNA, 120 bp, synthetic construct; identical to SEQ ID NO: 7651
  source 1..120: mol_type = other DNA

SEQ ID NO: 54768 - DNA, 120 bp, synthetic construct; identical to SEQ ID NO: 24814
  source 1..120: mol_type = other DNA

SEQ ID NO: 54769 - DNA, 120 bp, synthetic construct; identical to SEQ ID NO: 24815
  source 1..120: mol_type = other DNA

SEQ ID NO: 54770 - DNA, 120 bp, synthetic construct; identical to SEQ ID NO: 24816
  source 1..120: mol_type = other DNA

SEQ ID NO: 54771 - DNA, 120 bp, synthetic construct; identical to SEQ ID NO: 7652
  source 1..120: mol_type = other DNA

SEQ ID NO: 54772 - DNA, 120 bp, synthetic construct; identical to SEQ ID NO: 24818
  source 1..120: mol_type = other DNA

SEQ ID NO: 54773 - DNA, 120 bp, synthetic construct; identical to SEQ ID NO: 24819
  source 1..120: mol_type = other DNA

SEQ ID NO: 54774 - DNA, 120 bp, synthetic construct; identical to SEQ ID NO: 24820
  source 1..120: mol_type = other DNA

SEQ ID NO: 54775 - DNA, 120 bp, synthetic construct; identical to SEQ ID NO: 7653
  source 1..120: mol_type = other DNA

SEQ ID NO: 54776 - DNA, 120 bp, synthetic construct; identical to SEQ ID NO: 24822
  source 1..120: mol_type = other DNA

SEQ ID NO: 54777 - DNA, 120 bp, synthetic construct; identical to SEQ ID NO: 24823
  source 1..120: mol_type = other DNA

SEQ ID NO: 54778 - DNA, 120 bp, synthetic construct; identical to SEQ ID NO: 24824
  source 1..120: mol_type = other DNA

SEQ ID NO: 54779 - DNA, 120 bp, synthetic construct; identical to SEQ ID NO: 24825
  source 1..120: mol_type = other DNA

SEQ ID NO: 54780 - DNA, 120 bp, synthetic construct; identical to SEQ ID NO: 7654
  source 1..120: mol_type = other DNA

SEQ ID NO: 54781 - DNA, 120 bp, synthetic construct; identical to SEQ ID NO: 24827
  source 1..120: mol_type = other DNA

SEQ ID NO: 54782 - DNA, 120 bp, synthetic construct; identical to SEQ ID NO: 24828
  source 1..120: mol_type = other DNA

SEQ ID NO: 54783 - DNA, 120 bp, synthetic construct; identical to SEQ ID NO: 7655
  source 1..120: mol_type = other DNA

SEQ ID NO: 54784 - DNA, 120 bp, synthetic construct; identical to SEQ ID NO: 24830
  source 1..120: mol_type = other DNA

SEQ ID NO: 54785 - DNA, 120 bp, synthetic construct; identical to SEQ ID NO: 24831
  source 1..120: mol_type = other DNA

SEQ ID NO: 54786 - DNA, 120 bp, synthetic construct; identical to SEQ ID NO: 24832
  source 1..120: mol_type = other DNA

SEQ ID NO: 54787 - DNA, 120 bp, synthetic construct; identical to SEQ ID NO: 24833
  source 1..120: mol_type = other DNA

SEQ ID NO: 54788 - DNA, 120 bp, synthetic construct; identical to SEQ ID NO: 7656
  source 1..120: mol_type = other DNA

SEQ ID NO: 54789 - DNA, 120 bp, synthetic construct; identical to SEQ ID NO: 24835
  source 1..120: mol_type = other DNA

SEQ ID NO: 54790 - DNA, 120 bp, synthetic construct; identical to SEQ ID NO: 24836
  source 1..120: mol_type = other DNA

SEQ ID NO: 54791 - DNA, 120 bp, synthetic construct; identical to SEQ ID NO: 7657
  source 1..120: mol_type = other DNA

SEQ ID NO: 54792 - DNA, 120 bp, synthetic construct; identical to SEQ ID NO: 24838
  source 1..120: mol_type = other DNA

SEQ ID NO: 54793 - DNA, 120 bp, synthetic construct; identical to SEQ ID NO: 24839
  source 1..120: mol_type = other DNA

SEQ ID NO: 54794 - DNA, 120 bp, synthetic construct; identical to SEQ ID NO: 24840
  source 1..120: mol_type = other DNA

SEQ ID NO: 54795 - DNA, 120 bp, synthetic construct; identical to SEQ ID NO: 7658
  source 1..120: mol_type = other DNA

SEQ ID NO: 54796 - DNA, 120 bp, synthetic construct; identical to SEQ ID NO: 24842
  source 1..120: mol_type = other DNA

SEQ ID NO: 54797 - DNA, 120 bp, synthetic construct; identical to SEQ ID NO: 24843
  source 1..120: mol_type = other DNA

SEQ ID NO: 54798 - DNA, 120 bp, synthetic construct; identical to SEQ ID NO: 24844
  source 1..120: mol_type = other DNA

SEQ ID NO: 54799 - DNA, 120 bp, synthetic construct; identical to SEQ ID NO: 24845
  source 1..120: mol_type = other DNA

SEQ ID NO: 54800 - DNA, 120 bp, synthetic construct; identical to SEQ ID NO: 7659
  source 1..120: mol_type = other DNA

SEQ ID NO: 54801 - DNA, 120 bp, synthetic construct; identical to SEQ ID NO: 24847
  source 1..120: mol_type = other DNA

SEQ ID NO: 54802 - DNA, 120 bp, synthetic construct; identical to SEQ ID NO: 24848
  source 1..120: mol_type = other DNA

SEQ ID NO: 54803 - DNA, 120 bp, synthetic construct; identical to SEQ ID NO: 24849
  source 1..120: mol_type = other DNA

SEQ ID NO: 54804 - DNA, 120 bp, synthetic construct; identical to SEQ ID NO: 24850
  source 1..120: mol_type = other DNA

SEQ ID NO: 54805 - DNA, 120 bp, synthetic construct; identical to SEQ ID NO: 7660
  source 1..120: mol_type = other DNA

SEQ ID NO: 54806 - DNA, 120 bp, synthetic construct; identical to SEQ ID NO: 24852
  source 1..120: mol_type = other DNA

SEQ ID NO: 54807 - DNA, 120 bp, synthetic construct; identical to SEQ ID NO: 24853
  source 1..120: mol_type = other DNA

SEQ ID NO: 54808 - DNA, 120 bp, synthetic construct; identical to SEQ ID NO: 7661
  source 1..120: mol_type = other DNA

SEQ ID NO: 54809 - DNA, 120 bp, synthetic construct; identical to SEQ ID NO: 24855
  source 1..120: mol_type = other DNA

SEQ ID NO: 54810 - DNA, 120 bp, synthetic construct; identical to SEQ ID NO: 24856
  source 1..120: mol_type = other DNA

SEQ ID NO: 54811 - DNA, 120 bp, synthetic construct; identical to SEQ ID NO: 24857
  source 1..120: mol_type = other DNA

SEQ ID NO: 54812 - DNA, 120 bp, synthetic construct; identical to SEQ ID NO: 7662
  source 1..120: mol_type = other DNA

SEQ ID NO: 54813 - DNA, 120 bp, synthetic construct; identical to SEQ ID NO: 24859
  source 1..120: mol_type = other DNA

SEQ ID NO: 54814 - DNA, 120 bp, synthetic construct; identical to SEQ ID NO: 24860
  source 1..120: mol_type = other DNA

SEQ ID NO: 54815 - DNA, 120 bp, synthetic construct; identical to SEQ ID NO: 24861
  source 1..120: mol_type = other DNA

SEQ ID NO: 54816 - DNA, 120 bp, synthetic construct; identical to SEQ ID NO: 7663
  source 1..120: mol_type = other DNA

SEQ ID NO: 54817 - DNA, 120 bp, synthetic construct; identical to SEQ ID NO: 24863
  source 1..120: mol_type = other DNA

SEQ ID NO: 54818 - DNA, 120 bp, synthetic construct; identical to SEQ ID NO: 24864
  source 1..120: mol_type = other DNA

SEQ ID NO: 54819 - DNA, 120 bp, synthetic construct; identical to SEQ ID NO: 24865
  source 1..120: mol_type = other DNA

SEQ ID NO: 54820 - DNA, 120 bp, synthetic construct; identical to SEQ ID NO: 24866
  source 1..120: mol_type = other DNA

SEQ ID NO: 54821 - DNA, 120 bp, synthetic construct; identical to SEQ ID NO: 7664
  source 1..120: mol_type = other DNA

SEQ ID NO: 54822 - DNA, 120 bp, synthetic construct; identical to SEQ ID NO: 24868
  source 1..120: mol_type = other DNA

SEQ ID NO: 54823 - DNA, 120 bp, synthetic construct; identical to SEQ ID NO: 7665
  source 1..120: mol_type = other DNA

SEQ ID NO: 54824 - DNA, 120 bp, synthetic construct; identical to SEQ ID NO: 24870
  source 1..120: mol_type = other DNA

SEQ ID NO: 54825 - DNA, 120 bp, synthetic construct; identical to SEQ ID NO: 24871
  source 1..120: mol_type = other DNA

SEQ ID NO: 54826 - DNA, 120 bp, synthetic construct; identical to SEQ ID NO: 24872
  source 1..120: mol_type = other DNA

SEQ ID NO: 54827 - DNA, 120 bp, synthetic construct; identical to SEQ ID NO: 24873
  source 1..120: mol_type = other DNA

SEQ ID NO: 54828 - DNA, 120 bp, synthetic construct; identical to SEQ ID NO: 7666
  source 1..120: mol_type = other DNA

SEQ ID NO: 54829 - DNA, 120 bp, synthetic construct; identical to SEQ ID NO: 24875
  source 1..120: mol_type = other DNA

SEQ ID NO: 54830 - DNA, 120 bp, synthetic construct; identical to SEQ ID NO: 24876
  source 1..120: mol_type = other DNA

SEQ ID NO: 54831 - DNA, 120 bp, synthetic construct; identical to SEQ ID NO: 7667
  source 1..120: mol_type = other DNA

SEQ ID NO: 54832 - DNA, 120 bp, synthetic construct; identical to SEQ ID NO: 7668
  source 1..120: mol_type = other DNA

SEQ ID NO: 54833 - DNA, 120 bp, synthetic construct; identical to SEQ ID NO: 24879
  source 1..120: mol_type = other DNA

SEQ ID NO: 54834 - DNA, 120 bp, synthetic construct; identical to SEQ ID NO: 24880
  source 1..120: mol_type = other DNA

SEQ ID NO: 54835 - DNA, 120 bp, synthetic construct; identical to SEQ ID NO: 24881
  source 1..120: mol_type = other DNA

SEQ ID NO: 54836 - DNA, 120 bp, synthetic construct; identical to SEQ ID NO: 7669
  source 1..120: mol_type = other DNA

SEQ ID NO: 54837 - DNA, 120 bp, synthetic construct; identical to SEQ ID NO: 24883
  source 1..120: mol_type = other DNA

SEQ ID NO: 54838 - DNA, 120 bp, synthetic construct; identical to SEQ ID NO: 24884
  source 1..120: mol_type = other DNA

SEQ ID NO: 54839 - DNA, 120 bp, synthetic construct; identical to SEQ ID NO: 24885
  source 1..120: mol_type = other DNA

SEQ ID NO: 54840 - DNA, 120 bp, synthetic construct; identical to SEQ ID NO: 24886
  source 1..120: mol_type = other DNA

SEQ ID NO: 54841 - DNA, 120 bp, synthetic construct; identical to SEQ ID NO: 7670
  source 1..120: mol_type = other DNA

SEQ ID NO: 54842 - DNA, 120 bp, synthetic construct; identical to SEQ ID NO: 24888
  source 1..120: mol_type = other DNA

SEQ ID NO: 54843 - DNA, 120 bp, synthetic construct; identical to SEQ ID NO: 24889
  source 1..120: mol_type = other DNA

SEQ ID NO: 54844 - DNA, 120 bp, synthetic construct; identical to SEQ ID NO: 24890
  source 1..120: mol_type = other DNA

SEQ ID NO: 54845 - DNA, 120 bp, synthetic construct; identical to SEQ ID NO: 24891
  source 1..120: mol_type = other DNA

SEQ ID NO: 54846 - DNA, 120 bp, synthetic construct; identical to SEQ ID NO: 7671
  source 1..120: mol_type = other DNA

SEQ ID NO: 54847 - DNA, 120 bp, synthetic construct; identical to SEQ ID NO: 24893
  source 1..120: mol_type = other DNA

SEQ ID NO: 54848 - DNA, 120 bp, synthetic construct; identical to SEQ ID NO: 24894
  source 1..120: mol_type = other DNA

SEQ ID NO: 54849 - DNA, 120 bp, synthetic construct; identical to SEQ ID NO: 24895
  source 1..120: mol_type = other DNA

SEQ ID NO: 54850 - DNA, 120 bp, synthetic construct; identical to SEQ ID NO: 7672
  source 1..120: mol_type = other DNA

SEQ ID NO: 54851 - DNA, 120 bp, synthetic construct; identical to SEQ ID NO: 24897
  source 1..120: mol_type = other DNA

SEQ ID NO: 54852 - DNA, 120 bp, synthetic construct; identical to SEQ ID NO: 24898
  source 1..120: mol_type = other DNA

SEQ ID NO: 54853 - DNA, 120 bp, synthetic construct; identical to SEQ ID NO: 24899
  source 1..120: mol_type = other DNA

SEQ ID NO: 54854 - DNA, 120 bp, synthetic construct; identical to SEQ ID NO: 24900
  source 1..120: mol_type = other DNA

SEQ ID NO: 54855 - DNA, 120 bp, synthetic construct; identical to SEQ ID NO: 7673
  source 1..120: mol_type = other DNA

SEQ ID NO: 54856 - DNA, 120 bp, synthetic construct; identical to SEQ ID NO: 24902
  source 1..120: mol_type = other DNA

SEQ ID NO: 54857 - DNA, 120 bp, synthetic construct; identical to SEQ ID NO: 24903
  source 1..120: mol_type = other DNA

SEQ ID NO: 54858 - DNA, 120 bp, synthetic construct; identical to SEQ ID NO: 7674
  source 1..120: mol_type = other DNA

SEQ ID NO: 54859 - DNA, 120 bp, synthetic construct; identical to SEQ ID NO: 24905
  source 1..120: mol_type = other DNA

SEQ ID NO: 54860 - DNA, 120 bp, synthetic construct; identical to SEQ ID NO: 24906
  source 1..120: mol_type = other DNA

SEQ ID NO: 54861 - DNA, 120 bp, synthetic construct; identical to SEQ ID NO: 24907
  source 1..120: mol_type = other DNA

SEQ ID NO: 54862 - DNA, 120 bp, synthetic construct; identical to SEQ ID NO: 7675
  source 1..120: mol_type = other DNA

SEQ ID NO: 54863 - DNA, 120 bp, synthetic construct; identical to SEQ ID NO: 24909
  source 1..120: mol_type = other DNA

SEQ ID NO: 54864 - DNA, 120 bp, synthetic construct; identical to SEQ ID NO: 24910
  source 1..120: mol_type = other DNA

SEQ ID NO: 54865 - DNA, 120 bp, synthetic construct; identical to SEQ ID NO: 24911
  source 1..120: mol_type = other DNA

SEQ ID NO: 54866 - DNA, 120 bp, synthetic construct; identical to SEQ ID NO: 24912
  source 1..120: mol_type = other DNA

SEQ ID NO: 54867 - DNA, 120 bp, synthetic construct; identical to SEQ ID NO: 7676
  source 1..120: mol_type = other DNA

SEQ ID NO: 54868 - DNA, 120 bp, synthetic construct; identical to SEQ ID NO: 24914
  source 1..120: mol_type = other DNA

SEQ ID NO: 54869 - DNA, 120 bp, synthetic construct; identical to SEQ ID NO: 24915
  source 1..120: mol_type = other DNA

SEQ ID NO: 54870 - DNA, 120 bp, synthetic construct; identical to SEQ ID NO: 24916
  source 1..120: mol_type = other DNA

SEQ ID NO: 54871 - DNA, 120 bp, synthetic construct; identical to SEQ ID NO: 7677
  source 1..120: mol_type = other DNA

SEQ ID NO: 54872 - DNA, 120 bp, synthetic construct; identical to SEQ ID NO: 24918
  source 1..120: mol_type = other DNA

SEQ ID NO: 54873 - DNA, 120 bp, synthetic construct; identical to SEQ ID NO: 685
  source 1..120: mol_type = other DNA

SEQ ID NO: 54874 - DNA, 120 bp, synthetic construct; identical to SEQ ID NO: 7678
  source 1..120: mol_type = other DNA

SEQ ID NO: 54875 - DNA, 120 bp, synthetic construct; identical to SEQ ID NO: 24921
  source 1..120: mol_type = other DNA

SEQ ID NO: 54876 - DNA, 120 bp, synthetic construct; identical to SEQ ID NO: 24922
  source 1..120: mol_type = other DNA

SEQ ID NO: 54877 - DNA, 120 bp, synthetic construct; identical to SEQ ID NO: 24923
  source 1..120: mol_type = other DNA

SEQ ID NO: 54878 - DNA, 120 bp, synthetic construct; identical to SEQ ID NO: 7679
  source 1..120: mol_type = other DNA

SEQ ID NO: 54879 - DNA, 120 bp, synthetic construct; identical to SEQ ID NO: 24925
  source 1..120: mol_type = other DNA

SEQ ID NO: 54880 - DNA, 120 bp, synthetic construct; identical to SEQ ID NO: 24926
  source 1..120: mol_type = other DNA

SEQ ID NO: 54881 - DNA, 120 bp, synthetic construct; identical to SEQ ID NO: 24927
  source 1..120: mol_type = other DNA

SEQ ID NO: 54882 - DNA, 120 bp, synthetic construct; identical to SEQ ID NO: 24928
  source 1..120: mol_type = other DNA

SEQ ID NO: 54883 - DNA, 120 bp, synthetic construct; identical to SEQ ID NO: 7680
  source 1..120: mol_type = other DNA

SEQ ID NO: 54884 - DNA, 120 bp, synthetic construct; identical to SEQ ID NO: 24930
  source 1..120: mol_type = other DNA

SEQ ID NO: 54885 - DNA, 120 bp, synthetic construct; identical to SEQ ID NO: 24931
  source 1..120: mol_type = other DNA

SEQ ID NO: 54886 - DNA, 120 bp, synthetic construct; identical to SEQ ID NO: 7681
  source 1..120: mol_type = other DNA

SEQ ID NO: 54887 - DNA, 120 bp, synthetic construct; identical to SEQ ID NO: 24933
  source 1..120: mol_type = other DNA

SEQ ID NO: 54888 - DNA, 120 bp, synthetic construct; identical to SEQ ID NO: 24934
  source 1..120: mol_type = other DNA

SEQ ID NO: 54889 - DNA, 120 bp, synthetic construct; identical to SEQ ID NO: 24935
  source 1..120: mol_type = other DNA

SEQ ID NO: 54890 - DNA, 120 bp, synthetic construct; identical to SEQ ID NO: 24936
  source 1..120: mol_type = other DNA

SEQ ID NO: 54891 - DNA, 120 bp, synthetic construct; identical to SEQ ID NO: 7682
  source 1..120: mol_type = other DNA

SEQ ID NO: 54892 - DNA, 120 bp, synthetic construct; identical to SEQ ID NO: 24938
  source 1..120: mol_type = other DNA

SEQ ID NO: 54893 - DNA, 120 bp, synthetic construct; identical to SEQ ID NO: 24939
  source 1..120: mol_type = other DNA

SEQ ID NO: 54894 - DNA, 120 bp, synthetic construct; identical to SEQ ID NO: 7683
  source 1..120: mol_type = other DNA

SEQ ID NO: 54895 - DNA, 120 bp, synthetic construct; identical to SEQ ID NO: 24941
  source 1..120: mol_type = other DNA

SEQ ID NO: 54896 - DNA, 120 bp, synthetic construct; identical to SEQ ID NO: 24942
  source 1..120: mol_type = other DNA

SEQ ID NO: 54897 - DNA, 120 bp, synthetic construct; identical to SEQ ID NO: 24943
  source 1..120: mol_type = other DNA

SEQ ID NO: 54898 - DNA, 120 bp, synthetic construct; identical to SEQ ID NO: 7684
  source 1..120: mol_type = other DNA

SEQ ID NO: 54899 - DNA, 120 bp, synthetic construct; identical to SEQ ID NO: 24945
  source 1..120: mol_type = other DNA

SEQ ID NO: 54900 - DNA, 120 bp, synthetic construct; identical to SEQ ID NO: 24946
  source 1..120: mol_type = other DNA

SEQ ID NO: 54901 - DNA, 120 bp, synthetic construct; identical to SEQ ID NO: 24947
  source 1..120: mol_type = other DNA

SEQ ID NO: 54902 - DNA, 120 bp, synthetic construct; identical to SEQ ID NO: 24948
  source 1..120: mol_type = other DNA

SEQ ID NO: 54903 - DNA, 120 bp, synthetic construct; identical to SEQ ID NO: 7685
  source 1..120: mol_type = other DNA

SEQ ID NO: 54904 - DNA, 120 bp, synthetic construct; identical to SEQ ID NO: 24950
  source 1..120: mol_type = other DNA

SEQ ID NO: 54905 - DNA, 120 bp, synthetic construct; identical to SEQ ID NO: 24951
  source 1..120: mol_type = other DNA

SEQ ID NO: 54906 - DNA, 120 bp, synthetic construct; identical to SEQ ID NO: 7686
  source 1..120: mol_type = other DNA

SEQ ID NO: 54907 - DNA, 120 bp, synthetic construct; identical to SEQ ID NO: 24953
  source 1..120: mol_type = other DNA

SEQ ID NO: 54908 - DNA, 120 bp, synthetic construct; identical to SEQ ID NO: 24954
  source 1..120: mol_type = other DNA

SEQ ID NO: 54909 - DNA, 120 bp, synthetic construct; identical to SEQ ID NO: 24955
  source 1..120: mol_type = other DNA

SEQ ID NO: 54910 - DNA, 120 bp, synthetic construct; identical to SEQ ID NO: 24956
  source 1..120: mol_type = other DNA

SEQ ID NO: 54911 - DNA, 120 bp, synthetic construct; identical to SEQ ID NO: 7687
  source 1..120: mol_type = other DNA

SEQ ID NO: 54912 - DNA, 120 bp, synthetic construct; identical to SEQ ID NO: 24958
  source 1..120: mol_type = other DNA

SEQ ID NO: 54913 - DNA, 120 bp, synthetic construct; identical to SEQ ID NO: 24959
  source 1..120: mol_type = other DNA

SEQ ID NO: 54914 - DNA, 120 bp, synthetic construct; identical to SEQ ID NO: 24960
  source 1..120: mol_type = other DNA

SEQ ID NO: 54915 - DNA, 120 bp, synthetic construct; identical to SEQ ID NO: 7688
  source 1..120: mol_type = other DNA

SEQ ID NO: 54916 - DNA, 120 bp, synthetic construct; identical to SEQ ID NO: 24962
  source 1..120: mol_type = other DNA

SEQ ID NO: 54917 - DNA, 120 bp, synthetic construct; identical to SEQ ID NO: 24963
  source 1..120: mol_type = other DNA

SEQ ID NO: 54918 - DNA, 120 bp, synthetic construct; identical to SEQ ID NO: 24964
  source 1..120: mol_type = other DNA

SEQ ID NO: 54919 - DNA, 120 bp, synthetic construct; identical to SEQ ID NO: 7689
  source 1..120: mol_type = other DNA

SEQ ID NO: 54920 - DNA, 120 bp, synthetic construct; identical to SEQ ID NO: 24966
  source 1..120: mol_type = other DNA

SEQ ID NO: 54921 - DNA, 120 bp, synthetic construct; identical to SEQ ID NO: 24967
  source 1..120: mol_type = other DNA

SEQ ID NO: 54922 - DNA, 120 bp, synthetic construct; identical to SEQ ID NO: 7690
  source 1..120: mol_type = other DNA

SEQ ID NO: 54923 - DNA, 120 bp, synthetic construct; identical to SEQ ID NO: 24969
  source 1..120: mol_type = other DNA

SEQ ID NO: 54924 - DNA, 120 bp, synthetic construct; identical to SEQ ID NO: 24970
  source 1..120: mol_type = other DNA

SEQ ID NO: 54925 - DNA, 120 bp, synthetic construct; identical to SEQ ID NO: 24971
  source 1..120: mol_type = other DNA

SEQ ID NO: 54926 - DNA, 120 bp, synthetic construct; identical to SEQ ID NO: 24972
  source 1..120: mol_type = other DNA

SEQ ID NO: 54927 - DNA, 120 bp, synthetic construct; identical to SEQ ID NO: 7691
  source 1..120: mol_type = other DNA

SEQ ID NO: 54928 - DNA, 120 bp, synthetic construct; identical to SEQ ID NO: 24974
  source 1..120: mol_type = other DNA

SEQ ID NO: 54929 - DNA, 120 bp, synthetic construct; identical to SEQ ID NO: 24975
  source 1..120: mol_type = other DNA

SEQ ID NO: 54930 - DNA, 120 bp, synthetic construct; identical to SEQ ID NO: 7692
  source 1..120: mol_type = other DNA

SEQ ID NO: 54931 - DNA, 120 bp, synthetic construct; identical to SEQ ID NO: 24977
  source 1..120: mol_type = other DNA

SEQ ID NO: 54932 - DNA, 120 bp, synthetic construct; identical to SEQ ID NO: 24978
  source 1..120: mol_type = other DNA

SEQ ID NO: 54933 - DNA, 120 bp, synthetic construct; identical to SEQ ID NO: 24979
  source 1..120: mol_type = other DNA

SEQ ID NO: 54934 - DNA, 120 bp, synthetic construct; identical to SEQ ID NO: 7693
  source 1..120: mol_type = other DNA

SEQ ID NO: 54935 - DNA, 120 bp, synthetic construct; identical to SEQ ID NO: 700
  source 1..120: mol_type = other DNA

SEQ ID NO: 54936 - DNA, 120 bp, synthetic construct; identical to SEQ ID NO: 24982
  source 1..120: mol_type = other DNA

SEQ ID NO: 54937 - DNA, 120 bp, synthetic construct; identical to SEQ ID NO: 24983
  source 1..120: mol_type = other DNA

SEQ ID NO: 54938 - DNA, 120 bp, synthetic construct; identical to SEQ ID NO: 24984
  source 1..120: mol_type = other DNA

SEQ ID NO: 54939 - DNA, 120 bp, synthetic construct; identical to SEQ ID NO: 7694
  source 1..120: mol_type = other DNA

SEQ ID NO: 54940 - DNA, 120 bp, synthetic construct; identical to SEQ ID NO: 24986
  source 1..120: mol_type = other DNA

SEQ ID NO: 54941 - DNA, 120 bp, synthetic construct; identical to SEQ ID NO: 24987
  source 1..120: mol_type = other DNA

SEQ ID NO: 54942 - DNA, 120 bp, synthetic construct; identical to SEQ ID NO: 24988
  source 1..120: mol_type = other DNA

SEQ ID NO: 54943 - DNA, 120 bp, synthetic construct; identical to SEQ ID NO: 7695
  source 1..120: mol_type = other DNA

SEQ ID NO: 54944 - DNA, 120 bp, synthetic construct; identical to SEQ ID NO: 24990
  source 1..120: mol_type = other DNA

SEQ ID NO: 54945 - DNA, 120 bp, synthetic construct; identical to SEQ ID NO: 24991
  source 1..120: mol_type = other DNA

SEQ ID NO: 54946 - DNA, 120 bp, synthetic construct; identical to SEQ ID NO: 7696
  source 1..120: mol_type = other DNA

SEQ ID NO: 54947 - DNA, 120 bp, synthetic construct; identical to SEQ ID NO: 24993
  source 1..120: mol_type = other DNA

SEQ ID NO: 54948 - DNA, 120 bp, synthetic construct; identical to SEQ ID NO: 24994
  source 1..120: mol_type = other DNA

SEQ ID NO: 54949 - DNA, 120 bp, synthetic construct; identical to SEQ ID NO: 24995
  source 1..120: mol_type = other DNA

SEQ ID NO: 54950 - DNA, 120 bp, synthetic construct; identical to SEQ ID NO: 7697
  source 1..120: mol_type = other DNA

SEQ ID NO: 54951 - DNA, 120 bp, synthetic construct; identical to SEQ ID NO: 24997
  source 1..120: mol_type = other DNA

SEQ ID NO: 54952 - DNA, 120 bp, synthetic construct; identical to SEQ ID NO: 24998
  source 1..120: mol_type = other DNA

SEQ ID NO: 54953 - DNA, 120 bp, synthetic construct; identical to SEQ ID NO: 24999
  source 1..120: mol_type = other DNA

SEQ ID NO: 54954 - DNA, 120 bp, synthetic construct; identical to SEQ ID NO: 7698
  source 1..120: mol_type = other DNA

SEQ ID NO: 54955 - DNA, 120 bp, synthetic construct; identical to SEQ ID NO: 25001
  source 1..120: mol_type = other DNA

SEQ ID NO: 54956 - DNA, 120 bp, synthetic construct; identical to SEQ ID NO: 25002
  source 1..120: mol_type = other DNA

SEQ ID NO: 54957 - DNA, 120 bp, synthetic construct; identical to SEQ ID NO: 25003
  source 1..120: mol_type = other DNA

SEQ ID NO: 54958 - DNA, 120 bp, synthetic construct; identical to SEQ ID NO: 7699
  source 1..120: mol_type = other DNA

SEQ ID NO: 54959 - DNA, 120 bp, synthetic construct; identical to SEQ ID NO: 25005
  source 1..120: mol_type = other DNA

SEQ ID NO: 54960 - DNA, 120 bp, synthetic construct; identical to SEQ ID NO: 25006
  source 1..120: mol_type = other DNA

SEQ ID NO: 54961 - DNA, 120 bp, synthetic construct; identical to SEQ ID NO: 25007
  source 1..120: mol_type = other DNA

SEQ ID NO: 54962 - DNA, 120 bp, synthetic construct; identical to SEQ ID NO: 7700
  source 1..120: mol_type = other DNA

SEQ ID NO: 54963 - DNA, 120 bp, synthetic construct; identical to SEQ ID NO: 25009
  source 1..120: mol_type = other DNA

SEQ ID NO: 54964 - DNA, 120 bp, synthetic construct; identical to SEQ ID NO: 25010
  source 1..120: mol_type = other DNA

SEQ ID NO: 54965 - DNA, 120 bp, synthetic construct; identical to SEQ ID NO: 25011
  source 1..120: mol_type = other DNA

SEQ ID NO: 54966 - DNA, 120 bp, synthetic construct; identical to SEQ ID NO: 25012
  source 1..120: mol_type = other DNA

SEQ ID NO: 54967 - DNA, 120 bp, synthetic construct; identical to SEQ ID NO: 707
  source 1..120: mol_type = other DNA

SEQ ID NO: 54968 - DNA, 120 bp, synthetic construct; identical to SEQ ID NO: 25014
  source 1..120: mol_type = other DNA

SEQ ID NO: 54969 - DNA, 120 bp, synthetic construct; identical to SEQ ID NO: 25015
  source 1..120: mol_type = other DNA

SEQ ID NO: 54970 - DNA, 120 bp, synthetic construct; identical to SEQ ID NO: 25016
  source 1..120: mol_type = other DNA

SEQ ID NO: 54971 - DNA, 120 bp, synthetic construct; identical to SEQ ID NO: 7702
  source 1..120: mol_type = other DNA

SEQ ID NO: 54972 - DNA, 120 bp, synthetic construct; identical to SEQ ID NO: 25018
  source 1..120: mol_type = other DNA

SEQ ID NO: 54973 - DNA, 120 bp, synthetic construct; identical to SEQ ID NO: 25019
  source 1..120: mol_type = other DNA

SEQ ID NO: 54974 - DNA, 120 bp, synthetic construct; identical to SEQ ID NO: 7703
  source 1..120: mol_type = other DNA

SEQ ID NO: 54975 - DNA, 120 bp, synthetic construct; identical to SEQ ID NO: 25021
  source 1..120: mol_type = other DNA

SEQ ID NO: 54976 - DNA, 120 bp, synthetic construct; identical to SEQ ID NO: 25022
  source 1..120: mol_type = other DNA

SEQ ID NO: 54977 - DNA, 120 bp, synthetic construct; identical to SEQ ID NO: 25023
  source 1..120: mol_type = other DNA

SEQ ID NO: 54978 - DNA, 120 bp, synthetic construct; identical to SEQ ID NO: 7704
  source 1..120: mol_type = other DNA

SEQ ID NO: 54979 - DNA, 120 bp, synthetic construct; identical to SEQ ID NO: 25025
  source 1..120: mol_type = other DNA

SEQ ID NO: 54980 - DNA, 120 bp, synthetic construct; identical to SEQ ID NO: 25026
  source 1..120: mol_type = other DNA

SEQ ID NO: 54981 - DNA, 120 bp, synthetic construct; identical to SEQ ID NO: 25027
  source 1..120: mol_type = other DNA

SEQ ID NO: 54982 - DNA, 120 bp, synthetic construct; identical to SEQ ID NO: 25028
  source 1..120: mol_type = other DNA

SEQ ID NO: 54983 - DNA, 120 bp, synthetic construct; identical to SEQ ID NO: 7705
  source 1..120: mol_type = other DNA

SEQ ID NO: 54984 - DNA, 120 bp, synthetic construct; identical to SEQ ID NO: 25030
  source 1..120: mol_type = other DNA

SEQ ID NO: 54985 - DNA, 120 bp, synthetic construct; identical to SEQ ID NO: 25031
  source 1..120: mol_type = other DNA

SEQ ID NO: 54986 - DNA, 120 bp, synthetic construct; identical to SEQ ID NO: 25032
  source 1..120: mol_type = other DNA

SEQ ID NO: 54987 - DNA, 120 bp, synthetic construct; identical to SEQ ID NO: 7706
  source 1..120: mol_type = other DNA

SEQ ID NO: 54988 - DNA, 120 bp, synthetic construct; identical to SEQ ID NO: 25034
  source 1..120: mol_type = other DNA

SEQ ID NO: 54989 - DNA, 120 bp, synthetic construct; identical to SEQ ID NO: 25035
  source 1..120: mol_type = other DNA

SEQ ID NO: 54990 - DNA, 120 bp, synthetic construct; identical to SEQ ID NO: 7707
  source 1..120: mol_type = other DNA

SEQ ID NO: 54991 - DNA, 120 bp, synthetic construct; identical to SEQ ID NO: 25037
  source 1..120: mol_type = other DNA

SEQ ID NO: 54992 - DNA, 120 bp, synthetic construct; identical to SEQ ID NO: 25038
  source 1..120: mol_type = other DNA

SEQ ID NO: 54993 - DNA, 120 bp, synthetic construct; identical to SEQ ID NO: 25039
  source 1..120: mol_type = other DNA

SEQ ID NO: 54994 - DNA, 120 bp, synthetic construct; identical to SEQ ID NO: 7708
  source 1..120: mol_type = other DNA

SEQ ID NO: 54995 - DNA, 120 bp, synthetic construct; identical to SEQ ID NO: 25041
  source 1..120: mol_type = other DNA

SEQ ID NO: 54996 - DNA, 120 bp, synthetic construct; identical to SEQ ID NO: 25042
  source 1..120: mol_type = other DNA

SEQ ID NO: 54997 - DNA, 120 bp, synthetic construct; identical to SEQ ID NO: 714
  source 1..120: mol_type = other DNA

SEQ ID NO: 54998 - DNA, 120 bp, synthetic construct; identical to SEQ ID NO: 25044
  source 1..120: mol_type = other DNA

SEQ ID NO: 54999 - DNA, 120 bp, synthetic construct; identical to SEQ ID NO: 7709
  source 1..120: mol_type = other DNA

SEQ ID NO: 55000 - DNA, 120 bp, synthetic construct; identical to SEQ ID NO: 25046
  source 1..120: mol_type = other DNA

SEQ ID NO: 55001 - DNA, 120 bp, synthetic construct; identical to SEQ ID NO: 25047
  source 1..120: mol_type = other DNA

SEQ ID NO: 55002 - DNA, 120 bp, synthetic construct; identical to SEQ ID NO: 7710
  source 1..120: mol_type = other DNA

SEQ ID NO: 55003 - DNA, 120 bp, synthetic construct; identical to SEQ ID NO: 25049
  source 1..120: mol_type = other DNA

SEQ ID NO: 55004 - DNA, 120 bp, synthetic construct; identical to SEQ ID NO: 716
  source 1..120: mol_type = other DNA

SEQ ID NO: 55005 - DNA, 120 bp, synthetic construct; identical to SEQ ID NO: 25051
  source 1..120: mol_type = other DNA

SEQ ID NO: 55006 - DNA, 120 bp, synthetic construct; identical to SEQ ID NO: 7711
  source 1..120: mol_type = other DNA

SEQ ID NO: 55007 - DNA, 120 bp, synthetic construct; identical to SEQ ID NO: 25053
  source 1..120: mol_type = other DNA

SEQ ID NO: 55008 - DNA, 120 bp, synthetic construct; identical to SEQ ID NO: 25054
  source 1..120: mol_type = other DNA

SEQ ID NO: 55009 - DNA, 120 bp, synthetic construct; identical to SEQ ID NO: 25055
  source 1..120: mol_type = other DNA

SEQ ID NO: 55010 - DNA, 120 bp, synthetic construct; identical to SEQ ID NO: 7712
  source 1..120: mol_type = other DNA

SEQ ID NO: 55011 - DNA, 120 bp, synthetic construct; identical to SEQ ID NO: 25057
  source 1..120: mol_type = other DNA

SEQ ID NO: 55012 - DNA, 120 bp, synthetic construct; identical to SEQ ID NO: 25058
  source 1..120: mol_type = other DNA

SEQ ID NO: 55013 - DNA, 120 bp, synthetic construct; identical to SEQ ID NO: 25059
  source 1..120: mol_type = other DNA

SEQ ID NO: 55014 - DNA, 120 bp, synthetic construct; identical to SEQ ID NO: 25060
  source 1..120: mol_type = other DNA

SEQ ID NO: 55015 - DNA, 120 bp, synthetic construct; identical to SEQ ID NO: 7713
  source 1..120: mol_type = other DNA

SEQ ID NO: 55016 - DNA, 120 bp, synthetic construct; identical to SEQ ID NO: 25062
  source 1..120: mol_type = other DNA

SEQ ID NO: 55017 - DNA, 120 bp, synthetic construct; identical to SEQ ID NO: 25063
  source 1..120: mol_type = other DNA

SEQ ID NO: 55018 - DNA, 120 bp, synthetic construct; identical to SEQ ID NO: 7714
  source 1..120: mol_type = other DNA

SEQ ID NO: 55019 - DNA, 120 bp, synthetic construct; identical to SEQ ID NO: 25065
  source 1..120: mol_type = other DNA

SEQ ID NO: 55020 - DNA, 120 bp, synthetic construct; identical to SEQ ID NO: 25066
  source 1..120: mol_type = other DNA

SEQ ID NO: 55021 - DNA, 120 bp, synthetic construct; identical to SEQ ID NO: 25067
  source 1..120: mol_type = other DNA

SEQ ID NO: 55022 - DNA, 120 bp, synthetic construct; identical to SEQ ID NO: 25068
  source 1..120: mol_type = other DNA

SEQ ID NO: 55023 - DNA, 120 bp, synthetic construct; identical to SEQ ID NO: 25069
  source 1..120: mol_type = other DNA

SEQ ID NO: 55024 - DNA, 120 bp, synthetic construct; identical to SEQ ID NO: 720
  source 1..120: mol_type = other DNA

SEQ ID NO: 55025 - DNA, 120 bp, synthetic construct; identical to SEQ ID NO: 25071
  source 1..120: mol_type = other DNA

SEQ ID NO: 55026 - DNA, 120 bp, synthetic construct; identical to SEQ ID NO: 7716
  source 1..120: mol_type = other DNA

SEQ ID NO: 55027 - DNA, 120 bp, synthetic construct; identical to SEQ ID NO: 25073
  source 1..120: mol_type = other DNA

SEQ ID NO: 55028 - DNA, 120 bp, synthetic construct; identical to SEQ ID NO: 25074
  source 1..120: mol_type = other DNA

SEQ ID NO: 55029 - DNA, 120 bp, synthetic construct; identical to SEQ ID NO: 25075
  source 1..120: mol_type = other DNA

SEQ ID NO: 55030 - DNA, 120 bp, synthetic construct; identical to SEQ ID NO: 7717
  source 1..120: mol_type = other DNA

SEQ ID NO: 55031 - DNA, 120 bp, synthetic construct; identical to SEQ ID NO: 25077
  source 1..120: mol_type = other DNA

SEQ ID NO: 55032 - DNA, 120 bp, synthetic construct; identical to SEQ ID NO: 25078
  source 1..120: mol_type = other DNA

SEQ ID NO: 55033 - DNA, 120 bp, synthetic construct; identical to SEQ ID NO: 25079
  source 1..120: mol_type = other DNA

SEQ ID NO: 55034 - DNA, 120 bp, synthetic construct; identical to SEQ ID NO: 25080
  source 1..120: mol_type = other DNA

SEQ ID NO: 55035 - DNA, 120 bp, synthetic construct; identical to SEQ ID NO: 7718
  source 1..120: mol_type = other DNA

SEQ ID NO: 55036 - DNA, 120 bp, synthetic construct; identical to SEQ ID NO: 25082
  source 1..120: mol_type = other DNA

SEQ ID NO: 55037 - DNA, 120 bp, synthetic construct; identical to SEQ ID NO: 25083
  source 1..120: mol_type = other DNA

SEQ ID NO: 55038 - DNA, 120 bp, synthetic construct; identical to SEQ ID NO: 25084
  source 1..120: mol_type = other DNA

SEQ ID NO: 55039 - DNA, 120 bp, synthetic construct; identical to SEQ ID NO: 7719
  source 1..120: mol_type = other DNA

SEQ ID NO: 55040 - DNA, 120 bp, synthetic construct; identical to SEQ ID NO: 25086
  source 1..120: mol_type = other DNA

SEQ ID NO: 55041 - DNA, 120 bp, synthetic construct; identical to SEQ ID NO: 25087
  source 1..120: mol_type = other DNA

SEQ ID NO: 55042 - DNA, 120 bp, synthetic construct; identical to SEQ ID NO: 724
  source 1..120: mol_type = other DNA

SEQ ID NO: 55043 - DNA, 120 bp, synthetic construct; identical to SEQ ID NO: 25089
  source 1..120: mol_type = other DNA

SEQ ID NO: 55044 - DNA, 120 bp, synthetic construct; identical to SEQ ID NO: 25090
  source 1..120: mol_type = other DNA

SEQ ID NO: 55045 - DNA, 120 bp, synthetic construct; identical to SEQ ID NO: 25091
  source 1..120: mol_type = other DNA

SEQ ID NO: 55046 - DNA, 120 bp, synthetic construct; identical to SEQ ID NO: 25092
  source 1..120: mol_type = other DNA

SEQ ID NO: 55047 - DNA, 120 bp, synthetic construct; identical to SEQ ID NO: 7721
  source 1..120: mol_type = other DNA

SEQ ID NO: 55048 - DNA, 120 bp, synthetic construct; identical to SEQ ID NO: 25094
  source 1..120: mol_type = other DNA

SEQ ID NO: 55049 - DNA, 120 bp, synthetic construct; identical to SEQ ID NO: 25095
  source 1..120: mol_type = other DNA

SEQ ID NO: 55050 - DNA, 120 bp, synthetic construct; identical to SEQ ID NO: 7722
  source 1..120: mol_type = other DNA

SEQ ID NO: 55051 - DNA, 120 bp, synthetic construct; identical to SEQ ID NO: 25097
  source 1..120: mol_type = other DNA

SEQ ID NO: 55052 - DNA, 120 bp, synthetic construct; identical to SEQ ID NO: 25098
  source 1..120: mol_type = other DNA

SEQ ID NO: 55053 - DNA, 120 bp, synthetic construct; identical to SEQ ID NO: 25099
  source 1..120: mol_type = other DNA

SEQ ID NO: 55054 - DNA, 120 bp, synthetic construct; identical to SEQ ID NO: 25100
  source 1..120: mol_type = other DNA

SEQ ID NO: 55055 - DNA, 120 bp, synthetic construct; identical to SEQ ID NO: 7723
  source 1..120: mol_type = other DNA

SEQ ID NO: 55056 - DNA, 120 bp, synthetic construct; identical to SEQ ID NO: 25102
  source 1..120: mol_type = other DNA

SEQ ID NO: 55057 - DNA, 120 bp, synthetic construct; identical to SEQ ID NO: 25103
  source 1..120: mol_type = other DNA

SEQ ID NO: 55058 - DNA, 120 bp, synthetic construct; identical to SEQ ID NO: 728
  source 1..120: mol_type = other DNA

SEQ ID NO: 55059 - DNA, 120 bp, synthetic construct; identical to SEQ ID NO: 7724
  source 1..120: mol_type = other DNA

SEQ ID NO: 55060 - DNA, 120 bp, synthetic construct; identical to SEQ ID NO: 25106
  source 1..120: mol_type = other DNA

SEQ ID NO: 55061 - DNA, 120 bp, synthetic construct; identical to SEQ ID NO: 25107
  source 1..120: mol_type = other DNA

SEQ ID NO: 55062 - DNA, 120 bp, synthetic construct; identical to SEQ ID NO: 25108
  source 1..120: mol_type = other DNA

SEQ ID NO: 55063 - DNA, 120 bp, synthetic construct; identical to SEQ ID NO: 25109
  source 1..120: mol_type = other DNA

SEQ ID NO: 55064 - DNA, 120 bp, synthetic construct; identical to SEQ ID NO: 7725
  source 1..120: mol_type = other DNA

SEQ ID NO: 55065 - DNA, 120 bp, synthetic construct; identical to SEQ ID NO: 25111
  source 1..120: mol_type = other DNA

SEQ ID NO: 55066 - DNA, 120 bp, synthetic construct; identical to SEQ ID NO: 25112
  source 1..120: mol_type = other DNA

SEQ ID NO: 55067 - DNA, 120 bp, synthetic construct; identical to SEQ ID NO: 25113
  source 1..120: mol_type = other DNA

SEQ ID NO: 55068 - DNA, 120 bp, synthetic construct; identical to SEQ ID NO: 7726
  source 1..120: mol_type = other DNA

SEQ ID NO: 55069 - DNA, 120 bp, synthetic construct; identical to SEQ ID NO: 25115
  source 1..120: mol_type = other DNA

SEQ ID NO: 55070 - DNA, 120 bp, synthetic construct; identical to SEQ ID NO: 25116
  source 1..120: mol_type = other DNA

SEQ ID NO: 55071 - DNA, 120 bp, synthetic construct; identical to SEQ ID NO: 7727
  source 1..120: mol_type = other DNA

SEQ ID NO: 55072 - DNA, 120 bp, synthetic construct; identical to SEQ ID NO: 25118
  source 1..120: mol_type = other DNA

SEQ ID NO: 55073 - DNA, 120 bp, synthetic construct; identical to SEQ ID NO: 25119
  source 1..120: mol_type = other DNA

SEQ ID NO: 55074 - DNA, 120 bp, synthetic construct; identical to SEQ ID NO: 25120
  source 1..120: mol_type = other DNA

SEQ ID NO: 55075 - DNA, 120 bp, synthetic construct; identical to SEQ ID NO: 7728
  source 1..120: mol_type = other DNA

SEQ ID NO: 55076 - DNA, 120 bp, synthetic construct; identical to SEQ ID NO: 25122
  source 1..120: mol_type = other DNA

SEQ ID NO: 55077 - DNA, 120 bp, synthetic construct; identical to SEQ ID NO: 25123
  source 1..120: mol_type = other DNA

SEQ ID NO: 55078 - DNA, 120 bp, synthetic construct; identical to SEQ ID NO: 25124
  source 1..120: mol_type = other DNA

SEQ ID NO: 55079 - DNA, 120 bp, synthetic construct; identical to SEQ ID NO: 25125
  source 1..120: mol_type = other DNA

SEQ ID NO: 55080 - DNA, 120 bp, synthetic construct; identical to SEQ ID NO: 7729
  source 1..120: mol_type = other DNA

SEQ ID NO: 55081 - DNA, 120 bp, synthetic construct; identical to SEQ ID NO: 25127
  source 1..120: mol_type = other DNA

SEQ ID NO: 55082 - DNA, 120 bp, synthetic construct; identical to SEQ ID NO: 25128
  source 1..120: mol_type = other DNA

SEQ ID NO: 55083 - DNA, 120 bp, synthetic construct; identical to SEQ ID NO: 25129
  source 1..120: mol_type = other DNA

SEQ ID NO: 55084 - DNA, 120 bp, synthetic construct; identical to SEQ ID NO: 7730
  source 1..120: mol_type = other DNA

SEQ ID NO: 55085 - DNA, 120 bp, synthetic construct; identical to SEQ ID NO: 25131
  source 1..120: mol_type = other DNA

SEQ ID NO: 55086 - DNA, 120 bp, synthetic construct; identical to SEQ ID NO: 25132
  source 1..120: mol_type = other DNA

SEQ ID NO: 55087 - DNA, 120 bp, synthetic construct; identical to SEQ ID NO: 25133
  source 1..120: mol_type = other DNA

SEQ ID NO: 55088 - DNA, 120 bp, synthetic construct; identical to SEQ ID NO: 7731
  source 1..120: mol_type = other DNA

SEQ ID NO: 55089 - DNA, 120 bp, synthetic construct; identical to SEQ ID NO: 25135
  source 1..120: mol_type = other DNA

SEQ ID NO: 55090 - DNA, 120 bp, synthetic construct; identical to SEQ ID NO: 25136
  source 1..120: mol_type = other DNA

SEQ ID NO: 55091 - DNA, 120 bp, synthetic construct; identical to SEQ ID NO: 25137
  source 1..120: mol_type = other DNA

SEQ ID NO: 55092 - DNA, 120 bp, synthetic construct; identical to SEQ ID NO: 7732
  source 1..120: mol_type = other DNA

SEQ ID NO: 55093 - DNA, 120 bp, synthetic construct; identical to SEQ ID NO: 25139
  source 1..120: mol_type = other DNA

SEQ ID NO: 55094 - DNA, 120 bp, synthetic construct; identical to SEQ ID NO: 25140
  source 1..120: mol_type = other DNA

SEQ ID NO: 55095 - DNA, 120 bp, synthetic construct; identical to SEQ ID NO: 25141
  source 1..120: mol_type = other DNA

SEQ ID NO: 55096 - DNA, 120 bp, synthetic construct; identical to SEQ ID NO: 7733
  source 1..120: mol_type = other DNA

SEQ ID NO: 55097 - DNA, 120 bp, synthetic construct; identical to SEQ ID NO: 25143
  source 1..120: mol_type = other DNA

SEQ ID NO: 55098 - DNA, 120 bp, synthetic construct; identical to SEQ ID NO: 25144
  source 1..120: mol_type = other DNA

SEQ ID NO: 55099 - DNA, 120 bp, synthetic construct; identical to SEQ ID NO: 25145
  source 1..120: mol_type = other DNA

SEQ ID NO: 55100 - DNA, 120 bp, synthetic construct; identical to SEQ ID NO: 7734
  source 1..120: mol_type = other DNA

SEQ ID NO: 55101 - DNA, 120 bp, synthetic construct; identical to SEQ ID NO: 25147
  source 1..120: mol_type = other DNA

SEQ ID NO: 55102 - DNA, 120 bp, synthetic construct; identical to SEQ ID NO: 25148
  source 1..120: mol_type = other DNA

SEQ ID NO: 55103 - DNA, 120 bp, synthetic construct; identical to SEQ ID NO: 7735
  source 1..120: mol_type = other DNA

SEQ ID NO: 55104 - DNA, 120 bp, synthetic construct; identical to SEQ ID NO: 25150
  source 1..120: mol_type = other DNA

SEQ ID NO: 55105 - DNA, 120 bp, synthetic construct; identical to SEQ ID NO: 25151
  source 1..120: mol_type = other DNA

SEQ ID NO: 55106 - DNA, 120 bp, synthetic construct; identical to SEQ ID NO: 25152
  source 1..120: mol_type = other DNA

SEQ ID NO: 55107 - DNA, 120 bp, synthetic construct; identical to SEQ ID NO: 7736
  source 1..120: mol_type = other DNA

SEQ ID NO: 55108 - DNA, 120 bp, synthetic construct; identical to SEQ ID NO: 25154
  source 1..120: mol_type = other DNA

SEQ ID NO: 55109 - DNA, 120 bp, synthetic construct; identical to SEQ ID NO: 740
  source 1..120: mol_type = other DNA

SEQ ID NO: 55110 - DNA, 120 bp, synthetic construct; identical to SEQ ID NO: 25156
  source 1..120: mol_type = other DNA

SEQ ID NO: 55111 - DNA, 120 bp, synthetic construct; identical to SEQ ID NO: 7737
  source 1..120: mol_type = other DNA

SEQ ID NO: 55112 - DNA, 120 bp, synthetic construct; identical to SEQ ID NO: 25158
  source 1..120: mol_type = other DNA

SEQ ID NO: 55113 - DNA, 120 bp, synthetic construct; identical to SEQ ID NO: 25159
  source 1..120: mol_type = other DNA

SEQ ID NO: 55114 - DNA, 120 bp, synthetic construct; identical to SEQ ID NO: 25160
  source 1..120: mol_type = other DNA

SEQ ID NO: 55115 - DNA, 120 bp, synthetic construct; identical to SEQ ID NO: 25161
  source 1..120: mol_type = other DNA

SEQ ID NO: 55116 - DNA, 120 bp, synthetic construct; identical to SEQ ID NO: 7738
  source 1..120: mol_type = other DNA

SEQ ID NO: 55117 - DNA, 120 bp, synthetic construct; identical to SEQ ID NO: 25163
  source 1..120: mol_type = other DNA

SEQ ID NO: 55118 - DNA, 120 bp, synthetic construct; identical to SEQ ID NO: 25164
  source 1..120: mol_type = other DNA

SEQ ID NO: 55119 - DNA, 120 bp, synthetic construct; identical to SEQ ID NO: 7739
  source 1..120: mol_type = other DNA

SEQ ID NO: 55120 - DNA, 120 bp, synthetic construct; identical to SEQ ID NO: 25166
  source 1..120: mol_type = other DNA

SEQ ID NO: 55121 - DNA, 120 bp, synthetic construct; identical to SEQ ID NO: 25167
  source 1..120: mol_type = other DNA

SEQ ID NO: 55122 - DNA, 120 bp, synthetic construct; identical to SEQ ID NO: 25168
  source 1..120: mol_type = other DNA

SEQ ID NO: 55123 - DNA, 120 bp, synthetic construct; identical to SEQ ID NO: 25169
  source 1..120: mol_type = other DNA

SEQ ID NO: 55124 - DNA, 120 bp, synthetic construct; identical to SEQ ID NO: 7740
  source 1..120: mol_type = other DNA

SEQ ID NO: 55125 - DNA, 120 bp, synthetic construct; identical to SEQ ID NO: 25171
  source 1..120: mol_type = other DNA

SEQ ID NO: 55126 - DNA, 120 bp, synthetic construct; identical to SEQ ID NO: 25172
  source 1..120: mol_type = other DNA

SEQ ID NO: 55127 - DNA, 120 bp, synthetic construct; identical to SEQ ID NO: 25173
  source 1..120: mol_type = other DNA

SEQ ID NO: 55128 - DNA, 120 bp, synthetic construct; identical to SEQ ID NO: 7741
  source 1..120: mol_type = other DNA

SEQ ID NO: 55129 - DNA, 120 bp, synthetic construct; identical to SEQ ID NO: 25175
  source 1..120: mol_type = other DNA

SEQ ID NO: 55130 - DNA, 120 bp, synthetic construct; identical to SEQ ID NO: 25176
  source 1..120: mol_type = other DNA

SEQ ID NO: 55131 - DNA, 120 bp, synthetic construct; identical to SEQ ID NO: 7742
  source 1..120: mol_type = other DNA

SEQ ID NO: 55132 - DNA, 120 bp, synthetic construct; identical to SEQ ID NO: 25178
  source 1..120: mol_type = other DNA

SEQ ID NO: 55133 - DNA, 120 bp, synthetic construct; identical to SEQ ID NO: 25179
  source 1..120: mol_type = other DNA

SEQ ID NO: 55134 - DNA, 120 bp, synthetic construct; identical to SEQ ID NO: 746
  source 1..120: mol_type = other DNA

SEQ ID NO: 55135 - DNA, 120 bp, synthetic construct; identical to SEQ ID NO: 25181
  source 1..120: mol_type = other DNA

SEQ ID NO: 55136 - DNA, 120 bp, synthetic construct; identical to SEQ ID NO: 7743
  source 1..120: mol_type = other DNA

SEQ ID NO: 55137 - DNA, 120 bp, synthetic construct; identical to SEQ ID NO: 25183
  source 1..120: mol_type = other DNA

SEQ ID NO: 55138 - DNA, 120 bp, synthetic construct; identical to SEQ ID NO: 25184
  source 1..120: mol_type = other DNA

SEQ ID NO: 55139 - DNA, 120 bp, synthetic construct; identical to SEQ ID NO: 25185
  source 1..120: mol_type = other DNA

SEQ ID NO: 55140 - DNA, 120 bp, synthetic construct; identical to SEQ ID NO: 7744
  source 1..120: mol_type = other DNA

SEQ ID NO: 55141 - DNA, 120 bp, synthetic construct; identical to SEQ ID NO: 25187
  source 1..120: mol_type = other DNA

SEQ ID NO: 55142 - DNA, 120 bp, synthetic construct; identical to SEQ ID NO: 25188
  source 1..120: mol_type = other DNA

SEQ ID NO: 55143 - DNA, 120 bp, synthetic construct; identical to SEQ ID NO: 25189
  source 1..120: mol_type = other DNA

SEQ ID NO: 55144 - DNA, 120 bp, synthetic construct; identical to SEQ ID NO: 7745
  source 1..120: mol_type = other DNA

SEQ ID NO: 55145 - DNA, 120 bp, synthetic construct; identical to SEQ ID NO: 25191
  source 1..120: mol_type = other DNA

SEQ ID NO: 55146 - DNA, 120 bp, synthetic construct; identical to SEQ ID NO: 25192
  source 1..120: mol_type = other DNA

SEQ ID NO: 55147 - DNA, 120 bp, synthetic construct; identical to SEQ ID NO: 25193
  source 1..120: mol_type = other DNA

SEQ ID NO: 55148 - DNA, 120 bp, synthetic construct; identical to SEQ ID NO: 7746
  source 1..120: mol_type = other DNA

SEQ ID NO: 55149 - DNA, 120 bp, synthetic construct; identical to SEQ ID NO: 25195
  source 1..120: mol_type = other DNA

SEQ ID NO: 55150 - DNA, 120 bp, synthetic construct; identical to SEQ ID NO: 25196
  source 1..120: mol_type = other DNA

SEQ ID NO: 55151 - DNA, 120 bp, synthetic construct; identical to SEQ ID NO: 25197
  source 1..120: mol_type = other DNA

SEQ ID NO: 55152 - DNA, 120 bp, synthetic construct; identical to SEQ ID NO: 7747
  source 1..120: mol_type = other DNA

SEQ ID NO: 55153 - DNA, 120 bp, synthetic construct; identical to SEQ ID NO: 25199
  source 1..120: mol_type = other DNA

SEQ ID NO: 55154 - DNA, 120 bp, synthetic construct; identical to SEQ ID NO: 25200
  source 1..120: mol_type = other DNA

SEQ ID NO: 55155 - DNA, 120 bp, synthetic construct; identical to SEQ ID NO: 25201
  source 1..120: mol_type = other DNA

SEQ ID NO: 55156 - DNA, 120 bp, synthetic construct; identical to SEQ ID NO: 7748
  source 1..120: mol_type = other DNA

SEQ ID NO: 55157 - DNA, 120 bp, synthetic construct; identical to SEQ ID NO: 25203
  source 1..120: mol_type = other DNA

SEQ ID NO: 55158 - DNA, 120 bp, synthetic construct; identical to SEQ ID NO: 25204
  source 1..120: mol_type = other DNA

SEQ ID NO: 55159 - DNA, 120 bp, synthetic construct; identical to SEQ ID NO: 25205
  source 1..120: mol_type = other DNA

SEQ ID NO: 55160 - DNA, 120 bp, synthetic construct; identical to SEQ ID NO: 7749
  source 1..120: mol_type = other DNA

SEQ ID NO: 55161 - DNA, 120 bp, synthetic construct; identical to SEQ ID NO: 25207
  source 1..120: mol_type = other DNA

SEQ ID NO: 55162 - DNA, 120 bp, synthetic construct; identical to SEQ ID NO: 25208
  source 1..120: mol_type = other DNA

SEQ ID NO: 55163 - DNA, 120 bp, synthetic construct; identical to SEQ ID NO: 25209
  source 1..120: mol_type = other DNA

SEQ ID NO: 55164 - DNA, 120 bp, synthetic construct; identical to SEQ ID NO: 7750
  source 1..120: mol_type = other DNA

SEQ ID NO: 55165 - DNA, 120 bp, synthetic construct; identical to SEQ ID NO: 25211
  source 1..120: mol_type = other DNA

SEQ ID NO: 55166 - DNA, 120 bp, synthetic construct; identical to SEQ ID NO: 25212
  source 1..120: mol_type = other DNA

SEQ ID NO: 55167 - DNA, 120 bp, synthetic construct; identical to SEQ ID NO: 7751
  source 1..120: mol_type = other DNA

SEQ ID NO: 55168 - DNA, 120 bp, synthetic construct; identical to SEQ ID NO: 25214
  source 1..120: mol_type = other DNA

SEQ ID NO: 55169 - DNA, 120 bp, synthetic construct; identical to SEQ ID NO: 25215
  source 1..120: mol_type = other DNA

SEQ ID NO: 55170 - DNA, 120 bp, synthetic construct; identical to SEQ ID NO: 25216
  source 1..120: mol_type = other DNA

SEQ ID NO: 55171 - DNA, 120 bp, synthetic construct; identical to SEQ ID NO: 25217
  source 1..120: mol_type = other DNA

SEQ ID NO: 55172 - DNA, 120 bp, synthetic construct; identical to SEQ ID NO: 7752
  source 1..120: mol_type = other DNA

SEQ ID NO: 55173 - DNA, 120 bp, synthetic construct; identical to SEQ ID NO: 25219
  source 1..120: mol_type = other DNA

SEQ ID NO: 55174 - DNA, 120 bp, synthetic construct; identical to SEQ ID NO: 25220
  source 1..120: mol_type = other DNA

SEQ ID NO: 55175 - DNA, 120 bp, synthetic construct; identical to SEQ ID NO: 25221
  source 1..120: mol_type = other DNA

SEQ ID NO: 55176 - DNA, 120 bp, synthetic construct; identical to SEQ ID NO: 25222
  source 1..120: mol_type = other DNA

SEQ ID NO: 55177 - DNA, 120 bp, synthetic construct; identical to SEQ ID NO: 7753
  source 1..120: mol_type = other DNA

SEQ ID NO: 55178 - DNA, 120 bp, synthetic construct; identical to SEQ ID NO: 25224
  source 1..120: mol_type = other DNA

SEQ ID NO: 55179 - DNA, 120 bp, synthetic construct; identical to SEQ ID NO: 25225
  source 1..120: mol_type = other DNA

SEQ ID NO: 55180 - DNA, 120 bp, synthetic construct; identical to SEQ ID NO: 7754
  source 1..120: mol_type = other DNA

SEQ ID NO: 55181 - DNA, 120 bp, synthetic construct; identical to SEQ ID NO: 25227
  source 1..120: mol_type = other DNA

SEQ ID NO: 55182 - DNA, 120 bp, synthetic construct; identical to SEQ ID NO: 757
  source 1..120: mol_type = other DNA

SEQ ID NO: 55183 - DNA, 120 bp, synthetic construct; identical to SEQ ID NO: 7755
  source 1..120: mol_type = other DNA

SEQ ID NO: 55184 - DNA, 120 bp, synthetic construct; identical to SEQ ID NO: 25230
  source 1..120: mol_type = other DNA

SEQ ID NO: 55185 - DNA, 120 bp, synthetic construct; identical to SEQ ID NO: 25231
  source 1..120: mol_type = other DNA

SEQ ID NO: 55186 - DNA, 120 bp, synthetic construct; identical to SEQ ID NO: 25232
  source 1..120: mol_type = other DNA

SEQ ID NO: 55187 - DNA, 120 bp, synthetic construct; identical to SEQ ID NO: 25233
  source 1..120: mol_type = other DNA

SEQ ID NO: 55188 - DNA, 120 bp, synthetic construct; identical to SEQ ID NO: 7756
  source 1..120: mol_type = other DNA

SEQ ID NO: 55189 - DNA, 120 bp, synthetic construct; identical to SEQ ID NO: 25235
  source 1..120: mol_type = other DNA

SEQ ID NO: 55190 - DNA, 120 bp, synthetic construct; identical to SEQ ID NO: 25236
  source 1..120: mol_type = other DNA

SEQ ID NO: 55191 - DNA, 120 bp, synthetic construct; identical to SEQ ID NO: 7757
  source 1..120: mol_type = other DNA

SEQ ID NO: 55192 - DNA, 120 bp, synthetic construct; identical to SEQ ID NO: 25238
  source 1..120: mol_type = other DNA

SEQ ID NO: 55193 - DNA, 120 bp, synthetic construct; identical to SEQ ID NO: 25239
  source 1..120: mol_type = other DNA

SEQ ID NO: 55194 - DNA, 120 bp, synthetic construct; identical to SEQ ID NO: 25240
  source 1..120: mol_type = other DNA

SEQ ID NO: 55195 - DNA, 120 bp, synthetic construct; identical to SEQ ID NO: 7758
  source 1..120: mol_type = other DNA

SEQ ID NO: 55196 - DNA, 120 bp, synthetic construct; identical to SEQ ID NO: 25242
  source 1..120: mol_type = other DNA

SEQ ID NO: 55197 - DNA, 120 bp, synthetic construct; identical to SEQ ID NO: 25243
  source 1..120: mol_type = other DNA

SEQ ID NO: 55198 - DNA, 120 bp, synthetic construct; identical to SEQ ID NO: 25244
  source 1..120: mol_type = other DNA

SEQ ID NO: 55199 - DNA, 120 bp, synthetic construct; identical to SEQ ID NO: 7759
  source 1..120: mol_type = other DNA

SEQ ID NO: 55200 - DNA, 120 bp, synthetic construct; identical to SEQ ID NO: 25246
  source 1..120: mol_type = other DNA

SEQ ID NO: 55201 - DNA, 120 bp, synthetic construct; identical to SEQ ID NO: 25247
  source 1..120: mol_type = other DNA

SEQ ID NO: 55202 - DNA, 120 bp, synthetic construct; identical to SEQ ID NO: 7760
  source 1..120: mol_type = other DNA

SEQ ID NO: 55203 - DNA, 120 bp, synthetic construct; identical to SEQ ID NO: 25249
  source 1..120: mol_type = other DNA

SEQ ID NO: 55204 - DNA, 120 bp, synthetic construct; identical to SEQ ID NO: 25250
  source 1..120: mol_type = other DNA

SEQ ID NO: 55205 - DNA, 120 bp, synthetic construct; identical to SEQ ID NO: 25251
  source 1..120: mol_type = other DNA

SEQ ID NO: 55206 - DNA, 120 bp, synthetic construct; identical to SEQ ID NO: 25252
  source 1..120: mol_type = other DNA

SEQ ID NO: 55207 - DNA, 120 bp, synthetic construct; identical to SEQ ID NO: 7761
  source 1..120: mol_type = other DNA

SEQ ID NO: 55208 - DNA, 120 bp, synthetic construct; identical to SEQ ID NO: 25254
  source 1..120: mol_type = other DNA

SEQ ID NO: 55209 - DNA, 120 bp, synthetic construct; identical to SEQ ID NO: 25255
  source 1..120: mol_type = other DNA

SEQ ID NO: 55210 - DNA, 120 bp, synthetic construct; identical to SEQ ID NO: 25256
  source 1..120: mol_type = other DNA

SEQ ID NO: 55211 - DNA, 120 bp, synthetic construct; identical to SEQ ID NO: 7762
  source 1..120: mol_type = other DNA

SEQ ID NO: 55212 - DNA, 120 bp, synthetic construct; identical to SEQ ID NO: 25258
  source 1..120: mol_type = other DNA

SEQ ID NO: 55213 - DNA, 120 bp, synthetic construct; identical to SEQ ID NO: 25259
  source 1..120: mol_type = other DNA

SEQ ID NO: 55214 - DNA, 120 bp, synthetic construct; identical to SEQ ID NO: 25260
  source 1..120: mol_type = other DNA

SEQ ID NO: 55215 - DNA, 120 bp, synthetic construct; identical to SEQ ID NO: 25261
  source 1..120: mol_type = other DNA

SEQ ID NO: 55216 - DNA, 120 bp, synthetic construct; identical to SEQ ID NO: 7763
  source 1..120: mol_type = other DNA

SEQ ID NO: 55217 - DNA, 120 bp, synthetic construct; identical to SEQ ID NO: 25263
  source 1..120: mol_type = other DNA

SEQ ID NO: 55218 - DNA, 120 bp, synthetic construct; identical to SEQ ID NO: 25264
  source 1..120: mol_type = other DNA

SEQ ID NO: 55219 - DNA, 120 bp, synthetic construct; identical to SEQ ID NO: 7764
  source 1..120: mol_type = other DNA

SEQ ID NO: 55220 - DNA, 120 bp, synthetic construct; identical to SEQ ID NO: 25266
  source 1..120: mol_type = other DNA

SEQ ID NO: 55221 - DNA, 120 bp, synthetic construct; identical to SEQ ID NO: 25267
  source 1..120: mol_type = other DNA

SEQ ID NO: 55222 - DNA, 120 bp, synthetic construct; identical to SEQ ID NO: 25268
  source 1..120: mol_type = other DNA

SEQ ID NO: 55223 - DNA, 120 bp, synthetic construct; identical to SEQ ID NO: 7765
  source 1..120: mol_type = other DNA

SEQ ID NO: 55224 - DNA, 120 bp, synthetic construct; identical to SEQ ID NO: 25270
  source 1..120: mol_type = other DNA

SEQ ID NO: 55225 - DNA, 120 bp, synthetic construct; identical to SEQ ID NO: 25271
  source 1..120: mol_type = other DNA

SEQ ID NO: 55226 - DNA, 120 bp, synthetic construct; identical to SEQ ID NO: 25272
  source 1..120: mol_type = other DNA

SEQ ID NO: 55227 - DNA, 120 bp, synthetic construct; identical to SEQ ID NO: 25273
  source 1..120: mol_type = other DNA

SEQ ID NO: 55228 - DNA, 120 bp, synthetic construct; identical to SEQ ID NO: 7766
  source 1..120: mol_type = other DNA

SEQ ID NO: 55229 - DNA, 120 bp, synthetic construct; identical to SEQ ID NO: 25275
  source 1..120: mol_type = other DNA

SEQ ID NO: 55230 - DNA, 120 bp, synthetic construct; identical to SEQ ID NO: 25276
  source 1..120: mol_type = other DNA

SEQ ID NO: 55231 - DNA, 120 bp, synthetic construct; identical to SEQ ID NO: 25277
  source 1..120: mol_type = other DNA

SEQ ID NO: 55232 - DNA, 120 bp, synthetic construct; identical to SEQ ID NO: 7767
  source 1..120: mol_type = other DNA

SEQ ID NO: 55233 - DNA, 120 bp, synthetic construct; identical to SEQ ID NO: 25279
  source 1..120: mol_type = other DNA

SEQ ID NO: 55234 - DNA, 120 bp, synthetic construct; identical to SEQ ID NO: 25280
  source 1..120: mol_type = other DNA

SEQ ID NO: 55235 - DNA, 120 bp, synthetic construct; identical to SEQ ID NO: 7768
  source 1..120: mol_type = other DNA

SEQ ID NO: 55236 - DNA, 120 bp, synthetic construct; identical to SEQ ID NO: 25282
  source 1..120: mol_type = other DNA

SEQ ID NO: 55237 - DNA, 120 bp, synthetic construct; identical to SEQ ID NO: 25283
  source 1..120: mol_type = other DNA

SEQ ID NO: 55238 - DNA, 120 bp, synthetic construct; identical to SEQ ID NO: 25284
  source 1..120: mol_type = other DNA

SEQ ID NO: 55239 - DNA, 120 bp, synthetic construct; identical to SEQ ID NO: 7769
  source 1..120: mol_type = other DNA

SEQ ID NO: 55240 - DNA, 120 bp, synthetic construct; identical to SEQ ID NO: 25286
  source 1..120: mol_type = other DNA

SEQ ID NO: 55241 - DNA, 120 bp, synthetic construct; identical to SEQ ID NO: 25287
  source 1..120: mol_type = other DNA

SEQ ID NO: 55242 - DNA, 120 bp, synthetic construct; identical to SEQ ID NO: 25288
  source 1..120: mol_type = other DNA

SEQ ID NO: 55243 - DNA, 120 bp, synthetic construct; identical to SEQ ID NO: 25289
  source 1..120: mol_type = other DNA

SEQ ID NO: 55244 - DNA, 120 bp, synthetic construct; identical to SEQ ID NO: 7770
  source 1..120: mol_type = other DNA

SEQ ID NO: 55245 - DNA, 120 bp, synthetic construct; identical to SEQ ID NO: 25291
  source 1..120: mol_type = other DNA

SEQ ID NO: 55246 - DNA, 120 bp, synthetic construct; identical to SEQ ID NO: 25292
  source 1..120: mol_type = other DNA

SEQ ID NO: 55247 - DNA, 120 bp, synthetic construct; identical to SEQ ID NO: 25293
  source 1..120: mol_type = other DNA

SEQ ID NO: 55248 - DNA, 120 bp, synthetic construct; identical to SEQ ID NO: 7771
  source 1..120: mol_type = other DNA

SEQ ID NO: 55249 - DNA, 120 bp, synthetic construct; identical to SEQ ID NO: 25295
  source 1..120: mol_type = other DNA

SEQ ID NO: 55250 - DNA, 120 bp, synthetic construct; identical to SEQ ID NO: 25296
  source 1..120: mol_type = other DNA

SEQ ID NO: 55251 - DNA, 120 bp, synthetic construct; identical to SEQ ID NO: 7772
  source 1..120: mol_type = other DNA

SEQ ID NO: 55252 - DNA, 120 bp, synthetic construct; identical to SEQ ID NO: 25298
  source 1..120: mol_type = other DNA

SEQ ID NO: 55253 - DNA, 120 bp, synthetic construct; identical to SEQ ID NO: 25299
  source 1..120: mol_type = other DNA

SEQ ID NO: 55254 - DNA, 120 bp, synthetic construct; identical to SEQ ID NO: 25300
  source 1..120: mol_type = other DNA

SEQ ID NO: 55255 - DNA, 120 bp, synthetic construct; identical to SEQ ID NO: 25301
  source 1..120: mol_type = other DNA

SEQ ID NO: 55256 - DNA, 120 bp, synthetic construct; identical to SEQ ID NO: 7773
  source 1..120: mol_type = other DNA

SEQ ID NO: 55257 - DNA, 120 bp, synthetic construct; identical to SEQ ID NO: 25303
  source 1..120: mol_type = other DNA

SEQ ID NO: 55258 - DNA, 120 bp, synthetic construct; identical to SEQ ID NO: 25304
  source 1..120: mol_type = other DNA

SEQ ID NO: 55259 - DNA, 120 bp, synthetic construct; identical to SEQ ID NO: 7774
  source 1..120: mol_type = other DNA

SEQ ID NO: 55260 - DNA, 120 bp, synthetic construct; identical to SEQ ID NO: 25306
  source 1..120: mol_type = other DNA

SEQ ID NO: 55261 - DNA, 120 bp, synthetic construct; identical to SEQ ID NO: 25307
  source 1..120: mol_type = other DNA

SEQ ID NO: 55262 - DNA, 120 bp, synthetic construct; identical to SEQ ID NO: 25308
  source 1..120: mol_type = other DNA

SEQ ID NO: 55263 - DNA, 120 bp, synthetic construct; identical to SEQ ID NO: 7775
  source 1..120: mol_type = other DNA

SEQ ID NO: 55264 - DNA, 120 bp, synthetic construct; identical to SEQ ID NO: 25310
  source 1..120: mol_type = other DNA

SEQ ID NO: 55265 - DNA, 120 bp, synthetic construct; identical to SEQ ID NO: 25311
  source 1..120: mol_type = other DNA

SEQ ID NO: 55266 - DNA, 120 bp, synthetic construct; identical to SEQ ID NO: 25312
  source 1..120: mol_type = other DNA

SEQ ID NO: 55267 - DNA, 120 bp, synthetic construct; identical to SEQ ID NO: 7776
  source 1..120: mol_type = other DNA

SEQ ID NO: 55268 - DNA, 120 bp, synthetic construct; identical to SEQ ID NO: 25314
  source 1..120: mol_type = other DNA

SEQ ID NO: 55269 - DNA, 120 bp, synthetic construct; identical to SEQ ID NO: 25315
  source 1..120: mol_type = other DNA

SEQ ID NO: 55270 - DNA, 120 bp, synthetic construct; identical to SEQ ID NO: 25316
  source 1..120: mol_type = other DNA

SEQ ID NO: 55271 - DNA, 120 bp, synthetic construct; identical to SEQ ID NO: 25317
  source 1..120: mol_type = other DNA

SEQ ID NO: 55272 - DNA, 120 bp, synthetic construct; identical to SEQ ID NO: 7777
  source 1..120: mol_type = other DNA

SEQ ID NO: 55273 - DNA, 120 bp, synthetic construct; identical to SEQ ID NO: 25319
  source 1..120: mol_type = other DNA

SEQ ID NO: 55274 - DNA, 120 bp, synthetic construct; identical to SEQ ID NO: 25320
  source 1..120: mol_type = other DNA

SEQ ID NO: 55275 - DNA, 120 bp, synthetic construct; identical to SEQ ID NO: 7778
  source 1..120: mol_type = other DNA

SEQ ID NO: 55276 - DNA, 120 bp, synthetic construct; identical to SEQ ID NO: 25322
  source 1..120: mol_type = other DNA

SEQ ID NO: 55277 - DNA, 120 bp, synthetic construct; identical to SEQ ID NO: 25323
  source 1..120: mol_type = other DNA

SEQ ID NO: 55278 - DNA, 120 bp, synthetic construct; identical to SEQ ID NO: 25324
  source 1..120: mol_type = other DNA

SEQ ID NO: 55279 - DNA, 120 bp, synthetic construct; identical to SEQ ID NO: 7779
  source 1..120: mol_type = other DNA

SEQ ID NO: 55280 - DNA, 120 bp, synthetic construct; identical to SEQ ID NO: 25326
  source 1..120: mol_type = other DNA

SEQ ID NO: 55281 - DNA, 120 bp, synthetic construct; identical to SEQ ID NO: 25327
  source 1..120: mol_type = other DNA

SEQ ID NO: 55282 - DNA, 120 bp, synthetic construct; identical to SEQ ID NO: 25328
  source 1..120: mol_type = other DNA

SEQ ID NO: 55283 - DNA, 120 bp, synthetic construct; identical to SEQ ID NO: 25329
  source 1..120: mol_type = other DNA

SEQ ID NO: 55284 - DNA, 120 bp, synthetic construct; identical to SEQ ID NO: 7780
  source 1..120: mol_type = other DNA

SEQ ID NO: 55285 - DNA, 120 bp, synthetic construct; identical to SEQ ID NO: 25331
  source 1..120: mol_type = other DNA

SEQ ID NO: 55286 - DNA, 120 bp, synthetic construct; identical to SEQ ID NO: 25332
  source 1..120: mol_type = other DNA

SEQ ID NO: 55287 - DNA, 120 bp, synthetic construct; identical to SEQ ID NO: 25333
  source 1..120: mol_type = other DNA

SEQ ID NO: 55288 - DNA, 120 bp, synthetic construct; identical to SEQ ID NO: 7781
  source 1..120: mol_type = other DNA

SEQ ID NO: 55289 - DNA, 120 bp, synthetic construct; identical to SEQ ID NO: 25335
  source 1..120: mol_type = other DNA

SEQ ID NO: 55290 - DNA, 120 bp, synthetic construct; identical to SEQ ID NO: 25336
  source 1..120: mol_type = other DNA

SEQ ID NO: 55291 - DNA, 120 bp, synthetic construct; identical to SEQ ID NO: 7782
  source 1..120: mol_type = other DNA

SEQ ID NO: 55292 - DNA, 120 bp, synthetic construct; identical to SEQ ID NO: 25338
  source 1..120: mol_type = other DNA

SEQ ID NO: 55293 - DNA, 120 bp, synthetic construct; identical to SEQ ID NO: 25339
  source 1..120: mol_type = other DNA

SEQ ID NO: 55294 - DNA, 120 bp, synthetic construct; identical to SEQ ID NO: 25340
  source 1..120: mol_type = other DNA

SEQ ID NO: 55295 - DNA, 120 bp, synthetic construct; identical to SEQ ID NO: 7783
  source 1..120: mol_type = other DNA

SEQ ID NO: 55296 - DNA, 120 bp, synthetic construct; identical to SEQ ID NO: 25342
  source 1..120: mol_type = other DNA

SEQ ID NO: 55297 - DNA, 120 bp, synthetic construct; identical to SEQ ID NO: 25343
  source 1..120: mol_type = other DNA

SEQ ID NO: 55298 - DNA, 120 bp, synthetic construct; identical to SEQ ID NO: 25344
  source 1..120: mol_type = other DNA

SEQ ID NO: 55299 - DNA, 120 bp, synthetic construct; identical to SEQ ID NO: 7784
  source 1..120: mol_type = other DNA

SEQ ID NO: 55300 - DNA, 120 bp, synthetic construct; identical to SEQ ID NO: 25346
  source 1..120: mol_type = other DNA

SEQ ID NO: 55301 - DNA, 120 bp, synthetic construct; identical to SEQ ID NO: 25347
  source 1..120: mol_type = other DNA

SEQ ID NO: 55302 - DNA, 120 bp, synthetic construct; identical to SEQ ID NO: 25348
  source 1..120: mol_type = other DNA

SEQ ID NO: 55303 - DNA, 120 bp, synthetic construct; identical to SEQ ID NO: 7785
  source 1..120: mol_type = other DNA

SEQ ID NO: 55304 - DNA, 120 bp, synthetic construct; identical to SEQ ID NO: 25350
  source 1..120: mol_type = other DNA

SEQ ID NO: 55305 - DNA, 120 bp, synthetic construct; identical to SEQ ID NO: 25351
  source 1..120: mol_type = other DNA

SEQ ID NO: 55306 - DNA, 120 bp, synthetic construct; identical to SEQ ID NO: 25352
  source 1..120: mol_type = other DNA

SEQ ID NO: 55307 - DNA, 120 bp, synthetic construct; identical to SEQ ID NO: 25353
  source 1..120: mol_type = other DNA

SEQ ID NO: 55308 - DNA, 120 bp, synthetic construct; identical to SEQ ID NO: 7786
  source 1..120: mol_type = other DNA

SEQ ID NO: 55309 - DNA, 120 bp, synthetic construct; identical to SEQ ID NO: 25355
  source 1..120: mol_type = other DNA

SEQ ID NO: 55310 - DNA, 120 bp, synthetic construct; identical to SEQ ID NO: 25356
  source 1..120: mol_type = other DNA

SEQ ID NO: 55311 - DNA, 120 bp, synthetic construct; identical to SEQ ID NO: 7787
  source 1..120: mol_type = other DNA

SEQ ID NO: 55312 - DNA, 120 bp, synthetic construct; identical to SEQ ID NO: 25358
  source 1..120: mol_type = other DNA

SEQ ID NO: 55313 - DNA, 120 bp, synthetic construct; identical to SEQ ID NO: 25359
  source 1..120: mol_type = other DNA

SEQ ID NO: 55314 - DNA, 120 bp, synthetic construct; identical to SEQ ID NO: 25360
  source 1..120: mol_type = other DNA

SEQ ID NO: 55315 - DNA, 120 bp, synthetic construct; identical to SEQ ID NO: 7788
  source 1..120: mol_type = other DNA

SEQ ID NO: 55316 - DNA, 120 bp, synthetic construct; identical to SEQ ID NO: 25362
  source 1..120: mol_type = other DNA

SEQ ID NO: 55317 - DNA, 120 bp, synthetic construct; identical to SEQ ID NO: 25363
  source 1..120: mol_type = other DNA

SEQ ID NO: 55318 - DNA, 120 bp, synthetic construct; identical to SEQ ID NO: 25364
  source 1..120: mol_type = other DNA

SEQ ID NO: 55319 - DNA, 120 bp, synthetic construct; identical to SEQ ID NO: 7789
  source 1..120: mol_type = other DNA

SEQ ID NO: 55320 - DNA, 120 bp, synthetic construct; identical to SEQ ID NO: 25366
  source 1..120: mol_type = other DNA

SEQ ID NO: 55321 - DNA, 120 bp, synthetic construct; identical to SEQ ID NO: 25367
  source 1..120: mol_type = other DNA

SEQ ID NO: 55322 - DNA, 120 bp, synthetic construct; identical to SEQ ID NO: 25368
  source 1..120: mol_type = other DNA

SEQ ID NO: 55323 - DNA, 120 bp, synthetic construct; identical to SEQ ID NO: 7790
  source 1..120: mol_type = other DNA

SEQ ID NO: 55324 - DNA, 120 bp, synthetic construct; identical to SEQ ID NO: 25370
  source 1..120: mol_type = other DNA

SEQ ID NO: 55325 - DNA, 120 bp, synthetic construct; identical to SEQ ID NO: 25371
  source 1..120: mol_type = other DNA

SEQ ID NO: 55326 - DNA, 120 bp, synthetic construct; identical to SEQ ID NO: 25372
  source 1..120: mol_type = other DNA

SEQ ID NO: 55327 - DNA, 120 bp, synthetic construct; identical to SEQ ID NO: 7791
  source 1..120: mol_type = other DNA

SEQ ID NO: 55328 - DNA, 120 bp, synthetic construct; identical to SEQ ID NO: 25374
  source 1..120: mol_type = other DNA

SEQ ID NO: 55329 - DNA, 120 bp, synthetic construct; identical to SEQ ID NO: 25375
  source 1..120: mol_type = other DNA

SEQ ID NO: 55330 - DNA, 120 bp, synthetic construct; identical to SEQ ID NO: 25376
  source 1..120: mol_type = other DNA

SEQ ID NO: 55331 - DNA, 120 bp, synthetic construct; identical to SEQ ID NO: 7792
  source 1..120: mol_type = other DNA

SEQ ID NO: 55332 - DNA, 120 bp, synthetic construct; identical to SEQ ID NO: 25378
  source 1..120: mol_type = other DNA

SEQ ID NO: 55333 - DNA, 120 bp, synthetic construct; identical to SEQ ID NO: 25379
  source 1..120: mol_type = other DNA

SEQ ID NO: 55334 - DNA, 120 bp, synthetic construct; identical to SEQ ID NO: 25380
  source 1..120: mol_type = other DNA

SEQ ID NO: 55335 - DNA, 120 bp, synthetic construct; identical to SEQ ID NO: 25381
  source 1..120: mol_type = other DNA

SEQ ID NO: 55336 - DNA, 120 bp, synthetic construct; identical to SEQ ID NO: 7793
  source 1..120: mol_type = other DNA

SEQ ID NO: 55337 - DNA, 120 bp, synthetic construct; identical to SEQ ID NO: 25383
  source 1..120: mol_type = other DNA

SEQ ID NO: 55338 - DNA, 120 bp, synthetic construct; identical to SEQ ID NO: 25384
  source 1..120: mol_type = other DNA

SEQ ID NO: 55339 - DNA, 120 bp, synthetic construct; identical to SEQ ID NO: 25385
  source 1..120: mol_type = other DNA

SEQ ID NO: 55340 - DNA, 120 bp, synthetic construct; identical to SEQ ID NO: 7794
  source 1..120: mol_type = other DNA

SEQ ID NO: 55341 - DNA, 120 bp, synthetic construct; identical to SEQ ID NO: 25387
  source 1..120: mol_type = other DNA

SEQ ID NO: 55342 - DNA, 120 bp, synthetic construct; identical to SEQ ID NO: 25388
  source 1..120: mol_type = other DNA

SEQ ID NO: 55343 - DNA, 120 bp, synthetic construct; identical to SEQ ID NO: 7795
  source 1..120: mol_type = other DNA

SEQ ID NO: 55344 - DNA, 120 bp, synthetic construct; identical to SEQ ID NO: 25390
  source 1..120: mol_type = other DNA

SEQ ID NO: 55345 - DNA, 120 bp, synthetic construct; identical to SEQ ID NO: 25391
  source 1..120: mol_type = other DNA

SEQ ID NO: 55346 - DNA, 120 bp, synthetic construct; identical to SEQ ID NO: 25392
  source 1..120: mol_type = other DNA

SEQ ID NO: 55347 - DNA, 120 bp, synthetic construct; identical to SEQ ID NO: 7796
  source 1..120: mol_type = other DNA

SEQ ID NO: 55348 - DNA, 120 bp, synthetic construct; identical to SEQ ID NO: 25394
  source 1..120: mol_type = other DNA

SEQ ID NO: 55349 - DNA, 120 bp, synthetic construct; identical to SEQ ID NO: 25395
  source 1..120: mol_type = other DNA

SEQ ID NO: 55350 - DNA, 120 bp, synthetic construct; identical to SEQ ID NO: 25396
  source 1..120: mol_type = other DNA

SEQ ID NO: 55351 - DNA, 120 bp, synthetic construct; identical to SEQ ID NO: 7797
  source 1..120: mol_type = other DNA

SEQ ID NO: 55352 - DNA, 120 bp, synthetic construct; identical to SEQ ID NO: 25398
  source 1..120: mol_type = other DNA

SEQ ID NO: 55353 - DNA, 120 bp, synthetic construct; identical to SEQ ID NO: 25399
  source 1..120: mol_type = other DNA

SEQ ID NO: 55354 - DNA, 120 bp, synthetic construct; identical to SEQ ID NO: 25400
  source 1..120: mol_type = other DNA

SEQ ID NO: 55355 - DNA, 120 bp, synthetic construct; identical to SEQ ID NO: 25401
  source 1..120: mol_type = other DNA

SEQ ID NO: 55356 - DNA, 120 bp, synthetic construct; identical to SEQ ID NO: 7798
  source 1..120: mol_type = other DNA

SEQ ID NO: 55357 - DNA, 120 bp, synthetic construct; identical to SEQ ID NO: 25403
  source 1..120: mol_type = other DNA

SEQ ID NO: 55358 - DNA, 120 bp, synthetic construct; identical to SEQ ID NO: 25404
  source 1..120: mol_type = other DNA

SEQ ID NO: 55359 - DNA, 120 bp, synthetic construct; identical to SEQ ID NO: 7799
  source 1..120: mol_type = other DNA

SEQ ID NO: 55360 - DNA, 120 bp, synthetic construct; identical to SEQ ID NO: 25406
  source 1..120: mol_type = other DNA

SEQ ID NO: 55361 - DNA, 120 bp, synthetic construct; identical to SEQ ID NO: 25407
  source 1..120: mol_type = other DNA

SEQ ID NO: 55362 - DNA, 120 bp, synthetic construct; identical to SEQ ID NO: 25408
  source 1..120: mol_type = other DNA

SEQ ID NO: 55363 - DNA, 120 bp, synthetic construct; identical to SEQ ID NO: 25409
  source 1..120: mol_type = other DNA

SEQ ID NO: 55364 - DNA, 120 bp, synthetic construct; identical to SEQ ID NO: 7800
  source 1..120: mol_type = other DNA

SEQ ID NO: 55365 - DNA, 120 bp, synthetic construct; identical to SEQ ID NO: 25411
  source 1..120: mol_type = other DNA

SEQ ID NO: 55366 - DNA, 120 bp, synthetic construct; identical to SEQ ID NO: 25412
  source 1..120: mol_type = other DNA

SEQ ID NO: 55367 - DNA, 120 bp, synthetic construct; identical to SEQ ID NO: 7801
  source 1..120: mol_type = other DNA

SEQ ID NO: 55368 - DNA, 120 bp, synthetic construct; identical to SEQ ID NO: 25414
  source 1..120: mol_type = other DNA

SEQ ID NO: 55369 - DNA, 120 bp, synthetic construct; identical to SEQ ID NO: 25415
  source 1..120: mol_type = other DNA

SEQ ID NO: 55370 - DNA, 120 bp, synthetic construct; identical to SEQ ID NO: 25416
  source 1..120: mol_type = other DNA

SEQ ID NO: 55371 - DNA, 120 bp, synthetic construct; identical to SEQ ID NO: 25417
  source 1..120: mol_type = other DNA

SEQ ID NO: 55372 - DNA, 120 bp, synthetic construct; identical to SEQ ID NO: 7802
  source 1..120: mol_type = other DNA

SEQ ID NO: 55373 - DNA, 120 bp, synthetic construct; identical to SEQ ID NO: 25419
  source 1..120: mol_type = other DNA

SEQ ID NO: 55374 - DNA, 120 bp, synthetic construct; identical to SEQ ID NO: 25420
  source 1..120: mol_type = other DNA

SEQ ID NO: 55375 - DNA, 120 bp, synthetic construct; identical to SEQ ID NO: 7803
  source 1..120: mol_type = other DNA

SEQ ID NO: 55376 - DNA, 120 bp, synthetic construct; identical to SEQ ID NO: 25422
  source 1..120: mol_type = other DNA

SEQ ID NO: 55377 - DNA, 120 bp, synthetic construct; identical to SEQ ID NO: 25423
  source 1..120: mol_type = other DNA

SEQ ID NO: 55378 - DNA, 120 bp, synthetic construct; identical to SEQ ID NO: 25424
  source 1..120: mol_type = other DNA

SEQ ID NO: 55379 - DNA, 120 bp, synthetic construct; identical to SEQ ID NO: 7804
  source 1..120: mol_type = other DNA

SEQ ID NO: 55380 - DNA, 120 bp, synthetic construct; identical to SEQ ID NO: 25426
  source 1..120: mol_type = other DNA

SEQ ID NO: 55381 - DNA, 120 bp, synthetic construct; identical to SEQ ID NO: 25427
  source 1..120: mol_type = other DNA

SEQ ID NO: 55382 - DNA, 120 bp, synthetic construct; identical to SEQ ID NO: 25428
  source 1..120: mol_type = other DNA

SEQ ID NO: 55383 - DNA, 120 bp, synthetic construct; identical to SEQ ID NO: 7805
  source 1..120: mol_type = other DNA

SEQ ID NO: 55384 - DNA, 120 bp, synthetic construct; identical to SEQ ID NO: 25430
  source 1..120: mol_type = other DNA

SEQ ID NO: 55385 - DNA, 120 bp, synthetic construct; identical to SEQ ID NO: 25431
  source 1..120: mol_type = other DNA

SEQ ID NO: 55386 - DNA, 120 bp, synthetic construct; identical to SEQ ID NO: 25432
  source 1..120: mol_type = other DNA

SEQ ID NO: 55387 - DNA, 120 bp, synthetic construct; identical to SEQ ID NO: 25433
  source 1..120: mol_type = other DNA

SEQ ID NO: 55388 - DNA, 120 bp, synthetic construct; identical to SEQ ID NO: 7806
  source 1..120: mol_type = other DNA

SEQ ID NO: 55389 - DNA, 120 bp, synthetic construct; identical to SEQ ID NO: 25435
  source 1..120: mol_type = other DNA

SEQ ID NO: 55390 - DNA, 120 bp, synthetic construct; identical to SEQ ID NO: 25436
  source 1..120: mol_type = other DNA

SEQ ID NO: 55391 - DNA, 120 bp, synthetic construct; identical to SEQ ID NO: 7807
  source 1..120: mol_type = other DNA

SEQ ID NO: 55392 - DNA, 120 bp, synthetic construct; identical to SEQ ID NO: 25438
  source 1..120: mol_type = other DNA

SEQ ID NO: 55393 - DNA, 120 bp, synthetic construct; identical to SEQ ID NO: 25439
  source 1..120: mol_type = other DNA

SEQ ID NO: 55394 - DNA, 120 bp, synthetic construct; identical to SEQ ID NO: 25440
  source 1..120: mol_type = other DNA

SEQ ID NO: 55395 - DNA, 120 bp, synthetic construct; identical to SEQ ID NO: 7808
  source 1..120: mol_type = other DNA

SEQ ID NO: 55396 - DNA, 120 bp, synthetic construct; identical to SEQ ID NO: 25442
  source 1..120: mol_type = other DNA

SEQ ID NO: 55397 - DNA, 120 bp, synthetic construct; identical to SEQ ID NO: 25443
  source 1..120: mol_type = other DNA

SEQ ID NO: 55398 - DNA, 120 bp, synthetic construct; identical to SEQ ID NO: 25444
  source 1..120: mol_type = other DNA

SEQ ID NO: 55399 - DNA, 120 bp, synthetic construct; identical to SEQ ID NO: 7809
  source 1..120: mol_type = other DNA

SEQ ID NO: 55400 - DNA, 120 bp, synthetic construct; identical to SEQ ID NO: 25446
  source 1..120: mol_type = other DNA

SEQ ID NO: 55401 - DNA, 120 bp, synthetic construct; identical to SEQ ID NO: 25447
  source 1..120: mol_type = other DNA

SEQ ID NO: 55402 - DNA, 120 bp, synthetic construct; identical to SEQ ID NO: 25448
  source 1..120: mol_type = other DNA

SEQ ID NO: 55403 - DNA, 120 bp, synthetic construct; identical to SEQ ID NO: 25449
  source 1..120: mol_type = other DNA

SEQ ID NO: 55404 - DNA, 120 bp, synthetic construct; identical to SEQ ID NO: 7810
  source 1..120: mol_type = other DNA

SEQ ID NO: 55405 - DNA, 120 bp, synthetic construct; identical to SEQ ID NO: 25451
  source 1..120: mol_type = other DNA

SEQ ID NO: 55406 - DNA, 120 bp, synthetic construct; identical to SEQ ID NO: 25452
  source 1..120: mol_type = other DNA

SEQ ID NO: 55407 - DNA, 120 bp, synthetic construct; identical to SEQ ID NO: 25453
  source 1..120: mol_type = other DNA

SEQ ID NO: 55408 - DNA, 120 bp, synthetic construct; identical to SEQ ID NO: 7811
  source 1..120: mol_type = other DNA

SEQ ID NO: 55409 - DNA, 120 bp, synthetic construct; identical to SEQ ID NO: 25455
  source 1..120: mol_type = other DNA

SEQ ID NO: 55410 - DNA, 120 bp, synthetic construct; identical to SEQ ID NO: 25456
  source 1..120: mol_type = other DNA

SEQ ID NO: 55411 - DNA, 120 bp, synthetic construct; identical to SEQ ID NO: 25457
  source 1..120: mol_type = other DNA

SEQ ID NO: 55412 - DNA, 120 bp, synthetic construct; identical to SEQ ID NO: 7812
  source 1..120: mol_type = other DNA

SEQ ID NO: 55413 - DNA, 120 bp, synthetic construct; identical to SEQ ID NO: 25459
  source 1..120: mol_type = other DNA

SEQ ID NO: 55414 - DNA, 120 bp, synthetic construct; identical to SEQ ID NO: 25460
  source 1..120: mol_type = other DNA

SEQ ID NO: 55415 - DNA, 120 bp, synthetic construct; identical to SEQ ID NO: 7813
  source 1..120: mol_type = other DNA

SEQ ID NO: 55416 - DNA, 120 bp, synthetic construct; identical to SEQ ID NO: 25462
  source 1..120: mol_type = other DNA

SEQ ID NO: 55417 - DNA, 120 bp, synthetic construct; identical to SEQ ID NO: 25463
  source 1..120: mol_type = other DNA

SEQ ID NO: 55418 - DNA, 120 bp, synthetic construct; identical to SEQ ID NO: 25464
  source 1..120: mol_type = other DNA

SEQ ID NO: 55419 - DNA, 120 bp, synthetic construct; identical to SEQ ID NO: 25465
  source 1..120: mol_type = other DNA

SEQ ID NO: 55420 - DNA, 120 bp, synthetic construct; identical to SEQ ID NO: 7814
  source 1..120: mol_type = other DNA

SEQ ID NO: 55421 - DNA, 120 bp, synthetic construct; identical to SEQ ID NO: 25467
  source 1..120: mol_type = other DNA

SEQ ID NO: 55422 - DNA, 120 bp, synthetic construct; identical to SEQ ID NO: 25468
  source 1..120: mol_type = other DNA

SEQ ID NO: 55423 - DNA, 120 bp, synthetic construct; identical to SEQ ID NO: 25469
  source 1..120: mol_type = other DNA

SEQ ID NO: 55424 - DNA, 120 bp, synthetic construct; identical to SEQ ID NO: 7815
  source 1..120: mol_type = other DNA

SEQ ID NO: 55425 - DNA, 120 bp, synthetic construct; identical to SEQ ID NO: 25471
  source 1..120: mol_type = other DNA

SEQ ID NO: 55426 - DNA, 120 bp, synthetic construct; identical to SEQ ID NO: 25472
  source 1..120: mol_type = other DNA

SEQ ID NO: 55427 - DNA, 120 bp, synthetic construct; identical to SEQ ID NO: 7816
  source 1..120: mol_type = other DNA

SEQ ID NO: 55428 - DNA, 120 bp, synthetic construct; identical to SEQ ID NO: 25474
  source 1..120: mol_type = other DNA

SEQ ID NO: 55429 - DNA, 120 bp, synthetic construct; identical to SEQ ID NO: 25475
  source 1..120: mol_type = other DNA

SEQ ID NO: 55430 - DNA, 120 bp, synthetic construct; identical to SEQ ID NO: 25476
  source 1..120: mol_type = other DNA

SEQ ID NO: 55431 - DNA, 120 bp, synthetic construct; identical to SEQ ID NO: 7817
  source 1..120: mol_type = other DNA

SEQ ID NO: 55432 - DNA, 120 bp, synthetic construct; identical to SEQ ID NO: 25478
  source 1..120: mol_type = other DNA

SEQ ID NO: 55433 - DNA, 120 bp, synthetic construct; identical to SEQ ID NO: 25479
  source 1..120: mol_type = other DNA

SEQ ID NO: 55434 - DNA, 120 bp, synthetic construct; identical to SEQ ID NO: 25480
  source 1..120: mol_type = other DNA

SEQ ID NO: 55435 - DNA, 120 bp, synthetic construct; identical to SEQ ID NO: 7818
  source 1..120: mol_type = other DNA

SEQ ID NO: 55436 - DNA, 120 bp, synthetic construct; identical to SEQ ID NO: 25482
  source 1..120: mol_type = other DNA

SEQ ID NO: 55437 - DNA, 120 bp, synthetic construct; identical to SEQ ID NO: 25483
  source 1..120: mol_type = other DNA

SEQ ID NO: 55438 - DNA, 120 bp, synthetic construct; identical to SEQ ID NO: 25484
  source 1..120: mol_type = other DNA

SEQ ID NO: 55439 - DNA, 120 bp, synthetic construct; identical to SEQ ID NO: 25485
  source 1..120: mol_type = other DNA

SEQ ID NO: 55440 - DNA, 120 bp, synthetic construct; identical to SEQ ID NO: 7819
  source 1..120: mol_type = other DNA

SEQ ID NO: 55441 - DNA, 120 bp, synthetic construct; identical to SEQ ID NO: 25487
  source 1..120: mol_type = other DNA

SEQ ID NO: 55442 - DNA, 120 bp, synthetic construct; identical to SEQ ID NO: 25488
  source 1..120: mol_type = other DNA

SEQ ID NO: 55443 - DNA, 120 bp, synthetic construct; identical to SEQ ID NO: 7820
  source 1..120: mol_type = other DNA

SEQ ID NO: 55444 - DNA, 120 bp, synthetic construct; identical to SEQ ID NO: 25490
  source 1..120: mol_type = other DNA

SEQ ID NO: 55445 - DNA, 120 bp, synthetic construct; identical to SEQ ID NO: 25491
  source 1..120: mol_type = other DNA

SEQ ID NO: 55446 - DNA, 120 bp, synthetic construct; identical to SEQ ID NO: 25492
  source 1..120: mol_type = other DNA

SEQ ID NO: 55447 - DNA, 120 bp, synthetic construct; identical to SEQ ID NO: 7821
  source 1..120: mol_type = other DNA

SEQ ID NO: 55448 - DNA, 120 bp, synthetic construct; identical to SEQ ID NO: 25494
  source 1..120: mol_type = other DNA

SEQ ID NO: 55449 - DNA, 120 bp, synthetic construct; identical to SEQ ID NO: 25495
  source 1..120: mol_type = other DNA

SEQ ID NO: 55450 - DNA, 120 bp, synthetic construct; identical to SEQ ID NO: 25496
  source 1..120: mol_type = other DNA

SEQ ID NO: 55451 - DNA, 120 bp, synthetic construct; identical to SEQ ID NO: 7822
  source 1..120: mol_type = other DNA

SEQ ID NO: 55452 - DNA, 120 bp, synthetic construct; identical to SEQ ID NO: 25498
  source 1..120: mol_type = other DNA

SEQ ID NO: 55453 - DNA, 120 bp, synthetic construct; identical to SEQ ID NO: 25499
  source 1..120: mol_type = other DNA

SEQ ID NO: 55454 - DNA, 120 bp, synthetic construct; identical to SEQ ID NO: 25500
  source 1..120: mol_type = other DNA

SEQ ID NO: 55455 - DNA, 120 bp, synthetic construct; identical to SEQ ID NO: 7823
  source 1..120: mol_type = other DNA

SEQ ID NO: 55456 - DNA, 120 bp, synthetic construct; identical to SEQ ID NO: 25502
  source 1..120: mol_type = other DNA

SEQ ID NO: 55457 - DNA, 120 bp, synthetic construct; identical to SEQ ID NO: 25503
  source 1..120: mol_type = other DNA

SEQ ID NO: 55458 - DNA, 120 bp, synthetic construct; identical to SEQ ID NO: 7824
  source 1..120: mol_type = other DNA

SEQ ID NO: 55459 - DNA, 120 bp, synthetic construct; identical to SEQ ID NO: 25505
  source 1..120: mol_type = other DNA

SEQ ID NO: 55460 - DNA, 120 bp, synthetic construct; identical to SEQ ID NO: 25506
  source 1..120: mol_type = other DNA

SEQ ID NO: 55461 - DNA, 120 bp, synthetic construct; identical to SEQ ID NO: 25507
  source 1..120: mol_type = other DNA

SEQ ID NO: 55462 - DNA, 120 bp, synthetic construct; identical to SEQ ID NO: 25508
  source 1..120: mol_type = other DNA

SEQ ID NO: 55463 - DNA, 120 bp, synthetic construct; identical to SEQ ID NO: 7825
  source 1..120: mol_type = other DNA

SEQ ID NO: 55464 - DNA, 120 bp, synthetic construct; identical to SEQ ID NO: 25510
  source 1..120: mol_type = other DNA

SEQ ID NO: 55465 - DNA, 120 bp, synthetic construct; identical to SEQ ID NO: 25511
  source 1..120: mol_type = other DNA

SEQ ID NO: 55466 - DNA, 120 bp, synthetic construct; identical to SEQ ID NO: 25512
  source 1..120: mol_type = other DNA

SEQ ID NO: 55467 - DNA, 120 bp, synthetic construct; identical to SEQ ID NO: 7826
  source 1..120: mol_type = other DNA

SEQ ID NO: 55468 - DNA, 120 bp, synthetic construct; identical to SEQ ID NO: 25514
  source 1..120: mol_type = other DNA

SEQ ID NO: 55469 - DNA, 120 bp, synthetic construct; identical to SEQ ID NO: 25515
  source 1..120: mol_type = other DNA

SEQ ID NO: 55470 - DNA, 120 bp, synthetic construct; identical to SEQ ID NO: 25516
  source 1..120: mol_type = other DNA

SEQ ID NO: 55471 - DNA, 120 bp, synthetic construct; identical to SEQ ID NO: 25517
  source 1..120: mol_type = other DNA

SEQ ID NO: 55472 - DNA, 120 bp, synthetic construct; identical to SEQ ID NO: 7827
  source 1..120: mol_type = other DNA

SEQ ID NO: 55473 - DNA, 120 bp, synthetic construct; identical to SEQ ID NO: 25519
  source 1..120: mol_type = other DNA

SEQ ID NO: 55474 - DNA, 120 bp, synthetic construct; identical to SEQ ID NO: 25520
  source 1..120: mol_type = other DNA

SEQ ID NO: 55475 - DNA, 120 bp, synthetic construct; identical to SEQ ID NO: 7828
  source 1..120: mol_type = other DNA

SEQ ID NO: 55476 - DNA, 120 bp, synthetic construct; identical to SEQ ID NO: 25522
  source 1..120: mol_type = other DNA

SEQ ID NO: 55477 - DNA, 120 bp, synthetic construct; identical to SEQ ID NO: 25523
  source 1..120: mol_type = other DNA

SEQ ID NO: 55478 - DNA, 120 bp, synthetic construct; identical to SEQ ID NO: 25524
  source 1..120: mol_type = other DNA

SEQ ID NO: 55479 - DNA, 120 bp, synthetic construct; identical to SEQ ID NO: 25525
  source 1..120: mol_type = other DNA

SEQ ID NO: 55480 - DNA, 120 bp, synthetic construct; identical to SEQ ID NO: 7829
  source 1..120: mol_type = other DNA

SEQ ID NO: 55481 - DNA, 120 bp, synthetic construct; identical to SEQ ID NO: 25527
  source 1..120: mol_type = other DNA

SEQ ID NO: 55482 - DNA, 120 bp, synthetic construct; identical to SEQ ID NO: 25528
  source 1..120: mol_type = other DNA

SEQ ID NO: 55483 - DNA, 120 bp, synthetic construct; identical to SEQ ID NO: 25529
  source 1..120: mol_type = other DNA

SEQ ID NO: 55484 - DNA, 120 bp, synthetic construct; identical to SEQ ID NO: 7830
  source 1..120: mol_type = other DNA

SEQ ID NO: 55485 - DNA, 120 bp, synthetic construct; identical to SEQ ID NO: 25531
  source 1..120: mol_type = other DNA

SEQ ID NO: 55486 - DNA, 120 bp, synthetic construct; identical to SEQ ID NO: 25532
  source 1..120: mol_type = other DNA

SEQ ID NO: 55487 - DNA, 120 bp, synthetic construct; identical to SEQ ID NO: 25533
  source 1..120: mol_type = other DNA

SEQ ID NO: 55488 - DNA, 120 bp, synthetic construct; identical to SEQ ID NO: 7831
  source 1..120: mol_type = other DNA

SEQ ID NO: 55489 - DNA, 120 bp, synthetic construct; identical to SEQ ID NO: 25535
  source 1..120: mol_type = other DNA

SEQ ID NO: 55490 - DNA, 120 bp, synthetic construct; identical to SEQ ID NO: 25536
  source 1..120: mol_type = other DNA

SEQ ID NO: 55491 - DNA, 120 bp, synthetic construct; identical to SEQ ID NO: 25537
  source 1..120: mol_type = other DNA

SEQ ID NO: 55492 - DNA, 120 bp, synthetic construct; identical to SEQ ID NO: 7832
  source 1..120: mol_type = other DNA

SEQ ID NO: 55493 - DNA, 120 bp, synthetic construct; identical to SEQ ID NO: 25539
  source 1..120: mol_type = other DNA

SEQ ID NO: 55494 - DNA, 120 bp, synthetic construct; identical to SEQ ID NO: 25540
  source 1..120: mol_type = other DNA

SEQ ID NO: 55495 - DNA, 120 bp, synthetic construct; identical to SEQ ID NO: 25541
  source 1..120: mol_type = other DNA

SEQ ID NO: 55496 - DNA, 120 bp, synthetic construct; identical to SEQ ID NO: 7833
  source 1..120: mol_type = other DNA

SEQ ID NO: 55497 - DNA, 120 bp, synthetic construct; identical to SEQ ID NO: 25543
  source 1..120: mol_type = other DNA

SEQ ID NO: 55498 - DNA, 120 bp, synthetic construct; identical to SEQ ID NO: 25544
  source 1..120: mol_type = other DNA

SEQ ID NO: 55499 - DNA, 120 bp, synthetic construct; identical to SEQ ID NO: 7834
  source 1..120: mol_type = other DNA

SEQ ID NO: 55500 - DNA, 120 bp, synthetic construct; identical to SEQ ID NO: 25546
  source 1..120: mol_type = other DNA

SEQ ID NO: 55501 - DNA, 120 bp, synthetic construct; identical to SEQ ID NO: 25547
  source 1..120: mol_type = other DNA

SEQ ID NO: 55502 - DNA, 120 bp, synthetic construct; identical to SEQ ID NO: 25548
  source 1..120: mol_type = other DNA

SEQ ID NO: 55503 - DNA, 120 bp, synthetic construct; identical to SEQ ID NO: 7835
  source 1..120: mol_type = other DNA

SEQ ID NO: 55504 - DNA, 120 bp, synthetic construct; identical to SEQ ID NO: 25550
  source 1..120: mol_type = other DNA

SEQ ID NO: 55505 - DNA, 120 bp, synthetic construct; identical to SEQ ID NO: 832
  source 1..120: mol_type = other DNA

SEQ ID NO: 55506 - DNA, 120 bp, synthetic construct; identical to SEQ ID NO: 25552
  source 1..120: mol_type = other DNA

SEQ ID NO: 55507 - DNA, 120 bp, synthetic construct; identical to SEQ ID NO: 25553
  source 1..120: mol_type = other DNA

SEQ ID NO: 55508 - DNA, 120 bp, synthetic construct; identical to SEQ ID NO: 7836
  source 1..120: mol_type = other DNA

SEQ ID NO: 55509 - DNA, 120 bp, synthetic construct; identical to SEQ ID NO: 25555
  source 1..120: mol_type = other DNA

SEQ ID NO: 55510 - DNA, 120 bp, synthetic construct; identical to SEQ ID NO: 25556
  source 1..120: mol_type = other DNA

SEQ ID NO: 55511 - DNA, 120 bp, synthetic construct; identical to SEQ ID NO: 25557
  source 1..120: mol_type = other DNA

SEQ ID NO: 55512 - DNA, 120 bp, synthetic construct; identical to SEQ ID NO: 7837
  source 1..120: mol_type = other DNA

SEQ ID NO: 55513 - DNA, 120 bp, synthetic construct; identical to SEQ ID NO: 25559
  source 1..120: mol_type = other DNA

SEQ ID NO: 55514 - DNA, 120 bp, synthetic construct; identical to SEQ ID NO: 25560
  source 1..120: mol_type = other DNA

SEQ ID NO: 55515 - DNA, 120 bp, synthetic construct; identical to SEQ ID NO: 7838
  source 1..120: mol_type = other DNA

SEQ ID NO: 55516 - DNA, 120 bp, synthetic construct; identical to SEQ ID NO: 25562
  source 1..120: mol_type = other DNA

SEQ ID NO: 55517 - DNA, 120 bp, synthetic construct; identical to SEQ ID NO: 25563
  source 1..120: mol_type = other DNA

SEQ ID NO: 55518 - DNA, 120 bp, synthetic construct; identical to SEQ ID NO: 25564
  source 1..120: mol_type = other DNA

SEQ ID NO: 55519 - DNA, 120 bp, synthetic construct; identical to SEQ ID NO: 25565
  source 1..120: mol_type = other DNA

SEQ ID NO: 55520 - DNA, 120 bp, synthetic construct; identical to SEQ ID NO: 7839
  source 1..120: mol_type = other DNA

SEQ ID NO: 55521 - DNA, 120 bp, synthetic construct; identical to SEQ ID NO: 25567
  source 1..120: mol_type = other DNA

SEQ ID NO: 55522 - DNA, 120 bp, synthetic construct; identical to SEQ ID NO: 25568
  source 1..120: mol_type = other DNA

SEQ ID NO: 55523 - DNA, 120 bp, synthetic construct; identical to SEQ ID NO: 7840
  source 1..120: mol_type = other DNA

SEQ ID NO: 55524 - DNA, 120 bp, synthetic construct; identical to SEQ ID NO: 25570
  source 1..120: mol_type = other DNA

SEQ ID NO: 55525 - DNA, 120 bp, synthetic construct; identical to SEQ ID NO: 25571
  source 1..120: mol_type = other DNA

SEQ ID NO: 55526 - DNA, 120 bp, synthetic construct; identical to SEQ ID NO: 25572
  source 1..120: mol_type = other DNA

SEQ ID NO: 55527 - DNA, 120 bp, synthetic construct; identical to SEQ ID NO: 25573
  source 1..120: mol_type = other DNA

SEQ ID NO: 55528 - DNA, 120 bp, synthetic construct; identical to SEQ ID NO: 7841
  source 1..120: mol_type = other DNA

SEQ ID NO: 55529 - DNA, 120 bp, synthetic construct; identical to SEQ ID NO: 25575
  source 1..120: mol_type = other DNA

SEQ ID NO: 55530 - DNA, 120 bp, synthetic construct; identical to SEQ ID NO: 25576
  source 1..120: mol_type = other DNA

SEQ ID NO: 55531 - DNA, 120 bp, synthetic construct; identical to SEQ ID NO: 25577
  source 1..120: mol_type = other DNA

SEQ ID NO: 55532 - DNA, 120 bp, synthetic construct; identical to SEQ ID NO: 7842
  source 1..120: mol_type = other DNA

SEQ ID NO: 55533 - DNA, 120 bp, synthetic construct; identical to SEQ ID NO: 25579
  source 1..120: mol_type = other DNA

SEQ ID NO: 55534 - DNA, 120 bp, synthetic construct; identical to SEQ ID NO: 25580
  source 1..120: mol_type = other DNA

SEQ ID NO: 55535 - DNA, 120 bp, synthetic construct; identical to SEQ ID NO: 7843
  source 1..120: mol_type = other DNA

SEQ ID NO: 55536 - DNA, 120 bp, synthetic construct; identical to SEQ ID NO: 25582
  source 1..120: mol_type = other DNA

SEQ ID NO: 55537 - DNA, 120 bp, synthetic construct; identical to SEQ ID NO: 25583
  source 1..120: mol_type = other DNA

SEQ ID NO: 55538 - DNA, 120 bp, synthetic construct; identical to SEQ ID NO: 25584
  source 1..120: mol_type = other DNA

SEQ ID NO: 55539 - DNA, 120 bp, synthetic construct; identical to SEQ ID NO: 25585
  source 1..120: mol_type = other DNA

SEQ ID NO: 55540 - DNA, 120 bp, synthetic construct; identical to SEQ ID NO: 7844
  source 1..120: mol_type = other DNA

SEQ ID NO: 55541 - DNA, 120 bp, synthetic construct; identical to SEQ ID NO: 25587
  source 1..120: mol_type = other DNA

SEQ ID NO: 55542 - DNA, 120 bp, synthetic construct; identical to SEQ ID NO: 25588
  source 1..120: mol_type = other DNA

SEQ ID NO: 55543 - DNA, 120 bp, synthetic construct; identical to SEQ ID NO: 7845
  source 1..120: mol_type = other DNA

SEQ ID NO: 55544 - DNA, 120 bp, synthetic construct; identical to SEQ ID NO: 25590
  source 1..120: mol_type = other DNA

SEQ ID NO: 55545 - DNA, 120 bp, synthetic construct; identical to SEQ ID NO: 25591
  source 1..120: mol_type = other DNA

SEQ ID NO: 55546 - DNA, 120 bp, synthetic construct; identical to SEQ ID NO: 25592
  source 1..120: mol_type = other DNA

SEQ ID NO: 55547 - DNA, 120 bp, synthetic construct; identical to SEQ ID NO: 7846
  source 1..120: mol_type = other DNA

SEQ ID NO: 55548 - DNA, 120 bp, synthetic construct; identical to SEQ ID NO: 25594
  source 1..120: mol_type = other DNA

SEQ ID NO: 55549 - DNA, 120 bp, synthetic construct; identical to SEQ ID NO: 25595
  source 1..120: mol_type = other DNA

SEQ ID NO: 55550 - DNA, 120 bp, synthetic construct; identical to SEQ ID NO: 25596
  source 1..120: mol_type = other DNA

SEQ ID NO: 55551 - DNA, 120 bp, synthetic construct; identical to SEQ ID NO: 7847
  source 1..120: mol_type = other DNA

SEQ ID NO: 55552 - DNA, 120 bp, synthetic construct; identical to SEQ ID NO: 25598
  source 1..120: mol_type = other DNA

SEQ ID NO: 55553 - DNA, 120 bp, synthetic construct; identical to SEQ ID NO: 25599
  source 1..120: mol_type = other DNA

SEQ ID NO: 55554 - DNA, 120 bp, synthetic construct; identical to SEQ ID NO: 25600
  source 1..120: mol_type = other DNA

SEQ ID NO: 55555 - DNA, 120 bp, synthetic construct; identical to SEQ ID NO: 25601
  source 1..120: mol_type = other DNA

SEQ ID NO: 55556 - DNA, 120 bp, synthetic construct; identical to SEQ ID NO: 7848
  source 1..120: mol_type = other DNA

SEQ ID NO: 55557 - DNA, 120 bp, synthetic construct; identical to SEQ ID NO: 25603
  source 1..120: mol_type = other DNA

SEQ ID NO: 55558 - DNA, 120 bp, synthetic construct; identical to SEQ ID NO: 25604
  source 1..120: mol_type = other DNA

SEQ ID NO: 55559 - DNA, 120 bp, synthetic construct; identical to SEQ ID NO: 25605
  source 1..120: mol_type = other DNA

SEQ ID NO: 55560 - DNA, 120 bp, synthetic construct; identical to SEQ ID NO: 7849
  source 1..120: mol_type = other DNA

SEQ ID NO: 55561 - DNA, 120 bp, synthetic construct; identical to SEQ ID NO: 25607
  source 1..120: mol_type = other DNA

SEQ ID NO: 55562 - DNA, 120 bp, synthetic construct; identical to SEQ ID NO: 25608
  source 1..120: mol_type = other DNA

SEQ ID NO: 55563 - DNA, 120 bp, synthetic construct; identical to SEQ ID NO: 25609
  source 1..120: mol_type = other DNA

SEQ ID NO: 55564 - DNA, 120 bp, synthetic construct; identical to SEQ ID NO: 25610
  source 1..120: mol_type = other DNA

SEQ ID NO: 55565 - DNA, 120 bp, synthetic construct; identical to SEQ ID NO: 7850
  source 1..120: mol_type = other DNA

SEQ ID NO: 55566 - DNA, 120 bp, synthetic construct; identical to SEQ ID NO: 25612
  source 1..120: mol_type = other DNA

SEQ ID NO: 55567 - DNA, 120 bp, synthetic construct; identical to SEQ ID NO: 25613
  source 1..120: mol_type = other DNA

SEQ ID NO: 55568 - DNA, 120 bp, synthetic construct; identical to SEQ ID NO: 25614
  source 1..120: mol_type = other DNA

SEQ ID NO: 55569 - DNA, 120 bp, synthetic construct; identical to SEQ ID NO: 7851
  source 1..120: mol_type = other DNA

SEQ ID NO: 55570 - DNA, 120 bp, synthetic construct; identical to SEQ ID NO: 25616
  source 1..120: mol_type = other DNA

SEQ ID NO: 55571 - DNA, 120 bp, synthetic construct; identical to SEQ ID NO: 25617
  source 1..120: mol_type = other DNA

SEQ ID NO: 55572 - DNA, 120 bp, synthetic construct; identical to SEQ ID NO: 7852
  source 1..120: mol_type = other DNA

SEQ ID NO: 55573 - DNA, 120 bp, synthetic construct; identical to SEQ ID NO: 25619
  source 1..120: mol_type = other DNA

SEQ ID NO: 55574 - DNA, 120 bp, synthetic construct; identical to SEQ ID NO: 25620
  source 1..120: mol_type = other DNA

SEQ ID NO: 55575 - DNA, 120 bp, synthetic construct; identical to SEQ ID NO: 25621
  source 1..120: mol_type = other DNA

SEQ ID NO: 55576 - DNA, 120 bp, synthetic construct; identical to SEQ ID NO: 25622
  source 1..120: mol_type = other DNA

SEQ ID NO: 55577 - DNA, 120 bp, synthetic construct; identical to SEQ ID NO: 7853
  source 1..120: mol_type = other DNA

SEQ ID NO: 55578 - DNA, 120 bp, synthetic construct; identical to SEQ ID NO: 25624
  source 1..120: mol_type = other DNA

SEQ ID NO: 55579 - DNA, 120 bp, synthetic construct; identical to SEQ ID NO: 25625
  source 1..120: mol_type = other DNA

SEQ ID NO: 55580 - DNA, 120 bp, synthetic construct; identical to SEQ ID NO: 7854
  source 1..120: mol_type = other DNA

SEQ ID NO: 55581 - DNA, 120 bp, synthetic construct; identical to SEQ ID NO: 25627
  source 1..120: mol_type = other DNA

SEQ ID NO: 55582 - DNA, 120 bp, synthetic construct; identical to SEQ ID NO: 25628
  source 1..120: mol_type = other DNA

SEQ ID NO: 55583 - DNA, 120 bp, synthetic construct; identical to SEQ ID NO: 25629
  source 1..120: mol_type = other DNA

SEQ ID NO: 55584 - DNA, 120 bp, synthetic construct; identical to SEQ ID NO: 7855
  source 1..120: mol_type = other DNA

SEQ ID NO: 55585 - DNA, 120 bp, synthetic construct; identical to SEQ ID NO: 25631
  source 1..120: mol_type = other DNA

SEQ ID NO: 55586 - DNA, 120 bp, synthetic construct; identical to SEQ ID NO: 25632
  source 1..120: mol_type = other DNA

SEQ ID NO: 55587 - DNA, 120 bp, synthetic construct; identical to SEQ ID NO: 25633
  source 1..120: mol_type = other DNA

SEQ ID NO: 55588 - DNA, 120 bp, synthetic construct; identical to SEQ ID NO: 25634
  source 1..120: mol_type = other DNA

SEQ ID NO: 55589 - DNA, 120 bp, synthetic construct; identical to SEQ ID NO: 7856
  source 1..120: mol_type = other DNA

SEQ ID NO: 55590 - DNA, 120 bp, synthetic construct; identical to SEQ ID NO: 25636
  source 1..120: mol_type = other DNA

SEQ ID NO: 55591 - DNA, 120 bp, synthetic construct; identical to SEQ ID NO: 25637
  source 1..120: mol_type = other DNA

SEQ ID NO: 55592 - DNA, 120 bp, synthetic construct; identical to SEQ ID NO: 7857
  source 1..120: mol_type = other DNA

SEQ ID NO: 55593 - DNA, 120 bp, synthetic construct; identical to SEQ ID NO: 25639
  source 1..120: mol_type = other DNA

SEQ ID NO: 55594 - DNA, 120 bp, synthetic construct; identical to SEQ ID NO: 25640
  source 1..120: mol_type = other DNA

SEQ ID NO: 55595 - DNA, 120 bp, synthetic construct; identical to SEQ ID NO: 25641
  source 1..120: mol_type = other DNA

SEQ ID NO: 55596 - DNA, 120 bp, synthetic construct; identical to SEQ ID NO: 25642
  source 1..120: mol_type = other DNA

SEQ ID NO: 55597 - DNA, 120 bp, synthetic construct; identical to SEQ ID NO: 7858
  source 1..120: mol_type = other DNA

SEQ ID NO: 55598 - DNA, 120 bp, synthetic construct; identical to SEQ ID NO: 25644
  source 1..120: mol_type = other DNA

SEQ ID NO: 55599 - DNA, 120 bp, synthetic construct; identical to SEQ ID NO: 25645
  source 1..120: mol_type = other DNA

SEQ ID NO: 55600 - DNA, 120 bp, synthetic construct; identical to SEQ ID NO: 25646
  source 1..120: mol_type = other DNA

SEQ ID NO: 55601 - DNA, 120 bp, synthetic construct; identical to SEQ ID NO: 7859
  source 1..120: mol_type = other DNA

SEQ ID NO: 55602 - DNA, 120 bp, synthetic construct; identical to SEQ ID NO: 25648
  source 1..120: mol_type = other DNA

SEQ ID NO: 55603 - DNA, 120 bp, synthetic construct; identical to SEQ ID NO: 25649
  source 1..120: mol_type = other DNA

SEQ ID NO: 55604 - DNA, 120 bp, synthetic construct; identical to SEQ ID NO: 25650
  source 1..120: mol_type = other DNA

SEQ ID NO: 55605 - DNA, 120 bp, synthetic construct; identical to SEQ ID NO: 7860
  source 1..120: mol_type = other DNA

SEQ ID NO: 55606 - DNA, 120 bp, synthetic construct; identical to SEQ ID NO: 25652
  source 1..120: mol_type = other DNA

SEQ ID NO: 55607 - DNA, 120 bp, synthetic construct; identical to SEQ ID NO: 25653
  source 1..120: mol_type = other DNA

SEQ ID NO: 55608 - DNA, 120 bp, synthetic construct; identical to SEQ ID NO: 7861
  source 1..120: mol_type = other DNA

SEQ ID NO: 55609 - DNA, 120 bp, synthetic construct; identical to SEQ ID NO: 25655
  source 1..120: mol_type = other DNA

SEQ ID NO: 55610 - DNA, 120 bp, synthetic construct; identical to SEQ ID NO: 25656
  source 1..120: mol_type = other DNA

SEQ ID NO: 55611 - DNA, 120 bp, synthetic construct; identical to SEQ ID NO: 25657
  source 1..120: mol_type = other DNA

SEQ ID NO: 55612 - DNA, 120 bp, synthetic construct; identical to SEQ ID NO: 25658
  source 1..120: mol_type = other DNA

SEQ ID NO: 55613 - DNA, 120 bp, synthetic construct; identical to SEQ ID NO: 7862
  source 1..120: mol_type = other DNA

SEQ ID NO: 55614 - DNA, 120 bp, synthetic construct; identical to SEQ ID NO: 25660
  source 1..120: mol_type = other DNA

SEQ ID NO: 55615 - DNA, 120 bp, synthetic construct; identical to SEQ ID NO: 25661
  source 1..120: mol_type = other DNA

SEQ ID NO: 55616 - DNA, 120 bp, synthetic construct; identical to SEQ ID NO: 25662
  source 1..120: mol_type = other DNA

SEQ ID NO: 55617 - DNA, 120 bp, synthetic construct; identical to SEQ ID NO: 7863
  source 1..120: mol_type = other DNA

SEQ ID NO: 55618 - DNA, 120 bp, synthetic construct; identical to SEQ ID NO: 25664
  source 1..120: mol_type = other DNA

SEQ ID NO: 55619 - DNA, 120 bp, synthetic construct; identical to SEQ ID NO: 25665
  source 1..120: mol_type = other DNA

SEQ ID NO: 55620 - DNA, 120 bp, synthetic construct; identical to SEQ ID NO: 25666
  source 1..120: mol_type = other DNA

SEQ ID NO: 55621 - DNA, 120 bp, synthetic construct; identical to SEQ ID NO: 7864
  source 1..120: mol_type = other DNA

SEQ ID NO: 55622 - DNA, 120 bp, synthetic construct; identical to SEQ ID NO: 25668
  source 1..120: mol_type = other DNA

SEQ ID NO: 55623 - DNA, 120 bp, synthetic construct; identical to SEQ ID NO: 25669
  source 1..120: mol_type = other DNA

SEQ ID NO: 55624 - DNA, 120 bp, synthetic construct; identical to SEQ ID NO: 7865
  source 1..120: mol_type = other DNA

SEQ ID NO: 55625 - DNA, 120 bp, synthetic construct; identical to SEQ ID NO: 25671
  source 1..120: mol_type = other DNA

SEQ ID NO: 55626 - DNA, 120 bp, synthetic construct; identical to SEQ ID NO: 25672
  source 1..120: mol_type = other DNA

SEQ ID NO: 55627 - DNA, 120 bp, synthetic construct; identical to SEQ ID NO: 25673
  source 1..120: mol_type = other DNA

SEQ ID NO: 55628 - DNA, 120 bp, synthetic construct; identical to SEQ ID NO: 7866
  source 1..120: mol_type = other DNA

SEQ ID NO: 55629 - DNA, 120 bp, synthetic construct; identical to SEQ ID NO: 25675
  source 1..120: mol_type = other DNA

SEQ ID NO: 55630 - DNA, 120 bp, synthetic construct; identical to SEQ ID NO: 25676
  source 1..120: mol_type = other DNA

SEQ ID NO: 55631 - DNA, 120 bp, synthetic construct; identical to SEQ ID NO: 25677
  source 1..120: mol_type = other DNA

SEQ ID NO: 55632 - DNA, 120 bp, synthetic construct; identical to SEQ ID NO: 7867
  source 1..120: mol_type = other DNA

SEQ ID NO: 55633 - DNA, 120 bp, synthetic construct; identical to SEQ ID NO: 25679
  source 1..120: mol_type = other DNA

SEQ ID NO: 55634 - DNA, 120 bp, synthetic construct; identical to SEQ ID NO: 25680
  source 1..120: mol_type = other DNA

SEQ ID NO: 55635 - DNA, 120 bp, synthetic construct; identical to SEQ ID NO: 25681
  source 1..120: mol_type = other DNA

SEQ ID NO: 55636 - DNA, 120 bp, synthetic construct; identical to SEQ ID NO: 7868
  source 1..120: mol_type = other DNA

SEQ ID NO: 55637 - DNA, 120 bp, synthetic construct; identical to SEQ ID NO: 25683
  source 1..120: mol_type = other DNA

SEQ ID NO: 55638 - DNA, 120 bp, synthetic construct; identical to SEQ ID NO: 25684
  source 1..120: mol_type = other DNA

SEQ ID NO: 55639 - DNA, 120 bp, synthetic construct; identical to SEQ ID NO: 25685
  source 1..120: mol_type = other DNA

SEQ ID NO: 55640 - DNA, 120 bp, synthetic construct; identical to SEQ ID NO: 25686
  source 1..120: mol_type = other DNA

SEQ ID NO: 55641 - DNA, 120 bp, synthetic construct; identical to SEQ ID NO: 7869
  source 1..120: mol_type = other DNA

SEQ ID NO: 55642 - DNA, 120 bp, synthetic construct; identical to SEQ ID NO: 25688
  source 1..120: mol_type = other DNA

SEQ ID NO: 55643 - DNA, 120 bp, synthetic construct; identical to SEQ ID NO: 25689
  source 1..120: mol_type = other DNA

SEQ ID NO: 55644 - DNA, 120 bp, synthetic construct; identical to SEQ ID NO: 25690
  source 1..120: mol_type = other DNA

SEQ ID NO: 55645 - DNA, 120 bp, synthetic construct; identical to SEQ ID NO: 7870
  source 1..120: mol_type = other DNA

SEQ ID NO: 55646 - DNA, 120 bp, synthetic construct; identical to SEQ ID NO: 25692
  source 1..120: mol_type = other DNA

SEQ ID NO: 55647 - DNA, 120 bp, synthetic construct; identical to SEQ ID NO: 25693
  source 1..120: mol_type = other DNA

SEQ ID NO: 55648 - DNA, 120 bp, synthetic construct; identical to SEQ ID NO: 7871
  source 1..120: mol_type = other DNA

SEQ ID NO: 55649 - DNA, 120 bp, synthetic construct; identical to SEQ ID NO: 25695
  source 1..120: mol_type = other DNA

SEQ ID NO: 55650 - DNA, 120 bp, synthetic construct; identical to SEQ ID NO: 25696
  source 1..120: mol_type = other DNA

SEQ ID NO: 55651 - DNA, 120 bp, synthetic construct; identical to SEQ ID NO: 25697
  source 1..120: mol_type = other DNA

SEQ ID NO: 55652 - DNA, 120 bp, synthetic construct; identical to SEQ ID NO: 7872
  source 1..120: mol_type = other DNA

SEQ ID NO: 55653 - DNA, 120 bp, synthetic construct; identical to SEQ ID NO: 25699
  source 1..120: mol_type = other DNA

SEQ ID NO: 55654 - DNA, 120 bp, synthetic construct; identical to SEQ ID NO: 25700
  source 1..120: mol_type = other DNA

SEQ ID NO: 55655 - DNA, 120 bp, synthetic construct; identical to SEQ ID NO: 7873
  source 1..120: mol_type = other DNA

SEQ ID NO: 55656 - DNA, 120 bp, synthetic construct; identical to SEQ ID NO: 25702
  source 1..120: mol_type = other DNA

SEQ ID NO: 55657 - DNA, 120 bp, synthetic construct; identical to SEQ ID NO: 25703
  source 1..120: mol_type = other DNA

SEQ ID NO: 55658 - DNA, 120 bp, synthetic construct; identical to SEQ ID NO: 25704
  source 1..120: mol_type = other DNA

SEQ ID NO: 55659 - DNA, 120 bp, synthetic construct; identical to SEQ ID NO: 7874
  source 1..120: mol_type = other DNA

SEQ ID NO: 55660 - DNA, 120 bp, synthetic construct; identical to SEQ ID NO: 25706
  source 1..120: mol_type = other DNA

SEQ ID NO: 55661 - DNA, 120 bp, synthetic construct; identical to SEQ ID NO: 25707
  source 1..120: mol_type = other DNA

SEQ ID NO: 55662 - DNA, 120 bp, synthetic construct; identical to SEQ ID NO: 25708
  source 1..120: mol_type = other DNA

SEQ ID NO: 55663 - DNA, 120 bp, synthetic construct; identical to SEQ ID NO: 25709
  source 1..120: mol_type = other DNA

SEQ ID NO: 55664 - DNA, 120 bp, synthetic construct; identical to SEQ ID NO: 7875
  source 1..120: mol_type = other DNA

SEQ ID NO: 55665 - DNA, 120 bp, synthetic construct; identical to SEQ ID NO: 25711
  source 1..120: mol_type = other DNA

SEQ ID NO: 55666 - DNA, 120 bp, synthetic construct; identical to SEQ ID NO: 25712
  source 1..120: mol_type = other DNA

SEQ ID NO: 55667 - DNA, 120 bp, synthetic construct; identical to SEQ ID NO: 25713
  source 1..120: mol_type = other DNA

SEQ ID NO: 55668 - DNA, 120 bp, synthetic construct; identical to SEQ ID NO: 7876
  source 1..120: mol_type = other DNA

SEQ ID NO: 55669 - DNA, 120 bp, synthetic construct; identical to SEQ ID NO: 25715
  source 1..120: mol_type = other DNA

SEQ ID NO: 55670 - DNA, 120 bp, synthetic construct; identical to SEQ ID NO: 25716
  source 1..120: mol_type = other DNA

SEQ ID NO: 55671 - DNA, 120 bp, synthetic construct; identical to SEQ ID NO: 25717
  source 1..120: mol_type = other DNA

SEQ ID NO: 55672 - DNA, 120 bp, synthetic construct; identical to SEQ ID NO: 25718
  source 1..120: mol_type = other DNA

SEQ ID NO: 55673 - DNA, 120 bp, synthetic construct; identical to SEQ ID NO: 7877
  source 1..120: mol_type = other DNA

SEQ ID NO: 55674 - DNA, 120 bp, synthetic construct; identical to SEQ ID NO: 25720
  source 1..120: mol_type = other DNA

SEQ ID NO: 55675 - DNA, 120 bp, synthetic construct; identical to SEQ ID NO: 25721
  source 1..120: mol_type = other DNA

SEQ ID NO: 55676 - DNA, 120 bp, synthetic construct; identical to SEQ ID NO: 25722
  source 1..120: mol_type = other DNA

SEQ ID NO: 55677 - DNA, 120 bp, synthetic construct; identical to SEQ ID NO: 7878
  source 1..120: mol_type = other DNA

SEQ ID NO: 55678 - DNA, 120 bp, synthetic construct; identical to SEQ ID NO: 25724
  source 1..120: mol_type = other DNA

SEQ ID NO: 55679 - DNA, 120 bp, synthetic construct; identical to SEQ ID NO: 25725
  source 1..120: mol_type = other DNA

SEQ ID NO: 55680 - DNA, 120 bp, synthetic construct; identical to SEQ ID NO: 25726
  source 1..120: mol_type = other DNA

SEQ ID NO: 55681 - DNA, 120 bp, synthetic construct; identical to SEQ ID NO: 872
  source 1..120: mol_type = other DNA

SEQ ID NO: 55682 - DNA, 120 bp, synthetic construct; identical to SEQ ID NO: 25728
  source 1..120: mol_type = other DNA

SEQ ID NO: 55683 - DNA, 120 bp, synthetic construct; identical to SEQ ID NO: 25729
  source 1..120: mol_type = other DNA

SEQ ID NO: 55684 - DNA, 120 bp, synthetic construct; identical to SEQ ID NO: 7880
  source 1..120: mol_type = other DNA

SEQ ID NO: 55685 - DNA, 120 bp, synthetic construct; identical to SEQ ID NO: 25731
  source 1..120: mol_type = other DNA

SEQ ID NO: 55686 - DNA, 120 bp, synthetic construct; identical to SEQ ID NO: 25732
  source 1..120: mol_type = other DNA

SEQ ID NO: 55687 - DNA, 120 bp, synthetic construct; identical to SEQ ID NO: 25733
  source 1..120: mol_type = other DNA

SEQ ID NO: 55688 - DNA, 120 bp, synthetic construct; identical to SEQ ID NO: 7881
  source 1..120: mol_type = other DNA

SEQ ID NO: 55689 - DNA, 120 bp, synthetic construct; identical to SEQ ID NO: 25735
  source 1..120: mol_type = other DNA

SEQ ID NO: 55690 - DNA, 120 bp, synthetic construct; identical to SEQ ID NO: 25736
  source 1..120: mol_type = other DNA

SEQ ID NO: 55691 - DNA, 120 bp, synthetic construct; identical to SEQ ID NO: 25737
  source 1..120: mol_type = other DNA

SEQ ID NO: 55692 - DNA, 120 bp, synthetic construct; identical to SEQ ID NO: 25738
  source 1..120: mol_type = other DNA

SEQ ID NO: 55693 - DNA, 120 bp, synthetic construct; identical to SEQ ID NO: 7882
  source 1..120: mol_type = other DNA

SEQ ID NO: 55694 - DNA, 120 bp, synthetic construct; identical to SEQ ID NO: 25740
  source 1..120: mol_type = other DNA

SEQ ID NO: 55695 - DNA, 120 bp, synthetic construct; identical to SEQ ID NO: 25741
  source 1..120: mol_type = other DNA

SEQ ID NO: 55696 - DNA, 120 bp, synthetic construct; identical to SEQ ID NO: 25742
  source 1..120: mol_type = other DNA

SEQ ID NO: 55697 - DNA, 120 bp, synthetic construct; identical to SEQ ID NO: 7883
  source 1..120: mol_type = other DNA

SEQ ID NO: 55698 - DNA, 120 bp, synthetic construct; identical to SEQ ID NO: 25744
  source 1..120: mol_type = other DNA

SEQ ID NO: 55699 - DNA, 120 bp, synthetic construct; identical to SEQ ID NO: 25745
  source 1..120: mol_type = other DNA

SEQ ID NO: 55700 - DNA, 120 bp, synthetic construct; identical to SEQ ID NO: 25746
  source 1..120: mol_type = other DNA

SEQ ID NO: 55701 - DNA, 120 bp, synthetic construct; identical to SEQ ID NO: 7884
  source 1..120: mol_type = other DNA

SEQ ID NO: 55702 - DNA, 120 bp, synthetic construct; identical to SEQ ID NO: 25748
  source 1..120: mol_type = other DNA

SEQ ID NO: 55703 - DNA, 120 bp, synthetic construct; identical to SEQ ID NO: 25749
  source 1..120: mol_type = other DNA

SEQ ID NO: 55704 - DNA, 120 bp, synthetic construct; identical to SEQ ID NO: 7885
  source 1..120: mol_type = other DNA

SEQ ID NO: 55705 - DNA, 120 bp, synthetic construct; identical to SEQ ID NO: 25751
  source 1..120: mol_type = other DNA

SEQ ID NO: 55706 - DNA, 120 bp, synthetic construct; identical to SEQ ID NO: 25752
  source 1..120: mol_type = other DNA

SEQ ID NO: 55707 - DNA, 120 bp, synthetic construct; identical to SEQ ID NO: 25753
  source 1..120: mol_type = other DNA

SEQ ID NO: 55708 - DNA, 120 bp, synthetic construct; identical to SEQ ID NO: 25754
  source 1..120: mol_type = other DNA

SEQ ID NO: 55709 - DNA, 120 bp, synthetic construct; identical to SEQ ID NO: 7886
  source 1..120: mol_type = other DNA

SEQ ID NO: 55710 - DNA, 120 bp, synthetic construct; identical to SEQ ID NO: 25756
  source 1..120: mol_type = other DNA

SEQ ID NO: 55711 - DNA, 120 bp, synthetic construct; identical to SEQ ID NO: 25757
  source 1..120: mol_type = other DNA

SEQ ID NO: 55712 - DNA, 120 bp, synthetic construct; identical to SEQ ID NO: 7887
  source 1..120: mol_type = other DNA

SEQ ID NO: 55713 - DNA, 120 bp, synthetic construct; identical to SEQ ID NO: 25759
  source 1..120: mol_type = other DNA

SEQ ID NO: 55714 - DNA, 120 bp, synthetic construct; identical to SEQ ID NO: 25760
  source 1..120: mol_type = other DNA

SEQ ID NO: 55715 - DNA, 120 bp, synthetic construct; identical to SEQ ID NO: 25761
  source 1..120: mol_type = other DNA

SEQ ID NO: 55716 - DNA, 120 bp, synthetic construct; identical to SEQ ID NO: 25762
  source 1..120: mol_type = other DNA

SEQ ID NO: 55717 - DNA, 120 bp, synthetic construct; identical to SEQ ID NO: 7888
  source 1..120: mol_type = other DNA

SEQ ID NO: 55718 - DNA, 120 bp, synthetic construct; identical to SEQ ID NO: 25764
  source 1..120: mol_type = other DNA

SEQ ID NO: 55719 - DNA, 120 bp, synthetic construct; identical to SEQ ID NO: 25765
  source 1..120: mol_type = other DNA

SEQ ID NO: 55720 - DNA, 120 bp, synthetic construct; identical to SEQ ID NO: 7889
  source 1..120: mol_type = other DNA

SEQ ID NO: 55721 - DNA, 120 bp, synthetic construct; identical to SEQ ID NO: 25767
  source 1..120: mol_type = other DNA

SEQ ID NO: 55722 - DNA, 120 bp, synthetic construct; identical to SEQ ID NO: 25768
  source 1..120: mol_type = other DNA

SEQ ID NO: 55723 - DNA, 120 bp, synthetic construct; identical to SEQ ID NO: 25769
  source 1..120: mol_type = other DNA

SEQ ID NO: 55724 - DNA, 120 bp, synthetic construct; identical to SEQ ID NO: 25770
  source 1..120: mol_type = other DNA

SEQ ID NO: 55725 - DNA, 120 bp, synthetic construct; identical to SEQ ID NO: 7890
  source 1..120: mol_type = other DNA

SEQ ID NO: 55726 - DNA, 120 bp, synthetic construct; identical to SEQ ID NO: 25772
  source 1..120: mol_type = other DNA

SEQ ID NO: 55727 - DNA, 120 bp, synthetic construct; identical to SEQ ID NO: 7891
  source 1..120: mol_type = other DNA

SEQ ID NO: 55728 - DNA, 120 bp, synthetic construct; identical to SEQ ID NO: 25774
  source 1..120: mol_type = other DNA

SEQ ID NO: 55729 - DNA, 120 bp, synthetic construct; identical to SEQ ID NO: 25775
  source 1..120: mol_type = other DNA

SEQ ID NO: 55730 - DNA, 120 bp, synthetic construct; identical to SEQ ID NO: 25776
  source 1..120: mol_type = other DNA

SEQ ID NO: 55731 - DNA, 120 bp, synthetic construct; identical to SEQ ID NO: 25777
  source 1..120: mol_type = other DNA

SEQ ID NO: 55732 - DNA, 120 bp, synthetic construct; identical to SEQ ID NO: 7892
  source 1..120: mol_type = other DNA

SEQ ID NO: 55733 - DNA, 120 bp, synthetic construct; identical to SEQ ID NO: 25779
  source 1..120: mol_type = other DNA

SEQ ID NO: 55734 - DNA, 120 bp, synthetic construct; identical to SEQ ID NO: 25780
  source 1..120: mol_type = other DNA

SEQ ID NO: 55735 - DNA, 120 bp, synthetic construct; identical to SEQ ID NO: 25781
  source 1..120: mol_type = other DNA

SEQ ID NO: 55736 - DNA, 120 bp, synthetic construct; identical to SEQ ID NO: 7893
  source 1..120: mol_type = other DNA

SEQ ID NO: 55737 - DNA, 120 bp, synthetic construct; identical to SEQ ID NO: 25783
  source 1..120: mol_type = other DNA

SEQ ID NO: 55738 - DNA, 120 bp, synthetic construct; identical to SEQ ID NO: 25784
  source 1..120: mol_type = other DNA

SEQ ID NO: 55739 - DNA, 120 bp, synthetic construct; identical to SEQ ID NO: 25785
  source 1..120: mol_type = other DNA

SEQ ID NO: 55740 - DNA, 120 bp, synthetic construct; identical to SEQ ID NO: 7894
  source 1..120: mol_type = other DNA

SEQ ID NO: 55741 - DNA, 120 bp, synthetic construct; identical to SEQ ID NO: 25787
  source 1..120: mol_type = other DNA

SEQ ID NO: 55742 - DNA, 120 bp, synthetic construct; identical to SEQ ID NO: 25788
  source 1..120: mol_type = other DNA

SEQ ID NO: 55743 - DNA, 120 bp, synthetic construct; identical to SEQ ID NO: 25789
  source 1..120: mol_type = other DNA

SEQ ID NO: 55744 - DNA, 120 bp, synthetic construct; identical to SEQ ID NO: 7895
  source 1..120: mol_type = other DNA

SEQ ID NO: 55745 - DNA, 120 bp, synthetic construct; identical to SEQ ID NO: 25791
  source 1..120: mol_type = other DNA

SEQ ID NO: 55746 - DNA, 120 bp, synthetic construct; identical to SEQ ID NO: 25792
  source 1..120: mol_type = other DNA

SEQ ID NO: 55747 - DNA, 120 bp, synthetic construct; identical to SEQ ID NO: 7896
  source 1..120: mol_type = other DNA

SEQ ID NO: 55748 - DNA, 120 bp, synthetic construct; identical to SEQ ID NO: 25794
  source 1..120: mol_type = other DNA

SEQ ID NO: 55749 - DNA, 120 bp, synthetic construct; identical to SEQ ID NO: 25795
  source 1..120: mol_type = other DNA

SEQ ID NO: 55750 - DNA, 120 bp, synthetic construct; identical to SEQ ID NO: 25796
  source 1..120: mol_type = other DNA

SEQ ID NO: 55751 - DNA, 120 bp, synthetic construct; identical to SEQ ID NO: 7897
  source 1..120: mol_type = other DNA

SEQ ID NO: 55752 - DNA, 120 bp, synthetic construct; identical to SEQ ID NO: 25798
  source 1..120: mol_type = other DNA

SEQ ID NO: 55753 - DNA, 120 bp, synthetic construct; identical to SEQ ID NO: 25799
  source 1..120: mol_type = other DNA

SEQ ID NO: 55754 - DNA, 120 bp, synthetic construct; identical to SEQ ID NO: 25800
  source 1..120: mol_type = other DNA

SEQ ID NO: 55755 - DNA, 120 bp, synthetic construct; identical to SEQ ID NO: 25801
  source 1..120: mol_type = other DNA

SEQ ID NO: 55756 - DNA, 120 bp, synthetic construct; identical to SEQ ID NO: 7898
  source 1..120: mol_type = other DNA

SEQ ID NO: 55757 - DNA, 120 bp, synthetic construct; identical to SEQ ID NO: 25803
  source 1..120: mol_type = other DNA

SEQ ID NO: 55758 - DNA, 120 bp, synthetic construct; identical to SEQ ID NO: 25804
  source 1..120: mol_type = other DNA

SEQ ID NO: 55759 - DNA, 120 bp, synthetic construct; identical to SEQ ID NO: 7899
  source 1..120: mol_type = other DNA

SEQ ID NO: 55760 - DNA, 120 bp, synthetic construct; identical to SEQ ID NO: 25806
  source 1..120: mol_type = other DNA

SEQ ID NO: 55761 - DNA, 120 bp, synthetic construct; identical to SEQ ID NO: 25807
  source 1..120: mol_type = other DNA

SEQ ID NO: 55762 - DNA, 120 bp, synthetic construct; identical to SEQ ID NO: 25808
  source 1..120: mol_type = other DNA

SEQ ID NO: 55763 - DNA, 120 bp, synthetic construct; identical to SEQ ID NO: 7900
  source 1..120: mol_type = other DNA

SEQ ID NO: 55764 - DNA, 120 bp, synthetic construct; identical to SEQ ID NO: 25810
  source 1..120: mol_type = other DNA

SEQ ID NO: 55765 - DNA, 120 bp, synthetic construct; identical to SEQ ID NO: 25811
  source 1..120: mol_type = other DNA

SEQ ID NO: 55766 - DNA, 120 bp, synthetic construct; identical to SEQ ID NO: 25812
  source 1..120: mol_type = other DNA

SEQ ID NO: 55767 - DNA, 120 bp, synthetic construct; identical to SEQ ID NO: 25813
  source 1..120: mol_type = other DNA

SEQ ID NO: 55768 - DNA, 120 bp, synthetic construct; identical to SEQ ID NO: 7901
  source 1..120: mol_type = other DNA

SEQ ID NO: 55769 - DNA, 120 bp, synthetic construct; identical to SEQ ID NO: 25815
  source 1..120: mol_type = other DNA

SEQ ID NO: 55770 - DNA, 120 bp, synthetic construct; identical to SEQ ID NO: 25816
  source 1..120: mol_type = other DNA

SEQ ID NO: 55771 - DNA, 120 bp, synthetic construct; identical to SEQ ID NO: 25817
  source 1..120: mol_type = other DNA

SEQ ID NO: 55772 - DNA, 120 bp, synthetic construct; identical to SEQ ID NO: 7902
  source 1..120: mol_type = other DNA

SEQ ID NO: 55773 - DNA, 120 bp, synthetic construct; identical to SEQ ID NO: 25819
  source 1..120: mol_type = other DNA

SEQ ID NO: 55774 - DNA, 120 bp, synthetic construct; identical to SEQ ID NO: 25820
  source 1..120: mol_type = other DNA

SEQ ID NO: 55775 - DNA, 120 bp, synthetic construct; identical to SEQ ID NO: 7903
  source 1..120: mol_type = other DNA

SEQ ID NO: 55776 - DNA, 120 bp, synthetic construct; identical to SEQ ID NO: 25822
  source 1..120: mol_type = other DNA

SEQ ID NO: 55777 - DNA, 120 bp, synthetic construct; identical to SEQ ID NO: 25823
  source 1..120: mol_type = other DNA

SEQ ID NO: 55778 - DNA, 120 bp, synthetic construct; identical to SEQ ID NO: 25824
  source 1..120: mol_type = other DNA

SEQ ID NO: 55779 - DNA, 120 bp, synthetic construct; identical to SEQ ID NO: 7904
  source 1..120: mol_type = other DNA

SEQ ID NO: 55780 - DNA, 120 bp, synthetic construct; identical to SEQ ID NO: 25826
  source 1..120: mol_type = other DNA

SEQ ID NO: 55781 - DNA, 120 bp, synthetic construct; identical to SEQ ID NO: 25827
  source 1..120: mol_type = other DNA

SEQ ID NO: 55782 - DNA, 120 bp, synthetic construct; identical to SEQ ID NO: 25828
  source 1..120: mol_type = other DNA

SEQ ID NO: 55783 - DNA, 120 bp, synthetic construct; identical to SEQ ID NO: 7905
  source 1..120: mol_type = other DNA

SEQ ID NO: 55784 - DNA, 120 bp, synthetic construct; identical to SEQ ID NO: 25830
  source 1..120: mol_type = other DNA

SEQ ID NO: 55785 - DNA, 120 bp, synthetic construct; identical to SEQ ID NO: 25831
  source 1..120: mol_type = other DNA

SEQ ID NO: 55786 - DNA, 120 bp, synthetic construct; identical to SEQ ID NO: 25832
  source 1..120: mol_type = other DNA

SEQ ID NO: 55787 - DNA, 120 bp, synthetic construct; identical to SEQ ID NO: 25833
  source 1..120: mol_type = other DNA

SEQ ID NO: 55788 - DNA, 120 bp, synthetic construct; identical to SEQ ID NO: 7906
  source 1..120: mol_type = other DNA

SEQ ID NO: 55789 - DNA, 120 bp, synthetic construct; identical to SEQ ID NO: 25835
  source 1..120: mol_type = other DNA

SEQ ID NO: 55790 - DNA, 120 bp, synthetic construct; identical to SEQ ID NO: 25836
  source 1..120: mol_type = other DNA

SEQ ID NO: 55791 - DNA, 120 bp, synthetic construct; identical to SEQ ID NO: 7907
  source 1..120: mol_type = other DNA

SEQ ID NO: 55792 - DNA, 120 bp, synthetic construct; identical to SEQ ID NO: 25838
  source 1..120: mol_type = other DNA

SEQ ID NO: 55793 - DNA, 120 bp, synthetic construct; identical to SEQ ID NO: 25839
  source 1..120: mol_type = other DNA

SEQ ID NO: 55794 - DNA, 120 bp, synthetic construct; identical to SEQ ID NO: 25840
  source 1..120: mol_type = other DNA

SEQ ID NO: 55795 - DNA, 120 bp, synthetic construct; identical to SEQ ID NO: 25841
  source 1..120: mol_type = other DNA

SEQ ID NO: 55796 - DNA, 120 bp, synthetic construct; identical to SEQ ID NO: 7908
  source 1..120: mol_type = other DNA

SEQ ID NO: 55797 - DNA, 120 bp, synthetic construct; identical to SEQ ID NO: 25843
  source 1..120: mol_type = other DNA

SEQ ID NO: 55798 - DNA, 120 bp, synthetic construct; identical to SEQ ID NO: 25844
  source 1..120: mol_type = other DNA

SEQ ID NO: 55799 - DNA, 120 bp, synthetic construct; identical to SEQ ID NO: 7909
  source 1..120: mol_type = other DNA

SEQ ID NO: 55800 - DNA, 120 bp, synthetic construct; identical to SEQ ID NO: 25846
  source 1..120: mol_type = other DNA

SEQ ID NO: 55801 - DNA, 120 bp, synthetic construct; identical to SEQ ID NO: 25847
  source 1..120: mol_type = other DNA

SEQ ID NO: 55802 - DNA, 120 bp, synthetic construct; identical to SEQ ID NO: 25848
  source 1..120: mol_type = other DNA

SEQ ID NO: 55803 - DNA, 120 bp, synthetic construct; identical to SEQ ID NO: 7910
  source 1..120: mol_type = other DNA

SEQ ID NO: 55804 - DNA, 120 bp, synthetic construct; identical to SEQ ID NO: 25850
  source 1..120: mol_type = other DNA

SEQ ID NO: 55805 - DNA, 120 bp, synthetic construct; identical to SEQ ID NO: 25851
  source 1..120: mol_type = other DNA

SEQ ID NO: 55806 - DNA, 120 bp, synthetic construct; identical to SEQ ID NO: 25852
  source 1..120: mol_type = other DNA

SEQ ID NO: 55807 - DNA, 120 bp, synthetic construct; identical to SEQ ID NO: 7911
  source 1..120: mol_type = other DNA

SEQ ID NO: 55808 - DNA, 120 bp, synthetic construct; identical to SEQ ID NO: 25854
  source 1..120: mol_type = other DNA

SEQ ID NO: 55809 - DNA, 120 bp, synthetic construct; identical to SEQ ID NO: 25855
  source 1..120: mol_type = other DNA

SEQ ID NO: 55810 - DNA, 120 bp, synthetic construct; identical to SEQ ID NO: 25856
  source 1..120: mol_type = other DNA

SEQ ID NO: 55811 - DNA, 120 bp, synthetic construct; identical to SEQ ID NO: 25857
  source 1..120: mol_type = other DNA

SEQ ID NO: 55812 - DNA, 120 bp, synthetic construct; identical to SEQ ID NO: 7912
  source 1..120: mol_type = other DNA

SEQ ID NO: 55813 - DNA, 120 bp, synthetic construct; identical to SEQ ID NO: 25859
  source 1..120: mol_type = other DNA

SEQ ID NO: 55814 - DNA, 120 bp, synthetic construct; identical to SEQ ID NO: 25860
  source 1..120: mol_type = other DNA

SEQ ID NO: 55815 - DNA, 120 bp, synthetic construct; identical to SEQ ID NO: 7913
  source 1..120: mol_type = other DNA

SEQ ID NO: 55816 - DNA, 120 bp, synthetic construct; identical to SEQ ID NO: 25862
  source 1..120: mol_type = other DNA

SEQ ID NO: 55817 - DNA, 120 bp, synthetic construct; identical to SEQ ID NO: 25863
  source 1..120: mol_type = other DNA

SEQ ID NO: 55818 - DNA, 120 bp, synthetic construct; identical to SEQ ID NO: 25864
  source 1..120: mol_type = other DNA

SEQ ID NO: 55819 - DNA, 120 bp, synthetic construct; identical to SEQ ID NO: 25865
  source 1..120: mol_type = other DNA

SEQ ID NO: 55820 - DNA, 120 bp, synthetic construct; identical to SEQ ID NO: 7914
  source 1..120: mol_type = other DNA

SEQ ID NO: 55821 - DNA, 120 bp, synthetic construct; identical to SEQ ID NO: 25867
  source 1..120: mol_type = other DNA

SEQ ID NO: 55822 - DNA, 120 bp, synthetic construct; identical to SEQ ID NO: 25868
  source 1..120: mol_type = other DNA

SEQ ID NO: 55823 - DNA, 120 bp, synthetic construct; identical to SEQ ID NO: 7915
  source 1..120: mol_type = other DNA

SEQ ID NO: 55824 - DNA, 120 bp, synthetic construct; identical to SEQ ID NO: 25870
  source 1..120: mol_type = other DNA

SEQ ID NO: 55825 - DNA, 120 bp, synthetic construct; identical to SEQ ID NO: 25871
  source 1..120: mol_type = other DNA

SEQ ID NO: 55826 - DNA, 120 bp, synthetic construct; identical to SEQ ID NO: 25872
  source 1..120: mol_type = other DNA

SEQ ID NO: 55827 - DNA, 120 bp, synthetic construct; identical to SEQ ID NO: 25873
  source 1..120: mol_type = other DNA

SEQ ID NO: 55828 - DNA, 120 bp, synthetic construct; identical to SEQ ID NO: 7916
  source 1..120: mol_type = other DNA

SEQ ID NO: 55829 - DNA, 120 bp, synthetic construct; identical to SEQ ID NO: 25875
  source 1..120: mol_type = other DNA

SEQ ID NO: 55830 - DNA, 120 bp, synthetic construct; identical to SEQ ID NO: 25876
  source 1..120: mol_type = other DNA

SEQ ID NO: 55831 - DNA, 120 bp, synthetic construct; identical to SEQ ID NO: 7917
  source 1..120: mol_type = other DNA

SEQ ID NO: 55832 - DNA, 120 bp, synthetic construct; identical to SEQ ID NO: 25878
  source 1..120: mol_type = other DNA

SEQ ID NO: 55833 - DNA, 120 bp, synthetic construct; identical to SEQ ID NO: 25879
  source 1..120: mol_type = other DNA

SEQ ID NO: 55834 - DNA, 120 bp, synthetic construct; identical to SEQ ID NO: 25880
  source 1..120: mol_type = other DNA

SEQ ID NO: 55835 - DNA, 120 bp, synthetic construct; identical to SEQ ID NO: 25881
  source 1..120: mol_type = other DNA

SEQ ID NO: 55836 - DNA, 120 bp, synthetic construct; identical to SEQ ID NO: 7918
  source 1..120: mol_type = other DNA

SEQ ID NO: 55837 - DNA, 120 bp, synthetic construct; identical to SEQ ID NO: 25883
  source 1..120: mol_type = other DNA

SEQ ID NO: 55838 - DNA, 120 bp, synthetic construct; identical to SEQ ID NO: 25884
  source 1..120: mol_type = other DNA

SEQ ID NO: 55839 - DNA, 120 bp, synthetic construct; identical to SEQ ID NO: 7919
  source 1..120: mol_type = other DNA

SEQ ID NO: 55840 - DNA, 120 bp, synthetic construct; identical to SEQ ID NO: 25886
  source 1..120: mol_type = other DNA

SEQ ID NO: 55841 - DNA, 120 bp, synthetic construct; identical to SEQ ID NO: 25887
  source 1..120: mol_type = other DNA

SEQ ID NO: 55842 - DNA, 120 bp, synthetic construct; identical to SEQ ID NO: 25888
  source 1..120: mol_type = other DNA

SEQ ID NO: 55843 - DNA, 120 bp, synthetic construct; identical to SEQ ID NO: 25889
  source 1..120: mol_type = other DNA

SEQ ID NO: 55844 - DNA, 120 bp, synthetic construct; identical to SEQ ID NO: 7920
  source 1..120: mol_type = other DNA

SEQ ID NO: 55845 - DNA, 120 bp, synthetic construct; identical to SEQ ID NO: 25891
  source 1..120: mol_type = other DNA

SEQ ID NO: 55846 - DNA, 120 bp, synthetic construct; identical to SEQ ID NO: 25892
  source 1..120: mol_type = other DNA

SEQ ID NO: 55847 - DNA, 120 bp, synthetic construct; identical to SEQ ID NO: 7921
  source 1..120: mol_type = other DNA

SEQ ID NO: 55848 - DNA, 120 bp, synthetic construct; identical to SEQ ID NO: 25894
  source 1..120: mol_type = other DNA

SEQ ID NO: 55849 - DNA, 120 bp, synthetic construct; identical to SEQ ID NO: 25895
  source 1..120: mol_type = other DNA

SEQ ID NO: 55850 - DNA, 120 bp, synthetic construct; identical to SEQ ID NO: 25896
  source 1..120: mol_type = other DNA

SEQ ID NO: 55851 - DNA, 120 bp, synthetic construct; identical to SEQ ID NO: 25897
  source 1..120: mol_type = other DNA

SEQ ID NO: 55852 - DNA, 120 bp, synthetic construct; identical to SEQ ID NO: 7922
  source 1..120: mol_type = other DNA

SEQ ID NO: 55853 - DNA, 120 bp, synthetic construct; identical to SEQ ID NO: 25899
  source 1..120: mol_type = other DNA

SEQ ID NO: 55854 - DNA, 120 bp, synthetic construct; identical to SEQ ID NO: 25900
  source 1..120: mol_type = other DNA

SEQ ID NO: 55855 - DNA, 120 bp, synthetic construct; identical to SEQ ID NO: 25901
  source 1..120: mol_type = other DNA

SEQ ID NO: 55856 - DNA, 120 bp, synthetic construct; identical to SEQ ID NO: 7923
  source 1..120: mol_type = other DNA

SEQ ID NO: 55857 - DNA, 120 bp, synthetic construct; identical to SEQ ID NO: 25903
  source 1..120: mol_type = other DNA

SEQ ID NO: 55858 - DNA, 120 bp, synthetic construct; identical to SEQ ID NO: 25904
  source 1..120: mol_type = other DNA

SEQ ID NO: 55859 - DNA, 120 bp, synthetic construct; identical to SEQ ID NO: 25905
  source 1..120: mol_type = other DNA

SEQ ID NO: 55860 - DNA, 120 bp, synthetic construct; identical to SEQ ID NO: 7924
  source 1..120: mol_type = other DNA

SEQ ID NO: 55861 - DNA, 120 bp, synthetic construct; identical to SEQ ID NO: 25907
  source 1..120: mol_type = other DNA

SEQ ID NO: 55862 - DNA, 120 bp, synthetic construct; identical to SEQ ID NO: 25908
  source 1..120: mol_type = other DNA

SEQ ID NO: 55863 - DNA, 120 bp, synthetic construct; identical to SEQ ID NO: 25909
  source 1..120: mol_type = other DNA

SEQ ID NO: 55864 - DNA, 120 bp, synthetic construct; identical to SEQ ID NO: 7925
  source 1..120: mol_type = other DNA

SEQ ID NO: 55865 - DNA, 120 bp, synthetic construct; identical to SEQ ID NO: 25911
  source 1..120: mol_type = other DNA

SEQ ID NO: 55866 - DNA, 120 bp, synthetic construct; identical to SEQ ID NO: 25912
  source 1..120: mol_type = other DNA

SEQ ID NO: 55867 - DNA, 120 bp, synthetic construct; identical to SEQ ID NO: 25913
  source 1..120: mol_type = other DNA

SEQ ID NO: 55868 - DNA, 120 bp, synthetic construct; identical to SEQ ID NO: 7926
  source 1..120: mol_type = other DNA

SEQ ID NO: 55869 - DNA, 120 bp, synthetic construct; identical to SEQ ID NO: 25915
  source 1..120: mol_type = other DNA

SEQ ID NO: 55870 - DNA, 120 bp, synthetic construct; identical to SEQ ID NO: 25916
  source 1..120: mol_type = other DNA

SEQ ID NO: 55871 - DNA, 120 bp, synthetic construct; identical to SEQ ID NO: 25917
  source 1..120: mol_type = other DNA

SEQ ID NO: 55872 - DNA, 120 bp, synthetic construct; identical to SEQ ID NO: 7927
  source 1..120: mol_type = other DNA

SEQ ID NO: 55873 - DNA, 120 bp, synthetic construct; identical to SEQ ID NO: 25919
  source 1..120: mol_type = other DNA

SEQ ID NO: 55874 - DNA, 120 bp, synthetic construct; identical to SEQ ID NO: 25920
  source 1..120: mol_type = other DNA

SEQ ID NO: 55875 - DNA, 120 bp, synthetic construct; identical to SEQ ID NO: 25921
  source 1..120: mol_type = other DNA

SEQ ID NO: 55876 - DNA, 120 bp, synthetic construct; identical to SEQ ID NO: 7928
  source 1..120: mol_type = other DNA

SEQ ID NO: 55877 - DNA, 120 bp, synthetic construct; identical to SEQ ID NO: 25923
  source 1..120: mol_type = other DNA

SEQ ID NO: 55878 - DNA, 120 bp, synthetic construct; identical to SEQ ID NO: 25924
  source 1..120: mol_type = other DNA

SEQ ID NO: 55879 - DNA, 120 bp, synthetic construct; identical to SEQ ID NO: 7929
  source 1..120: mol_type = other DNA

SEQ ID NO: 55880 - DNA, 120 bp, synthetic construct; identical to SEQ ID NO: 25926
  source 1..120: mol_type = other DNA

SEQ ID NO: 55881 - DNA, 120 bp, synthetic construct; identical to SEQ ID NO: 25927
  source 1..120: mol_type = other DNA

SEQ ID NO: 55882 - DNA, 120 bp, synthetic construct; identical to SEQ ID NO: 25928
  source 1..120: mol_type = other DNA

SEQ ID NO: 55883 - DNA, 120 bp, synthetic construct; identical to SEQ ID NO: 7930
  source 1..120: mol_type = other DNA

SEQ ID NO: 55884 - DNA, 120 bp, synthetic construct; identical to SEQ ID NO: 25930
  source 1..120: mol_type = other DNA

SEQ ID NO: 55885 - DNA, 120 bp, synthetic construct; identical to SEQ ID NO: 25931
  source 1..120: mol_type = other DNA

SEQ ID NO: 55886 - DNA, 120 bp, synthetic construct; identical to SEQ ID NO: 25932
  source 1..120: mol_type = other DNA

SEQ ID NO: 55887 - DNA, 120 bp, synthetic construct; identical to SEQ ID NO: 25933
  source 1..120: mol_type = other DNA

SEQ ID NO: 55888 - DNA, 120 bp, synthetic construct; identical to SEQ ID NO: 7931
  source 1..120: mol_type = other DNA

SEQ ID NO: 55889 - DNA, 120 bp, synthetic construct; identical to SEQ ID NO: 25935
  source 1..120: mol_type = other DNA

SEQ ID NO: 55890 - DNA, 120 bp, synthetic construct; identical to SEQ ID NO: 25936
  source 1..120: mol_type = other DNA

SEQ ID NO: 55891 - DNA, 120 bp, synthetic construct; identical to SEQ ID NO: 7932
  source 1..120: mol_type = other DNA

SEQ ID NO: 55892 - DNA, 120 bp, synthetic construct; identical to SEQ ID NO: 25938
  source 1..120: mol_type = other DNA

SEQ ID NO: 55893 - DNA, 120 bp, synthetic construct; identical to SEQ ID NO: 25939
  source 1..120: mol_type = other DNA

SEQ ID NO: 55894 - DNA, 120 bp, synthetic construct; identical to SEQ ID NO: 25940
  source 1..120: mol_type = other DNA

SEQ ID NO: 55895 - DNA, 120 bp, synthetic construct; identical to SEQ ID NO: 7933
  source 1..120: mol_type = other DNA

SEQ ID NO: 55896 - DNA, 120 bp, synthetic construct; identical to SEQ ID NO: 25942
  source 1..120: mol_type = other DNA

SEQ ID NO: 55897 - DNA, 120 bp, synthetic construct; identical to SEQ ID NO: 25943
  source 1..120: mol_type = other DNA

SEQ ID NO: 55898 - DNA, 120 bp, synthetic construct; identical to SEQ ID NO: 25944
  source 1..120: mol_type = other DNA

SEQ ID NO: 55899 - DNA, 120 bp, synthetic construct; identical to SEQ ID NO: 25945
  source 1..120: mol_type = other DNA

SEQ ID NO: 55900 - DNA, 120 bp, synthetic construct; identical to SEQ ID NO: 7934
  source 1..120: mol_type = other DNA

SEQ ID NO: 55901 - DNA, 120 bp, synthetic construct; identical to SEQ ID NO: 25947
  source 1..120: mol_type = other DNA

SEQ ID NO: 55902 - DNA, 120 bp, synthetic construct; identical to SEQ ID NO: 25948
  source 1..120: mol_type = other DNA

SEQ ID NO: 55903 - DNA, 120 bp, synthetic construct; identical to SEQ ID NO: 7935
  source 1..120: mol_type = other DNA

SEQ ID NO: 55904 - DNA, 120 bp, synthetic construct; identical to SEQ ID NO: 25950
  source 1..120: mol_type = other DNA

SEQ ID NO: 55905 - DNA, 120 bp, synthetic construct; identical to SEQ ID NO: 25951
  source 1..120: mol_type = other DNA

SEQ ID NO: 55906 - DNA, 120 bp, synthetic construct; identical to SEQ ID NO: 25952
  source 1..120: mol_type = other DNA

SEQ ID NO: 55907 - DNA, 120 bp, synthetic construct; identical to SEQ ID NO: 7936
  source 1..120: mol_type = other DNA

SEQ ID NO: 55908 - DNA, 120 bp, synthetic construct; identical to SEQ ID NO: 25954
  source 1..120: mol_type = other DNA

SEQ ID NO: 55909 - DNA, 120 bp, synthetic construct; identical to SEQ ID NO: 25955
  source 1..120: mol_type = other DNA

SEQ ID NO: 55910 - DNA, 120 bp, synthetic construct; identical to SEQ ID NO: 25956
  source 1..120: mol_type = other DNA

SEQ ID NO: 55911 - DNA, 120 bp, synthetic construct; identical to SEQ ID NO: 7937
  source 1..120: mol_type = other DNA

SEQ ID NO: 55912 - DNA, 120 bp, synthetic construct; identical to SEQ ID NO: 25958
  source 1..120: mol_type = other DNA

SEQ ID NO: 55913 - DNA, 120 bp, synthetic construct; identical to SEQ ID NO: 25959
  source 1..120: mol_type = other DNA

SEQ ID NO: 55914 - DNA, 120 bp, synthetic construct; identical to SEQ ID NO: 25960
  source 1..120: mol_type = other DNA

SEQ ID NO: 55915 - DNA, 120 bp, synthetic construct; identical to SEQ ID NO: 7938
  source 1..120: mol_type = other DNA

SEQ ID NO: 55916 - DNA, 120 bp, synthetic construct; identical to SEQ ID NO: 25962
  source 1..120: mol_type = other DNA

SEQ ID NO: 55917 - DNA, 120 bp, synthetic construct; identical to SEQ ID NO: 25963
  source 1..120: mol_type = other DNA

SEQ ID NO: 55918 - DNA, 120 bp, synthetic construct; identical to SEQ ID NO: 25964
  source 1..120: mol_type = other DNA

SEQ ID NO: 55919 - DNA, 120 bp, synthetic construct; identical to SEQ ID NO: 7939
  source 1..120: mol_type = other DNA

SEQ ID NO: 55920 - DNA, 120 bp, synthetic construct; identical to SEQ ID NO: 25966
  source 1..120: mol_type = other DNA

SEQ ID NO: 55921 - DNA, 120 bp, synthetic construct; identical to SEQ ID NO: 25967
  source 1..120: mol_type = other DNA

SEQ ID NO: 55922 - DNA, 120 bp, synthetic construct; identical to SEQ ID NO: 25968
  source 1..120: mol_type = other DNA

SEQ ID NO: 55923 - DNA, 120 bp, synthetic construct; identical to SEQ ID NO: 7940
  source 1..120: mol_type = other DNA

SEQ ID NO: 55924 - DNA, 120 bp, synthetic construct; identical to SEQ ID NO: 25970
  source 1..120: mol_type = other DNA

SEQ ID NO: 55925 - DNA, 120 bp, synthetic construct; identical to SEQ ID NO: 25971
  source 1..120: mol_type = other DNA

SEQ ID NO: 55926 - DNA, 120 bp, synthetic construct; identical to SEQ ID NO: 25972
  source 1..120: mol_type = other DNA

SEQ ID NO: 55927 - DNA, 120 bp, synthetic construct; identical to SEQ ID NO: 7941
  source 1..120: mol_type = other DNA

SEQ ID NO: 55928 - DNA, 120 bp, synthetic construct; identical to SEQ ID NO: 25974
  source 1..120: mol_type = other DNA

SEQ ID NO: 55929 - DNA, 120 bp, synthetic construct; identical to SEQ ID NO: 25975
  source 1..120: mol_type = other DNA

SEQ ID NO: 55930 - DNA, 120 bp, synthetic construct; identical to SEQ ID NO: 25976
  source 1..120: mol_type = other DNA

SEQ ID NO: 55931 - DNA, 120 bp, synthetic construct; identical to SEQ ID NO: 7942
  source 1..120: mol_type = other DNA

SEQ ID NO: 55932 - DNA, 120 bp, synthetic construct; identical to SEQ ID NO: 25978
  source 1..120: mol_type = other DNA

SEQ ID NO: 55933 - DNA, 120 bp, synthetic construct; identical to SEQ ID NO: 25979
  source 1..120: mol_type = other DNA

SEQ ID NO: 55934 - DNA, 120 bp, synthetic construct; identical to SEQ ID NO: 25980
  source 1..120: mol_type = other DNA

SEQ ID NO: 55935 - DNA, 120 bp, synthetic construct; identical to SEQ ID NO: 25981
  source 1..120: mol_type = other DNA

SEQ ID NO: 55936 - DNA, 120 bp, synthetic construct; identical to SEQ ID NO: 7943
  source 1..120: mol_type = other DNA

SEQ ID NO: 55937 - DNA, 120 bp, synthetic construct; identical to SEQ ID NO: 25983
  source 1..120: mol_type = other DNA

SEQ ID NO: 55938 - DNA, 120 bp, synthetic construct; identical to SEQ ID NO: 25984
  source 1..120: mol_type = other DNA

SEQ ID NO: 55939 - DNA, 120 bp, synthetic construct; identical to SEQ ID NO: 7944
  source 1..120: mol_type = other DNA

SEQ ID NO: 55940 - DNA, 120 bp, synthetic construct; identical to SEQ ID NO: 25986
  source 1..120: mol_type = other DNA

SEQ ID NO: 55941 - DNA, 120 bp, synthetic construct; identical to SEQ ID NO: 25987
  source 1..120: mol_type = other DNA

SEQ ID NO: 55942 - DNA, 120 bp, synthetic construct; identical to SEQ ID NO: 25988
  source 1..120: mol_type = other DNA

SEQ ID NO: 55943 - DNA, 120 bp, synthetic construct; identical to SEQ ID NO: 25989
  source 1..120: mol_type = other DNA

SEQ ID NO: 55944 - DNA, 120 bp, synthetic construct; identical to SEQ ID NO: 25990
  source 1..120: mol_type = other DNA

SEQ ID NO: 55945 - DNA, 120 bp, synthetic construct; identical to SEQ ID NO: 7945
  source 1..120: mol_type = other DNA

SEQ ID NO: 55946 - DNA, 120 bp, synthetic construct; identical to SEQ ID NO: 25992
  source 1..120: mol_type = other DNA

SEQ ID NO: 55947 - DNA, 120 bp, synthetic construct; identical to SEQ ID NO: 25993
  source 1..120: mol_type = other DNA

SEQ ID NO: 55948 - DNA, 120 bp, synthetic construct; identical to SEQ ID NO: 25994
  source 1..120: mol_type = other DNA

SEQ ID NO: 55949 - DNA, 120 bp, synthetic construct; identical to SEQ ID NO: 7946
  source 1..120: mol_type = other DNA

SEQ ID NO: 55950 - DNA, 120 bp, synthetic construct; identical to SEQ ID NO: 25996
  source 1..120: mol_type = other DNA

SEQ ID NO: 55951 - DNA, 120 bp, synthetic construct; identical to SEQ ID NO: 25997
  source 1..120: mol_type = other DNA

SEQ ID NO: 55952 - DNA, 120 bp, synthetic construct; identical to SEQ ID NO: 25998
  source 1..120: mol_type = other DNA

SEQ ID NO: 55953 - DNA, 120 bp, synthetic construct; identical to SEQ ID NO: 25999
  source 1..120: mol_type = other DNA

SEQ ID NO: 55954 - DNA, 120 bp, synthetic construct; identical to SEQ ID NO: 7947
  source 1..120: mol_type = other DNA

SEQ ID NO: 55955 - DNA, 120 bp, synthetic construct; identical to SEQ ID NO: 26001
  source 1..120: mol_type = other DNA

SEQ ID NO: 55956 - DNA, 120 bp, synthetic construct; identical to SEQ ID NO: 26002
  source 1..120: mol_type = other DNA

SEQ ID NO: 55957 - DNA, 120 bp, synthetic construct; identical to SEQ ID NO: 7948
  source 1..120: mol_type = other DNA

SEQ ID NO: 55958 - DNA, 120 bp, synthetic construct; identical to SEQ ID NO: 26004
  source 1..120: mol_type = other DNA

SEQ ID NO: 55959 - DNA, 120 bp, synthetic construct; identical to SEQ ID NO: 26005
  source 1..120: mol_type = other DNA

SEQ ID NO: 55960 - DNA, 120 bp, synthetic construct; identical to SEQ ID NO: 26006
  source 1..120: mol_type = other DNA

SEQ ID NO: 55961 - DNA, 120 bp, synthetic construct; identical to SEQ ID NO: 26007
  source 1..120: mol_type = other DNA

SEQ ID NO: 55962 - DNA, 120 bp, synthetic construct; identical to SEQ ID NO: 7949
  source 1..120: mol_type = other DNA

SEQ ID NO: 55963 - DNA, 120 bp, synthetic construct; identical to SEQ ID NO: 26009
  source 1..120: mol_type = other DNA

SEQ ID NO: 55964 - DNA, 120 bp, synthetic construct; identical to SEQ ID NO: 26010
  source 1..120: mol_type = other DNA

SEQ ID NO: 55965 - DNA, 120 bp, synthetic construct; identical to SEQ ID NO: 26011
  source 1..120: mol_type = other DNA

SEQ ID NO: 55966 - DNA, 120 bp, synthetic construct; identical to SEQ ID NO: 7950
  source 1..120: mol_type = other DNA

SEQ ID NO: 55967 - DNA, 120 bp, synthetic construct; identical to SEQ ID NO: 26013
  source 1..120: mol_type = other DNA

SEQ ID NO: 55968 - DNA, 120 bp, synthetic construct; identical to SEQ ID NO: 26014
  source 1..120: mol_type = other DNA

SEQ ID NO: 55969 - DNA, 120 bp, synthetic construct; identical to SEQ ID NO: 7951
  source 1..120: mol_type = other DNA

SEQ ID NO: 55970 - DNA, 120 bp, synthetic construct; identical to SEQ ID NO: 26016
  source 1..120: mol_type = other DNA

SEQ ID NO: 55971 - DNA, 120 bp, synthetic construct; identical to SEQ ID NO: 26017
  source 1..120: mol_type = other DNA

SEQ ID NO: 55972 - DNA, 120 bp, synthetic construct; identical to SEQ ID NO: 26018
  source 1..120: mol_type = other DNA

SEQ ID NO: 55973 - DNA, 120 bp, synthetic construct; identical to SEQ ID NO: 26019
  source 1..120: mol_type = other DNA

SEQ ID NO: 55974 - DNA, 120 bp, synthetic construct; identical to SEQ ID NO: 7952
  source 1..120: mol_type = other DNA

SEQ ID NO: 55975 - DNA, 120 bp, synthetic construct; identical to SEQ ID NO: 26021
  source 1..120: mol_type = other DNA

SEQ ID NO: 55976 - DNA, 120 bp, synthetic construct; identical to SEQ ID NO: 26022
  source 1..120: mol_type = other DNA

SEQ ID NO: 55977 - DNA, 120 bp, synthetic construct; identical to SEQ ID NO: 26023
  source 1..120: mol_type = other DNA

SEQ ID NO: 55978 - DNA, 120 bp, synthetic construct; identical to SEQ ID NO: 7953
  source 1..120: mol_type = other DNA

SEQ ID NO: 55979 - DNA, 120 bp, synthetic construct; identical to SEQ ID NO: 26025
  source 1..120: mol_type = other DNA

SEQ ID NO: 55980 - DNA, 120 bp, synthetic construct; identical to SEQ ID NO: 26026
  source 1..120: mol_type = other DNA

SEQ ID NO: 55981 - DNA, 120 bp, synthetic construct; identical to SEQ ID NO: 26027
  source 1..120: mol_type = other DNA

SEQ ID NO: 55982 - DNA, 120 bp, synthetic construct; identical to SEQ ID NO: 7954
  source 1..120: mol_type = other DNA

SEQ ID NO: 55983 - DNA, 120 bp, synthetic construct; identical to SEQ ID NO: 26029
  source 1..120: mol_type = other DNA

SEQ ID NO: 55984 - DNA, 120 bp, synthetic construct; identical to SEQ ID NO: 26030
  source 1..120: mol_type = other DNA

SEQ ID NO: 55985 - DNA, 120 bp, synthetic construct; identical to SEQ ID NO: 26031
  source 1..120: mol_type = other DNA

SEQ ID NO: 55986 - DNA, 120 bp, synthetic construct; identical to SEQ ID NO: 7955
  source 1..120: mol_type = other DNA

SEQ ID NO: 55987 - DNA, 120 bp, synthetic construct; identical to SEQ ID NO: 26033
  source 1..120: mol_type = other DNA

SEQ ID NO: 55988 - DNA, 120 bp, synthetic construct; identical to SEQ ID NO: 26034
  source 1..120: mol_type = other DNA

SEQ ID NO: 55989 - DNA, 120 bp, synthetic construct; identical to SEQ ID NO: 26035
  source 1..120: mol_type = other DNA

SEQ ID NO: 55990 - DNA, 120 bp, synthetic construct; identical to SEQ ID NO: 7956
  source 1..120: mol_type = other DNA

SEQ ID NO: 55991 - DNA, 120 bp, synthetic construct; identical to SEQ ID NO: 26037
  source 1..120: mol_type = other DNA

SEQ ID NO: 55992 - DNA, 120 bp, synthetic construct; identical to SEQ ID NO: 26038
  source 1..120: mol_type = other DNA

SEQ ID NO: 55993 - DNA, 120 bp, synthetic construct; identical to SEQ ID NO: 26039
  source 1..120: mol_type = other DNA

SEQ ID NO: 55994 - DNA, 120 bp, synthetic construct; identical to SEQ ID NO: 7957
  source 1..120: mol_type = other DNA

SEQ ID NO: 55995 - DNA, 120 bp, synthetic construct; identical to SEQ ID NO: 26041
  source 1..120: mol_type = other DNA

SEQ ID NO: 55996 - DNA, 120 bp, synthetic construct; identical to SEQ ID NO: 26042
  source 1..120: mol_type = other DNA

SEQ ID NO: 55997 - DNA, 120 bp, synthetic construct; identical to SEQ ID NO: 7958
  source 1..120: mol_type = other DNA

SEQ ID NO: 55998 - DNA, 120 bp, synthetic construct; identical to SEQ ID NO: 26044
  source 1..120: mol_type = other DNA

SEQ ID NO: 55999 - DNA, 120 bp, synthetic construct; identical to SEQ ID NO: 26045
  source 1..120: mol_type = other DNA

SEQ ID NO: 56000 - DNA, 120 bp, synthetic construct; identical to SEQ ID NO: 26046
  source 1..120: mol_type = other DNA

SEQ ID NO: 56001 - DNA, 120 bp, synthetic construct; identical to SEQ ID NO: 26047
  source 1..120: mol_type = other DNA

SEQ ID NO: 56002 - DNA, 120 bp, synthetic construct; identical to SEQ ID NO: 7959
  source 1..120: mol_type = other DNA

SEQ ID NO: 56003 - DNA, 120 bp, synthetic construct; identical to SEQ ID NO: 26049
  source 1..120: mol_type = other DNA

SEQ ID NO: 56004 - DNA, 120 bp, synthetic construct; identical to SEQ ID NO: 26050
  source 1..120: mol_type = other DNA

SEQ ID NO: 56005 - DNA, 120 bp, synthetic construct; identical to SEQ ID NO: 26051
  source 1..120: mol_type = other DNA

SEQ ID NO: 56006 - DNA, 120 bp, synthetic construct; identical to SEQ ID NO: 7960
  source 1..120: mol_type = other DNA

SEQ ID NO: 56007 - DNA, 120 bp, synthetic construct; identical to SEQ ID NO: 26053
  source 1..120: mol_type = other DNA

SEQ ID NO: 56008 - DNA, 120 bp, synthetic construct; identical to SEQ ID NO: 26054
  source 1..120: mol_type = other DNA

SEQ ID NO: 56009 - DNA, 120 bp, synthetic construct; identical to SEQ ID NO: 7961
  source 1..120: mol_type = other DNA

SEQ ID NO: 56010 - DNA, 120 bp, synthetic construct; identical to SEQ ID NO: 26056
  source 1..120: mol_type = other DNA

SEQ ID NO: 56011 - DNA, 120 bp, synthetic construct; identical to SEQ ID NO: 26057
  source 1..120: mol_type = other DNA

SEQ ID NO: 56012 - DNA, 120 bp, synthetic construct; identical to SEQ ID NO: 26058
  source 1..120: mol_type = other DNA

SEQ ID NO: 56013 - DNA, 120 bp, synthetic construct; identical to SEQ ID NO: 7962
  source 1..120: mol_type = other DNA

SEQ ID NO: 56014 - DNA, 120 bp, synthetic construct; identical to SEQ ID NO: 26060
  source 1..120: mol_type = other DNA

SEQ ID NO: 56015 - DNA, 120 bp, synthetic construct; identical to SEQ ID NO: 26061
  source 1..120: mol_type = other DNA

SEQ ID NO: 56016 - DNA, 120 bp, synthetic construct; identical to SEQ ID NO: 26062
  source 1..120: mol_type = other DNA

SEQ ID NO: 56017 - DNA, 120 bp, synthetic construct; identical to SEQ ID NO: 26063
  source 1..120: mol_type = other DNA

SEQ ID NO: 56018 - DNA, 120 bp, synthetic construct; identical to SEQ ID NO: 7963
  source 1..120: mol_type = other DNA

SEQ ID NO: 56019 - DNA, 120 bp, synthetic construct; identical to SEQ ID NO: 26065
  source 1..120: mol_type = other DNA

SEQ ID NO: 56020 - DNA, 120 bp, synthetic construct; identical to SEQ ID NO: 26066
  source 1..120: mol_type = other DNA

SEQ ID NO: 56021 - DNA, 120 bp, synthetic construct; identical to SEQ ID NO: 26067
  source 1..120: mol_type = other DNA

SEQ ID NO: 56022 - DNA, 120 bp, synthetic construct; identical to SEQ ID NO: 7964
  source 1..120: mol_type = other DNA

SEQ ID NO: 56023 - DNA, 120 bp, synthetic construct; identical to SEQ ID NO: 26069
  source 1..120: mol_type = other DNA

SEQ ID NO: 56024 - DNA, 120 bp, synthetic construct; identical to SEQ ID NO: 26070
  source 1..120: mol_type = other DNA

SEQ ID NO: 56025 - DNA, 120 bp, synthetic construct; identical to SEQ ID NO: 26071
  source 1..120: mol_type = other DNA

SEQ ID NO: 56026 - DNA, 120 bp, synthetic construct; identical to SEQ ID NO: 7965
  source 1..120: mol_type = other DNA

SEQ ID NO: 56027 - DNA, 120 bp, synthetic construct; identical to SEQ ID NO: 26073
  source 1..120: mol_type = other DNA

SEQ ID NO: 56028 - DNA, 120 bp, synthetic construct; identical to SEQ ID NO: 26074
  source 1..120: mol_type = other DNA

SEQ ID NO: 56029 - DNA, 120 bp, synthetic construct; identical to SEQ ID NO: 26075
  source 1..120: mol_type = other DNA

SEQ ID NO: 56030 - DNA, 120 bp, synthetic construct; identical to SEQ ID NO: 7966
  source 1..120: mol_type = other DNA

SEQ ID NO: 56031 - DNA, 120 bp, synthetic construct; identical to SEQ ID NO: 26077
  source 1..120: mol_type = other DNA

SEQ ID NO: 56032 - DNA, 120 bp, synthetic construct; identical to SEQ ID NO: 953
  source 1..120: mol_type = other DNA

SEQ ID NO: 56033 - DNA, 120 bp, synthetic construct; identical to SEQ ID NO: 7967
  source 1..120: mol_type = other DNA

SEQ ID NO: 56034 - DNA, 120 bp, synthetic construct; identical to SEQ ID NO: 26080
  source 1..120: mol_type = other DNA

SEQ ID NO: 56035 - DNA, 120 bp, synthetic construct; identical to SEQ ID NO: 26081
  source 1..120: mol_type = other DNA

SEQ ID NO: 56036 - DNA, 120 bp, synthetic construct; identical to SEQ ID NO: 26082
  source 1..120: mol_type = other DNA

SEQ ID NO: 56037 - DNA, 120 bp, synthetic construct; identical to SEQ ID NO: 7968
  source 1..120: mol_type = other DNA

SEQ ID NO: 56038 - DNA, 120 bp, synthetic construct; identical to SEQ ID NO: 26084
  source 1..120: mol_type = other DNA

SEQ ID NO: 56039 - DNA, 120 bp, synthetic construct; identical to SEQ ID NO: 26085
  source 1..120: mol_type = other DNA

SEQ ID NO: 56040 - DNA, 120 bp, synthetic construct; identical to SEQ ID NO: 26086
  source 1..120: mol_type = other DNA

SEQ ID NO: 56041 - DNA, 120 bp, synthetic construct; identical to SEQ ID NO: 26087
  source 1..120: mol_type = other DNA

SEQ ID NO: 56042 - DNA, 120 bp, synthetic construct; identical to SEQ ID NO: 7969
  source 1..120: mol_type = other DNA

SEQ ID NO: 56043 - DNA, 120 bp, synthetic construct; identical to SEQ ID NO: 26089
  source 1..120: mol_type = other DNA

SEQ ID NO: 56044 - DNA, 120 bp, synthetic construct; identical to SEQ ID NO: 26090
  source 1..120: mol_type = other DNA

SEQ ID NO: 56045 - DNA, 120 bp, synthetic construct; identical to SEQ ID NO: 26091
  source 1..120: mol_type = other DNA

SEQ ID NO: 56046 - DNA, 120 bp, synthetic construct; identical to SEQ ID NO: 7970
  source 1..120: mol_type = other DNA

SEQ ID NO: 56047 - DNA, 120 bp, synthetic construct; identical to SEQ ID NO: 26093
  source 1..120: mol_type = other DNA

SEQ ID NO: 56048 - DNA, 120 bp, synthetic construct; identical to SEQ ID NO: 26094
  source 1..120: mol_type = other DNA

SEQ ID NO: 56049 - DNA, 120 bp, synthetic construct; identical to SEQ ID NO: 26095
  source 1..120: mol_type = other DNA

SEQ ID NO: 56050 - DNA, 120 bp, synthetic construct; identical to SEQ ID NO: 26096
  source 1..120: mol_type = other DNA

SEQ ID NO: 56051 - DNA, 120 bp, synthetic construct; identical to SEQ ID NO: 7971
  source 1..120: mol_type = other DNA

SEQ ID NO: 56052 - DNA, 120 bp, synthetic construct; identical to SEQ ID NO: 26098
  source 1..120: mol_type = other DNA

SEQ ID NO: 56053 - DNA, 120 bp, synthetic construct; identical to SEQ ID NO: 26099
  source 1..120: mol_type = other DNA

SEQ ID NO: 56054 - DNA, 120 bp, synthetic construct; identical to SEQ ID NO: 7972
  source 1..120: mol_type = other DNA

SEQ ID NO: 56055 - DNA, 120 bp, synthetic construct; identical to SEQ ID NO: 26101
  source 1..120: mol_type = other DNA

SEQ ID NO: 56056 - DNA, 120 bp, synthetic construct; identical to SEQ ID NO: 26102
  source 1..120: mol_type = other DNA

SEQ ID NO: 56057 - DNA, 120 bp, synthetic construct; identical to SEQ ID NO: 26103
  source 1..120: mol_type = other DNA

SEQ ID NO: 56058 - DNA, 120 bp, synthetic construct; identical to SEQ ID NO: 7973
  source 1..120: mol_type = other DNA

SEQ ID NO: 56059 - DNA, 120 bp, synthetic construct; identical to SEQ ID NO: 26105
  source 1..120: mol_type = other DNA

SEQ ID NO: 56060 - DNA, 120 bp, synthetic construct; identical to SEQ ID NO: 26106
  source 1..120: mol_type = other DNA

SEQ ID NO: 56061 - DNA, 120 bp, synthetic construct; identical to SEQ ID NO: 26107
  source 1..120: mol_type = other DNA

SEQ ID NO: 56062 - DNA, 120 bp, synthetic construct; identical to SEQ ID NO: 26108
  source 1..120: mol_type = other DNA

SEQ ID NO: 56063 - DNA, 120 bp, synthetic construct; identical to SEQ ID NO: 984
  source 1..120: mol_type = other DNA

SEQ ID NO: 56064 - DNA, 120 bp, synthetic construct; identical to SEQ ID NO: 26110
  source 1..120: mol_type = other DNA

SEQ ID NO: 56065 - DNA, 120 bp, synthetic construct; identical to SEQ ID NO: 26111
  source 1..120: mol_type = other DNA

SEQ ID NO: 56066 - DNA, 120 bp, synthetic construct; identical to SEQ ID NO: 26112
  source 1..120: mol_type = other DNA

SEQ ID NO: 56067 - DNA, 120 bp, synthetic construct; identical to SEQ ID NO: 7975
  source 1..120: mol_type = other DNA

SEQ ID NO: 56068 - DNA, 120 bp, synthetic construct; identical to SEQ ID NO: 26114
  source 1..120: mol_type = other DNA

SEQ ID NO: 56069 - DNA, 120 bp, synthetic construct; identical to SEQ ID NO: 26115
  source 1..120: mol_type = other DNA

SEQ ID NO: 56070 - DNA, 120 bp, synthetic construct; identical to SEQ ID NO: 26116
  source 1..120: mol_type = other DNA

SEQ ID NO: 56071 - DNA, 120 bp, synthetic construct; identical to SEQ ID NO: 7976
  source 1..120: mol_type = other DNA

SEQ ID NO: 56072 - DNA, 120 bp, synthetic construct; identical to SEQ ID NO: 26118
  source 1..120: mol_type = other DNA

SEQ ID NO: 56073 - DNA, 120 bp, synthetic construct; identical to SEQ ID NO: 26119
  source 1..120: mol_type = other DNA

SEQ ID NO: 56074 - DNA, 120 bp, synthetic construct; identical to SEQ ID NO: 26120
  source 1..120: mol_type = other DNA

SEQ ID NO: 56075 - DNA, 120 bp, synthetic construct; identical to SEQ ID NO: 7977
  source 1..120: mol_type = other DNA

SEQ ID NO: 56076 - DNA, 120 bp, synthetic construct; identical to SEQ ID NO: 26122
  source 1..120: mol_type = other DNA

SEQ ID NO: 56077 - DNA, 120 bp, synthetic construct; identical to SEQ ID NO: 26123
  source 1..120: mol_type = other DNA

SEQ ID NO: 56078 - DNA, 120 bp, synthetic construct; identical to SEQ ID NO: 7978
  source 1..120: mol_type = other DNA

SEQ ID NO: 56079 - DNA, 120 bp, synthetic construct; identical to SEQ ID NO: 26125
  source 1..120: mol_type = other DNA

SEQ ID NO: 56080 - DNA, 120 bp, synthetic construct; identical to SEQ ID NO: 26126
  source 1..120: mol_type = other DNA

SEQ ID NO: 56081 - DNA, 120 bp, synthetic construct; identical to SEQ ID NO: 26127
  source 1..120: mol_type = other DNA

SEQ ID NO: 56082 - DNA, 120 bp, synthetic construct; identical to SEQ ID NO: 26128
  source 1..120: mol_type = other DNA

SEQ ID NO: 56083 - DNA, 120 bp, synthetic construct; identical to SEQ ID NO: 7979
  source 1..120: mol_type = other DNA

SEQ ID NO: 56084 - DNA, 120 bp, synthetic construct; identical to SEQ ID NO: 26130
  source 1..120: mol_type = other DNA

SEQ ID NO: 56085 - DNA, 120 bp, synthetic construct; identical to SEQ ID NO: 26131
  source 1..120: mol_type = other DNA

SEQ ID NO: 56086 - DNA, 120 bp, synthetic construct; identical to SEQ ID NO: 26132
  source 1..120: mol_type = other DNA

SEQ ID NO: 56087 - DNA, 120 bp, synthetic construct; identical to SEQ ID NO: 7980
  source 1..120: mol_type = other DNA

SEQ ID NO: 56088 - DNA, 120 bp, synthetic construct; identical to SEQ ID NO: 26134
  source 1..120: mol_type = other DNA

SEQ ID NO: 56089 - DNA, 120 bp, synthetic construct; identical to SEQ ID NO: 26135
  source 1..120: mol_type = other DNA

SEQ ID NO: 56090 - DNA, 120 bp, synthetic construct; identical to SEQ ID NO: 7981
  source 1..120: mol_type = other DNA

SEQ ID NO: 56091 - DNA, 120 bp, synthetic construct; identical to SEQ ID NO: 26137
  source 1..120: mol_type = other DNA

SEQ ID NO: 56092 - DNA, 120 bp, synthetic construct; identical to SEQ ID NO: 26138
  source 1..120: mol_type = other DNA

SEQ ID NO: 56093 - DNA, 120 bp, synthetic construct; identical to SEQ ID NO: 7982
  source 1..120: mol_type = other DNA

SEQ ID NO: 56094 - DNA, 120 bp, synthetic construct; identical to SEQ ID NO: 26140
  source 1..120: mol_type = other DNA

SEQ ID NO: 56095 - DNA, 120 bp, synthetic construct; identical to SEQ ID NO: 26141
  source 1..120: mol_type = other DNA

SEQ ID NO: 56096 - DNA, 120 bp, synthetic construct; identical to SEQ ID NO: 26142
  source 1..120: mol_type = other DNA

SEQ ID NO: 56097 - DNA, 120 bp, synthetic construct; identical to SEQ ID NO: 992
  source 1..120: mol_type = other DNA

SEQ ID NO: 56098 - DNA, 120 bp, synthetic construct; identical to SEQ ID NO: 26144
  source 1..120: mol_type = other DNA

SEQ ID NO: 56099 - DNA, 120 bp, synthetic construct; identical to SEQ ID NO: 26145
  source 1..120: mol_type = other DNA

SEQ ID NO: 56100 - DNA, 120 bp, synthetic construct; identical to SEQ ID NO: 26146
  source 1..120: mol_type = other DNA

SEQ ID NO: 56101 - DNA, 120 bp, synthetic construct; identical to SEQ ID NO: 26147
  source 1..120: mol_type = other DNA

SEQ ID NO: 56102 - DNA, 120 bp, synthetic construct; identical to SEQ ID NO: 7984
  source 1..120: mol_type = other DNA

SEQ ID NO: 56103 - DNA, 120 bp, synthetic construct; identical to SEQ ID NO: 26149
  source 1..120: mol_type = other DNA

SEQ ID NO: 56104 - DNA, 120 bp, synthetic construct; identical to SEQ ID NO: 26150
  source 1..120: mol_type = other DNA

SEQ ID NO: 56105 - DNA, 120 bp, synthetic construct; identical to SEQ ID NO: 7985
  source 1..120: mol_type = other DNA

SEQ ID NO: 56106 - DNA, 120 bp, synthetic construct; identical to SEQ ID NO: 26152
  source 1..120: mol_type = other DNA

SEQ ID NO: 56107 - DNA, 120 bp, synthetic construct; identical to SEQ ID NO: 26153
  source 1..120: mol_type = other DNA

SEQ ID NO: 56108 - DNA, 120 bp, synthetic construct; identical to SEQ ID NO: 26154
  source 1..120: mol_type = other DNA

SEQ ID NO: 56109 - DNA, 120 bp, synthetic construct; identical to SEQ ID NO: 26155
  source 1..120: mol_type = other DNA

SEQ ID NO: 56110 - DNA, 120 bp, synthetic construct; identical to SEQ ID NO: 7986
  source 1..120: mol_type = other DNA

SEQ ID NO: 56111 - DNA, 120 bp, synthetic construct; identical to SEQ ID NO: 26157
  source 1..120: mol_type = other DNA

SEQ ID NO: 56112 - DNA, 120 bp, synthetic construct; identical to SEQ ID NO: 26158
  source 1..120: mol_type = other DNA

SEQ ID NO: 56113 - DNA, 120 bp, synthetic construct; identical to SEQ ID NO: 7987
  source 1..120: mol_type = other DNA

SEQ ID NO: 56114 - DNA, 120 bp, synthetic construct; identical to SEQ ID NO: 26160
  source 1..120: mol_type = other DNA

SEQ ID NO: 56115 - DNA, 120 bp, synthetic construct; identical to SEQ ID NO: 26161
  source 1..120: mol_type = other DNA

SEQ ID NO: 56116 - DNA, 120 bp, synthetic construct; identical to SEQ ID NO: 26162
  source 1..120: mol_type = other DNA

SEQ ID NO: 56117 - DNA, 120 bp, synthetic construct; identical to SEQ ID NO: 7988
  source 1..120: mol_type = other DNA

SEQ ID NO: 56118 - DNA, 120 bp, synthetic construct; identical to SEQ ID NO: 26164
  source 1..120: mol_type = other DNA

SEQ ID NO: 56119 - DNA, 120 bp, synthetic construct; identical to SEQ ID NO: 26165
  source 1..120: mol_type = other DNA

SEQ ID NO: 56120 - DNA, 120 bp, synthetic construct; identical to SEQ ID NO: 26166
  source 1..120: mol_type = other DNA

SEQ ID NO: 56121 - DNA, 120 bp, synthetic construct; identical to SEQ ID NO: 26167
  source 1..120: mol_type = other DNA

SEQ ID NO: 56122 - DNA, 120 bp, synthetic construct; identical to SEQ ID NO: 7989
  source 1..120: mol_type = other DNA

SEQ ID NO: 56123 - DNA, 120 bp, synthetic construct; identical to SEQ ID NO: 26169
  source 1..120: mol_type = other DNA

SEQ ID NO: 56124 - DNA, 120 bp, synthetic construct; identical to SEQ ID NO: 26170
  source 1..120: mol_type = other DNA

SEQ ID NO: 56125 - DNA, 120 bp, synthetic construct; identical to SEQ ID NO: 7990
  source 1..120: mol_type = other DNA

SEQ ID NO: 56126 - DNA, 120 bp, synthetic construct; identical to SEQ ID NO: 26172
  source 1..120: mol_type = other DNA

SEQ ID NO: 56127 - DNA, 120 bp, synthetic construct; identical to SEQ ID NO: 26173
  source 1..120: mol_type = other DNA

SEQ ID NO: 56128 - DNA, 120 bp, synthetic construct; identical to SEQ ID NO: 26174
  source 1..120: mol_type = other DNA

SEQ ID NO: 56129 - DNA, 120 bp, synthetic construct; identical to SEQ ID NO: 26175
  source 1..120: mol_type = other DNA

SEQ ID NO: 56130 - DNA, 120 bp, synthetic construct; identical to SEQ ID NO: 7991
  source 1..120: mol_type = other DNA

SEQ ID NO: 56131 - DNA, 120 bp, synthetic construct; identical to SEQ ID NO: 26177
  source 1..120: mol_type = other DNA

SEQ ID NO: 56132 - DNA, 120 bp, synthetic construct; identical to SEQ ID NO: 26178
  source 1..120: mol_type = other DNA

SEQ ID NO: 56133 - DNA, 120 bp, synthetic construct; identical to SEQ ID NO: 26179
  source 1..120: mol_type = other DNA

SEQ ID NO: 56134 - DNA, 120 bp, synthetic construct; identical to SEQ ID NO: 7992
  source 1..120: mol_type = other DNA

SEQ ID NO: 56135 - DNA, 120 bp, synthetic construct; identical to SEQ ID NO: 26181
  source 1..120: mol_type = other DNA

SEQ ID NO: 56136 - DNA, 120 bp, synthetic construct; identical to SEQ ID NO: 26182
  source 1..120: mol_type = other DNA

SEQ ID NO: 56137 - DNA, 120 bp, synthetic construct; identical to SEQ ID NO: 7993
  source 1..120: mol_type = other DNA

SEQ ID NO: 56138 - DNA, 120 bp, synthetic construct; identical to SEQ ID NO: 26184
  source 1..120: mol_type = other DNA

SEQ ID NO: 56139 - DNA, 120 bp, synthetic construct; identical to SEQ ID NO: 26185
  source 1..120: mol_type = other DNA

SEQ ID NO: 56140 - DNA, 120 bp, synthetic construct; identical to SEQ ID NO: 26186
  source 1..120: mol_type = other DNA

SEQ ID NO: 56141 - DNA, 120 bp, synthetic construct; identical to SEQ ID NO: 7994
  source 1..120: mol_type = other DNA

SEQ ID NO: 56142 - DNA, 120 bp, synthetic construct; identical to SEQ ID NO: 26188
  source 1..120: mol_type = other DNA

SEQ ID NO: 56143 - DNA, 120 bp, synthetic construct; identical to SEQ ID NO: 26189
  source 1..120: mol_type = other DNA

SEQ ID NO: 56144 - DNA, 120 bp, synthetic construct; identical to SEQ ID NO: 26190
  source 1..120: mol_type = other DNA

SEQ ID NO: 56145 - DNA, 120 bp, synthetic construct; identical to SEQ ID NO: 26191
  source 1..120: mol_type = other DNA

SEQ ID NO: 56146 - DNA, 120 bp, synthetic construct; identical to SEQ ID NO: 7995
  source 1..120: mol_type = other DNA

SEQ ID NO: 56147 - DNA, 120 bp, synthetic construct; identical to SEQ ID NO: 26193
  source 1..120: mol_type = other DNA

SEQ ID NO: 56148 - DNA, 120 bp, synthetic construct; identical to SEQ ID NO: 26194
  source 1..120: mol_type = other DNA

SEQ ID NO: 56149 - DNA, 120 bp, synthetic construct; identical to SEQ ID NO: 26195
  source 1..120: mol_type = other DNA

SEQ ID NO: 56150 - DNA, 120 bp, synthetic construct; identical to SEQ ID NO: 7996
  source 1..120: mol_type = other DNA

SEQ ID NO: 56151 - DNA, 120 bp, synthetic construct; identical to SEQ ID NO: 26197
  source 1..120: mol_type = other DNA

SEQ ID NO: 56152 - DNA, 120 bp, synthetic construct; identical to SEQ ID NO: 26198
  source 1..120: mol_type = other DNA

SEQ ID NO: 56153 - DNA, 120 bp, synthetic construct; identical to SEQ ID NO: 7997
  source 1..120: mol_type = other DNA

SEQ ID NO: 56154 - DNA, 120 bp, synthetic construct; identical to SEQ ID NO: 26200
  source 1..120: mol_type = other DNA

SEQ ID NO: 56155 - DNA, 120 bp, synthetic construct; identical to SEQ ID NO: 26201
  source 1..120: mol_type = other DNA

SEQ ID NO: 56156 - DNA, 120 bp, synthetic construct; identical to SEQ ID NO: 26202
  source 1..120: mol_type = other DNA

SEQ ID NO: 56157 - DNA, 120 bp, synthetic construct; identical to SEQ ID NO: 7998
  source 1..120: mol_type = other DNA

SEQ ID NO: 56158 - DNA, 120 bp, synthetic construct; identical to SEQ ID NO: 26204
  source 1..120: mol_type = other DNA

SEQ ID NO: 56159 - DNA, 120 bp, synthetic construct; identical to SEQ ID NO: 26205
  source 1..120: mol_type = other DNA

SEQ ID NO: 56160 - DNA, 120 bp, synthetic construct; identical to SEQ ID NO: 26206
  source 1..120: mol_type = other DNA

SEQ ID NO: 56161 - DNA, 120 bp, synthetic construct; identical to SEQ ID NO: 26207
  source 1..120: mol_type = other DNA

SEQ ID NO: 56162 - DNA, 120 bp, synthetic construct; identical to SEQ ID NO: 7999
  source 1..120: mol_type = other DNA

SEQ ID NO: 56163 - DNA, 120 bp, synthetic construct; identical to SEQ ID NO: 26209
  source 1..120: mol_type = other DNA

SEQ ID NO: 56164 - DNA, 120 bp, synthetic construct; identical to SEQ ID NO: 26210
  source 1..120: mol_type = other DNA

SEQ ID NO: 56165 - DNA, 120 bp, synthetic construct; identical to SEQ ID NO: 26211
  source 1..120: mol_type = other DNA

SEQ ID NO: 56166 - DNA, 120 bp, synthetic construct; identical to SEQ ID NO: 8000
  source 1..120: mol_type = other DNA

SEQ ID NO: 56167 - DNA, 120 bp, synthetic construct; identical to SEQ ID NO: 26213
  source 1..120: mol_type = other DNA

SEQ ID NO: 56168 - DNA, 120 bp, synthetic construct; identical to SEQ ID NO: 26214
  source 1..120: mol_type = other DNA

SEQ ID NO: 56169 - DNA, 120 bp, synthetic construct; identical to SEQ ID NO: 26215
  source 1..120: mol_type = other DNA

SEQ ID NO: 56170 - DNA, 120 bp, synthetic construct; identical to SEQ ID NO: 8001
  source 1..120: mol_type = other DNA

SEQ ID NO: 56171 - DNA, 120 bp, synthetic construct; identical to SEQ ID NO: 26217
  source 1..120: mol_type = other DNA

SEQ ID NO: 56172 - DNA, 120 bp, synthetic construct; identical to SEQ ID NO: 26218
  source 1..120: mol_type = other DNA

SEQ ID NO: 56173 - DNA, 120 bp, synthetic construct; identical to SEQ ID NO: 8002
  source 1..120: mol_type = other DNA

SEQ ID NO: 56174 - DNA, 120 bp, synthetic construct; identical to SEQ ID NO: 26220
  source 1..120: mol_type = other DNA

SEQ ID NO: 56175 - DNA, 120 bp, synthetic construct; identical to SEQ ID NO: 26221
  source 1..120: mol_type = other DNA

SEQ ID NO: 56176 - DNA, 120 bp, synthetic construct; identical to SEQ ID NO: 26222
  source 1..120: mol_type = other DNA

SEQ ID NO: 56177 - DNA, 120 bp, synthetic construct; identical to SEQ ID NO: 8003
  source 1..120: mol_type = other DNA

SEQ ID NO: 56178 - DNA, 120 bp, synthetic construct; identical to SEQ ID NO: 26224
  source 1..120: mol_type = other DNA

SEQ ID NO: 56179 - DNA, 120 bp, synthetic construct; identical to SEQ ID NO: 26225
  source 1..120: mol_type = other DNA

SEQ ID NO: 56180 - DNA, 120 bp, synthetic construct; identical to SEQ ID NO: 26226
  source 1..120: mol_type = other DNA

SEQ ID NO: 56181 - DNA, 120 bp, synthetic construct; identical to SEQ ID NO: 26227
  source 1..120: mol_type = other DNA

SEQ ID NO: 56182 - DNA, 120 bp, synthetic construct; identical to SEQ ID NO: 8004
  source 1..120: mol_type = other DNA

SEQ ID NO: 56183 - DNA, 120 bp, synthetic construct; identical to SEQ ID NO: 26229
  source 1..120: mol_type = other DNA

SEQ ID NO: 56184 - DNA, 120 bp, synthetic construct; identical to SEQ ID NO: 26230
  source 1..120: mol_type = other DNA

SEQ ID NO: 56185 - DNA, 120 bp, synthetic construct; identical to SEQ ID NO: 8005
  source 1..120: mol_type = other DNA

SEQ ID NO: 56186 - DNA, 120 bp, synthetic construct; identical to SEQ ID NO: 26232
  source 1..120: mol_type = other DNA

SEQ ID NO: 56187 - DNA, 120 bp, synthetic construct; identical to SEQ ID NO: 26233
  source 1..120: mol_type = other DNA

SEQ ID NO: 56188 - DNA, 120 bp, synthetic construct; identical to SEQ ID NO: 26234
  source 1..120: mol_type = other DNA

SEQ ID NO: 56189 - DNA, 120 bp, synthetic construct; identical to SEQ ID NO: 26235
  source 1..120: mol_type = other DNA

SEQ ID NO: 56190 - DNA, 120 bp, synthetic construct; identical to SEQ ID NO: 8006
  source 1..120: mol_type = other DNA

SEQ ID NO: 56191 - DNA, 120 bp, synthetic construct; identical to SEQ ID NO: 26237
  source 1..120: mol_type = other DNA

SEQ ID NO: 56192 - DNA, 120 bp, synthetic construct; identical to SEQ ID NO: 26238
  source 1..120: mol_type = other DNA

SEQ ID NO: 56193 - DNA, 120 bp, synthetic construct; identical to SEQ ID NO: 8007
  source 1..120: mol_type = other DNA

SEQ ID NO: 56194 - DNA, 120 bp, synthetic construct; identical to SEQ ID NO: 26240
  source 1..120: mol_type = other DNA

SEQ ID NO: 56195 - DNA, 120 bp, synthetic construct; identical to SEQ ID NO: 26241
  source 1..120: mol_type = other DNA

SEQ ID NO: 56196 - DNA, 120 bp, synthetic construct; identical to SEQ ID NO: 26242
  source 1..120: mol_type = other DNA

SEQ ID NO: 56197 - DNA, 120 bp, synthetic construct; identical to SEQ ID NO: 26243
  source 1..120: mol_type = other DNA

SEQ ID NO: 56198 - DNA, 120 bp, synthetic construct; identical to SEQ ID NO: 8008
  source 1..120: mol_type = other DNA

SEQ ID NO: 56199 - DNA, 120 bp, synthetic construct; identical to SEQ ID NO: 26245
  source 1..120: mol_type = other DNA

SEQ ID NO: 56200 - DNA, 120 bp, synthetic construct; identical to SEQ ID NO: 26246
  source 1..120: mol_type = other DNA

SEQ ID NO: 56201 - DNA, 120 bp, synthetic construct; identical to SEQ ID NO: 26247
  source 1..120: mol_type = other DNA

SEQ ID NO: 56202 - DNA, 120 bp, synthetic construct; identical to SEQ ID NO: 8009
  source 1..120: mol_type = other DNA

SEQ ID NO: 56203 - DNA, 120 bp, synthetic construct; identical to SEQ ID NO: 26249
  source 1..120: mol_type = other DNA

SEQ ID NO: 56204 - DNA, 120 bp, synthetic construct; identical to SEQ ID NO: 26250
  source 1..120: mol_type = other DNA

SEQ ID NO: 56205 - DNA, 120 bp, synthetic construct; identical to SEQ ID NO: 26251
  source 1..120: mol_type = other DNA

SEQ ID NO: 56206 - DNA, 120 bp, synthetic construct; identical to SEQ ID NO: 26252
  source 1..120: mol_type = other DNA

SEQ ID NO: 56207 - DNA, 120 bp, synthetic construct; identical to SEQ ID NO: 8010
  source 1..120: mol_type = other DNA

SEQ ID NO: 56208 - DNA, 120 bp, synthetic construct; identical to SEQ ID NO: 26254
  source 1..120: mol_type = other DNA

SEQ ID NO: 56209 - DNA, 120 bp, synthetic construct; identical to SEQ ID NO: 26255
  source 1..120: mol_type = other DNA

SEQ ID NO: 56210 - DNA, 120 bp, synthetic construct; identical to SEQ ID NO: 26256
  source 1..120: mol_type = other DNA

SEQ ID NO: 56211 - DNA, 120 bp, synthetic construct; identical to SEQ ID NO: 8011
  source 1..120: mol_type = other DNA

SEQ ID NO: 56212 - DNA, 120 bp, synthetic construct; identical to SEQ ID NO: 26258
  source 1..120: mol_type = other DNA

SEQ ID NO: 56213 - DNA, 120 bp, synthetic construct; identical to SEQ ID NO: 26259
  source 1..120: mol_type = other DNA

SEQ ID NO: 56214 - DNA, 120 bp, synthetic construct; identical to SEQ ID NO: 26260
  source 1..120: mol_type = other DNA

SEQ ID NO: 56215 - DNA, 120 bp, synthetic construct; identical to SEQ ID NO: 8012
  source 1..120: mol_type = other DNA

SEQ ID NO: 56216 - DNA, 120 bp, synthetic construct; identical to SEQ ID NO: 26262
  source 1..120: mol_type = other DNA

SEQ ID NO: 56217 - DNA, 120 bp, synthetic construct; identical to SEQ ID NO: 26263
  source 1..120: mol_type = other DNA

SEQ ID NO: 56218 - DNA, 120 bp, synthetic construct; identical to SEQ ID NO: 8013
  source 1..120: mol_type = other DNA

SEQ ID NO: 56219 - DNA, 120 bp, synthetic construct; identical to SEQ ID NO: 26265
  source 1..120: mol_type = other DNA

SEQ ID NO: 56220 - DNA, 120 bp, synthetic construct; identical to SEQ ID NO: 26266
  source 1..120: mol_type = other DNA

SEQ ID NO: 56221 - DNA, 120 bp, synthetic construct; identical to SEQ ID NO: 26267
  source 1..120: mol_type = other DNA

SEQ ID NO: 56222 - DNA, 120 bp, synthetic construct; identical to SEQ ID NO: 26268
  source 1..120: mol_type = other DNA

SEQ ID NO: 56223 - DNA, 120 bp, synthetic construct; identical to SEQ ID NO: 8014
  source 1..120: mol_type = other DNA

SEQ ID NO: 56224 - DNA, 120 bp, synthetic construct; identical to SEQ ID NO: 26270
  source 1..120: mol_type = other DNA

SEQ ID NO: 56225 - DNA, 120 bp, synthetic construct; identical to SEQ ID NO: 26271
  source 1..120: mol_type = other DNA

SEQ ID NO: 56226 - DNA, 120 bp, synthetic construct; identical to SEQ ID NO: 26272
  source 1..120: mol_type = other DNA

SEQ ID NO: 56227 - DNA, 120 bp, synthetic construct; identical to SEQ ID NO: 8015
  source 1..120: mol_type = other DNA

SEQ ID NO: 56228 - DNA, 120 bp, synthetic construct; identical to SEQ ID NO: 26274
  source 1..120: mol_type = other DNA

SEQ ID NO: 56229 - DNA, 120 bp, synthetic construct; identical to SEQ ID NO: 26275
  source 1..120: mol_type = other DNA

SEQ ID NO: 56230 - DNA, 120 bp, synthetic construct; identical to SEQ ID NO: 26276
  source 1..120: mol_type = other DNA

SEQ ID NO: 56231 - DNA, 120 bp, synthetic construct; identical to SEQ ID NO: 8016
  source 1..120: mol_type = other DNA

SEQ ID NO: 56232 - DNA, 120 bp, synthetic construct; identical to SEQ ID NO: 26278
  source 1..120: mol_type = other DNA

SEQ ID NO: 56233 - DNA, 120 bp, synthetic construct; identical to SEQ ID NO: 26279
  source 1..120: mol_type = other DNA

SEQ ID NO: 56234 - DNA, 120 bp, synthetic construct; identical to SEQ ID NO: 26280
  source 1..120: mol_type = other DNA

SEQ ID NO: 56235 - DNA, 120 bp, synthetic construct; identical to SEQ ID NO: 8017
  source 1..120: mol_type = other DNA

SEQ ID NO: 56236 - DNA, 120 bp, synthetic construct; identical to SEQ ID NO: 26282
  source 1..120: mol_type = other DNA

SEQ ID NO: 56237 - DNA, 120 bp, synthetic construct; identical to SEQ ID NO: 26283
  source 1..120: mol_type = other DNA

SEQ ID NO: 56238 - DNA, 120 bp, synthetic construct; identical to SEQ ID NO: 26284
  source 1..120: mol_type = other DNA

SEQ ID NO: 56239 - DNA, 120 bp, synthetic construct; identical to SEQ ID NO: 8018
  source 1..120: mol_type = other DNA

SEQ ID NO: 56240 - DNA, 120 bp, synthetic construct; identical to SEQ ID NO: 26286
  source 1..120: mol_type = other DNA

SEQ ID NO: 56241 - DNA, 120 bp, synthetic construct; identical to SEQ ID NO: 26287
  source 1..120: mol_type = other DNA

SEQ ID NO: 56242 - DNA, 120 bp, synthetic construct; identical to SEQ ID NO: 26288
  source 1..120: mol_type = other DNA

SEQ ID NO: 56243 - DNA, 120 bp, synthetic construct; identical to SEQ ID NO: 8019
  source 1..120: mol_type = other DNA

SEQ ID NO: 56244 - DNA, 120 bp, synthetic construct; identical to SEQ ID NO: 26290
  source 1..120: mol_type = other DNA

SEQ ID NO: 56245 - DNA, 120 bp, synthetic construct; identical to SEQ ID NO: 957
  source 1..120: mol_type = other DNA

SEQ ID NO: 56246 - DNA, 120 bp, synthetic construct; identical to SEQ ID NO: 26292
  source 1..120: mol_type = other DNA

SEQ ID NO: 56247 - DNA, 120 bp, synthetic construct; identical to SEQ ID NO: 26293
  source 1..120: mol_type = other DNA

SEQ ID NO: 56248 - DNA, 120 bp, synthetic construct; identical to SEQ ID NO: 8020
  source 1..120: mol_type = other DNA

SEQ ID NO: 56249 - DNA, 120 bp, synthetic construct; identical to SEQ ID NO: 26295
  source 1..120: mol_type = other DNA

SEQ ID NO: 56250 - DNA, 120 bp, synthetic construct; identical to SEQ ID NO: 26296
  source 1..120: mol_type = other DNA

SEQ ID NO: 56251 - DNA, 120 bp, synthetic construct; identical to SEQ ID NO: 26297
  source 1..120: mol_type = other DNA

SEQ ID NO: 56252 - DNA, 120 bp, synthetic construct; identical to SEQ ID NO: 8021
  source 1..120: mol_type = other DNA

SEQ ID NO: 56253 - DNA, 120 bp, synthetic construct; identical to SEQ ID NO: 26299
  source 1..120: mol_type = other DNA

SEQ ID NO: 56254 - DNA, 120 bp, synthetic construct; identical to SEQ ID NO: 26300
  source 1..120: mol_type = other DNA

SEQ ID NO: 56255 - DNA, 120 bp, synthetic construct; identical to SEQ ID NO: 26301
  source 1..120: mol_type = other DNA

SEQ ID NO: 56256 - DNA, 120 bp, synthetic construct; identical to SEQ ID NO: 8022
  source 1..120: mol_type = other DNA

SEQ ID NO: 56257 - DNA, 120 bp, synthetic construct; identical to SEQ ID NO: 26303
  source 1..120: mol_type = other DNA

SEQ ID NO: 56258 - DNA, 120 bp, synthetic construct; identical to SEQ ID NO: 26304
  source 1..120: mol_type = other DNA

SEQ ID NO: 56259 - DNA, 120 bp, synthetic construct; identical to SEQ ID NO: 26305
  source 1..120: mol_type = other DNA

SEQ ID NO: 56260 - DNA, 120 bp, synthetic construct; identical to SEQ ID NO: 8023
  source 1..120: mol_type = other DNA

SEQ ID NO: 56261 - DNA, 120 bp, synthetic construct; identical to SEQ ID NO: 26307
  source 1..120: mol_type = other DNA

SEQ ID NO: 56262 - DNA, 120 bp, synthetic construct; identical to SEQ ID NO: 26308
  source 1..120: mol_type = other DNA

SEQ ID NO: 56263 - DNA, 120 bp, synthetic construct; identical to SEQ ID NO: 26309
  source 1..120: mol_type = other DNA

SEQ ID NO: 56264 - DNA, 120 bp, synthetic construct; identical to SEQ ID NO: 8024
  source 1..120: mol_type = other DNA

SEQ ID NO: 56265 - DNA, 120 bp, synthetic construct; identical to SEQ ID NO: 26311
  source 1..120: mol_type = other DNA

SEQ ID NO: 56266 - DNA, 120 bp, synthetic construct; identical to SEQ ID NO: 26312
  source 1..120: mol_type = other DNA

SEQ ID NO: 56267 - DNA, 120 bp, synthetic construct; identical to SEQ ID NO: 26313
  source 1..120: mol_type = other DNA

SEQ ID NO: 56268 - DNA, 120 bp, synthetic construct; identical to SEQ ID NO: 8025
  source 1..120: mol_type = other DNA

SEQ ID NO: 56269 - DNA, 120 bp, synthetic construct; identical to SEQ ID NO: 26315
  source 1..120: mol_type = other DNA

SEQ ID NO: 56270 - DNA, 120 bp, synthetic construct; identical to SEQ ID NO: 26316
  source 1..120: mol_type = other DNA

SEQ ID NO: 56271 - DNA, 120 bp, synthetic construct; identical to SEQ ID NO: 8026
  source 1..120: mol_type = other DNA

SEQ ID NO: 56272 - DNA, 120 bp, synthetic construct; identical to SEQ ID NO: 26318
  source 1..120: mol_type = other DNA

SEQ ID NO: 56273 - DNA, 120 bp, synthetic construct; identical to SEQ ID NO: 26319
  source 1..120: mol_type = other DNA

SEQ ID NO: 56274 - DNA, 120 bp, synthetic construct; identical to SEQ ID NO: 26320
  source 1..120: mol_type = other DNA

SEQ ID NO: 56275 - DNA, 120 bp, synthetic construct; identical to SEQ ID NO: 8027
  source 1..120: mol_type = other DNA

SEQ ID NO: 56276 - DNA, 120 bp, synthetic construct; identical to SEQ ID NO: 26322
  source 1..120: mol_type = other DNA

SEQ ID NO: 56277 - DNA, 120 bp, synthetic construct; identical to SEQ ID NO: 26323
  source 1..120: mol_type = other DNA

SEQ ID NO: 56278 - DNA, 120 bp, synthetic construct; identical to SEQ ID NO: 26324
  source 1..120: mol_type = other DNA

SEQ ID NO: 56279 - DNA, 120 bp, synthetic construct; identical to SEQ ID NO: 8028
  source 1..120: mol_type = other DNA

SEQ ID NO: 56280 - DNA, 120 bp, synthetic construct; identical to SEQ ID NO: 26326
  source 1..120: mol_type = other DNA

SEQ ID NO: 56281 - DNA, 120 bp, synthetic construct; identical to SEQ ID NO: 26327
  source 1..120: mol_type = other DNA

SEQ ID NO: 56282 - DNA, 120 bp, synthetic construct; identical to SEQ ID NO: 26328
  source 1..120: mol_type = other DNA

SEQ ID NO: 56283 - DNA, 120 bp, synthetic construct; identical to SEQ ID NO: 26329
  source 1..120: mol_type = other DNA

SEQ ID NO: 56284 - DNA, 120 bp, synthetic construct; identical to SEQ ID NO: 8029
  source 1..120: mol_type = other DNA

SEQ ID NO: 56285 - DNA, 120 bp, synthetic construct; identical to SEQ ID NO: 26331
  source 1..120: mol_type = other DNA

SEQ ID NO: 56286 - DNA, 120 bp, synthetic construct; identical to SEQ ID NO: 26332
  source 1..120: mol_type = other DNA

SEQ ID NO: 56287 - DNA, 120 bp, synthetic construct; identical to SEQ ID NO: 8030
  source 1..120: mol_type = other DNA

SEQ ID NO: 56288 - DNA, 120 bp, synthetic construct; identical to SEQ ID NO: 26334
  source 1..120: mol_type = other DNA

SEQ ID NO: 56289 - DNA, 120 bp, synthetic construct; identical to SEQ ID NO: 26335
  source 1..120: mol_type = other DNA

SEQ ID NO: 56290 - DNA, 120 bp, synthetic construct; identical to SEQ ID NO: 26336
  source 1..120: mol_type = other DNA

SEQ ID NO: 56291 - DNA, 120 bp, synthetic construct; identical to SEQ ID NO: 8031
  source 1..120: mol_type = other DNA

SEQ ID NO: 56292 - DNA, 120 bp, synthetic construct; identical to SEQ ID NO: 26338
  source 1..120: mol_type = other DNA

SEQ ID NO: 56293 - DNA, 120 bp, synthetic construct; identical to SEQ ID NO: 26339
  source 1..120: mol_type = other DNA

SEQ ID NO: 56294 - DNA, 120 bp, synthetic construct; identical to SEQ ID NO: 26340
  source 1..120: mol_type = other DNA

SEQ ID NO: 56295 - DNA, 120 bp, synthetic construct; identical to SEQ ID NO: 26341
  source 1..120: mol_type = other DNA

SEQ ID NO: 56296 - DNA, 120 bp, synthetic construct; identical to SEQ ID NO: 8032
  source 1..120: mol_type = other DNA

SEQ ID NO: 56297 - DNA, 120 bp, synthetic construct; identical to SEQ ID NO: 26343
  source 1..120: mol_type = other DNA

SEQ ID NO: 56298 - DNA, 120 bp, synthetic construct; identical to SEQ ID NO: 26344
  source 1..120: mol_type = other DNA

SEQ ID NO: 56299 - DNA, 120 bp, synthetic construct; identical to SEQ ID NO: 26345
  source 1..120: mol_type = other DNA

SEQ ID NO: 56300 - DNA, 120 bp, synthetic construct; identical to SEQ ID NO: 8033
  source 1..120: mol_type = other DNA

SEQ ID NO: 56301 - DNA, 120 bp, synthetic construct; identical to SEQ ID NO: 26347
  source 1..120: mol_type = other DNA

SEQ ID NO: 56302 - DNA, 120 bp, synthetic construct; identical to SEQ ID NO: 26348
  source 1..120: mol_type = other DNA

SEQ ID NO: 56303 - DNA, 120 bp, synthetic construct; identical to SEQ ID NO: 26349
  source 1..120: mol_type = other DNA

SEQ ID NO: 56304 - DNA, 120 bp, synthetic construct; identical to SEQ ID NO: 8034
  source 1..120: mol_type = other DNA

SEQ ID NO: 56305 - DNA, 120 bp, synthetic construct; identical to SEQ ID NO: 26351
  source 1..120: mol_type = other DNA

SEQ ID NO: 56306 - DNA, 120 bp, synthetic construct; identical to SEQ ID NO: 26352
  source 1..120: mol_type = other DNA

SEQ ID NO: 56307 - DNA, 120 bp, synthetic construct; identical to SEQ ID NO: 26353
  source 1..120: mol_type = other DNA

SEQ ID NO: 56308 - DNA, 120 bp, synthetic construct; identical to SEQ ID NO: 8035
  source 1..120: mol_type = other DNA

SEQ ID NO: 56309 - DNA, 120 bp, synthetic construct; identical to SEQ ID NO: 26355
  source 1..120: mol_type = other DNA

SEQ ID NO: 56310 - DNA, 120 bp, synthetic construct; identical to SEQ ID NO: 26356
  source 1..120: mol_type = other DNA

SEQ ID NO: 56311 - DNA, 120 bp, synthetic construct; identical to SEQ ID NO: 8036
  source 1..120: mol_type = other DNA

SEQ ID NO: 56312 - DNA, 120 bp, synthetic construct; identical to SEQ ID NO: 26358
  source 1..120: mol_type = other DNA

SEQ ID NO: 56313 - DNA, 120 bp, synthetic construct; identical to SEQ ID NO: 26359
  source 1..120: mol_type = other DNA

SEQ ID NO: 56314 - DNA, 120 bp, synthetic construct; identical to SEQ ID NO: 26360
  source 1..120: mol_type = other DNA

SEQ ID NO: 56315 - DNA, 120 bp, synthetic construct; identical to SEQ ID NO: 8037
  source 1..120: mol_type = other DNA

SEQ ID NO: 56316 - DNA, 120 bp, synthetic construct; identical to SEQ ID NO: 26362
  source 1..120: mol_type = other DNA

SEQ ID NO: 56317 - DNA, 120 bp, synthetic construct; identical to SEQ ID NO: 26363
  source 1..120: mol_type = other DNA

SEQ ID NO: 56318 - DNA, 120 bp, synthetic construct; identical to SEQ ID NO: 26364
  source 1..120: mol_type = other DNA

SEQ ID NO: 56319 - DNA, 120 bp, synthetic construct; identical to SEQ ID NO: 8038
  source 1..120: mol_type = other DNA

SEQ ID NO: 56320 - DNA, 120 bp, synthetic construct; identical to SEQ ID NO: 26366
  source 1..120: mol_type = other DNA

SEQ ID NO: 56321 - DNA, 120 bp, synthetic construct; identical to SEQ ID NO: 26367
  source 1..120: mol_type = other DNA

SEQ ID NO: 56322 - DNA, 120 bp, synthetic construct; identical to SEQ ID NO: 26368
  source 1..120: mol_type = other DNA

SEQ ID NO: 56323 - DNA, 120 bp, synthetic construct; identical to SEQ ID NO: 26369
  source 1..120: mol_type = other DNA

SEQ ID NO: 56324 - DNA, 120 bp, synthetic construct; identical to SEQ ID NO: 8039
  source 1..120: mol_type = other DNA

SEQ ID NO: 56325 - DNA, 120 bp, synthetic construct; identical to SEQ ID NO: 26371
  source 1..120: mol_type = other DNA

SEQ ID NO: 56326 - DNA, 120 bp, synthetic construct; identical to SEQ ID NO: 26372
  source 1..120: mol_type = other DNA

SEQ ID NO: 56327 - DNA, 120 bp, synthetic construct; identical to SEQ ID NO: 8040
  source 1..120: mol_type = other DNA

SEQ ID NO: 56328 - DNA, 120 bp, synthetic construct; identical to SEQ ID NO: 26374
  source 1..120: mol_type = other DNA

SEQ ID NO: 56329 - DNA, 120 bp, synthetic construct; identical to SEQ ID NO: 26375
  source 1..120: mol_type = other DNA

SEQ ID NO: 56330 - DNA, 120 bp, synthetic construct; identical to SEQ ID NO: 26376
  source 1..120: mol_type = other DNA

SEQ ID NO: 56331 - DNA, 120 bp, synthetic construct; identical to SEQ ID NO: 26377
  source 1..120: mol_type = other DNA

SEQ ID NO: 56332 - DNA, 120 bp, synthetic construct; identical to SEQ ID NO: 8041
  source 1..120: mol_type = other DNA

SEQ ID NO: 56333 - DNA, 120 bp, synthetic construct; identical to SEQ ID NO: 26379
  source 1..120: mol_type = other DNA

SEQ ID NO: 56334 - DNA, 120 bp, synthetic construct; identical to SEQ ID NO: 26380
  source 1..120: mol_type = other DNA

SEQ ID NO: 56335 - DNA, 120 bp, synthetic construct; identical to SEQ ID NO: 8042
  source 1..120: mol_type = other DNA

SEQ ID NO: 56336 - DNA, 120 bp, synthetic construct; identical to SEQ ID NO: 26382
  source 1..120: mol_type = other DNA

SEQ ID NO: 56337 - DNA, 120 bp, synthetic construct; identical to SEQ ID NO: 26383
  source 1..120: mol_type = other DNA

SEQ ID NO: 56338 - DNA, 120 bp, synthetic construct; identical to SEQ ID NO: 26384
  source 1..120: mol_type = other DNA

SEQ ID NO: 56339 - DNA, 120 bp, synthetic construct; identical to SEQ ID NO: 26385
  source 1..120: mol_type = other DNA

SEQ ID NO: 56340 - DNA, 120 bp, synthetic construct; identical to SEQ ID NO: 979
  source 1..120: mol_type = other DNA

SEQ ID NO: 56341 - DNA, 120 bp, synthetic construct; identical to SEQ ID NO: 26387
  source 1..120: mol_type = other DNA

SEQ ID NO: 56342 - DNA, 120 bp, synthetic construct; identical to SEQ ID NO: 26388
  source 1..120: mol_type = other DNA

SEQ ID NO: 56343 - DNA, 120 bp, synthetic construct; identical to SEQ ID NO: 1025
  source 1..120: mol_type = other DNA

SEQ ID NO: 56344 - DNA, 120 bp, synthetic construct; identical to SEQ ID NO: 26390
  source 1..120: mol_type = other DNA

SEQ ID NO: 56345 - DNA, 120 bp, synthetic construct; identical to SEQ ID NO: 26391
  source 1..120: mol_type = other DNA

SEQ ID NO: 56346 - DNA, 120 bp, synthetic construct; identical to SEQ ID NO: 8045
  source 1..120: mol_type = other DNA

SEQ ID NO: 56347 - DNA, 120 bp, synthetic construct; identical to SEQ ID NO: 26393
  source 1..120: mol_type = other DNA

SEQ ID NO: 56348 - DNA, 120 bp, synthetic construct; identical to SEQ ID NO: 26394
  source 1..120: mol_type = other DNA

SEQ ID NO: 56349 - DNA, 120 bp, synthetic construct; identical to SEQ ID NO: 8046
  source 1..120: mol_type = other DNA

SEQ ID NO: 56350 - DNA, 120 bp, synthetic construct; identical to SEQ ID NO: 26396
  source 1..120: mol_type = other DNA

SEQ ID NO: 56351 - DNA, 120 bp, synthetic construct; identical to SEQ ID NO: 26397
  source 1..120: mol_type = other DNA

SEQ ID NO: 56352 - DNA, 120 bp, synthetic construct; identical to SEQ ID NO: 8047
  source 1..120: mol_type = other DNA

SEQ ID NO: 56353 - DNA, 120 bp, synthetic construct; identical to SEQ ID NO: 26399
  source 1..120: mol_type = other DNA

SEQ ID NO: 56354 - DNA, 120 bp, synthetic construct; identical to SEQ ID NO: 26400
  source 1..120: mol_type = other DNA

SEQ ID NO: 56355 - DNA, 120 bp, synthetic construct; identical to SEQ ID NO: 26401
  source 1..120: mol_type = other DNA

SEQ ID NO: 56356 - DNA, 120 bp, synthetic construct; identical to SEQ ID NO: 8048
  source 1..120: mol_type = other DNA

SEQ ID NO: 56357 - DNA, 120 bp, synthetic construct; identical to SEQ ID NO: 26403
  source 1..120: mol_type = other DNA

SEQ ID NO: 56358 - DNA, 120 bp, synthetic construct; identical to SEQ ID NO: 26404
  source 1..120: mol_type = other DNA

SEQ ID NO: 56359 - DNA, 120 bp, synthetic construct; identical to SEQ ID NO: 26405
  source 1..120: mol_type = other DNA

SEQ ID NO: 56360 - DNA, 120 bp, synthetic construct; identical to SEQ ID NO: 8049
  source 1..120: mol_type = other DNA

SEQ ID NO: 56361 - DNA, 120 bp, synthetic construct; identical to SEQ ID NO: 26407
  source 1..120: mol_type = other DNA

SEQ ID NO: 56362 - DNA, 120 bp, synthetic construct; identical to SEQ ID NO: 26408
  source 1..120: mol_type = other DNA

SEQ ID NO: 56363 - DNA, 120 bp, synthetic construct; identical to SEQ ID NO: 26409
  source 1..120: mol_type = other DNA

SEQ ID NO: 56364 - DNA, 120 bp, synthetic construct; identical to SEQ ID NO: 8050
  source 1..120: mol_type = other DNA

SEQ ID NO: 56365 - DNA, 120 bp, synthetic construct; identical to SEQ ID NO: 26411
  source 1..120: mol_type = other DNA

SEQ ID NO: 56366 - DNA, 120 bp, synthetic construct; identical to SEQ ID NO: 26412
  source 1..120: mol_type = other DNA

SEQ ID NO: 56367 - DNA, 120 bp, synthetic construct; identical to SEQ ID NO: 26413
  source 1..120: mol_type = other DNA

SEQ ID NO: 56368 - DNA, 120 bp, synthetic construct; identical to SEQ ID NO: 8051
  source 1..120: mol_type = other DNA

SEQ ID NO: 56369 - DNA, 120 bp, synthetic construct; identical to SEQ ID NO: 26415
  source 1..120: mol_type = other DNA

SEQ ID NO: 56370 - DNA, 120 bp, synthetic construct; identical to SEQ ID NO: 26416
  source 1..120: mol_type = other DNA

SEQ ID NO: 56371 - DNA, 120 bp, synthetic construct; identical to SEQ ID NO: 26417
  source 1..120: mol_type = other DNA

SEQ ID NO: 56372 - DNA, 120 bp, synthetic construct; identical to SEQ ID NO: 26418
  source 1..120: mol_type = other DNA

SEQ ID NO: 56373 - DNA, 120 bp, synthetic construct; identical to SEQ ID NO: 8052
  source 1..120: mol_type = other DNA

SEQ ID NO: 56374 - DNA, 120 bp, synthetic construct; identical to SEQ ID NO: 26420
  source 1..120: mol_type = other DNA

SEQ ID NO: 56375 - DNA, 120 bp, synthetic construct; identical to SEQ ID NO: 26421
  source 1..120: mol_type = other DNA

SEQ ID NO: 56376 - DNA, 120 bp, synthetic construct; identical to SEQ ID NO: 26422
  source 1..120: mol_type = other DNA

SEQ ID NO: 56377 - DNA, 120 bp, synthetic construct; identical to SEQ ID NO: 8053
  source 1..120: mol_type = other DNA

SEQ ID NO: 56378 - DNA, 120 bp, synthetic construct; identical to SEQ ID NO: 26424
  source 1..120: mol_type = other DNA

SEQ ID NO: 56379 - DNA, 120 bp, synthetic construct; identical to SEQ ID NO: 26425
  source 1..120: mol_type = other DNA

SEQ ID NO: 56380 - DNA, 120 bp, synthetic construct; identical to SEQ ID NO: 26426
  source 1..120: mol_type = other DNA

SEQ ID NO: 56381 - DNA, 120 bp, synthetic construct; identical to SEQ ID NO: 26427
  source 1..120: mol_type = other DNA

SEQ ID NO: 56382 - DNA, 120 bp, synthetic construct; identical to SEQ ID NO: 8054
  source 1..120: mol_type = other DNA

SEQ ID NO: 56383 - DNA, 120 bp, synthetic construct; identical to SEQ ID NO: 26429
  source 1..120: mol_type = other DNA

SEQ ID NO: 56384 - DNA, 120 bp, synthetic construct; identical to SEQ ID NO: 26430
  source 1..120: mol_type = other DNA

SEQ ID NO: 56385 - DNA, 120 bp, synthetic construct; identical to SEQ ID NO: 8055
  source 1..120: mol_type = other DNA

SEQ ID NO: 56386 - DNA, 120 bp, synthetic construct; identical to SEQ ID NO: 26432
  source 1..120: mol_type = other DNA

SEQ ID NO: 56387 - DNA, 120 bp, synthetic construct; identical to SEQ ID NO: 26433
  source 1..120: mol_type = other DNA

SEQ ID NO: 56388 - DNA, 120 bp, synthetic construct; identical to SEQ ID NO: 8056
  source 1..120: mol_type = other DNA

SEQ ID NO: 56389 - DNA, 120 bp, synthetic construct; identical to SEQ ID NO: 26435
  source 1..120: mol_type = other DNA

SEQ ID NO: 56390 - DNA, 120 bp, synthetic construct; identical to SEQ ID NO: 26436
  source 1..120: mol_type = other DNA

SEQ ID NO: 56391 - DNA, 120 bp, synthetic construct; identical to SEQ ID NO: 8057
  source 1..120: mol_type = other DNA

SEQ ID NO: 56392 - DNA, 120 bp, synthetic construct; identical to SEQ ID NO: 26438
  source 1..120: mol_type = other DNA

SEQ ID NO: 56393 - DNA, 120 bp, synthetic construct; identical to SEQ ID NO: 26439
  source 1..120: mol_type = other DNA

SEQ ID NO: 56394 - DNA, 120 bp, synthetic construct; identical to SEQ ID NO: 8058
  source 1..120: mol_type = other DNA

SEQ ID NO: 56395 - DNA, 120 bp, synthetic construct; identical to SEQ ID NO: 26441
  source 1..120: mol_type = other DNA

SEQ ID NO: 56396 - DNA, 120 bp, synthetic construct; identical to SEQ ID NO: 26442
  source 1..120: mol_type = other DNA

SEQ ID NO: 56397 - DNA, 120 bp, synthetic construct; identical to SEQ ID NO: 26443
  source 1..120: mol_type = other DNA

SEQ ID NO: 56398 - DNA, 120 bp, synthetic construct; identical to SEQ ID NO: 8059
  source 1..120: mol_type = other DNA

SEQ ID NO: 56399 - DNA, 120 bp, synthetic construct; identical to SEQ ID NO: 26445
  source 1..120: mol_type = other DNA

SEQ ID NO: 56400 - DNA, 120 bp, synthetic construct; identical to SEQ ID NO: 26446
  source 1..120: mol_type = other DNA

SEQ ID NO: 56401 - DNA, 120 bp, synthetic construct; identical to SEQ ID NO: 26447
  source 1..120: mol_type = other DNA

SEQ ID NO: 56402 - DNA, 120 bp, synthetic construct; identical to SEQ ID NO: 8060
  source 1..120: mol_type = other DNA

SEQ ID NO: 56403 - DNA, 120 bp, synthetic construct; identical to SEQ ID NO: 26449
  source 1..120: mol_type = other DNA

SEQ ID NO: 56404 - DNA, 120 bp, synthetic construct; identical to SEQ ID NO: 26450
  source 1..120: mol_type = other DNA

SEQ ID NO: 56405 - DNA, 120 bp, synthetic construct; identical to SEQ ID NO: 26451
  source 1..120: mol_type = other DNA

SEQ ID NO: 56406 - DNA, 120 bp, synthetic construct; identical to SEQ ID NO: 26452
  source 1..120: mol_type = other DNA

SEQ ID NO: 56407 - DNA, 120 bp, synthetic construct; identical to SEQ ID NO: 8061
  source 1..120: mol_type = other DNA

SEQ ID NO: 56408 - DNA, 120 bp, synthetic construct; identical to SEQ ID NO: 26454
  source 1..120: mol_type = other DNA

SEQ ID NO: 56409 - DNA, 120 bp, synthetic construct; identical to SEQ ID NO: 26455
  source 1..120: mol_type = other DNA

SEQ ID NO: 56410 - DNA, 120 bp, synthetic construct; identical to SEQ ID NO: 26456
  source 1..120: mol_type = other DNA

SEQ ID NO: 56411 - DNA, 120 bp, synthetic construct; identical to SEQ ID NO: 8062
  source 1..120: mol_type = other DNA

SEQ ID NO: 56412 - DNA, 120 bp, synthetic construct; identical to SEQ ID NO: 26458
  source 1..120: mol_type = other DNA

SEQ ID NO: 56413 - DNA, 120 bp, synthetic construct; identical to SEQ ID NO: 26459
  source 1..120: mol_type = other DNA

SEQ ID NO: 56414 - DNA, 120 bp, synthetic construct; identical to SEQ ID NO: 26460
  source 1..120: mol_type = other DNA

SEQ ID NO: 56415 - DNA, 120 bp, synthetic construct; identical to SEQ ID NO: 26461
  source 1..120: mol_type = other DNA

SEQ ID NO: 56416 - DNA, 120 bp, synthetic construct; identical to SEQ ID NO: 8063
  source 1..120: mol_type = other DNA

SEQ ID NO: 56417 - DNA, 120 bp, synthetic construct; identical to SEQ ID NO: 26463
  source 1..120: mol_type = other DNA

SEQ ID NO: 56418 - DNA, 120 bp, synthetic construct; identical to SEQ ID NO: 26464
  source 1..120: mol_type = other DNA

SEQ ID NO: 56419 - DNA, 120 bp, synthetic construct; identical to SEQ ID NO: 8064
  source 1..120: mol_type = other DNA

SEQ ID NO: 56420 - DNA, 120 bp, synthetic construct; identical to SEQ ID NO: 26466
  source 1..120: mol_type = other DNA

SEQ ID NO: 56421 - DNA, 120 bp, synthetic construct; identical to SEQ ID NO: 26467
  source 1..120: mol_type = other DNA

SEQ ID NO: 56422 - DNA, 120 bp, synthetic construct; identical to SEQ ID NO: 26468
  source 1..120: mol_type = other DNA

SEQ ID NO: 56423 - DNA, 120 bp, synthetic construct; identical to SEQ ID NO: 8065
  source 1..120: mol_type = other DNA

SEQ ID NO: 56424 - DNA, 120 bp, synthetic construct; identical to SEQ ID NO: 26470
  source 1..120: mol_type = other DNA

SEQ ID NO: 56425 - DNA, 120 bp, synthetic construct; identical to SEQ ID NO: 26471
  source 1..120: mol_type = other DNA

SEQ ID NO: 56426 - DNA, 120 bp, synthetic construct; identical to SEQ ID NO: 26472
  source 1..120: mol_type = other DNA

SEQ ID NO: 56427 - DNA, 120 bp, synthetic construct; identical to SEQ ID NO: 8066
  source 1..120: mol_type = other DNA

SEQ ID NO: 56428 - DNA, 120 bp, synthetic construct; identical to SEQ ID NO: 26474
  source 1..120: mol_type = other DNA

SEQ ID NO: 56429 - DNA, 120 bp, synthetic construct; identical to SEQ ID NO: 26475
  source 1..120: mol_type = other DNA

SEQ ID NO: 56430 - DNA, 120 bp, synthetic construct; identical to SEQ ID NO: 26476
  source 1..120: mol_type = other DNA

SEQ ID NO: 56431 - DNA, 120 bp, synthetic construct; identical to SEQ ID NO: 8067
  source 1..120: mol_type = other DNA

SEQ ID NO: 56432 - DNA, 120 bp, synthetic construct; identical to SEQ ID NO: 26478
  source 1..120: mol_type = other DNA

SEQ ID NO: 56433 - DNA, 120 bp, synthetic construct; identical to SEQ ID NO: 26479
  source 1..120: mol_type = other DNA

SEQ ID NO: 56434 - DNA, 120 bp, synthetic construct; identical to SEQ ID NO: 26480
  source 1..120: mol_type = other DNA

SEQ ID NO: 56435 - DNA, 120 bp, synthetic construct; identical to SEQ ID NO: 26481
  source 1..120: mol_type = other DNA

SEQ ID NO: 56436 - DNA, 120 bp, synthetic construct; identical to SEQ ID NO: 8068
  source 1..120: mol_type = other DNA

SEQ ID NO: 56437 - DNA, 120 bp, synthetic construct; identical to SEQ ID NO: 26483
  source 1..120: mol_type = other DNA

SEQ ID NO: 56438 - DNA, 120 bp, synthetic construct; identical to SEQ ID NO: 26484
  source 1..120: mol_type = other DNA

SEQ ID NO: 56439 - DNA, 120 bp, synthetic construct; identical to SEQ ID NO: 26485
  source 1..120: mol_type = other DNA

SEQ ID NO: 56440 - DNA, 120 bp, synthetic construct; identical to SEQ ID NO: 8069
  source 1..120: mol_type = other DNA

SEQ ID NO: 56441 - DNA, 120 bp, synthetic construct; identical to SEQ ID NO: 26487
  source 1..120: mol_type = other DNA

SEQ ID NO: 56442 - DNA, 120 bp, synthetic construct; identical to SEQ ID NO: 26488
  source 1..120: mol_type = other DNA

SEQ ID NO: 56443 - DNA, 120 bp, synthetic construct; identical to SEQ ID NO: 26489
  source 1..120: mol_type = other DNA

SEQ ID NO: 56444 - DNA, 120 bp, synthetic construct; identical to SEQ ID NO: 8070
  source 1..120: mol_type = other DNA

SEQ ID NO: 56445 - DNA, 120 bp, synthetic construct; identical to SEQ ID NO: 26491
  source 1..120: mol_type = other DNA

SEQ ID NO: 56446 - DNA, 120 bp, synthetic construct; identical to SEQ ID NO: 26492
  source 1..120: mol_type = other DNA

SEQ ID NO: 56447 - DNA, 120 bp, synthetic construct; identical to SEQ ID NO: 8071
  source 1..120: mol_type = other DNA

SEQ ID NO: 56448 - DNA, 120 bp, synthetic construct; identical to SEQ ID NO: 26494
  source 1..120: mol_type = other DNA

SEQ ID NO: 56449 - DNA, 120 bp, synthetic construct; identical to SEQ ID NO: 26495
  source 1..120: mol_type = other DNA

SEQ ID NO: 56450 - DNA, 120 bp, synthetic construct; identical to SEQ ID NO: 26496
  source 1..120: mol_type = other DNA

SEQ ID NO: 56451 - DNA, 120 bp, synthetic construct; identical to SEQ ID NO: 8072
  source 1..120: mol_type = other DNA

SEQ ID NO: 56452 - DNA, 120 bp, synthetic construct; identical to SEQ ID NO: 26498
  source 1..120: mol_type = other DNA

SEQ ID NO: 56453 - DNA, 120 bp, synthetic construct; identical to SEQ ID NO: 26499
  source 1..120: mol_type = other DNA

SEQ ID NO: 56454 - DNA, 120 bp, synthetic construct; identical to SEQ ID NO: 26500
  source 1..120: mol_type = other DNA

SEQ ID NO: 56455 - DNA, 120 bp, synthetic construct; identical to SEQ ID NO: 8073
  source 1..120: mol_type = other DNA

SEQ ID NO: 56456 - DNA, 120 bp, synthetic construct; identical to SEQ ID NO: 26502
  source 1..120: mol_type = other DNA

SEQ ID NO: 56457 - DNA, 120 bp, synthetic construct; identical to SEQ ID NO: 26503
  source 1..120: mol_type = other DNA

SEQ ID NO: 56458 - DNA, 120 bp, synthetic construct; identical to SEQ ID NO: 8074
  source 1..120: mol_type = other DNA

SEQ ID NO: 56459 - DNA, 120 bp, synthetic construct; identical to SEQ ID NO: 26505
  source 1..120: mol_type = other DNA

SEQ ID NO: 56460 - DNA, 120 bp, synthetic construct; identical to SEQ ID NO: 26506
  source 1..120: mol_type = other DNA

SEQ ID NO: 56461 - DNA, 120 bp, synthetic construct; identical to SEQ ID NO: 26507
  source 1..120: mol_type = other DNA

SEQ ID NO: 56462 - DNA, 120 bp, synthetic construct; identical to SEQ ID NO: 26508
  source 1..120: mol_type = other DNA

SEQ ID NO: 56463 - DNA, 120 bp, synthetic construct; identical to SEQ ID NO: 8075
  source 1..120: mol_type = other DNA

SEQ ID NO: 56464 - DNA, 120 bp, synthetic construct; identical to SEQ ID NO: 26510
  source 1..120: mol_type = other DNA

SEQ ID NO: 56465 - DNA, 120 bp, synthetic construct; identical to SEQ ID NO: 26511
  source 1..120: mol_type = other DNA

SEQ ID NO: 56466 - DNA, 120 bp, synthetic construct; identical to SEQ ID NO: 26512
  source 1..120: mol_type = other DNA

SEQ ID NO: 56467 - DNA, 120 bp, synthetic construct; identical to SEQ ID NO: 8076
  source 1..120: mol_type = other DNA

SEQ ID NO: 56468 - DNA, 120 bp, synthetic construct; identical to SEQ ID NO: 26514
  source 1..120: mol_type = other DNA

SEQ ID NO: 56469 - DNA, 120 bp, synthetic construct; identical to SEQ ID NO: 26515
  source 1..120: mol_type = other DNA

SEQ ID NO: 56470 - DNA, 120 bp, synthetic construct; identical to SEQ ID NO: 8077
  source 1..120: mol_type = other DNA

SEQ ID NO: 56471 - DNA, 120 bp, synthetic construct; identical to SEQ ID NO: 26517
  source 1..120: mol_type = other DNA

SEQ ID NO: 56472 - DNA, 120 bp, synthetic construct; identical to SEQ ID NO: 26518
  source 1..120: mol_type = other DNA

SEQ ID NO: 56473 - DNA, 120 bp, synthetic construct; identical to SEQ ID NO: 26519
  source 1..120: mol_type = other DNA

SEQ ID NO: 56474 - DNA, 120 bp, synthetic construct; identical to SEQ ID NO: 26520
  source 1..120: mol_type = other DNA

SEQ ID NO: 56475 - DNA, 120 bp, synthetic construct; identical to SEQ ID NO: 8078
  source 1..120: mol_type = other DNA

SEQ ID NO: 56476 - DNA, 120 bp, synthetic construct; identical to SEQ ID NO: 26522
  source 1..120: mol_type = other DNA

SEQ ID NO: 56477 - DNA, 120 bp, synthetic construct; identical to SEQ ID NO: 26523
  source 1..120: mol_type = other DNA

SEQ ID NO: 56478 - DNA, 120 bp, synthetic construct; identical to SEQ ID NO: 8079
  source 1..120: mol_type = other DNA

SEQ ID NO: 56479 - DNA, 120 bp, synthetic construct; identical to SEQ ID NO: 26525
  source 1..120: mol_type = other DNA

SEQ ID NO: 56480 - DNA, 120 bp, synthetic construct; identical to SEQ ID NO: 26526
  source 1..120: mol_type = other DNA

SEQ ID NO: 56481 - DNA, 120 bp, synthetic construct; identical to SEQ ID NO: 26527
  source 1..120: mol_type = other DNA

SEQ ID NO: 56482 - DNA, 120 bp, synthetic construct; identical to SEQ ID NO: 8080
  source 1..120: mol_type = other DNA

SEQ ID NO: 56483 - DNA, 120 bp, synthetic construct; identical to SEQ ID NO: 26529
  source 1..120: mol_type = other DNA

SEQ ID NO: 56484 - DNA, 120 bp, synthetic construct; identical to SEQ ID NO: 26530
  source 1..120: mol_type = other DNA

SEQ ID NO: 56485 - DNA, 120 bp, synthetic construct; identical to SEQ ID NO: 26531
  source 1..120: mol_type = other DNA

SEQ ID NO: 56486 - DNA, 120 bp, synthetic construct; identical to SEQ ID NO: 8081
  source 1..120: mol_type = other DNA

SEQ ID NO: 56487 - DNA, 120 bp, synthetic construct; identical to SEQ ID NO: 26533
  source 1..120: mol_type = other DNA

SEQ ID NO: 56488 - DNA, 120 bp, synthetic construct; identical to SEQ ID NO: 26534
  source 1..120: mol_type = other DNA

SEQ ID NO: 56489 - DNA, 120 bp, synthetic construct; identical to SEQ ID NO: 26535
  source 1..120: mol_type = other DNA

SEQ ID NO: 56490 - DNA, 120 bp, synthetic construct; identical to SEQ ID NO: 26536
  source 1..120: mol_type = other DNA

SEQ ID NO: 56491 - DNA, 120 bp, synthetic construct; identical to SEQ ID NO: 8082
  source 1..120: mol_type = other DNA

SEQ ID NO: 56492 - DNA, 120 bp, synthetic construct; identical to SEQ ID NO: 26538
  source 1..120: mol_type = other DNA

SEQ ID NO: 56493 - DNA, 120 bp, synthetic construct; identical to SEQ ID NO: 26539
  source 1..120: mol_type = other DNA

SEQ ID NO: 56494 - DNA, 120 bp, synthetic construct; identical to SEQ ID NO: 26540
  source 1..120: mol_type = other DNA

SEQ ID NO: 56495 - DNA, 120 bp, synthetic construct; identical to SEQ ID NO: 8083
  source 1..120: mol_type = other DNA

SEQ ID NO: 56496 - DNA, 120 bp, synthetic construct; identical to SEQ ID NO: 26542
  source 1..120: mol_type = other DNA

SEQ ID NO: 56497 - DNA, 120 bp, synthetic construct; identical to SEQ ID NO: 26543
  source 1..120: mol_type = other DNA

SEQ ID NO: 56498 - DNA, 120 bp, synthetic construct; identical to SEQ ID NO: 26544
  source 1..120: mol_type = other DNA

SEQ ID NO: 56499 - DNA, 120 bp, synthetic construct; identical to SEQ ID NO: 8084
  source 1..120: mol_type = other DNA

SEQ ID NO: 56500 - DNA, 120 bp, synthetic construct; identical to SEQ ID NO: 26546
  source 1..120: mol_type = other DNA

SEQ ID NO: 56501 - DNA, 120 bp, synthetic construct; identical to SEQ ID NO: 26547
  source 1..120: mol_type = other DNA

SEQ ID NO: 56502 - DNA, 120 bp, synthetic construct; identical to SEQ ID NO: 26548
  source 1..120: mol_type = other DNA

SEQ ID NO: 56503 - DNA, 120 bp, synthetic construct; identical to SEQ ID NO: 8085
  source 1..120: mol_type = other DNA

SEQ ID NO: 56504 - DNA, 120 bp, synthetic construct; identical to SEQ ID NO: 26550
  source 1..120: mol_type = other DNA

SEQ ID NO: 56505 - DNA, 120 bp, synthetic construct; identical to SEQ ID NO: 26551
  source 1..120: mol_type = other DNA

SEQ ID NO: 56506 - DNA, 120 bp, synthetic construct; identical to SEQ ID NO: 26552
  source 1..120: mol_type = other DNA

SEQ ID NO: 56507 - DNA, 120 bp, synthetic construct; identical to SEQ ID NO: 8086
  source 1..120: mol_type = other DNA

SEQ ID NO: 56508 - DNA, 120 bp, synthetic construct; identical to SEQ ID NO: 8087
  source 1..120: mol_type = other DNA

SEQ ID NO: 56509 - DNA, 120 bp, synthetic construct; identical to SEQ ID NO: 26555
  source 1..120: mol_type = other DNA

SEQ ID NO: 56510 - DNA, 120 bp, synthetic construct; identical to SEQ ID NO: 26556
  source 1..120: mol_type = other DNA

SEQ ID NO: 56511 - DNA, 120 bp, synthetic construct; identical to SEQ ID NO: 26557
  source 1..120: mol_type = other DNA

SEQ ID NO: 56512 - DNA, 120 bp, synthetic construct; identical to SEQ ID NO: 8088
  source 1..120: mol_type = other DNA

SEQ ID NO: 56513 - DNA, 120 bp, synthetic construct; identical to SEQ ID NO: 26559
  source 1..120: mol_type = other DNA

SEQ ID NO: 56514 - DNA, 120 bp, synthetic construct; identical to SEQ ID NO: 26560
  source 1..120: mol_type = other DNA

SEQ ID NO: 56515 - DNA, 120 bp, synthetic construct; identical to SEQ ID NO: 26561
  source 1..120: mol_type = other DNA

SEQ ID NO: 56516 - DNA, 120 bp, synthetic construct; identical to SEQ ID NO: 8089
  source 1..120: mol_type = other DNA

SEQ ID NO: 56517 - DNA, 120 bp, synthetic construct; identical to SEQ ID NO: 26563
  source 1..120: mol_type = other DNA

SEQ ID NO: 56518 - DNA, 120 bp, synthetic construct; identical to SEQ ID NO: 26564
  source 1..120: mol_type = other DNA

SEQ ID NO: 56519 - DNA, 120 bp, synthetic construct; identical to SEQ ID NO: 8090
  source 1..120: mol_type = other DNA

SEQ ID NO: 56520 - DNA, 120 bp, synthetic construct; identical to SEQ ID NO: 26566
  source 1..120: mol_type = other DNA

SEQ ID NO: 56521 - DNA, 120 bp, synthetic construct; identical to SEQ ID NO: 26567
  source 1..120: mol_type = other DNA

SEQ ID NO: 56522 - DNA, 120 bp, synthetic construct; identical to SEQ ID NO: 26568
  source 1..120: mol_type = other DNA

SEQ ID NO: 56523 - DNA, 120 bp, synthetic construct; identical to SEQ ID NO: 26569
  source 1..120: mol_type = other DNA

SEQ ID NO: 56524 - DNA, 120 bp, synthetic construct; identical to SEQ ID NO: 8091
  source 1..120: mol_type = other DNA

SEQ ID NO: 56525 - DNA, 120 bp, synthetic construct; identical to SEQ ID NO: 26571
  source 1..120: mol_type = other DNA

SEQ ID NO: 56526 - DNA, 120 bp, synthetic construct; identical to SEQ ID NO: 26572
  source 1..120: mol_type = other DNA

SEQ ID NO: 56527 - DNA, 120 bp, synthetic construct; identical to SEQ ID NO: 26573
  source 1..120: mol_type = other DNA

SEQ ID NO: 56528 - DNA, 120 bp, synthetic construct; identical to SEQ ID NO: 8092
  source 1..120: mol_type = other DNA

SEQ ID NO: 56529 - DNA, 120 bp, synthetic construct; identical to SEQ ID NO: 26575
  source 1..120: mol_type = other DNA

SEQ ID NO: 56530 - DNA, 120 bp, synthetic construct; identical to SEQ ID NO: 26576
  source 1..120: mol_type = other DNA

SEQ ID NO: 56531 - DNA, 120 bp, synthetic construct; identical to SEQ ID NO: 8093
  source 1..120: mol_type = other DNA

SEQ ID NO: 56532 - DNA, 120 bp, synthetic construct; identical to SEQ ID NO: 26578
  source 1..120: mol_type = other DNA

SEQ ID NO: 56533 - DNA, 120 bp, synthetic construct; identical to SEQ ID NO: 26579
  source 1..120: mol_type = other DNA

SEQ ID NO: 56534 - DNA, 120 bp, synthetic construct; identical to SEQ ID NO: 26580
  source 1..120: mol_type = other DNA

SEQ ID NO: 56535 - DNA, 120 bp, synthetic construct; identical to SEQ ID NO: 8094
  source 1..120: mol_type = other DNA

SEQ ID NO: 56536 - DNA, 120 bp, synthetic construct; identical to SEQ ID NO: 26582
  source 1..120: mol_type = other DNA

SEQ ID NO: 56537 - DNA, 120 bp, synthetic construct; identical to SEQ ID NO: 26583
  source 1..120: mol_type = other DNA

SEQ ID NO: 56538 - DNA, 120 bp, synthetic construct; identical to SEQ ID NO: 26584
  source 1..120: mol_type = other DNA

SEQ ID NO: 56539 - DNA, 120 bp, synthetic construct; identical to SEQ ID NO: 8095
  source 1..120: mol_type = other DNA

SEQ ID NO: 56540 - DNA, 120 bp, synthetic construct; identical to SEQ ID NO: 26586
  source 1..120: mol_type = other DNA

SEQ ID NO: 56541 - DNA, 120 bp, synthetic construct; identical to SEQ ID NO: 26587
  source 1..120: mol_type = other DNA

SEQ ID NO: 56542 - DNA, 120 bp, synthetic construct; identical to SEQ ID NO: 26588
  source 1..120: mol_type = other DNA

SEQ ID NO: 56543 - DNA, 120 bp, synthetic construct; identical to SEQ ID NO: 8096
  source 1..120: mol_type = other DNA

SEQ ID NO: 56544 - DNA, 120 bp, synthetic construct; identical to SEQ ID NO: 26590
  source 1..120: mol_type = other DNA

SEQ ID NO: 56545 - DNA, 120 bp, synthetic construct; identical to SEQ ID NO: 8097
  source 1..120: mol_type = other DNA

SEQ ID NO: 56546 - DNA, 120 bp, synthetic construct; identical to SEQ ID NO: 26592
  source 1..120: mol_type = other DNA

SEQ ID NO: 56547 - DNA, 120 bp, synthetic construct; identical to SEQ ID NO: 26593
  source 1..120: mol_type = other DNA

SEQ ID NO: 56548 - DNA, 120 bp, synthetic construct; identical to SEQ ID NO: 26594
  source 1..120: mol_type = other DNA

SEQ ID NO: 56549 - DNA, 120 bp, synthetic construct; identical to SEQ ID NO: 8098
  source 1..120: mol_type = other DNA

SEQ ID NO: 56550 - DNA, 120 bp, synthetic construct; identical to SEQ ID NO: 26596
  source 1..120: mol_type = other DNA

SEQ ID NO: 56551 - DNA, 120 bp, synthetic construct; identical to SEQ ID NO: 26597
  source 1..120: mol_type = other DNA

SEQ ID NO: 56552 - DNA, 120 bp, synthetic construct; identical to SEQ ID NO: 26598
  source 1..120: mol_type = other DNA

SEQ ID NO: 56553 - DNA, 120 bp, synthetic construct; identical to SEQ ID NO: 26599
  source 1..120: mol_type = other DNA

SEQ ID NO: 56554 - DNA, 120 bp, synthetic construct; identical to SEQ ID NO: 8099
  source 1..120: mol_type = other DNA

SEQ ID NO: 56555 - DNA, 120 bp, synthetic construct; identical to SEQ ID NO: 26601
  source 1..120: mol_type = other DNA

SEQ ID NO: 56556 - DNA, 120 bp, synthetic construct; identical to SEQ ID NO: 26602
  source 1..120: mol_type = other DNA

SEQ ID NO: 56557 - DNA, 120 bp, synthetic construct; identical to SEQ ID NO: 26603
  source 1..120: mol_type = other DNA

SEQ ID NO: 56558 - DNA, 120 bp, synthetic construct; identical to SEQ ID NO: 8100
  source 1..120: mol_type = other DNA

SEQ ID NO: 56559 - DNA, 120 bp, synthetic construct; identical to SEQ ID NO: 26605
  source 1..120: mol_type = other DNA

SEQ ID NO: 56560 - DNA, 120 bp, synthetic construct; identical to SEQ ID NO: 26606
  source 1..120: mol_type = other DNA

SEQ ID NO: 56561 - DNA, 120 bp, synthetic construct; identical to SEQ ID NO: 8101
  source 1..120: mol_type = other DNA

SEQ ID NO: 56562 - DNA, 120 bp, synthetic construct; identical to SEQ ID NO: 26608
  source 1..120: mol_type = other DNA

SEQ ID NO: 56563 - DNA, 120 bp, synthetic construct; identical to SEQ ID NO: 26609
  source 1..120: mol_type = other DNA

SEQ ID NO: 56564 - DNA, 120 bp, synthetic construct; identical to SEQ ID NO: 26610
  source 1..120: mol_type = other DNA

SEQ ID NO: 56565 - DNA, 120 bp, synthetic construct; identical to SEQ ID NO: 26611
  source 1..120: mol_type = other DNA

SEQ ID NO: 56566 - DNA, 120 bp, synthetic construct; identical to SEQ ID NO: 8102
  source 1..120: mol_type = other DNA

SEQ ID NO: 56567 - DNA, 120 bp, synthetic construct; identical to SEQ ID NO: 26613
  source 1..120: mol_type = other DNA

SEQ ID NO: 56568 - DNA, 120 bp, synthetic construct; identical to SEQ ID NO: 26614
  source 1..120: mol_type = other DNA

SEQ ID NO: 56569 - DNA, 120 bp, synthetic construct; identical to SEQ ID NO: 26615
  source 1..120: mol_type = other DNA

SEQ ID NO: 56570 - DNA, 120 bp, synthetic construct; identical to SEQ ID NO: 8103
  source 1..120: mol_type = other DNA

SEQ ID NO: 56571 - DNA, 120 bp, synthetic construct; identical to SEQ ID NO: 26617
  source 1..120: mol_type = other DNA

SEQ ID NO: 56572 - DNA, 120 bp, synthetic construct; identical to SEQ ID NO: 26618
  source 1..120: mol_type = other DNA

SEQ ID NO: 56573 - DNA, 120 bp, synthetic construct; identical to SEQ ID NO: 26619
  source 1..120: mol_type = other DNA

SEQ ID NO: 56574 - DNA, 120 bp, synthetic construct; identical to SEQ ID NO: 8104
  source 1..120: mol_type = other DNA

SEQ ID NO: 56575 - DNA, 120 bp, synthetic construct; identical to SEQ ID NO: 26621
  source 1..120: mol_type = other DNA

SEQ ID NO: 56576 - DNA, 120 bp, synthetic construct; identical to SEQ ID NO: 26622
  source 1..120: mol_type = other DNA

SEQ ID NO: 56577 - DNA, 120 bp, synthetic construct; identical to SEQ ID NO: 8105
  source 1..120: mol_type = other DNA

SEQ ID NO: 56578 - DNA, 120 bp, synthetic construct; identical to SEQ ID NO: 26624
  source 1..120: mol_type = other DNA

SEQ ID NO: 56579 - DNA, 120 bp, synthetic construct; identical to SEQ ID NO: 26625
  source 1..120: mol_type = other DNA

SEQ ID NO: 56580 - DNA, 120 bp, synthetic construct; identical to SEQ ID NO: 26626
  source 1..120: mol_type = other DNA

SEQ ID NO: 56581 - DNA, 120 bp, synthetic construct; identical to SEQ ID NO: 8106
  source 1..120: mol_type = other DNA

SEQ ID NO: 56582 - DNA, 120 bp, synthetic construct; identical to SEQ ID NO: 26628
  source 1..120: mol_type = other DNA

SEQ ID NO: 56583 - DNA, 120 bp, synthetic construct; identical to SEQ ID NO: 26629
  source 1..120: mol_type = other DNA

SEQ ID NO: 56584 - DNA, 120 bp, synthetic construct; identical to SEQ ID NO: 26630
  source 1..120: mol_type = other DNA

SEQ ID NO: 56585 - DNA, 120 bp, synthetic construct; identical to SEQ ID NO: 8107
  source 1..120: mol_type = other DNA

SEQ ID NO: 56586 - DNA, 120 bp, synthetic construct; identical to SEQ ID NO: 26632
  source 1..120: mol_type = other DNA

SEQ ID NO: 56587 - DNA, 120 bp, synthetic construct; identical to SEQ ID NO: 26633
  source 1..120: mol_type = other DNA

SEQ ID NO: 56588 - DNA, 120 bp, synthetic construct; identical to SEQ ID NO: 26634
  source 1..120: mol_type = other DNA

SEQ ID NO: 56589 - DNA, 120 bp, synthetic construct; identical to SEQ ID NO: 8108
  source 1..120: mol_type = other DNA

SEQ ID NO: 56590 - DNA, 120 bp, synthetic construct; identical to SEQ ID NO: 26636
  source 1..120: mol_type = other DNA

SEQ ID NO: 56591 - DNA, 120 bp, synthetic construct; identical to SEQ ID NO: 26637
  source 1..120: mol_type = other DNA

SEQ ID NO: 56592 - DNA, 120 bp, synthetic construct; identical to SEQ ID NO: 26638
  source 1..120: mol_type = other DNA

SEQ ID NO: 56593 - DNA, 120 bp, synthetic construct; identical to SEQ ID NO: 8109
  source 1..120: mol_type = other DNA

SEQ ID NO: 56594 - DNA, 120 bp, synthetic construct; identical to SEQ ID NO: 26640
  source 1..120: mol_type = other DNA

SEQ ID NO: 56595 - DNA, 120 bp, synthetic construct; identical to SEQ ID NO: 26641
  source 1..120: mol_type = other DNA

SEQ ID NO: 56596 - DNA, 120 bp, synthetic construct; identical to SEQ ID NO: 26642
  source 1..120: mol_type = other DNA

SEQ ID NO: 56597 - DNA, 120 bp, synthetic construct; identical to SEQ ID NO: 26643
  source 1..120: mol_type = other DNA

SEQ ID NO: 56598 - DNA, 120 bp, synthetic construct; identical to SEQ ID NO: 8110
  source 1..120: mol_type = other DNA

SEQ ID NO: 56599 - DNA, 120 bp, synthetic construct; identical to SEQ ID NO: 26645
  source 1..120: mol_type = other DNA

SEQ ID NO: 56600 - DNA, 120 bp, synthetic construct; identical to SEQ ID NO: 26646
  source 1..120: mol_type = other DNA

SEQ ID NO: 56601 - DNA, 120 bp, synthetic construct; identical to SEQ ID NO: 26647
  source 1..120: mol_type = other DNA

SEQ ID NO: 56602 - DNA, 120 bp, synthetic construct; identical to SEQ ID NO: 26648
  source 1..120: mol_type = other DNA

SEQ ID NO: 56603 - DNA, 120 bp, synthetic construct; identical to SEQ ID NO: 8111
  source 1..120: mol_type = other DNA

SEQ ID NO: 56604 - DNA, 120 bp, synthetic construct; identical to SEQ ID NO: 26650
  source 1..120: mol_type = other DNA

SEQ ID NO: 56605 - DNA, 120 bp, synthetic construct; identical to SEQ ID NO: 26651
  source 1..120: mol_type = other DNA

SEQ ID NO: 56606 - DNA, 120 bp, synthetic construct; identical to SEQ ID NO: 26652
  source 1..120: mol_type = other DNA

SEQ ID NO: 56607 - DNA, 120 bp, synthetic construct; identical to SEQ ID NO: 8112
  source 1..120: mol_type = other DNA

SEQ ID NO: 56608 - DNA, 120 bp, synthetic construct; identical to SEQ ID NO: 26654
  source 1..120: mol_type = other DNA

SEQ ID NO: 56609 - DNA, 120 bp, synthetic construct; identical to SEQ ID NO: 26655
  source 1..120: mol_type = other DNA

SEQ ID NO: 56610 - DNA, 120 bp, synthetic construct; identical to SEQ ID NO: 26656
  source 1..120: mol_type = other DNA

SEQ ID NO: 56611 - DNA, 120 bp, synthetic construct; identical to SEQ ID NO: 8113
  source 1..120: mol_type = other DNA

SEQ ID NO: 56612 - DNA, 120 bp, synthetic construct; identical to SEQ ID NO: 26658
  source 1..120: mol_type = other DNA

SEQ ID NO: 56613 - DNA, 120 bp, synthetic construct; identical to SEQ ID NO: 26659
  source 1..120: mol_type = other DNA

SEQ ID NO: 56614 - DNA, 120 bp, synthetic construct; identical to SEQ ID NO: 26660
  source 1..120: mol_type = other DNA

SEQ ID NO: 56615 - DNA, 120 bp, synthetic construct; identical to SEQ ID NO: 8114
  source 1..120: mol_type = other DNA

SEQ ID NO: 56616 - DNA, 120 bp, synthetic construct; identical to SEQ ID NO: 26662
  source 1..120: mol_type = other DNA

SEQ ID NO: 56617 - DNA, 120 bp, synthetic construct; identical to SEQ ID NO: 26663
  source 1..120: mol_type = other DNA

SEQ ID NO: 56618 - DNA, 120 bp, synthetic construct; identical to SEQ ID NO: 26664
  source 1..120: mol_type = other DNA

SEQ ID NO: 56619 - DNA, 120 bp, synthetic construct; identical to SEQ ID NO: 8115
  source 1..120: mol_type = other DNA

SEQ ID NO: 56620 - DNA, 120 bp, synthetic construct; identical to SEQ ID NO: 26666
  source 1..120: mol_type = other DNA

SEQ ID NO: 56621 - DNA, 120 bp, synthetic construct; identical to SEQ ID NO: 26667
  source 1..120: mol_type = other DNA

SEQ ID NO: 56622 - DNA, 120 bp, synthetic construct; identical to SEQ ID NO: 8116
  source 1..120: mol_type = other DNA

SEQ ID NO: 56623 - DNA, 120 bp, synthetic construct; identical to SEQ ID NO: 26669
  source 1..120: mol_type = other DNA

SEQ ID NO: 56624 - DNA, 120 bp, synthetic construct; identical to SEQ ID NO: 26670
  source 1..120: mol_type = other DNA

SEQ ID NO: 56625 - DNA, 120 bp, synthetic construct; identical to SEQ ID NO: 26671
  source 1..120: mol_type = other DNA

SEQ ID NO: 56626 - DNA, 120 bp, synthetic construct; identical to SEQ ID NO: 26672
  source 1..120: mol_type = other DNA

SEQ ID NO: 56627 - DNA, 120 bp, synthetic construct; identical to SEQ ID NO: 8117
  source 1..120: mol_type = other DNA

SEQ ID NO: 56628 - DNA, 120 bp, synthetic construct; identical to SEQ ID NO: 26674
  source 1..120: mol_type = other DNA

SEQ ID NO: 56629 - DNA, 120 bp, synthetic construct; identical to SEQ ID NO: 26675
  source 1..120: mol_type = other DNA

SEQ ID NO: 56630 - DNA, 120 bp, synthetic construct; identical to SEQ ID NO: 8118
  source 1..120: mol_type = other DNA

SEQ ID NO: 56631 - DNA, 120 bp, synthetic construct; identical to SEQ ID NO: 26677
  source 1..120: mol_type = other DNA

SEQ ID NO: 56632 - DNA, 120 bp, synthetic construct; identical to SEQ ID NO: 26678
  source 1..120: mol_type = other DNA

SEQ ID NO: 56633 - DNA, 120 bp, synthetic construct; identical to SEQ ID NO: 26679
  source 1..120: mol_type = other DNA

SEQ ID NO: 56634 - DNA, 120 bp, synthetic construct; identical to SEQ ID NO: 26680
  source 1..120: mol_type = other DNA

SEQ ID NO: 56635 - DNA, 120 bp, synthetic construct; identical to SEQ ID NO: 8119
  source 1..120: mol_type = other DNA

SEQ ID NO: 56636 - DNA, 120 bp, synthetic construct; identical to SEQ ID NO: 26682
  source 1..120: mol_type = other DNA

SEQ ID NO: 56637 - DNA, 120 bp, synthetic construct; identical to SEQ ID NO: 26683
  source 1..120: mol_type = other DNA

SEQ ID NO: 56638 - DNA, 120 bp, synthetic construct; identical to SEQ ID NO: 26684
  source 1..120: mol_type = other DNA

SEQ ID NO: 56639 - DNA, 120 bp, synthetic construct; identical to SEQ ID NO: 26685
  source 1..120: mol_type = other DNA

SEQ ID NO: 56640 - DNA, 120 bp, synthetic construct; identical to SEQ ID NO: 8120
  source 1..120: mol_type = other DNA

SEQ ID NO: 56641 - DNA, 120 bp, synthetic construct; identical to SEQ ID NO: 26687
  source 1..120: mol_type = other DNA

SEQ ID NO: 56642 - DNA, 120 bp, synthetic construct; identical to SEQ ID NO: 26688
  source 1..120: mol_type = other DNA

SEQ ID NO: 56643 - DNA, 120 bp, synthetic construct; identical to SEQ ID NO: 8121
  source 1..120: mol_type = other DNA

SEQ ID NO: 56644 - DNA, 120 bp, synthetic construct; identical to SEQ ID NO: 26690
  source 1..120: mol_type = other DNA

SEQ ID NO: 56645 - DNA, 120 bp, synthetic construct; identical to SEQ ID NO: 26691
  source 1..120: mol_type = other DNA

SEQ ID NO: 56646 - DNA, 120 bp, synthetic construct; identical to SEQ ID NO: 26692
  source 1..120: mol_type = other DNA

SEQ ID NO: 56647 - DNA, 120 bp, synthetic construct; identical to SEQ ID NO: 8122
  source 1..120: mol_type = other DNA

SEQ ID NO: 56648 - DNA, 120 bp, synthetic construct; identical to SEQ ID NO: 26694
  source 1..120: mol_type = other DNA

SEQ ID NO: 56649 - DNA, 120 bp, synthetic construct; identical to SEQ ID NO: 26695
  source 1..120: mol_type = other DNA

SEQ ID NO: 56650 - DNA, 120 bp, synthetic construct; identical to SEQ ID NO: 8123
  source 1..120: mol_type = other DNA

SEQ ID NO: 56651 - DNA, 120 bp, synthetic construct; identical to SEQ ID NO: 26697
  source 1..120: mol_type = other DNA

SEQ ID NO: 56652 - DNA, 120 bp, synthetic construct; identical to SEQ ID NO: 26698
  source 1..120: mol_type = other DNA

SEQ ID NO: 56653 - DNA, 120 bp, synthetic construct; identical to SEQ ID NO: 26699
  source 1..120: mol_type = other DNA

SEQ ID NO: 56654 - DNA, 120 bp, synthetic construct; identical to SEQ ID NO: 26700
  source 1..120: mol_type = other DNA

SEQ ID NO: 56655 - DNA, 120 bp, synthetic construct; identical to SEQ ID NO: 8124
  source 1..120: mol_type = other DNA

SEQ ID NO: 56656 - DNA, 120 bp, synthetic construct; identical to SEQ ID NO: 26702
  source 1..120: mol_type = other DNA

SEQ ID NO: 56657 - DNA, 120 bp, synthetic construct; identical to SEQ ID NO: 26703
  source 1..120: mol_type = other DNA

SEQ ID NO: 56658 - DNA, 120 bp, synthetic construct; identical to SEQ ID NO: 8125
  source 1..120: mol_type = other DNA

SEQ ID NO: 56659 - DNA, 120 bp, synthetic construct; identical to SEQ ID NO: 26705
  source 1..120: mol_type = other DNA

SEQ ID NO: 56660 - DNA, 120 bp, synthetic construct; identical to SEQ ID NO: 26706
  source 1..120: mol_type = other DNA

SEQ ID NO: 56661 - DNA, 120 bp, synthetic construct; identical to SEQ ID NO: 26707
  source 1..120: mol_type = other DNA

SEQ ID NO: 56662 - DNA, 120 bp, synthetic construct; identical to SEQ ID NO: 8126
  source 1..120: mol_type = other DNA

SEQ ID NO: 56663 - DNA, 120 bp, synthetic construct; identical to SEQ ID NO: 26709
  source 1..120: mol_type = other DNA

SEQ ID NO: 56664 - DNA, 120 bp, synthetic construct; identical to SEQ ID NO: 26710
  source 1..120: mol_type = other DNA

SEQ ID NO: 56665 - DNA, 120 bp, synthetic construct; identical to SEQ ID NO: 26711
  source 1..120: mol_type = other DNA

SEQ ID NO: 56666 - DNA, 120 bp, synthetic construct; identical to SEQ ID NO: 8127
  source 1..120: mol_type = other DNA

SEQ ID NO: 56667 - DNA, 120 bp, synthetic construct; identical to SEQ ID NO: 26713
  source 1..120: mol_type = other DNA

SEQ ID NO: 56668 - DNA, 120 bp, synthetic construct; identical to SEQ ID NO: 26714
  source 1..120: mol_type = other DNA

SEQ ID NO: 56669 - DNA, 120 bp, synthetic construct; identical to SEQ ID NO: 26715
  source 1..120: mol_type = other DNA

SEQ ID NO: 56670 - DNA, 120 bp, synthetic construct; identical to SEQ ID NO: 26716
  source 1..120: mol_type = other DNA

SEQ ID NO: 56671 - DNA, 120 bp, synthetic construct; identical to SEQ ID NO: 8128
  source 1..120: mol_type = other DNA

SEQ ID NO: 56672 - DNA, 120 bp, synthetic construct; identical to SEQ ID NO: 26718
  source 1..120: mol_type = other DNA

SEQ ID NO: 56673 - DNA, 120 bp, synthetic construct; identical to SEQ ID NO: 26719
  source 1..120: mol_type = other DNA

SEQ ID NO: 56674 - DNA, 120 bp, synthetic construct; identical to SEQ ID NO: 8129
  source 1..120: mol_type = other DNA

SEQ ID NO: 56675 - DNA, 120 bp, synthetic construct; identical to SEQ ID NO: 26721
  source 1..120: mol_type = other DNA

SEQ ID NO: 56676 - DNA, 120 bp, synthetic construct; identical to SEQ ID NO: 26722
  source 1..120: mol_type = other DNA

SEQ ID NO: 56677 - DNA, 120 bp, synthetic construct; identical to SEQ ID NO: 26723
  source 1..120: mol_type = other DNA

SEQ ID NO: 56678 - DNA, 120 bp, synthetic construct; identical to SEQ ID NO: 26724
  source 1..120: mol_type = other DNA

SEQ ID NO: 56679 - DNA, 120 bp, synthetic construct; identical to SEQ ID NO: 8130
  source 1..120: mol_type = other DNA

SEQ ID NO: 56680 - DNA, 120 bp, synthetic construct; identical to SEQ ID NO: 26726
  source 1..120: mol_type = other DNA

SEQ ID NO: 56681 - DNA, 120 bp, synthetic construct; identical to SEQ ID NO: 26727
  source 1..120: mol_type = other DNA

SEQ ID NO: 56682 - DNA, 120 bp, synthetic construct; identical to SEQ ID NO: 8131
  source 1..120: mol_type = other DNA

SEQ ID NO: 56683 - DNA, 120 bp, synthetic construct; identical to SEQ ID NO: 26729
  source 1..120: mol_type = other DNA

SEQ ID NO: 56684 - DNA, 120 bp, synthetic construct; identical to SEQ ID NO: 26730
  source 1..120: mol_type = other DNA

SEQ ID NO: 56685 - DNA, 120 bp, synthetic construct; identical to SEQ ID NO: 26731
  source 1..120: mol_type = other DNA

SEQ ID NO: 56686 - DNA, 120 bp, synthetic construct; identical to SEQ ID NO: 26732
  source 1..120: mol_type = other DNA

SEQ ID NO: 56687 - DNA, 120 bp, synthetic construct; identical to SEQ ID NO: 8132
  source 1..120: mol_type = other DNA

SEQ ID NO: 56688 - DNA, 120 bp, synthetic construct; identical to SEQ ID NO: 26734
  source 1..120: mol_type = other DNA

SEQ ID NO: 56689 - DNA, 120 bp, synthetic construct; identical to SEQ ID NO: 26735
  source 1..120: mol_type = other DNA

SEQ ID NO: 56690 - DNA, 120 bp, synthetic construct; identical to SEQ ID NO: 8133
  source 1..120: mol_type = other DNA

SEQ ID NO: 56691 - DNA, 120 bp, synthetic construct; identical to SEQ ID NO: 26737
  source 1..120: mol_type = other DNA

SEQ ID NO: 56692 - DNA, 120 bp, synthetic construct; identical to SEQ ID NO: 26738
  source 1..120: mol_type = other DNA

SEQ ID NO: 56693 - DNA, 120 bp, synthetic construct; identical to SEQ ID NO: 26739
  source 1..120: mol_type = other DNA

SEQ ID NO: 56694 - DNA, 120 bp, synthetic construct; identical to SEQ ID NO: 8134
  source 1..120: mol_type = other DNA

SEQ ID NO: 56695 - DNA, 120 bp, synthetic construct; identical to SEQ ID NO: 26741
  source 1..120: mol_type = other DNA

SEQ ID NO: 56696 - DNA, 120 bp, synthetic construct; identical to SEQ ID NO: 26742
  source 1..120: mol_type = other DNA

SEQ ID NO: 56697 - DNA, 120 bp, synthetic construct; identical to SEQ ID NO: 26743
  source 1..120: mol_type = other DNA

SEQ ID NO: 56698 - DNA, 120 bp, synthetic construct; identical to SEQ ID NO: 26744
  source 1..120: mol_type = other DNA

SEQ ID NO: 56699 - DNA, 120 bp, synthetic construct; identical to SEQ ID NO: 8135
  source 1..120: mol_type = other DNA

SEQ ID NO: 56700 - DNA, 120 bp, synthetic construct; identical to SEQ ID NO: 26746
  source 1..120: mol_type = other DNA

SEQ ID NO: 56701 - DNA, 120 bp, synthetic construct; identical to SEQ ID NO: 26747
  source 1..120: mol_type = other DNA

SEQ ID NO: 56702 - DNA, 120 bp, synthetic construct; identical to SEQ ID NO: 8136
  source 1..120: mol_type = other DNA

SEQ ID NO: 56703 - DNA, 120 bp, synthetic construct; identical to SEQ ID NO: 26749
  source 1..120: mol_type = other DNA

SEQ ID NO: 56704 - DNA, 120 bp, synthetic construct; identical to SEQ ID NO: 26750
  source 1..120: mol_type = other DNA

SEQ ID NO: 56705 - DNA, 120 bp, synthetic construct; identical to SEQ ID NO: 26751
  source 1..120: mol_type = other DNA

SEQ ID NO: 56706 - DNA, 120 bp, synthetic construct; identical to SEQ ID NO: 26752
  source 1..120: mol_type = other DNA

SEQ ID NO: 56707 - DNA, 120 bp, synthetic construct; identical to SEQ ID NO: 8137
  source 1..120: mol_type = other DNA

SEQ ID NO: 56708 - DNA, 120 bp, synthetic construct; identical to SEQ ID NO: 26754
  source 1..120: mol_type = other DNA

SEQ ID NO: 56709 - DNA, 120 bp, synthetic construct; identical to SEQ ID NO: 26755
  source 1..120: mol_type = other DNA

SEQ ID NO: 56710 - DNA, 120 bp, synthetic construct; identical to SEQ ID NO: 26756
  source 1..120: mol_type = other DNA

SEQ ID NO: 56711 - DNA, 120 bp, synthetic construct; identical to SEQ ID NO: 8138
  source 1..120: mol_type = other DNA

SEQ ID NO: 56712 - DNA, 120 bp, synthetic construct; identical to SEQ ID NO: 26758
  source 1..120: mol_type = other DNA

SEQ ID NO: 56713 - DNA, 120 bp, synthetic construct; identical to SEQ ID NO: 26759
  source 1..120: mol_type = other DNA

SEQ ID NO: 56714 - DNA, 120 bp, synthetic construct; identical to SEQ ID NO: 26760
  source 1..120: mol_type = other DNA

SEQ ID NO: 56715 - DNA, 120 bp, synthetic construct; identical to SEQ ID NO: 8139
  source 1..120: mol_type = other DNA

SEQ ID NO: 56716 - DNA, 120 bp, synthetic construct; identical to SEQ ID NO: 26762
  source 1..120: mol_type = other DNA

SEQ ID NO: 56717 - DNA, 120 bp, synthetic construct; identical to SEQ ID NO: 26763
  source 1..120: mol_type = other DNA

SEQ ID NO: 56718 - DNA, 120 bp, synthetic construct; identical to SEQ ID NO: 26764
  source 1..120: mol_type = other DNA

SEQ ID NO: 56719 - DNA, 120 bp, synthetic construct; identical to SEQ ID NO: 8140
  source 1..120: mol_type = other DNA

SEQ ID NO: 56720 - DNA, 120 bp, synthetic construct; identical to SEQ ID NO: 26766
  source 1..120: mol_type = other DNA

SEQ ID NO: 56721 - DNA, 120 bp, synthetic construct; identical to SEQ ID NO: 26767
  source 1..120: mol_type = other DNA

SEQ ID NO: 56722 - DNA, 120 bp, synthetic construct; identical to SEQ ID NO: 8141
  source 1..120: mol_type = other DNA

SEQ ID NO: 56723 - DNA, 120 bp, synthetic construct; identical to SEQ ID NO: 26769
  source 1..120: mol_type = other DNA

SEQ ID NO: 56724 - DNA, 120 bp, synthetic construct; identical to SEQ ID NO: 26770
  source 1..120: mol_type = other DNA

SEQ ID NO: 56725 - DNA, 120 bp, synthetic construct; identical to SEQ ID NO: 26771
  source 1..120: mol_type = other DNA

SEQ ID NO: 56726 - DNA, 120 bp, synthetic construct; identical to SEQ ID NO: 8142
  source 1..120: mol_type = other DNA

SEQ ID NO: 56727 - DNA, 120 bp, synthetic construct; identical to SEQ ID NO: 26773
  source 1..120: mol_type = other DNA

SEQ ID NO: 56728 - DNA, 120 bp, synthetic construct; identical to SEQ ID NO: 26774
  source 1..120: mol_type = other DNA

SEQ ID NO: 56729 - DNA, 120 bp, synthetic construct; identical to SEQ ID NO: 26775
  source 1..120: mol_type = other DNA

SEQ ID NO: 56730 - DNA, 120 bp, synthetic construct; identical to SEQ ID NO: 26776
  source 1..120: mol_type = other DNA

SEQ ID NO: 56731 - DNA, 120 bp, synthetic construct; identical to SEQ ID NO: 8143
  source 1..120: mol_type = other DNA

SEQ ID NO: 56732 - DNA, 120 bp, synthetic construct; identical to SEQ ID NO: 26778
  source 1..120: mol_type = other DNA

SEQ ID NO: 56733 - DNA, 120 bp, synthetic construct; identical to SEQ ID NO: 26779
  source 1..120: mol_type = other DNA

SEQ ID NO: 56734 - DNA, 120 bp, synthetic construct; identical to SEQ ID NO: 26780
  source 1..120: mol_type = other DNA

SEQ ID NO: 56735 - DNA, 120 bp, synthetic construct; identical to SEQ ID NO: 8144
  source 1..120: mol_type = other DNA

SEQ ID NO: 56736 - DNA, 120 bp, synthetic construct; identical to SEQ ID NO: 26782
  source 1..120: mol_type = other DNA

SEQ ID NO: 56737 - DNA, 120 bp, synthetic construct; identical to SEQ ID NO: 26783
  source 1..120: mol_type = other DNA

SEQ ID NO: 56738 - DNA, 120 bp, synthetic construct; identical to SEQ ID NO: 26784
  source 1..120: mol_type = other DNA

SEQ ID NO: 56739 - DNA, 120 bp, synthetic construct; identical to SEQ ID NO: 8145
  source 1..120: mol_type = other DNA

SEQ ID NO: 56740 - DNA, 120 bp, synthetic construct; identical to SEQ ID NO: 26786
  source 1..120: mol_type = other DNA

SEQ ID NO: 56741 - DNA, 120 bp, synthetic construct; identical to SEQ ID NO: 26787
  source 1..120: mol_type = other DNA

SEQ ID NO: 56742 - DNA, 120 bp, synthetic construct; identical to SEQ ID NO: 26788
  source 1..120: mol_type = other DNA

SEQ ID NO: 56743 - DNA, 120 bp, synthetic construct; identical to SEQ ID NO: 26789
  source 1..120: mol_type = other DNA

SEQ ID NO: 56744 - DNA, 120 bp, synthetic construct; identical to SEQ ID NO: 8146
  source 1..120: mol_type = other DNA

SEQ ID NO: 56745 - DNA, 120 bp, synthetic construct; identical to SEQ ID NO: 26791
  source 1..120: mol_type = other DNA

SEQ ID NO: 56746 - DNA, 120 bp, synthetic construct; identical to SEQ ID NO: 26792
  source 1..120: mol_type = other DNA

SEQ ID NO: 56747 - DNA, 120 bp, synthetic construct; identical to SEQ ID NO: 26793
  source 1..120: mol_type = other DNA

SEQ ID NO: 56748 - DNA, 120 bp, synthetic construct; identical to SEQ ID NO: 8147
  source 1..120: mol_type = other DNA

SEQ ID NO: 56749 - DNA, 120 bp, synthetic construct; identical to SEQ ID NO: 26795
  source 1..120: mol_type = other DNA

SEQ ID NO: 56750 - DNA, 120 bp, synthetic construct; identical to SEQ ID NO: 26796
  source 1..120: mol_type = other DNA

SEQ ID NO: 56751 - DNA, 120 bp, synthetic construct; identical to SEQ ID NO: 8148
  source 1..120: mol_type = other DNA

SEQ ID NO: 56752 - DNA, 120 bp, synthetic construct; identical to SEQ ID NO: 26798
  source 1..120: mol_type = other DNA

SEQ ID NO: 56753 - DNA, 120 bp, synthetic construct; identical to SEQ ID NO: 26799
  source 1..120: mol_type = other DNA

SEQ ID NO: 56754 - DNA, 120 bp, synthetic construct; identical to SEQ ID NO: 26800
  source 1..120: mol_type = other DNA

SEQ ID NO: 56755 - DNA, 120 bp, synthetic construct; identical to SEQ ID NO: 26801
  source 1..120: mol_type = other DNA

SEQ ID NO: 56756 - DNA, 120 bp, synthetic construct; identical to SEQ ID NO: 8149
  source 1..120: mol_type = other DNA

SEQ ID NO: 56757 - DNA, 120 bp, synthetic construct; identical to SEQ ID NO: 26803
  source 1..120: mol_type = other DNA

SEQ ID NO: 56758 - DNA, 120 bp, synthetic construct; identical to SEQ ID NO: 26804
  source 1..120: mol_type = other DNA

SEQ ID NO: 56759 - DNA, 120 bp, synthetic construct; identical to SEQ ID NO: 26805
  source 1..120: mol_type = other DNA

SEQ ID NO: 56760 - DNA, 120 bp, synthetic construct; identical to SEQ ID NO: 8150
  source 1..120: mol_type = other DNA

SEQ ID NO: 56761 - DNA, 120 bp, synthetic construct; identical to SEQ ID NO: 26807
  source 1..120: mol_type = other DNA

SEQ ID NO: 56762 - DNA, 120 bp, synthetic construct; identical to SEQ ID NO: 26808
  source 1..120: mol_type = other DNA

SEQ ID NO: 56763 - DNA, 120 bp, synthetic construct; identical to SEQ ID NO: 26809
  source 1..120: mol_type = other DNA

SEQ ID NO: 56764 - DNA, 120 bp, synthetic construct; identical to SEQ ID NO: 8151
  source 1..120: mol_type = other DNA

SEQ ID NO: 56765 - DNA, 120 bp, synthetic construct; identical to SEQ ID NO: 26811
  source 1..120: mol_type = other DNA

SEQ ID NO: 56766 - DNA, 120 bp, synthetic construct; identical to SEQ ID NO: 26812
  source 1..120: mol_type = other DNA

SEQ ID NO: 56767 - DNA, 120 bp, synthetic construct; identical to SEQ ID NO: 8152
  source 1..120: mol_type = other DNA

SEQ ID NO: 56768 - DNA, 120 bp, synthetic construct; identical to SEQ ID NO: 26814
  source 1..120: mol_type = other DNA

SEQ ID NO: 56769 - DNA, 120 bp, synthetic construct; identical to SEQ ID NO: 26815
  source 1..120: mol_type = other DNA

SEQ ID NO: 56770 - DNA, 120 bp, synthetic construct; identical to SEQ ID NO: 26816
  source 1..120: mol_type = other DNA

SEQ ID NO: 56771 - DNA, 120 bp, synthetic construct; identical to SEQ ID NO: 26817
  source 1..120: mol_type = other DNA

SEQ ID NO: 56772 - DNA, 120 bp, synthetic construct; identical to SEQ ID NO: 8153
  source 1..120: mol_type = other DNA

SEQ ID NO: 56773 - DNA, 120 bp, synthetic construct; identical to SEQ ID NO: 26819
  source 1..120: mol_type = other DNA

SEQ ID NO: 56774 - DNA, 120 bp, synthetic construct; identical to SEQ ID NO: 26820
  source 1..120: mol_type = other DNA

SEQ ID NO: 56775 - DNA, 120 bp, synthetic construct; identical to SEQ ID NO: 26821
  source 1..120: mol_type = other DNA

SEQ ID NO: 56776 - DNA, 120 bp, synthetic construct; identical to SEQ ID NO: 26822
  source 1..120: mol_type = other DNA

SEQ ID NO: 56777 - DNA, 120 bp, synthetic construct; identical to SEQ ID NO: 8154
  source 1..120: mol_type = other DNA

SEQ ID NO: 56778 - DNA, 120 bp, synthetic construct; identical to SEQ ID NO: 26824
  source 1..120: mol_type = other DNA

SEQ ID NO: 56779 - DNA, 120 bp, synthetic construct; identical to SEQ ID NO: 8155
  source 1..120: mol_type = other DNA

SEQ ID NO: 56780 - DNA, 120 bp, synthetic construct; identical to SEQ ID NO: 26826
  source 1..120: mol_type = other DNA

SEQ ID NO: 56781 - DNA, 120 bp, synthetic construct; identical to SEQ ID NO: 26827
  source 1..120: mol_type = other DNA

SEQ ID NO: 56782 - DNA, 120 bp, synthetic construct; identical to SEQ ID NO: 26828
  source 1..120: mol_type = other DNA

SEQ ID NO: 56783 - DNA, 120 bp, synthetic construct; identical to SEQ ID NO: 8156
  source 1..120: mol_type = other DNA

SEQ ID NO: 56784 - DNA, 120 bp, synthetic construct; identical to SEQ ID NO: 26830
  source 1..120: mol_type = other DNA

SEQ ID NO: 56785 - DNA, 120 bp, synthetic construct; identical to SEQ ID NO: 26831
  source 1..120: mol_type = other DNA

SEQ ID NO: 56786 - DNA, 120 bp, synthetic construct; identical to SEQ ID NO: 26832
  source 1..120: mol_type = other DNA

SEQ ID NO: 56787 - DNA, 120 bp, synthetic construct; identical to SEQ ID NO: 26833
  source 1..120: mol_type = other DNA

SEQ ID NO: 56788 - DNA, 120 bp, synthetic construct; identical to SEQ ID NO: 8157
  source 1..120: mol_type = other DNA

SEQ ID NO: 56789 - DNA, 120 bp, synthetic construct; identical to SEQ ID NO: 26835
  source 1..120: mol_type = other DNA

SEQ ID NO: 56790 - DNA, 120 bp, synthetic construct; identical to SEQ ID NO: 26836
  source 1..120: mol_type = other DNA

SEQ ID NO: 56791 - DNA, 120 bp, synthetic construct; identical to SEQ ID NO: 26837
  source 1..120: mol_type = other DNA

SEQ ID NO: 56792 - DNA, 120 bp, synthetic construct; identical to SEQ ID NO: 8158
  source 1..120: mol_type = other DNA

SEQ ID NO: 56793 - DNA, 120 bp, synthetic construct; identical to SEQ ID NO: 26839
  source 1..120: mol_type = other DNA

SEQ ID NO: 56794 - DNA, 120 bp, synthetic construct; identical to SEQ ID NO: 26840
  source 1..120: mol_type = other DNA

SEQ ID NO: 56795 - DNA, 120 bp, synthetic construct; identical to SEQ ID NO: 8159
  source 1..120: mol_type = other DNA

SEQ ID NO: 56796 - DNA, 120 bp, synthetic construct; identical to SEQ ID NO: 26842
  source 1..120: mol_type = other DNA

SEQ ID NO: 56797 - DNA, 120 bp, synthetic construct; identical to SEQ ID NO: 26843
  source 1..120: mol_type = other DNA

SEQ ID NO: 56798 - DNA, 120 bp, synthetic construct; identical to SEQ ID NO: 26844
  source 1..120: mol_type = other DNA

SEQ ID NO: 56799 - DNA, 120 bp, synthetic construct; identical to SEQ ID NO: 8160
  source 1..120: mol_type = other DNA

SEQ ID NO: 56800 - DNA, 120 bp, synthetic construct; identical to SEQ ID NO: 26846
  source 1..120: mol_type = other DNA

SEQ ID NO: 56801 - DNA, 120 bp, synthetic construct; identical to SEQ ID NO: 26847
  source 1..120: mol_type = other DNA

SEQ ID NO: 56802 - DNA, 120 bp, synthetic construct; identical to SEQ ID NO: 26848
  source 1..120: mol_type = other DNA

SEQ ID NO: 56803 - DNA, 120 bp, synthetic construct; identical to SEQ ID NO: 8161
  source 1..120: mol_type = other DNA

SEQ ID NO: 56804 - DNA, 120 bp, synthetic construct; identical to SEQ ID NO: 26850
  source 1..120: mol_type = other DNA

SEQ ID NO: 56805 - DNA, 120 bp, synthetic construct; identical to SEQ ID NO: 26851
  source 1..120: mol_type = other DNA

SEQ ID NO: 56806 - DNA, 120 bp, synthetic construct; identical to SEQ ID NO: 26852
  source 1..120: mol_type = other DNA

SEQ ID NO: 56807 - DNA, 120 bp, synthetic construct; identical to SEQ ID NO: 8162
  source 1..120: mol_type = other DNA

SEQ ID NO: 56808 - DNA, 120 bp, synthetic construct; identical to SEQ ID NO: 26854
  source 1..120: mol_type = other DNA

SEQ ID NO: 56809 - DNA, 120 bp, synthetic construct; identical to SEQ ID NO: 26855
  source 1..120: mol_type = other DNA

SEQ ID NO: 56810 - DNA, 120 bp, synthetic construct; identical to SEQ ID NO: 26856
  source 1..120: mol_type = other DNA

SEQ ID NO: 56811 - DNA, 120 bp, synthetic construct; identical to SEQ ID NO: 8163
  source 1..120: mol_type = other DNA

SEQ ID NO: 56812 - DNA, 120 bp, synthetic construct; identical to SEQ ID NO: 26858
  source 1..120: mol_type = other DNA

SEQ ID NO: 56813 - DNA, 120 bp, synthetic construct; identical to SEQ ID NO: 26859
  source 1..120: mol_type = other DNA

SEQ ID NO: 56814 - DNA, 120 bp, synthetic construct; identical to SEQ ID NO: 26860
  source 1..120: mol_type = other DNA

SEQ ID NO: 56815 - DNA, 120 bp, synthetic construct; identical to SEQ ID NO: 8164
  source 1..120: mol_type = other DNA

SEQ ID NO: 56816 - DNA, 120 bp, synthetic construct; identical to SEQ ID NO: 26862
  source 1..120: mol_type = other DNA

SEQ ID NO: 56817 - DNA, 120 bp, synthetic construct; identical to SEQ ID NO: 26863
  source 1..120: mol_type = other DNA

SEQ ID NO: 56818 - DNA, 120 bp, synthetic construct; identical to SEQ ID NO: 26864
  source 1..120: mol_type = other DNA

SEQ ID NO: 56819 - DNA, 120 bp, synthetic construct; identical to SEQ ID NO: 26865
  source 1..120: mol_type = other DNA

SEQ ID NO: 56820 - DNA, 120 bp, synthetic construct; identical to SEQ ID NO: 8165
  source 1..120: mol_type = other DNA

SEQ ID NO: 56821 - DNA, 120 bp, synthetic construct; identical to SEQ ID NO: 26867
  source 1..120: mol_type = other DNA

SEQ ID NO: 56822 - DNA, 120 bp, synthetic construct; identical to SEQ ID NO: 26868
  source 1..120: mol_type = other DNA

SEQ ID NO: 56823 - DNA, 120 bp, synthetic construct; identical to SEQ ID NO: 26869
  source 1..120: mol_type = other DNA

SEQ ID NO: 56824 - DNA, 120 bp, synthetic construct; identical to SEQ ID NO: 8166
  source 1..120: mol_type = other DNA

SEQ ID NO: 56825 - DNA, 120 bp, synthetic construct; identical to SEQ ID NO: 26871
  source 1..120: mol_type = other DNA

SEQ ID NO: 56826 - DNA, 120 bp, synthetic construct; identical to SEQ ID NO: 26872
  source 1..120: mol_type = other DNA

SEQ ID NO: 56827 - DNA, 120 bp, synthetic construct; identical to SEQ ID NO: 26873
  source 1..120: mol_type = other DNA

SEQ ID NO: 56828 - DNA, 120 bp, synthetic construct; identical to SEQ ID NO: 26874
  source 1..120: mol_type = other DNA

SEQ ID NO: 56829 - DNA, 120 bp, synthetic construct; identical to SEQ ID NO: 8167
  source 1..120: mol_type = other DNA

SEQ ID NO: 56830 - DNA, 120 bp, synthetic construct; identical to SEQ ID NO: 26876
  source 1..120: mol_type = other DNA

SEQ ID NO: 56831 - DNA, 120 bp, synthetic construct; identical to SEQ ID NO: 26877
  source 1..120: mol_type = other DNA

SEQ ID NO: 56832 - DNA, 120 bp, synthetic construct; identical to SEQ ID NO: 8168
  source 1..120: mol_type = other DNA

SEQ ID NO: 56833 - DNA, 120 bp, synthetic construct; identical to SEQ ID NO: 26879
  source 1..120: mol_type = other DNA

SEQ ID NO: 56834 - DNA, 120 bp, synthetic construct; identical to SEQ ID NO: 26880
  source 1..120: mol_type = other DNA

SEQ ID NO: 56835 - DNA, 120 bp, synthetic construct; identical to SEQ ID NO: 26881
  source 1..120: mol_type = other DNA

SEQ ID NO: 56836 - DNA, 120 bp, synthetic construct; identical to SEQ ID NO: 8169
  source 1..120: mol_type = other DNA

SEQ ID NO: 56837 - DNA, 120 bp, synthetic construct; identical to SEQ ID NO: 26883
  source 1..120: mol_type = other DNA

SEQ ID NO: 56838 - DNA, 120 bp, synthetic construct; identical to SEQ ID NO: 26884
  source 1..120: mol_type = other DNA

SEQ ID NO: 56839 - DNA, 120 bp, synthetic construct; identical to SEQ ID NO: 26885
  source 1..120: mol_type = other DNA

SEQ ID NO: 56840 - DNA, 120 bp, synthetic construct; identical to SEQ ID NO: 26886
  source 1..120: mol_type = other DNA

SEQ ID NO: 56841 - DNA, 120 bp, synthetic construct; identical to SEQ ID NO: 8170
  source 1..120: mol_type = other DNA

SEQ ID NO: 56842 - DNA, 120 bp, synthetic construct; identical to SEQ ID NO: 26888
  source 1..120: mol_type = other DNA

SEQ ID NO: 56843 - DNA, 120 bp, synthetic construct; identical to SEQ ID NO: 26889
  source 1..120: mol_type = other DNA

SEQ ID NO: 56844 - DNA, 120 bp, synthetic construct; identical to SEQ ID NO: 26890
  source 1..120: mol_type = other DNA

SEQ ID NO: 56845 - DNA, 120 bp, synthetic construct; identical to SEQ ID NO: 8171
  source 1..120: mol_type = other DNA

SEQ ID NO: 56846 - DNA, 120 bp, synthetic construct; identical to SEQ ID NO: 26892
  source 1..120: mol_type = other DNA

SEQ ID NO: 56847 - DNA, 120 bp, synthetic construct; identical to SEQ ID NO: 26893
  source 1..120: mol_type = other DNA

SEQ ID NO: 56848 - DNA, 120 bp, synthetic construct; identical to SEQ ID NO: 26894
  source 1..120: mol_type = other DNA

SEQ ID NO: 56849 - DNA, 120 bp, synthetic construct; identical to SEQ ID NO: 26895
  source 1..120: mol_type = other DNA

SEQ ID NO: 56850 - DNA, 120 bp, synthetic construct; identical to SEQ ID NO: 8172
  source 1..120: mol_type = other DNA

SEQ ID NO: 56851 - DNA, 120 bp, synthetic construct; identical to SEQ ID NO: 26897
  source 1..120: mol_type = other DNA

SEQ ID NO: 56852 - DNA, 120 bp, synthetic construct; identical to SEQ ID NO: 26898
  source 1..120: mol_type = other DNA

SEQ ID NO: 56853 - DNA, 120 bp, synthetic construct; identical to SEQ ID NO: 8173
  source 1..120: mol_type = other DNA

SEQ ID NO: 56854 - DNA, 120 bp, synthetic construct; identical to SEQ ID NO: 26900
  source 1..120: mol_type = other DNA

SEQ ID NO: 56855 - DNA, 120 bp, synthetic construct; identical to SEQ ID NO: 26901
  source 1..120: mol_type = other DNA

SEQ ID NO: 56856 - DNA, 120 bp, synthetic construct; identical to SEQ ID NO: 26902
  source 1..120: mol_type = other DNA

SEQ ID NO: 56857 - DNA, 120 bp, synthetic construct; identical to SEQ ID NO: 8174
  source 1..120: mol_type = other DNA

SEQ ID NO: 56858 - DNA, 120 bp, synthetic construct; identical to SEQ ID NO: 26904
  source 1..120: mol_type = other DNA

SEQ ID NO: 56859 - DNA, 120 bp, synthetic construct; identical to SEQ ID NO: 26905
  source 1..120: mol_type = other DNA

SEQ ID NO: 56860 - DNA, 120 bp, synthetic construct; identical to SEQ ID NO: 26906
  source 1..120: mol_type = other DNA

SEQ ID NO: 56861 - DNA, 120 bp, synthetic construct; identical to SEQ ID NO: 8175
  source 1..120: mol_type = other DNA

SEQ ID NO: 56862 - DNA, 120 bp, synthetic construct; identical to SEQ ID NO: 26908
  source 1..120: mol_type = other DNA

SEQ ID NO: 56863 - DNA, 120 bp, synthetic construct; identical to SEQ ID NO: 26909
  source 1..120: mol_type = other DNA

SEQ ID NO: 56864 - DNA, 120 bp, synthetic construct; identical to SEQ ID NO: 26910
  source 1..120: mol_type = other DNA

SEQ ID NO: 56865 - DNA, 120 bp, synthetic construct; identical to SEQ ID NO: 8176
  source 1..120: mol_type = other DNA

SEQ ID NO: 56866 - DNA, 120 bp, synthetic construct; identical to SEQ ID NO: 1147
  source 1..120: mol_type = other DNA

SEQ ID NO: 56867 - DNA, 120 bp, synthetic construct; identical to SEQ ID NO: 26913
  source 1..120: mol_type = other DNA

SEQ ID NO: 56868 - DNA, 120 bp, synthetic construct; identical to SEQ ID NO: 26914
  source 1..120: mol_type = other DNA

SEQ ID NO: 56869 - DNA, 120 bp, synthetic construct; identical to SEQ ID NO: 26915
  source 1..120: mol_type = other DNA

SEQ ID NO: 56870 - DNA, 120 bp, synthetic construct; identical to SEQ ID NO: 8177
  source 1..120: mol_type = other DNA

SEQ ID NO: 56871 - DNA, 120 bp, synthetic construct; identical to SEQ ID NO: 26917
  source 1..120: mol_type = other DNA

SEQ ID NO: 56872 - DNA, 120 bp, synthetic construct; identical to SEQ ID NO: 26918
  source 1..120: mol_type = other DNA

SEQ ID NO: 56873 - DNA, 120 bp, synthetic construct; identical to SEQ ID NO: 26919
  source 1..120: mol_type = other DNA

SEQ ID NO: 56874 - DNA, 120 bp, synthetic construct; identical to SEQ ID NO: 8178
  source 1..120: mol_type = other DNA

SEQ ID NO: 56875 - DNA, 120 bp, synthetic construct; identical to SEQ ID NO: 26921
  source 1..120: mol_type = other DNA

SEQ ID NO: 56876 - DNA, 120 bp, synthetic construct; identical to SEQ ID NO: 26922
  source 1..120: mol_type = other DNA

SEQ ID NO: 56877 - DNA, 120 bp, synthetic construct; identical to SEQ ID NO: 26923
  source 1..120: mol_type = other DNA

SEQ ID NO: 56878 - DNA, 120 bp, synthetic construct; identical to SEQ ID NO: 8179
  source 1..120: mol_type = other DNA

SEQ ID NO: 56879 - DNA, 120 bp, synthetic construct; identical to SEQ ID NO: 26925
  source 1..120: mol_type = other DNA

SEQ ID NO: 56880 - DNA, 120 bp, synthetic construct; identical to SEQ ID NO: 26926
  source 1..120: mol_type = other DNA

SEQ ID NO: 56881 - DNA, 120 bp, synthetic construct; identical to SEQ ID NO: 8180
  source 1..120: mol_type = other DNA

SEQ ID NO: 56882 - DNA, 120 bp, synthetic construct; identical to SEQ ID NO: 26928
  source 1..120: mol_type = other DNA

SEQ ID NO: 56883 - DNA, 120 bp, synthetic construct; identical to SEQ ID NO: 26929
  source 1..120: mol_type = other DNA

SEQ ID NO: 56884 - DNA, 120 bp, synthetic construct; identical to SEQ ID NO: 26930
  source 1..120: mol_type = other DNA

SEQ ID NO: 56885 - DNA, 120 bp, synthetic construct; identical to SEQ ID NO: 26931
  source 1..120: mol_type = other DNA

SEQ ID NO: 56886 - DNA, 120 bp, synthetic construct; identical to SEQ ID NO: 8181
  source 1..120: mol_type = other DNA

SEQ ID NO: 56887 - DNA, 120 bp, synthetic construct; identical to SEQ ID NO: 26933
  source 1..120: mol_type = other DNA

SEQ ID NO: 56888 - DNA, 120 bp, synthetic construct; identical to SEQ ID NO: 26934
  source 1..120: mol_type = other DNA

SEQ ID NO: 56889 - DNA, 120 bp, synthetic construct; identical to SEQ ID NO: 26935
  source 1..120: mol_type = other DNA

SEQ ID NO: 56890 - DNA, 120 bp, synthetic construct; identical to SEQ ID NO: 8182
  source 1..120: mol_type = other DNA

SEQ ID NO: 56891 - DNA, 120 bp, synthetic construct; identical to SEQ ID NO: 26937
  source 1..120: mol_type = other DNA

SEQ ID NO: 56892 - DNA, 120 bp, synthetic construct; identical to SEQ ID NO: 26938
  source 1..120: mol_type = other DNA

SEQ ID NO: 56893 - DNA, 120 bp, synthetic construct; identical to SEQ ID NO: 26939
  source 1..120: mol_type = other DNA

SEQ ID NO: 56894 - DNA, 120 bp, synthetic construct; identical to SEQ ID NO: 8183
  source 1..120: mol_type = other DNA

SEQ ID NO: 56895 - DNA, 120 bp, synthetic construct; identical to SEQ ID NO: 26941
  source 1..120: mol_type = other DNA

SEQ ID NO: 56896 - DNA, 120 bp, synthetic construct; identical to SEQ ID NO: 26942
  source 1..120: mol_type = other DNA

SEQ ID NO: 56897 - DNA, 120 bp, synthetic construct; identical to SEQ ID NO: 26943
  source 1..120: mol_type = other DNA

SEQ ID NO: 56898 - DNA, 120 bp, synthetic construct; identical to SEQ ID NO: 8184
  source 1..120: mol_type = other DNA

SEQ ID NO: 56899 - DNA, 120 bp, synthetic construct; identical to SEQ ID NO: 26945
  source 1..120: mol_type = other DNA

SEQ ID NO: 56900 - DNA, 120 bp, synthetic construct; identical to SEQ ID NO: 26946
  source 1..120: mol_type = other DNA

SEQ ID NO: 56901 - DNA, 120 bp, synthetic construct; identical to SEQ ID NO: 8185
  source 1..120: mol_type = other DNA

SEQ ID NO: 56902 - DNA, 120 bp, synthetic construct; identical to SEQ ID NO: 26948
  source 1..120: mol_type = other DNA

SEQ ID NO: 56903 - DNA, 120 bp, synthetic construct; identical to SEQ ID NO: 26949
  source 1..120: mol_type = other DNA

SEQ ID NO: 56904 - DNA, 120 bp, synthetic construct; identical to SEQ ID NO: 26950
  source 1..120: mol_type = other DNA

SEQ ID NO: 56905 - DNA, 120 bp, synthetic construct; identical to SEQ ID NO: 26951
  source 1..120: mol_type = other DNA

SEQ ID NO: 56906 - DNA, 120 bp, synthetic construct; identical to SEQ ID NO: 8186
  source 1..120: mol_type = other DNA

SEQ ID NO: 56907 - DNA, 120 bp, synthetic construct; identical to SEQ ID NO: 26953
  source 1..120: mol_type = other DNA

SEQ ID NO: 56908 - DNA, 120 bp, synthetic construct; identical to SEQ ID NO: 26954
  source 1..120: mol_type = other DNA

SEQ ID NO: 56909 - DNA, 120 bp, synthetic construct; identical to SEQ ID NO: 8187
  source 1..120: mol_type = other DNA

SEQ ID NO: 56910 - DNA, 120 bp, synthetic construct; identical to SEQ ID NO: 26956
  source 1..120: mol_type = other DNA

SEQ ID NO: 56911 - DNA, 120 bp, synthetic construct; identical to SEQ ID NO: 26957
  source 1..120: mol_type = other DNA

SEQ ID NO: 56912 - DNA, 120 bp, synthetic construct; identical to SEQ ID NO: 26958
  source 1..120: mol_type = other DNA

SEQ ID NO: 56913 - DNA, 120 bp, synthetic construct; identical to SEQ ID NO: 8188
  source 1..120: mol_type = other DNA

SEQ ID NO: 56914 - DNA, 120 bp, synthetic construct; identical to SEQ ID NO: 26960
  source 1..120: mol_type = other DNA

SEQ ID NO: 56915 - DNA, 120 bp, synthetic construct; identical to SEQ ID NO: 26961
  source 1..120: mol_type = other DNA

SEQ ID NO: 56916 - DNA, 120 bp, synthetic construct; identical to SEQ ID NO: 26962
  source 1..120: mol_type = other DNA

SEQ ID NO: 56917 - DNA, 120 bp, synthetic construct; identical to SEQ ID NO: 26963
  source 1..120: mol_type = other DNA

SEQ ID NO: 56918 - DNA, 120 bp, synthetic construct; identical to SEQ ID NO: 8189
  source 1..120: mol_type = other DNA

SEQ ID NO: 56919 - DNA, 120 bp, synthetic construct; identical to SEQ ID NO: 26965
  source 1..120: mol_type = other DNA

SEQ ID NO: 56920 - DNA, 120 bp, synthetic construct; identical to SEQ ID NO: 26966
  source 1..120: mol_type = other DNA

SEQ ID NO: 56921 - DNA, 120 bp, synthetic construct; identical to SEQ ID NO: 26967
  source 1..120: mol_type = other DNA

SEQ ID NO: 56922 - DNA, 120 bp, synthetic construct; identical to SEQ ID NO: 8190
  source 1..120: mol_type = other DNA

SEQ ID NO: 56923 - DNA, 120 bp, synthetic construct; identical to SEQ ID NO: 26969
  source 1..120: mol_type = other DNA

SEQ ID NO: 56924 - DNA, 120 bp, synthetic construct; identical to SEQ ID NO: 26970
  source 1..120: mol_type = other DNA

SEQ ID NO: 56925 - DNA, 120 bp, synthetic construct; identical to SEQ ID NO: 8191
  source 1..120: mol_type = other DNA

SEQ ID NO: 56926 - DNA, 120 bp, synthetic construct; identical to SEQ ID NO: 26972
  source 1..120: mol_type = other DNA

SEQ ID NO: 56927 - DNA, 120 bp, synthetic construct; identical to SEQ ID NO: 26973
  source 1..120: mol_type = other DNA

SEQ ID NO: 56928 - DNA, 120 bp, synthetic construct; identical to SEQ ID NO: 26974
  source 1..120: mol_type = other DNA

SEQ ID NO: 56929 - DNA, 120 bp, synthetic construct; identical to SEQ ID NO: 8192
  source 1..120: mol_type = other DNA

SEQ ID NO: 56930 - DNA, 120 bp, synthetic construct; identical to SEQ ID NO: 26976
  source 1..120: mol_type = other DNA

SEQ ID NO: 56931 - DNA, 120 bp, synthetic construct; identical to SEQ ID NO: 26977
  source 1..120: mol_type = other DNA

SEQ ID NO: 56932 - DNA, 120 bp, synthetic construct; identical to SEQ ID NO: 26978
  source 1..120: mol_type = other DNA

SEQ ID NO: 56933 - DNA, 120 bp, synthetic construct; identical to SEQ ID NO: 26979
  source 1..120: mol_type = other DNA

SEQ ID NO: 56934 - DNA, 120 bp, synthetic construct; identical to SEQ ID NO: 8193
  source 1..120: mol_type = other DNA

SEQ ID NO: 56935 - DNA, 120 bp, synthetic construct; identical to SEQ ID NO: 26981
  source 1..120: mol_type = other DNA

SEQ ID NO: 56936 - DNA, 120 bp, synthetic construct; identical to SEQ ID NO: 26982
  source 1..120: mol_type = other DNA

SEQ ID NO: 56937 - DNA, 120 bp, synthetic construct; identical to SEQ ID NO: 8194
  source 1..120: mol_type = other DNA

SEQ ID NO: 56938 - DNA, 120 bp, synthetic construct; identical to SEQ ID NO: 26984
  source 1..120: mol_type = other DNA

SEQ ID NO: 56939 - DNA, 120 bp, synthetic construct; identical to SEQ ID NO: 26985
  source 1..120: mol_type = other DNA

SEQ ID NO: 56940 - DNA, 120 bp, synthetic construct; identical to SEQ ID NO: 26986
  source 1..120: mol_type = other DNA

SEQ ID NO: 56941 - DNA, 120 bp, synthetic construct; identical to SEQ ID NO: 8195
  source 1..120: mol_type = other DNA

SEQ ID NO: 56942 - DNA, 120 bp, synthetic construct; identical to SEQ ID NO: 26988
  source 1..120: mol_type = other DNA

SEQ ID NO: 56943 - DNA, 120 bp, synthetic construct; identical to SEQ ID NO: 26989
  source 1..120: mol_type = other DNA

SEQ ID NO: 56944 - DNA, 120 bp, synthetic construct; identical to SEQ ID NO: 26990
  source 1..120: mol_type = other DNA

SEQ ID NO: 56945 - DNA, 120 bp, synthetic construct; identical to SEQ ID NO: 8196
  source 1..120: mol_type = other DNA

SEQ ID NO: 56946 - DNA, 120 bp, synthetic construct; identical to SEQ ID NO: 26992
  source 1..120: mol_type = other DNA

SEQ ID NO: 56947 - DNA, 120 bp, synthetic construct; identical to SEQ ID NO: 26993
  source 1..120: mol_type = other DNA

SEQ ID NO: 56948 - DNA, 120 bp, synthetic construct; identical to SEQ ID NO: 26994
  source 1..120: mol_type = other DNA

SEQ ID NO: 56949 - DNA, 120 bp, synthetic construct; identical to SEQ ID NO: 8197
  source 1..120: mol_type = other DNA

SEQ ID NO: 56950 - DNA, 120 bp, synthetic construct; identical to SEQ ID NO: 26996
  source 1..120: mol_type = other DNA

SEQ ID NO: 56951 - DNA, 120 bp, synthetic construct; identical to SEQ ID NO: 26997
  source 1..120: mol_type = other DNA

SEQ ID NO: 56952 - DNA, 120 bp, synthetic construct; identical to SEQ ID NO: 26998
  source 1..120: mol_type = other DNA

SEQ ID NO: 56953 - DNA, 120 bp, synthetic construct; identical to SEQ ID NO: 8198
  source 1..120: mol_type = other DNA

SEQ ID NO: 56954 - DNA, 120 bp, synthetic construct; identical to SEQ ID NO: 27000
  source 1..120: mol_type = other DNA

SEQ ID NO: 56955 - DNA, 120 bp, synthetic construct; identical to SEQ ID NO: 27001
  source 1..120: mol_type = other DNA

SEQ ID NO: 56956 - DNA, 120 bp, synthetic construct; identical to SEQ ID NO: 8199
  source 1..120: mol_type = other DNA

SEQ ID NO: 56957 - DNA, 120 bp, synthetic construct; identical to SEQ ID NO: 27003
  source 1..120: mol_type = other DNA

SEQ ID NO: 56958 - DNA, 120 bp, synthetic construct; identical to SEQ ID NO: 27004
  source 1..120: mol_type = other DNA

SEQ ID NO: 56959 - DNA, 120 bp, synthetic construct; identical to SEQ ID NO: 27005
  source 1..120: mol_type = other DNA

SEQ ID NO: 56960 - DNA, 120 bp, synthetic construct; identical to SEQ ID NO: 27006
  source 1..120: mol_type = other DNA

SEQ ID NO: 56961 - DNA, 120 bp, synthetic construct; identical to SEQ ID NO: 8200
  source 1..120: mol_type = other DNA

SEQ ID NO: 56962 - DNA, 120 bp, synthetic construct; identical to SEQ ID NO: 27008
  source 1..120: mol_type = other DNA

SEQ ID NO: 56963 - DNA, 120 bp, synthetic construct; identical to SEQ ID NO: 27009
  source 1..120: mol_type = other DNA

SEQ ID NO: 56964 - DNA, 120 bp, synthetic construct; identical to SEQ ID NO: 8201
  source 1..120: mol_type = other DNA

SEQ ID NO: 56965 - DNA, 120 bp, synthetic construct; identical to SEQ ID NO: 27011
  source 1..120: mol_type = other DNA

SEQ ID NO: 56966 - DNA, 120 bp, synthetic construct; identical to SEQ ID NO: 27012
  source 1..120: mol_type = other DNA

SEQ ID NO: 56967 - DNA, 120 bp, synthetic construct; identical to SEQ ID NO: 27013
  source 1..120: mol_type = other DNA

SEQ ID NO: 56968 - DNA, 120 bp, synthetic construct; identical to SEQ ID NO: 8202
  source 1..120: mol_type = other DNA

SEQ ID NO: 56969 - DNA, 120 bp, synthetic construct; identical to SEQ ID NO: 27015
  source 1..120: mol_type = other DNA

SEQ ID NO: 56970 - DNA, 120 bp, synthetic construct; identical to SEQ ID NO: 27016
  source 1..120: mol_type = other DNA

SEQ ID NO: 56971 - DNA, 120 bp, synthetic construct; identical to SEQ ID NO: 27017
  source 1..120: mol_type = other DNA

SEQ ID NO: 56972 - DNA, 120 bp, synthetic construct; identical to SEQ ID NO: 27018
  source 1..120: mol_type = other DNA

SEQ ID NO: 56973 - DNA, 120 bp, synthetic construct; identical to SEQ ID NO: 8203
  source 1..120: mol_type = other DNA

SEQ ID NO: 56974 - DNA, 120 bp, synthetic construct; identical to SEQ ID NO: 27020
  source 1..120: mol_type = other DNA

SEQ ID NO: 56975 - DNA, 120 bp, synthetic construct; identical to SEQ ID NO: 27021
  source 1..120: mol_type = other DNA

SEQ ID NO: 56976 - DNA, 120 bp, synthetic construct; identical to SEQ ID NO: 1173
  source 1..120: mol_type = other DNA

SEQ ID NO: 56977 - DNA, 120 bp, synthetic construct; identical to SEQ ID NO: 27023
  source 1..120: mol_type = other DNA

SEQ ID NO: 56978 - DNA, 120 bp, synthetic construct; identical to SEQ ID NO: 27024
  source 1..120: mol_type = other DNA

SEQ ID NO: 56979 - DNA, 120 bp, synthetic construct; identical to SEQ ID NO: 27025
  source 1..120: mol_type = other DNA

SEQ ID NO: 56980 - DNA, 120 bp, synthetic construct; identical to SEQ ID NO: 1174
  source 1..120: mol_type = other DNA

SEQ ID NO: 56981 - DNA, 120 bp, synthetic construct; identical to SEQ ID NO: 27027
  source 1..120: mol_type = other DNA

SEQ ID NO: 56982 - DNA, 120 bp, synthetic construct; identical to SEQ ID NO: 27028
  source 1..120: mol_type = other DNA

SEQ ID NO: 56983 - DNA, 120 bp, synthetic construct; identical to SEQ ID NO: 27029
  source 1..120: mol_type = other DNA

SEQ ID NO: 56984 - DNA, 120 bp, synthetic construct; identical to SEQ ID NO: 27030
  source 1..120: mol_type = other DNA

SEQ ID NO: 56985 - DNA, 120 bp, synthetic construct; identical to SEQ ID NO: 8206
  source 1..120: mol_type = other DNA

SEQ ID NO: 56986 - DNA, 120 bp, synthetic construct; identical to SEQ ID NO: 27032
  source 1..120: mol_type = other DNA

SEQ ID NO: 56987 - DNA, 120 bp, synthetic construct; identical to SEQ ID NO: 27033
  source 1..120: mol_type = other DNA

SEQ ID NO: 56988 - DNA, 120 bp, synthetic construct; identical to SEQ ID NO: 8207
  source 1..120: mol_type = other DNA

SEQ ID NO: 56989 - DNA, 120 bp, synthetic construct; identical to SEQ ID NO: 27035
  source 1..120: mol_type = other DNA

SEQ ID NO: 56990 - DNA, 120 bp, synthetic construct; identical to SEQ ID NO: 27036
  source 1..120: mol_type = other DNA

SEQ ID NO: 56991 - DNA, 120 bp, synthetic construct; identical to SEQ ID NO: 27037
  source 1..120: mol_type = other DNA

SEQ ID NO: 56992 - DNA, 120 bp, synthetic construct; identical to SEQ ID NO: 27038
  source 1..120: mol_type = other DNA

SEQ ID NO: 56993 - DNA, 120 bp, synthetic construct; identical to SEQ ID NO: 1177
  source 1..120: mol_type = other DNA

SEQ ID NO: 56994 - DNA, 120 bp, synthetic construct; identical to SEQ ID NO: 27040
  source 1..120: mol_type = other DNA

SEQ ID NO: 56995 - DNA, 120 bp, synthetic construct; identical to SEQ ID NO: 27041
  source 1..120: mol_type = other DNA

SEQ ID NO: 56996 - DNA, 120 bp, synthetic construct; identical to SEQ ID NO: 27042
  source 1..120: mol_type = other DNA

SEQ ID NO: 56997 - DNA, 120 bp, synthetic construct; identical to SEQ ID NO: 8209
  source 1..120: mol_type = other DNA

SEQ ID NO: 56998 - DNA, 120 bp, synthetic construct; identical to SEQ ID NO: 27044
  source 1..120: mol_type = other DNA

SEQ ID NO: 56999 - DNA, 120 bp, synthetic construct; identical to SEQ ID NO: 27045
  source 1..120: mol_type = other DNA

SEQ ID NO: 57000 - DNA, 120 bp, synthetic construct; identical to SEQ ID NO: 27046
  source 1..120: mol_type = other DNA

SEQ ID NO: 57001 - DNA, 120 bp, synthetic construct; identical to SEQ ID NO: 27047
  source 1..120: mol_type = other DNA

SEQ ID NO: 57002 - DNA, 120 bp, synthetic construct; identical to SEQ ID NO: 8210
  source 1..120: mol_type = other DNA

SEQ ID NO: 57003 - DNA, 120 bp, synthetic construct; identical to SEQ ID NO: 27049
  source 1..120: mol_type = other DNA

SEQ ID NO: 57004 - DNA, 120 bp, synthetic construct; identical to SEQ ID NO: 27050
  source 1..120: mol_type = other DNA

SEQ ID NO: 57005 - DNA, 120 bp, synthetic construct; identical to SEQ ID NO: 8211
  source 1..120: mol_type = other DNA

SEQ ID NO: 57006 - DNA, 120 bp, synthetic construct; identical to SEQ ID NO: 27052
  source 1..120: mol_type = other DNA

SEQ ID NO: 57007 - DNA, 120 bp, synthetic construct; identical to SEQ ID NO: 1180
  source 1..120: mol_type = other DNA

SEQ ID NO: 57008 - DNA, 120 bp, synthetic construct; identical to SEQ ID NO: 27054
  source 1..120: mol_type = other DNA

SEQ ID NO: 57009 - DNA, 120 bp, synthetic construct; identical to SEQ ID NO: 8212
  source 1..120: mol_type = other DNA

SEQ ID NO: 57010 - DNA, 120 bp, synthetic construct; identical to SEQ ID NO: 27056
  source 1..120: mol_type = other DNA

SEQ ID NO: 57011 - DNA, 120 bp, synthetic construct; identical to SEQ ID NO: 27057
  source 1..120: mol_type = other DNA

SEQ ID NO: 57012 - DNA, 120 bp, synthetic construct; identical to SEQ ID NO: 27058
  source 1..120: mol_type = other DNA

SEQ ID NO: 57013 - DNA, 120 bp, synthetic construct; identical to SEQ ID NO: 27059
  source 1..120: mol_type = other DNA

SEQ ID NO: 57014 - DNA, 120 bp, synthetic construct; identical to SEQ ID NO: 8213
  source 1..120: mol_type = other DNA

SEQ ID NO: 57015 - DNA, 120 bp, synthetic construct; identical to SEQ ID NO: 27061
  source 1..120: mol_type = other DNA

SEQ ID NO: 57016 - DNA, 120 bp, synthetic construct; identical to SEQ ID NO: 27062
  source 1..120: mol_type = other DNA

SEQ ID NO: 57017 - DNA, 120 bp, synthetic construct; identical to SEQ ID NO: 27063
  source 1..120: mol_type = other DNA

SEQ ID NO: 57018 - DNA, 120 bp, synthetic construct; identical to SEQ ID NO: 8214
  source 1..120: mol_type = other DNA

SEQ ID NO: 57019 - DNA, 120 bp, synthetic construct; identical to SEQ ID NO: 27065
  source 1..120: mol_type = other DNA

SEQ ID NO: 57020 - DNA, 120 bp, synthetic construct; identical to SEQ ID NO: 27066
  source 1..120: mol_type = other DNA

SEQ ID NO: 57021 - DNA, 120 bp, synthetic construct; identical to SEQ ID NO: 8215
  source 1..120: mol_type = other DNA

SEQ ID NO: 57022 - DNA, 120 bp, synthetic construct; identical to SEQ ID NO: 27068
  source 1..120: mol_type = other DNA

SEQ ID NO: 57023 - DNA, 120 bp, synthetic construct; identical to SEQ ID NO: 27069
  source 1..120: mol_type = other DNA

SEQ ID NO: 57024 - DNA, 120 bp, synthetic construct; identical to SEQ ID NO: 27070
  source 1..120: mol_type = other DNA

SEQ ID NO: 57025 - DNA, 120 bp, synthetic construct; identical to SEQ ID NO: 8216
  source 1..120: mol_type = other DNA

SEQ ID NO: 57026 - DNA, 120 bp, synthetic construct; identical to SEQ ID NO: 27072
  source 1..120: mol_type = other DNA

SEQ ID NO: 57027 - DNA, 120 bp, synthetic construct; identical to SEQ ID NO: 27073
  source 1..120: mol_type = other DNA

SEQ ID NO: 57028 - DNA, 120 bp, synthetic construct; identical to SEQ ID NO: 27074
  source 1..120: mol_type = other DNA

SEQ ID NO: 57029 - DNA, 120 bp, synthetic construct; identical to SEQ ID NO: 8217
  source 1..120: mol_type = other DNA

SEQ ID NO: 57030 - DNA, 120 bp, synthetic construct; identical to SEQ ID NO: 27076
  source 1..120: mol_type = other DNA

SEQ ID NO: 57031 - DNA, 120 bp, synthetic construct; identical to SEQ ID NO: 27077
  source 1..120: mol_type = other DNA

SEQ ID NO: 57032 - DNA, 120 bp, synthetic construct; identical to SEQ ID NO: 27078
  source 1..120: mol_type = other DNA

SEQ ID NO: 57033 - DNA, 120 bp, synthetic construct; identical to SEQ ID NO: 8218
  source 1..120: mol_type = other DNA

SEQ ID NO: 57034 - DNA, 120 bp, synthetic construct; identical to SEQ ID NO: 27080
  source 1..120: mol_type = other DNA

SEQ ID NO: 57035 - DNA, 120 bp, synthetic construct; identical to SEQ ID NO: 27081
  source 1..120: mol_type = other DNA

SEQ ID NO: 57036 - DNA, 120 bp, synthetic construct; identical to SEQ ID NO: 27082
  source 1..120: mol_type = other DNA

SEQ ID NO: 57037 - DNA, 120 bp, synthetic construct; identical to SEQ ID NO: 8219
  source 1..120: mol_type = other DNA

SEQ ID NO: 57038 - DNA, 120 bp, synthetic construct; identical to SEQ ID NO: 27084
  source 1..120: mol_type = other DNA

SEQ ID NO: 57039 - DNA, 120 bp, synthetic construct; identical to SEQ ID NO: 27085
  source 1..120: mol_type = other DNA

SEQ ID NO: 57040 - DNA, 120 bp, synthetic construct; identical to SEQ ID NO: 27086
  source 1..120: mol_type = other DNA

SEQ ID NO: 57041 - DNA, 120 bp, synthetic construct; identical to SEQ ID NO: 8220
  source 1..120: mol_type = other DNA

SEQ ID NO: 57042 - DNA, 120 bp, synthetic construct; identical to SEQ ID NO: 27088
  source 1..120: mol_type = other DNA

SEQ ID NO: 57043 - DNA, 120 bp, synthetic construct; identical to SEQ ID NO: 27089
  source 1..120: mol_type = other DNA

SEQ ID NO: 57044 - DNA, 120 bp, synthetic construct; identical to SEQ ID NO: 27090
  source 1..120: mol_type = other DNA

SEQ ID NO: 57045 - DNA, 120 bp, synthetic construct; identical to SEQ ID NO: 27091
  source 1..120: mol_type = other DNA

SEQ ID NO: 57046 - DNA, 120 bp, synthetic construct; identical to SEQ ID NO: 8221
  source 1..120: mol_type = other DNA

SEQ ID NO: 57047 - DNA, 120 bp, synthetic construct; identical to SEQ ID NO: 27093
  source 1..120: mol_type = other DNA

SEQ ID NO: 57048 - DNA, 120 bp, synthetic construct; identical to SEQ ID NO: 27094
  source 1..120: mol_type = other DNA

SEQ ID NO: 57049 - DNA, 120 bp, synthetic construct; identical to SEQ ID NO: 27095
  source 1..120: mol_type = other DNA

SEQ ID NO: 57050 - DNA, 120 bp, synthetic construct; identical to SEQ ID NO: 8222
  source 1..120: mol_type = other DNA

SEQ ID NO: 57051 - DNA, 120 bp, synthetic construct; identical to SEQ ID NO: 27097
  source 1..120: mol_type = other DNA

SEQ ID NO: 57052 - DNA, 120 bp, synthetic construct; identical to SEQ ID NO: 27098
  source 1..120: mol_type = other DNA

SEQ ID NO: 57053 - DNA, 120 bp, synthetic construct; identical to SEQ ID NO: 8223
  source 1..120: mol_type = other DNA

SEQ ID NO: 57054 - DNA, 120 bp, synthetic construct; identical to SEQ ID NO: 27100
  source 1..120: mol_type = other DNA

SEQ ID NO: 57055 - DNA, 120 bp, synthetic construct; identical to SEQ ID NO: 27101
  source 1..120: mol_type = other DNA

SEQ ID NO: 57056 - DNA, 120 bp, synthetic construct; identical to SEQ ID NO: 27102
  source 1..120: mol_type = other DNA

SEQ ID NO: 57057 - DNA, 120 bp, synthetic construct; identical to SEQ ID NO: 8224
  source 1..120: mol_type = other DNA

SEQ ID NO: 57058 - DNA, 120 bp, synthetic construct; identical to SEQ ID NO: 27104
  source 1..120: mol_type = other DNA

SEQ ID NO: 57059 - DNA, 120 bp, synthetic construct; identical to SEQ ID NO: 27105
  source 1..120: mol_type = other DNA

SEQ ID NO: 57060 - DNA, 120 bp, synthetic construct; identical to SEQ ID NO: 27106
  source 1..120: mol_type = other DNA

SEQ ID NO: 57061 - DNA, 120 bp, synthetic construct; identical to SEQ ID NO: 27107
  source 1..120: mol_type = other DNA

SEQ ID NO: 57062 - DNA, 120 bp, synthetic construct; identical to SEQ ID NO: 8225
  source 1..120: mol_type = other DNA

SEQ ID NO: 57063 - DNA, 120 bp, synthetic construct; identical to SEQ ID NO: 27109
  source 1..120: mol_type = other DNA

SEQ ID NO: 57064 - DNA, 120 bp, synthetic construct; identical to SEQ ID NO: 27110
  source 1..120: mol_type = other DNA

SEQ ID NO: 57065 - DNA, 120 bp, synthetic construct; identical to SEQ ID NO: 27111
  source 1..120: mol_type = other DNA

SEQ ID NO: 57066 - DNA, 120 bp, synthetic construct; identical to SEQ ID NO: 8226
  source 1..120: mol_type = other DNA

SEQ ID NO: 57067 - DNA, 120 bp, synthetic construct; identical to SEQ ID NO: 1194
  source 1..120: mol_type = other DNA

SEQ ID NO: 57068 - DNA, 120 bp, synthetic construct; identical to SEQ ID NO: 27114
  source 1..120: mol_type = other DNA

SEQ ID NO: 57069 - DNA, 120 bp, synthetic construct; identical to SEQ ID NO: 27115
  source 1..120: mol_type = other DNA

SEQ ID NO: 57070 - DNA, 120 bp, synthetic construct; identical to SEQ ID NO: 8227
  source 1..120: mol_type = other DNA

SEQ ID NO: 57071 - DNA, 120 bp, synthetic construct; identical to SEQ ID NO: 27117
  source 1..120: mol_type = other DNA

SEQ ID NO: 57072 - DNA, 120 bp, synthetic construct; identical to SEQ ID NO: 27118
  source 1..120: mol_type = other DNA

SEQ ID NO: 57073 - DNA, 120 bp, synthetic construct; identical to SEQ ID NO: 27119
  source 1..120: mol_type = other DNA

SEQ ID NO: 57074 - DNA, 120 bp, synthetic construct; identical to SEQ ID NO: 8228
  source 1..120: mol_type = other DNA

SEQ ID NO: 57075 - DNA, 120 bp, synthetic construct; identical to SEQ ID NO: 27121
  source 1..120: mol_type = other DNA

SEQ ID NO: 57076 - DNA, 120 bp, synthetic construct; identical to SEQ ID NO: 27122
  source 1..120: mol_type = other DNA

SEQ ID NO: 57077 - DNA, 120 bp, synthetic construct; identical to SEQ ID NO: 27123
  source 1..120: mol_type = other DNA

SEQ ID NO: 57078 - DNA, 120 bp, synthetic construct; identical to SEQ ID NO: 8229
  source 1..120: mol_type = other DNA

SEQ ID NO: 57079 - DNA, 120 bp, synthetic construct; identical to SEQ ID NO: 27125
  source 1..120: mol_type = other DNA

SEQ ID NO: 57080 - DNA, 120 bp, synthetic construct; identical to SEQ ID NO: 27126
  source 1..120: mol_type = other DNA

SEQ ID NO: 57081 - DNA, 120 bp, synthetic construct; identical to SEQ ID NO: 27127
  source 1..120: mol_type = other DNA

SEQ ID NO: 57082 - DNA, 120 bp, synthetic construct; identical to SEQ ID NO: 8230
  source 1..120: mol_type = other DNA

SEQ ID NO: 57083 - DNA, 120 bp, synthetic construct; identical to SEQ ID NO: 27129
  source 1..120: mol_type = other DNA

SEQ ID NO: 57084 - DNA, 120 bp, synthetic construct; identical to SEQ ID NO: 27130
  source 1..120: mol_type = other DNA

SEQ ID NO: 57085 - DNA, 120 bp, synthetic construct; identical to SEQ ID NO: 8231
  source 1..120: mol_type = other DNA

SEQ ID NO: 57086 - DNA, 120 bp, synthetic construct; identical to SEQ ID NO: 27132
  source 1..120: mol_type = other DNA

SEQ ID NO: 57087 - DNA, 120 bp, synthetic construct; identical to SEQ ID NO: 27133
  source 1..120: mol_type = other DNA

SEQ ID NO: 57088 - DNA, 120 bp, synthetic construct; identical to SEQ ID NO: 27134
  source 1..120: mol_type = other DNA

SEQ ID NO: 57089 - DNA, 120 bp, synthetic construct; identical to SEQ ID NO: 8232
  source 1..120: mol_type = other DNA

SEQ ID NO: 57090 - DNA, 120 bp, synthetic construct; identical to SEQ ID NO: 27136
  source 1..120: mol_type = other DNA

SEQ ID NO: 57091 - DNA, 120 bp, synthetic construct; identical to SEQ ID NO: 27137
  source 1..120: mol_type = other DNA

SEQ ID NO: 57092 - DNA, 120 bp, synthetic construct; identical to SEQ ID NO: 27138
  source 1..120: mol_type = other DNA

SEQ ID NO: 57093 - DNA, 120 bp, synthetic construct; identical to SEQ ID NO: 8233
  source 1..120: mol_type = other DNA

SEQ ID NO: 57094 - DNA, 120 bp, synthetic construct; identical to SEQ ID NO: 27140
  source 1..120: mol_type = other DNA

SEQ ID NO: 57095 - DNA, 120 bp, synthetic construct; identical to SEQ ID NO: 27141
  source 1..120: mol_type = other DNA

SEQ ID NO: 57096 - DNA, 120 bp, synthetic construct; identical to SEQ ID NO: 27142
  source 1..120: mol_type = other DNA

SEQ ID NO: 57097 - DNA, 120 bp, synthetic construct; identical to SEQ ID NO: 8234
  source 1..120: mol_type = other DNA

SEQ ID NO: 57098 - DNA, 120 bp, synthetic construct; identical to SEQ ID NO: 27144
  source 1..120: mol_type = other DNA

SEQ ID NO: 57099 - DNA, 120 bp, synthetic construct; identical to SEQ ID NO: 27145
  source 1..120: mol_type = other DNA

SEQ ID NO: 57100 - DNA, 120 bp, synthetic construct; identical to SEQ ID NO: 1202
  source 1..120: mol_type = other DNA

SEQ ID NO: 57101 - DNA, 120 bp, synthetic construct; identical to SEQ ID NO: 8235
  source 1..120: mol_type = other DNA

SEQ ID NO: 57102 - DNA, 120 bp, synthetic construct; identical to SEQ ID NO: 27148
  source 1..120: mol_type = other DNA

SEQ ID NO: 57103 - DNA, 120 bp, synthetic construct; identical to SEQ ID NO: 27149
  source 1..120: mol_type = other DNA

SEQ ID NO: 57104 - DNA, 120 bp, synthetic construct; identical to SEQ ID NO: 27150
  source 1..120: mol_type = other DNA

SEQ ID NO: 57105 - DNA, 120 bp, synthetic construct; identical to SEQ ID NO: 8236
  source 1..120: mol_type = other DNA

SEQ ID NO: 57106 - DNA, 120 bp, synthetic construct; identical to SEQ ID NO: 27152
  source 1..120: mol_type = other DNA

SEQ ID NO: 57107 - DNA, 120 bp, synthetic construct; identical to SEQ ID NO: 27153
  source 1..120: mol_type = other DNA

SEQ ID NO: 57108 - DNA, 120 bp, synthetic construct; identical to SEQ ID NO: 1204
  source 1..120: mol_type = other DNA

SEQ ID NO: 57109 - DNA, 120 bp, synthetic construct; identical to SEQ ID NO: 27155
  source 1..120: mol_type = other DNA

SEQ ID NO: 57110 - DNA, 120 bp, synthetic construct; identical to SEQ ID NO: 8237
  source 1..120: mol_type = other DNA

SEQ ID NO: 57111 - DNA, 120 bp, synthetic construct; identical to SEQ ID NO: 27157
  source 1..120: mol_type = other DNA

SEQ ID NO: 57112 - DNA, 120 bp, synthetic construct; identical to SEQ ID NO: 27158
  source 1..120: mol_type = other DNA

SEQ ID NO: 57113 - DNA, 120 bp, synthetic construct; identical to SEQ ID NO: 8238
  source 1..120: mol_type = other DNA

SEQ ID NO: 57114 - DNA, 120 bp, synthetic construct; identical to SEQ ID NO: 27160
  source 1..120: mol_type = other DNA

SEQ ID NO: 57115 - DNA, 120 bp, synthetic construct; identical to SEQ ID NO: 27161
  source 1..120: mol_type = other DNA

SEQ ID NO: 57116 - DNA, 120 bp, synthetic construct; identical to SEQ ID NO: 27162
  source 1..120: mol_type = other DNA

SEQ ID NO: 57117 - DNA, 120 bp, synthetic construct; identical to SEQ ID NO: 8239
  source 1..120: mol_type = other DNA

SEQ ID NO: 57118 - DNA, 120 bp, synthetic construct; identical to SEQ ID NO: 27164
  source 1..120: mol_type = other DNA

SEQ ID NO: 57119 - DNA, 120 bp, synthetic construct; identical to SEQ ID NO: 27165
  source 1..120: mol_type = other DNA

SEQ ID NO: 57120 - DNA, 120 bp, synthetic construct; identical to SEQ ID NO: 27166
  source 1..120: mol_type = other DNA

SEQ ID NO: 57121 - DNA, 120 bp, synthetic construct; identical to SEQ ID NO: 27167
  source 1..120: mol_type = other DNA

SEQ ID NO: 57122 - DNA, 120 bp, synthetic construct; identical to SEQ ID NO: 8240
  source 1..120: mol_type = other DNA

SEQ ID NO: 57123 - DNA, 120 bp, synthetic construct; identical to SEQ ID NO: 27169
  source 1..120: mol_type = other DNA

SEQ ID NO: 57124 - DNA, 120 bp, synthetic construct; identical to SEQ ID NO: 27170
  source 1..120: mol_type = other DNA

SEQ ID NO: 57125 - DNA, 120 bp, synthetic construct; identical to SEQ ID NO: 8241
  source 1..120: mol_type = other DNA

SEQ ID NO: 57126 - DNA, 120 bp, synthetic construct; identical to SEQ ID NO: 27172
  source 1..120: mol_type = other DNA

SEQ ID NO: 57127 - DNA, 120 bp, synthetic construct; identical to SEQ ID NO: 27173
  source 1..120: mol_type = other DNA

SEQ ID NO: 57128 - DNA, 120 bp, synthetic construct; identical to SEQ ID NO: 27174
  source 1..120: mol_type = other DNA

SEQ ID NO: 57129 - DNA, 120 bp, synthetic construct; identical to SEQ ID NO: 8242
  source 1..120: mol_type = other DNA

SEQ ID NO: 57130 - DNA, 120 bp, synthetic construct; identical to SEQ ID NO: 27176
  source 1..120: mol_type = other DNA

SEQ ID NO: 57131 - DNA, 120 bp, synthetic construct; identical to SEQ ID NO: 27177
  source 1..120: mol_type = other DNA

SEQ ID NO: 57132 - DNA, 120 bp, synthetic construct; identical to SEQ ID NO: 27178
  source 1..120: mol_type = other DNA

SEQ ID NO: 57133 - DNA, 120 bp, synthetic construct; identical to SEQ ID NO: 8243
  source 1..120: mol_type = other DNA

SEQ ID NO: 57134 - DNA, 120 bp, synthetic construct; identical to SEQ ID NO: 27180
  source 1..120: mol_type = other DNA

SEQ ID NO: 57135 - DNA, 120 bp, synthetic construct; identical to SEQ ID NO: 27181
  source 1..120: mol_type = other DNA

SEQ ID NO: 57136 - DNA, 120 bp, synthetic construct; identical to SEQ ID NO: 27182
  source 1..120: mol_type = other DNA

SEQ ID NO: 57137 - DNA, 120 bp, synthetic construct; identical to SEQ ID NO: 27183
  source 1..120: mol_type = other DNA

SEQ ID NO: 57138 - DNA, 120 bp, synthetic construct; identical to SEQ ID NO: 8244
  source 1..120: mol_type = other DNA

SEQ ID NO: 57139 - DNA, 120 bp, synthetic construct; identical to SEQ ID NO: 27185
  source 1..120: mol_type = other DNA

SEQ ID NO: 57140 - DNA, 120 bp, synthetic construct; identical to SEQ ID NO: 27186
  source 1..120: mol_type = other DNA

SEQ ID NO: 57141 - DNA, 120 bp, synthetic construct; identical to SEQ ID NO: 8245
  source 1..120: mol_type = other DNA

SEQ ID NO: 57142 - DNA, 120 bp, synthetic construct; identical to SEQ ID NO: 27188
  source 1..120: mol_type = other DNA

SEQ ID NO: 57143 - DNA, 120 bp, synthetic construct; identical to SEQ ID NO: 1212
  source 1..120: mol_type = other DNA

SEQ ID NO: 57144 - DNA, 120 bp, synthetic construct; identical to SEQ ID NO: 27190
  source 1..120: mol_type = other DNA

SEQ ID NO: 57145 - DNA, 120 bp, synthetic construct; identical to SEQ ID NO: 27191
  source 1..120: mol_type = other DNA

SEQ ID NO: 57146 - DNA, 120 bp, synthetic construct; identical to SEQ ID NO: 8246
  source 1..120: mol_type = other DNA

SEQ ID NO: 57147 - DNA, 120 bp, synthetic construct; identical to SEQ ID NO: 27193
  source 1..120: mol_type = other DNA

SEQ ID NO: 57148 - DNA, 120 bp, synthetic construct; identical to SEQ ID NO: 8247
  source 1..120: mol_type = other DNA

SEQ ID NO: 57149 - DNA, 120 bp, synthetic construct; identical to SEQ ID NO: 27195
  source 1..120: mol_type = other DNA

SEQ ID NO: 57150 - DNA, 120 bp, synthetic construct; identical to SEQ ID NO: 27196
  source 1..120: mol_type = other DNA

SEQ ID NO: 57151 - DNA, 120 bp, synthetic construct; identical to SEQ ID NO: 8248
  source 1..120: mol_type = other DNA

SEQ ID NO: 57152 - DNA, 120 bp, synthetic construct; identical to SEQ ID NO: 27198
  source 1..120: mol_type = other DNA

SEQ ID NO: 57153 - DNA, 120 bp, synthetic construct; identical to SEQ ID NO: 27199
  source 1..120: mol_type = other DNA

SEQ ID NO: 57154 - DNA, 120 bp, synthetic construct; identical to SEQ ID NO: 27200
  source 1..120: mol_type = other DNA

SEQ ID NO: 57155 - DNA, 120 bp, synthetic construct; identical to SEQ ID NO: 27201
  source 1..120: mol_type = other DNA

SEQ ID NO: 57156 - DNA, 120 bp, synthetic construct; identical to SEQ ID NO: 8249
  source 1..120: mol_type = other DNA

SEQ ID NO: 57157 - DNA, 120 bp, synthetic construct; identical to SEQ ID NO: 27203
  source 1..120: mol_type = other DNA

SEQ ID NO: 57158 - DNA, 120 bp, synthetic construct; identical to SEQ ID NO: 27204
  source 1..120: mol_type = other DNA

SEQ ID NO: 57159 - DNA, 120 bp, synthetic construct; identical to SEQ ID NO: 27205
  source 1..120: mol_type = other DNA

SEQ ID NO: 57160 - DNA, 120 bp, synthetic construct; identical to SEQ ID NO: 8250
  source 1..120: mol_type = other DNA

SEQ ID NO: 57161 - DNA, 120 bp, synthetic construct; identical to SEQ ID NO: 27207
  source 1..120: mol_type = other DNA

SEQ ID NO: 57162 - DNA, 120 bp, synthetic construct; identical to SEQ ID NO: 27208
  source 1..120: mol_type = other DNA

SEQ ID NO: 57163 - DNA, 120 bp, synthetic construct; identical to SEQ ID NO: 27209
  source 1..120: mol_type = other DNA

SEQ ID NO: 57164 - DNA, 120 bp, synthetic construct; identical to SEQ ID NO: 8251
  source 1..120: mol_type = other DNA

SEQ ID NO: 57165 - DNA, 120 bp, synthetic construct; identical to SEQ ID NO: 27211
  source 1..120: mol_type = other DNA

SEQ ID NO: 57166 - DNA, 120 bp, synthetic construct; identical to SEQ ID NO: 27212
  source 1..120: mol_type = other DNA

SEQ ID NO: 57167 - DNA, 120 bp, synthetic construct; identical to SEQ ID NO: 27213
  source 1..120: mol_type = other DNA

SEQ ID NO: 57168 - DNA, 120 bp, synthetic construct; identical to SEQ ID NO: 8252
  source 1..120: mol_type = other DNA

SEQ ID NO: 57169 - DNA, 120 bp, synthetic construct; identical to SEQ ID NO: 27215
  source 1..120: mol_type = other DNA

SEQ ID NO: 57170 - DNA, 120 bp, synthetic construct; identical to SEQ ID NO: 27216
  source 1..120: mol_type = other DNA

SEQ ID NO: 57171 - DNA, 120 bp, synthetic construct; identical to SEQ ID NO: 8253
  source 1..120: mol_type = other DNA

SEQ ID NO: 57172 - DNA, 120 bp, synthetic construct; identical to SEQ ID NO: 27218
  source 1..120: mol_type = other DNA

SEQ ID NO: 57173 - DNA, 120 bp, synthetic construct; identical to SEQ ID NO: 27219
  source 1..120: mol_type = other DNA

SEQ ID NO: 57174 - DNA, 120 bp, synthetic construct; identical to SEQ ID NO: 27220
  source 1..120: mol_type = other DNA

SEQ ID NO: 57175 - DNA, 120 bp, synthetic construct; identical to SEQ ID NO: 8254
  source 1..120: mol_type = other DNA

SEQ ID NO: 57176 - DNA, 120 bp, synthetic construct; identical to SEQ ID NO: 27222
  source 1..120: mol_type = other DNA

SEQ ID NO: 57177 - DNA, 120 bp, synthetic construct; identical to SEQ ID NO: 27223
  source 1..120: mol_type = other DNA

SEQ ID NO: 57178 - DNA, 120 bp, synthetic construct; identical to SEQ ID NO: 27224
  source 1..120: mol_type = other DNA

SEQ ID NO: 57179 - DNA, 120 bp, synthetic construct; identical to SEQ ID NO: 8255
  source 1..120: mol_type = other DNA

SEQ ID NO: 57180 - DNA, 120 bp, synthetic construct; identical to SEQ ID NO: 27226
  source 1..120: mol_type = other DNA

SEQ ID NO: 57181 - DNA, 120 bp, synthetic construct; identical to SEQ ID NO: 27227
  source 1..120: mol_type = other DNA

SEQ ID NO: 57182 - DNA, 120 bp, synthetic construct; identical to SEQ ID NO: 8256
  source 1..120: mol_type = other DNA

SEQ ID NO: 57183 - DNA, 120 bp, synthetic construct; identical to SEQ ID NO: 27229
  source 1..120: mol_type = other DNA

SEQ ID NO: 57184 - DNA, 120 bp, synthetic construct; identical to SEQ ID NO: 27230
  source 1..120: mol_type = other DNA

SEQ ID NO: 57185 - DNA, 120 bp, synthetic construct; identical to SEQ ID NO: 27231
  source 1..120: mol_type = other DNA

SEQ ID NO: 57186 - DNA, 120 bp, synthetic construct; identical to SEQ ID NO: 8257
  source 1..120: mol_type = other DNA

SEQ ID NO: 57187 - DNA, 120 bp, synthetic construct; identical to SEQ ID NO: 27233
  source 1..120: mol_type = other DNA

SEQ ID NO: 57188 - DNA, 120 bp, synthetic construct; identical to SEQ ID NO: 27234
  source 1..120: mol_type = other DNA

SEQ ID NO: 57189 - DNA, 120 bp, synthetic construct; identical to SEQ ID NO: 27235
  source 1..120: mol_type = other DNA

SEQ ID NO: 57190 - DNA, 120 bp, synthetic construct; identical to SEQ ID NO: 27236
  source 1..120: mol_type = other DNA

SEQ ID NO: 57191 - DNA, 120 bp, synthetic construct; identical to SEQ ID NO: 8258
  source 1..120: mol_type = other DNA

SEQ ID NO: 57192 - DNA, 120 bp, synthetic construct; identical to SEQ ID NO: 27238
  source 1..120: mol_type = other DNA

SEQ ID NO: 57193 - DNA, 120 bp, synthetic construct; identical to SEQ ID NO: 27239
  source 1..120: mol_type = other DNA

SEQ ID NO: 57194 - DNA, 120 bp, synthetic construct; identical to SEQ ID NO: 27240
  source 1..120: mol_type = other DNA

SEQ ID NO: 57195 - DNA, 120 bp, synthetic construct; identical to SEQ ID NO: 27241
  source 1..120: mol_type = other DNA

SEQ ID NO: 57196 - DNA, 120 bp, synthetic construct; identical to SEQ ID NO: 8259
  source 1..120: mol_type = other DNA

SEQ ID NO: 57197 - DNA, 120 bp, synthetic construct; identical to SEQ ID NO: 27243
  source 1..120: mol_type = other DNA

SEQ ID NO: 57198 - DNA, 120 bp, synthetic construct; identical to SEQ ID NO: 27244
  source 1..120: mol_type = other DNA

SEQ ID NO: 57199 - DNA, 120 bp, synthetic construct; identical to SEQ ID NO: 27245
  source 1..120: mol_type = other DNA

SEQ ID NO: 57200 - DNA, 120 bp, synthetic construct; identical to SEQ ID NO: 27246
  source 1..120: mol_type = other DNA

SEQ ID NO: 57201 - DNA, 120 bp, synthetic construct; identical to SEQ ID NO: 8260
  source 1..120: mol_type = other DNA

SEQ ID NO: 57202 - DNA, 120 bp, synthetic construct; identical to SEQ ID NO: 27248
  source 1..120: mol_type = other DNA

SEQ ID NO: 57203 - DNA, 120 bp, synthetic construct; identical to SEQ ID NO: 27249
  source 1..120: mol_type = other DNA

SEQ ID NO: 57204 - DNA, 120 bp, synthetic construct; identical to SEQ ID NO: 27250
  source 1..120: mol_type = other DNA

SEQ ID NO: 57205 - DNA, 120 bp, synthetic construct; identical to SEQ ID NO: 8261
  source 1..120: mol_type = other DNA

SEQ ID NO: 57206 - DNA, 120 bp, synthetic construct; identical to SEQ ID NO: 27252
  source 1..120: mol_type = other DNA

SEQ ID NO: 57207 - DNA, 120 bp, synthetic construct; identical to SEQ ID NO: 27253
  source 1..120: mol_type = other DNA

SEQ ID NO: 57208 - DNA, 120 bp, synthetic construct; identical to SEQ ID NO: 27254
  source 1..120: mol_type = other DNA

SEQ ID NO: 57209 - DNA, 120 bp, synthetic construct; identical to SEQ ID NO: 8262
  source 1..120: mol_type = other DNA

SEQ ID NO: 57210 - DNA, 120 bp, synthetic construct; identical to SEQ ID NO: 27256
  source 1..120: mol_type = other DNA

SEQ ID NO: 57211 - DNA, 120 bp, synthetic construct; identical to SEQ ID NO: 27257
  source 1..120: mol_type = other DNA

SEQ ID NO: 57212 - DNA, 120 bp, synthetic construct; identical to SEQ ID NO: 27258
  source 1..120: mol_type = other DNA

SEQ ID NO: 57213 - DNA, 120 bp, synthetic construct; identical to SEQ ID NO: 27259
  source 1..120: mol_type = other DNA

SEQ ID NO: 57214 - DNA, 120 bp, synthetic construct; identical to SEQ ID NO: 8263
  source 1..120: mol_type = other DNA

SEQ ID NO: 57215 - DNA, 120 bp, synthetic construct; identical to SEQ ID NO: 27261
  source 1..120: mol_type = other DNA

SEQ ID NO: 57216 - DNA, 120 bp, synthetic construct; identical to SEQ ID NO: 27262
  source 1..120: mol_type = other DNA

SEQ ID NO: 57217 - DNA, 120 bp, synthetic construct; identical to SEQ ID NO: 8264
  source 1..120: mol_type = other DNA

SEQ ID NO: 57218 - DNA, 120 bp, synthetic construct; identical to SEQ ID NO: 27264
  source 1..120: mol_type = other DNA

SEQ ID NO: 57219 - DNA, 120 bp, synthetic construct; identical to SEQ ID NO: 27265
  source 1..120: mol_type = other DNA

SEQ ID NO: 57220 - DNA, 120 bp, synthetic construct; identical to SEQ ID NO: 27266
  source 1..120: mol_type = other DNA

SEQ ID NO: 57221 - DNA, 120 bp, synthetic construct; identical to SEQ ID NO: 27267
  source 1..120: mol_type = other DNA

SEQ ID NO: 57222 - DNA, 120 bp, synthetic construct; identical to SEQ ID NO: 8265
  source 1..120: mol_type = other DNA

SEQ ID NO: 57223 - DNA, 120 bp, synthetic construct; identical to SEQ ID NO: 27269
  source 1..120: mol_type = other DNA

SEQ ID NO: 57224 - DNA, 120 bp, synthetic construct; identical to SEQ ID NO: 27270
  source 1..120: mol_type = other DNA

SEQ ID NO: 57225 - DNA, 120 bp, synthetic construct; identical to SEQ ID NO: 8266
  source 1..120: mol_type = other DNA

SEQ ID NO: 57226 - DNA, 120 bp, synthetic construct; identical to SEQ ID NO: 27272
  source 1..120: mol_type = other DNA

SEQ ID NO: 57227 - DNA, 120 bp, synthetic construct; identical to SEQ ID NO: 27273
  source 1..120: mol_type = other DNA

SEQ ID NO: 57228 - DNA, 120 bp, synthetic construct; identical to SEQ ID NO: 27274
  source 1..120: mol_type = other DNA

SEQ ID NO: 57229 - DNA, 120 bp, synthetic construct; identical to SEQ ID NO: 27275
  source 1..120: mol_type = other DNA

SEQ ID NO: 57230 - DNA, 120 bp, synthetic construct; identical to SEQ ID NO: 8267
  source 1..120: mol_type = other DNA

SEQ ID NO: 57231 - DNA, 120 bp, synthetic construct; identical to SEQ ID NO: 27277
  source 1..120: mol_type = other DNA

SEQ ID NO: 57232 - DNA, 120 bp, synthetic construct; identical to SEQ ID NO: 8268
  source 1..120: mol_type = other DNA

SEQ ID NO: 57233 - DNA, 120 bp, synthetic construct; identical to SEQ ID NO: 27279
  source 1..120: mol_type = other DNA

SEQ ID NO: 57234 - DNA, 120 bp, synthetic construct; identical to SEQ ID NO: 27280
  source 1..120: mol_type = other DNA

SEQ ID NO: 57235 - DNA, 120 bp, synthetic construct; identical to SEQ ID NO: 8269
  source 1..120: mol_type = other DNA

SEQ ID NO: 57236 - DNA, 120 bp, synthetic construct; identical to SEQ ID NO: 27282
  source 1..120: mol_type = other DNA

SEQ ID NO: 57237 - DNA, 120 bp, synthetic construct; identical to SEQ ID NO: 1234
  source 1..120: mol_type = other DNA

SEQ ID NO: 57238 - DNA, 120 bp, synthetic construct; identical to SEQ ID NO: 27284
  source 1..120: mol_type = other DNA

SEQ ID NO: 57239 - DNA, 120 bp, synthetic construct; identical to SEQ ID NO: 8270
  source 1..120: mol_type = other DNA

SEQ ID NO: 57240 - DNA, 120 bp, synthetic construct; identical to SEQ ID NO: 27286
  source 1..120: mol_type = other DNA

SEQ ID NO: 57241 - DNA, 120 bp, synthetic construct; identical to SEQ ID NO: 27287
  source 1..120: mol_type = other DNA

SEQ ID NO: 57242 - DNA, 120 bp, synthetic construct; identical to SEQ ID NO: 27288
  source 1..120: mol_type = other DNA

SEQ ID NO: 57243 - DNA, 120 bp, synthetic construct; identical to SEQ ID NO: 8271
  source 1..120: mol_type = other DNA

SEQ ID NO: 57244 - DNA, 120 bp, synthetic construct; identical to SEQ ID NO: 27290
  source 1..120: mol_type = other DNA

SEQ ID NO: 57245 - DNA, 120 bp, synthetic construct; identical to SEQ ID NO: 27291
  source 1..120: mol_type = other DNA

SEQ ID NO: 57246 - DNA, 120 bp, synthetic construct; identical to SEQ ID NO: 27292
  source 1..120: mol_type = other DNA

SEQ ID NO: 57247 - DNA, 120 bp, synthetic construct; identical to SEQ ID NO: 8272
  source 1..120: mol_type = other DNA

SEQ ID NO: 57248 - DNA, 120 bp, synthetic construct; identical to SEQ ID NO: 27294
  source 1..120: mol_type = other DNA

SEQ ID NO: 57249 - DNA, 120 bp, synthetic construct; identical to SEQ ID NO: 27295
  source 1..120: mol_type = other DNA

SEQ ID NO: 57250 - DNA, 120 bp, synthetic construct; identical to SEQ ID NO: 8273
  source 1..120: mol_type = other DNA

SEQ ID NO: 57251 - DNA, 120 bp, synthetic construct; identical to SEQ ID NO: 27297
  source 1..120: mol_type = other DNA

SEQ ID NO: 57252 - DNA, 120 bp, synthetic construct; identical to SEQ ID NO: 27298
  source 1..120: mol_type = other DNA

SEQ ID NO: 57253 - DNA, 120 bp, synthetic construct; identical to SEQ ID NO: 27299
  source 1..120: mol_type = other DNA

SEQ ID NO: 57254 - DNA, 120 bp, synthetic construct; identical to SEQ ID NO: 27300
  source 1..120: mol_type = other DNA

SEQ ID NO: 57255 - DNA, 120 bp, synthetic construct; identical to SEQ ID NO: 8274
  source 1..120: mol_type = other DNA

SEQ ID NO: 57256 - DNA, 120 bp, synthetic construct; identical to SEQ ID NO: 27302
  source 1..120: mol_type = other DNA

SEQ ID NO: 57257 - DNA, 120 bp, synthetic construct; identical to SEQ ID NO: 27303
  source 1..120: mol_type = other DNA

SEQ ID NO: 57258 - DNA, 120 bp, synthetic construct; identical to SEQ ID NO: 8275
  source 1..120: mol_type = other DNA

SEQ ID NO: 57259 - DNA, 120 bp, synthetic construct; identical to SEQ ID NO: 27305
  source 1..120: mol_type = other DNA

SEQ ID NO: 57260 - DNA, 120 bp, synthetic construct; identical to SEQ ID NO: 27306
  source 1..120: mol_type = other DNA

SEQ ID NO: 57261 - DNA, 120 bp, synthetic construct; identical to SEQ ID NO: 27307
  source 1..120: mol_type = other DNA

SEQ ID NO: 57262 - DNA, 120 bp, synthetic construct; identical to SEQ ID NO: 8276
  source 1..120: mol_type = other DNA

SEQ ID NO: 57263 - DNA, 120 bp, synthetic construct; identical to SEQ ID NO: 27309
  source 1..120: mol_type = other DNA

SEQ ID NO: 57264 - DNA, 120 bp, synthetic construct; identical to SEQ ID NO: 27310
  source 1..120: mol_type = other DNA

SEQ ID NO: 57265 - DNA, 120 bp, synthetic construct; identical to SEQ ID NO: 27311
  source 1..120: mol_type = other DNA

SEQ ID NO: 57266 - DNA, 120 bp, synthetic construct; identical to SEQ ID NO: 8277
  source 1..120: mol_type = other DNA

SEQ ID NO: 57267 - DNA, 120 bp, synthetic construct; identical to SEQ ID NO: 27313
  source 1..120: mol_type = other DNA

SEQ ID NO: 57268 - DNA, 120 bp, synthetic construct; identical to SEQ ID NO: 27314
  source 1..120: mol_type = other DNA

SEQ ID NO: 57269 - DNA, 120 bp, synthetic construct; identical to SEQ ID NO: 27315
  source 1..120: mol_type = other DNA

SEQ ID NO: 57270 - DNA, 120 bp, synthetic construct; identical to SEQ ID NO: 27316
  source 1..120: mol_type = other DNA

SEQ ID NO: 57271 - DNA, 120 bp, synthetic construct; identical to SEQ ID NO: 8278
  source 1..120: mol_type = other DNA

SEQ ID NO: 57272 - DNA, 120 bp, synthetic construct; identical to SEQ ID NO: 27318
  source 1..120: mol_type = other DNA

SEQ ID NO: 57273 - DNA, 120 bp, synthetic construct; identical to SEQ ID NO: 27319
  source 1..120: mol_type = other DNA

SEQ ID NO: 57274 - DNA, 120 bp, synthetic construct; identical to SEQ ID NO: 8279
  source 1..120: mol_type = other DNA

SEQ ID NO: 57275 - DNA, 120 bp, synthetic construct; identical to SEQ ID NO: 27321
  source 1..120: mol_type = other DNA

SEQ ID NO: 57276 - DNA, 120 bp, synthetic construct; identical to SEQ ID NO: 27322
  source 1..120: mol_type = other DNA

SEQ ID NO: 57277 - DNA, 120 bp, synthetic construct; identical to SEQ ID NO: 27323
  source 1..120: mol_type = other DNA

SEQ ID NO: 57278 - DNA, 120 bp, synthetic construct; identical to SEQ ID NO: 8280
  source 1..120: mol_type = other DNA

SEQ ID NO: 57279 - DNA, 120 bp, synthetic construct; identical to SEQ ID NO: 27325
  source 1..120: mol_type = other DNA

SEQ ID NO: 57280 - DNA, 120 bp, synthetic construct; identical to SEQ ID NO: 27326
  source 1..120: mol_type = other DNA

SEQ ID NO: 57281 - DNA, 120 bp, synthetic construct; identical to SEQ ID NO: 27327
  source 1..120: mol_type = other DNA

SEQ ID NO: 57282 - DNA, 120 bp, synthetic construct; identical to SEQ ID NO: 8281
  source 1..120: mol_type = other DNA

SEQ ID NO: 57283 - DNA, 120 bp, synthetic construct; identical to SEQ ID NO: 27329
  source 1..120: mol_type = other DNA

SEQ ID NO: 57284 - DNA, 120 bp, synthetic construct; identical to SEQ ID NO: 27330
  source 1..120: mol_type = other DNA

SEQ ID NO: 57285 - DNA, 120 bp, synthetic construct; identical to SEQ ID NO: 27331
  source 1..120: mol_type = other DNA

SEQ ID NO: 57286 - DNA, 120 bp, synthetic construct; identical to SEQ ID NO: 27332
  source 1..120: mol_type = other DNA

SEQ ID NO: 57287 - DNA, 120 bp, synthetic construct; identical to SEQ ID NO: 8282
  source 1..120: mol_type = other DNA

SEQ ID NO: 57288 - DNA, 120 bp, synthetic construct; identical to SEQ ID NO: 27334
  source 1..120: mol_type = other DNA

SEQ ID NO: 57289 - DNA, 120 bp, synthetic construct; identical to SEQ ID NO: 27335
  source 1..120: mol_type = other DNA

SEQ ID NO: 57290 - DNA, 120 bp, synthetic construct; identical to SEQ ID NO: 27336
  source 1..120: mol_type = other DNA

SEQ ID NO: 57291 - DNA, 120 bp, synthetic construct; identical to SEQ ID NO: 8283
  source 1..120: mol_type = other DNA

SEQ ID NO: 57292 - DNA, 120 bp, synthetic construct; identical to SEQ ID NO: 27338
  source 1..120: mol_type = other DNA

SEQ ID NO: 57293 - DNA, 120 bp, synthetic construct; identical to SEQ ID NO: 27339
  source 1..120: mol_type = other DNA

SEQ ID NO: 57294 - DNA, 120 bp, synthetic construct; identical to SEQ ID NO: 27340
  source 1..120: mol_type = other DNA

SEQ ID NO: 57295 - DNA, 120 bp, synthetic construct; identical to SEQ ID NO: 8284
  source 1..120: mol_type = other DNA

SEQ ID NO: 57296 - DNA, 120 bp, synthetic construct; identical to SEQ ID NO: 27342
  source 1..120: mol_type = other DNA

SEQ ID NO: 57297 - DNA, 120 bp, synthetic construct; identical to SEQ ID NO: 27343
  source 1..120: mol_type = other DNA

SEQ ID NO: 57298 - DNA, 120 bp, synthetic construct; identical to SEQ ID NO: 27344
  source 1..120: mol_type = other DNA

SEQ ID NO: 57299 - DNA, 120 bp, synthetic construct; identical to SEQ ID NO: 8285
  source 1..120: mol_type = other DNA

SEQ ID NO: 57300 - DNA, 120 bp, synthetic construct; identical to SEQ ID NO: 27346
  source 1..120: mol_type = other DNA

SEQ ID NO: 57301 - DNA, 120 bp, synthetic construct; identical to SEQ ID NO: 27347
  source 1..120: mol_type = other DNA

SEQ ID NO: 57302 - DNA, 120 bp, synthetic construct; identical to SEQ ID NO: 27348
  source 1..120: mol_type = other DNA

SEQ ID NO: 57303 - DNA, 120 bp, synthetic construct; identical to SEQ ID NO: 8286
  source 1..120: mol_type = other DNA

SEQ ID NO: 57304 - DNA, 120 bp, synthetic construct; identical to SEQ ID NO: 27350
  source 1..120: mol_type = other DNA

SEQ ID NO: 57305 - DNA, 120 bp, synthetic construct; identical to SEQ ID NO: 27351
  source 1..120: mol_type = other DNA

SEQ ID NO: 57306 - DNA, 120 bp, synthetic construct; identical to SEQ ID NO: 8287
  source 1..120: mol_type = other DNA

SEQ ID NO: 57307 - DNA, 120 bp, synthetic construct; identical to SEQ ID NO: 27353
  source 1..120: mol_type = other DNA

SEQ ID NO: 57308 - DNA, 120 bp, synthetic construct; identical to SEQ ID NO: 27354
  source 1..120: mol_type = other DNA

SEQ ID NO: 57309 - DNA, 120 bp, synthetic construct; identical to SEQ ID NO: 27355
  source 1..120: mol_type = other DNA

SEQ ID NO: 57310 - DNA, 120 bp, synthetic construct; identical to SEQ ID NO: 27356
  source 1..120: mol_type = other DNA

SEQ ID NO: 57311 - DNA, 120 bp, synthetic construct; identical to SEQ ID NO: 27357
  source 1..120: mol_type = other DNA

SEQ ID NO: 57312 - DNA, 120 bp, synthetic construct; identical to SEQ ID NO: 8288
  source 1..120: mol_type = other DNA

SEQ ID NO: 57313 - DNA, 120 bp, synthetic construct; identical to SEQ ID NO: 27359
  source 1..120: mol_type = other DNA

SEQ ID NO: 57314 - DNA, 120 bp, synthetic construct; identical to SEQ ID NO: 27360
  source 1..120: mol_type = other DNA

SEQ ID NO: 57315 - DNA, 120 bp, synthetic construct; identical to SEQ ID NO: 27361
  source 1..120: mol_type = other DNA

SEQ ID NO: 57316 - DNA, 120 bp, synthetic construct; identical to SEQ ID NO: 8289
  source 1..120: mol_type = other DNA

SEQ ID NO: 57317 - DNA, 120 bp, synthetic construct; identical to SEQ ID NO: 27363
  source 1..120: mol_type = other DNA

SEQ ID NO: 57318 - DNA, 120 bp, synthetic construct; identical to SEQ ID NO: 27364
  source 1..120: mol_type = other DNA

SEQ ID NO: 57319 - DNA, 120 bp, synthetic construct; identical to SEQ ID NO: 27365
  source 1..120: mol_type = other DNA

SEQ ID NO: 57320 - DNA, 120 bp, synthetic construct; identical to SEQ ID NO: 27366
  source 1..120: mol_type = other DNA

SEQ ID NO: 57321 - DNA, 120 bp, synthetic construct; identical to SEQ ID NO: 8290
  source 1..120: mol_type = other DNA

SEQ ID NO: 57322 - DNA, 120 bp, synthetic construct; identical to SEQ ID NO: 8291
  source 1..120: mol_type = other DNA

SEQ ID NO: 57323 - DNA, 120 bp, synthetic construct; identical to SEQ ID NO: 27369
  source 1..120: mol_type = other DNA

SEQ ID NO: 57324 - DNA, 120 bp, synthetic construct; identical to SEQ ID NO: 27370
  source 1..120: mol_type = other DNA

SEQ ID NO: 57325 - DNA, 120 bp, synthetic construct; identical to SEQ ID NO: 27371
  source 1..120: mol_type = other DNA

SEQ ID NO: 57326 - DNA, 120 bp, synthetic construct; identical to SEQ ID NO: 8292
  source 1..120: mol_type = other DNA

SEQ ID NO: 57327 - DNA, 120 bp, synthetic construct; identical to SEQ ID NO: 27373
  source 1..120: mol_type = other DNA

SEQ ID NO: 57328 - DNA, 120 bp, synthetic construct; identical to SEQ ID NO: 27374
  source 1..120: mol_type = other DNA

SEQ ID NO: 57329 - DNA, 120 bp, synthetic construct; identical to SEQ ID NO: 27375
  source 1..120: mol_type = other DNA

SEQ ID NO: 57330 - DNA, 120 bp, synthetic construct; identical to SEQ ID NO: 8293
  source 1..120: mol_type = other DNA

SEQ ID NO: 57331 - DNA, 120 bp, synthetic construct; identical to SEQ ID NO: 27377
  source 1..120: mol_type = other DNA

SEQ ID NO: 57332 - DNA, 120 bp, synthetic construct; identical to SEQ ID NO: 27378
  source 1..120: mol_type = other DNA

SEQ ID NO: 57333 - DNA, 120 bp, synthetic construct; identical to SEQ ID NO: 8294
  source 1..120: mol_type = other DNA

SEQ ID NO: 57334 - DNA, 120 bp, synthetic construct; identical to SEQ ID NO: 27380
  source 1..120: mol_type = other DNA

SEQ ID NO: 57335 - DNA, 120 bp, synthetic construct; identical to SEQ ID NO: 27381
  source 1..120: mol_type = other DNA

SEQ ID NO: 57336 - DNA, 120 bp, synthetic construct; identical to SEQ ID NO: 27382
  source 1..120: mol_type = other DNA

SEQ ID NO: 57337 - DNA, 120 bp, synthetic construct; identical to SEQ ID NO: 27383
  source 1..120: mol_type = other DNA

SEQ ID NO: 57338 - DNA, 120 bp, synthetic construct; identical to SEQ ID NO: 8295
  source 1..120: mol_type = other DNA

SEQ ID NO: 57339 - DNA, 120 bp, synthetic construct; identical to SEQ ID NO: 27385
  source 1..120: mol_type = other DNA

SEQ ID NO: 57340 - DNA, 120 bp, synthetic construct; identical to SEQ ID NO: 27386
  source 1..120: mol_type = other DNA

SEQ ID NO: 57341 - DNA, 120 bp, synthetic construct; identical to SEQ ID NO: 8296
  source 1..120: mol_type = other DNA

SEQ ID NO: 57342 - DNA, 120 bp, synthetic construct; identical to SEQ ID NO: 27388
  source 1..120: mol_type = other DNA

SEQ ID NO: 57343 - DNA, 120 bp, synthetic construct; identical to SEQ ID NO: 27389
  source 1..120: mol_type = other DNA

SEQ ID NO: 57344 - DNA, 120 bp, synthetic construct; identical to SEQ ID NO: 27390
  source 1..120: mol_type = other DNA

SEQ ID NO: 57345 - DNA, 120 bp, synthetic construct; identical to SEQ ID NO: 8297
  source 1..120: mol_type = other DNA

SEQ ID NO: 57346 - DNA, 120 bp, synthetic construct; identical to SEQ ID NO: 27392
  source 1..120: mol_type = other DNA

SEQ ID NO: 57347 - DNA, 120 bp, synthetic construct; identical to SEQ ID NO: 27393
  source 1..120: mol_type = other DNA

SEQ ID NO: 57348 - DNA, 120 bp, synthetic construct; identical to SEQ ID NO: 27394
  source 1..120: mol_type = other DNA

SEQ ID NO: 57349 - DNA, 120 bp, synthetic construct; identical to SEQ ID NO: 8298
  source 1..120: mol_type = other DNA

SEQ ID NO: 57350 - DNA, 120 bp, synthetic construct; identical to SEQ ID NO: 27396
  source 1..120: mol_type = other DNA

SEQ ID NO: 57351 - DNA, 120 bp, synthetic construct; identical to SEQ ID NO: 27397
  source 1..120: mol_type = other DNA

SEQ ID NO: 57352 - DNA, 120 bp, synthetic construct; identical to SEQ ID NO: 27398
  source 1..120: mol_type = other DNA

SEQ ID NO: 57353 - DNA, 120 bp, synthetic construct; identical to SEQ ID NO: 8299
  source 1..120: mol_type = other DNA

SEQ ID NO: 57354 - DNA, 120 bp, synthetic construct; identical to SEQ ID NO: 27400
  source 1..120: mol_type = other DNA

SEQ ID NO: 57355 - DNA, 120 bp, synthetic construct; identical to SEQ ID NO: 27401
  source 1..120: mol_type = other DNA

SEQ ID NO: 57356 - DNA, 120 bp, synthetic construct; identical to SEQ ID NO: 27402
  source 1..120: mol_type = other DNA

SEQ ID NO: 57357 - DNA, 120 bp, synthetic construct; identical to SEQ ID NO: 27403
  source 1..120: mol_type = other DNA

SEQ ID NO: 57358 - DNA, 120 bp, synthetic construct; identical to SEQ ID NO: 8300
  source 1..120: mol_type = other DNA

SEQ ID NO: 57359 - DNA, 120 bp, synthetic construct; identical to SEQ ID NO: 27405
  source 1..120: mol_type = other DNA

SEQ ID NO: 57360 - DNA, 120 bp, synthetic construct; identical to SEQ ID NO: 27406
  source 1..120: mol_type = other DNA

SEQ ID NO: 57361 - DNA, 120 bp, synthetic construct; identical to SEQ ID NO: 27407
  source 1..120: mol_type = other DNA

SEQ ID NO: 57362 - DNA, 120 bp, synthetic construct; identical to SEQ ID NO: 8301
  source 1..120: mol_type = other DNA

SEQ ID NO: 57363 - DNA, 120 bp, synthetic construct; identical to SEQ ID NO: 27409
  source 1..120: mol_type = other DNA

SEQ ID NO: 57364 - DNA, 120 bp, synthetic construct; identical to SEQ ID NO: 27410
  source 1..120: mol_type = other DNA

SEQ ID NO: 57365 - DNA, 120 bp, synthetic construct; identical to SEQ ID NO: 8302
  source 1..120: mol_type = other DNA

SEQ ID NO: 57366 - DNA, 120 bp, synthetic construct; identical to SEQ ID NO: 27412
  source 1..120: mol_type = other DNA

SEQ ID NO: 57367 - DNA, 120 bp, synthetic construct; identical to SEQ ID NO: 27413
  source 1..120: mol_type = other DNA

SEQ ID NO: 57368 - DNA, 120 bp, synthetic construct; identical to SEQ ID NO: 8303
  source 1..120: mol_type = other DNA

SEQ ID NO: 57369 - DNA, 120 bp, synthetic construct; identical to SEQ ID NO: 27415
  source 1..120: mol_type = other DNA

SEQ ID NO: 57370 - DNA, 120 bp, synthetic construct; identical to SEQ ID NO: 27416
  source 1..120: mol_type = other DNA

SEQ ID NO: 57371 - DNA, 120 bp, synthetic construct; identical to SEQ ID NO: 8304
  source 1..120: mol_type = other DNA

SEQ ID NO: 57372 - DNA, 120 bp, synthetic construct; identical to SEQ ID NO: 27418
  source 1..120: mol_type = other DNA

SEQ ID NO: 57373 - DNA, 120 bp, synthetic construct; identical to SEQ ID NO: 27419
  source 1..120: mol_type = other DNA

SEQ ID NO: 57374 - DNA, 120 bp, synthetic construct; identical to SEQ ID NO: 8305
  source 1..120: mol_type = other DNA

SEQ ID NO: 57375 - DNA, 120 bp, synthetic construct; identical to SEQ ID NO: 27421
  source 1..120: mol_type = other DNA

SEQ ID NO: 57376 - DNA, 120 bp, synthetic construct; identical to SEQ ID NO: 27422
  source 1..120: mol_type = other DNA

SEQ ID NO: 57377 - DNA, 120 bp, synthetic construct; identical to SEQ ID NO: 27423
  source 1..120: mol_type = other DNA

SEQ ID NO: 57378 - DNA, 120 bp, synthetic construct; identical to SEQ ID NO: 8306
  source 1..120: mol_type = other DNA

SEQ ID NO: 57379 - DNA, 120 bp, synthetic construct; identical to SEQ ID NO: 27425
  source 1..120: mol_type = other DNA

SEQ ID NO: 57380 - DNA, 120 bp, synthetic construct; identical to SEQ ID NO: 27426
  source 1..120: mol_type = other DNA

SEQ ID NO: 57381 - DNA, 120 bp, synthetic construct; identical to SEQ ID NO: 27427
  source 1..120: mol_type = other DNA

SEQ ID NO: 57382 - DNA, 120 bp, synthetic construct; identical to SEQ ID NO: 8307
  source 1..120: mol_type = other DNA

SEQ ID NO: 57383 - DNA, 120 bp, synthetic construct; identical to SEQ ID NO: 27429
  source 1..120: mol_type = other DNA

SEQ ID NO: 57384 - DNA, 120 bp, synthetic construct; identical to SEQ ID NO: 27430
  source 1..120: mol_type = other DNA

SEQ ID NO: 57385 - DNA, 120 bp, synthetic construct; identical to SEQ ID NO: 27431
  source 1..120: mol_type = other DNA

SEQ ID NO: 57386 - DNA, 120 bp, synthetic construct; identical to SEQ ID NO: 8308
  source 1..120: mol_type = other DNA

SEQ ID NO: 57387 - DNA, 120 bp, synthetic construct; identical to SEQ ID NO: 27433
  source 1..120: mol_type = other DNA

SEQ ID NO: 57388 - DNA, 120 bp, synthetic construct; identical to SEQ ID NO: 27434
  source 1..120: mol_type = other DNA

SEQ ID NO: 57389 - DNA, 120 bp, synthetic construct; identical to SEQ ID NO: 27435
  source 1..120: mol_type = other DNA

SEQ ID NO: 57390 - DNA, 120 bp, synthetic construct; identical to SEQ ID NO: 27436
  source 1..120: mol_type = other DNA

SEQ ID NO: 57391 - DNA, 120 bp, synthetic construct; identical to SEQ ID NO: 8309
  source 1..120: mol_type = other DNA

SEQ ID NO: 57392 - DNA, 120 bp, synthetic construct; identical to SEQ ID NO: 27438
  source 1..120: mol_type = other DNA

SEQ ID NO: 57393 - DNA, 120 bp, synthetic construct; identical to SEQ ID NO: 27439
  source 1..120: mol_type = other DNA

SEQ ID NO: 57394 - DNA, 120 bp, synthetic construct; identical to SEQ ID NO: 8310
  source 1..120: mol_type = other DNA

SEQ ID NO: 57395 - DNA, 120 bp, synthetic construct; identical to SEQ ID NO: 27441
  source 1..120: mol_type = other DNA

SEQ ID NO: 57396 - DNA, 120 bp, synthetic construct; identical to SEQ ID NO: 27442
  source 1..120: mol_type = other DNA

SEQ ID NO: 57397 - DNA, 120 bp, synthetic construct; identical to SEQ ID NO: 27443
  source 1..120: mol_type = other DNA

SEQ ID NO: 57398 - DNA, 120 bp, synthetic construct; identical to SEQ ID NO: 8311
  source 1..120: mol_type = other DNA

SEQ ID NO: 57399 - DNA, 120 bp, synthetic construct; identical to SEQ ID NO: 27445
  source 1..120: mol_type = other DNA

SEQ ID NO: 57400 - DNA, 120 bp, synthetic construct; identical to SEQ ID NO: 27446
  source 1..120: mol_type = other DNA

SEQ ID NO: 57401 - DNA, 120 bp, synthetic construct; identical to SEQ ID NO: 27447
  source 1..120: mol_type = other DNA

SEQ ID NO: 57402 - DNA, 120 bp, synthetic construct; identical to SEQ ID NO: 8312
  source 1..120: mol_type = other DNA

SEQ ID NO: 57403 - DNA, 120 bp, synthetic construct; identical to SEQ ID NO: 27449
  source 1..120: mol_type = other DNA

SEQ ID NO: 57404 - DNA, 120 bp, synthetic construct; identical to SEQ ID NO: 27450
  source 1..120: mol_type = other DNA

SEQ ID NO: 57405 - DNA, 120 bp, synthetic construct; identical to SEQ ID NO: 27451
  source 1..120: mol_type = other DNA

SEQ ID NO: 57406 - DNA, 120 bp, synthetic construct; identical to SEQ ID NO: 8313
  source 1..120: mol_type = other DNA

SEQ ID NO: 57407 - DNA, 120 bp, synthetic construct; identical to SEQ ID NO: 27453
  source 1..120: mol_type = other DNA

SEQ ID NO: 57408 - DNA, 120 bp, synthetic construct; identical to SEQ ID NO: 27454
  source 1..120: mol_type = other DNA

SEQ ID NO: 57409 - DNA, 120 bp, synthetic construct; identical to SEQ ID NO: 27455
  source 1..120: mol_type = other DNA

SEQ ID NO: 57410 - DNA, 120 bp, synthetic construct; identical to SEQ ID NO: 8314
  source 1..120: mol_type = other DNA

SEQ ID NO: 57411 - DNA, 120 bp, synthetic construct; identical to SEQ ID NO: 27457
  source 1..120: mol_type = other DNA

SEQ ID NO: 57412 - DNA, 120 bp, synthetic construct; identical to SEQ ID NO: 27458
  source 1..120: mol_type = other DNA

SEQ ID NO: 57413 - DNA, 120 bp, synthetic construct; identical to SEQ ID NO: 27459
  source 1..120: mol_type = other DNA

SEQ ID NO: 57414 - DNA, 120 bp, synthetic construct; identical to SEQ ID NO: 8315
  source 1..120: mol_type = other DNA

SEQ ID NO: 57415 - DNA, 120 bp, synthetic construct; identical to SEQ ID NO: 27461
  source 1..120: mol_type = other DNA

SEQ ID NO: 57416 - DNA, 120 bp, synthetic construct; identical to SEQ ID NO: 27462
  source 1..120: mol_type = other DNA

SEQ ID NO: 57417 - DNA, 120 bp, synthetic construct; identical to SEQ ID NO: 27463
  source 1..120: mol_type = other DNA

SEQ ID NO: 57418 - DNA, 120 bp, synthetic construct; identical to SEQ ID NO: 8316
  source 1..120: mol_type = other DNA

SEQ ID NO: 57419 - DNA, 120 bp, synthetic construct; identical to SEQ ID NO: 27465
  source 1..120: mol_type = other DNA

SEQ ID NO: 57420 - DNA, 120 bp, synthetic construct; identical to SEQ ID NO: 27466
  source 1..120: mol_type = other DNA

SEQ ID NO: 57421 - DNA, 120 bp, synthetic construct; identical to SEQ ID NO: 27467
  source 1..120: mol_type = other DNA

SEQ ID NO: 57422 - DNA, 120 bp, synthetic construct; identical to SEQ ID NO: 27468
  source 1..120: mol_type = other DNA

SEQ ID NO: 57423 - DNA, 120 bp, synthetic construct; identical to SEQ ID NO: 8317
  source 1..120: mol_type = other DNA

SEQ ID NO: 57424 - DNA, 120 bp, synthetic construct; identical to SEQ ID NO: 27470
  source 1..120: mol_type = other DNA

SEQ ID NO: 57425 - DNA, 120 bp, synthetic construct; identical to SEQ ID NO: 27471
  source 1..120: mol_type = other DNA

SEQ ID NO: 57426 - DNA, 120 bp, synthetic construct; identical to SEQ ID NO: 27472
  source 1..120: mol_type = other DNA

SEQ ID NO: 57427 - DNA, 120 bp, synthetic construct; identical to SEQ ID NO: 8318
  source 1..120: mol_type = other DNA

SEQ ID NO: 57428 - DNA, 120 bp, synthetic construct; identical to SEQ ID NO: 27474
  source 1..120: mol_type = other DNA

SEQ ID NO: 57429 - DNA, 120 bp, synthetic construct; identical to SEQ ID NO: 27475
  source 1..120: mol_type = other DNA

SEQ ID NO: 57430 - DNA, 120 bp, synthetic construct; identical to SEQ ID NO: 8319
  source 1..120: mol_type = other DNA

SEQ ID NO: 57431 - DNA, 120 bp, synthetic construct; identical to SEQ ID NO: 27477
  source 1..120: mol_type = other DNA

SEQ ID NO: 57432 - DNA, 120 bp, synthetic construct; identical to SEQ ID NO: 27478
  source 1..120: mol_type = other DNA

SEQ ID NO: 57433 - DNA, 120 bp, synthetic construct; identical to SEQ ID NO: 27479
  source 1..120: mol_type = other DNA

SEQ ID NO: 57434 - DNA, 120 bp, synthetic construct; identical to SEQ ID NO: 27480
  source 1..120: mol_type = other DNA

SEQ ID NO: 57435 - DNA, 120 bp, synthetic construct; identical to SEQ ID NO: 27481
  source 1..120: mol_type = other DNA

SEQ ID NO: 57436 - DNA, 120 bp, synthetic construct; identical to SEQ ID NO: 8320
  source 1..120: mol_type = other DNA

SEQ ID NO: 57437 - DNA, 120 bp, synthetic construct; identical to SEQ ID NO: 27483
  source 1..120: mol_type = other DNA

SEQ ID NO: 57438 - DNA, 120 bp, synthetic construct; identical to SEQ ID NO: 27484
  source 1..120: mol_type = other DNA

SEQ ID NO: 57439 - DNA, 120 bp, synthetic construct; identical to SEQ ID NO: 8321
  source 1..120: mol_type = other DNA

SEQ ID NO: 57440 - DNA, 120 bp, synthetic construct; identical to SEQ ID NO: 27486
  source 1..120: mol_type = other DNA

SEQ ID NO: 57441 - DNA, 120 bp, synthetic construct; identical to SEQ ID NO: 27487
  source 1..120: mol_type = other DNA

SEQ ID NO: 57442 - DNA, 120 bp, synthetic construct; identical to SEQ ID NO: 27488
  source 1..120: mol_type = other DNA

SEQ ID NO: 57443 - DNA, 120 bp, synthetic construct; identical to SEQ ID NO: 8322
  source 1..120: mol_type = other DNA

SEQ ID NO: 57444 - DNA, 120 bp, synthetic construct; identical to SEQ ID NO: 27490
  source 1..120: mol_type = other DNA

SEQ ID NO: 57445 - DNA, 120 bp, synthetic construct; identical to SEQ ID NO: 27491
  source 1..120: mol_type = other DNA

SEQ ID NO: 57446 - DNA, 120 bp, synthetic construct; identical to SEQ ID NO: 27492
  source 1..120: mol_type = other DNA

SEQ ID NO: 57447 - DNA, 120 bp, synthetic construct; identical to SEQ ID NO: 27493
  source 1..120: mol_type = other DNA

SEQ ID NO: 57448 - DNA, 120 bp, synthetic construct; identical to SEQ ID NO: 8323
  source 1..120: mol_type = other DNA

SEQ ID NO: 57449 - DNA, 120 bp, synthetic construct; identical to SEQ ID NO: 27495
  source 1..120: mol_type = other DNA

SEQ ID NO: 57450 - DNA, 120 bp, synthetic construct; identical to SEQ ID NO: 27496
  source 1..120: mol_type = other DNA

SEQ ID NO: 57451 - DNA, 120 bp, synthetic construct; identical to SEQ ID NO: 27497
  source 1..120: mol_type = other DNA

SEQ ID NO: 57452 - DNA, 120 bp, synthetic construct; identical to SEQ ID NO: 8324
  source 1..120: mol_type = other DNA

SEQ ID NO: 57453 - DNA, 120 bp, synthetic construct; identical to SEQ ID NO: 27499
  source 1..120: mol_type = other DNA

SEQ ID NO: 57454 - DNA, 120 bp, synthetic construct; identical to SEQ ID NO: 27500
  source 1..120: mol_type = other DNA

SEQ ID NO: 57455 - DNA, 120 bp, synthetic construct; identical to SEQ ID NO: 27501
  source 1..120: mol_type = other DNA

SEQ ID NO: 57456 - DNA, 120 bp, synthetic construct; identical to SEQ ID NO: 8325
  source 1..120: mol_type = other DNA

SEQ ID NO: 57457 - DNA, 120 bp, synthetic construct; identical to SEQ ID NO: 27503
  source 1..120: mol_type = other DNA

SEQ ID NO: 57458 - DNA, 120 bp, synthetic construct; identical to SEQ ID NO: 27504
  source 1..120: mol_type = other DNA

SEQ ID NO: 57459 - DNA, 120 bp, synthetic construct; identical to SEQ ID NO: 27505
  source 1..120: mol_type = other DNA

SEQ ID NO: 57460 - DNA, 120 bp, synthetic construct; identical to SEQ ID NO: 8326
  source 1..120: mol_type = other DNA

SEQ ID NO: 57461 - DNA, 120 bp, synthetic construct; identical to SEQ ID NO: 27507
  source 1..120: mol_type = other DNA

SEQ ID NO: 57462 - DNA, 120 bp, synthetic construct; identical to SEQ ID NO: 27508
  source 1..120: mol_type = other DNA

SEQ ID NO: 57463 - DNA, 120 bp, synthetic construct; identical to SEQ ID NO: 8327
  source 1..120: mol_type = other DNA

SEQ ID NO: 57464 - DNA, 120 bp, synthetic construct; identical to SEQ ID NO: 27510
  source 1..120: mol_type = other DNA

SEQ ID NO: 57465 - DNA, 120 bp, synthetic construct; identical to SEQ ID NO: 27511
  source 1..120: mol_type = other DNA

SEQ ID NO: 57466 - DNA, 120 bp, synthetic construct; identical to SEQ ID NO: 27512
  source 1..120: mol_type = other DNA

SEQ ID NO: 57467 - DNA, 120 bp, synthetic construct; identical to SEQ ID NO: 27513
  source 1..120: mol_type = other DNA

SEQ ID NO: 57468 - DNA, 120 bp, synthetic construct; identical to SEQ ID NO: 8328
  source 1..120: mol_type = other DNA

SEQ ID NO: 57469 - DNA, 120 bp, synthetic construct; identical to SEQ ID NO: 27515
  source 1..120: mol_type = other DNA

SEQ ID NO: 57470 - DNA, 120 bp, synthetic construct; identical to SEQ ID NO: 27516
  source 1..120: mol_type = other DNA

SEQ ID NO: 57471 - DNA, 120 bp, synthetic construct; identical to SEQ ID NO: 8329
  source 1..120: mol_type = other DNA

SEQ ID NO: 57472 - DNA, 120 bp, synthetic construct; identical to SEQ ID NO: 27518
  source 1..120: mol_type = other DNA

SEQ ID NO: 57473 - DNA, 120 bp, synthetic construct; identical to SEQ ID NO: 27519
  source 1..120: mol_type = other DNA

SEQ ID NO: 57474 - DNA, 120 bp, synthetic construct; identical to SEQ ID NO: 27520
  source 1..120: mol_type = other DNA

SEQ ID NO: 57475 - DNA, 120 bp, synthetic construct; identical to SEQ ID NO: 27521
  source 1..120: mol_type = other DNA

SEQ ID NO: 57476 - DNA, 120 bp, synthetic construct; identical to SEQ ID NO: 8330
  source 1..120: mol_type = other DNA

SEQ ID NO: 57477 - DNA, 120 bp, synthetic construct; identical to SEQ ID NO: 27523
  source 1..120: mol_type = other DNA

SEQ ID NO: 57478 - DNA, 120 bp, synthetic construct; identical to SEQ ID NO: 27524
  source 1..120: mol_type = other DNA

SEQ ID NO: 57479 - DNA, 120 bp, synthetic construct; identical to SEQ ID NO: 8331
  source 1..120: mol_type = other DNA

SEQ ID NO: 57480 - DNA, 120 bp, synthetic construct; identical to SEQ ID NO: 27526
  source 1..120: mol_type = other DNA

SEQ ID NO: 57481 - DNA, 120 bp, synthetic construct; identical to SEQ ID NO: 27527
  source 1..120: mol_type = other DNA

SEQ ID NO: 57482 - DNA, 120 bp, synthetic construct; identical to SEQ ID NO: 27528
  source 1..120: mol_type = other DNA

SEQ ID NO: 57483 - DNA, 120 bp, synthetic construct; identical to SEQ ID NO: 27529
  source 1..120: mol_type = other DNA

SEQ ID NO: 57484 - DNA, 120 bp, synthetic construct; identical to SEQ ID NO: 8332
  source 1..120: mol_type = other DNA

SEQ ID NO: 57485 - DNA, 120 bp, synthetic construct; identical to SEQ ID NO: 27531
  source 1..120: mol_type = other DNA

SEQ ID NO: 57486 - DNA, 120 bp, synthetic construct; identical to SEQ ID NO: 27532
  source 1..120: mol_type = other DNA

SEQ ID NO: 57487 - DNA, 120 bp, synthetic construct; identical to SEQ ID NO: 27533
  source 1..120: mol_type = other DNA

SEQ ID NO: 57488 - DNA, 120 bp, synthetic construct; identical to SEQ ID NO: 8333
  source 1..120: mol_type = other DNA

SEQ ID NO: 57489 - DNA, 120 bp, synthetic construct; identical to SEQ ID NO: 27535
  source 1..120: mol_type = other DNA

SEQ ID NO: 57490 - DNA, 120 bp, synthetic construct; identical to SEQ ID NO: 27536
  source 1..120: mol_type = other DNA

SEQ ID NO: 57491 - DNA, 120 bp, synthetic construct; identical to SEQ ID NO: 27537
  source 1..120: mol_type = other DNA

SEQ ID NO: 57492 - DNA, 120 bp, synthetic construct; identical to SEQ ID NO: 27538
  source 1..120: mol_type = other DNA

SEQ ID NO: 57493 - DNA, 120 bp, synthetic construct; identical to SEQ ID NO: 8334
  source 1..120: mol_type = other DNA

SEQ ID NO: 57494 - DNA, 120 bp, synthetic construct; identical to SEQ ID NO: 27540
  source 1..120: mol_type = other DNA

SEQ ID NO: 57495 - DNA, 120 bp, synthetic construct; identical to SEQ ID NO: 27541
  source 1..120: mol_type = other DNA

SEQ ID NO: 57496 - DNA, 120 bp, synthetic construct; identical to SEQ ID NO: 8335
  source 1..120: mol_type = other DNA

SEQ ID NO: 57497 - DNA, 120 bp, synthetic construct; identical to SEQ ID NO: 27543
  source 1..120: mol_type = other DNA

SEQ ID NO: 57498 - DNA, 120 bp, synthetic construct; identical to SEQ ID NO: 27544
  source 1..120: mol_type = other DNA

SEQ ID NO: 57499 - DNA, 120 bp, synthetic construct; identical to SEQ ID NO: 27545
  source 1..120: mol_type = other DNA

SEQ ID NO: 57500 - DNA, 120 bp, synthetic construct; identical to SEQ ID NO: 8336
  source 1..120: mol_type = other DNA

SEQ ID NO: 57501 - DNA, 120 bp, synthetic construct; identical to SEQ ID NO: 27547
  source 1..120: mol_type = other DNA

SEQ ID NO: 57502 - DNA, 120 bp, synthetic construct; identical to SEQ ID NO: 27548
  source 1..120: mol_type = other DNA

SEQ ID NO: 57503 - DNA, 120 bp, synthetic construct; identical to SEQ ID NO: 27549
  source 1..120: mol_type = other DNA

SEQ ID NO: 57504 - DNA, 120 bp, synthetic construct; identical to SEQ ID NO: 8337
  source 1..120: mol_type = other DNA

SEQ ID NO: 57505 - DNA, 120 bp, synthetic construct; identical to SEQ ID NO: 27551
  source 1..120: mol_type = other DNA

SEQ ID NO: 57506 - DNA, 120 bp, synthetic construct; identical to SEQ ID NO: 27552
  source 1..120: mol_type = other DNA

SEQ ID NO: 57507 - DNA, 120 bp, synthetic construct; identical to SEQ ID NO: 27553
  source 1..120: mol_type = other DNA

SEQ ID NO: 57508 - DNA, 120 bp, synthetic construct; identical to SEQ ID NO: 8338
  source 1..120: mol_type = other DNA

SEQ ID NO: 57509 - DNA, 120 bp, synthetic construct; identical to SEQ ID NO: 27555
  source 1..120: mol_type = other DNA

SEQ ID NO: 57510 - DNA, 120 bp, synthetic construct; identical to SEQ ID NO: 27556
  source 1..120: mol_type = other DNA

SEQ ID NO: 57511 - DNA, 120 bp, synthetic construct; identical to SEQ ID NO: 27557
  source 1..120: mol_type = other DNA

SEQ ID NO: 57512 - DNA, 120 bp, synthetic construct; identical to SEQ ID NO: 27558
  source 1..120: mol_type = other DNA

SEQ ID NO: 57513 - DNA, 120 bp, synthetic construct; identical to SEQ ID NO: 8339
  source 1..120: mol_type = other DNA

SEQ ID NO: 57514 - DNA, 120 bp, synthetic construct; identical to SEQ ID NO: 27560
  source 1..120: mol_type = other DNA

SEQ ID NO: 57515 - DNA, 120 bp, synthetic construct; identical to SEQ ID NO: 27561
  source 1..120: mol_type = other DNA

SEQ ID NO: 57516 - DNA, 120 bp, synthetic construct; identical to SEQ ID NO: 8340
  source 1..120: mol_type = other DNA

SEQ ID NO: 57517 - DNA, 120 bp, synthetic construct; identical to SEQ ID NO: 27563
  source 1..120: mol_type = other DNA

SEQ ID NO: 57518 - DNA, 120 bp, synthetic construct; identical to SEQ ID NO: 27564
  source 1..120: mol_type = other DNA

SEQ ID NO: 57519 - DNA, 120 bp, synthetic construct; identical to SEQ ID NO: 27565
  source 1..120: mol_type = other DNA

SEQ ID NO: 57520 - DNA, 120 bp, synthetic construct; identical to SEQ ID NO: 27566
  source 1..120: mol_type = other DNA

SEQ ID NO: 57521 - DNA, 120 bp, synthetic construct; identical to SEQ ID NO: 8341
  source 1..120: mol_type = other DNA

SEQ ID NO: 57522 - DNA, 120 bp, synthetic construct; identical to SEQ ID NO: 27568
  source 1..120: mol_type = other DNA

SEQ ID NO: 57523 - DNA, 120 bp, synthetic construct; identical to SEQ ID NO: 27569
  source 1..120: mol_type = other DNA

SEQ ID NO: 57524 - DNA, 120 bp, synthetic construct; identical to SEQ ID NO: 8342
  source 1..120: mol_type = other DNA

SEQ ID NO: 57525 - DNA, 120 bp, synthetic construct; identical to SEQ ID NO: 27571
  source 1..120: mol_type = other DNA

SEQ ID NO: 57526 - DNA, 120 bp, synthetic construct; identical to SEQ ID NO: 27572
  source 1..120: mol_type = other DNA

SEQ ID NO: 57527 - DNA, 120 bp, synthetic construct; identical to SEQ ID NO: 27573
  source 1..120: mol_type = other DNA

SEQ ID NO: 57528 - DNA, 120 bp, synthetic construct; identical to SEQ ID NO: 8343
  source 1..120: mol_type = other DNA

SEQ ID NO: 57529 - DNA, 120 bp, synthetic construct; identical to SEQ ID NO: 27575
  source 1..120: mol_type = other DNA

SEQ ID NO: 57530 - DNA, 120 bp, synthetic construct; identical to SEQ ID NO: 27576
  source 1..120: mol_type = other DNA

SEQ ID NO: 57531 - DNA, 120 bp, synthetic construct; identical to SEQ ID NO: 27577
  source 1..120: mol_type = other DNA

SEQ ID NO: 57532 - DNA, 120 bp, synthetic construct; identical to SEQ ID NO: 27578
  source 1..120: mol_type = other DNA

SEQ ID NO: 57533 - DNA, 120 bp, synthetic construct; identical to SEQ ID NO: 8344
  source 1..120: mol_type = other DNA

SEQ ID NO: 57534 - DNA, 120 bp, synthetic construct; identical to SEQ ID NO: 27580
  source 1..120: mol_type = other DNA

SEQ ID NO: 57535 - DNA, 120 bp, synthetic construct; identical to SEQ ID NO: 27581
  source 1..120: mol_type = other DNA

SEQ ID NO: 57536 - DNA, 120 bp, synthetic construct; identical to SEQ ID NO: 8345
  source 1..120: mol_type = other DNA

SEQ ID NO: 57537 - DNA, 120 bp, synthetic construct; identical to SEQ ID NO: 27583
  source 1..120: mol_type = other DNA

SEQ ID NO: 57538 - DNA, 120 bp, synthetic construct; identical to SEQ ID NO: 27584
  source 1..120: mol_type = other DNA

SEQ ID NO: 57539 - DNA, 120 bp, synthetic construct; identical to SEQ ID NO: 27585
  source 1..120: mol_type = other DNA

SEQ ID NO: 57540 - DNA, 120 bp, synthetic construct; identical to SEQ ID NO: 27586
  source 1..120: mol_type = other DNA

SEQ ID NO: 57541 - DNA, 120 bp, synthetic construct; identical to SEQ ID NO: 8346
  source 1..120: mol_type = other DNA

SEQ ID NO: 57542 - DNA, 120 bp, synthetic construct; identical to SEQ ID NO: 27588
  source 1..120: mol_type = other DNA

SEQ ID NO: 57543 - DNA, 120 bp, synthetic construct; identical to SEQ ID NO: 27589
  source 1..120: mol_type = other DNA

SEQ ID NO: 57544 - DNA, 120 bp, synthetic construct; identical to SEQ ID NO: 27590
  source 1..120: mol_type = other DNA

SEQ ID NO: 57545 - DNA, 120 bp, synthetic construct; identical to SEQ ID NO: 8347
  source 1..120: mol_type = other DNA

SEQ ID NO: 57546 - DNA, 120 bp, synthetic construct; identical to SEQ ID NO: 27592
  source 1..120: mol_type = other DNA

SEQ ID NO: 57547 - DNA, 120 bp, synthetic construct; identical to SEQ ID NO: 27593
  source 1..120: mol_type = other DNA

SEQ ID NO: 57548 - DNA, 120 bp, synthetic construct; identical to SEQ ID NO: 8348
  source 1..120: mol_type = other DNA

SEQ ID NO: 57549 - DNA, 120 bp, synthetic construct; identical to SEQ ID NO: 27595
  source 1..120: mol_type = other DNA

SEQ ID NO: 57550 - DNA, 120 bp, synthetic construct; identical to SEQ ID NO: 27596
  source 1..120: mol_type = other DNA

SEQ ID NO: 57551 - DNA, 120 bp, synthetic construct; identical to SEQ ID NO: 27597
  source 1..120: mol_type = other DNA

SEQ ID NO: 57552 - DNA, 120 bp, synthetic construct; identical to SEQ ID NO: 8349
  source 1..120: mol_type = other DNA

SEQ ID NO: 57553 - DNA, 120 bp, synthetic construct; identical to SEQ ID NO: 27599
  source 1..120: mol_type = other DNA

SEQ ID NO: 57554 - DNA, 120 bp, synthetic construct; identical to SEQ ID NO: 27600
  source 1..120: mol_type = other DNA

SEQ ID NO: 57555 - DNA, 120 bp, synthetic construct; identical to SEQ ID NO: 27601
  source 1..120: mol_type = other DNA

SEQ ID NO: 57556 - DNA, 120 bp, synthetic construct; identical to SEQ ID NO: 27602
  source 1..120: mol_type = other DNA

SEQ ID NO: 57557 - DNA, 120 bp, synthetic construct; identical to SEQ ID NO: 8350
  source 1..120: mol_type = other DNA

SEQ ID NO: 57558 - DNA, 120 bp, synthetic construct; identical to SEQ ID NO: 27604
  source 1..120: mol_type = other DNA

SEQ ID NO: 57559 - DNA, 120 bp, synthetic construct; identical to SEQ ID NO: 27605
  source 1..120: mol_type = other DNA

SEQ ID NO: 57560 - DNA, 120 bp, synthetic construct; identical to SEQ ID NO: 27606
  source 1..120: mol_type = other DNA

SEQ ID NO: 57561 - DNA, 120 bp, synthetic construct; identical to SEQ ID NO: 8351
  source 1..120: mol_type = other DNA

SEQ ID NO: 57562 - DNA, 120 bp, synthetic construct; identical to SEQ ID NO: 27608
  source 1..120: mol_type = other DNA

SEQ ID NO: 57563 - DNA, 120 bp, synthetic construct; identical to SEQ ID NO: 27609
  source 1..120: mol_type = other DNA

SEQ ID NO: 57564 - DNA, 120 bp, synthetic construct; identical to SEQ ID NO: 8352
  source 1..120: mol_type = other DNA

SEQ ID NO: 57565 - DNA, 120 bp, synthetic construct; identical to SEQ ID NO: 27611
  source 1..120: mol_type = other DNA

SEQ ID NO: 57566 - DNA, 120 bp, synthetic construct; identical to SEQ ID NO: 27612
  source 1..120: mol_type = other DNA

SEQ ID NO: 57567 - DNA, 120 bp, synthetic construct; identical to SEQ ID NO: 27613
  source 1..120: mol_type = other DNA

SEQ ID NO: 57568 - DNA, 120 bp, synthetic construct; identical to SEQ ID NO: 8353
  source 1..120: mol_type = other DNA

SEQ ID NO: 57569 - DNA, 120 bp, synthetic construct; identical to SEQ ID NO: 27615
  source 1..120: mol_type = other DNA

SEQ ID NO: 57570 - DNA, 120 bp, synthetic construct; identical to SEQ ID NO: 27616
  source 1..120: mol_type = other DNA

SEQ ID NO: 57571 - DNA, 120 bp, synthetic construct; identical to SEQ ID NO: 27617
  source 1..120: mol_type = other DNA

SEQ ID NO: 57572 - DNA, 120 bp, synthetic construct; identical to SEQ ID NO: 8354
  source 1..120: mol_type = other DNA

SEQ ID NO: 57573 - DNA, 120 bp, synthetic construct; identical to SEQ ID NO: 27619
  source 1..120: mol_type = other DNA

SEQ ID NO: 57574 - DNA, 120 bp, synthetic construct; identical to SEQ ID NO: 27620
  source 1..120: mol_type = other DNA

SEQ ID NO: 57575 - DNA, 120 bp, synthetic construct; identical to SEQ ID NO: 27621
  source 1..120: mol_type = other DNA

SEQ ID NO: 57576 - DNA, 120 bp, synthetic construct; identical to SEQ ID NO: 8355
  source 1..120: mol_type = other DNA

SEQ ID NO: 57577 - DNA, 120 bp, synthetic construct; identical to SEQ ID NO: 27623
  source 1..120: mol_type = other DNA

SEQ ID NO: 57578 - DNA, 120 bp, synthetic construct; identical to SEQ ID NO: 27624
  source 1..120: mol_type = other DNA

SEQ ID NO: 57579 - DNA, 120 bp, synthetic construct; identical to SEQ ID NO: 27625
  source 1..120: mol_type = other DNA

SEQ ID NO: 57580 - DNA, 120 bp, synthetic construct; identical to SEQ ID NO: 8356
  source 1..120: mol_type = other DNA

SEQ ID NO: 57581 - DNA, 120 bp, synthetic construct; identical to SEQ ID NO: 27627
  source 1..120: mol_type = other DNA

SEQ ID NO: 57582 - DNA, 120 bp, synthetic construct; identical to SEQ ID NO: 27628
  source 1..120: mol_type = other DNA

SEQ ID NO: 57583 - DNA, 120 bp, synthetic construct; identical to SEQ ID NO: 27629
  source 1..120: mol_type = other DNA

SEQ ID NO: 57584 - DNA, 120 bp, synthetic construct; identical to SEQ ID NO: 27630
  source 1..120: mol_type = other DNA

SEQ ID NO: 57585 - DNA, 120 bp, synthetic construct; identical to SEQ ID NO: 8357
  source 1..120: mol_type = other DNA

SEQ ID NO: 57586 - DNA, 120 bp, synthetic construct; identical to SEQ ID NO: 27632
  source 1..120: mol_type = other DNA

SEQ ID NO: 57587 - DNA, 120 bp, synthetic construct; identical to SEQ ID NO: 27633
  source 1..120: mol_type = other DNA

SEQ ID NO: 57588 - DNA, 120 bp, synthetic construct; identical to SEQ ID NO: 1314
  source 1..120: mol_type = other DNA

SEQ ID NO: 57589 - DNA, 120 bp, synthetic construct; identical to SEQ ID NO: 27635
  source 1..120: mol_type = other DNA

SEQ ID NO: 57590 - DNA, 120 bp, synthetic construct; identical to SEQ ID NO: 27636
  source 1..120: mol_type = other DNA

SEQ ID NO: 57591 - DNA, 120 bp, synthetic construct; identical to SEQ ID NO: 27637
  source 1..120: mol_type = other DNA

SEQ ID NO: 57592 - DNA, 120 bp, synthetic construct; identical to SEQ ID NO: 27638
  source 1..120: mol_type = other DNA

SEQ ID NO: 57593 - DNA, 120 bp, synthetic construct; identical to SEQ ID NO: 8359
  source 1..120: mol_type = other DNA

SEQ ID NO: 57594 - DNA, 120 bp, synthetic construct; identical to SEQ ID NO: 27640
  source 1..120: mol_type = other DNA

SEQ ID NO: 57595 - DNA, 120 bp, synthetic construct; identical to SEQ ID NO: 27641
  source 1..120: mol_type = other DNA

SEQ ID NO: 57596 - DNA, 120 bp, synthetic construct; identical to SEQ ID NO: 8360
  source 1..120: mol_type = other DNA

SEQ ID NO: 57597 - DNA, 120 bp, synthetic construct; identical to SEQ ID NO: 27643
  source 1..120: mol_type = other DNA

SEQ ID NO: 57598 - DNA, 120 bp, synthetic construct; identical to SEQ ID NO: 27644
  source 1..120: mol_type = other DNA

SEQ ID NO: 57599 - DNA, 120 bp, synthetic construct; identical to SEQ ID NO: 27645
  source 1..120: mol_type = other DNA

SEQ ID NO: 57600 - DNA, 120 bp, synthetic construct; identical to SEQ ID NO: 27646
  source 1..120: mol_type = other DNA

SEQ ID NO: 57601 - DNA, 120 bp, synthetic construct; identical to SEQ ID NO: 8361
  source 1..120: mol_type = other DNA

SEQ ID NO: 57602 - DNA, 120 bp, synthetic construct; identical to SEQ ID NO: 27648
  source 1..120: mol_type = other DNA

SEQ ID NO: 57603 - DNA, 120 bp, synthetic construct; identical to SEQ ID NO: 27649
  source 1..120: mol_type = other DNA

SEQ ID NO: 57604 - DNA, 120 bp, synthetic construct; identical to SEQ ID NO: 8362
  source 1..120: mol_type = other DNA

SEQ ID NO: 57605 - DNA, 120 bp, synthetic construct; identical to SEQ ID NO: 27651
  source 1..120: mol_type = other DNA

SEQ ID NO: 57606 - DNA, 120 bp, synthetic construct; identical to SEQ ID NO: 27652
  source 1..120: mol_type = other DNA

SEQ ID NO: 57607 - DNA, 120 bp, synthetic construct; identical to SEQ ID NO: 27653
  source 1..120: mol_type = other DNA

SEQ ID NO: 57608 - DNA, 120 bp, synthetic construct; identical to SEQ ID NO: 27654
  source 1..120: mol_type = other DNA

SEQ ID NO: 57609 - DNA, 120 bp, synthetic construct; identical to SEQ ID NO: 8363
  source 1..120: mol_type = other DNA

SEQ ID NO: 57610 - DNA, 120 bp, synthetic construct; identical to SEQ ID NO: 27656
  source 1..120: mol_type = other DNA

SEQ ID NO: 57611 - DNA, 120 bp, synthetic construct; identical to SEQ ID NO: 27657
  source 1..120: mol_type = other DNA

SEQ ID NO: 57612 - DNA, 120 bp, synthetic construct; identical to SEQ ID NO: 27658
  source 1..120: mol_type = other DNA

SEQ ID NO: 57613 - DNA, 120 bp, synthetic construct; identical to SEQ ID NO: 8364
  source 1..120: mol_type = other DNA

SEQ ID NO: 57614 - DNA, 120 bp, synthetic construct; identical to SEQ ID NO: 27660
  source 1..120: mol_type = other DNA

SEQ ID NO: 57615 - DNA, 120 bp, synthetic construct; identical to SEQ ID NO: 27661
  source 1..120: mol_type = other DNA

SEQ ID NO: 57616 - DNA, 120 bp, synthetic construct; identical to SEQ ID NO: 8365
  source 1..120: mol_type = other DNA

SEQ ID NO: 57617 - DNA, 120 bp, synthetic construct; identical to SEQ ID NO: 27663
  source 1..120: mol_type = other DNA

SEQ ID NO: 57618 - DNA, 120 bp, synthetic construct; identical to SEQ ID NO: 27664
  source 1..120: mol_type = other DNA

SEQ ID NO: 57619 - DNA, 120 bp, synthetic construct; identical to SEQ ID NO: 27665
  source 1..120: mol_type = other DNA

SEQ ID NO: 57620 - DNA, 120 bp, synthetic construct; identical to SEQ ID NO: 27666
  source 1..120: mol_type = other DNA

SEQ ID NO: 57621 - DNA, 120 bp, synthetic construct; identical to SEQ ID NO: 8366
  source 1..120: mol_type = other DNA

SEQ ID NO: 57622 - DNA, 120 bp, synthetic construct; identical to SEQ ID NO: 27668
  source 1..120: mol_type = other DNA

SEQ ID NO: 57623 - DNA, 120 bp, synthetic construct; identical to SEQ ID NO: 27669
  source 1..120: mol_type = other DNA

SEQ ID NO: 57624 - DNA, 120 bp, synthetic construct; identical to SEQ ID NO: 27670
  source 1..120: mol_type = other DNA

SEQ ID NO: 57625 - DNA, 120 bp, synthetic construct; identical to SEQ ID NO: 8367
  source 1..120: mol_type = other DNA

SEQ ID NO: 57626 - DNA, 120 bp, synthetic construct; identical to SEQ ID NO: 27672
  source 1..120: mol_type = other DNA

SEQ ID NO: 57627 - DNA, 120 bp, synthetic construct; identical to SEQ ID NO: 27673
  source 1..120: mol_type = other DNA

SEQ ID NO: 57628 - DNA, 120 bp, synthetic construct; identical to SEQ ID NO: 27674
  source 1..120: mol_type = other DNA

SEQ ID NO: 57629 - DNA, 120 bp, synthetic construct; identical to SEQ ID NO: 8368
  source 1..120: mol_type = other DNA

SEQ ID NO: 57630 - DNA, 120 bp, synthetic construct; identical to SEQ ID NO: 27676
  source 1..120: mol_type = other DNA

SEQ ID NO: 57631 - DNA, 120 bp, synthetic construct; identical to SEQ ID NO: 27677
  source 1..120: mol_type = other DNA

SEQ ID NO: 57632 - DNA, 120 bp, synthetic construct; identical to SEQ ID NO: 8369
  source 1..120: mol_type = other DNA

SEQ ID NO: 57633 - DNA, 120 bp, synthetic construct; identical to SEQ ID NO: 27679
  source 1..120: mol_type = other DNA

SEQ ID NO: 57634 - DNA, 120 bp, synthetic construct; identical to SEQ ID NO: 27680
  source 1..120: mol_type = other DNA

SEQ ID NO: 57635 - DNA, 120 bp, synthetic construct; identical to SEQ ID NO: 27681
  source 1..120: mol_type = other DNA

SEQ ID NO: 57636 - DNA, 120 bp, synthetic construct; identical to SEQ ID NO: 27682
  source 1..120: mol_type = other DNA

SEQ ID NO: 57637 - DNA, 120 bp, synthetic construct; identical to SEQ ID NO: 8370
  source 1..120: mol_type = other DNA

SEQ ID NO: 57638 - DNA, 120 bp, synthetic construct; identical to SEQ ID NO: 27684
  source 1..120: mol_type = other DNA

SEQ ID NO: 57639 - DNA, 120 bp, synthetic construct; identical to SEQ ID NO: 27685
  source 1..120: mol_type = other DNA

SEQ ID NO: 57640 - DNA, 120 bp, synthetic construct; identical to SEQ ID NO: 8371
  source 1..120: mol_type = other DNA

SEQ ID NO: 57641 - DNA, 120 bp, synthetic construct; identical to SEQ ID NO: 27687
  source 1..120: mol_type = other DNA

SEQ ID NO: 57642 - DNA, 120 bp, synthetic construct; identical to SEQ ID NO: 27688
  source 1..120: mol_type = other DNA

SEQ ID NO: 57643 - DNA, 120 bp, synthetic construct; identical to SEQ ID NO: 27689
  source 1..120: mol_type = other DNA

SEQ ID NO: 57644 - DNA, 120 bp, synthetic construct; identical to SEQ ID NO: 8372
  source 1..120: mol_type = other DNA

SEQ ID NO: 57645 - DNA, 120 bp, synthetic construct; identical to SEQ ID NO: 27691
  source 1..120: mol_type = other DNA

SEQ ID NO: 57646 - DNA, 120 bp, synthetic construct; identical to SEQ ID NO: 27692
  source 1..120: mol_type = other DNA

SEQ ID NO: 57647 - DNA, 120 bp, synthetic construct; identical to SEQ ID NO: 27693
  source 1..120: mol_type = other DNA

SEQ ID NO: 57648 - DNA, 120 bp, synthetic construct; identical to SEQ ID NO: 27694
  source 1..120: mol_type = other DNA

SEQ ID NO: 57649 - DNA, 120 bp, synthetic construct; identical to SEQ ID NO: 8373
  source 1..120: mol_type = other DNA

SEQ ID NO: 57650 - DNA, 120 bp, synthetic construct; identical to SEQ ID NO: 27696
  source 1..120: mol_type = other DNA

SEQ ID NO: 57651 - DNA, 120 bp, synthetic construct; identical to SEQ ID NO: 27697
  source 1..120: mol_type = other DNA

SEQ ID NO: 57652 - DNA, 120 bp, synthetic construct; identical to SEQ ID NO: 27698
  source 1..120: mol_type = other DNA

SEQ ID NO: 57653 - DNA, 120 bp, synthetic construct; identical to SEQ ID NO: 27699
  source 1..120: mol_type = other DNA

SEQ ID NO: 57654 - DNA, 120 bp, synthetic construct; identical to SEQ ID NO: 8374
  source 1..120: mol_type = other DNA

SEQ ID NO: 57655 - DNA, 120 bp, synthetic construct; identical to SEQ ID NO: 27701
  source 1..120: mol_type = other DNA

SEQ ID NO: 57656 - DNA, 120 bp, synthetic construct; identical to SEQ ID NO: 27702
  source 1..120: mol_type = other DNA

SEQ ID NO: 57657 - DNA, 120 bp, synthetic construct; identical to SEQ ID NO: 8375
  source 1..120: mol_type = other DNA

SEQ ID NO: 57658 - DNA, 120 bp, synthetic construct; identical to SEQ ID NO: 27704
  source 1..120: mol_type = other DNA

SEQ ID NO: 57659 - DNA, 120 bp, synthetic construct; identical to SEQ ID NO: 27705
  source 1..120: mol_type = other DNA

SEQ ID NO: 57660 - DNA, 120 bp, synthetic construct; identical to SEQ ID NO: 27706
  source 1..120: mol_type = other DNA

SEQ ID NO: 57661 - DNA, 120 bp, synthetic construct; identical to SEQ ID NO: 8376
  source 1..120: mol_type = other DNA

SEQ ID NO: 57662 - DNA, 120 bp, synthetic construct; identical to SEQ ID NO: 27708
  source 1..120: mol_type = other DNA

SEQ ID NO: 57663 - DNA, 120 bp, synthetic construct; identical to SEQ ID NO: 27709
  source 1..120: mol_type = other DNA

SEQ ID NO: 57664 - DNA, 120 bp, synthetic construct; identical to SEQ ID NO: 27710
  source 1..120: mol_type = other DNA

SEQ ID NO: 57665 - DNA, 120 bp, synthetic construct; identical to SEQ ID NO: 27711
  source 1..120: mol_type = other DNA

SEQ ID NO: 57666 - DNA, 120 bp, synthetic construct; identical to SEQ ID NO: 8377
  source 1..120: mol_type = other DNA

SEQ ID NO: 57667 - DNA, 120 bp, synthetic construct; identical to SEQ ID NO: 27713
  source 1..120: mol_type = other DNA

SEQ ID NO: 57668 - DNA, 120 bp, synthetic construct; identical to SEQ ID NO: 27714
  source 1..120: mol_type = other DNA

SEQ ID NO: 57669 - DNA, 120 bp, synthetic construct; identical to SEQ ID NO: 8378
  source 1..120: mol_type = other DNA

SEQ ID NO: 57670 - DNA, 120 bp, synthetic construct; identical to SEQ ID NO: 27716
  source 1..120: mol_type = other DNA

SEQ ID NO: 57671 - DNA, 120 bp, synthetic construct; identical to SEQ ID NO: 27717
  source 1..120: mol_type = other DNA

SEQ ID NO: 57672 - DNA, 120 bp, synthetic construct; identical to SEQ ID NO: 27718
  source 1..120: mol_type = other DNA

SEQ ID NO: 57673 - DNA, 120 bp, synthetic construct; identical to SEQ ID NO: 8379
  source 1..120: mol_type = other DNA

SEQ ID NO: 57674 - DNA, 120 bp, synthetic construct; identical to SEQ ID NO: 27720
  source 1..120: mol_type = other DNA

SEQ ID NO: 57675 - DNA, 120 bp, synthetic construct; identical to SEQ ID NO: 27721
  source 1..120: mol_type = other DNA

SEQ ID NO: 57676 - DNA, 120 bp, synthetic construct; identical to SEQ ID NO: 27722
  source 1..120: mol_type = other DNA

SEQ ID NO: 57677 - DNA, 120 bp, synthetic construct; identical to SEQ ID NO: 8380
  source 1..120: mol_type = other DNA

SEQ ID NO: 57678 - DNA, 120 bp, synthetic construct; identical to SEQ ID NO: 27724
  source 1..120: mol_type = other DNA

SEQ ID NO: 57679 - DNA, 120 bp, synthetic construct; identical to SEQ ID NO: 27725
  source 1..120: mol_type = other DNA

SEQ ID NO: 57680 - DNA, 120 bp, synthetic construct; identical to SEQ ID NO: 27726
  source 1..120: mol_type = other DNA

SEQ ID NO: 57681 - DNA, 120 bp, synthetic construct; identical to SEQ ID NO: 8381
  source 1..120: mol_type = other DNA

SEQ ID NO: 57682 - DNA, 120 bp, synthetic construct; identical to SEQ ID NO: 27728
  source 1..120: mol_type = other DNA

SEQ ID NO: 57683 - DNA, 120 bp, synthetic construct; identical to SEQ ID NO: 27729
  source 1..120: mol_type = other DNA

SEQ ID NO: 57684 - DNA, 120 bp, synthetic construct; identical to SEQ ID NO: 27730
  source 1..120: mol_type = other DNA

SEQ ID NO: 57685 - DNA, 120 bp, synthetic construct; identical to SEQ ID NO: 8382
  source 1..120: mol_type = other DNA

SEQ ID NO: 57686 - DNA, 120 bp, synthetic construct; identical to SEQ ID NO: 27732
  source 1..120: mol_type = other DNA

SEQ ID NO: 57687 - DNA, 120 bp, synthetic construct; identical to SEQ ID NO: 27733
  source 1..120: mol_type = other DNA

SEQ ID NO: 57688 - DNA, 120 bp, synthetic construct; identical to SEQ ID NO: 27734
  source 1..120: mol_type = other DNA

SEQ ID NO: 57689 - DNA, 120 bp, synthetic construct; identical to SEQ ID NO: 8383
  source 1..120: mol_type = other DNA

SEQ ID NO: 57690 - DNA, 120 bp, synthetic construct; identical to SEQ ID NO: 27736
  source 1..120: mol_type = other DNA

SEQ ID NO: 57691 - DNA, 120 bp, synthetic construct; identical to SEQ ID NO: 27737
  source 1..120: mol_type = other DNA

SEQ ID NO: 57692 - DNA, 120 bp, synthetic construct; identical to SEQ ID NO: 27738
  source 1..120: mol_type = other DNA

SEQ ID NO: 57693 - DNA, 120 bp, synthetic construct; identical to SEQ ID NO: 8384
  source 1..120: mol_type = other DNA

SEQ ID NO: 57694 - DNA, 120 bp, synthetic construct; identical to SEQ ID NO: 27740
  source 1..120: mol_type = other DNA

SEQ ID NO: 57695 - DNA, 120 bp, synthetic construct; identical to SEQ ID NO: 27741
  source 1..120: mol_type = other DNA

SEQ ID NO: 57696 - DNA, 120 bp, synthetic construct; identical to SEQ ID NO: 27742
  source 1..120: mol_type = other DNA

SEQ ID NO: 57697 - DNA, 120 bp, synthetic construct; identical to SEQ ID NO: 27743
  source 1..120: mol_type = other DNA

SEQ ID NO: 57698 - DNA, 120 bp, synthetic construct; identical to SEQ ID NO: 8385
  source 1..120: mol_type = other DNA

SEQ ID NO: 57699 - DNA, 120 bp, synthetic construct; identical to SEQ ID NO: 27745
  source 1..120: mol_type = other DNA

SEQ ID NO: 57700 - DNA, 120 bp, synthetic construct; identical to SEQ ID NO: 27746
  source 1..120: mol_type = other DNA

SEQ ID NO: 57701 - DNA, 120 bp, synthetic construct; identical to SEQ ID NO: 8386
  source 1..120: mol_type = other DNA

SEQ ID NO: 57702 - DNA, 120 bp, synthetic construct; identical to SEQ ID NO: 27748
  source 1..120: mol_type = other DNA

SEQ ID NO: 57703 - DNA, 120 bp, synthetic construct; identical to SEQ ID NO: 27749
  source 1..120: mol_type = other DNA

SEQ ID NO: 57704 - DNA, 120 bp, synthetic construct; identical to SEQ ID NO: 27750
  source 1..120: mol_type = other DNA

SEQ ID NO: 57705 - DNA, 120 bp, synthetic construct; identical to SEQ ID NO: 27751
  source 1..120: mol_type = other DNA

SEQ ID NO: 57706 - DNA, 120 bp, synthetic construct; identical to SEQ ID NO: 8387
  source 1..120: mol_type = other DNA

SEQ ID NO: 57707 - DNA, 120 bp, synthetic construct; identical to SEQ ID NO: 27753
  source 1..120: mol_type = other DNA

SEQ ID NO: 57708 - DNA, 120 bp, synthetic construct; identical to SEQ ID NO: 27754
  source 1..120: mol_type = other DNA

SEQ ID NO: 57709 - DNA, 120 bp, synthetic construct; identical to SEQ ID NO: 27755
  source 1..120: mol_type = other DNA

SEQ ID NO: 57710 - DNA, 120 bp, synthetic construct; identical to SEQ ID NO: 8388
  source 1..120: mol_type = other DNA

SEQ ID NO: 57711 - DNA, 120 bp, synthetic construct; identical to SEQ ID NO: 27757
  source 1..120: mol_type = other DNA

SEQ ID NO: 57712 - DNA, 120 bp, synthetic construct; identical to SEQ ID NO: 27758
  source 1..120: mol_type = other DNA

SEQ ID NO: 57713 - DNA, 120 bp, synthetic construct; identical to SEQ ID NO: 27759
  source 1..120: mol_type = other DNA

SEQ ID NO: 57714 - DNA, 120 bp, synthetic construct; identical to SEQ ID NO: 8389
  source 1..120: mol_type = other DNA

SEQ ID NO: 57715 - DNA, 120 bp, synthetic construct; identical to SEQ ID NO: 27761
  source 1..120: mol_type = other DNA

SEQ ID NO: 57716 - DNA, 120 bp, synthetic construct; identical to SEQ ID NO: 27762
  source 1..120: mol_type = other DNA

SEQ ID NO: 57717 - DNA, 120 bp, synthetic construct; identical to SEQ ID NO: 8390
  source 1..120: mol_type = other DNA

SEQ ID NO: 57718 - DNA, 120 bp, synthetic construct; identical to SEQ ID NO: 27764
  source 1..120: mol_type = other DNA

SEQ ID NO: 57719 - DNA, 120 bp, synthetic construct; identical to SEQ ID NO: 27765
  source 1..120: mol_type = other DNA

SEQ ID NO: 57720 - DNA, 120 bp, synthetic construct; identical to SEQ ID NO: 27766
  source 1..120: mol_type = other DNA

SEQ ID NO: 57721 - DNA, 120 bp, synthetic construct; identical to SEQ ID NO: 27767
  source 1..120: mol_type = other DNA

SEQ ID NO: 57722 - DNA, 120 bp, synthetic construct; identical to SEQ ID NO: 8391
  source 1..120: mol_type = other DNA

SEQ ID NO: 57723 - DNA, 120 bp, synthetic construct; identical to SEQ ID NO: 27769
  source 1..120: mol_type = other DNA

SEQ ID NO: 57724 - DNA, 120 bp, synthetic construct; identical to SEQ ID NO: 27770
  source 1..120: mol_type = other DNA

SEQ ID NO: 57725 - DNA, 120 bp, synthetic construct; identical to SEQ ID NO: 8392
  source 1..120: mol_type = other DNA

SEQ ID NO: 57726 - DNA, 120 bp, synthetic construct; identical to SEQ ID NO: 27772
  source 1..120: mol_type = other DNA

SEQ ID NO: 57727 - DNA, 120 bp, synthetic construct; identical to SEQ ID NO: 27773
  source 1..120: mol_type = other DNA

SEQ ID NO: 57728 - DNA, 120 bp, synthetic construct; identical to SEQ ID NO: 27774
  source 1..120: mol_type = other DNA

SEQ ID NO: 57729 - DNA, 120 bp, synthetic construct; identical to SEQ ID NO: 27775
  source 1..120: mol_type = other DNA

SEQ ID NO: 57730 - DNA, 120 bp, synthetic construct; identical to SEQ ID NO: 8393
  source 1..120: mol_type = other DNA

SEQ ID NO: 57731 - DNA, 120 bp, synthetic construct; identical to SEQ ID NO: 27777
  source 1..120: mol_type = other DNA

SEQ ID NO: 57732 - DNA, 120 bp, synthetic construct; identical to SEQ ID NO: 27778
  source 1..120: mol_type = other DNA

SEQ ID NO: 57733 - DNA, 120 bp, synthetic construct; identical to SEQ ID NO: 27779
  source 1..120: mol_type = other DNA

SEQ ID NO: 57734 - DNA, 120 bp, synthetic construct; identical to SEQ ID NO: 8394
  source 1..120: mol_type = other DNA

SEQ ID NO: 57735 - DNA, 120 bp, synthetic construct; identical to SEQ ID NO: 27781
  source 1..120: mol_type = other DNA

SEQ ID NO: 57736 - DNA, 120 bp, synthetic construct; identical to SEQ ID NO: 27782
  source 1..120: mol_type = other DNA

SEQ ID NO: 57737 - DNA, 120 bp, synthetic construct; identical to SEQ ID NO: 27783
  source 1..120: mol_type = other DNA

SEQ ID NO: 57738 - DNA, 120 bp, synthetic construct; identical to SEQ ID NO: 8395
  source 1..120: mol_type = other DNA

SEQ ID NO: 57739 - DNA, 120 bp, synthetic construct; identical to SEQ ID NO: 27785
  source 1..120: mol_type = other DNA

SEQ ID NO: 57740 - DNA, 120 bp, synthetic construct; identical to SEQ ID NO: 27786
  source 1..120: mol_type = other DNA

SEQ ID NO: 57741 - DNA, 120 bp, synthetic construct; identical to SEQ ID NO: 8396
  source 1..120: mol_type = other DNA

SEQ ID NO: 57742 - DNA, 120 bp, synthetic construct; identical to SEQ ID NO: 27788
  source 1..120: mol_type = other DNA

SEQ ID NO: 57743 - DNA, 120 bp, synthetic construct; identical to SEQ ID NO: 27789
  source 1..120: mol_type = other DNA

SEQ ID NO: 57744 - DNA, 120 bp, synthetic construct; identical to SEQ ID NO: 27790
  source 1..120: mol_type = other DNA

SEQ ID NO: 57745 - DNA, 120 bp, synthetic construct; identical to SEQ ID NO: 27791
  source 1..120: mol_type = other DNA

SEQ ID NO: 57746 - DNA, 120 bp, synthetic construct; identical to SEQ ID NO: 8397
  source 1..120: mol_type = other DNA

SEQ ID NO: 57747 - DNA, 120 bp, synthetic construct; identical to SEQ ID NO: 27793
  source 1..120: mol_type = other DNA

SEQ ID NO: 57748 - DNA, 120 bp, synthetic construct; identical to SEQ ID NO: 27794
  source 1..120: mol_type = other DNA

SEQ ID NO: 57749 - DNA, 120 bp, synthetic construct; identical to SEQ ID NO: 27795
  source 1..120: mol_type = other DNA

SEQ ID NO: 57750 - DNA, 120 bp, synthetic construct; identical to SEQ ID NO: 8398
  source 1..120: mol_type = other DNA

SEQ ID NO: 57751 - DNA, 120 bp, synthetic construct; identical to SEQ ID NO: 27797
  source 1..120: mol_type = other DNA

SEQ ID NO: 57752 - DNA, 120 bp, synthetic construct; identical to SEQ ID NO: 27798
  source 1..120: mol_type = other DNA

SEQ ID NO: 57753 - DNA, 120 bp, synthetic construct; identical to SEQ ID NO: 27799
  source 1..120: mol_type = other DNA

SEQ ID NO: 57754 - DNA, 120 bp, synthetic construct; identical to SEQ ID NO: 8399
  source 1..120: mol_type = other DNA

SEQ ID NO: 57755 - DNA, 120 bp, synthetic construct; identical to SEQ ID NO: 27801
  source 1..120: mol_type = other DNA

SEQ ID NO: 57756 - DNA, 120 bp, synthetic construct; identical to SEQ ID NO: 27802
  source 1..120: mol_type = other DNA

SEQ ID NO: 57757 - DNA, 120 bp, synthetic construct; identical to SEQ ID NO: 8400
  source 1..120: mol_type = other DNA

SEQ ID NO: 57758 - DNA, 120 bp, synthetic construct; identical to SEQ ID NO: 27804
  source 1..120: mol_type = other DNA

SEQ ID NO: 57759 - DNA, 120 bp, synthetic construct; identical to SEQ ID NO: 27805
  source 1..120: mol_type = other DNA

SEQ ID NO: 57760 - DNA, 120 bp, synthetic construct; identical to SEQ ID NO: 27806
  source 1..120: mol_type = other DNA

SEQ ID NO: 57761 - DNA, 120 bp, synthetic construct; identical to SEQ ID NO: 8401
  source 1..120: mol_type = other DNA

SEQ ID NO: 57762 - DNA, 120 bp, synthetic construct; identical to SEQ ID NO: 27808
  source 1..120: mol_type = other DNA

SEQ ID NO: 57763 - DNA, 120 bp, synthetic construct; identical to SEQ ID NO: 27809
  source 1..120: mol_type = other DNA

SEQ ID NO: 57764 - DNA, 120 bp, synthetic construct; identical to SEQ ID NO: 27810
  source 1..120: mol_type = other DNA

SEQ ID NO: 57765 - DNA, 120 bp, synthetic construct; identical to SEQ ID NO: 8402
  source 1..120: mol_type = other DNA

SEQ ID NO: 57766 - DNA, 120 bp, synthetic construct; identical to SEQ ID NO: 27812
  source 1..120: mol_type = other DNA

SEQ ID NO: 57767 - DNA, 120 bp, synthetic construct; identical to SEQ ID NO: 27813
  source 1..120: mol_type = other DNA

SEQ ID NO: 57768 - DNA, 120 bp, synthetic construct; identical to SEQ ID NO: 27814
  source 1..120: mol_type = other DNA

SEQ ID NO: 57769 - DNA, 120 bp, synthetic construct; identical to SEQ ID NO: 8403
  source 1..120: mol_type = other DNA

SEQ ID NO: 57770 - DNA, 120 bp, synthetic construct; identical to SEQ ID NO: 27816
  source 1..120: mol_type = other DNA

SEQ ID NO: 57771 - DNA, 120 bp, synthetic construct; identical to SEQ ID NO: 27817
  source 1..120: mol_type = other DNA

SEQ ID NO: 57772 - DNA, 120 bp, synthetic construct; identical to SEQ ID NO: 27818
  source 1..120: mol_type = other DNA

SEQ ID NO: 57773 - DNA, 120 bp, synthetic construct; identical to SEQ ID NO: 8404
  source 1..120: mol_type = other DNA

SEQ ID NO: 57774 - DNA, 120 bp, synthetic construct; identical to SEQ ID NO: 27820
  source 1..120: mol_type = other DNA

SEQ ID NO: 57775 - DNA, 120 bp, synthetic construct; identical to SEQ ID NO: 27821
  source 1..120: mol_type = other DNA

SEQ ID NO: 57776 - DNA, 120 bp, synthetic construct; identical to SEQ ID NO: 27822
  source 1..120: mol_type = other DNA

SEQ ID NO: 57777 - DNA, 120 bp, synthetic construct; identical to SEQ ID NO: 27823
  source 1..120: mol_type = other DNA

SEQ ID NO: 57778 - DNA, 120 bp, synthetic construct; identical to SEQ ID NO: 8405
  source 1..120: mol_type = other DNA

SEQ ID NO: 57779 - DNA, 120 bp, synthetic construct; identical to SEQ ID NO: 27825
  source 1..120: mol_type = other DNA

SEQ ID NO: 57780 - DNA, 120 bp, synthetic construct; identical to SEQ ID NO: 27826
  source 1..120: mol_type = other DNA

SEQ ID NO: 57781 - DNA, 120 bp, synthetic construct; identical to SEQ ID NO: 8406
  source 1..120: mol_type = other DNA

SEQ ID NO: 57782 - DNA, 120 bp, synthetic construct; identical to SEQ ID NO: 27828
  source 1..120: mol_type = other DNA

SEQ ID NO: 57783 - DNA, 120 bp, synthetic construct; identical to SEQ ID NO: 27829
  source 1..120: mol_type = other DNA

SEQ ID NO: 57784 - DNA, 120 bp, synthetic construct; identical to SEQ ID NO: 27830
  source 1..120: mol_type = other DNA

SEQ ID NO: 57785 - DNA, 120 bp, synthetic construct; identical to SEQ ID NO: 27831
  source 1..120: mol_type = other DNA

SEQ ID NO: 57786 - DNA, 120 bp, synthetic construct; identical to SEQ ID NO: 8407
  source 1..120: mol_type = other DNA

SEQ ID NO: 57787 - DNA, 120 bp, synthetic construct; identical to SEQ ID NO: 27833
  source 1..120: mol_type = other DNA

SEQ ID NO: 57788 - DNA, 120 bp, synthetic construct; identical to SEQ ID NO: 27834
  source 1..120: mol_type = other DNA

SEQ ID NO: 57789 - DNA, 120 bp, synthetic construct; identical to SEQ ID NO: 27835
  source 1..120: mol_type = other DNA

SEQ ID NO: 57790 - DNA, 120 bp, synthetic construct; identical to SEQ ID NO: 8408
  source 1..120: mol_type = other DNA

SEQ ID NO: 57791 - DNA, 120 bp, synthetic construct; identical to SEQ ID NO: 27837
  source 1..120: mol_type = other DNA

SEQ ID NO: 57792 - DNA, 120 bp, synthetic construct; identical to SEQ ID NO: 27838
  source 1..120: mol_type = other DNA

SEQ ID NO: 57793 - DNA, 120 bp, synthetic construct; identical to SEQ ID NO: 27839
  source 1..120: mol_type = other DNA

SEQ ID NO: 57794 - DNA, 120 bp, synthetic construct; identical to SEQ ID NO: 8409
  source 1..120: mol_type = other DNA

SEQ ID NO: 57795 - DNA, 120 bp, synthetic construct; identical to SEQ ID NO: 27841
  source 1..120: mol_type = other DNA

SEQ ID NO: 57796 - DNA, 120 bp, synthetic construct; identical to SEQ ID NO: 27842
  source 1..120: mol_type = other DNA

SEQ ID NO: 57797 - DNA, 120 bp, synthetic construct; identical to SEQ ID NO: 27843
  source 1..120: mol_type = other DNA

SEQ ID NO: 57798 - DNA, 120 bp, synthetic construct; identical to SEQ ID NO: 8410
  source 1..120: mol_type = other DNA

SEQ ID NO: 57799 - DNA, 120 bp, synthetic construct; identical to SEQ ID NO: 27845
  source 1..120: mol_type = other DNA

SEQ ID NO: 57800 - DNA, 120 bp, synthetic construct; identical to SEQ ID NO: 27846
  source 1..120: mol_type = other DNA

SEQ ID NO: 57801 - DNA, 120 bp, synthetic construct; identical to SEQ ID NO: 27847
  source 1..120: mol_type = other DNA

SEQ ID NO: 57802 - DNA, 120 bp, synthetic construct; identical to SEQ ID NO: 8411
  source 1..120: mol_type = other DNA

SEQ ID NO: 57803 - DNA, 120 bp, synthetic construct; identical to SEQ ID NO: 27849
  source 1..120: mol_type = other DNA

SEQ ID NO: 57804 - DNA, 120 bp, synthetic construct; identical to SEQ ID NO: 27850
  source 1..120: mol_type = other DNA

SEQ ID NO: 57805 - DNA, 120 bp, synthetic construct; identical to SEQ ID NO: 8412
  source 1..120: mol_type = other DNA

SEQ ID NO: 57806 - DNA, 120 bp, synthetic construct; identical to SEQ ID NO: 27852
  source 1..120: mol_type = other DNA

SEQ ID NO: 57807 - DNA, 120 bp, synthetic construct; identical to SEQ ID NO: 27853
  source 1..120: mol_type = other DNA

SEQ ID NO: 57808 - DNA, 120 bp, synthetic construct; identical to SEQ ID NO: 27854
  source 1..120: mol_type = other DNA

SEQ ID NO: 57809 - DNA, 120 bp, synthetic construct; identical to SEQ ID NO: 8413
  source 1..120: mol_type = other DNA

SEQ ID NO: 57810 - DNA, 120 bp, synthetic construct; identical to SEQ ID NO: 27856
  source 1..120: mol_type = other DNA

SEQ ID NO: 57811 - DNA, 120 bp, synthetic construct; identical to SEQ ID NO: 27857
  source 1..120: mol_type = other DNA

SEQ ID NO: 57812 - DNA, 120 bp, synthetic construct; identical to SEQ ID NO: 27858
  source 1..120: mol_type = other DNA

SEQ ID NO: 57813 - DNA, 120 bp, synthetic construct; identical to SEQ ID NO: 27859
  source 1..120: mol_type = other DNA

SEQ ID NO: 57814 - DNA, 120 bp, synthetic construct; identical to SEQ ID NO: 8414
  source 1..120: mol_type = other DNA

SEQ ID NO: 57815 - DNA, 120 bp, synthetic construct; identical to SEQ ID NO: 27861
  source 1..120: mol_type = other DNA

SEQ ID NO: 57816 - DNA, 120 bp, synthetic construct; identical to SEQ ID NO: 27862
  source 1..120: mol_type = other DNA

SEQ ID NO: 57817 - DNA, 120 bp, synthetic construct; identical to SEQ ID NO: 8415
  source 1..120: mol_type = other DNA

SEQ ID NO: 57818 - DNA, 120 bp, synthetic construct; identical to SEQ ID NO: 27864
  source 1..120: mol_type = other DNA

SEQ ID NO: 57819 - DNA, 120 bp, synthetic construct; identical to SEQ ID NO: 27865
  source 1..120: mol_type = other DNA

SEQ ID NO: 57820 - DNA, 120 bp, synthetic construct; identical to SEQ ID NO: 27866
  source 1..120: mol_type = other DNA

SEQ ID NO: 57821 - DNA, 120 bp, synthetic construct; identical to SEQ ID NO: 27867
  source 1..120: mol_type = other DNA

SEQ ID NO: 57822 - DNA, 120 bp, synthetic construct; identical to SEQ ID NO: 8416
  source 1..120: mol_type = other DNA

SEQ ID NO: 57823 - DNA, 120 bp, synthetic construct; identical to SEQ ID NO: 27869
  source 1..120: mol_type = other DNA

SEQ ID NO: 57824 - DNA, 120 bp, synthetic construct; identical to SEQ ID NO: 27870
  source 1..120: mol_type = other DNA

SEQ ID NO: 57825 - DNA, 120 bp, synthetic construct; identical to SEQ ID NO: 27871
  source 1..120: mol_type = other DNA

SEQ ID NO: 57826 - DNA, 120 bp, synthetic construct; identical to SEQ ID NO: 8417
  source 1..120: mol_type = other DNA

SEQ ID NO: 57827 - DNA, 120 bp, synthetic construct; identical to SEQ ID NO: 27873
  source 1..120: mol_type = other DNA

SEQ ID NO: 57828 - DNA, 120 bp, synthetic construct; identical to SEQ ID NO: 27874
  source 1..120: mol_type = other DNA

SEQ ID NO: 57829 - DNA, 120 bp, synthetic construct; identical to SEQ ID NO: 27875
  source 1..120: mol_type = other DNA

SEQ ID NO: 57830 - DNA, 120 bp, synthetic construct; identical to SEQ ID NO: 27876
  source 1..120: mol_type = other DNA

SEQ ID NO: 57831 - DNA, 120 bp, synthetic construct; identical to SEQ ID NO: 8418
  source 1..120: mol_type = other DNA

SEQ ID NO: 57832 - DNA, 120 bp, synthetic construct; identical to SEQ ID NO: 27878
  source 1..120: mol_type = other DNA

SEQ ID NO: 57833 - DNA, 120 bp, synthetic construct; identical to SEQ ID NO: 27879
  source 1..120: mol_type = other DNA

SEQ ID NO: 57834 - DNA, 120 bp, synthetic construct; identical to SEQ ID NO: 8419
  source 1..120: mol_type = other DNA

SEQ ID NO: 57835 - DNA, 120 bp, synthetic construct; identical to SEQ ID NO: 27881
  source 1..120: mol_type = other DNA

SEQ ID NO: 57836 - DNA, 120 bp, synthetic construct; identical to SEQ ID NO: 27882
  source 1..120: mol_type = other DNA

SEQ ID NO: 57837 - DNA, 120 bp, synthetic construct; identical to SEQ ID NO: 27883
  source 1..120: mol_type = other DNA

SEQ ID NO: 57838 - DNA, 120 bp, synthetic construct; identical to SEQ ID NO: 27884
  source 1..120: mol_type = other DNA

SEQ ID NO: 57839 - DNA, 120 bp, synthetic construct; identical to SEQ ID NO: 8420
  source 1..120: mol_type = other DNA

SEQ ID NO: 57840 - DNA, 120 bp, synthetic construct; identical to SEQ ID NO: 27886
  source 1..120: mol_type = other DNA

SEQ ID NO: 57841 - DNA, 120 bp, synthetic construct; identical to SEQ ID NO: 27887
  source 1..120: mol_type = other DNA

SEQ ID NO: 57842 - DNA, 120 bp, synthetic construct; identical to SEQ ID NO: 8421
  source 1..120: mol_type = other DNA

SEQ ID NO: 57843 - DNA, 120 bp, synthetic construct; identical to SEQ ID NO: 27889
  source 1..120: mol_type = other DNA

SEQ ID NO: 57844 - DNA, 120 bp, synthetic construct; identical to SEQ ID NO: 27890
  source 1..120: mol_type = other DNA

SEQ ID NO: 57845 - DNA, 120 bp, synthetic construct; identical to SEQ ID NO: 27891
  source 1..120: mol_type = other DNA

SEQ ID NO: 57846 - DNA, 120 bp, synthetic construct; identical to SEQ ID NO: 27892
  source 1..120: mol_type = other DNA

SEQ ID NO: 57847 - DNA, 120 bp, synthetic construct; identical to SEQ ID NO: 8422
  source 1..120: mol_type = other DNA

SEQ ID NO: 57848 - DNA, 120 bp, synthetic construct; identical to SEQ ID NO: 27894
  source 1..120: mol_type = other DNA

SEQ ID NO: 57849 - DNA, 120 bp, synthetic construct; identical to SEQ ID NO: 27895
  source 1..120: mol_type = other DNA

SEQ ID NO: 57850 - DNA, 120 bp, synthetic construct; identical to SEQ ID NO: 27896
  source 1..120: mol_type = other DNA

SEQ ID NO: 57851 - DNA, 120 bp, synthetic construct; identical to SEQ ID NO: 8423
  source 1..120: mol_type = other DNA

SEQ ID NO: 57852 - DNA, 120 bp, synthetic construct; identical to SEQ ID NO: 27898
  source 1..120: mol_type = other DNA

SEQ ID NO: 57853 - DNA, 120 bp, synthetic construct; identical to SEQ ID NO: 27899
  source 1..120: mol_type = other DNA

SEQ ID NO: 57854 - DNA, 120 bp, synthetic construct; identical to SEQ ID NO: 27900
  source 1..120: mol_type = other DNA

SEQ ID NO: 57855 - DNA, 120 bp, synthetic construct; identical to SEQ ID NO: 8424
  source 1..120: mol_type = other DNA

SEQ ID NO: 57856 - DNA, 120 bp, synthetic construct; identical to SEQ ID NO: 27902
  source 1..120: mol_type = other DNA

SEQ ID NO: 57857 - DNA, 120 bp, synthetic construct; identical to SEQ ID NO: 27903
  source 1..120: mol_type = other DNA

SEQ ID NO: 57858 - DNA, 120 bp, synthetic construct; identical to SEQ ID NO: 8425
  source 1..120: mol_type = other DNA

SEQ ID NO: 57859 - DNA, 120 bp, synthetic construct; identical to SEQ ID NO: 27905
  source 1..120: mol_type = other DNA

SEQ ID NO: 57860 - DNA, 120 bp, synthetic construct; identical to SEQ ID NO: 27906
  source 1..120: mol_type = other DNA

SEQ ID NO: 57861 - DNA, 120 bp, synthetic construct; identical to SEQ ID NO: 27907
  source 1..120: mol_type = other DNA

SEQ ID NO: 57862 - DNA, 120 bp, synthetic construct; identical to SEQ ID NO: 8426
  source 1..120: mol_type = other DNA

SEQ ID NO: 57863 - DNA, 120 bp, synthetic construct; identical to SEQ ID NO: 27909
  source 1..120: mol_type = other DNA

SEQ ID NO: 57864 - DNA, 120 bp, synthetic construct; identical to SEQ ID NO: 27910
  source 1..120: mol_type = other DNA

SEQ ID NO: 57865 - DNA, 120 bp, synthetic construct; identical to SEQ ID NO: 27911
  source 1..120: mol_type = other DNA

SEQ ID NO: 57866 - DNA, 120 bp, synthetic construct; identical to SEQ ID NO: 27912
  source 1..120: mol_type = other DNA

SEQ ID NO: 57867 - DNA, 120 bp, synthetic construct; identical to SEQ ID NO: 8427
  source 1..120: mol_type = other DNA

SEQ ID NO: 57868 - DNA, 120 bp, synthetic construct; identical to SEQ ID NO: 27914
  source 1..120: mol_type = other DNA

SEQ ID NO: 57869 - DNA, 120 bp, synthetic construct; identical to SEQ ID NO: 27915
  source 1..120: mol_type = other DNA

SEQ ID NO: 57870 - DNA, 120 bp, synthetic construct; identical to SEQ ID NO: 27916
  source 1..120: mol_type = other DNA

SEQ ID NO: 57871 - DNA, 120 bp, synthetic construct; identical to SEQ ID NO: 8428
  source 1..120: mol_type = other DNA

SEQ ID NO: 57872 - DNA, 120 bp, synthetic construct; identical to SEQ ID NO: 27918
  source 1..120: mol_type = other DNA

SEQ ID NO: 57873 - DNA, 120 bp, synthetic construct; identical to SEQ ID NO: 27919
  source 1..120: mol_type = other DNA

SEQ ID NO: 57874 - DNA, 120 bp, synthetic construct; identical to SEQ ID NO: 8429
  source 1..120: mol_type = other DNA

SEQ ID NO: 57875 - DNA, 120 bp, synthetic construct; identical to SEQ ID NO: 27921
  source 1..120: mol_type = other DNA

SEQ ID NO: 57876 - DNA, 120 bp, synthetic construct; identical to SEQ ID NO: 27922
  source 1..120: mol_type = other DNA

SEQ ID NO: 57877 - DNA, 120 bp, synthetic construct; identical to SEQ ID NO: 27923
  source 1..120: mol_type = other DNA

SEQ ID NO: 57878 - DNA, 120 bp, synthetic construct; identical to SEQ ID NO: 8430
  source 1..120: mol_type = other DNA

SEQ ID NO: 57879 - DNA, 120 bp, synthetic construct; identical to SEQ ID NO: 27925
  source 1..120: mol_type = other DNA

SEQ ID NO: 57880 - DNA, 120 bp, synthetic construct; identical to SEQ ID NO: 27926
  source 1..120: mol_type = other DNA

SEQ ID NO: 57881 - DNA, 120 bp, synthetic construct; identical to SEQ ID NO: 27927
  source 1..120: mol_type = other DNA

SEQ ID NO: 57882 - DNA, 120 bp, synthetic construct; identical to SEQ ID NO: 27928
  source 1..120: mol_type = other DNA

SEQ ID NO: 57883 - DNA, 120 bp, synthetic construct; identical to SEQ ID NO: 8431
  source 1..120: mol_type = other DNA

SEQ ID NO: 57884 - DNA, 120 bp, synthetic construct; identical to SEQ ID NO: 27930
  source 1..120: mol_type = other DNA

SEQ ID NO: 57885 - DNA, 120 bp, synthetic construct; identical to SEQ ID NO: 27931
  source 1..120: mol_type = other DNA

SEQ ID NO: 57886 - DNA, 120 bp, synthetic construct; identical to SEQ ID NO: 27932
  source 1..120: mol_type = other DNA

SEQ ID NO: 57887 - DNA, 120 bp, synthetic construct; identical to SEQ ID NO: 8432
  source 1..120: mol_type = other DNA

SEQ ID NO: 57888 - DNA, 120 bp, synthetic construct; identical to SEQ ID NO: 27934
  source 1..120: mol_type = other DNA

SEQ ID NO: 57889 - DNA, 120 bp, synthetic construct; identical to SEQ ID NO: 27935
  source 1..120: mol_type = other DNA

SEQ ID NO: 57890 - DNA, 120 bp, synthetic construct; identical to SEQ ID NO: 8433
  source 1..120: mol_type = other DNA

SEQ ID NO: 57891 - DNA, 120 bp, synthetic construct; identical to SEQ ID NO: 27937
  source 1..120: mol_type = other DNA

SEQ ID NO: 57892 - DNA, 120 bp, synthetic construct; identical to SEQ ID NO: 27938
  source 1..120: mol_type = other DNA

SEQ ID NO: 57893 - DNA, 120 bp, synthetic construct; identical to SEQ ID NO: 27939
  source 1..120: mol_type = other DNA

SEQ ID NO: 57894 - DNA, 120 bp, synthetic construct; identical to SEQ ID NO: 8434
  source 1..120: mol_type = other DNA

SEQ ID NO: 57895 - DNA, 120 bp, synthetic construct; identical to SEQ ID NO: 27941
  source 1..120: mol_type = other DNA

SEQ ID NO: 57896 - DNA, 120 bp, synthetic construct; identical to SEQ ID NO: 27942
  source 1..120: mol_type = other DNA

SEQ ID NO: 57897 - DNA, 120 bp, synthetic construct; identical to SEQ ID NO: 27943
  source 1..120: mol_type = other DNA

SEQ ID NO: 57898 - DNA, 120 bp, synthetic construct; identical to SEQ ID NO: 8435
  source 1..120: mol_type = other DNA

SEQ ID NO: 57899 - DNA, 120 bp, synthetic construct; identical to SEQ ID NO: 27945
  source 1..120: mol_type = other DNA

SEQ ID NO: 57900 - DNA, 120 bp, synthetic construct; identical to SEQ ID NO: 27946
  source 1..120: mol_type = other DNA

SEQ ID NO: 57901 - DNA, 120 bp, synthetic construct; identical to SEQ ID NO: 27947
  source 1..120: mol_type = other DNA

SEQ ID NO: 57902 - DNA, 120 bp, synthetic construct; identical to SEQ ID NO: 8436
  source 1..120: mol_type = other DNA

SEQ ID NO: 57903 - DNA, 120 bp, synthetic construct; identical to SEQ ID NO: 27949
  source 1..120: mol_type = other DNA

SEQ ID NO: 57904 - DNA, 120 bp, synthetic construct; identical to SEQ ID NO: 27950
  source 1..120: mol_type = other DNA

SEQ ID NO: 57905 - DNA, 120 bp, synthetic construct; identical to SEQ ID NO: 27951
  source 1..120: mol_type = other DNA

SEQ ID NO: 57906 - DNA, 120 bp, synthetic construct; identical to SEQ ID NO: 8437
  source 1..120: mol_type = other DNA

SEQ ID NO: 57907 - DNA, 120 bp, synthetic construct; identical to SEQ ID NO: 27953
  source 1..120: mol_type = other DNA

SEQ ID NO: 57908 - DNA, 120 bp, synthetic construct; identical to SEQ ID NO: 27954
  source 1..120: mol_type = other DNA

SEQ ID NO: 57909 - DNA, 120 bp, synthetic construct; identical to SEQ ID NO: 27955
  source 1..120: mol_type = other DNA

SEQ ID NO: 57910 - DNA, 120 bp, synthetic construct; identical to SEQ ID NO: 27956
  source 1..120: mol_type = other DNA

SEQ ID NO: 57911 - DNA, 120 bp, synthetic construct; identical to SEQ ID NO: 8438
  source 1..120: mol_type = other DNA

SEQ ID NO: 57912 - DNA, 120 bp, synthetic construct; identical to SEQ ID NO: 27958
  source 1..120: mol_type = other DNA

SEQ ID NO: 57913 - DNA, 120 bp, synthetic construct; identical to SEQ ID NO: 27959
  source 1..120: mol_type = other DNA

SEQ ID NO: 57914 - DNA, 120 bp, synthetic construct; identical to SEQ ID NO: 27960
  source 1..120: mol_type = other DNA

SEQ ID NO: 57915 - DNA, 120 bp, synthetic construct; identical to SEQ ID NO: 8439
  source 1..120: mol_type = other DNA

SEQ ID NO: 57916 - DNA, 120 bp, synthetic construct; identical to SEQ ID NO: 27962
  source 1..120: mol_type = other DNA

SEQ ID NO: 57917 - DNA, 120 bp, synthetic construct; identical to SEQ ID NO: 27963
  source 1..120: mol_type = other DNA

SEQ ID NO: 57918 - DNA, 120 bp, synthetic construct; identical to SEQ ID NO: 27964
  source 1..120: mol_type = other DNA

SEQ ID NO: 57919 - DNA, 120 bp, synthetic construct; identical to SEQ ID NO: 8440
  source 1..120: mol_type = other DNA

SEQ ID NO: 57920 - DNA, 120 bp, synthetic construct; identical to SEQ ID NO: 27966
  source 1..120: mol_type = other DNA

SEQ ID NO: 57921 - DNA, 120 bp, synthetic construct; identical to SEQ ID NO: 27967
  source 1..120: mol_type = other DNA

SEQ ID NO: 57922 - DNA, 120 bp, synthetic construct; identical to SEQ ID NO: 8441
  source 1..120: mol_type = other DNA

SEQ ID NO: 57923 - DNA, 120 bp, synthetic construct; identical to SEQ ID NO: 27969
  source 1..120: mol_type = other DNA

SEQ ID NO: 57924 - DNA, 120 bp, synthetic construct; identical to SEQ ID NO: 27970
  source 1..120: mol_type = other DNA

SEQ ID NO: 57925 - DNA, 120 bp, synthetic construct; identical to SEQ ID NO: 27971
  source 1..120: mol_type = other DNA

SEQ ID NO: 57926 - DNA, 120 bp, synthetic construct; identical to SEQ ID NO: 8442
  source 1..120: mol_type = other DNA

SEQ ID NO: 57927 - DNA, 120 bp, synthetic construct; identical to SEQ ID NO: 27973
  source 1..120: mol_type = other DNA

SEQ ID NO: 57928 - DNA, 120 bp, synthetic construct; identical to SEQ ID NO: 27974
  source 1..120: mol_type = other DNA

SEQ ID NO: 57929 - DNA, 120 bp, synthetic construct; identical to SEQ ID NO: 27975
  source 1..120: mol_type = other DNA

SEQ ID NO: 57930 - DNA, 120 bp, synthetic construct; identical to SEQ ID NO: 8443
  source 1..120: mol_type = other DNA

SEQ ID NO: 57931 - DNA, 120 bp, synthetic construct; identical to SEQ ID NO: 27977
  source 1..120: mol_type = other DNA

SEQ ID NO: 57932 - DNA, 120 bp, synthetic construct; identical to SEQ ID NO: 27978
  source 1..120: mol_type = other DNA

SEQ ID NO: 57933 - DNA, 120 bp, synthetic construct; identical to SEQ ID NO: 27979
  source 1..120: mol_type = other DNA

SEQ ID NO: 57934 - DNA, 120 bp, synthetic construct; identical to SEQ ID NO: 8444
  source 1..120: mol_type = other DNA

SEQ ID NO: 57935 - DNA, 120 bp, synthetic construct; identical to SEQ ID NO: 27981
  source 1..120: mol_type = other DNA

SEQ ID NO: 57936 - DNA, 120 bp, synthetic construct; identical to SEQ ID NO: 27982
  source 1..120: mol_type = other DNA

SEQ ID NO: 57937 - DNA, 120 bp, synthetic construct; identical to SEQ ID NO: 27983
  source 1..120: mol_type = other DNA

SEQ ID NO: 57938 - DNA, 120 bp, synthetic construct; identical to SEQ ID NO: 8445
  source 1..120: mol_type = other DNA

SEQ ID NO: 57939 - DNA, 120 bp, synthetic construct; identical to SEQ ID NO: 27985
  source 1..120: mol_type = other DNA

SEQ ID NO: 57940 - DNA, 120 bp, synthetic construct; identical to SEQ ID NO: 27986
  source 1..120: mol_type = other DNA

SEQ ID NO: 57941 - DNA, 120 bp, synthetic construct; identical to SEQ ID NO: 27987
  source 1..120: mol_type = other DNA

SEQ ID NO: 57942 - DNA, 120 bp, synthetic construct; identical to SEQ ID NO: 8446
  source 1..120: mol_type = other DNA

SEQ ID NO: 57943 - DNA, 120 bp, synthetic construct; identical to SEQ ID NO: 27989
  source 1..120: mol_type = other DNA

SEQ ID NO: 57944 - DNA, 120 bp, synthetic construct; identical to SEQ ID NO: 27990
  source 1..120: mol_type = other DNA

SEQ ID NO: 57945 - DNA, 120 bp, synthetic construct; identical to SEQ ID NO: 27991
  source 1..120: mol_type = other DNA

SEQ ID NO: 57946 - DNA, 120 bp, synthetic construct; identical to SEQ ID NO: 27992
  source 1..120: mol_type = other DNA

SEQ ID NO: 57947 - DNA, 120 bp, synthetic construct; identical to SEQ ID NO: 8447
  source 1..120: mol_type = other DNA

SEQ ID NO: 57948 - DNA, 120 bp, synthetic construct; identical to SEQ ID NO: 27994
  source 1..120: mol_type = other DNA

SEQ ID NO: 57949 - DNA, 120 bp, synthetic construct; identical to SEQ ID NO: 27995
  source 1..120: mol_type = other DNA

SEQ ID NO: 57950 - DNA, 120 bp, synthetic construct; identical to SEQ ID NO: 27996
  source 1..120: mol_type = other DNA

SEQ ID NO: 57951 - DNA, 120 bp, synthetic construct; identical to SEQ ID NO: 8448
  source 1..120: mol_type = other DNA

SEQ ID NO: 57952 - DNA, 120 bp, synthetic construct; identical to SEQ ID NO: 27998
  source 1..120: mol_type = other DNA

SEQ ID NO: 57953 - DNA, 120 bp, synthetic construct; identical to SEQ ID NO: 27999
  source 1..120: mol_type = other DNA

SEQ ID NO: 57954 - DNA, 120 bp, synthetic construct; identical to SEQ ID NO: 8449
  source 1..120: mol_type = other DNA

SEQ ID NO: 57955 - DNA, 120 bp, synthetic construct; identical to SEQ ID NO: 28001
  source 1..120: mol_type = other DNA

SEQ ID NO: 57956 - DNA, 120 bp, synthetic construct; identical to SEQ ID NO: 28002
  source 1..120: mol_type = other DNA

SEQ ID NO: 57957 - DNA, 120 bp, synthetic construct; identical to SEQ ID NO: 28003
  source 1..120: mol_type = other DNA

SEQ ID NO: 57958 - DNA, 120 bp, synthetic construct; identical to SEQ ID NO: 8450
  source 1..120: mol_type = other DNA

SEQ ID NO: 57959 - DNA, 120 bp, synthetic construct; identical to SEQ ID NO: 28005
  source 1..120: mol_type = other DNA

SEQ ID NO: 57960 - DNA, 120 bp, synthetic construct; identical to SEQ ID NO: 28006
  source 1..120: mol_type = other DNA

SEQ ID NO: 57961 - DNA, 120 bp, synthetic construct; identical to SEQ ID NO: 28007
  source 1..120: mol_type = other DNA

SEQ ID NO: 57962 - DNA, 120 bp, synthetic construct; identical to SEQ ID NO: 28008
  source 1..120: mol_type = other DNA

SEQ ID NO: 57963 - DNA, 120 bp, synthetic construct; identical to SEQ ID NO: 8451
  source 1..120: mol_type = other DNA

SEQ ID NO: 57964 - DNA, 120 bp, synthetic construct; identical to SEQ ID NO: 28010
  source 1..120: mol_type = other DNA

SEQ ID NO: 57965 - DNA, 120 bp, synthetic construct; identical to SEQ ID NO: 28011
  source 1..120: mol_type = other DNA

SEQ ID NO: 57966 - DNA, 120 bp, synthetic construct; identical to SEQ ID NO: 8452
  source 1..120: mol_type = other DNA

SEQ ID NO: 57967 - DNA, 120 bp, synthetic construct; identical to SEQ ID NO: 28013
  source 1..120: mol_type = other DNA

SEQ ID NO: 57968 - DNA, 120 bp, synthetic construct; identical to SEQ ID NO: 28014
  source 1..120: mol_type = other DNA

SEQ ID NO: 57969 - DNA, 120 bp, synthetic construct; identical to SEQ ID NO: 28015
  source 1..120: mol_type = other DNA

SEQ ID NO: 57970 - DNA, 120 bp, synthetic construct; identical to SEQ ID NO: 8453
  source 1..120: mol_type = other DNA

SEQ ID NO: 57971 - DNA, 120 bp, synthetic construct; identical to SEQ ID NO: 28017
  source 1..120: mol_type = other DNA

SEQ ID NO: 57972 - DNA, 120 bp, synthetic construct; identical to SEQ ID NO: 28018
  source 1..120: mol_type = other DNA

SEQ ID NO: 57973 - DNA, 120 bp, synthetic construct; identical to SEQ ID NO: 28019
  source 1..120: mol_type = other DNA

SEQ ID NO: 57974 - DNA, 120 bp, synthetic construct; identical to SEQ ID NO: 28020
  source 1..120: mol_type = other DNA

SEQ ID NO: 57975 - DNA, 120 bp, synthetic construct; identical to SEQ ID NO: 8454
  source 1..120: mol_type = other DNA

SEQ ID NO: 57976 - DNA, 120 bp, synthetic construct; identical to SEQ ID NO: 28022
  source 1..120: mol_type = other DNA

SEQ ID NO: 57977 - DNA, 120 bp, synthetic construct; identical to SEQ ID NO: 28023
  source 1..120: mol_type = other DNA

SEQ ID NO: 57978 - DNA, 120 bp, synthetic construct; identical to SEQ ID NO: 8455
  source 1..120: mol_type = other DNA

SEQ ID NO: 57979 - DNA, 120 bp, synthetic construct; identical to SEQ ID NO: 28025
  source 1..120: mol_type = other DNA

SEQ ID NO: 57980 - DNA, 120 bp, synthetic construct; identical to SEQ ID NO: 28026
  source 1..120: mol_type = other DNA

SEQ ID NO: 57981 - DNA, 120 bp, synthetic construct; identical to SEQ ID NO: 28027
  source 1..120: mol_type = other DNA

SEQ ID NO: 57982 - DNA, 120 bp, synthetic construct; identical to SEQ ID NO: 8456
  source 1..120: mol_type = other DNA

SEQ ID NO: 57983 - DNA, 120 bp, synthetic construct; identical to SEQ ID NO: 28029
  source 1..120: mol_type = other DNA

SEQ ID NO: 57984 - DNA, 120 bp, synthetic construct; identical to SEQ ID NO: 28030
  source 1..120: mol_type = other DNA

SEQ ID NO: 57985 - DNA, 120 bp, synthetic construct; identical to SEQ ID NO: 28031
  source 1..120: mol_type = other DNA

SEQ ID NO: 57986 - DNA, 120 bp, synthetic construct; identical to SEQ ID NO: 28032
  source 1..120: mol_type = other DNA

SEQ ID NO: 57987 - DNA, 120 bp, synthetic construct; identical to SEQ ID NO: 8457
  source 1..120: mol_type = other DNA

SEQ ID NO: 57988 - DNA, 120 bp, synthetic construct; identical to SEQ ID NO: 28034
  source 1..120: mol_type = other DNA

SEQ ID NO: 57989 - DNA, 120 bp, synthetic construct; identical to SEQ ID NO: 28035
  source 1..120: mol_type = other DNA

SEQ ID NO: 57990 - DNA, 120 bp, synthetic construct; identical to SEQ ID NO: 28036
  source 1..120: mol_type = other DNA

SEQ ID NO: 57991 - DNA, 120 bp, synthetic construct; identical to SEQ ID NO: 8458
  source 1..120: mol_type = other DNA

SEQ ID NO: 57992 - DNA, 120 bp, synthetic construct; identical to SEQ ID NO: 28038
  source 1..120: mol_type = other DNA

SEQ ID NO: 57993 - DNA, 120 bp, synthetic construct; identical to SEQ ID NO: 28039
  source 1..120: mol_type = other DNA

SEQ ID NO: 57994 - DNA, 120 bp, synthetic construct; identical to SEQ ID NO: 8459
  source 1..120: mol_type = other DNA

SEQ ID NO: 57995 - DNA, 120 bp, synthetic construct; identical to SEQ ID NO: 28041
  source 1..120: mol_type = other DNA

SEQ ID NO: 57996 - DNA, 120 bp, synthetic construct; identical to SEQ ID NO: 28042
  source 1..120: mol_type = other DNA

SEQ ID NO: 57997 - DNA, 120 bp, synthetic construct; identical to SEQ ID NO: 28043
  source 1..120: mol_type = other DNA

SEQ ID NO: 57998 - DNA, 120 bp, synthetic construct; identical to SEQ ID NO: 28044
  source 1..120: mol_type = other DNA

SEQ ID NO: 57999 - DNA, 120 bp, synthetic construct; identical to SEQ ID NO: 8460
  source 1..120: mol_type = other DNA

SEQ ID NO: 58000 - DNA, 120 bp, synthetic construct; identical to SEQ ID NO: 28046
  source 1..120: mol_type = other DNA

SEQ ID NO: 58001 - DNA, 120 bp, synthetic construct; identical to SEQ ID NO: 28047
  source 1..120: mol_type = other DNA

SEQ ID NO: 58002 - DNA, 120 bp, synthetic construct; identical to SEQ ID NO: 8461
  source 1..120: mol_type = other DNA

SEQ ID NO: 58003 - DNA, 120 bp, synthetic construct; identical to SEQ ID NO: 28049
  source 1..120: mol_type = other DNA

SEQ ID NO: 58004 - DNA, 120 bp, synthetic construct; identical to SEQ ID NO: 28050
  source 1..120: mol_type = other DNA

SEQ ID NO: 58005 - DNA, 120 bp, synthetic construct; identical to SEQ ID NO: 28051
  source 1..120: mol_type = other DNA

SEQ ID NO: 58006 - DNA, 120 bp, synthetic construct; identical to SEQ ID NO: 28052
  source 1..120: mol_type = other DNA

SEQ ID NO: 58007 - DNA, 120 bp, synthetic construct; identical to SEQ ID NO: 8462
  source 1..120: mol_type = other DNA

SEQ ID NO: 58008 - DNA, 120 bp, synthetic construct; identical to SEQ ID NO: 28054
  source 1..120: mol_type = other DNA

SEQ ID NO: 58009 - DNA, 120 bp, synthetic construct; identical to SEQ ID NO: 28055
  source 1..120: mol_type = other DNA

SEQ ID NO: 58010 - DNA, 120 bp, synthetic construct; identical to SEQ ID NO: 28056
  source 1..120: mol_type = other DNA

SEQ ID NO: 58011 - DNA, 120 bp, synthetic construct; identical to SEQ ID NO: 28057
  source 1..120: mol_type = other DNA

SEQ ID NO: 58012 - DNA, 120 bp, synthetic construct; identical to SEQ ID NO: 8463
  source 1..120: mol_type = other DNA

SEQ ID NO: 58013 - DNA, 120 bp, synthetic construct; identical to SEQ ID NO: 28059
  source 1..120: mol_type = other DNA

SEQ ID NO: 58014 - DNA, 120 bp, synthetic construct; identical to SEQ ID NO: 28060
  source 1..120: mol_type = other DNA

SEQ ID NO: 58015 - DNA, 120 bp, synthetic construct; identical to SEQ ID NO: 8464
  source 1..120: mol_type = other DNA

SEQ ID NO: 58016 - DNA, 120 bp, synthetic construct; identical to SEQ ID NO: 28062
  source 1..120: mol_type = other DNA

SEQ ID NO: 58017 - DNA, 120 bp, synthetic construct; identical to SEQ ID NO: 28063
  source 1..120: mol_type = other DNA

SEQ ID NO: 58018 - DNA, 120 bp, synthetic construct; identical to SEQ ID NO: 28064
  source 1..120: mol_type = other DNA

SEQ ID NO: 58019 - DNA, 120 bp, synthetic construct; identical to SEQ ID NO: 8465
  source 1..120: mol_type = other DNA

SEQ ID NO: 58020 - DNA, 120 bp, synthetic construct; identical to SEQ ID NO: 28066
  source 1..120: mol_type = other DNA

SEQ ID NO: 58021 - DNA, 120 bp, synthetic construct; identical to SEQ ID NO: 28067
  source 1..120: mol_type = other DNA

SEQ ID NO: 58022 - DNA, 120 bp, synthetic construct; identical to SEQ ID NO: 28068
  source 1..120: mol_type = other DNA

SEQ ID NO: 58023 - DNA, 120 bp, synthetic construct; identical to SEQ ID NO: 8466
  source 1..120: mol_type = other DNA

SEQ ID NO: 58024 - DNA, 120 bp, synthetic construct; identical to SEQ ID NO: 28070
  source 1..120: mol_type = other DNA

SEQ ID NO: 58025 - DNA, 120 bp, synthetic construct; identical to SEQ ID NO: 28071
  source 1..120: mol_type = other DNA

SEQ ID NO: 58026 - DNA, 120 bp, synthetic construct; identical to SEQ ID NO: 8467
  source 1..120: mol_type = other DNA

SEQ ID NO: 58027 - DNA, 120 bp, synthetic construct; identical to SEQ ID NO: 28073
  source 1..120: mol_type = other DNA

SEQ ID NO: 58028 - DNA, 120 bp, synthetic construct; identical to SEQ ID NO: 28074
  source 1..120: mol_type = other DNA

SEQ ID NO: 58029 - DNA, 120 bp, synthetic construct; identical to SEQ ID NO: 8468
  source 1..120: mol_type = other DNA

SEQ ID NO: 58030 - DNA, 120 bp, synthetic construct; identical to SEQ ID NO: 28076
  source 1..120: mol_type = other DNA

SEQ ID NO: 58031 - DNA, 120 bp, synthetic construct; identical to SEQ ID NO: 28077
  source 1..120: mol_type = other DNA

SEQ ID NO: 58032 - DNA, 120 bp, synthetic construct; identical to SEQ ID NO: 28078
  source 1..120: mol_type = other DNA

SEQ ID NO: 58033 - DNA, 120 bp, synthetic construct; identical to SEQ ID NO: 28079
  source 1..120: mol_type = other DNA

SEQ ID NO: 58034 - DNA, 120 bp, synthetic construct; identical to SEQ ID NO: 8469
  source 1..120: mol_type = other DNA

SEQ ID NO: 58035 - DNA, 120 bp, synthetic construct; identical to SEQ ID NO: 28081
  source 1..120: mol_type = other DNA

SEQ ID NO: 58036 - DNA, 120 bp, synthetic construct; identical to SEQ ID NO: 28082
  source 1..120: mol_type = other DNA

SEQ ID NO: 58037 - DNA, 120 bp, synthetic construct; identical to SEQ ID NO: 28083
  source 1..120: mol_type = other DNA

SEQ ID NO: 58038 - DNA, 120 bp, synthetic construct; identical to SEQ ID NO: 8470
  source 1..120: mol_type = other DNA

SEQ ID NO: 58039 - DNA, 120 bp, synthetic construct; identical to SEQ ID NO: 28085
  source 1..120: mol_type = other DNA

SEQ ID NO: 58040 - DNA, 120 bp, synthetic construct; identical to SEQ ID NO: 28086
  source 1..120: mol_type = other DNA

SEQ ID NO: 58041 - DNA, 120 bp, synthetic construct; identical to SEQ ID NO: 28087
  source 1..120: mol_type = other DNA

SEQ ID NO: 58042 - DNA, 120 bp, synthetic construct; identical to SEQ ID NO: 8471
  source 1..120: mol_type = other DNA

SEQ ID NO: 58043 - DNA, 120 bp, synthetic construct; identical to SEQ ID NO: 28089
  source 1..120: mol_type = other DNA

SEQ ID NO: 58044 - DNA, 120 bp, synthetic construct; identical to SEQ ID NO: 28090
  source 1..120: mol_type = other DNA

SEQ ID NO: 58045 - DNA, 120 bp, synthetic construct; identical to SEQ ID NO: 8472
  source 1..120: mol_type = other DNA

SEQ ID NO: 58046 - DNA, 120 bp, synthetic construct; identical to SEQ ID NO: 28092
  source 1..120: mol_type = other DNA

SEQ ID NO: 58047 - DNA, 120 bp, synthetic construct; identical to SEQ ID NO: 28093
  source 1..120: mol_type = other DNA

SEQ ID NO: 58048 - DNA, 120 bp, synthetic construct; identical to SEQ ID NO: 28094
  source 1..120: mol_type = other DNA

SEQ ID NO: 58049 - DNA, 120 bp, synthetic construct; identical to SEQ ID NO: 28095
  source 1..120: mol_type = other DNA

SEQ ID NO: 58050 - DNA, 120 bp, synthetic construct; identical to SEQ ID NO: 8473
  source 1..120: mol_type = other DNA

SEQ ID NO: 58051 - DNA, 120 bp, synthetic construct; identical to SEQ ID NO: 28097
  source 1..120: mol_type = other DNA

SEQ ID NO: 58052 - DNA, 120 bp, synthetic construct; identical to SEQ ID NO: 28098
  source 1..120: mol_type = other DNA

SEQ ID NO: 58053 - DNA, 120 bp, synthetic construct; identical to SEQ ID NO: 8474
  source 1..120: mol_type = other DNA

SEQ ID NO: 58054 - DNA, 120 bp, synthetic construct; identical to SEQ ID NO: 28100
  source 1..120: mol_type = other DNA

SEQ ID NO: 58055 - DNA, 120 bp, synthetic construct; identical to SEQ ID NO: 28101
  source 1..120: mol_type = other DNA

SEQ ID NO: 58056 - DNA, 120 bp, synthetic construct; identical to SEQ ID NO: 28102
  source 1..120: mol_type = other DNA

SEQ ID NO: 58057 - DNA, 120 bp, synthetic construct; identical to SEQ ID NO: 28103
  source 1..120: mol_type = other DNA

SEQ ID NO: 58058 - DNA, 120 bp, synthetic construct; identical to SEQ ID NO: 8475
  source 1..120: mol_type = other DNA

SEQ ID NO: 58059 - DNA, 120 bp, synthetic construct; identical to SEQ ID NO: 28105
  source 1..120: mol_type = other DNA

SEQ ID NO: 58060 - DNA, 120 bp, synthetic construct; identical to SEQ ID NO: 28106
  source 1..120: mol_type = other DNA

SEQ ID NO: 58061 - DNA, 120 bp, synthetic construct; identical to SEQ ID NO: 8476
  source 1..120: mol_type = other DNA

SEQ ID NO: 58062 - DNA, 120 bp, synthetic construct; identical to SEQ ID NO: 28108
  source 1..120: mol_type = other DNA

SEQ ID NO: 58063 - DNA, 120 bp, synthetic construct; identical to SEQ ID NO: 28109
  source 1..120: mol_type = other DNA

SEQ ID NO: 58064 - DNA, 120 bp, synthetic construct; identical to SEQ ID NO: 28110
  source 1..120: mol_type = other DNA

SEQ ID NO: 58065 - DNA, 120 bp, synthetic construct; identical to SEQ ID NO: 28111
  source 1..120: mol_type = other DNA

SEQ ID NO: 58066 - DNA, 120 bp, synthetic construct; identical to SEQ ID NO: 8477
  source 1..120: mol_type = other DNA

SEQ ID NO: 58067 - DNA, 120 bp, synthetic construct; identical to SEQ ID NO: 28113
  source 1..120: mol_type = other DNA

SEQ ID NO: 58068 - DNA, 120 bp, synthetic construct; identical to SEQ ID NO: 28114
  source 1..120: mol_type = other DNA

SEQ ID NO: 58069 - DNA, 120 bp, synthetic construct; identical to SEQ ID NO: 8478
  source 1..120: mol_type = other DNA

SEQ ID NO: 58070 - DNA, 120 bp, synthetic construct; identical to SEQ ID NO: 28116
  source 1..120: mol_type = other DNA

SEQ ID NO: 58071 - DNA, 120 bp, synthetic construct; identical to SEQ ID NO: 28117
  source 1..120: mol_type = other DNA

SEQ ID NO: 58072 - DNA, 120 bp, synthetic construct; identical to SEQ ID NO: 28118
  source 1..120: mol_type = other DNA

SEQ ID NO: 58073 - DNA, 120 bp, synthetic construct; identical to SEQ ID NO: 28119
  source 1..120: mol_type = other DNA

SEQ ID NO: 58074 - DNA, 120 bp, synthetic construct; identical to SEQ ID NO: 8479
  source 1..120: mol_type = other DNA

SEQ ID NO: 58075 - DNA, 120 bp, synthetic construct; identical to SEQ ID NO: 28121
  source 1..120: mol_type = other DNA

SEQ ID NO: 58076 - DNA, 120 bp, synthetic construct; identical to SEQ ID NO: 28122
  source 1..120: mol_type = other DNA

SEQ ID NO: 58077 - DNA, 120 bp, synthetic construct; identical to SEQ ID NO: 8480
  source 1..120: mol_type = other DNA

SEQ ID NO: 58078 - DNA, 120 bp, synthetic construct; identical to SEQ ID NO: 28124
  source 1..120: mol_type = other DNA

SEQ ID NO: 58079 - DNA, 120 bp, synthetic construct; identical to SEQ ID NO: 28125
  source 1..120: mol_type = other DNA

SEQ ID NO: 58080 - DNA, 120 bp, synthetic construct; identical to SEQ ID NO: 28126
  source 1..120: mol_type = other DNA

SEQ ID NO: 58081 - DNA, 120 bp, synthetic construct; identical to SEQ ID NO: 8481
  source 1..120: mol_type = other DNA

SEQ ID NO: 58082 - DNA, 120 bp, synthetic construct; identical to SEQ ID NO: 28128
  source 1..120: mol_type = other DNA

SEQ ID NO: 58083 - DNA, 120 bp, synthetic construct; identical to SEQ ID NO: 28129
  source 1..120: mol_type = other DNA

SEQ ID NO: 58084 - DNA, 120 bp, synthetic construct; identical to SEQ ID NO: 28130
  source 1..120: mol_type = other DNA

SEQ ID NO: 58085 - DNA, 120 bp, synthetic construct; identical to SEQ ID NO: 28131
  source 1..120: mol_type = other DNA

SEQ ID NO: 58086 - DNA, 120 bp, synthetic construct; identical to SEQ ID NO: 8482
  source 1..120: mol_type = other DNA

SEQ ID NO: 58087 - DNA, 120 bp, synthetic construct; identical to SEQ ID NO: 28133
  source 1..120: mol_type = other DNA

SEQ ID NO: 58088 - DNA, 120 bp, synthetic construct; identical to SEQ ID NO: 28134
  source 1..120: mol_type = other DNA

SEQ ID NO: 58089 - DNA, 120 bp, synthetic construct; identical to SEQ ID NO: 28135
  source 1..120: mol_type = other DNA

SEQ ID NO: 58090 - DNA, 120 bp, synthetic construct; identical to SEQ ID NO: 8483
  source 1..120: mol_type = other DNA

SEQ ID NO: 58091 - DNA, 120 bp, synthetic construct; identical to SEQ ID NO: 28137
  source 1..120: mol_type = other DNA

SEQ ID NO: 58092 - DNA, 120 bp, synthetic construct; identical to SEQ ID NO: 28138
  source 1..120: mol_type = other DNA

SEQ ID NO: 58093 - DNA, 120 bp, synthetic construct; identical to SEQ ID NO: 8484
  source 1..120: mol_type = other DNA

SEQ ID NO: 58094 - DNA, 120 bp, synthetic construct; identical to SEQ ID NO: 28140
  source 1..120: mol_type = other DNA

SEQ ID NO: 58095 - DNA, 120 bp, synthetic construct; identical to SEQ ID NO: 28141
  source 1..120: mol_type = other DNA

SEQ ID NO: 58096 - DNA, 120 bp, synthetic construct; identical to SEQ ID NO: 28142
  source 1..120: mol_type = other DNA

SEQ ID NO: 58097 - DNA, 120 bp, synthetic construct; identical to SEQ ID NO: 8485
  source 1..120: mol_type = other DNA

SEQ ID NO: 58098 - DNA, 120 bp, synthetic construct; identical to SEQ ID NO: 28144
  source 1..120: mol_type = other DNA

SEQ ID NO: 58099 - DNA, 120 bp, synthetic construct; identical to SEQ ID NO: 28145
  source 1..120: mol_type = other DNA

SEQ ID NO: 58100 - DNA, 120 bp, synthetic construct; identical to SEQ ID NO: 28146
  source 1..120: mol_type = other DNA

SEQ ID NO: 58101 - DNA, 120 bp, synthetic construct; identical to SEQ ID NO: 8486
  source 1..120: mol_type = other DNA

SEQ ID NO: 58102 - DNA, 120 bp, synthetic construct; identical to SEQ ID NO: 28148
  source 1..120: mol_type = other DNA

SEQ ID NO: 58103 - DNA, 120 bp, synthetic construct; identical to SEQ ID NO: 28149
  source 1..120: mol_type = other DNA

SEQ ID NO: 58104 - DNA, 120 bp, synthetic construct; identical to SEQ ID NO: 28150
  source 1..120: mol_type = other DNA

SEQ ID NO: 58105 - DNA, 120 bp, synthetic construct; identical to SEQ ID NO: 28151
  source 1..120: mol_type = other DNA

SEQ ID NO: 58106 - DNA, 120 bp, synthetic construct; identical to SEQ ID NO: 8487
  source 1..120: mol_type = other DNA

SEQ ID NO: 58107 - DNA, 120 bp, synthetic construct; identical to SEQ ID NO: 28153
  source 1..120: mol_type = other DNA

SEQ ID NO: 58108 - DNA, 120 bp, synthetic construct; identical to SEQ ID NO: 28154
  source 1..120: mol_type = other DNA

SEQ ID NO: 58109 - DNA, 120 bp, synthetic construct; identical to SEQ ID NO: 28155
  source 1..120: mol_type = other DNA

SEQ ID NO: 58110 - DNA, 120 bp, synthetic construct; identical to SEQ ID NO: 8488
  source 1..120: mol_type = other DNA

SEQ ID NO: 58111 - DNA, 120 bp, synthetic construct; identical to SEQ ID NO: 28157
  source 1..120: mol_type = other DNA

SEQ ID NO: 58112 - DNA, 120 bp, synthetic construct; identical to SEQ ID NO: 28158
  source 1..120: mol_type = other DNA

SEQ ID NO: 58113 - DNA, 120 bp, synthetic construct; identical to SEQ ID NO: 8489
  source 1..120: mol_type = other DNA

SEQ ID NO: 58114 - DNA, 120 bp, synthetic construct; identical to SEQ ID NO: 28160
  source 1..120: mol_type = other DNA

SEQ ID NO: 58115 - DNA, 120 bp, synthetic construct; identical to SEQ ID NO: 28161
  source 1..120: mol_type = other DNA

SEQ ID NO: 58116 - DNA, 120 bp, synthetic construct; identical to SEQ ID NO: 28162
  source 1..120: mol_type = other DNA

SEQ ID NO: 58117 - DNA, 120 bp, synthetic construct; identical to SEQ ID NO: 28163
  source 1..120: mol_type = other DNA

SEQ ID NO: 58118 - DNA, 120 bp, synthetic construct; identical to SEQ ID NO: 8490
  source 1..120: mol_type = other DNA

SEQ ID NO: 58119 - DNA, 120 bp, synthetic construct; identical to SEQ ID NO: 28165
  source 1..120: mol_type = other DNA

SEQ ID NO: 58120 - DNA, 120 bp, synthetic construct; identical to SEQ ID NO: 28166
  source 1..120: mol_type = other DNA

SEQ ID NO: 58121 - DNA, 120 bp, synthetic construct; identical to SEQ ID NO: 8491
  source 1..120: mol_type = other DNA

SEQ ID NO: 58122 - DNA, 120 bp, synthetic construct; identical to SEQ ID NO: 28168
  source 1..120: mol_type = other DNA

SEQ ID NO: 58123 - DNA, 120 bp, synthetic construct; identical to SEQ ID NO: 28169
  source 1..120: mol_type = other DNA

SEQ ID NO: 58124 - DNA, 120 bp, synthetic construct; identical to SEQ ID NO: 28170
  source 1..120: mol_type = other DNA

SEQ ID NO: 58125 - DNA, 120 bp, synthetic construct; identical to SEQ ID NO: 28171
  source 1..120: mol_type = other DNA

SEQ ID NO: 58126 - DNA, 120 bp, synthetic construct; identical to SEQ ID NO: 8492
  source 1..120: mol_type = other DNA

SEQ ID NO: 58127 - DNA, 120 bp, synthetic construct; identical to SEQ ID NO: 28173
  source 1..120: mol_type = other DNA

SEQ ID NO: 58128 - DNA, 120 bp, synthetic construct; identical to SEQ ID NO: 28174
  source 1..120: mol_type = other DNA

SEQ ID NO: 58129 - DNA, 120 bp, synthetic construct; identical to SEQ ID NO: 28175
  source 1..120: mol_type = other DNA

SEQ ID NO: 58130 - DNA, 120 bp, synthetic construct; identical to SEQ ID NO: 8493
  source 1..120: mol_type = other DNA

SEQ ID NO: 58131 - DNA, 120 bp, synthetic construct; identical to SEQ ID NO: 28177
  source 1..120: mol_type = other DNA

SEQ ID NO: 58132 - DNA, 120 bp, synthetic construct; identical to SEQ ID NO: 28178
  source 1..120: mol_type = other DNA

SEQ ID NO: 58133 - DNA, 120 bp, synthetic construct; identical to SEQ ID NO: 28179
  source 1..120: mol_type = other DNA

SEQ ID NO: 58134 - DNA, 120 bp, synthetic construct; identical to SEQ ID NO: 8494
  source 1..120: mol_type = other DNA

SEQ ID NO: 58135 - DNA, 120 bp, synthetic construct; identical to SEQ ID NO: 28181
  source 1..120: mol_type = other DNA

SEQ ID NO: 58136 - DNA, 120 bp, synthetic construct; identical to SEQ ID NO: 28182
  source 1..120: mol_type = other DNA

SEQ ID NO: 58137 - DNA, 120 bp, synthetic construct; identical to SEQ ID NO: 8495
  source 1..120: mol_type = other DNA

SEQ ID NO: 58138 - DNA, 120 bp, synthetic construct; identical to SEQ ID NO: 28184
  source 1..120: mol_type = other DNA

SEQ ID NO: 58139 - DNA, 120 bp, synthetic construct; identical to SEQ ID NO: 28185
  source 1..120: mol_type = other DNA

SEQ ID NO: 58140 - DNA, 120 bp, synthetic construct; identical to SEQ ID NO: 28186
  source 1..120: mol_type = other DNA

SEQ ID NO: 58141 - DNA, 120 bp, synthetic construct; identical to SEQ ID NO: 8496
  source 1..120: mol_type = other DNA

SEQ ID NO: 58142 - DNA, 120 bp, synthetic construct; identical to SEQ ID NO: 28188
  source 1..120: mol_type = other DNA

SEQ ID NO: 58143 - DNA, 120 bp, synthetic construct; identical to SEQ ID NO: 28189
  source 1..120: mol_type = other DNA

SEQ ID NO: 58144 - DNA, 120 bp, synthetic construct; identical to SEQ ID NO: 28190
  source 1..120: mol_type = other DNA

SEQ ID NO: 58145 - DNA, 120 bp, synthetic construct; identical to SEQ ID NO: 28191
  source 1..120: mol_type = other DNA

SEQ ID NO: 58146 - DNA, 120 bp, synthetic construct; identical to SEQ ID NO: 8497
  source 1..120: mol_type = other DNA

SEQ ID NO: 58147 - DNA, 120 bp, synthetic construct; identical to SEQ ID NO: 28193
  source 1..120: mol_type = other DNA

SEQ ID NO: 58148 - DNA, 120 bp, synthetic construct; identical to SEQ ID NO: 28194
  source 1..120: mol_type = other DNA

SEQ ID NO: 58149 - DNA, 120 bp, synthetic construct; identical to SEQ ID NO: 8498
  source 1..120: mol_type = other DNA

SEQ ID NO: 58150 - DNA, 120 bp, synthetic construct; identical to SEQ ID NO: 28196
  source 1..120: mol_type = other DNA

SEQ ID NO: 58151 - DNA, 120 bp, synthetic construct; identical to SEQ ID NO: 28197
  source 1..120: mol_type = other DNA

SEQ ID NO: 58152 - DNA, 120 bp, synthetic construct; identical to SEQ ID NO: 28198
  source 1..120: mol_type = other DNA

SEQ ID NO: 58153 - DNA, 120 bp, synthetic construct; identical to SEQ ID NO: 28199
  source 1..120: mol_type = other DNA

SEQ ID NO: 58154 - DNA, 120 bp, synthetic construct; identical to SEQ ID NO: 8499
  source 1..120: mol_type = other DNA

SEQ ID NO: 58155 - DNA, 120 bp, synthetic construct; identical to SEQ ID NO: 28201
  source 1..120: mol_type = other DNA

SEQ ID NO: 58156 - DNA, 120 bp, synthetic construct; identical to SEQ ID NO: 28202
  source 1..120: mol_type = other DNA

SEQ ID NO: 58157 - DNA, 120 bp, synthetic construct; identical to SEQ ID NO: 8500
  source 1..120: mol_type = other DNA

SEQ ID NO: 58158 - DNA, 120 bp, synthetic construct; identical to SEQ ID NO: 28204
  source 1..120: mol_type = other DNA

SEQ ID NO: 58159 - DNA, 120 bp, synthetic construct; identical to SEQ ID NO: 28205
  source 1..120: mol_type = other DNA

SEQ ID NO: 58160 - DNA, 120 bp, synthetic construct; identical to SEQ ID NO: 28206
  source 1..120: mol_type = other DNA

SEQ ID NO: 58161 - DNA, 120 bp, synthetic construct; identical to SEQ ID NO: 8501
  source 1..120: mol_type = other DNA

SEQ ID NO: 58162 - DNA, 120 bp, synthetic construct; identical to SEQ ID NO: 28208
  source 1..120: mol_type = other DNA

SEQ ID NO: 58163 - DNA, 120 bp, synthetic construct; identical to SEQ ID NO: 28209
  source 1..120: mol_type = other DNA

SEQ ID NO: 58164 - DNA, 120 bp, synthetic construct; identical to SEQ ID NO: 28210
  source 1..120: mol_type = other DNA

SEQ ID NO: 58165 - DNA, 120 bp, synthetic construct; identical to SEQ ID NO: 28211
  source 1..120: mol_type = other DNA

SEQ ID NO: 58166 - DNA, 120 bp, synthetic construct; identical to SEQ ID NO: 8502
  source 1..120: mol_type = other DNA

SEQ ID NO: 58167 - DNA, 120 bp, synthetic construct; identical to SEQ ID NO: 28213
  source 1..120: mol_type = other DNA

SEQ ID NO: 58168 - DNA, 120 bp, synthetic construct; identical to SEQ ID NO: 28214
  source 1..120: mol_type = other DNA

SEQ ID NO: 58169 - DNA, 120 bp, synthetic construct; identical to SEQ ID NO: 28215
  source 1..120: mol_type = other DNA

SEQ ID NO: 58170 - DNA, 120 bp, synthetic construct; identical to SEQ ID NO: 8503
  source 1..120: mol_type = other DNA

SEQ ID NO: 58171 - DNA, 120 bp, synthetic construct; identical to SEQ ID NO: 28217
  source 1..120: mol_type = other DNA

SEQ ID NO: 58172 - DNA, 120 bp, synthetic construct; identical to SEQ ID NO: 28218
  source 1..120: mol_type = other DNA

SEQ ID NO: 58173 - DNA, 120 bp, synthetic construct; identical to SEQ ID NO: 28219
  source 1..120: mol_type = other DNA

SEQ ID NO: 58174 - DNA, 120 bp, synthetic construct; identical to SEQ ID NO: 8504
  source 1..120: mol_type = other DNA

SEQ ID NO: 58175 - DNA, 120 bp, synthetic construct; identical to SEQ ID NO: 28221
  source 1..120: mol_type = other DNA

SEQ ID NO: 58176 - DNA, 120 bp, synthetic construct; identical to SEQ ID NO: 28222
  source 1..120: mol_type = other DNA

SEQ ID NO: 58177 - DNA, 120 bp, synthetic construct; identical to SEQ ID NO: 8505
  source 1..120: mol_type = other DNA

SEQ ID NO: 58178 - DNA, 120 bp, synthetic construct; identical to SEQ ID NO: 28224
  source 1..120: mol_type = other DNA

SEQ ID NO: 58179 - DNA, 120 bp, synthetic construct; identical to SEQ ID NO: 28225
  source 1..120: mol_type = other DNA

SEQ ID NO: 58180 - DNA, 120 bp, synthetic construct; identical to SEQ ID NO: 28226
  source 1..120: mol_type = other DNA

SEQ ID NO: 58181 - DNA, 120 bp, synthetic construct; identical to SEQ ID NO: 8506
  source 1..120: mol_type = other DNA

SEQ ID NO: 58182 - DNA, 120 bp, synthetic construct; identical to SEQ ID NO: 28228
  source 1..120: mol_type = other DNA

SEQ ID NO: 58183 - DNA, 120 bp, synthetic construct; identical to SEQ ID NO: 28229
  source 1..120: mol_type = other DNA

SEQ ID NO: 58184 - DNA, 120 bp, synthetic construct; identical to SEQ ID NO: 28230
  source 1..120: mol_type = other DNA

SEQ ID NO: 58185 - DNA, 120 bp, synthetic construct; identical to SEQ ID NO: 8507
  source 1..120: mol_type = other DNA

SEQ ID NO: 58186 - DNA, 120 bp, synthetic construct; identical to SEQ ID NO: 28232
  source 1..120: mol_type = other DNA

SEQ ID NO: 58187 - DNA, 120 bp, synthetic construct; identical to SEQ ID NO: 28233
  source 1..120: mol_type = other DNA

SEQ ID NO: 58188 - DNA, 120 bp, synthetic construct; identical to SEQ ID NO: 28234
  source 1..120: mol_type = other DNA

SEQ ID NO: 58189 - DNA, 120 bp, synthetic construct; identical to SEQ ID NO: 8508
  source 1..120: mol_type = other DNA

SEQ ID NO: 58190 - DNA, 120 bp, synthetic construct; identical to SEQ ID NO: 28236
  source 1..120: mol_type = other DNA

SEQ ID NO: 58191 - DNA, 120 bp, synthetic construct; identical to SEQ ID NO: 28237
  source 1..120: mol_type = other DNA

SEQ ID NO: 58192 - DNA, 120 bp, synthetic construct; identical to SEQ ID NO: 28238
  source 1..120: mol_type = other DNA

SEQ ID NO: 58193 - DNA, 120 bp, synthetic construct; identical to SEQ ID NO: 8509
  source 1..120: mol_type = other DNA

SEQ ID NO: 58194 - DNA, 120 bp, synthetic construct; identical to SEQ ID NO: 28240
  source 1..120: mol_type = other DNA

SEQ ID NO: 58195 - DNA, 120 bp, synthetic construct; identical to SEQ ID NO: 28241
  source 1..120: mol_type = other DNA

SEQ ID NO: 58196 - DNA, 120 bp, synthetic construct; identical to SEQ ID NO: 28242
  source 1..120: mol_type = other DNA

SEQ ID NO: 58197 - DNA, 120 bp, synthetic construct; identical to SEQ ID NO: 28243
  source 1..120: mol_type = other DNA

SEQ ID NO: 58198 - DNA, 120 bp, synthetic construct; identical to SEQ ID NO: 8510
  source 1..120: mol_type = other DNA

SEQ ID NO: 58199 - DNA, 120 bp, synthetic construct; identical to SEQ ID NO: 28245
  source 1..120: mol_type = other DNA

SEQ ID NO: 58200 - DNA, 120 bp, synthetic construct; identical to SEQ ID NO: 28246
  source 1..120: mol_type = other DNA

SEQ ID NO: 58201 - DNA, 120 bp, synthetic construct; identical to SEQ ID NO: 28247
  source 1..120: mol_type = other DNA

SEQ ID NO: 58202 - DNA, 120 bp, synthetic construct; identical to SEQ ID NO: 8511
  source 1..120: mol_type = other DNA

SEQ ID NO: 58203 - DNA, 120 bp, synthetic construct; identical to SEQ ID NO: 28249
  source 1..120: mol_type = other DNA

SEQ ID NO: 58204 - DNA, 120 bp, synthetic construct; identical to SEQ ID NO: 28250
  source 1..120: mol_type = other DNA

SEQ ID NO: 58205 - DNA, 120 bp, synthetic construct; identical to SEQ ID NO: 28251
  source 1..120: mol_type = other DNA

SEQ ID NO: 58206 - DNA, 120 bp, synthetic construct; identical to SEQ ID NO: 8512
  source 1..120: mol_type = other DNA

SEQ ID NO: 58207 - DNA, 120 bp, synthetic construct; identical to SEQ ID NO: 28253
  source 1..120: mol_type = other DNA

SEQ ID NO: 58208 - DNA, 120 bp, synthetic construct; identical to SEQ ID NO: 28254
  source 1..120: mol_type = other DNA

SEQ ID NO: 58209 - DNA, 120 bp, synthetic construct; identical to SEQ ID NO: 28255
  source 1..120: mol_type = other DNA

SEQ ID NO: 58210 - DNA, 120 bp, synthetic construct; identical to SEQ ID NO: 8513
  source 1..120: mol_type = other DNA

SEQ ID NO: 58211 - DNA, 120 bp, synthetic construct; identical to SEQ ID NO: 28257
  source 1..120: mol_type = other DNA

SEQ ID NO: 58212 - DNA, 120 bp, synthetic construct; identical to SEQ ID NO: 28258
  source 1..120: mol_type = other DNA

SEQ ID NO: 58213 - DNA, 120 bp, synthetic construct; identical to SEQ ID NO: 8514
  source 1..120: mol_type = other DNA

SEQ ID NO: 58214 - DNA, 120 bp, synthetic construct; identical to SEQ ID NO: 28260
  source 1..120: mol_type = other DNA

SEQ ID NO: 58215 - DNA, 120 bp, synthetic construct; identical to SEQ ID NO: 28261
  source 1..120: mol_type = other DNA

SEQ ID NO: 58216 - DNA, 120 bp, synthetic construct; identical to SEQ ID NO: 28262
  source 1..120: mol_type = other DNA

SEQ ID NO: 58217 - DNA, 120 bp, synthetic construct; identical to SEQ ID NO: 8515
  source 1..120: mol_type = other DNA

SEQ ID NO: 58218 - DNA, 120 bp, synthetic construct; identical to SEQ ID NO: 28264
  source 1..120: mol_type = other DNA

SEQ ID NO: 58219 - DNA, 120 bp, synthetic construct; identical to SEQ ID NO: 28265
  source 1..120: mol_type = other DNA

SEQ ID NO: 58220 - DNA, 120 bp, synthetic construct; identical to SEQ ID NO: 28266
  source 1..120: mol_type = other DNA

SEQ ID NO: 58221 - DNA, 120 bp, synthetic construct; identical to SEQ ID NO: 28267
  source 1..120: mol_type = other DNA

SEQ ID NO: 58222 - DNA, 120 bp, synthetic construct; identical to SEQ ID NO: 8516
  source 1..120: mol_type = other DNA

SEQ ID NO: 58223 - DNA, 120 bp, synthetic construct; identical to SEQ ID NO: 28269
  source 1..120: mol_type = other DNA

SEQ ID NO: 58224 - DNA, 120 bp, synthetic construct; identical to SEQ ID NO: 28270
  source 1..120: mol_type = other DNA

SEQ ID NO: 58225 - DNA, 120 bp, synthetic construct; identical to SEQ ID NO: 28271
  source 1..120: mol_type = other DNA

SEQ ID NO: 58226 - DNA, 120 bp, synthetic construct; identical to SEQ ID NO: 8517
  source 1..120: mol_type = other DNA

SEQ ID NO: 58227 - DNA, 120 bp, synthetic construct; identical to SEQ ID NO: 28273
  source 1..120: mol_type = other DNA

SEQ ID NO: 58228 - DNA, 120 bp, synthetic construct; identical to SEQ ID NO: 28274
  source 1..120: mol_type = other DNA

SEQ ID NO: 58229 - DNA, 120 bp, synthetic construct; identical to SEQ ID NO: 8518
  source 1..120: mol_type = other DNA

SEQ ID NO: 58230 - DNA, 120 bp, synthetic construct; identical to SEQ ID NO: 28276
  source 1..120: mol_type = other DNA

SEQ ID NO: 58231 - DNA, 120 bp, synthetic construct; identical to SEQ ID NO: 28277
  source 1..120: mol_type = other DNA

SEQ ID NO: 58232 - DNA, 120 bp, synthetic construct; identical to SEQ ID NO: 28278
  source 1..120: mol_type = other DNA

SEQ ID NO: 58233 - DNA, 120 bp, synthetic construct; identical to SEQ ID NO: 8519
  source 1..120: mol_type = other DNA

SEQ ID NO: 58234 - DNA, 120 bp, synthetic construct; identical to SEQ ID NO: 28280
  source 1..120: mol_type = other DNA

SEQ ID NO: 58235 - DNA, 120 bp, synthetic construct; identical to SEQ ID NO: 28281
  source 1..120: mol_type = other DNA

SEQ ID NO: 58236 - DNA, 120 bp, synthetic construct; identical to SEQ ID NO: 28282
  source 1..120: mol_type = other DNA

SEQ ID NO: 58237 - DNA, 120 bp, synthetic construct; identical to SEQ ID NO: 28283
  source 1..120: mol_type = other DNA

SEQ ID NO: 58238 - DNA, 120 bp, synthetic construct; identical to SEQ ID NO: 8520
  source 1..120: mol_type = other DNA

SEQ ID NO: 58239 - DNA, 120 bp, synthetic construct; identical to SEQ ID NO: 28285
  source 1..120: mol_type = other DNA

SEQ ID NO: 58240 - DNA, 120 bp, synthetic construct; identical to SEQ ID NO: 28286
  source 1..120: mol_type = other DNA

SEQ ID NO: 58241 - DNA, 120 bp, synthetic construct; identical to SEQ ID NO: 28287
  source 1..120: mol_type = other DNA

SEQ ID NO: 58242 - DNA, 120 bp, synthetic construct; identical to SEQ ID NO: 8521
  source 1..120: mol_type = other DNA

SEQ ID NO: 58243 - DNA, 120 bp, synthetic construct; identical to SEQ ID NO: 28289
  source 1..120: mol_type = other DNA

SEQ ID NO: 58244 - DNA, 120 bp, synthetic construct; identical to SEQ ID NO: 28290
  source 1..120: mol_type = other DNA

SEQ ID NO: 58245 - DNA, 120 bp, synthetic construct; identical to SEQ ID NO: 28291
  source 1..120: mol_type = other DNA

SEQ ID NO: 58246 - DNA, 120 bp, synthetic construct; identical to SEQ ID NO: 8522
  source 1..120: mol_type = other DNA

SEQ ID NO: 58247 - DNA, 120 bp, synthetic construct; identical to SEQ ID NO: 28293
  source 1..120: mol_type = other DNA

SEQ ID NO: 58248 - DNA, 120 bp, synthetic construct; identical to SEQ ID NO: 28294
  source 1..120: mol_type = other DNA

SEQ ID NO: 58249 - DNA, 120 bp, synthetic construct; identical to SEQ ID NO: 28295
  source 1..120: mol_type = other DNA

SEQ ID NO: 58250 - DNA, 120 bp, synthetic construct; identical to SEQ ID NO: 8523
  source 1..120: mol_type = other DNA

SEQ ID NO: 58251 - DNA, 120 bp, synthetic construct; identical to SEQ ID NO: 28297
  source 1..120: mol_type = other DNA

SEQ ID NO: 58252 - DNA, 120 bp, synthetic construct; identical to SEQ ID NO: 28298
  source 1..120: mol_type = other DNA

SEQ ID NO: 58253 - DNA, 120 bp, synthetic construct; identical to SEQ ID NO: 8524
  source 1..120: mol_type = other DNA

SEQ ID NO: 58254 - DNA, 120 bp, synthetic construct; identical to SEQ ID NO: 28300
  source 1..120: mol_type = other DNA

SEQ ID NO: 58255 - DNA, 120 bp, synthetic construct; identical to SEQ ID NO: 28301
  source 1..120: mol_type = other DNA

SEQ ID NO: 58256 - DNA, 120 bp, synthetic construct; identical to SEQ ID NO: 28302
  source 1..120: mol_type = other DNA

SEQ ID NO: 58257 - DNA, 120 bp, synthetic construct; identical to SEQ ID NO: 28303
  source 1..120: mol_type = other DNA

SEQ ID NO: 58258 - DNA, 120 bp, synthetic construct; identical to SEQ ID NO: 8525
  source 1..120: mol_type = other DNA

SEQ ID NO: 58259 - DNA, 120 bp, synthetic construct; identical to SEQ ID NO: 28305
  source 1..120: mol_type = other DNA

SEQ ID NO: 58260 - DNA, 120 bp, synthetic construct; identical to SEQ ID NO: 28306
  source 1..120: mol_type = other DNA

SEQ ID NO: 58261 - DNA, 120 bp, synthetic construct; identical to SEQ ID NO: 28307
  source 1..120: mol_type = other DNA

SEQ ID NO: 58262 - DNA, 120 bp, synthetic construct; identical to SEQ ID NO: 8526
  source 1..120: mol_type = other DNA

SEQ ID NO: 58263 - DNA, 120 bp, synthetic construct; identical to SEQ ID NO: 28309
  source 1..120: mol_type = other DNA

SEQ ID NO: 58264 - DNA, 120 bp, synthetic construct; identical to SEQ ID NO: 28310
  source 1..120: mol_type = other DNA

SEQ ID NO: 58265 - DNA, 120 bp, synthetic construct; identical to SEQ ID NO: 28311
  source 1..120: mol_type = other DNA

SEQ ID NO: 58266 - DNA, 120 bp, synthetic construct; identical to SEQ ID NO: 8527
  source 1..120: mol_type = other DNA

SEQ ID NO: 58267 - DNA, 120 bp, synthetic construct; identical to SEQ ID NO: 28313
  source 1..120: mol_type = other DNA

SEQ ID NO: 58268 - DNA, 120 bp, synthetic construct; identical to SEQ ID NO: 28314
  source 1..120: mol_type = other DNA

SEQ ID NO: 58269 - DNA, 120 bp, synthetic construct; identical to SEQ ID NO: 28315
  source 1..120: mol_type = other DNA

SEQ ID NO: 58270 - DNA, 120 bp, synthetic construct; identical to SEQ ID NO: 8528
  source 1..120: mol_type = other DNA

SEQ ID NO: 58271 - DNA, 120 bp, synthetic construct; identical to SEQ ID NO: 28317
  source 1..120: mol_type = other DNA

SEQ ID NO: 58272 - DNA, 120 bp, synthetic construct; identical to SEQ ID NO: 28318
  source 1..120: mol_type = other DNA

SEQ ID NO: 58273 - DNA, 120 bp, synthetic construct; identical to SEQ ID NO: 28319
  source 1..120: mol_type = other DNA

SEQ ID NO: 58274 - DNA, 120 bp, synthetic construct; identical to SEQ ID NO: 8529
  source 1..120: mol_type = other DNA

SEQ ID NO: 58275 - DNA, 120 bp, synthetic construct; identical to SEQ ID NO: 28321
  source 1..120: mol_type = other DNA

SEQ ID NO: 58276 - DNA, 120 bp, synthetic construct; identical to SEQ ID NO: 28322
  source 1..120: mol_type = other DNA

SEQ ID NO: 58277 - DNA, 120 bp, synthetic construct; identical to SEQ ID NO: 8530
  source 1..120: mol_type = other DNA

SEQ ID NO: 58278 - DNA, 120 bp, synthetic construct; identical to SEQ ID NO: 28324
  source 1..120: mol_type = other DNA

SEQ ID NO: 58279 - DNA, 120 bp, synthetic construct; identical to SEQ ID NO: 28325
  source 1..120: mol_type = other DNA

SEQ ID NO: 58280 - DNA, 120 bp, synthetic construct; identical to SEQ ID NO: 28326
  source 1..120: mol_type = other DNA

SEQ ID NO: 58281 - DNA, 120 bp, synthetic construct; identical to SEQ ID NO: 8531
  source 1..120: mol_type = other DNA

SEQ ID NO: 58282 - DNA, 120 bp, synthetic construct; identical to SEQ ID NO: 28328
  source 1..120: mol_type = other DNA

SEQ ID NO: 58283 - DNA, 120 bp, synthetic construct; identical to SEQ ID NO: 28329
  source 1..120: mol_type = other DNA

SEQ ID NO: 58284 - DNA, 120 bp, synthetic construct; identical to SEQ ID NO: 28330
  source 1..120: mol_type = other DNA

SEQ ID NO: 58285 - DNA, 120 bp, synthetic construct; identical to SEQ ID NO: 8532
  source 1..120: mol_type = other DNA

SEQ ID NO: 58286 - DNA, 120 bp, synthetic construct; identical to SEQ ID NO: 28332
  source 1..120: mol_type = other DNA

SEQ ID NO: 58287 - DNA, 120 bp, synthetic construct; identical to SEQ ID NO: 28333
  source 1..120: mol_type = other DNA

SEQ ID NO: 58288 - DNA, 120 bp, synthetic construct; identical to SEQ ID NO: 28334
  source 1..120: mol_type = other DNA

SEQ ID NO: 58289 - DNA, 120 bp, synthetic construct; identical to SEQ ID NO: 28335
  source 1..120: mol_type = other DNA

SEQ ID NO: 58290 - DNA, 120 bp, synthetic construct; identical to SEQ ID NO: 8533
  source 1..120: mol_type = other DNA

SEQ ID NO: 58291 - DNA, 120 bp, synthetic construct; identical to SEQ ID NO: 28337
  source 1..120: mol_type = other DNA

SEQ ID NO: 58292 - DNA, 120 bp, synthetic construct; identical to SEQ ID NO: 28338
  source 1..120: mol_type = other DNA

SEQ ID NO: 58293 - DNA, 120 bp, synthetic construct; identical to SEQ ID NO: 8534
  source 1..120: mol_type = other DNA

SEQ ID NO: 58294 - DNA, 120 bp, synthetic construct; identical to SEQ ID NO: 28340
  source 1..120: mol_type = other DNA

SEQ ID NO: 58295 - DNA, 120 bp, synthetic construct; identical to SEQ ID NO: 28341
  source 1..120: mol_type = other DNA

SEQ ID NO: 58296 - DNA, 120 bp, synthetic construct; identical to SEQ ID NO: 28342
  source 1..120: mol_type = other DNA

SEQ ID NO: 58297 - DNA, 120 bp, synthetic construct; identical to SEQ ID NO: 8535
  source 1..120: mol_type = other DNA

SEQ ID NO: 58298 - DNA, 120 bp, synthetic construct; identical to SEQ ID NO: 28344
  source 1..120: mol_type = other DNA

SEQ ID NO: 58299 - DNA, 120 bp, synthetic construct; identical to SEQ ID NO: 28345
  source 1..120: mol_type = other DNA

SEQ ID NO: 58300 - DNA, 120 bp, synthetic construct; identical to SEQ ID NO: 28346
  source 1..120: mol_type = other DNA

SEQ ID NO: 58301 - DNA, 120 bp, synthetic construct; identical to SEQ ID NO: 28347
  source 1..120: mol_type = other DNA

SEQ ID NO: 58302 - DNA, 120 bp, synthetic construct; identical to SEQ ID NO: 8536
  source 1..120: mol_type = other DNA

SEQ ID NO: 58303 - DNA, 120 bp, synthetic construct; identical to SEQ ID NO: 28349
  source 1..120: mol_type = other DNA

SEQ ID NO: 58304 - DNA, 120 bp, synthetic construct; identical to SEQ ID NO: 28350
  source 1..120: mol_type = other DNA

SEQ ID NO: 58305 - DNA, 120 bp, synthetic construct; identical to SEQ ID NO: 8537
  source 1..120: mol_type = other DNA

SEQ ID NO: 58306 - DNA, 120 bp, synthetic construct; identical to SEQ ID NO: 28352
  source 1..120: mol_type = other DNA

SEQ ID NO: 58307 - DNA, 120 bp, synthetic construct; identical to SEQ ID NO: 28353
  source 1..120: mol_type = other DNA

SEQ ID NO: 58308 - DNA, 120 bp, synthetic construct; identical to SEQ ID NO: 28354
  source 1..120: mol_type = other DNA

SEQ ID NO: 58309 - DNA, 120 bp, synthetic construct; identical to SEQ ID NO: 8538
  source 1..120: mol_type = other DNA

SEQ ID NO: 58310 - DNA, 120 bp, synthetic construct; identical to SEQ ID NO: 28356
  source 1..120: mol_type = other DNA

SEQ ID NO: 58311 - DNA, 120 bp, synthetic construct; identical to SEQ ID NO: 28357
  source 1..120: mol_type = other DNA

SEQ ID NO: 58312 - DNA, 120 bp, synthetic construct; identical to SEQ ID NO: 28358
  source 1..120: mol_type = other DNA

SEQ ID NO: 58313 - DNA, 120 bp, synthetic construct; identical to SEQ ID NO: 8539
  source 1..120: mol_type = other DNA

SEQ ID NO: 58314 - DNA, 120 bp, synthetic construct; identical to SEQ ID NO: 28360
  source 1..120: mol_type = other DNA

SEQ ID NO: 58315 - DNA, 120 bp, synthetic construct; identical to SEQ ID NO: 28361
  source 1..120: mol_type = other DNA

SEQ ID NO: 58316 - DNA, 120 bp, synthetic construct; identical to SEQ ID NO: 28362
  source 1..120: mol_type = other DNA

SEQ ID NO: 58317 - DNA, 120 bp, synthetic construct; identical to SEQ ID NO: 28363
  source 1..120: mol_type = other DNA

SEQ ID NO: 58318 - DNA, 120 bp, synthetic construct; identical to SEQ ID NO: 8540
  source 1..120: mol_type = other DNA

SEQ ID NO: 58319 - DNA, 120 bp, synthetic construct; identical to SEQ ID NO: 28365
  source 1..120: mol_type = other DNA

SEQ ID NO: 58320 - DNA, 120 bp, synthetic construct; identical to SEQ ID NO: 28366
  source 1..120: mol_type = other DNA

SEQ ID NO: 58321 - DNA, 120 bp, synthetic construct; identical to SEQ ID NO: 28367
  source 1..120: mol_type = other DNA

SEQ ID NO: 58322 - DNA, 120 bp, synthetic construct; identical to SEQ ID NO: 8541
  source 1..120: mol_type = other DNA

SEQ ID NO: 58323 - DNA, 120 bp, synthetic construct; identical to SEQ ID NO: 28369
  source 1..120: mol_type = other DNA

SEQ ID NO: 58324 - DNA, 120 bp, synthetic construct; identical to SEQ ID NO: 28370
  source 1..120: mol_type = other DNA

SEQ ID NO: 58325 - DNA, 120 bp, synthetic construct; identical to SEQ ID NO: 8542
  source 1..120: mol_type = other DNA

SEQ ID NO: 58326 - DNA, 120 bp, synthetic construct; identical to SEQ ID NO: 28372
  source 1..120: mol_type = other DNA

SEQ ID NO: 58327 - DNA, 120 bp, synthetic construct; identical to SEQ ID NO: 28373
  source 1..120: mol_type = other DNA

SEQ ID NO: 58328 - DNA, 120 bp, synthetic construct; identical to SEQ ID NO: 28374
  source 1..120: mol_type = other DNA

SEQ ID NO: 58329 - DNA, 120 bp, synthetic construct; identical to SEQ ID NO: 28375
  source 1..120: mol_type = other DNA

SEQ ID NO: 58330 - DNA, 120 bp, synthetic construct; identical to SEQ ID NO: 8543
  source 1..120: mol_type = other DNA

SEQ ID NO: 58331 - DNA, 120 bp, synthetic construct; identical to SEQ ID NO: 28377
  source 1..120: mol_type = other DNA

SEQ ID NO: 58332 - DNA, 120 bp, synthetic construct; identical to SEQ ID NO: 28378
  source 1..120: mol_type = other DNA

SEQ ID NO: 58333 - DNA, 120 bp, synthetic construct; identical to SEQ ID NO: 8544
  source 1..120: mol_type = other DNA

SEQ ID NO: 58334 - DNA, 120 bp, synthetic construct; identical to SEQ ID NO: 28380
  source 1..120: mol_type = other DNA

SEQ ID NO: 58335 - DNA, 120 bp, synthetic construct; identical to SEQ ID NO: 28381
  source 1..120: mol_type = other DNA

SEQ ID NO: 58336 - DNA, 120 bp, synthetic construct; identical to SEQ ID NO: 28382
  source 1..120: mol_type = other DNA

SEQ ID NO: 58337 - DNA, 120 bp, synthetic construct; identical to SEQ ID NO: 28383
  source 1..120: mol_type = other DNA

SEQ ID NO: 58338 - DNA, 120 bp, synthetic construct; identical to SEQ ID NO: 8545
  source 1..120: mol_type = other DNA

SEQ ID NO: 58339 - DNA, 120 bp, synthetic construct; identical to SEQ ID NO: 28385
  source 1..120: mol_type = other DNA

SEQ ID NO: 58340 - DNA, 120 bp, synthetic construct; identical to SEQ ID NO: 28386
  source 1..120: mol_type = other DNA

SEQ ID NO: 58341 - DNA, 120 bp, synthetic construct; identical to SEQ ID NO: 28387
  source 1..120: mol_type = other DNA

SEQ ID NO: 58342 - DNA, 120 bp, synthetic construct; identical to SEQ ID NO: 8546
  source 1..120: mol_type = other DNA

SEQ ID NO: 58343 - DNA, 120 bp, synthetic construct; identical to SEQ ID NO: 28389
  source 1..120: mol_type = other DNA

SEQ ID NO: 58344 - DNA, 120 bp, synthetic construct; identical to SEQ ID NO: 28390
  source 1..120: mol_type = other DNA

SEQ ID NO: 58345 - DNA, 120 bp, synthetic construct; identical to SEQ ID NO: 8547
  source 1..120: mol_type = other DNA

SEQ ID NO: 58346 - DNA, 120 bp, synthetic construct; identical to SEQ ID NO: 28392
  source 1..120: mol_type = other DNA

SEQ ID NO: 58347 - DNA, 120 bp, synthetic construct; identical to SEQ ID NO: 28393
  source 1..120: mol_type = other DNA

SEQ ID NO: 58348 - DNA, 120 bp, synthetic construct; identical to SEQ ID NO: 28394
  source 1..120: mol_type = other DNA

SEQ ID NO: 58349 - DNA, 120 bp, synthetic construct; identical to SEQ ID NO: 8548
  source 1..120: mol_type = other DNA

SEQ ID NO: 58350 - DNA, 120 bp, synthetic construct; identical to SEQ ID NO: 28396
  source 1..120: mol_type = other DNA

SEQ ID NO: 58351 - DNA, 120 bp, synthetic construct; identical to SEQ ID NO: 28397
  source 1..120: mol_type = other DNA

SEQ ID NO: 58352 - DNA, 120 bp, synthetic construct; identical to SEQ ID NO: 28398
  source 1..120: mol_type = other DNA

SEQ ID NO: 58353 - DNA, 120 bp, synthetic construct; identical to SEQ ID NO: 8549
  source 1..120: mol_type = other DNA

SEQ ID NO: 58354 - DNA, 120 bp, synthetic construct; identical to SEQ ID NO: 28400
  source 1..120: mol_type = other DNA

SEQ ID NO: 58355 - DNA, 120 bp, synthetic construct; identical to SEQ ID NO: 28401
  source 1..120: mol_type = other DNA

SEQ ID NO: 58356 - DNA, 120 bp, synthetic construct; identical to SEQ ID NO: 8550
  source 1..120: mol_type = other DNA

SEQ ID NO: 58357 - DNA, 120 bp, synthetic construct; identical to SEQ ID NO: 28403
  source 1..120: mol_type = other DNA

SEQ ID NO: 58358 - DNA, 120 bp, synthetic construct; identical to SEQ ID NO: 28404
  source 1..120: mol_type = other DNA

SEQ ID NO: 58359 - DNA, 120 bp, synthetic construct; identical to SEQ ID NO: 28405
  source 1..120: mol_type = other DNA

SEQ ID NO: 58360 - DNA, 120 bp, synthetic construct; identical to SEQ ID NO: 8551
  source 1..120: mol_type = other DNA

SEQ ID NO: 58361 - DNA, 120 bp, synthetic construct; identical to SEQ ID NO: 28407
  source 1..120: mol_type = other DNA

SEQ ID NO: 58362 - DNA, 120 bp, synthetic construct; identical to SEQ ID NO: 28408
  source 1..120: mol_type = other DNA

SEQ ID NO: 58363 - DNA, 120 bp, synthetic construct; identical to SEQ ID NO: 28409
  source 1..120: mol_type = other DNA

SEQ ID NO: 58364 - DNA, 120 bp, synthetic construct; identical to SEQ ID NO: 8552
  source 1..120: mol_type = other DNA

SEQ ID NO: 58365 - DNA, 120 bp, synthetic construct; identical to SEQ ID NO: 28411
  source 1..120: mol_type = other DNA

SEQ ID NO: 58366 - DNA, 120 bp, synthetic construct; identical to SEQ ID NO: 28412
  source 1..120: mol_type = other DNA

SEQ ID NO: 58367 - DNA, 120 bp, synthetic construct; identical to SEQ ID NO: 28413
  source 1..120: mol_type = other DNA

SEQ ID NO: 58368 - DNA, 120 bp, synthetic construct; identical to SEQ ID NO: 8553
  source 1..120: mol_type = other DNA

SEQ ID NO: 58369 - DNA, 120 bp, synthetic construct; identical to SEQ ID NO: 28415
  source 1..120: mol_type = other DNA

SEQ ID NO: 58370 - DNA, 120 bp, synthetic construct; identical to SEQ ID NO: 28416
  source 1..120: mol_type = other DNA

SEQ ID NO: 58371 - DNA, 120 bp, synthetic construct; identical to SEQ ID NO: 8554
  source 1..120: mol_type = other DNA

SEQ ID NO: 58372 - DNA, 120 bp, synthetic construct; identical to SEQ ID NO: 28418
  source 1..120: mol_type = other DNA

SEQ ID NO: 58373 - DNA, 120 bp, synthetic construct; identical to SEQ ID NO: 28419
  source 1..120: mol_type = other DNA

SEQ ID NO: 58374 - DNA, 120 bp, synthetic construct; identical to SEQ ID NO: 28420
  source 1..120: mol_type = other DNA

SEQ ID NO: 58375 - DNA, 120 bp, synthetic construct; identical to SEQ ID NO: 8555
  source 1..120: mol_type = other DNA

SEQ ID NO: 58376 - DNA, 120 bp, synthetic construct; identical to SEQ ID NO: 28422
  source 1..120: mol_type = other DNA

SEQ ID NO: 58377 - DNA, 120 bp, synthetic construct; identical to SEQ ID NO: 28423
  source 1..120: mol_type = other DNA

SEQ ID NO: 58378 - DNA, 120 bp, synthetic construct; identical to SEQ ID NO: 28424
  source 1..120: mol_type = other DNA

SEQ ID NO: 58379 - DNA, 120 bp, synthetic construct; identical to SEQ ID NO: 28425
  source 1..120: mol_type = other DNA

SEQ ID NO: 58380 - DNA, 120 bp, synthetic construct; identical to SEQ ID NO: 8556
  source 1..120: mol_type = other DNA

SEQ ID NO: 58381 - DNA, 120 bp, synthetic construct; identical to SEQ ID NO: 28427
  source 1..120: mol_type = other DNA

SEQ ID NO: 58382 - DNA, 120 bp, synthetic construct; identical to SEQ ID NO: 28428
  source 1..120: mol_type = other DNA

SEQ ID NO: 58383 - DNA, 120 bp, synthetic construct; identical to SEQ ID NO: 8557
  source 1..120: mol_type = other DNA

SEQ ID NO: 58384 - DNA, 120 bp, synthetic construct; identical to SEQ ID NO: 28430
  source 1..120: mol_type = other DNA

SEQ ID NO: 58385 - DNA, 120 bp, synthetic construct; identical to SEQ ID NO: 28431
  source 1..120: mol_type = other DNA

SEQ ID NO: 58386 - DNA, 120 bp, synthetic construct; identical to SEQ ID NO: 28432
  source 1..120: mol_type = other DNA

SEQ ID NO: 58387 - DNA, 120 bp, synthetic construct; identical to SEQ ID NO: 8558
  source 1..120: mol_type = other DNA

SEQ ID NO: 58388 - DNA, 120 bp, synthetic construct; identical to SEQ ID NO: 28434
  source 1..120: mol_type = other DNA

SEQ ID NO: 58389 - DNA, 120 bp, synthetic construct; identical to SEQ ID NO: 28435
  source 1..120: mol_type = other DNA

SEQ ID NO: 58390 - DNA, 120 bp, synthetic construct; identical to SEQ ID NO: 28436
  source 1..120: mol_type = other DNA

SEQ ID NO: 58391 - DNA, 120 bp, synthetic construct; identical to SEQ ID NO: 28437
  source 1..120: mol_type = other DNA

SEQ ID NO: 58392 - DNA, 120 bp, synthetic construct; identical to SEQ ID NO: 8559
  source 1..120: mol_type = other DNA

SEQ ID NO: 58393 - DNA, 120 bp, synthetic construct; identical to SEQ ID NO: 28439
  source 1..120: mol_type = other DNA

SEQ ID NO: 58394 - DNA, 120 bp, synthetic construct; identical to SEQ ID NO: 28440
  source 1..120: mol_type = other DNA

SEQ ID NO: 58395 - DNA, 120 bp, synthetic construct; identical to SEQ ID NO: 28441
  source 1..120: mol_type = other DNA

SEQ ID NO: 58396 - DNA, 120 bp, synthetic construct; identical to SEQ ID NO: 8560
  source 1..120: mol_type = other DNA

SEQ ID NO: 58397 - DNA, 120 bp, synthetic construct; identical to SEQ ID NO: 28443
  source 1..120: mol_type = other DNA

SEQ ID NO: 58398 - DNA, 120 bp, synthetic construct; identical to SEQ ID NO: 28444
  source 1..120: mol_type = other DNA

SEQ ID NO: 58399 - DNA, 120 bp, synthetic construct; identical to SEQ ID NO: 28445
  source 1..120: mol_type = other DNA

SEQ ID NO: 58400 - DNA, 120 bp, synthetic construct; identical to SEQ ID NO: 8561
  source 1..120: mol_type = other DNA

SEQ ID NO: 58401 - DNA, 120 bp, synthetic construct; identical to SEQ ID NO: 28447
  source 1..120: mol_type = other DNA

SEQ ID NO: 58402 - DNA, 120 bp, synthetic construct; identical to SEQ ID NO: 28448
  source 1..120: mol_type = other DNA

SEQ ID NO: 58403 - DNA, 120 bp, synthetic construct; identical to SEQ ID NO: 8562
  source 1..120: mol_type = other DNA

SEQ ID NO: 58404 - DNA, 120 bp, synthetic construct; identical to SEQ ID NO: 28450
  source 1..120: mol_type = other DNA

SEQ ID NO: 58405 - DNA, 120 bp, synthetic construct; identical to SEQ ID NO: 28451
  source 1..120: mol_type = other DNA

SEQ ID NO: 58406 - DNA, 120 bp, synthetic construct; identical to SEQ ID NO: 28452
  source 1..120: mol_type = other DNA

SEQ ID NO: 58407 - DNA, 120 bp, synthetic construct; identical to SEQ ID NO: 28453
  source 1..120: mol_type = other DNA

SEQ ID NO: 58408 - DNA, 120 bp, synthetic construct; identical to SEQ ID NO: 1504
  source 1..120: mol_type = other DNA

SEQ ID NO: 58409 - DNA, 120 bp, synthetic construct; identical to SEQ ID NO: 28455
  source 1..120: mol_type = other DNA

SEQ ID NO: 58410 - DNA, 120 bp, synthetic construct; identical to SEQ ID NO: 28456
  source 1..120: mol_type = other DNA

SEQ ID NO: 58411 - DNA, 120 bp, synthetic construct; identical to SEQ ID NO: 28457
  source 1..120: mol_type = other DNA

SEQ ID NO: 58412 - DNA, 120 bp, synthetic construct; identical to SEQ ID NO: 8564
  source 1..120: mol_type = other DNA

SEQ ID NO: 58413 - DNA, 120 bp, synthetic construct; identical to SEQ ID NO: 28459
  source 1..120: mol_type = other DNA

SEQ ID NO: 58414 - DNA, 120 bp, synthetic construct; identical to SEQ ID NO: 28460
  source 1..120: mol_type = other DNA

SEQ ID NO: 58415 - DNA, 120 bp, synthetic construct; identical to SEQ ID NO: 28461
  source 1..120: mol_type = other DNA

SEQ ID NO: 58416 - DNA, 120 bp, synthetic construct; identical to SEQ ID NO: 28462
  source 1..120: mol_type = other DNA

SEQ ID NO: 58417 - DNA, 120 bp, synthetic construct; identical to SEQ ID NO: 8565
  source 1..120: mol_type = other DNA

SEQ ID NO: 58418 - DNA, 120 bp, synthetic construct; identical to SEQ ID NO: 28464
  source 1..120: mol_type = other DNA

SEQ ID NO: 58419 - DNA, 120 bp, synthetic construct; identical to SEQ ID NO: 28465
  source 1..120: mol_type = other DNA

SEQ ID NO: 58420 - DNA, 120 bp, synthetic construct; identical to SEQ ID NO: 8566
  source 1..120: mol_type = other DNA

SEQ ID NO: 58421 - DNA, 120 bp, synthetic construct; identical to SEQ ID NO: 28467
  source 1..120: mol_type = other DNA

SEQ ID NO: 58422 - DNA, 120 bp, synthetic construct; identical to SEQ ID NO: 28468
  source 1..120: mol_type = other DNA

SEQ ID NO: 58423 - DNA, 120 bp, synthetic construct; identical to SEQ ID NO: 28469
  source 1..120: mol_type = other DNA

SEQ ID NO: 58424 - DNA, 120 bp, synthetic construct; identical to SEQ ID NO: 8567
  source 1..120: mol_type = other DNA

SEQ ID NO: 58425 - DNA, 120 bp, synthetic construct; identical to SEQ ID NO: 28471
  source 1..120: mol_type = other DNA

SEQ ID NO: 58426 - DNA, 120 bp, synthetic construct; identical to SEQ ID NO: 28472
  source 1..120: mol_type = other DNA

SEQ ID NO: 58427 - DNA, 120 bp, synthetic construct; identical to SEQ ID NO: 28473
  source 1..120: mol_type = other DNA

SEQ ID NO: 58428 - DNA, 120 bp, synthetic construct; identical to SEQ ID NO: 8568
  source 1..120: mol_type = other DNA

SEQ ID NO: 58429 - DNA, 120 bp, synthetic construct; identical to SEQ ID NO: 28475
  source 1..120: mol_type = other DNA

SEQ ID NO: 58430 - DNA, 120 bp, synthetic construct; identical to SEQ ID NO: 28476
  source 1..120: mol_type = other DNA

SEQ ID NO: 58431 - DNA, 120 bp, synthetic construct; identical to SEQ ID NO: 28477
  source 1..120: mol_type = other DNA

SEQ ID NO: 58432 - DNA, 120 bp, synthetic construct; identical to SEQ ID NO: 8569
  source 1..120: mol_type = other DNA

SEQ ID NO: 58433 - DNA, 120 bp, synthetic construct; identical to SEQ ID NO: 28479
  source 1..120: mol_type = other DNA

SEQ ID NO: 58434 - DNA, 120 bp, synthetic construct; identical to SEQ ID NO: 28480
  source 1..120: mol_type = other DNA

SEQ ID NO: 58435 - DNA, 120 bp, synthetic construct; identical to SEQ ID NO: 28481
  source 1..120: mol_type = other DNA

SEQ ID NO: 58436 - DNA, 120 bp, synthetic construct; identical to SEQ ID NO: 28482
  source 1..120: mol_type = other DNA

SEQ ID NO: 58437 - DNA, 120 bp, synthetic construct; identical to SEQ ID NO: 8570
  source 1..120: mol_type = other DNA

SEQ ID NO: 58438 - DNA, 120 bp, synthetic construct; identical to SEQ ID NO: 28484
  source 1..120: mol_type = other DNA

SEQ ID NO: 58439 - DNA, 120 bp, synthetic construct; identical to SEQ ID NO: 28485
  source 1..120: mol_type = other DNA

SEQ ID NO: 58440 - DNA, 120 bp, synthetic construct; identical to SEQ ID NO: 28486
  source 1..120: mol_type = other DNA

SEQ ID NO: 58441 - DNA, 120 bp, synthetic construct; identical to SEQ ID NO: 8571
  source 1..120: mol_type = other DNA

SEQ ID NO: 58442 - DNA, 120 bp, synthetic construct; identical to SEQ ID NO: 28488
  source 1..120: mol_type = other DNA

SEQ ID NO: 58443 - DNA, 120 bp, synthetic construct; identical to SEQ ID NO: 28489
  source 1..120: mol_type = other DNA

SEQ ID NO: 58444 - DNA, 120 bp, synthetic construct; identical to SEQ ID NO: 8572
  source 1..120: mol_type = other DNA

SEQ ID NO: 58445 - DNA, 120 bp, synthetic construct; identical to SEQ ID NO: 28491
  source 1..120: mol_type = other DNA

SEQ ID NO: 58446 - DNA, 120 bp, synthetic construct; identical to SEQ ID NO: 28492
  source 1..120: mol_type = other DNA

SEQ ID NO: 58447 - DNA, 120 bp, synthetic construct; identical to SEQ ID NO: 28493
  source 1..120: mol_type = other DNA

SEQ ID NO: 58448 - DNA, 120 bp, synthetic construct; identical to SEQ ID NO: 28494
  source 1..120: mol_type = other DNA

SEQ ID NO: 58449 - DNA, 120 bp, synthetic construct; identical to SEQ ID NO: 8573
  source 1..120: mol_type = other DNA

SEQ ID NO: 58450 - DNA, 120 bp, synthetic construct; identical to SEQ ID NO: 28496
  source 1..120: mol_type = other DNA

SEQ ID NO: 58451 - DNA, 120 bp, synthetic construct; identical to SEQ ID NO: 28497
  source 1..120: mol_type = other DNA

SEQ ID NO: 58452 - DNA, 120 bp, synthetic construct; identical to SEQ ID NO: 28498
  source 1..120: mol_type = other DNA

SEQ ID NO: 58453 - DNA, 120 bp, synthetic construct; identical to SEQ ID NO: 8574
  source 1..120: mol_type = other DNA

SEQ ID NO: 58454 - DNA, 120 bp, synthetic construct; identical to SEQ ID NO: 28500
  source 1..120: mol_type = other DNA

SEQ ID NO: 58455 - DNA, 120 bp, synthetic construct; identical to SEQ ID NO: 28501
  source 1..120: mol_type = other DNA

SEQ ID NO: 58456 - DNA, 120 bp, synthetic construct; identical to SEQ ID NO: 28502
  source 1..120: mol_type = other DNA

SEQ ID NO: 58457 - DNA, 120 bp, synthetic construct; identical to SEQ ID NO: 28503
  source 1..120: mol_type = other DNA

SEQ ID NO: 58458 - DNA, 120 bp, synthetic construct; identical to SEQ ID NO: 8575
  source 1..120: mol_type = other DNA

SEQ ID NO: 58459 - DNA, 120 bp, synthetic construct; identical to SEQ ID NO: 28505
  source 1..120: mol_type = other DNA

SEQ ID NO: 58460 - DNA, 120 bp, synthetic construct; identical to SEQ ID NO: 28506
  source 1..120: mol_type = other DNA

SEQ ID NO: 58461 - DNA, 120 bp, synthetic construct; identical to SEQ ID NO: 28507
  source 1..120: mol_type = other DNA

SEQ ID NO: 58462 - DNA, 120 bp, synthetic construct; identical to SEQ ID NO: 8576
  source 1..120: mol_type = other DNA

SEQ ID NO: 58463 - DNA, 120 bp, synthetic construct; identical to SEQ ID NO: 28509
  source 1..120: mol_type = other DNA

SEQ ID NO: 58464 - DNA, 120 bp, synthetic construct; identical to SEQ ID NO: 28510
  source 1..120: mol_type = other DNA

SEQ ID NO: 58465 - DNA, 120 bp, synthetic construct; identical to SEQ ID NO: 28511
  source 1..120: mol_type = other DNA

SEQ ID NO: 58466 - DNA, 120 bp, synthetic construct; identical to SEQ ID NO: 8577
  source 1..120: mol_type = other DNA

SEQ ID NO: 58467 - DNA, 120 bp, synthetic construct; identical to SEQ ID NO: 28513
  source 1..120: mol_type = other DNA

SEQ ID NO: 58468 - DNA, 120 bp, synthetic construct; identical to SEQ ID NO: 28514
  source 1..120: mol_type = other DNA

SEQ ID NO: 58469 - DNA, 120 bp, synthetic construct; identical to SEQ ID NO: 8578
  source 1..120: mol_type = other DNA

SEQ ID NO: 58470 - DNA, 120 bp, synthetic construct; identical to SEQ ID NO: 28516
  source 1..120: mol_type = other DNA

SEQ ID NO: 58471 - DNA, 120 bp, synthetic construct; identical to SEQ ID NO: 28517
  source 1..120: mol_type = other DNA

SEQ ID NO: 58472 - DNA, 120 bp, synthetic construct; identical to SEQ ID NO: 28518
  source 1..120: mol_type = other DNA

SEQ ID NO: 58473 - DNA, 120 bp, synthetic construct; identical to SEQ ID NO: 28519
  source 1..120: mol_type = other DNA

SEQ ID NO: 58474 - DNA, 120 bp, synthetic construct; identical to SEQ ID NO: 8579
  source 1..120: mol_type = other DNA

SEQ ID NO: 58475 - DNA, 120 bp, synthetic construct; identical to SEQ ID NO: 28521
  source 1..120: mol_type = other DNA

SEQ ID NO: 58476 - DNA, 120 bp, synthetic construct; identical to SEQ ID NO: 28522
  source 1..120: mol_type = other DNA

SEQ ID NO: 58477 - DNA, 120 bp, synthetic construct; identical to SEQ ID NO: 28523
  source 1..120: mol_type = other DNA

SEQ ID NO: 58478 - DNA, 120 bp, synthetic construct; identical to SEQ ID NO: 8580
  source 1..120: mol_type = other DNA

SEQ ID NO: 58479 - DNA, 120 bp, synthetic construct; identical to SEQ ID NO: 8581
  source 1..120: mol_type = other DNA

SEQ ID NO: 58480 - DNA, 120 bp, synthetic construct; identical to SEQ ID NO: 28526
  source 1..120: mol_type = other DNA

SEQ ID NO: 58481 - DNA, 120 bp, synthetic construct; identical to SEQ ID NO: 28527
  source 1..120: mol_type = other DNA

SEQ ID NO: 58482 - DNA, 120 bp, synthetic construct; identical to SEQ ID NO: 8582
  source 1..120: mol_type = other DNA

SEQ ID NO: 58483 - DNA, 120 bp, synthetic construct; identical to SEQ ID NO: 28529
  source 1..120: mol_type = other DNA

SEQ ID NO: 58484 - DNA, 120 bp, synthetic construct; identical to SEQ ID NO: 28530
  source 1..120: mol_type = other DNA

SEQ ID NO: 58485 - DNA, 120 bp, synthetic construct; identical to SEQ ID NO: 28531
  source 1..120: mol_type = other DNA

SEQ ID NO: 58486 - DNA, 120 bp, synthetic construct; identical to SEQ ID NO: 8583
  source 1..120: mol_type = other DNA

SEQ ID NO: 58487 - DNA, 120 bp, synthetic construct; identical to SEQ ID NO: 28533
  source 1..120: mol_type = other DNA

SEQ ID NO: 58488 - DNA, 120 bp, synthetic construct; identical to SEQ ID NO: 28534
  source 1..120: mol_type = other DNA

SEQ ID NO: 58489 - DNA, 120 bp, synthetic construct; identical to SEQ ID NO: 28535
  source 1..120: mol_type = other DNA

SEQ ID NO: 58490 - DNA, 120 bp, synthetic construct; identical to SEQ ID NO: 8584
  source 1..120: mol_type = other DNA

SEQ ID NO: 58491 - DNA, 120 bp, synthetic construct; identical to SEQ ID NO: 28537
  source 1..120: mol_type = other DNA

SEQ ID NO: 58492 - DNA, 120 bp, synthetic construct; identical to SEQ ID NO: 28538
  source 1..120: mol_type = other DNA

SEQ ID NO: 58493 - DNA, 120 bp, synthetic construct; identical to SEQ ID NO: 8585
  source 1..120: mol_type = other DNA

SEQ ID NO: 58494 - DNA, 120 bp, synthetic construct; identical to SEQ ID NO: 28540
  source 1..120: mol_type = other DNA

SEQ ID NO: 58495 - DNA, 120 bp, synthetic construct; identical to SEQ ID NO: 28541
  source 1..120: mol_type = other DNA

SEQ ID NO: 58496 - DNA, 120 bp, synthetic construct; identical to SEQ ID NO: 28542
  source 1..120: mol_type = other DNA

SEQ ID NO: 58497 - DNA, 120 bp, synthetic construct; identical to SEQ ID NO: 28543
  source 1..120: mol_type = other DNA

SEQ ID NO: 58498 - DNA, 120 bp, synthetic construct; identical to SEQ ID NO: 8586
  source 1..120: mol_type = other DNA

SEQ ID NO: 58499 - DNA, 120 bp, synthetic construct; identical to SEQ ID NO: 28545
  source 1..120: mol_type = other DNA

SEQ ID NO: 58500 - DNA, 120 bp, synthetic construct; identical to SEQ ID NO: 1526
  source 1..120: mol_type = other DNA

SEQ ID NO: 58501 - DNA, 120 bp, synthetic construct; identical to SEQ ID NO: 28547
  source 1..120: mol_type = other DNA

SEQ ID NO: 58502 - DNA, 120 bp, synthetic construct; identical to SEQ ID NO: 8587
  source 1..120: mol_type = other DNA

SEQ ID NO: 58503 - DNA, 120 bp, synthetic construct; identical to SEQ ID NO: 28549
  source 1..120: mol_type = other DNA

SEQ ID NO: 58504 - DNA, 120 bp, synthetic construct; identical to SEQ ID NO: 28550
  source 1..120: mol_type = other DNA

SEQ ID NO: 58505 - DNA, 120 bp, synthetic construct; identical to SEQ ID NO: 28551
  source 1..120: mol_type = other DNA

SEQ ID NO: 58506 - DNA, 120 bp, synthetic construct; identical to SEQ ID NO: 8588
  source 1..120: mol_type = other DNA

SEQ ID NO: 58507 - DNA, 120 bp, synthetic construct; identical to SEQ ID NO: 28553
  source 1..120: mol_type = other DNA

SEQ ID NO: 58508 - DNA, 120 bp, synthetic construct; identical to SEQ ID NO: 28554
  source 1..120: mol_type = other DNA

SEQ ID NO: 58509 - DNA, 120 bp, synthetic construct; identical to SEQ ID NO: 28555
  source 1..120: mol_type = other DNA

SEQ ID NO: 58510 - DNA, 120 bp, synthetic construct; identical to SEQ ID NO: 8589
  source 1..120: mol_type = other DNA

SEQ ID NO: 58511 - DNA, 120 bp, synthetic construct; identical to SEQ ID NO: 28557
  source 1..120: mol_type = other DNA

SEQ ID NO: 58512 - DNA, 120 bp, synthetic construct; identical to SEQ ID NO: 28558
  source 1..120: mol_type = other DNA

SEQ ID NO: 58513 - DNA, 120 bp, synthetic construct; identical to SEQ ID NO: 8590
  source 1..120: mol_type = other DNA

SEQ ID NO: 58514 - DNA, 120 bp, synthetic construct; identical to SEQ ID NO: 28560
  source 1..120: mol_type = other DNA

SEQ ID NO: 58515 - DNA, 120 bp, synthetic construct; identical to SEQ ID NO: 28561
  source 1..120: mol_type = other DNA

SEQ ID NO: 58516 - DNA, 120 bp, synthetic construct; identical to SEQ ID NO: 28562
  source 1..120: mol_type = other DNA

SEQ ID NO: 58517 - DNA, 120 bp, synthetic construct; identical to SEQ ID NO: 8591
  source 1..120: mol_type = other DNA

SEQ ID NO: 58518 - DNA, 120 bp, synthetic construct; identical to SEQ ID NO: 28564
  source 1..120: mol_type = other DNA

SEQ ID NO: 58519 - DNA, 120 bp, synthetic construct; identical to SEQ ID NO: 28565
  source 1..120: mol_type = other DNA

SEQ ID NO: 58520 - DNA, 120 bp, synthetic construct; identical to SEQ ID NO: 28566
  source 1..120: mol_type = other DNA

SEQ ID NO: 58521 - DNA, 120 bp, synthetic construct; identical to SEQ ID NO: 8592
  source 1..120: mol_type = other DNA

SEQ ID NO: 58522 - DNA, 120 bp, synthetic construct; identical to SEQ ID NO: 28568
  source 1..120: mol_type = other DNA

SEQ ID NO: 58523 - DNA, 120 bp, synthetic construct; identical to SEQ ID NO: 28569
  source 1..120: mol_type = other DNA

SEQ ID NO: 58524 - DNA, 120 bp, synthetic construct; identical to SEQ ID NO: 8593
  source 1..120: mol_type = other DNA

SEQ ID NO: 58525 - DNA, 120 bp, synthetic construct; identical to SEQ ID NO: 28571
  source 1..120: mol_type = other DNA

SEQ ID NO: 58526 - DNA, 120 bp, synthetic construct; identical to SEQ ID NO: 28572
  source 1..120: mol_type = other DNA

SEQ ID NO: 58527 - DNA, 120 bp, synthetic construct; identical to SEQ ID NO: 8594
  source 1..120: mol_type = other DNA

SEQ ID NO: 58528 - DNA, 120 bp, synthetic construct; identical to SEQ ID NO: 28574
  source 1..120: mol_type = other DNA

SEQ ID NO: 58529 - DNA, 120 bp, synthetic construct; identical to SEQ ID NO: 28575
  source 1..120: mol_type = other DNA

SEQ ID NO: 58530 - DNA, 120 bp, synthetic construct; identical to SEQ ID NO: 8595
  source 1..120: mol_type = other DNA

SEQ ID NO: 58531 - DNA, 120 bp, synthetic construct; identical to SEQ ID NO: 28577
  source 1..120: mol_type = other DNA

SEQ ID NO: 58532 - DNA, 120 bp, synthetic construct; identical to SEQ ID NO: 28578
  source 1..120: mol_type = other DNA

SEQ ID NO: 58533 - DNA, 120 bp, synthetic construct; identical to SEQ ID NO: 28579
  source 1..120: mol_type = other DNA

SEQ ID NO: 58534 - DNA, 120 bp, synthetic construct; identical to SEQ ID NO: 8596
  source 1..120: mol_type = other DNA

SEQ ID NO: 58535 - DNA, 120 bp, synthetic construct; identical to SEQ ID NO: 28581
  source 1..120: mol_type = other DNA

SEQ ID NO: 58536 - DNA, 120 bp, synthetic construct; identical to SEQ ID NO: 28582
  source 1..120: mol_type = other DNA

SEQ ID NO: 58537 - DNA, 120 bp, synthetic construct; identical to SEQ ID NO: 28583
  source 1..120: mol_type = other DNA

SEQ ID NO: 58538 - DNA, 120 bp, synthetic construct; identical to SEQ ID NO: 28584
  source 1..120: mol_type = other DNA

SEQ ID NO: 58539 - DNA, 120 bp, synthetic construct; identical to SEQ ID NO: 8597
  source 1..120: mol_type = other DNA

SEQ ID NO: 58540 - DNA, 120 bp, synthetic construct; identical to SEQ ID NO: 28586
  source 1..120: mol_type = other DNA

SEQ ID NO: 58541 - DNA, 120 bp, synthetic construct; identical to SEQ ID NO: 28587
  source 1..120: mol_type = other DNA

SEQ ID NO: 58542 - DNA, 120 bp, synthetic construct; identical to SEQ ID NO: 28588
  source 1..120: mol_type = other DNA

SEQ ID NO: 58543 - DNA, 120 bp, synthetic construct; identical to SEQ ID NO: 8598
  source 1..120: mol_type = other DNA

SEQ ID NO: 58544 - DNA, 120 bp, synthetic construct; identical to SEQ ID NO: 28590
  source 1..120: mol_type = other DNA

SEQ ID NO: 58545 - DNA, 120 bp, synthetic construct; identical to SEQ ID NO: 28591
  source 1..120: mol_type = other DNA

SEQ ID NO: 58546 - DNA, 120 bp, synthetic construct; identical to SEQ ID NO: 8599
  source 1..120: mol_type = other DNA

SEQ ID NO: 58547 - DNA, 120 bp, synthetic construct; identical to SEQ ID NO: 28593
  source 1..120: mol_type = other DNA

SEQ ID NO: 58548 - DNA, 120 bp, synthetic construct; identical to SEQ ID NO: 28594
  source 1..120: mol_type = other DNA

SEQ ID NO: 58549 - DNA, 120 bp, synthetic construct; identical to SEQ ID NO: 28595
  source 1..120: mol_type = other DNA

SEQ ID NO: 58550 - DNA, 120 bp, synthetic construct; identical to SEQ ID NO: 8600
  source 1..120: mol_type = other DNA

SEQ ID NO: 58551 - DNA, 120 bp, synthetic construct; identical to SEQ ID NO: 28597
  source 1..120: mol_type = other DNA

SEQ ID NO: 58552 - DNA, 120 bp, synthetic construct; identical to SEQ ID NO: 28598
  source 1..120: mol_type = other DNA

SEQ ID NO: 58553 - DNA, 120 bp, synthetic construct; identical to SEQ ID NO: 28599
  source 1..120: mol_type = other DNA

SEQ ID NO: 58554 - DNA, 120 bp, synthetic construct; identical to SEQ ID NO: 28600
  source 1..120: mol_type = other DNA

SEQ ID NO: 58555 - DNA, 120 bp, synthetic construct; identical to SEQ ID NO: 8601
  source 1..120: mol_type = other DNA

SEQ ID NO: 58556 - DNA, 120 bp, synthetic construct; identical to SEQ ID NO: 28602
  source 1..120: mol_type = other DNA

SEQ ID NO: 58557 - DNA, 120 bp, synthetic construct; identical to SEQ ID NO: 28603
  source 1..120: mol_type = other DNA

SEQ ID NO: 58558 - DNA, 120 bp, synthetic construct; identical to SEQ ID NO: 28604
  source 1..120: mol_type = other DNA

SEQ ID NO: 58559 - DNA, 120 bp, synthetic construct; identical to SEQ ID NO: 8602
  source 1..120: mol_type = other DNA

SEQ ID NO: 58560 - DNA, 120 bp, synthetic construct; identical to SEQ ID NO: 28606
  source 1..120: mol_type = other DNA

SEQ ID NO: 58561 - DNA, 120 bp, synthetic construct; identical to SEQ ID NO: 28607
  source 1..120: mol_type = other DNA

SEQ ID NO: 58562 - DNA, 120 bp, synthetic construct; identical to SEQ ID NO: 28608
  source 1..120: mol_type = other DNA

SEQ ID NO: 58563 - DNA, 120 bp, synthetic construct; identical to SEQ ID NO: 8603
  source 1..120: mol_type = other DNA

SEQ ID NO: 58564 - DNA, 120 bp, synthetic construct; identical to SEQ ID NO: 28610
  source 1..120: mol_type = other DNA

SEQ ID NO: 58565 - DNA, 120 bp, synthetic construct; identical to SEQ ID NO: 28611
  source 1..120: mol_type = other DNA

SEQ ID NO: 58566 - DNA, 120 bp, synthetic construct; identical to SEQ ID NO: 28612
  source 1..120: mol_type = other DNA

SEQ ID NO: 58567 - DNA, 120 bp, synthetic construct; identical to SEQ ID NO: 8604
  source 1..120: mol_type = other DNA

SEQ ID NO: 58568 - DNA, 120 bp, synthetic construct; identical to SEQ ID NO: 28614
  source 1..120: mol_type = other DNA

SEQ ID NO: 58569 - DNA, 120 bp, synthetic construct; identical to SEQ ID NO: 28615
  source 1..120: mol_type = other DNA

SEQ ID NO: 58570 - DNA, 120 bp, synthetic construct; identical to SEQ ID NO: 28616
  source 1..120: mol_type = other DNA

SEQ ID NO: 58571 - DNA, 120 bp, synthetic construct; identical to SEQ ID NO: 28617
  source 1..120: mol_type = other DNA

SEQ ID NO: 58572 - DNA, 120 bp, synthetic construct; identical to SEQ ID NO: 8605
  source 1..120: mol_type = other DNA

SEQ ID NO: 58573 - DNA, 120 bp, synthetic construct; identical to SEQ ID NO: 28619
  source 1..120: mol_type = other DNA

SEQ ID NO: 58574 - DNA, 120 bp, synthetic construct; identical to SEQ ID NO: 28620
  source 1..120: mol_type = other DNA

SEQ ID NO: 58575 - DNA, 120 bp, synthetic construct; identical to SEQ ID NO: 8606
  source 1..120: mol_type = other DNA

SEQ ID NO: 58576 - DNA, 120 bp, synthetic construct; identical to SEQ ID NO: 28622
  source 1..120: mol_type = other DNA

SEQ ID NO: 58577 - DNA, 120 bp, synthetic construct; identical to SEQ ID NO: 28623
  source 1..120: mol_type = other DNA

SEQ ID NO: 58578 - DNA, 120 bp, synthetic construct; identical to SEQ ID NO: 28624
  source 1..120: mol_type = other DNA

SEQ ID NO: 58579 - DNA, 120 bp, synthetic construct; identical to SEQ ID NO: 8607
  source 1..120: mol_type = other DNA

SEQ ID NO: 58580 - DNA, 120 bp, synthetic construct; identical to SEQ ID NO: 28626
  source 1..120: mol_type = other DNA

SEQ ID NO: 58581 - DNA, 120 bp, synthetic construct; identical to SEQ ID NO: 28627
  source 1..120: mol_type = other DNA

SEQ ID NO: 58582 - DNA, 120 bp, synthetic construct; identical to SEQ ID NO: 28628
  source 1..120: mol_type = other DNA

SEQ ID NO: 58583 - DNA, 120 bp, synthetic construct; identical to SEQ ID NO: 8608
  source 1..120: mol_type = other DNA

SEQ ID NO: 58584 - DNA, 120 bp, synthetic construct; identical to SEQ ID NO: 28630
  source 1..120: mol_type = other DNA

SEQ ID NO: 58585 - DNA, 120 bp, synthetic construct; identical to SEQ ID NO: 28631
  source 1..120: mol_type = other DNA

SEQ ID NO: 58586 - DNA, 120 bp, synthetic construct; identical to SEQ ID NO: 28632
  source 1..120: mol_type = other DNA

SEQ ID NO: 58587 - DNA, 120 bp, synthetic construct; identical to SEQ ID NO: 8609
  source 1..120: mol_type = other DNA

SEQ ID NO: 58588 - DNA, 120 bp, synthetic construct; identical to SEQ ID NO: 28634
  source 1..120: mol_type = other DNA

SEQ ID NO: 58589 - DNA, 120 bp, synthetic construct; identical to SEQ ID NO: 28635
  source 1..120: mol_type = other DNA

SEQ ID NO: 58590 - DNA, 120 bp, synthetic construct; identical to SEQ ID NO: 28636
  source 1..120: mol_type = other DNA

SEQ ID NO: 58591 - DNA, 120 bp, synthetic construct; identical to SEQ ID NO: 28637
  source 1..120: mol_type = other DNA

SEQ ID NO: 58592 - DNA, 120 bp, synthetic construct; identical to SEQ ID NO: 8610
  source 1..120: mol_type = other DNA

SEQ ID NO: 58593 - DNA, 120 bp, synthetic construct; identical to SEQ ID NO: 28639
  source 1..120: mol_type = other DNA

SEQ ID NO: 58594 - DNA, 120 bp, synthetic construct; identical to SEQ ID NO: 28640
  source 1..120: mol_type = other DNA

SEQ ID NO: 58595 - DNA, 120 bp, synthetic construct; identical to SEQ ID NO: 8611
  source 1..120: mol_type = other DNA

SEQ ID NO: 58596 - DNA, 120 bp, synthetic construct; identical to SEQ ID NO: 28642
  source 1..120: mol_type = other DNA

SEQ ID NO: 58597 - DNA, 120 bp, synthetic construct; identical to SEQ ID NO: 28643
  source 1..120: mol_type = other DNA

SEQ ID NO: 58598 - DNA, 120 bp, synthetic construct; identical to SEQ ID NO: 28644
  source 1..120: mol_type = other DNA

SEQ ID NO: 58599 - DNA, 120 bp, synthetic construct; identical to SEQ ID NO: 8612
  source 1..120: mol_type = other DNA

SEQ ID NO: 58600 - DNA, 120 bp, synthetic construct; identical to SEQ ID NO: 28646
  source 1..120: mol_type = other DNA

SEQ ID NO: 58601 - DNA, 120 bp, synthetic construct; identical to SEQ ID NO: 28647
  source 1..120: mol_type = other DNA

SEQ ID NO: 58602 - DNA, 120 bp, synthetic construct; identical to SEQ ID NO: 28648
  source 1..120: mol_type = other DNA

SEQ ID NO: 58603 - DNA, 120 bp, synthetic construct; identical to SEQ ID NO: 1550
  source 1..120: mol_type = other DNA

SEQ ID NO: 58604 - DNA, 120 bp, synthetic construct; identical to SEQ ID NO: 28650
  source 1..120: mol_type = other DNA

SEQ ID NO: 58605 - DNA, 120 bp, synthetic construct; identical to SEQ ID NO: 28651
  source 1..120: mol_type = other DNA

SEQ ID NO: 58606 - DNA, 120 bp, synthetic construct; identical to SEQ ID NO: 28652
  source 1..120: mol_type = other DNA

SEQ ID NO: 58607 - DNA, 120 bp, synthetic construct; identical to SEQ ID NO: 28653
  source 1..120: mol_type = other DNA

SEQ ID NO: 58608 - DNA, 120 bp, synthetic construct; identical to SEQ ID NO: 8614
  source 1..120: mol_type = other DNA

SEQ ID NO: 58609 - DNA, 120 bp, synthetic construct; identical to SEQ ID NO: 28655
  source 1..120: mol_type = other DNA

SEQ ID NO: 58610 - DNA, 120 bp, synthetic construct; identical to SEQ ID NO: 28656
  source 1..120: mol_type = other DNA

SEQ ID NO: 58611 - DNA, 120 bp, synthetic construct; identical to SEQ ID NO: 8615
  source 1..120: mol_type = other DNA

SEQ ID NO: 58612 - DNA, 120 bp, synthetic construct; identical to SEQ ID NO: 28658
  source 1..120: mol_type = other DNA

SEQ ID NO: 58613 - DNA, 120 bp, synthetic construct; identical to SEQ ID NO: 28659
  source 1..120: mol_type = other DNA

SEQ ID NO: 58614 - DNA, 120 bp, synthetic construct; identical to SEQ ID NO: 28660
  source 1..120: mol_type = other DNA

SEQ ID NO: 58615 - DNA, 120 bp, synthetic construct; identical to SEQ ID NO: 28661
  source 1..120: mol_type = other DNA

SEQ ID NO: 58616 - DNA, 120 bp, synthetic construct; identical to SEQ ID NO: 8616
  source 1..120: mol_type = other DNA

SEQ ID NO: 58617 - DNA, 120 bp, synthetic construct; identical to SEQ ID NO: 28663
  source 1..120: mol_type = other DNA

SEQ ID NO: 58618 - DNA, 120 bp, synthetic construct; identical to SEQ ID NO: 28664
  source 1..120: mol_type = other DNA

SEQ ID NO: 58619 - DNA, 120 bp, synthetic construct; identical to SEQ ID NO: 28665
  source 1..120: mol_type = other DNA

SEQ ID NO: 58620 - DNA, 120 bp, synthetic construct; identical to SEQ ID NO: 8617
  source 1..120: mol_type = other DNA

SEQ ID NO: 58621 - DNA, 120 bp, synthetic construct; identical to SEQ ID NO: 28667
  source 1..120: mol_type = other DNA

SEQ ID NO: 58622 - DNA, 120 bp, synthetic construct; identical to SEQ ID NO: 28668
  source 1..120: mol_type = other DNA

SEQ ID NO: 58623 - DNA, 120 bp, synthetic construct; identical to SEQ ID NO: 28669
  source 1..120: mol_type = other DNA

SEQ ID NO: 58624 - DNA, 120 bp, synthetic construct; identical to SEQ ID NO: 1555
  source 1..120: mol_type = other DNA

SEQ ID NO: 58625 - DNA, 120 bp, synthetic construct; identical to SEQ ID NO: 28671
  source 1..120: mol_type = other DNA

SEQ ID NO: 58626 - DNA, 120 bp, synthetic construct; identical to SEQ ID NO: 28672
  source 1..120: mol_type = other DNA

SEQ ID NO: 58627 - DNA, 120 bp, synthetic construct; identical to SEQ ID NO: 28673
  source 1..120: mol_type = other DNA

SEQ ID NO: 58628 - DNA, 120 bp, synthetic construct; identical to SEQ ID NO: 8619
  source 1..120: mol_type = other DNA

SEQ ID NO: 58629 - DNA, 120 bp, synthetic construct; identical to SEQ ID NO: 28675
  source 1..120: mol_type = other DNA

SEQ ID NO: 58630 - DNA, 120 bp, synthetic construct; identical to SEQ ID NO: 28676
  source 1..120: mol_type = other DNA

SEQ ID NO: 58631 - DNA, 120 bp, synthetic construct; identical to SEQ ID NO: 28677
  source 1..120: mol_type = other DNA

SEQ ID NO: 58632 - DNA, 120 bp, synthetic construct; identical to SEQ ID NO: 8620
  source 1..120: mol_type = other DNA

SEQ ID NO: 58633 - DNA, 120 bp, synthetic construct; identical to SEQ ID NO: 28679
  source 1..120: mol_type = other DNA

SEQ ID NO: 58634 - DNA, 120 bp, synthetic construct; identical to SEQ ID NO: 28680
  source 1..120: mol_type = other DNA

SEQ ID NO: 58635 - DNA, 120 bp, synthetic construct; identical to SEQ ID NO: 28681
  source 1..120: mol_type = other DNA

SEQ ID NO: 58636 - DNA, 120 bp, synthetic construct; identical to SEQ ID NO: 8621
  source 1..120: mol_type = other DNA

SEQ ID NO: 58637 - DNA, 120 bp, synthetic construct; identical to SEQ ID NO: 28683
  source 1..120: mol_type = other DNA

SEQ ID NO: 58638 - DNA, 120 bp, synthetic construct; identical to SEQ ID NO: 28684
  source 1..120: mol_type = other DNA

SEQ ID NO: 58639 - DNA, 120 bp, synthetic construct; identical to SEQ ID NO: 28685
  source 1..120: mol_type = other DNA

SEQ ID NO: 58640 - DNA, 120 bp, synthetic construct; identical to SEQ ID NO: 8622
  source 1..120: mol_type = other DNA

SEQ ID NO: 58641 - DNA, 120 bp, synthetic construct; identical to SEQ ID NO: 28687
  source 1..120: mol_type = other DNA

SEQ ID NO: 58642 - DNA, 120 bp, synthetic construct; identical to SEQ ID NO: 28688
  source 1..120: mol_type = other DNA

SEQ ID NO: 58643 - DNA, 120 bp, synthetic construct; identical to SEQ ID NO: 28689
  source 1..120: mol_type = other DNA

SEQ ID NO: 58644 - DNA, 120 bp, synthetic construct; identical to SEQ ID NO: 8623
  source 1..120: mol_type = other DNA

SEQ ID NO: 58645 - DNA, 120 bp, synthetic construct; identical to SEQ ID NO: 28691
  source 1..120: mol_type = other DNA

SEQ ID NO: 58646 - DNA, 120 bp, synthetic construct; identical to SEQ ID NO: 28692
  source 1..120: mol_type = other DNA

SEQ ID NO: 58647 - DNA, 120 bp, synthetic construct; identical to SEQ ID NO: 28693
  source 1..120: mol_type = other DNA

SEQ ID NO: 58648 - DNA, 120 bp, synthetic construct; identical to SEQ ID NO: 8624
  source 1..120: mol_type = other DNA

SEQ ID NO: 58649 - DNA, 120 bp, synthetic construct; identical to SEQ ID NO: 28695
  source 1..120: mol_type = other DNA

SEQ ID NO: 58650 - DNA, 120 bp, synthetic construct; identical to SEQ ID NO: 28696
  source 1..120: mol_type = other DNA

SEQ ID NO: 58651 - DNA, 120 bp, synthetic construct; identical to SEQ ID NO: 28697
  source 1..120: mol_type = other DNA

SEQ ID NO: 58652 - DNA, 120 bp, synthetic construct; identical to SEQ ID NO: 28698
  source 1..120: mol_type = other DNA

SEQ ID NO: 58653 - DNA, 120 bp, synthetic construct; identical to SEQ ID NO: 8625
  source 1..120: mol_type = other DNA

SEQ ID NO: 58654 - DNA, 120 bp, synthetic construct; identical to SEQ ID NO: 28700
  source 1..120: mol_type = other DNA

SEQ ID NO: 58655 - DNA, 120 bp, synthetic construct; identical to SEQ ID NO: 28701
  source 1..120: mol_type = other DNA

SEQ ID NO: 58656 - DNA, 120 bp, synthetic construct; identical to SEQ ID NO: 28702
  source 1..120: mol_type = other DNA

SEQ ID NO: 58657 - DNA, 120 bp, synthetic construct; identical to SEQ ID NO: 8626
  source 1..120: mol_type = other DNA

SEQ ID NO: 58658 - DNA, 120 bp, synthetic construct; identical to SEQ ID NO: 28704
  source 1..120: mol_type = other DNA

SEQ ID NO: 58659 - DNA, 120 bp, synthetic construct; identical to SEQ ID NO: 28705
  source 1..120: mol_type = other DNA

SEQ ID NO: 58660 - DNA, 120 bp, synthetic construct; identical to SEQ ID NO: 28706
  source 1..120: mol_type = other DNA

SEQ ID NO: 58661 - DNA, 120 bp, synthetic construct; identical to SEQ ID NO: 8627
  source 1..120: mol_type = other DNA

SEQ ID NO: 58662 - DNA, 120 bp, synthetic construct; identical to SEQ ID NO: 28708
  source 1..120: mol_type = other DNA

SEQ ID NO: 58663 - DNA, 120 bp, synthetic construct; identical to SEQ ID NO: 28709
  source 1..120: mol_type = other DNA

SEQ ID NO: 58664 - DNA, 120 bp, synthetic construct; identical to SEQ ID NO: 1565
  source 1..120: mol_type = other DNA

SEQ ID NO: 58665 - DNA, 120 bp, synthetic construct; identical to SEQ ID NO: 8628
  source 1..120: mol_type = other DNA

SEQ ID NO: 58666 - DNA, 120 bp, synthetic construct; identical to SEQ ID NO: 28712
  source 1..120: mol_type = other DNA

SEQ ID NO: 58667 - DNA, 120 bp, synthetic construct; identical to SEQ ID NO: 28713
  source 1..120: mol_type = other DNA

SEQ ID NO: 58668 - DNA, 120 bp, synthetic construct; identical to SEQ ID NO: 28714
  source 1..120: mol_type = other DNA

SEQ ID NO: 58669 - DNA, 120 bp, synthetic construct; identical to SEQ ID NO: 8629
  source 1..120: mol_type = other DNA

SEQ ID NO: 58670 - DNA, 120 bp, synthetic construct; identical to SEQ ID NO: 28716
  source 1..120: mol_type = other DNA

SEQ ID NO: 58671 - DNA, 120 bp, synthetic construct; identical to SEQ ID NO: 28717
  source 1..120: mol_type = other DNA

SEQ ID NO: 58672 - DNA, 120 bp, synthetic construct; identical to SEQ ID NO: 28718
  source 1..120: mol_type = other DNA

SEQ ID NO: 58673 - DNA, 120 bp, synthetic construct; identical to SEQ ID NO: 8630
  source 1..120: mol_type = other DNA

SEQ ID NO: 58674 - DNA, 120 bp, synthetic construct; identical to SEQ ID NO: 28720
  source 1..120: mol_type = other DNA

SEQ ID NO: 58675 - DNA, 120 bp, synthetic construct; identical to SEQ ID NO: 28721
  source 1..120: mol_type = other DNA

SEQ ID NO: 58676 - DNA, 120 bp, synthetic construct; identical to SEQ ID NO: 28722
  source 1..120: mol_type = other DNA

SEQ ID NO: 58677 - DNA, 120 bp, synthetic construct; identical to SEQ ID NO: 8631
  source 1..120: mol_type = other DNA

SEQ ID NO: 58678 - DNA, 120 bp, synthetic construct; identical to SEQ ID NO: 28724
  source 1..120: mol_type = other DNA

SEQ ID NO: 58679 - DNA, 120 bp, synthetic construct; identical to SEQ ID NO: 28725
  source 1..120: mol_type = other DNA

SEQ ID NO: 58680 - DNA, 120 bp, synthetic construct; identical to SEQ ID NO: 28726
  source 1..120: mol_type = other DNA

SEQ ID NO: 58681 - DNA, 120 bp, synthetic construct; identical to SEQ ID NO: 28727
  source 1..120: mol_type = other DNA

SEQ ID NO: 58682 - DNA, 120 bp, synthetic construct; identical to SEQ ID NO: 8632
  source 1..120: mol_type = other DNA

SEQ ID NO: 58683 - DNA, 120 bp, synthetic construct; identical to SEQ ID NO: 28729
  source 1..120: mol_type = other DNA

SEQ ID NO: 58684 - DNA, 120 bp, synthetic construct; identical to SEQ ID NO: 28730
  source 1..120: mol_type = other DNA

SEQ ID NO: 58685 - DNA, 120 bp, synthetic construct; identical to SEQ ID NO: 28731
  source 1..120: mol_type = other DNA

SEQ ID NO: 58686 - DNA, 120 bp, synthetic construct; identical to SEQ ID NO: 8633
  source 1..120: mol_type = other DNA

SEQ ID NO: 58687 - DNA, 120 bp, synthetic construct; identical to SEQ ID NO: 28733
  source 1..120: mol_type = other DNA

SEQ ID NO: 58688 - DNA, 120 bp, synthetic construct; identical to SEQ ID NO: 28734
  source 1..120: mol_type = other DNA

SEQ ID NO: 58689 - DNA, 120 bp, synthetic construct; identical to SEQ ID NO: 28735
  source 1..120: mol_type = other DNA

SEQ ID NO: 58690 - DNA, 120 bp, synthetic construct; identical to SEQ ID NO: 8634
  source 1..120: mol_type = other DNA

SEQ ID NO: 58691 - DNA, 120 bp, synthetic construct; identical to SEQ ID NO: 28737
  source 1..120: mol_type = other DNA

SEQ ID NO: 58692 - DNA, 120 bp, synthetic construct; identical to SEQ ID NO: 28738
  source 1..120: mol_type = other DNA

SEQ ID NO: 58693 - DNA, 120 bp, synthetic construct; identical to SEQ ID NO: 28739
  source 1..120: mol_type = other DNA

SEQ ID NO: 58694 - DNA, 120 bp, synthetic construct; identical to SEQ ID NO: 8635
  source 1..120: mol_type = other DNA

SEQ ID NO: 58695 - DNA, 120 bp, synthetic construct; identical to SEQ ID NO: 28741
  source 1..120: mol_type = other DNA

SEQ ID NO: 58696 - DNA, 120 bp, synthetic construct; identical to SEQ ID NO: 28742
  source 1..120: mol_type = other DNA

SEQ ID NO: 58697 - DNA, 120 bp, synthetic construct; identical to SEQ ID NO: 8636
  source 1..120: mol_type = other DNA

SEQ ID NO: 58698 - DNA, 120 bp, synthetic construct; identical to SEQ ID NO: 28744
  source 1..120: mol_type = other DNA

SEQ ID NO: 58699 - DNA, 120 bp, synthetic construct; identical to SEQ ID NO: 28745
  source 1..120: mol_type = other DNA

SEQ ID NO: 58700 - DNA, 120 bp, synthetic construct; identical to SEQ ID NO: 28746
  source 1..120: mol_type = other DNA

SEQ ID NO: 58701 - DNA, 120 bp, synthetic construct; identical to SEQ ID NO: 28747
  source 1..120: mol_type = other DNA

SEQ ID NO: 58702 - DNA, 120 bp, synthetic construct; identical to SEQ ID NO: 8637
  source 1..120: mol_type = other DNA

SEQ ID NO: 58703 - DNA, 120 bp, synthetic construct; identical to SEQ ID NO: 28749
  source 1..120: mol_type = other DNA

SEQ ID NO: 58704 - DNA, 120 bp, synthetic construct; identical to SEQ ID NO: 28750
  source 1..120: mol_type = other DNA

SEQ ID NO: 58705 - DNA, 120 bp, synthetic construct; identical to SEQ ID NO: 8638
  source 1..120: mol_type = other DNA

SEQ ID NO: 58706 - DNA, 120 bp, synthetic construct; identical to SEQ ID NO: 28752
  source 1..120: mol_type = other DNA

SEQ ID NO: 58707 - DNA, 120 bp, synthetic construct; identical to SEQ ID NO: 28753
  source 1..120: mol_type = other DNA

SEQ ID NO: 58708 - DNA, 120 bp, synthetic construct; identical to SEQ ID NO: 28754
  source 1..120: mol_type = other DNA

SEQ ID NO: 58709 - DNA, 120 bp, synthetic construct; identical to SEQ ID NO: 8639
  source 1..120: mol_type = other DNA

SEQ ID NO: 58710 - DNA, 120 bp, synthetic construct; identical to SEQ ID NO: 28756
  source 1..120: mol_type = other DNA

SEQ ID NO: 58711 - DNA, 120 bp, synthetic construct; identical to SEQ ID NO: 28757
  source 1..120: mol_type = other DNA

SEQ ID NO: 58712 - DNA, 120 bp, synthetic construct; identical to SEQ ID NO: 28758
  source 1..120: mol_type = other DNA

SEQ ID NO: 58713 - DNA, 120 bp, synthetic construct; identical to SEQ ID NO: 8640
  source 1..120: mol_type = other DNA

SEQ ID NO: 58714 - DNA, 120 bp, synthetic construct; identical to SEQ ID NO: 28760
  source 1..120: mol_type = other DNA

SEQ ID NO: 58715 - DNA, 120 bp, synthetic construct; identical to SEQ ID NO: 28761
  source 1..120: mol_type = other DNA

SEQ ID NO: 58716 - DNA, 120 bp, synthetic construct; identical to SEQ ID NO: 28762
  source 1..120: mol_type = other DNA

SEQ ID NO: 58717 - DNA, 120 bp, synthetic construct; identical to SEQ ID NO: 8641
  source 1..120: mol_type = other DNA

SEQ ID NO: 58718 - DNA, 120 bp, synthetic construct; identical to SEQ ID NO: 28764
  source 1..120: mol_type = other DNA

SEQ ID NO: 58719 - DNA, 120 bp, synthetic construct; identical to SEQ ID NO: 28765
  source 1..120: mol_type = other DNA

SEQ ID NO: 58720 - DNA, 120 bp, synthetic construct; identical to SEQ ID NO: 28766
  source 1..120: mol_type = other DNA

SEQ ID NO: 58721 - DNA, 120 bp, synthetic construct; identical to SEQ ID NO: 8642
  source 1..120: mol_type = other DNA

SEQ ID NO: 58722 - DNA, 120 bp, synthetic construct; identical to SEQ ID NO: 28768
  source 1..120: mol_type = other DNA

SEQ ID NO: 58723 - DNA, 120 bp, synthetic construct; identical to SEQ ID NO: 28769
  source 1..120: mol_type = other DNA

SEQ ID NO: 58724 - DNA, 120 bp, synthetic construct; identical to SEQ ID NO: 28770
  source 1..120: mol_type = other DNA

SEQ ID NO: 58725 - DNA, 120 bp, synthetic construct; identical to SEQ ID NO: 28771
  source 1..120: mol_type = other DNA

SEQ ID NO: 58726 - DNA, 120 bp, synthetic construct; identical to SEQ ID NO: 8643
  source 1..120: mol_type = other DNA

SEQ ID NO: 58727 - DNA, 120 bp, synthetic construct; identical to SEQ ID NO: 28773
  source 1..120: mol_type = other DNA

SEQ ID NO: 58728 - DNA, 120 bp, synthetic construct; identical to SEQ ID NO: 28774
  source 1..120: mol_type = other DNA

SEQ ID NO: 58729 - DNA, 120 bp, synthetic construct; identical to SEQ ID NO: 8644
  source 1..120: mol_type = other DNA

SEQ ID NO: 58730 - DNA, 120 bp, synthetic construct; identical to SEQ ID NO: 28776
  source 1..120: mol_type = other DNA

SEQ ID NO: 58731 - DNA, 120 bp, synthetic construct; identical to SEQ ID NO: 28777
  source 1..120: mol_type = other DNA

SEQ ID NO: 58732 - DNA, 120 bp, synthetic construct; identical to SEQ ID NO: 28778
  source 1..120: mol_type = other DNA

SEQ ID NO: 58733 - DNA, 120 bp, synthetic construct; identical to SEQ ID NO: 28779
  source 1..120: mol_type = other DNA

SEQ ID NO: 58734 - DNA, 120 bp, synthetic construct; identical to SEQ ID NO: 8645
  source 1..120: mol_type = other DNA

SEQ ID NO: 58735 - DNA, 120 bp, synthetic construct; identical to SEQ ID NO: 28781
  source 1..120: mol_type = other DNA

SEQ ID NO: 58736 - DNA, 120 bp, synthetic construct; identical to SEQ ID NO: 28782
  source 1..120: mol_type = other DNA

SEQ ID NO: 58737 - DNA, 120 bp, synthetic construct; identical to SEQ ID NO: 28783
  source 1..120: mol_type = other DNA

SEQ ID NO: 58738 - DNA, 120 bp, synthetic construct; identical to SEQ ID NO: 28784
  source 1..120: mol_type = other DNA

SEQ ID NO: 58739 - DNA, 120 bp, synthetic construct; identical to SEQ ID NO: 8646
  source 1..120: mol_type = other DNA

SEQ ID NO: 58740 - DNA, 120 bp, synthetic construct; identical to SEQ ID NO: 28786
  source 1..120: mol_type = other DNA

SEQ ID NO: 58741 - DNA, 120 bp, synthetic construct; identical to SEQ ID NO: 28787
  source 1..120: mol_type = other DNA

SEQ ID NO: 58742 - DNA, 120 bp, synthetic construct; identical to SEQ ID NO: 28788
  source 1..120: mol_type = other DNA

SEQ ID NO: 58743 - DNA, 120 bp, synthetic construct; identical to SEQ ID NO: 8647
  source 1..120: mol_type = other DNA

SEQ ID NO: 58744 - DNA, 120 bp, synthetic construct; identical to SEQ ID NO: 28790
  source 1..120: mol_type = other DNA

SEQ ID NO: 58745 - DNA, 120 bp, synthetic construct; identical to SEQ ID NO: 28791
  source 1..120: mol_type = other DNA

SEQ ID NO: 58746 - DNA, 120 bp, synthetic construct; identical to SEQ ID NO: 28792
  source 1..120: mol_type = other DNA

SEQ ID NO: 58747 - DNA, 120 bp, synthetic construct; identical to SEQ ID NO: 8648
  source 1..120: mol_type = other DNA

SEQ ID NO: 58748 - DNA, 120 bp, synthetic construct; identical to SEQ ID NO: 28794
  source 1..120: mol_type = other DNA

SEQ ID NO: 58749 - DNA, 120 bp, synthetic construct; identical to SEQ ID NO: 28795
  source 1..120: mol_type = other DNA

SEQ ID NO: 58750 - DNA, 120 bp, synthetic construct; identical to SEQ ID NO: 28796
  source 1..120: mol_type = other DNA

SEQ ID NO: 58751 - DNA, 120 bp, synthetic construct; identical to SEQ ID NO: 8649
  source 1..120: mol_type = other DNA

SEQ ID NO: 58752 - DNA, 120 bp, synthetic construct; identical to SEQ ID NO: 28798
  source 1..120: mol_type = other DNA

SEQ ID NO: 58753 - DNA, 120 bp, synthetic construct; identical to SEQ ID NO: 28799
  source 1..120: mol_type = other DNA

SEQ ID NO: 58754 - DNA, 120 bp, synthetic construct; identical to SEQ ID NO: 28800
  source 1..120: mol_type = other DNA

SEQ ID NO: 58755 - DNA, 120 bp, synthetic construct; identical to SEQ ID NO: 28801
  source 1..120: mol_type = other DNA

SEQ ID NO: 58756 - DNA, 120 bp, synthetic construct; identical to SEQ ID NO: 8650
  source 1..120: mol_type = other DNA

SEQ ID NO: 58757 - DNA, 120 bp, synthetic construct; identical to SEQ ID NO: 28803
  source 1..120: mol_type = other DNA

SEQ ID NO: 58758 - DNA, 120 bp, synthetic construct; identical to SEQ ID NO: 28804
  source 1..120: mol_type = other DNA

SEQ ID NO: 58759 - DNA, 120 bp, synthetic construct; identical to SEQ ID NO: 8651
  source 1..120: mol_type = other DNA

SEQ ID NO: 58760 - DNA, 120 bp, synthetic construct; identical to SEQ ID NO: 28806
  source 1..120: mol_type = other DNA

SEQ ID NO: 58761 - DNA, 120 bp, synthetic construct; identical to SEQ ID NO: 28807
  source 1..120: mol_type = other DNA

SEQ ID NO: 58762 - DNA, 120 bp, synthetic construct; identical to SEQ ID NO: 28808
  source 1..120: mol_type = other DNA

SEQ ID NO: 58763 - DNA, 120 bp, synthetic construct; identical to SEQ ID NO: 8652
  source 1..120: mol_type = other DNA

SEQ ID NO: 58764 - DNA, 120 bp, synthetic construct; identical to SEQ ID NO: 28810
  source 1..120: mol_type = other DNA

SEQ ID NO: 58765 - DNA, 120 bp, synthetic construct; identical to SEQ ID NO: 28811
  source 1..120: mol_type = other DNA

SEQ ID NO: 58766 - DNA, 120 bp, synthetic construct; identical to SEQ ID NO: 28812
  source 1..120: mol_type = other DNA

SEQ ID NO: 58767 - DNA, 120 bp, synthetic construct; identical to SEQ ID NO: 8653
  source 1..120: mol_type = other DNA

SEQ ID NO: 58768 - DNA, 120 bp, synthetic construct; identical to SEQ ID NO: 28814
  source 1..120: mol_type = other DNA

SEQ ID NO: 58769 - DNA, 120 bp, synthetic construct; identical to SEQ ID NO: 28815
  source 1..120: mol_type = other DNA

SEQ ID NO: 58770 - DNA, 120 bp, synthetic construct; identical to SEQ ID NO: 28816
  source 1..120: mol_type = other DNA

SEQ ID NO: 58771 - DNA, 120 bp, synthetic construct; identical to SEQ ID NO: 8654
  source 1..120: mol_type = other DNA

SEQ ID NO: 58772 - DNA, 120 bp, synthetic construct; identical to SEQ ID NO: 28818
  source 1..120: mol_type = other DNA

SEQ ID NO: 58773 - DNA, 120 bp, synthetic construct; identical to SEQ ID NO: 28819
  source 1..120: mol_type = other DNA

SEQ ID NO: 58774 - DNA, 120 bp, synthetic construct; identical to SEQ ID NO: 8655
  source 1..120: mol_type = other DNA

SEQ ID NO: 58775 - DNA, 120 bp, synthetic construct; identical to SEQ ID NO: 28821
  source 1..120: mol_type = other DNA

SEQ ID NO: 58776 - DNA, 120 bp, synthetic construct; identical to SEQ ID NO: 28822
  source 1..120: mol_type = other DNA

SEQ ID NO: 58777 - DNA, 120 bp, synthetic construct; identical to SEQ ID NO: 28823
  source 1..120: mol_type = other DNA

SEQ ID NO: 58778 - DNA, 120 bp, synthetic construct; identical to SEQ ID NO: 28824
  source 1..120: mol_type = other DNA

SEQ ID NO: 58779 - DNA, 120 bp, synthetic construct; identical to SEQ ID NO: 8656
  source 1..120: mol_type = other DNA

SEQ ID NO: 58780 - DNA, 120 bp, synthetic construct; identical to SEQ ID NO: 28826
  source 1..120: mol_type = other DNA

SEQ ID NO: 58781 - DNA, 120 bp, synthetic construct; identical to SEQ ID NO: 28827
  source 1..120: mol_type = other DNA

SEQ ID NO: 58782 - DNA, 120 bp, synthetic construct; identical to SEQ ID NO: 28828
  source 1..120: mol_type = other DNA

SEQ ID NO: 58783 - DNA, 120 bp, synthetic construct; identical to SEQ ID NO: 8657
  source 1..120: mol_type = other DNA

SEQ ID NO: 58784 - DNA, 120 bp, synthetic construct; identical to SEQ ID NO: 28830
  source 1..120: mol_type = other DNA

SEQ ID NO: 58785 - DNA, 120 bp, synthetic construct; identical to SEQ ID NO: 28831
  source 1..120: mol_type = other DNA

SEQ ID NO: 58786 - DNA, 120 bp, synthetic construct; identical to SEQ ID NO: 28832
  source 1..120: mol_type = other DNA

SEQ ID NO: 58787 - DNA, 120 bp, synthetic construct; identical to SEQ ID NO: 8658
  source 1..120: mol_type = other DNA

SEQ ID NO: 58788 - DNA, 120 bp, synthetic construct; identical to SEQ ID NO: 28834
  source 1..120: mol_type = other DNA

SEQ ID NO: 58789 - DNA, 120 bp, synthetic construct; identical to SEQ ID NO: 28835
  source 1..120: mol_type = other DNA

SEQ ID NO: 58790 - DNA, 120 bp, synthetic construct; identical to SEQ ID NO: 8659
  source 1..120: mol_type = other DNA

SEQ ID NO: 58791 - DNA, 120 bp, synthetic construct; identical to SEQ ID NO: 28837
  source 1..120: mol_type = other DNA

SEQ ID NO: 58792 - DNA, 120 bp, synthetic construct; identical to SEQ ID NO: 28838
  source 1..120: mol_type = other DNA

SEQ ID NO: 58793 - DNA, 120 bp, synthetic construct; identical to SEQ ID NO: 28839
  source 1..120: mol_type = other DNA

SEQ ID NO: 58794 - DNA, 120 bp, synthetic construct; identical to SEQ ID NO: 8660
  source 1..120: mol_type = other DNA

SEQ ID NO: 58795 - DNA, 120 bp, synthetic construct; identical to SEQ ID NO: 28841
  source 1..120: mol_type = other DNA

SEQ ID NO: 58796 - DNA, 120 bp, synthetic construct; identical to SEQ ID NO: 28842
  source 1..120: mol_type = other DNA

SEQ ID NO: 58797 - DNA, 120 bp, synthetic construct; identical to SEQ ID NO: 28843
  source 1..120: mol_type = other DNA

SEQ ID NO: 58798 - DNA, 120 bp, synthetic construct; identical to SEQ ID NO: 8661
  source 1..120: mol_type = other DNA

SEQ ID NO: 58799 - DNA, 120 bp, synthetic construct; identical to SEQ ID NO: 28845
  source 1..120: mol_type = other DNA

SEQ ID NO: 58800 - DNA, 120 bp, synthetic construct; identical to SEQ ID NO: 28846
  source 1..120: mol_type = other DNA

SEQ ID NO: 58801 - DNA, 120 bp, synthetic construct; identical to SEQ ID NO: 28847
  source 1..120: mol_type = other DNA

SEQ ID NO: 58802 - DNA, 120 bp, synthetic construct; identical to SEQ ID NO: 28848
  source 1..120: mol_type = other DNA

SEQ ID NO: 58803 - DNA, 120 bp, synthetic construct; identical to SEQ ID NO: 8662
  source 1..120: mol_type = other DNA

SEQ ID NO: 58804 - DNA, 120 bp, synthetic construct; identical to SEQ ID NO: 28850
  source 1..120: mol_type = other DNA

SEQ ID NO: 58805 - DNA, 120 bp, synthetic construct; identical to SEQ ID NO: 28851
  source 1..120: mol_type = other DNA

SEQ ID NO: 58806 - DNA, 120 bp, synthetic construct; identical to SEQ ID NO: 8663
  source 1..120: mol_type = other DNA

SEQ ID NO: 58807 - DNA, 120 bp, synthetic construct; identical to SEQ ID NO: 28853
  source 1..120: mol_type = other DNA

SEQ ID NO: 58808 - DNA, 120 bp, synthetic construct; identical to SEQ ID NO: 28854
  source 1..120: mol_type = other DNA

SEQ ID NO: 58809 - DNA, 120 bp, synthetic construct; identical to SEQ ID NO: 28855
  source 1..120: mol_type = other DNA

SEQ ID NO: 58810 - DNA, 120 bp, synthetic construct; identical to SEQ ID NO: 8664
  source 1..120: mol_type = other DNA

SEQ ID NO: 58811 - DNA, 120 bp, synthetic construct; identical to SEQ ID NO: 28857
  source 1..120: mol_type = other DNA

SEQ ID NO: 58812 - DNA, 120 bp, synthetic construct; identical to SEQ ID NO: 28858
  source 1..120: mol_type = other DNA

SEQ ID NO: 58813 - DNA, 120 bp, synthetic construct; identical to SEQ ID NO: 28859
  source 1..120: mol_type = other DNA

SEQ ID NO: 58814 - DNA, 120 bp, synthetic construct; identical to SEQ ID NO: 8665
  source 1..120: mol_type = other DNA

SEQ ID NO: 58815 - DNA, 120 bp, synthetic construct; identical to SEQ ID NO: 28861
  source 1..120: mol_type = other DNA

SEQ ID NO: 58816 - DNA, 120 bp, synthetic construct; identical to SEQ ID NO: 28862
  source 1..120: mol_type = other DNA

SEQ ID NO: 58817 - DNA, 120 bp, synthetic construct; identical to SEQ ID NO: 28863
  source 1..120: mol_type = other DNA

SEQ ID NO: 58818 - DNA, 120 bp, synthetic construct; identical to SEQ ID NO: 8666
  source 1..120: mol_type = other DNA

SEQ ID NO: 58819 - DNA, 120 bp, synthetic construct; identical to SEQ ID NO: 28865
  source 1..120: mol_type = other DNA

SEQ ID NO: 58820 - DNA, 120 bp, synthetic construct; identical to SEQ ID NO: 28866
  source 1..120: mol_type = other DNA

SEQ ID NO: 58821 - DNA, 120 bp, synthetic construct; identical to SEQ ID NO: 28867
  source 1..120: mol_type = other DNA

SEQ ID NO: 58822 - DNA, 120 bp, synthetic construct; identical to SEQ ID NO: 28868
  source 1..120: mol_type = other DNA

SEQ ID NO: 58823 - DNA, 120 bp, synthetic construct; identical to SEQ ID NO: 8667
  source 1..120: mol_type = other DNA

SEQ ID NO: 58824 - DNA, 120 bp, synthetic construct; identical to SEQ ID NO: 28870
  source 1..120: mol_type = other DNA

SEQ ID NO: 58825 - DNA, 120 bp, synthetic construct; identical to SEQ ID NO: 28871
  source 1..120: mol_type = other DNA

SEQ ID NO: 58826 - DNA, 120 bp, synthetic construct; identical to SEQ ID NO: 28872
  source 1..120: mol_type = other DNA

SEQ ID NO: 58827 - DNA, 120 bp, synthetic construct; identical to SEQ ID NO: 8668
  source 1..120: mol_type = other DNA

SEQ ID NO: 58828 - DNA, 120 bp, synthetic construct; identical to SEQ ID NO: 28874
  source 1..120: mol_type = other DNA

SEQ ID NO: 58829 - DNA, 120 bp, synthetic construct; identical to SEQ ID NO: 28875
  source 1..120: mol_type = other DNA

SEQ ID NO: 58830 - DNA, 120 bp, synthetic construct; identical to SEQ ID NO: 28876
  source 1..120: mol_type = other DNA

SEQ ID NO: 58831 - DNA, 120 bp, synthetic construct; identical to SEQ ID NO: 8669
  source 1..120: mol_type = other DNA

SEQ ID NO: 58832 - DNA, 120 bp, synthetic construct; identical to SEQ ID NO: 28878
  source 1..120: mol_type = other DNA

SEQ ID NO: 58833 - DNA, 120 bp, synthetic construct; identical to SEQ ID NO: 28879
  source 1..120: mol_type = other DNA

SEQ ID NO: 58834 - DNA, 120 bp, synthetic construct; identical to SEQ ID NO: 28880
  source 1..120: mol_type = other DNA

SEQ ID NO: 58835 - DNA, 120 bp, synthetic construct; identical to SEQ ID NO: 28881
  source 1..120: mol_type = other DNA

SEQ ID NO: 58836 - DNA, 120 bp, synthetic construct; identical to SEQ ID NO: 8670
  source 1..120: mol_type = other DNA

SEQ ID NO: 58837 - DNA, 120 bp, synthetic construct; identical to SEQ ID NO: 28883
  source 1..120: mol_type = other DNA

SEQ ID NO: 58838 - DNA, 120 bp, synthetic construct; identical to SEQ ID NO: 28884
  source 1..120: mol_type = other DNA

SEQ ID NO: 58839 - DNA, 120 bp, synthetic construct; identical to SEQ ID NO: 28885
  source 1..120: mol_type = other DNA

SEQ ID NO: 58840 - DNA, 120 bp, synthetic construct; identical to SEQ ID NO: 8671
  source 1..120: mol_type = other DNA

SEQ ID NO: 58841 - DNA, 120 bp, synthetic construct; identical to SEQ ID NO: 28887
  source 1..120: mol_type = other DNA

SEQ ID NO: 58842 - DNA, 120 bp, synthetic construct; identical to SEQ ID NO: 28888
  source 1..120: mol_type = other DNA

SEQ ID NO: 58843 - DNA, 120 bp, synthetic construct; identical to SEQ ID NO: 28889
  source 1..120: mol_type = other DNA

SEQ ID NO: 58844 - DNA, 120 bp, synthetic construct; identical to SEQ ID NO: 8672
  source 1..120: mol_type = other DNA

SEQ ID NO: 58845 - DNA, 120 bp, synthetic construct; identical to SEQ ID NO: 28891
  source 1..120: mol_type = other DNA

SEQ ID NO: 58846 - DNA, 120 bp, synthetic construct; identical to SEQ ID NO: 28892
  source 1..120: mol_type = other DNA

SEQ ID NO: 58847 - DNA, 120 bp, synthetic construct; identical to SEQ ID NO: 28893
  source 1..120: mol_type = other DNA

SEQ ID NO: 58848 - DNA, 120 bp, synthetic construct; identical to SEQ ID NO: 28894
  source 1..120: mol_type = other DNA

SEQ ID NO: 58849 - DNA, 120 bp, synthetic construct; identical to SEQ ID NO: 8673
  source 1..120: mol_type = other DNA

SEQ ID NO: 58850 - DNA, 120 bp, synthetic construct; identical to SEQ ID NO: 28896
  source 1..120: mol_type = other DNA

SEQ ID NO: 58851 - DNA, 120 bp, synthetic construct; identical to SEQ ID NO: 28897
  source 1..120: mol_type = other DNA

SEQ ID NO: 58852 - DNA, 120 bp, synthetic construct; identical to SEQ ID NO: 8674
  source 1..120: mol_type = other DNA

SEQ ID NO: 58853 - DNA, 120 bp, synthetic construct; identical to SEQ ID NO: 28899
  source 1..120: mol_type = other DNA

SEQ ID NO: 58854 - DNA, 120 bp, synthetic construct; identical to SEQ ID NO: 28900
  source 1..120: mol_type = other DNA

SEQ ID NO: 58855 - DNA, 120 bp, synthetic construct; identical to SEQ ID NO: 28901
  source 1..120: mol_type = other DNA

SEQ ID NO: 58856 - DNA, 120 bp, synthetic construct; identical to SEQ ID NO: 8675
  source 1..120: mol_type = other DNA

SEQ ID NO: 58857 - DNA, 120 bp, synthetic construct; identical to SEQ ID NO: 28903
  source 1..120: mol_type = other DNA

SEQ ID NO: 58858 - DNA, 120 bp, synthetic construct; identical to SEQ ID NO: 28904
  source 1..120: mol_type = other DNA

SEQ ID NO: 58859 - DNA, 120 bp, synthetic construct; identical to SEQ ID NO: 28905
  source 1..120: mol_type = other DNA

SEQ ID NO: 58860 - DNA, 120 bp, synthetic construct; identical to SEQ ID NO: 28906
  source 1..120: mol_type = other DNA

SEQ ID NO: 58861 - DNA, 120 bp, synthetic construct; identical to SEQ ID NO: 8676
  source 1..120: mol_type = other DNA

SEQ ID NO: 58862 - DNA, 120 bp, synthetic construct; identical to SEQ ID NO: 28908
  source 1..120: mol_type = other DNA

SEQ ID NO: 58863 - DNA, 120 bp, synthetic construct; identical to SEQ ID NO: 28909
  source 1..120: mol_type = other DNA

SEQ ID NO: 58864 - DNA, 120 bp, synthetic construct; identical to SEQ ID NO: 28910
  source 1..120: mol_type = other DNA

SEQ ID NO: 58865 - DNA, 120 bp, synthetic construct; identical to SEQ ID NO: 8677
  source 1..120: mol_type = other DNA

SEQ ID NO: 58866 - DNA, 120 bp, synthetic construct; identical to SEQ ID NO: 28912
  source 1..120: mol_type = other DNA

SEQ ID NO: 58867 - DNA, 120 bp, synthetic construct; identical to SEQ ID NO: 28913
  source 1..120: mol_type = other DNA

SEQ ID NO: 58868 - DNA, 120 bp, synthetic construct; identical to SEQ ID NO: 28914
  source 1..120: mol_type = other DNA

SEQ ID NO: 58869 - DNA, 120 bp, synthetic construct; identical to SEQ ID NO: 8678
  source 1..120: mol_type = other DNA

SEQ ID NO: 58870 - DNA, 120 bp, synthetic construct; identical to SEQ ID NO: 28916
  source 1..120: mol_type = other DNA

SEQ ID NO: 58871 - DNA, 120 bp, synthetic construct; identical to SEQ ID NO: 28917
  source 1..120: mol_type = other DNA

SEQ ID NO: 58872 - DNA, 120 bp, synthetic construct; identical to SEQ ID NO: 8679
  source 1..120: mol_type = other DNA

SEQ ID NO: 58873 - DNA, 120 bp, synthetic construct; identical to SEQ ID NO: 28919
  source 1..120: mol_type = other DNA

SEQ ID NO: 58874 - DNA, 120 bp, synthetic construct; identical to SEQ ID NO: 28920
  source 1..120: mol_type = other DNA

SEQ ID NO: 58875 - DNA, 120 bp, synthetic construct; identical to SEQ ID NO: 28921
  source 1..120: mol_type = other DNA

SEQ ID NO: 58876 - DNA, 120 bp, synthetic construct; identical to SEQ ID NO: 8680
  source 1..120: mol_type = other DNA

SEQ ID NO: 58877 - DNA, 120 bp, synthetic construct; identical to SEQ ID NO: 28923
  source 1..120: mol_type = other DNA

SEQ ID NO: 58878 - DNA, 120 bp, synthetic construct; identical to SEQ ID NO: 28924
  source 1..120: mol_type = other DNA

SEQ ID NO: 58879 - DNA, 120 bp, synthetic construct; identical to SEQ ID NO: 28925
  source 1..120: mol_type = other DNA

SEQ ID NO: 58880 - DNA, 120 bp, synthetic construct; identical to SEQ ID NO: 8681
  source 1..120: mol_type = other DNA

SEQ ID NO: 58881 - DNA, 120 bp, synthetic construct; identical to SEQ ID NO: 28927
  source 1..120: mol_type = other DNA

SEQ ID NO: 58882 - DNA, 120 bp, synthetic construct; identical to SEQ ID NO: 28928
  source 1..120: mol_type = other DNA

SEQ ID NO: 58883 - DNA, 120 bp, synthetic construct; identical to SEQ ID NO: 28929
  source 1..120: mol_type = other DNA

SEQ ID NO: 58884 - DNA, 120 bp, synthetic construct; identical to SEQ ID NO: 28930
  source 1..120: mol_type = other DNA

SEQ ID NO: 58885 - DNA, 120 bp, synthetic construct; identical to SEQ ID NO: 8682
  source 1..120: mol_type = other DNA

SEQ ID NO: 58886 - DNA, 120 bp, synthetic construct; identical to SEQ ID NO: 28932
  source 1..120: mol_type = other DNA

SEQ ID NO: 58887 - DNA, 120 bp, synthetic construct; identical to SEQ ID NO: 28933
  source 1..120: mol_type = other DNA

SEQ ID NO: 58888 - DNA, 120 bp, synthetic construct; identical to SEQ ID NO: 28934
  source 1..120: mol_type = other DNA

SEQ ID NO: 58889 - DNA, 120 bp, synthetic construct; identical to SEQ ID NO: 28935
  source 1..120: mol_type = other DNA

SEQ ID NO: 58890 - DNA, 120 bp, synthetic construct; identical to SEQ ID NO: 8683
  source 1..120: mol_type = other DNA

SEQ ID NO: 58891 - DNA, 120 bp, synthetic construct; identical to SEQ ID NO: 28937
  source 1..120: mol_type = other DNA

SEQ ID NO: 58892 - DNA, 120 bp, synthetic construct; identical to SEQ ID NO: 28938
  source 1..120: mol_type = other DNA

SEQ ID NO: 58893 - DNA, 120 bp, synthetic construct; identical to SEQ ID NO: 28939
  source 1..120: mol_type = other DNA

SEQ ID NO: 58894 - DNA, 120 bp, synthetic construct; identical to SEQ ID NO: 8684
  source 1..120: mol_type = other DNA

SEQ ID NO: 58895 - DNA, 120 bp, synthetic construct; identical to SEQ ID NO: 28941
  source 1..120: mol_type = other DNA

SEQ ID NO: 58896 - DNA, 120 bp, synthetic construct; identical to SEQ ID NO: 28942
  source 1..120: mol_type = other DNA

SEQ ID NO: 58897 - DNA, 120 bp, synthetic construct; identical to SEQ ID NO: 8685
  source 1..120: mol_type = other DNA

SEQ ID NO: 58898 - DNA, 120 bp, synthetic construct; identical to SEQ ID NO: 28944
  source 1..120: mol_type = other DNA

SEQ ID NO: 58899 - DNA, 120 bp, synthetic construct; identical to SEQ ID NO: 28945
  source 1..120: mol_type = other DNA

SEQ ID NO: 58900 - DNA, 120 bp, synthetic construct; identical to SEQ ID NO: 28946
  source 1..120: mol_type = other DNA

SEQ ID NO: 58901 - DNA, 120 bp, synthetic construct; identical to SEQ ID NO: 28947
  source 1..120: mol_type = other DNA

SEQ ID NO: 58902 - DNA, 120 bp, synthetic construct; identical to SEQ ID NO: 8686
  source 1..120: mol_type = other DNA

SEQ ID NO: 58903 - DNA, 120 bp, synthetic construct; identical to SEQ ID NO: 28949
  source 1..120: mol_type = other DNA

SEQ ID NO: 58904 - DNA, 120 bp, synthetic construct; identical to SEQ ID NO: 28950
  source 1..120: mol_type = other DNA

SEQ ID NO: 58905 - DNA, 120 bp, synthetic construct; identical to SEQ ID NO: 28951
  source 1..120: mol_type = other DNA

SEQ ID NO: 58906 - DNA, 120 bp, synthetic construct; identical to SEQ ID NO: 8687
  source 1..120: mol_type = other DNA

SEQ ID NO: 58907 - DNA, 120 bp, synthetic construct; identical to SEQ ID NO: 28953
  source 1..120: mol_type = other DNA

SEQ ID NO: 58908 - DNA, 120 bp, synthetic construct; identical to SEQ ID NO: 28954
  source 1..120: mol_type = other DNA

SEQ ID NO: 58909 - DNA, 120 bp, synthetic construct; identical to SEQ ID NO: 28955
  source 1..120: mol_type = other DNA

SEQ ID NO: 58910 - DNA, 120 bp, synthetic construct; identical to SEQ ID NO: 28956
  source 1..120: mol_type = other DNA

SEQ ID NO: 58911 - DNA, 120 bp, synthetic construct; identical to SEQ ID NO: 8688
  source 1..120: mol_type = other DNA

SEQ ID NO: 58912 - DNA, 120 bp, synthetic construct; identical to SEQ ID NO: 28958
  source 1..120: mol_type = other DNA

SEQ ID NO: 58913 - DNA, 120 bp, synthetic construct; identical to SEQ ID NO: 28959
  source 1..120: mol_type = other DNA

SEQ ID NO: 58914 - DNA, 120 bp, synthetic construct; identical to SEQ ID NO: 8689
  source 1..120: mol_type = other DNA

SEQ ID NO: 58915 - DNA, 120 bp, synthetic construct; identical to SEQ ID NO: 28961
  source 1..120: mol_type = other DNA

SEQ ID NO: 58916 - DNA, 120 bp, synthetic construct; identical to SEQ ID NO: 28962
  source 1..120: mol_type = other DNA

SEQ ID NO: 58917 - DNA, 120 bp, synthetic construct; identical to SEQ ID NO: 28963
  source 1..120: mol_type = other DNA

SEQ ID NO: 58918 - DNA, 120 bp, synthetic construct; identical to SEQ ID NO: 28964
  source 1..120: mol_type = other DNA

SEQ ID NO: 58919 - DNA, 120 bp, synthetic construct; identical to SEQ ID NO: 8690
  source 1..120: mol_type = other DNA

SEQ ID NO: 58920 - DNA, 120 bp, synthetic construct; identical to SEQ ID NO: 28966
  source 1..120: mol_type = other DNA

SEQ ID NO: 58921 - DNA, 120 bp, synthetic construct; identical to SEQ ID NO: 28967
  source 1..120: mol_type = other DNA

SEQ ID NO: 58922 - DNA, 120 bp, synthetic construct; identical to SEQ ID NO: 8691
  source 1..120: mol_type = other DNA

SEQ ID NO: 58923 - DNA, 120 bp, synthetic construct; identical to SEQ ID NO: 28969
  source 1..120: mol_type = other DNA

SEQ ID NO: 58924 - DNA, 120 bp, synthetic construct; identical to SEQ ID NO: 28970
  source 1..120: mol_type = other DNA

SEQ ID NO: 58925 - DNA, 120 bp, synthetic construct; identical to SEQ ID NO: 28971
  source 1..120: mol_type = other DNA

SEQ ID NO: 58926 - DNA, 120 bp, synthetic construct; identical to SEQ ID NO: 28972
  source 1..120: mol_type = other DNA

SEQ ID NO: 58927 - DNA, 120 bp, synthetic construct; identical to SEQ ID NO: 8692
  source 1..120: mol_type = other DNA

SEQ ID NO: 58928 - DNA, 120 bp, synthetic construct; identical to SEQ ID NO: 28974
  source 1..120: mol_type = other DNA

SEQ ID NO: 58929 - DNA, 120 bp, synthetic construct; identical to SEQ ID NO: 28975
  source 1..120: mol_type = other DNA

SEQ ID NO: 58930 - DNA, 120 bp, synthetic construct; identical to SEQ ID NO: 28976
  source 1..120: mol_type = other DNA

SEQ ID NO: 58931 - DNA, 120 bp, synthetic construct; identical to SEQ ID NO: 8693
  source 1..120: mol_type = other DNA

SEQ ID NO: 58932 - DNA, 120 bp, synthetic construct; identical to SEQ ID NO: 28978
  source 1..120: mol_type = other DNA

SEQ ID NO: 58933 - DNA, 120 bp, synthetic construct; identical to SEQ ID NO: 28979
  source 1..120: mol_type = other DNA

SEQ ID NO: 58934 - DNA, 120 bp, synthetic construct; identical to SEQ ID NO: 28980
  source 1..120: mol_type = other DNA

SEQ ID NO: 58935 - DNA, 120 bp, synthetic construct; identical to SEQ ID NO: 28981
  source 1..120: mol_type = other DNA

SEQ ID NO: 58936 - DNA, 120 bp, synthetic construct; identical to SEQ ID NO: 8694
  source 1..120: mol_type = other DNA

SEQ ID NO: 58937 - DNA, 120 bp, synthetic construct; identical to SEQ ID NO: 28983
  source 1..120: mol_type = other DNA

SEQ ID NO: 58938 - DNA, 120 bp, synthetic construct; identical to SEQ ID NO: 28984
  source 1..120: mol_type = other DNA

SEQ ID NO: 58939 - DNA, 120 bp, synthetic construct; identical to SEQ ID NO: 8695
  source 1..120: mol_type = other DNA

SEQ ID NO: 58940 - DNA, 120 bp, synthetic construct; identical to SEQ ID NO: 28986
  source 1..120: mol_type = other DNA

SEQ ID NO: 58941 - DNA, 120 bp, synthetic construct; identical to SEQ ID NO: 28987
  source 1..120: mol_type = other DNA

SEQ ID NO: 58942 - DNA, 120 bp, synthetic construct; identical to SEQ ID NO: 28988
  source 1..120: mol_type = other DNA

SEQ ID NO: 58943 - DNA, 120 bp, synthetic construct; identical to SEQ ID NO: 28989
  source 1..120: mol_type = other DNA

SEQ ID NO: 58944 - DNA, 120 bp, synthetic construct; identical to SEQ ID NO: 8696
  source 1..120: mol_type = other DNA

SEQ ID NO: 58945 - DNA, 120 bp, synthetic construct; identical to SEQ ID NO: 28991
  source 1..120: mol_type = other DNA

SEQ ID NO: 58946 - DNA, 120 bp, synthetic construct; identical to SEQ ID NO: 28992
  source 1..120: mol_type = other DNA

SEQ ID NO: 58947 - DNA, 120 bp, synthetic construct; identical to SEQ ID NO: 8697
  source 1..120: mol_type = other DNA

SEQ ID NO: 58948 - DNA, 120 bp, synthetic construct; identical to SEQ ID NO: 28994
  source 1..120: mol_type = other DNA

SEQ ID NO: 58949 - DNA, 120 bp, synthetic construct; identical to SEQ ID NO: 28995
  source 1..120: mol_type = other DNA

SEQ ID NO: 58950 - DNA, 120 bp, synthetic construct; identical to SEQ ID NO: 28996
  source 1..120: mol_type = other DNA

SEQ ID NO: 58951 - DNA, 120 bp, synthetic construct; identical to SEQ ID NO: 28997
  source 1..120: mol_type = other DNA

SEQ ID NO: 58952 - DNA, 120 bp, synthetic construct; identical to SEQ ID NO: 8698
  source 1..120: mol_type = other DNA

SEQ ID NO: 58953 - DNA, 120 bp, synthetic construct; identical to SEQ ID NO: 28999
  source 1..120: mol_type = other DNA

SEQ ID NO: 58954 - DNA, 120 bp, synthetic construct; identical to SEQ ID NO: 29000
  source 1..120: mol_type = other DNA

SEQ ID NO: 58955 - DNA, 120 bp, synthetic construct; identical to SEQ ID NO: 29001
  source 1..120: mol_type = other DNA

SEQ ID NO: 58956 - DNA, 120 bp, synthetic construct; identical to SEQ ID NO: 8699
  source 1..120: mol_type = other DNA

SEQ ID NO: 58957 - DNA, 120 bp, synthetic construct; identical to SEQ ID NO: 29003
  source 1..120: mol_type = other DNA

SEQ ID NO: 58958 - DNA, 120 bp, synthetic construct; identical to SEQ ID NO: 29004
  source 1..120: mol_type = other DNA

SEQ ID NO: 58959 - DNA, 120 bp, synthetic construct; identical to SEQ ID NO: 29005
  source 1..120: mol_type = other DNA

SEQ ID NO: 58960 - DNA, 120 bp, synthetic construct; identical to SEQ ID NO: 8700
  source 1..120: mol_type = other DNA

SEQ ID NO: 58961 - DNA, 120 bp, synthetic construct; identical to SEQ ID NO: 29007
  source 1..120: mol_type = other DNA

SEQ ID NO: 58962 - DNA, 120 bp, synthetic construct; identical to SEQ ID NO: 8701
  source 1..120: mol_type = other DNA

SEQ ID NO: 58963 - DNA, 120 bp, synthetic construct; identical to SEQ ID NO: 29009
  source 1..120: mol_type = other DNA

SEQ ID NO: 58964 - DNA, 120 bp, synthetic construct; identical to SEQ ID NO: 29010
  source 1..120: mol_type = other DNA

SEQ ID NO: 58965 - DNA, 120 bp, synthetic construct; identical to SEQ ID NO: 29011
  source 1..120: mol_type = other DNA

SEQ ID NO: 58966 - DNA, 120 bp, synthetic construct; identical to SEQ ID NO: 8702
  source 1..120: mol_type = other DNA

SEQ ID NO: 58967 - DNA, 120 bp, synthetic construct; identical to SEQ ID NO: 29013
  source 1..120: mol_type = other DNA

SEQ ID NO: 58968 - DNA, 120 bp, synthetic construct; identical to SEQ ID NO: 29014
  source 1..120: mol_type = other DNA

SEQ ID NO: 58969 - DNA, 120 bp, synthetic construct; identical to SEQ ID NO: 29015
  source 1..120: mol_type = other DNA

SEQ ID NO: 58970 - DNA, 120 bp, synthetic construct; identical to SEQ ID NO: 8703
  source 1..120: mol_type = other DNA

SEQ ID NO: 58971 - DNA, 120 bp, synthetic construct; identical to SEQ ID NO: 29017
  source 1..120: mol_type = other DNA

SEQ ID NO: 58972 - DNA, 120 bp, synthetic construct; identical to SEQ ID NO: 29018
  source 1..120: mol_type = other DNA

SEQ ID NO: 58973 - DNA, 120 bp, synthetic construct; identical to SEQ ID NO: 29019
  source 1..120: mol_type = other DNA

SEQ ID NO: 58974 - DNA, 120 bp, synthetic construct; identical to SEQ ID NO: 8704
  source 1..120: mol_type = other DNA

SEQ ID NO: 58975 - DNA, 120 bp, synthetic construct; identical to SEQ ID NO: 29021
  source 1..120: mol_type = other DNA

SEQ ID NO: 58976 - DNA, 120 bp, synthetic construct; identical to SEQ ID NO: 29022
  source 1..120: mol_type = other DNA

SEQ ID NO: 58977 - DNA, 120 bp, synthetic construct; identical to SEQ ID NO: 29023
  source 1..120: mol_type = other DNA

SEQ ID NO: 58978 - DNA, 120 bp, synthetic construct; identical to SEQ ID NO: 8705
  source 1..120: mol_type = other DNA

SEQ ID NO: 58979 - DNA, 120 bp, synthetic construct; identical to SEQ ID NO: 29025
  source 1..120: mol_type = other DNA

SEQ ID NO: 58980 - DNA, 120 bp, synthetic construct; identical to SEQ ID NO: 29026
  source 1..120: mol_type = other DNA

SEQ ID NO: 58981 - DNA, 120 bp, synthetic construct; identical to SEQ ID NO: 8706
  source 1..120: mol_type = other DNA

SEQ ID NO: 58982 - DNA, 120 bp, synthetic construct; identical to SEQ ID NO: 29028
  source 1..120: mol_type = other DNA

SEQ ID NO: 58983 - DNA, 120 bp, synthetic construct; identical to SEQ ID NO: 29029
  source 1..120: mol_type = other DNA

SEQ ID NO: 58984 - DNA, 120 bp, synthetic construct; identical to SEQ ID NO: 29030
  source 1..120: mol_type = other DNA

SEQ ID NO: 58985 - DNA, 120 bp, synthetic construct; identical to SEQ ID NO: 1640
  source 1..120: mol_type = other DNA

SEQ ID NO: 58986 - DNA, 120 bp, synthetic construct; identical to SEQ ID NO: 29032
  source 1..120: mol_type = other DNA

SEQ ID NO: 58987 - DNA, 120 bp, synthetic construct; identical to SEQ ID NO: 29033
  source 1..120: mol_type = other DNA

SEQ ID NO: 58988 - DNA, 120 bp, synthetic construct; identical to SEQ ID NO: 29034
  source 1..120: mol_type = other DNA

SEQ ID NO: 58989 - DNA, 120 bp, synthetic construct; identical to SEQ ID NO: 29035
  source 1..120: mol_type = other DNA

SEQ ID NO: 58990 - DNA, 120 bp, synthetic construct; identical to SEQ ID NO: 8708
  source 1..120: mol_type = other DNA

SEQ ID NO: 58991 - DNA, 120 bp, synthetic construct; identical to SEQ ID NO: 29037
  source 1..120: mol_type = other DNA

SEQ ID NO: 58992 - DNA, 120 bp, synthetic construct; identical to SEQ ID NO: 29038
  source 1..120: mol_type = other DNA

SEQ ID NO: 58993 - DNA, 120 bp, synthetic construct; identical to SEQ ID NO: 29039
  source 1..120: mol_type = other DNA

SEQ ID NO: 58994 - DNA, 120 bp, synthetic construct; identical to SEQ ID NO: 29040
  source 1..120: mol_type = other DNA

SEQ ID NO: 58995 - DNA, 120 bp, synthetic construct; identical to SEQ ID NO: 8709
  source 1..120: mol_type = other DNA

SEQ ID NO: 58996 - DNA, 120 bp, synthetic construct; identical to SEQ ID NO: 29042
  source 1..120: mol_type = other DNA

SEQ ID NO: 58997 - DNA, 120 bp, synthetic construct; identical to SEQ ID NO: 29043
  source 1..120: mol_type = other DNA

SEQ ID NO: 58998 - DNA, 120 bp, synthetic construct; identical to SEQ ID NO: 8710
  source 1..120: mol_type = other DNA

SEQ ID NO: 58999 - DNA, 120 bp, synthetic construct; identical to SEQ ID NO: 29045
  source 1..120: mol_type = other DNA

SEQ ID NO: 59000 - DNA, 120 bp, synthetic construct; identical to SEQ ID NO: 29046
  source 1..120: mol_type = other DNA

SEQ ID NO: 59001 - DNA, 120 bp, synthetic construct; identical to SEQ ID NO: 29047
  source 1..120: mol_type = other DNA

SEQ ID NO: 59002 - DNA, 120 bp, synthetic construct; identical to SEQ ID NO: 29048
  source 1..120: mol_type = other DNA

SEQ ID NO: 59003 - DNA, 120 bp, synthetic construct; identical to SEQ ID NO: 8711
  source 1..120: mol_type = other DNA

SEQ ID NO: 59004 - DNA, 120 bp, synthetic construct; identical to SEQ ID NO: 29050
  source 1..120: mol_type = other DNA

SEQ ID NO: 59005 - DNA, 120 bp, synthetic construct; identical to SEQ ID NO: 29051
  source 1..120: mol_type = other DNA

SEQ ID NO: 59006 - DNA, 120 bp, synthetic construct; identical to SEQ ID NO: 29052
  source 1..120: mol_type = other DNA

SEQ ID NO: 59007 - DNA, 120 bp, synthetic construct; identical to SEQ ID NO: 8712
  source 1..120: mol_type = other DNA

SEQ ID NO: 59008 - DNA, 120 bp, synthetic construct; identical to SEQ ID NO: 29054
  source 1..120: mol_type = other DNA

SEQ ID NO: 59009 - DNA, 120 bp, synthetic construct; identical to SEQ ID NO: 29055
  source 1..120: mol_type = other DNA

SEQ ID NO: 59010 - DNA, 120 bp, synthetic construct; identical to SEQ ID NO: 29056
  source 1..120: mol_type = other DNA

SEQ ID NO: 59011 - DNA, 120 bp, synthetic construct; identical to SEQ ID NO: 8713
  source 1..120: mol_type = other DNA

SEQ ID NO: 59012 - DNA, 120 bp, synthetic construct; identical to SEQ ID NO: 29058
  source 1..120: mol_type = other DNA

SEQ ID NO: 59013 - DNA, 120 bp, synthetic construct; identical to SEQ ID NO: 29059
  source 1..120: mol_type = other DNA

SEQ ID NO: 59014 - DNA, 120 bp, synthetic construct; identical to SEQ ID NO: 29060
  source 1..120: mol_type = other DNA

SEQ ID NO: 59015 - DNA, 120 bp, synthetic construct; identical to SEQ ID NO: 8714
  source 1..120: mol_type = other DNA

SEQ ID NO: 59016 - DNA, 120 bp, synthetic construct; identical to SEQ ID NO: 29062
  source 1..120: mol_type = other DNA

SEQ ID NO: 59017 - DNA, 120 bp, synthetic construct; identical to SEQ ID NO: 29063
  source 1..120: mol_type = other DNA

SEQ ID NO: 59018 - DNA, 120 bp, synthetic construct; identical to SEQ ID NO: 8715
  source 1..120: mol_type = other DNA

SEQ ID NO: 59019 - DNA, 120 bp, synthetic construct; identical to SEQ ID NO: 29065
  source 1..120: mol_type = other DNA

SEQ ID NO: 59020 - DNA, 120 bp, synthetic construct; identical to SEQ ID NO: 29066
  source 1..120: mol_type = other DNA

SEQ ID NO: 59021 - DNA, 120 bp, synthetic construct; identical to SEQ ID NO: 29067
  source 1..120: mol_type = other DNA

SEQ ID NO: 59022 - DNA, 120 bp, synthetic construct; identical to SEQ ID NO: 8716
  source 1..120: mol_type = other DNA

SEQ ID NO: 59023 - DNA, 120 bp, synthetic construct; identical to SEQ ID NO: 29069
  source 1..120: mol_type = other DNA

SEQ ID NO: 59024 - DNA, 120 bp, synthetic construct; identical to SEQ ID NO: 29070
  source 1..120: mol_type = other DNA

SEQ ID NO: 59025 - DNA, 120 bp, synthetic construct; identical to SEQ ID NO: 29071
  source 1..120: mol_type = other DNA

SEQ ID NO: 59026 - DNA, 120 bp, synthetic construct; identical to SEQ ID NO: 29072
  source 1..120: mol_type = other DNA

SEQ ID NO: 59027 - DNA, 120 bp, synthetic construct; identical to SEQ ID NO: 8717
  source 1..120: mol_type = other DNA

SEQ ID NO: 59028 - DNA, 120 bp, synthetic construct; identical to SEQ ID NO: 29074
  source 1..120: mol_type = other DNA

SEQ ID NO: 59029 - DNA, 120 bp, synthetic construct; identical to SEQ ID NO: 29075
  source 1..120: mol_type = other DNA

SEQ ID NO: 59030 - DNA, 120 bp, synthetic construct; identical to SEQ ID NO: 8718
  source 1..120: mol_type = other DNA

SEQ ID NO: 59031 - DNA, 120 bp, synthetic construct; identical to SEQ ID NO: 29077
  source 1..120: mol_type = other DNA

SEQ ID NO: 59032 - DNA, 120 bp, synthetic construct; identical to SEQ ID NO: 29078
  source 1..120: mol_type = other DNA

SEQ ID NO: 59033 - DNA, 120 bp, synthetic construct; identical to SEQ ID NO: 29079
  source 1..120: mol_type = other DNA

SEQ ID NO: 59034 - DNA, 120 bp, synthetic construct; identical to SEQ ID NO: 8719
  source 1..120: mol_type = other DNA

SEQ ID NO: 59035 - DNA, 120 bp, synthetic construct; identical to SEQ ID NO: 29081
  source 1..120: mol_type = other DNA

SEQ ID NO: 59036 - DNA, 120 bp, synthetic construct; identical to SEQ ID NO: 29082
  source 1..120: mol_type = other DNA

SEQ ID NO: 59037 - DNA, 120 bp, synthetic construct; identical to SEQ ID NO: 29083
  source 1..120: mol_type = other DNA

SEQ ID NO: 59038 - DNA, 120 bp, synthetic construct; identical to SEQ ID NO: 8720
  source 1..120: mol_type = other DNA

SEQ ID NO: 59039 - DNA, 120 bp, synthetic construct; identical to SEQ ID NO: 29085
  source 1..120: mol_type = other DNA

SEQ ID NO: 59040 - DNA, 120 bp, synthetic construct; identical to SEQ ID NO: 29086
  source 1..120: mol_type = other DNA

SEQ ID NO: 59041 - DNA, 120 bp, synthetic construct; identical to SEQ ID NO: 29087
  source 1..120: mol_type = other DNA

SEQ ID NO: 59042 - DNA, 120 bp, synthetic construct; identical to SEQ ID NO: 8721
  source 1..120: mol_type = other DNA

SEQ ID NO: 59043 - DNA, 120 bp, synthetic construct; identical to SEQ ID NO: 29089
  source 1..120: mol_type = other DNA

SEQ ID NO: 59044 - DNA, 120 bp, synthetic construct; identical to SEQ ID NO: 29090
  source 1..120: mol_type = other DNA

SEQ ID NO: 59045 - DNA, 120 bp, synthetic construct; identical to SEQ ID NO: 29091
  source 1..120: mol_type = other DNA

SEQ ID NO: 59046 - DNA, 120 bp, synthetic construct; identical to SEQ ID NO: 8722
  source 1..120: mol_type = other DNA

SEQ ID NO: 59047 - DNA, 120 bp, synthetic construct; identical to SEQ ID NO: 29093
  source 1..120: mol_type = other DNA

SEQ ID NO: 59048 - DNA, 120 bp, synthetic construct; identical to SEQ ID NO: 29094
  source 1..120: mol_type = other DNA

SEQ ID NO: 59049 - DNA, 120 bp, synthetic construct; identical to SEQ ID NO: 29095
  source 1..120: mol_type = other DNA

SEQ ID NO: 59050 - DNA, 120 bp, synthetic construct; identical to SEQ ID NO: 8723
  source 1..120: mol_type = other DNA

SEQ ID NO: 59051 - DNA, 120 bp, synthetic construct; identical to SEQ ID NO: 29097
  source 1..120: mol_type = other DNA

SEQ ID NO: 59052 - DNA, 120 bp, synthetic construct; identical to SEQ ID NO: 29098
  source 1..120: mol_type = other DNA

SEQ ID NO: 59053 - DNA, 120 bp, synthetic construct; identical to SEQ ID NO: 29099
  source 1..120: mol_type = other DNA

SEQ ID NO: 59054 - DNA, 120 bp, synthetic construct; identical to SEQ ID NO: 29100
  source 1..120: mol_type = other DNA

SEQ ID NO: 59055 - DNA, 120 bp, synthetic construct; identical to SEQ ID NO: 8724
  source 1..120: mol_type = other DNA

SEQ ID NO: 59056 - DNA, 120 bp, synthetic construct; identical to SEQ ID NO: 29102
  source 1..120: mol_type = other DNA

SEQ ID NO: 59057 - DNA, 120 bp, synthetic construct; identical to SEQ ID NO: 29103
  source 1..120: mol_type = other DNA

SEQ ID NO: 59058 - DNA, 120 bp, synthetic construct; identical to SEQ ID NO: 29104
  source 1..120: mol_type = other DNA

SEQ ID NO: 59059 - DNA, 120 bp, synthetic construct; identical to SEQ ID NO: 8725
  source 1..120: mol_type = other DNA

SEQ ID NO: 59060 - DNA, 120 bp, synthetic construct; identical to SEQ ID NO: 29106
  source 1..120: mol_type = other DNA

SEQ ID NO: 59061 - DNA, 120 bp, synthetic construct; identical to SEQ ID NO: 29107
  source 1..120: mol_type = other DNA

SEQ ID NO: 59062 - DNA, 120 bp, synthetic construct; identical to SEQ ID NO: 29108
  source 1..120: mol_type = other DNA

SEQ ID NO: 59063 - DNA, 120 bp, synthetic construct; identical to SEQ ID NO: 8726
  source 1..120: mol_type = other DNA

SEQ ID NO: 59064 - DNA, 120 bp, synthetic construct; identical to SEQ ID NO: 29110
  source 1..120: mol_type = other DNA

SEQ ID NO: 59065 - DNA, 120 bp, synthetic construct; identical to SEQ ID NO: 29111
  source 1..120: mol_type = other DNA

SEQ ID NO: 59066 - DNA, 120 bp, synthetic construct; identical to SEQ ID NO: 29112
  source 1..120: mol_type = other DNA

SEQ ID NO: 59067 - DNA, 120 bp, synthetic construct; identical to SEQ ID NO: 8727
  source 1..120: mol_type = other DNA

SEQ ID NO: 59068 - DNA, 120 bp, synthetic construct; identical to SEQ ID NO: 29114
  source 1..120: mol_type = other DNA

SEQ ID NO: 59069 - DNA, 120 bp, synthetic construct; identical to SEQ ID NO: 29115
  source 1..120: mol_type = other DNA

SEQ ID NO: 59070 - DNA, 120 bp, synthetic construct; identical to SEQ ID NO: 8728
  source 1..120: mol_type = other DNA

SEQ ID NO: 59071 - DNA, 120 bp, synthetic construct; identical to SEQ ID NO: 29117
  source 1..120: mol_type = other DNA

SEQ ID NO: 59072 - DNA, 120 bp, synthetic construct; identical to SEQ ID NO: 29118
  source 1..120: mol_type = other DNA

SEQ ID NO: 59073 - DNA, 120 bp, synthetic construct; identical to SEQ ID NO: 29119
  source 1..120: mol_type = other DNA

SEQ ID NO: 59074 - DNA, 120 bp, synthetic construct; identical to SEQ ID NO: 29120
  source 1..120: mol_type = other DNA

SEQ ID NO: 59075 - DNA, 120 bp, synthetic construct; identical to SEQ ID NO: 8729
  source 1..120: mol_type = other DNA

SEQ ID NO: 59076 - DNA, 120 bp, synthetic construct; identical to SEQ ID NO: 29122
  source 1..120: mol_type = other DNA

SEQ ID NO: 59077 - DNA, 120 bp, synthetic construct; identical to SEQ ID NO: 29123
  source 1..120: mol_type = other DNA

SEQ ID NO: 59078 - DNA, 120 bp, synthetic construct; identical to SEQ ID NO: 8730
  source 1..120: mol_type = other DNA

SEQ ID NO: 59079 - DNA, 120 bp, synthetic construct; identical to SEQ ID NO: 29125
  source 1..120: mol_type = other DNA

SEQ ID NO: 59080 - DNA, 120 bp, synthetic construct; identical to SEQ ID NO: 29126
  source 1..120: mol_type = other DNA

SEQ ID NO: 59081 - DNA, 120 bp, synthetic construct; identical to SEQ ID NO: 29127
  source 1..120: mol_type = other DNA

SEQ ID NO: 59082 - DNA, 120 bp, synthetic construct; identical to SEQ ID NO: 8731
  source 1..120: mol_type = other DNA

SEQ ID NO: 59083 - DNA, 120 bp, synthetic construct; identical to SEQ ID NO: 29129
  source 1..120: mol_type = other DNA

SEQ ID NO: 59084 - DNA, 120 bp, synthetic construct; identical to SEQ ID NO: 29130
  source 1..120: mol_type = other DNA

SEQ ID NO: 59085 - DNA, 120 bp, synthetic construct; identical to SEQ ID NO: 29131
  source 1..120: mol_type = other DNA

SEQ ID NO: 59086 - DNA, 120 bp, synthetic construct; identical to SEQ ID NO: 29132
  source 1..120: mol_type = other DNA

SEQ ID NO: 59087 - DNA, 120 bp, synthetic construct; identical to SEQ ID NO: 8732
  source 1..120: mol_type = other DNA

SEQ ID NO: 59088 - DNA, 120 bp, synthetic construct; identical to SEQ ID NO: 29134
  source 1..120: mol_type = other DNA

SEQ ID NO: 59089 - DNA, 120 bp, synthetic construct; identical to SEQ ID NO: 29135
  source 1..120: mol_type = other DNA

SEQ ID NO: 59090 - DNA, 120 bp, synthetic construct; identical to SEQ ID NO: 29136
  source 1..120: mol_type = other DNA

SEQ ID NO: 59091 - DNA, 120 bp, synthetic construct; identical to SEQ ID NO: 8733
  source 1..120: mol_type = other DNA

SEQ ID NO: 59092 - DNA, 120 bp, synthetic construct; identical to SEQ ID NO: 29138
  source 1..120: mol_type = other DNA

SEQ ID NO: 59093 - DNA, 120 bp, synthetic construct; identical to SEQ ID NO: 29139
  source 1..120: mol_type = other DNA

SEQ ID NO: 59094 - DNA, 120 bp, synthetic construct; identical to SEQ ID NO: 8734
  source 1..120: mol_type = other DNA

SEQ ID NO: 59095 - DNA, 120 bp, synthetic construct; identical to SEQ ID NO: 29141
  source 1..120: mol_type = other DNA

SEQ ID NO: 59096 - DNA, 120 bp, synthetic construct; identical to SEQ ID NO: 29142
  source 1..120: mol_type = other DNA

SEQ ID NO: 59097 - DNA, 120 bp, synthetic construct; identical to SEQ ID NO: 29143
  source 1..120: mol_type = other DNA

SEQ ID NO: 59098 - DNA, 120 bp, synthetic construct; identical to SEQ ID NO: 8735
  source 1..120: mol_type = other DNA

SEQ ID NO: 59099 - DNA, 120 bp, synthetic construct; identical to SEQ ID NO: 29145
  source 1..120: mol_type = other DNA

SEQ ID NO: 59100 - DNA, 120 bp, synthetic construct; identical to SEQ ID NO: 29146
  source 1..120: mol_type = other DNA

SEQ ID NO: 59101 - DNA, 120 bp, synthetic construct; identical to SEQ ID NO: 29147
  source 1..120: mol_type = other DNA

SEQ ID NO: 59102 - DNA, 120 bp, synthetic construct; identical to SEQ ID NO: 8736
  source 1..120: mol_type = other DNA

SEQ ID NO: 59103 - DNA, 120 bp, synthetic construct; identical to SEQ ID NO: 29149
  source 1..120: mol_type = other DNA

SEQ ID NO: 59104 - DNA, 120 bp, synthetic construct; identical to SEQ ID NO: 29150
  source 1..120: mol_type = other DNA

SEQ ID NO: 59105 - DNA, 120 bp, synthetic construct; identical to SEQ ID NO: 29151
  source 1..120: mol_type = other DNA

SEQ ID NO: 59106 - DNA, 120 bp, synthetic construct; identical to SEQ ID NO: 29152
  source 1..120: mol_type = other DNA

SEQ ID NO: 59107 - DNA, 120 bp, synthetic construct; identical to SEQ ID NO: 8737
  source 1..120: mol_type = other DNA

SEQ ID NO: 59108 - DNA, 120 bp, synthetic construct; identical to SEQ ID NO: 29154
  source 1..120: mol_type = other DNA

SEQ ID NO: 59109 - DNA, 120 bp, synthetic construct; identical to SEQ ID NO: 29155
  source 1..120: mol_type = other DNA

SEQ ID NO: 59110 - DNA, 120 bp, synthetic construct; identical to SEQ ID NO: 8738
  source 1..120: mol_type = other DNA

SEQ ID NO: 59111 - DNA, 120 bp, synthetic construct; identical to SEQ ID NO: 29157
  source 1..120: mol_type = other DNA

SEQ ID NO: 59112 - DNA, 120 bp, synthetic construct; identical to SEQ ID NO: 29158
  source 1..120: mol_type = other DNA

SEQ ID NO: 59113 - DNA, 120 bp, synthetic construct; identical to SEQ ID NO: 29159
  source 1..120: mol_type = other DNA

SEQ ID NO: 59114 - DNA, 120 bp, synthetic construct; identical to SEQ ID NO: 29160
  source 1..120: mol_type = other DNA

SEQ ID NO: 59115 - DNA, 120 bp, synthetic construct; identical to SEQ ID NO: 8739
  source 1..120: mol_type = other DNA

SEQ ID NO: 59116 - DNA, 120 bp, synthetic construct; identical to SEQ ID NO: 29162
  source 1..120: mol_type = other DNA

SEQ ID NO: 59117 - DNA, 120 bp, synthetic construct; identical to SEQ ID NO: 29163
  source 1..120: mol_type = other DNA

SEQ ID NO: 59118 - DNA, 120 bp, synthetic construct; identical to SEQ ID NO: 29164
  source 1..120: mol_type = other DNA

SEQ ID NO: 59119 - DNA, 120 bp, synthetic construct; identical to SEQ ID NO: 8740
  source 1..120: mol_type = other DNA

SEQ ID NO: 59120 - DNA, 120 bp, synthetic construct; identical to SEQ ID NO: 29166
  source 1..120: mol_type = other DNA

SEQ ID NO: 59121 - DNA, 120 bp, synthetic construct; identical to SEQ ID NO: 29167
  source 1..120: mol_type = other DNA

SEQ ID NO: 59122 - DNA, 120 bp, synthetic construct; identical to SEQ ID NO: 29168
  source 1..120: mol_type = other DNA

SEQ ID NO: 59123 - DNA, 120 bp, synthetic construct; identical to SEQ ID NO: 29169
  source 1..120: mol_type = other DNA

SEQ ID NO: 59124 - DNA, 120 bp, synthetic construct; identical to SEQ ID NO: 8741
  source 1..120: mol_type = other DNA

SEQ ID NO: 59125 - DNA, 120 bp, synthetic construct; identical to SEQ ID NO: 29171
  source 1..120: mol_type = other DNA

SEQ ID NO: 59126 - DNA, 120 bp, synthetic construct; identical to SEQ ID NO: 29172
  source 1..120: mol_type = other DNA

SEQ ID NO: 59127 - DNA, 120 bp, synthetic construct; identical to SEQ ID NO: 29173
  source 1..120: mol_type = other DNA

SEQ ID NO: 59128 - DNA, 120 bp, synthetic construct; identical to SEQ ID NO: 29174
  source 1..120: mol_type = other DNA

SEQ ID NO: 59129 - DNA, 120 bp, synthetic construct; identical to SEQ ID NO: 8742
  source 1..120: mol_type = other DNA

SEQ ID NO: 59130 - DNA, 120 bp, synthetic construct; identical to SEQ ID NO: 29176
  source 1..120: mol_type = other DNA

SEQ ID NO: 59131 - DNA, 120 bp, synthetic construct; identical to SEQ ID NO: 29177
  source 1..120: mol_type = other DNA

SEQ ID NO: 59132 - DNA, 120 bp, synthetic construct; identical to SEQ ID NO: 29178
  source 1..120: mol_type = other DNA

SEQ ID NO: 59133 - DNA, 120 bp, synthetic construct; identical to SEQ ID NO: 29179
  source 1..120: mol_type = other DNA

SEQ ID NO: 59134 - DNA, 120 bp, synthetic construct; identical to SEQ ID NO: 8743
  source 1..120: mol_type = other DNA

SEQ ID NO: 59135 - DNA, 120 bp, synthetic construct; identical to SEQ ID NO: 29181
  source 1..120: mol_type = other DNA

SEQ ID NO: 59136 - DNA, 120 bp, synthetic construct; identical to SEQ ID NO: 29182
  source 1..120: mol_type = other DNA

SEQ ID NO: 59137 - DNA, 120 bp, synthetic construct; identical to SEQ ID NO: 29183
  source 1..120: mol_type = other DNA

SEQ ID NO: 59138 - DNA, 120 bp, synthetic construct; identical to SEQ ID NO: 29184
  source 1..120: mol_type = other DNA

SEQ ID NO: 59139 - DNA, 120 bp, synthetic construct; identical to SEQ ID NO: 8744
  source 1..120: mol_type = other DNA

SEQ ID NO: 59140 - DNA, 120 bp, synthetic construct; identical to SEQ ID NO: 29186
  source 1..120: mol_type = other DNA

SEQ ID NO: 59141 - DNA, 120 bp, synthetic construct; identical to SEQ ID NO: 29187
  source 1..120: mol_type = other DNA

SEQ ID NO: 59142 - DNA, 120 bp, synthetic construct; identical to SEQ ID NO: 29188
  source 1..120: mol_type = other DNA

SEQ ID NO: 59143 - DNA, 120 bp, synthetic construct; identical to SEQ ID NO: 8745
  source 1..120: mol_type = other DNA

SEQ ID NO: 59144 - DNA, 120 bp, synthetic construct; identical to SEQ ID NO: 29190
  source 1..120: mol_type = other DNA

SEQ ID NO: 59145 - DNA, 120 bp, synthetic construct; identical to SEQ ID NO: 29191
  source 1..120: mol_type = other DNA

SEQ ID NO: 59146 - DNA, 120 bp, synthetic construct; identical to SEQ ID NO: 29192
  source 1..120: mol_type = other DNA

SEQ ID NO: 59147 - DNA, 120 bp, synthetic construct; identical to SEQ ID NO: 8746
  source 1..120: mol_type = other DNA

SEQ ID NO: 59148 - DNA, 120 bp, synthetic construct; identical to SEQ ID NO: 29194
  source 1..120: mol_type = other DNA

SEQ ID NO: 59149 - DNA, 120 bp, synthetic construct; identical to SEQ ID NO: 29195
  source 1..120: mol_type = other DNA

SEQ ID NO: 59150 - DNA, 120 bp, synthetic construct; identical to SEQ ID NO: 29196
  source 1..120: mol_type = other DNA

SEQ ID NO: 59151 - DNA, 120 bp, synthetic construct; identical to SEQ ID NO: 8747
  source 1..120: mol_type = other DNA

SEQ ID NO: 59152 - DNA, 120 bp, synthetic construct; identical to SEQ ID NO: 29198
  source 1..120: mol_type = other DNA

SEQ ID NO: 59153 - DNA, 120 bp, synthetic construct; identical to SEQ ID NO: 29199
  source 1..120: mol_type = other DNA

SEQ ID NO: 59154 - DNA, 120 bp, synthetic construct; identical to SEQ ID NO: 8748
  source 1..120: mol_type = other DNA

SEQ ID NO: 59155 - DNA, 120 bp, synthetic construct; identical to SEQ ID NO: 29201
  source 1..120: mol_type = other DNA

SEQ ID NO: 59156 - DNA, 120 bp, synthetic construct; identical to SEQ ID NO: 29202
  source 1..120: mol_type = other DNA

SEQ ID NO: 59157 - DNA, 120 bp, synthetic construct; identical to SEQ ID NO: 8749
  source 1..120: mol_type = other DNA

SEQ ID NO: 59158 - DNA, 120 bp, synthetic construct; identical to SEQ ID NO: 29204
  source 1..120: mol_type = other DNA

SEQ ID NO: 59159 - DNA, 120 bp, synthetic construct; identical to SEQ ID NO: 29205
  source 1..120: mol_type = other DNA

SEQ ID NO: 59160 - DNA, 120 bp, synthetic construct; identical to SEQ ID NO: 29206
  source 1..120: mol_type = other DNA

SEQ ID NO: 59161 - DNA, 120 bp, synthetic construct; identical to SEQ ID NO: 8750
  source 1..120: mol_type = other DNA

SEQ ID NO: 59162 - DNA, 120 bp, synthetic construct; identical to SEQ ID NO: 29208
  source 1..120: mol_type = other DNA

SEQ ID NO: 59163 - DNA, 120 bp, synthetic construct; identical to SEQ ID NO: 29209
  source 1..120: mol_type = other DNA

SEQ ID NO: 59164 - DNA, 120 bp, synthetic construct; identical to SEQ ID NO: 29210
  source 1..120: mol_type = other DNA

SEQ ID NO: 59165 - DNA, 120 bp, synthetic construct; identical to SEQ ID NO: 8751
  source 1..120: mol_type = other DNA

SEQ ID NO: 59166 - DNA, 120 bp, synthetic construct; identical to SEQ ID NO: 29212
  source 1..120: mol_type = other DNA

SEQ ID NO: 59167 - DNA, 120 bp, synthetic construct; identical to SEQ ID NO: 29213
  source 1..120: mol_type = other DNA

SEQ ID NO: 59168 - DNA, 120 bp, synthetic construct; identical to SEQ ID NO: 29214
  source 1..120: mol_type = other DNA

SEQ ID NO: 59169 - DNA, 120 bp, synthetic construct; identical to SEQ ID NO: 8752
  source 1..120: mol_type = other DNA

SEQ ID NO: 59170 - DNA, 120 bp, synthetic construct; identical to SEQ ID NO: 29216
  source 1..120: mol_type = other DNA

SEQ ID NO: 59171 - DNA, 120 bp, synthetic construct; identical to SEQ ID NO: 29217
  source 1..120: mol_type = other DNA

SEQ ID NO: 59172 - DNA, 120 bp, synthetic construct; identical to SEQ ID NO: 29218
  source 1..120: mol_type = other DNA

SEQ ID NO: 59173 - DNA, 120 bp, synthetic construct; identical to SEQ ID NO: 8753
  source 1..120: mol_type = other DNA

SEQ ID NO: 59174 - DNA, 120 bp, synthetic construct; identical to SEQ ID NO: 29220
  source 1..120: mol_type = other DNA

SEQ ID NO: 59175 - DNA, 120 bp, synthetic construct; identical to SEQ ID NO: 29221
  source 1..120: mol_type = other DNA

SEQ ID NO: 59176 - DNA, 120 bp, synthetic construct; identical to SEQ ID NO: 29222
  source 1..120: mol_type = other DNA

SEQ ID NO: 59177 - DNA, 120 bp, synthetic construct; identical to SEQ ID NO: 29223
  source 1..120: mol_type = other DNA

SEQ ID NO: 59178 - DNA, 120 bp, synthetic construct; identical to SEQ ID NO: 8754
  source 1..120: mol_type = other DNA

SEQ ID NO: 59179 - DNA, 120 bp, synthetic construct; identical to SEQ ID NO: 29225
  source 1..120: mol_type = other DNA

SEQ ID NO: 59180 - DNA, 120 bp, synthetic construct; identical to SEQ ID NO: 29226
  source 1..120: mol_type = other DNA

SEQ ID NO: 59181 - DNA, 120 bp, synthetic construct; identical to SEQ ID NO: 29227
  source 1..120: mol_type = other DNA

SEQ ID NO: 59182 - DNA, 120 bp, synthetic construct; identical to SEQ ID NO: 8755
  source 1..120: mol_type = other DNA

SEQ ID NO: 59183 - DNA, 120 bp, synthetic construct; identical to SEQ ID NO: 29229
  source 1..120: mol_type = other DNA

SEQ ID NO: 59184 - DNA, 120 bp, synthetic construct; identical to SEQ ID NO: 29230
  source 1..120: mol_type = other DNA

SEQ ID NO: 59185 - DNA, 120 bp, synthetic construct; identical to SEQ ID NO: 8756
  source 1..120: mol_type = other DNA

SEQ ID NO: 59186 - DNA, 120 bp, synthetic construct; identical to SEQ ID NO: 29232
  source 1..120: mol_type = other DNA

SEQ ID NO: 59187 - DNA, 120 bp, synthetic construct; identical to SEQ ID NO: 29233
  source 1..120: mol_type = other DNA

SEQ ID NO: 59188 - DNA, 120 bp, synthetic construct; identical to SEQ ID NO: 29234
  source 1..120: mol_type = other DNA

SEQ ID NO: 59189 - DNA, 120 bp, synthetic construct; identical to SEQ ID NO: 29235
  source 1..120: mol_type = other DNA

SEQ ID NO: 59190 - DNA, 120 bp, synthetic construct; identical to SEQ ID NO: 8757
  source 1..120: mol_type = other DNA

SEQ ID NO: 59191 - DNA, 120 bp, synthetic construct; identical to SEQ ID NO: 29237
  source 1..120: mol_type = other DNA

SEQ ID NO: 59192 - DNA, 120 bp, synthetic construct; identical to SEQ ID NO: 29238
  source 1..120: mol_type = other DNA

SEQ ID NO: 59193 - DNA, 120 bp, synthetic construct; identical to SEQ ID NO: 29239
  source 1..120: mol_type = other DNA

SEQ ID NO: 59194 - DNA, 120 bp, synthetic construct; identical to SEQ ID NO: 8758
  source 1..120: mol_type = other DNA

SEQ ID NO: 59195 - DNA, 120 bp, synthetic construct; identical to SEQ ID NO: 29241
  source 1..120: mol_type = other DNA

SEQ ID NO: 59196 - DNA, 120 bp, synthetic construct; identical to SEQ ID NO: 29242
  source 1..120: mol_type = other DNA

SEQ ID NO: 59197 - DNA, 120 bp, synthetic construct; identical to SEQ ID NO: 8759
  source 1..120: mol_type = other DNA

SEQ ID NO: 59198 - DNA, 120 bp, synthetic construct; identical to SEQ ID NO: 29244
  source 1..120: mol_type = other DNA

SEQ ID NO: 59199 - DNA, 120 bp, synthetic construct; identical to SEQ ID NO: 29245
  source 1..120: mol_type = other DNA

SEQ ID NO: 59200 - DNA, 120 bp, synthetic construct; identical to SEQ ID NO: 29246
  source 1..120: mol_type = other DNA

SEQ ID NO: 59201 - DNA, 120 bp, synthetic construct; identical to SEQ ID NO: 29247
  source 1..120: mol_type = other DNA

SEQ ID NO: 59202 - DNA, 120 bp, synthetic construct; identical to SEQ ID NO: 8760
  source 1..120: mol_type = other DNA

SEQ ID NO: 59203 - DNA, 120 bp, synthetic construct; identical to SEQ ID NO: 29249
  source 1..120: mol_type = other DNA

SEQ ID NO: 59204 - DNA, 120 bp, synthetic construct; identical to SEQ ID NO: 29250
  source 1..120: mol_type = other DNA

SEQ ID NO: 59205 - DNA, 120 bp, synthetic construct; identical to SEQ ID NO: 29251
  source 1..120: mol_type = other DNA

SEQ ID NO: 59206 - DNA, 120 bp, synthetic construct; identical to SEQ ID NO: 8761
  source 1..120: mol_type = other DNA

SEQ ID NO: 59207 - DNA, 120 bp, synthetic construct; identical to SEQ ID NO: 29253
  source 1..120: mol_type = other DNA

SEQ ID NO: 59208 - DNA, 120 bp, synthetic construct; identical to SEQ ID NO: 29254
  source 1..120: mol_type = other DNA

SEQ ID NO: 59209 - DNA, 120 bp, synthetic construct; identical to SEQ ID NO: 8762
  source 1..120: mol_type = other DNA

SEQ ID NO: 59210 - DNA, 120 bp, synthetic construct; identical to SEQ ID NO: 29256
  source 1..120: mol_type = other DNA

SEQ ID NO: 59211 - DNA, 120 bp, synthetic construct; identical to SEQ ID NO: 29257
  source 1..120: mol_type = other DNA

SEQ ID NO: 59212 - DNA, 120 bp, synthetic construct; identical to SEQ ID NO: 29258
  source 1..120: mol_type = other DNA

SEQ ID NO: 59213 - DNA, 120 bp, synthetic construct; identical to SEQ ID NO: 8763
  source 1..120: mol_type = other DNA

SEQ ID NO: 59214 - DNA, 120 bp, synthetic construct; identical to SEQ ID NO: 29260
  source 1..120: mol_type = other DNA

SEQ ID NO: 59215 - DNA, 120 bp, synthetic construct; identical to SEQ ID NO: 29261
  source 1..120: mol_type = other DNA

SEQ ID NO: 59216 - DNA, 120 bp, synthetic construct; identical to SEQ ID NO: 29262
  source 1..120: mol_type = other DNA

SEQ ID NO: 59217 - DNA, 120 bp, synthetic construct; identical to SEQ ID NO: 29263
  source 1..120: mol_type = other DNA

SEQ ID NO: 59218 - DNA, 120 bp, synthetic construct; identical to SEQ ID NO: 8764
  source 1..120: mol_type = other DNA

SEQ ID NO: 59219 - DNA, 120 bp, synthetic construct; identical to SEQ ID NO: 29265
  source 1..120: mol_type = other DNA

SEQ ID NO: 59220 - DNA, 120 bp, synthetic construct; identical to SEQ ID NO: 29266
  source 1..120: mol_type = other DNA

SEQ ID NO: 59221 - DNA, 120 bp, synthetic construct; identical to SEQ ID NO: 8765
  source 1..120: mol_type = other DNA

SEQ ID NO: 59222 - DNA, 120 bp, synthetic construct; identical to SEQ ID NO: 29268
  source 1..120: mol_type = other DNA

SEQ ID NO: 59223 - DNA, 120 bp, synthetic construct; identical to SEQ ID NO: 29269
  source 1..120: mol_type = other DNA

SEQ ID NO: 59224 - DNA, 120 bp, synthetic construct; identical to SEQ ID NO: 29270
  source 1..120: mol_type = other DNA

SEQ ID NO: 59225 - DNA, 120 bp, synthetic construct; identical to SEQ ID NO: 29271
  source 1..120: mol_type = other DNA

SEQ ID NO: 59226 - DNA, 120 bp, synthetic construct; identical to SEQ ID NO: 8766
  source 1..120: mol_type = other DNA

SEQ ID NO: 59227 - DNA, 120 bp, synthetic construct; identical to SEQ ID NO: 29273
  source 1..120: mol_type = other DNA

SEQ ID NO: 59228 - DNA, 120 bp, synthetic construct; identical to SEQ ID NO: 29274
  source 1..120: mol_type = other DNA

SEQ ID NO: 59229 - DNA, 120 bp, synthetic construct; identical to SEQ ID NO: 29275
  source 1..120: mol_type = other DNA

SEQ ID NO: 59230 - DNA, 120 bp, synthetic construct; identical to SEQ ID NO: 8767
  source 1..120: mol_type = other DNA

SEQ ID NO: 59231 - DNA, 120 bp, synthetic construct; identical to SEQ ID NO: 29277
  source 1..120: mol_type = other DNA

SEQ ID NO: 59232 - DNA, 120 bp, synthetic construct; identical to SEQ ID NO: 29278
  source 1..120: mol_type = other DNA

SEQ ID NO: 59233 - DNA, 120 bp, synthetic construct; identical to SEQ ID NO: 8768
  source 1..120: mol_type = other DNA

SEQ ID NO: 59234 - DNA, 120 bp, synthetic construct; identical to SEQ ID NO: 29280
  source 1..120: mol_type = other DNA

SEQ ID NO: 59235 - DNA, 120 bp, synthetic construct; identical to SEQ ID NO: 29281
  source 1..120: mol_type = other DNA

SEQ ID NO: 59236 - DNA, 120 bp, synthetic construct; identical to SEQ ID NO: 29282
  source 1..120: mol_type = other DNA

SEQ ID NO: 59237 - DNA, 120 bp, synthetic construct; identical to SEQ ID NO: 8769
  source 1..120: mol_type = other DNA

SEQ ID NO: 59238 - DNA, 120 bp, synthetic construct; identical to SEQ ID NO: 29284
  source 1..120: mol_type = other DNA

SEQ ID NO: 59239 - DNA, 120 bp, synthetic construct; identical to SEQ ID NO: 29285
  source 1..120: mol_type = other DNA

SEQ ID NO: 59240 - DNA, 120 bp, synthetic construct; identical to SEQ ID NO: 29286
  source 1..120: mol_type = other DNA

SEQ ID NO: 59241 - DNA, 120 bp, synthetic construct; identical to SEQ ID NO: 8770
  source 1..120: mol_type = other DNA

SEQ ID NO: 59242 - DNA, 120 bp, synthetic construct; identical to SEQ ID NO: 29288
  source 1..120: mol_type = other DNA

SEQ ID NO: 59243 - DNA, 120 bp, synthetic construct; identical to SEQ ID NO: 29289
  source 1..120: mol_type = other DNA

SEQ ID NO: 59244 - DNA, 120 bp, synthetic construct; identical to SEQ ID NO: 29290
  source 1..120: mol_type = other DNA

SEQ ID NO: 59245 - DNA, 120 bp, synthetic construct; identical to SEQ ID NO: 29291
  source 1..120: mol_type = other DNA

SEQ ID NO: 59246 - DNA, 120 bp, synthetic construct; identical to SEQ ID NO: 8771
  source 1..120: mol_type = other DNA

SEQ ID NO: 59247 - DNA, 120 bp, synthetic construct; identical to SEQ ID NO: 29293
  source 1..120: mol_type = other DNA

SEQ ID NO: 59248 - DNA, 120 bp, synthetic construct; identical to SEQ ID NO: 29294
  source 1..120: mol_type = other DNA

SEQ ID NO: 59249 - DNA, 120 bp, synthetic construct; identical to SEQ ID NO: 8772
  source 1..120: mol_type = other DNA

SEQ ID NO: 59250 - DNA, 120 bp, synthetic construct; identical to SEQ ID NO: 29296
  source 1..120: mol_type = other DNA

SEQ ID NO: 59251 - DNA, 120 bp, synthetic construct; identical to SEQ ID NO: 29297
  source 1..120: mol_type = other DNA

SEQ ID NO: 59252 - DNA, 120 bp, synthetic construct; identical to SEQ ID NO: 29298
  source 1..120: mol_type = other DNA

SEQ ID NO: 59253 - DNA, 120 bp, synthetic construct; identical to SEQ ID NO: 8773
  source 1..120: mol_type = other DNA

SEQ ID NO: 59254 - DNA, 120 bp, synthetic construct; identical to SEQ ID NO: 29300
  source 1..120: mol_type = other DNA

SEQ ID NO: 59255 - DNA, 120 bp, synthetic construct; identical to SEQ ID NO: 29301
  source 1..120: mol_type = other DNA

SEQ ID NO: 59256 - DNA, 120 bp, synthetic construct; identical to SEQ ID NO: 29302
  source 1..120: mol_type = other DNA

SEQ ID NO: 59257 - DNA, 120 bp, synthetic construct; identical to SEQ ID NO: 29303
  source 1..120: mol_type = other DNA

SEQ ID NO: 59258 - DNA, 120 bp, synthetic construct; identical to SEQ ID NO: 8774
  source 1..120: mol_type = other DNA

SEQ ID NO: 59259 - DNA, 120 bp, synthetic construct; identical to SEQ ID NO: 29305
  source 1..120: mol_type = other DNA

SEQ ID NO: 59260 - DNA, 120 bp, synthetic construct; identical to SEQ ID NO: 29306
  source 1..120: mol_type = other DNA

SEQ ID NO: 59261 - DNA, 120 bp, synthetic construct; identical to SEQ ID NO: 29307
  source 1..120: mol_type = other DNA

SEQ ID NO: 59262 - DNA, 120 bp, synthetic construct; identical to SEQ ID NO: 8775
  source 1..120: mol_type = other DNA

SEQ ID NO: 59263 - DNA, 120 bp, synthetic construct; identical to SEQ ID NO: 29309
  source 1..120: mol_type = other DNA

SEQ ID NO: 59264 - DNA, 120 bp, synthetic construct; identical to SEQ ID NO: 1705
  source 1..120: mol_type = other DNA

SEQ ID NO: 59265 - DNA, 120 bp, synthetic construct; identical to SEQ ID NO: 8776
  source 1..120: mol_type = other DNA

SEQ ID NO: 59266 - DNA, 120 bp, synthetic construct; identical to SEQ ID NO: 29312
  source 1..120: mol_type = other DNA

SEQ ID NO: 59267 - DNA, 120 bp, synthetic construct; identical to SEQ ID NO: 29313
  source 1..120: mol_type = other DNA

SEQ ID NO: 59268 - DNA, 120 bp, synthetic construct; identical to SEQ ID NO: 29314
  source 1..120: mol_type = other DNA

SEQ ID NO: 59269 - DNA, 120 bp, synthetic construct; identical to SEQ ID NO: 8777
  source 1..120: mol_type = other DNA

SEQ ID NO: 59270 - DNA, 120 bp, synthetic construct; identical to SEQ ID NO: 29316
  source 1..120: mol_type = other DNA

SEQ ID NO: 59271 - DNA, 120 bp, synthetic construct; identical to SEQ ID NO: 29317
  source 1..120: mol_type = other DNA

SEQ ID NO: 59272 - DNA, 120 bp, synthetic construct; identical to SEQ ID NO: 29318
  source 1..120: mol_type = other DNA

SEQ ID NO: 59273 - DNA, 120 bp, synthetic construct; identical to SEQ ID NO: 29319
  source 1..120: mol_type = other DNA

SEQ ID NO: 59274 - DNA, 120 bp, synthetic construct; identical to SEQ ID NO: 8778
  source 1..120: mol_type = other DNA

SEQ ID NO: 59275 - DNA, 120 bp, synthetic construct; identical to SEQ ID NO: 29321
  source 1..120: mol_type = other DNA

SEQ ID NO: 59276 - DNA, 120 bp, synthetic construct; identical to SEQ ID NO: 29322
  source 1..120: mol_type = other DNA

SEQ ID NO: 59277 - DNA, 120 bp, synthetic construct; identical to SEQ ID NO: 8779
  source 1..120: mol_type = other DNA

SEQ ID NO: 59278 - DNA, 120 bp, synthetic construct; identical to SEQ ID NO: 29324
  source 1..120: mol_type = other DNA

SEQ ID NO: 59279 - DNA, 120 bp, synthetic construct; identical to SEQ ID NO: 29325
  source 1..120: mol_type = other DNA

SEQ ID NO: 59280 - DNA, 120 bp, synthetic construct; identical to SEQ ID NO: 29326
  source 1..120: mol_type = other DNA

SEQ ID NO: 59281 - DNA, 120 bp, synthetic construct; identical to SEQ ID NO: 29327
  source 1..120: mol_type = other DNA

SEQ ID NO: 59282 - DNA, 120 bp, synthetic construct; identical to SEQ ID NO: 8780
  source 1..120: mol_type = other DNA

SEQ ID NO: 59283 - DNA, 120 bp, synthetic construct; identical to SEQ ID NO: 29329
  source 1..120: mol_type = other DNA

SEQ ID NO: 59284 - DNA, 120 bp, synthetic construct; identical to SEQ ID NO: 29330
  source 1..120: mol_type = other DNA

SEQ ID NO: 59285 - DNA, 120 bp, synthetic construct; identical to SEQ ID NO: 29331
  source 1..120: mol_type = other DNA

SEQ ID NO: 59286 - DNA, 120 bp, synthetic construct; identical to SEQ ID NO: 8781
  source 1..120: mol_type = other DNA

SEQ ID NO: 59287 - DNA, 120 bp, synthetic construct; identical to SEQ ID NO: 29333
  source 1..120: mol_type = other DNA

SEQ ID NO: 59288 - DNA, 120 bp, synthetic construct; identical to SEQ ID NO: 29334
  source 1..120: mol_type = other DNA

SEQ ID NO: 59289 - DNA, 120 bp, synthetic construct; identical to SEQ ID NO: 8782
  source 1..120: mol_type = other DNA

SEQ ID NO: 59290 - DNA, 120 bp, synthetic construct; identical to SEQ ID NO: 29336
  source 1..120: mol_type = other DNA

SEQ ID NO: 59291 - DNA, 120 bp, synthetic construct; identical to SEQ ID NO: 29337
  source 1..120: mol_type = other DNA

SEQ ID NO: 59292 - DNA, 120 bp, synthetic construct; identical to SEQ ID NO: 29338
  source 1..120: mol_type = other DNA

SEQ ID NO: 59293 - DNA, 120 bp, synthetic construct; identical to SEQ ID NO: 29339
  source 1..120: mol_type = other DNA

SEQ ID NO: 59294 - DNA, 120 bp, synthetic construct; identical to SEQ ID NO: 8783
  source 1..120: mol_type = other DNA

SEQ ID NO: 59295 - DNA, 120 bp, synthetic construct; identical to SEQ ID NO: 29341
  source 1..120: mol_type = other DNA

SEQ ID NO: 59296 - DNA, 120 bp, synthetic construct; identical to SEQ ID NO: 29342
  source 1..120: mol_type = other DNA

SEQ ID NO: 59297 - DNA, 120 bp, synthetic construct; identical to SEQ ID NO: 29343
  source 1..120: mol_type = other DNA

SEQ ID NO: 59298 - DNA, 120 bp, synthetic construct; identical to SEQ ID NO: 8784
  source 1..120: mol_type = other DNA

SEQ ID NO: 59299 - DNA, 120 bp, synthetic construct; identical to SEQ ID NO: 29345
  source 1..120: mol_type = other DNA

SEQ ID NO: 59300 - DNA, 120 bp, synthetic construct; identical to SEQ ID NO: 29346
  source 1..120: mol_type = other DNA

SEQ ID NO: 59301 - DNA, 120 bp, synthetic construct; identical to SEQ ID NO: 29347
  source 1..120: mol_type = other DNA

SEQ ID NO: 59302 - DNA, 120 bp, synthetic construct; identical to SEQ ID NO: 8785
  source 1..120: mol_type = other DNA

SEQ ID NO: 59303 - DNA, 120 bp, synthetic construct; identical to SEQ ID NO: 29349
  source 1..120: mol_type = other DNA

SEQ ID NO: 59304 - DNA, 120 bp, synthetic construct; identical to SEQ ID NO: 29350
  source 1..120: mol_type = other DNA

SEQ ID NO: 59305 - DNA, 120 bp, synthetic construct; identical to SEQ ID NO: 29351
  source 1..120: mol_type = other DNA

SEQ ID NO: 59306 - DNA, 120 bp, synthetic construct; identical to SEQ ID NO: 1715
  source 1..120: mol_type = other DNA

SEQ ID NO: 59307 - DNA, 120 bp, synthetic construct; identical to SEQ ID NO: 29353
  source 1..120: mol_type = other DNA

SEQ ID NO: 59308 - DNA, 120 bp, synthetic construct; identical to SEQ ID NO: 29354
  source 1..120: mol_type = other DNA

SEQ ID NO: 59309 - DNA, 120 bp, synthetic construct; identical to SEQ ID NO: 8787
  source 1..120: mol_type = other DNA

SEQ ID NO: 59310 - DNA, 120 bp, synthetic construct; identical to SEQ ID NO: 29356
  source 1..120: mol_type = other DNA

SEQ ID NO: 59311 - DNA, 120 bp, synthetic construct; identical to SEQ ID NO: 29357
  source 1..120: mol_type = other DNA

SEQ ID NO: 59312 - DNA, 120 bp, synthetic construct; identical to SEQ ID NO: 29358
  source 1..120: mol_type = other DNA

SEQ ID NO: 59313 - DNA, 120 bp, synthetic construct; identical to SEQ ID NO: 29359
  source 1..120: mol_type = other DNA

SEQ ID NO: 59314 - DNA, 120 bp, synthetic construct; identical to SEQ ID NO: 8788
  source 1..120: mol_type = other DNA

SEQ ID NO: 59315 - DNA, 120 bp, synthetic construct; identical to SEQ ID NO: 29361
  source 1..120: mol_type = other DNA

SEQ ID NO: 59316 - DNA, 120 bp, synthetic construct; identical to SEQ ID NO: 29362
  source 1..120: mol_type = other DNA

SEQ ID NO: 59317 - DNA, 120 bp, synthetic construct; identical to SEQ ID NO: 8789
  source 1..120: mol_type = other DNA

SEQ ID NO: 59318 - DNA, 120 bp, synthetic construct; identical to SEQ ID NO: 29364
  source 1..120: mol_type = other DNA

SEQ ID NO: 59319 - DNA, 120 bp, synthetic construct; identical to SEQ ID NO: 29365
  source 1..120: mol_type = other DNA

SEQ ID NO: 59320 - DNA, 120 bp, synthetic construct; identical to SEQ ID NO: 29366
  source 1..120: mol_type = other DNA

SEQ ID NO: 59321 - DNA, 120 bp, synthetic construct; identical to SEQ ID NO: 29367
  source 1..120: mol_type = other DNA

SEQ ID NO: 59322 - DNA, 120 bp, synthetic construct; identical to SEQ ID NO: 8790
  source 1..120: mol_type = other DNA

SEQ ID NO: 59323 - DNA, 120 bp, synthetic construct; identical to SEQ ID NO: 29369
  source 1..120: mol_type = other DNA

SEQ ID NO: 59324 - DNA, 120 bp, synthetic construct; identical to SEQ ID NO: 29370
  source 1..120: mol_type = other DNA

SEQ ID NO: 59325 - DNA, 120 bp, synthetic construct; identical to SEQ ID NO: 29371
  source 1..120: mol_type = other DNA

SEQ ID NO: 59326 - DNA, 120 bp, synthetic construct; identical to SEQ ID NO: 8791
  source 1..120: mol_type = other DNA

SEQ ID NO: 59327 - DNA, 120 bp, synthetic construct; identical to SEQ ID NO: 29373
  source 1..120: mol_type = other DNA

SEQ ID NO: 59328 - DNA, 120 bp, synthetic construct; identical to SEQ ID NO: 29374
  source 1..120: mol_type = other DNA

SEQ ID NO: 59329 - DNA, 120 bp, synthetic construct; identical to SEQ ID NO: 29375
  source 1..120: mol_type = other DNA

SEQ ID NO: 59330 - DNA, 120 bp, synthetic construct; identical to SEQ ID NO: 8792
  source 1..120: mol_type = other DNA

SEQ ID NO: 59331 - DNA, 120 bp, synthetic construct; identical to SEQ ID NO: 29377
  source 1..120: mol_type = other DNA

SEQ ID NO: 59332 - DNA, 120 bp, synthetic construct; identical to SEQ ID NO: 29378
  source 1..120: mol_type = other DNA

SEQ ID NO: 59333 - DNA, 120 bp, synthetic construct; identical to SEQ ID NO: 29379
  source 1..120: mol_type = other DNA

SEQ ID NO: 59334 - DNA, 120 bp, synthetic construct; identical to SEQ ID NO: 8793
  source 1..120: mol_type = other DNA

SEQ ID NO: 59335 - DNA, 120 bp, synthetic construct; identical to SEQ ID NO: 29381
  source 1..120: mol_type = other DNA

SEQ ID NO: 59336 - DNA, 120 bp, synthetic construct; identical to SEQ ID NO: 29382
  source 1..120: mol_type = other DNA

SEQ ID NO: 59337 - DNA, 120 bp, synthetic construct; identical to SEQ ID NO: 29383
  source 1..120: mol_type = other DNA

SEQ ID NO: 59338 - DNA, 120 bp, synthetic construct; identical to SEQ ID NO: 8794
  source 1..120: mol_type = other DNA

SEQ ID NO: 59339 - DNA, 120 bp, synthetic construct; identical to SEQ ID NO: 29385
  source 1..120: mol_type = other DNA

SEQ ID NO: 59340 - DNA, 120 bp, synthetic construct; identical to SEQ ID NO: 29386
  source 1..120: mol_type = other DNA

SEQ ID NO: 59341 - DNA, 120 bp, synthetic construct; identical to SEQ ID NO: 29387
  source 1..120: mol_type = other DNA

SEQ ID NO: 59342 - DNA, 120 bp, synthetic construct; identical to SEQ ID NO: 8795
  source 1..120: mol_type = other DNA

SEQ ID NO: 59343 - DNA, 120 bp, synthetic construct; identical to SEQ ID NO: 29389
  source 1..120: mol_type = other DNA

SEQ ID NO: 59344 - DNA, 120 bp, synthetic construct; identical to SEQ ID NO: 29390
  source 1..120: mol_type = other DNA

SEQ ID NO: 59345 - DNA, 120 bp, synthetic construct; identical to SEQ ID NO: 29391
  source 1..120: mol_type = other DNA

SEQ ID NO: 59346 - DNA, 120 bp, synthetic construct; identical to SEQ ID NO: 8796
  source 1..120: mol_type = other DNA

SEQ ID NO: 59347 - DNA, 120 bp, synthetic construct; identical to SEQ ID NO: 29393
  source 1..120: mol_type = other DNA

SEQ ID NO: 59348 - DNA, 120 bp, synthetic construct; identical to SEQ ID NO: 29394
  source 1..120: mol_type = other DNA

SEQ ID NO: 59349 - DNA, 120 bp, synthetic construct; identical to SEQ ID NO: 29395
  source 1..120: mol_type = other DNA

SEQ ID NO: 59350 - DNA, 120 bp, synthetic construct; identical to SEQ ID NO: 29396
  source 1..120: mol_type = other DNA

SEQ ID NO: 59351 - DNA, 120 bp, synthetic construct; identical to SEQ ID NO: 8797
  source 1..120: mol_type = other DNA

SEQ ID NO: 59352 - DNA, 120 bp, synthetic construct; identical to SEQ ID NO: 29398
  source 1..120: mol_type = other DNA

SEQ ID NO: 59353 - DNA, 120 bp, synthetic construct; identical to SEQ ID NO: 29399
  source 1..120: mol_type = other DNA

SEQ ID NO: 59354 - DNA, 120 bp, synthetic construct; identical to SEQ ID NO: 29400
  source 1..120: mol_type = other DNA

SEQ ID NO: 59355 - DNA, 120 bp, synthetic construct; identical to SEQ ID NO: 8798
  source 1..120: mol_type = other DNA

SEQ ID NO: 59356 - DNA, 120 bp, synthetic construct; identical to SEQ ID NO: 29402
  source 1..120: mol_type = other DNA

SEQ ID NO: 59357 - DNA, 120 bp, synthetic construct; identical to SEQ ID NO: 29403
  source 1..120: mol_type = other DNA

SEQ ID NO: 59358 - DNA, 120 bp, synthetic construct; identical to SEQ ID NO: 29404
  source 1..120: mol_type = other DNA

SEQ ID NO: 59359 - DNA, 120 bp, synthetic construct; identical to SEQ ID NO: 8799
  source 1..120: mol_type = other DNA

SEQ ID NO: 59360 - DNA, 120 bp, synthetic construct; identical to SEQ ID NO: 29406
  source 1..120: mol_type = other DNA

SEQ ID NO: 59361 - DNA, 120 bp, synthetic construct; identical to SEQ ID NO: 29407
  source 1..120: mol_type = other DNA

SEQ ID NO: 59362 - DNA, 120 bp, synthetic construct; identical to SEQ ID NO: 29408
  source 1..120: mol_type = other DNA

SEQ ID NO: 59363 - DNA, 120 bp, synthetic construct; identical to SEQ ID NO: 8800
  source 1..120: mol_type = other DNA

SEQ ID NO: 59364 - DNA, 120 bp, synthetic construct; identical to SEQ ID NO: 29410
  source 1..120: mol_type = other DNA

SEQ ID NO: 59365 - DNA, 120 bp, synthetic construct; identical to SEQ ID NO: 29411
  source 1..120: mol_type = other DNA

SEQ ID NO: 59366 - DNA, 120 bp, synthetic construct; identical to SEQ ID NO: 29412
  source 1..120: mol_type = other DNA

SEQ ID NO: 59367 - DNA, 120 bp, synthetic construct; identical to SEQ ID NO: 8801
  source 1..120: mol_type = other DNA

SEQ ID NO: 59368 - DNA, 120 bp, synthetic construct; identical to SEQ ID NO: 29414
  source 1..120: mol_type = other DNA

SEQ ID NO: 59369 - DNA, 120 bp, synthetic construct; identical to SEQ ID NO: 29415
  source 1..120: mol_type = other DNA

SEQ ID NO: 59370 - DNA, 120 bp, synthetic construct; identical to SEQ ID NO: 8802
  source 1..120: mol_type = other DNA

SEQ ID NO: 59371 - DNA, 120 bp, synthetic construct; identical to SEQ ID NO: 29417
  source 1..120: mol_type = other DNA

SEQ ID NO: 59372 - DNA, 120 bp, synthetic construct; identical to SEQ ID NO: 29418
  source 1..120: mol_type = other DNA

SEQ ID NO: 59373 - DNA, 120 bp, synthetic construct; identical to SEQ ID NO: 29419
  source 1..120: mol_type = other DNA

SEQ ID NO: 59374 - DNA, 120 bp, synthetic construct; identical to SEQ ID NO: 8803
  source 1..120: mol_type = other DNA

SEQ ID NO: 59375 - DNA, 120 bp, synthetic construct; identical to SEQ ID NO: 29421
  source 1..120: mol_type = other DNA

SEQ ID NO: 59376 - DNA, 120 bp, synthetic construct; identical to SEQ ID NO: 29422
  source 1..120: mol_type = other DNA

SEQ ID NO: 59377 - DNA, 120 bp, synthetic construct; identical to SEQ ID NO: 29423
  source 1..120: mol_type = other DNA

SEQ ID NO: 59378 - DNA, 120 bp, synthetic construct; identical to SEQ ID NO: 29424
  source 1..120: mol_type = other DNA

SEQ ID NO: 59379 - DNA, 120 bp, synthetic construct; identical to SEQ ID NO: 8804
  source 1..120: mol_type = other DNA

SEQ ID NO: 59380 - DNA, 120 bp, synthetic construct; identical to SEQ ID NO: 29426
  source 1..120: mol_type = other DNA

SEQ ID NO: 59381 - DNA, 120 bp, synthetic construct; identical to SEQ ID NO: 29427
  source 1..120: mol_type = other DNA

SEQ ID NO: 59382 - DNA, 120 bp, synthetic construct; identical to SEQ ID NO: 29428
  source 1..120: mol_type = other DNA

SEQ ID NO: 59383 - DNA, 120 bp, synthetic construct; identical to SEQ ID NO: 8805
  source 1..120: mol_type = other DNA

SEQ ID NO: 59384 - DNA, 120 bp, synthetic construct; identical to SEQ ID NO: 29430
  source 1..120: mol_type = other DNA

SEQ ID NO: 59385 - DNA, 120 bp, synthetic construct; identical to SEQ ID NO: 29431
  source 1..120: mol_type = other DNA

SEQ ID NO: 59386 - DNA, 120 bp, synthetic construct; identical to SEQ ID NO: 29432
  source 1..120: mol_type = other DNA

SEQ ID NO: 59387 - DNA, 120 bp, synthetic construct; identical to SEQ ID NO: 8806
  source 1..120: mol_type = other DNA

SEQ ID NO: 59388 - DNA, 120 bp, synthetic construct; identical to SEQ ID NO: 29434
  source 1..120: mol_type = other DNA

SEQ ID NO: 59389 - DNA, 120 bp, synthetic construct; identical to SEQ ID NO: 29435
  source 1..120: mol_type = other DNA

SEQ ID NO: 59390 - DNA, 120 bp, synthetic construct; identical to SEQ ID NO: 29436
  source 1..120: mol_type = other DNA

SEQ ID NO: 59391 - DNA, 120 bp, synthetic construct; identical to SEQ ID NO: 8807
  source 1..120: mol_type = other DNA

SEQ ID NO: 59392 - DNA, 120 bp, synthetic construct; identical to SEQ ID NO: 29438
  source 1..120: mol_type = other DNA

SEQ ID NO: 59393 - DNA, 120 bp, synthetic construct; identical to SEQ ID NO: 29439
  source 1..120: mol_type = other DNA

SEQ ID NO: 59394 - DNA, 120 bp, synthetic construct; identical to SEQ ID NO: 29440
  source 1..120: mol_type = other DNA

SEQ ID NO: 59395 - DNA, 120 bp, synthetic construct; identical to SEQ ID NO: 8808
  source 1..120: mol_type = other DNA

SEQ ID NO: 59396 - DNA, 120 bp, synthetic construct; identical to SEQ ID NO: 29442
  source 1..120: mol_type = other DNA

SEQ ID NO: 59397 - DNA, 120 bp, synthetic construct; identical to SEQ ID NO: 29443
  source 1..120: mol_type = other DNA

SEQ ID NO: 59398 - DNA, 120 bp, synthetic construct; identical to SEQ ID NO: 8809
  source 1..120: mol_type = other DNA

SEQ ID NO: 59399 - DNA, 120 bp, synthetic construct; identical to SEQ ID NO: 29445
  source 1..120: mol_type = other DNA

SEQ ID NO: 59400 - DNA, 120 bp, synthetic construct; identical to SEQ ID NO: 29446
  source 1..120: mol_type = other DNA

SEQ ID NO: 59401 - DNA, 120 bp, synthetic construct; identical to SEQ ID NO: 29447
  source 1..120: mol_type = other DNA

SEQ ID NO: 59402 - DNA, 120 bp, synthetic construct; identical to SEQ ID NO: 29448
  source 1..120: mol_type = other DNA

SEQ ID NO: 59403 - DNA, 120 bp, synthetic construct; identical to SEQ ID NO: 8810
  source 1..120: mol_type = other DNA

SEQ ID NO: 59404 - DNA, 120 bp, synthetic construct; identical to SEQ ID NO: 29450
  source 1..120: mol_type = other DNA

SEQ ID NO: 59405 - DNA, 120 bp, synthetic construct; identical to SEQ ID NO: 29451
  source 1..120: mol_type = other DNA

SEQ ID NO: 59406 - DNA, 120 bp, synthetic construct; identical to SEQ ID NO: 8811
  source 1..120: mol_type = other DNA

SEQ ID NO: 59407 - DNA, 120 bp, synthetic construct; identical to SEQ ID NO: 29453
  source 1..120: mol_type = other DNA

SEQ ID NO: 59408 - DNA, 120 bp, synthetic construct; identical to SEQ ID NO: 29454
  source 1..120: mol_type = other DNA

SEQ ID NO: 59409 - DNA, 120 bp, synthetic construct; identical to SEQ ID NO: 29455
  source 1..120: mol_type = other DNA

SEQ ID NO: 59410 - DNA, 120 bp, synthetic construct; identical to SEQ ID NO: 29456
  source 1..120: mol_type = other DNA

SEQ ID NO: 59411 - DNA, 120 bp, synthetic construct; identical to SEQ ID NO: 8812
  source 1..120: mol_type = other DNA

SEQ ID NO: 59412 - DNA, 120 bp, synthetic construct; identical to SEQ ID NO: 29458
  source 1..120: mol_type = other DNA

SEQ ID NO: 59413 - DNA, 120 bp, synthetic construct; identical to SEQ ID NO: 29459
  source 1..120: mol_type = other DNA

SEQ ID NO: 59414 - DNA, 120 bp, synthetic construct; identical to SEQ ID NO: 8813
  source 1..120: mol_type = other DNA

SEQ ID NO: 59415 - DNA, 120 bp, synthetic construct; identical to SEQ ID NO: 29461
  source 1..120: mol_type = other DNA

SEQ ID NO: 59416 - DNA, 120 bp, synthetic construct; identical to SEQ ID NO: 29462
  source 1..120: mol_type = other DNA

SEQ ID NO: 59417 - DNA, 120 bp, synthetic construct; identical to SEQ ID NO: 29463
  source 1..120: mol_type = other DNA

SEQ ID NO: 59418 - DNA, 120 bp, synthetic construct; identical to SEQ ID NO: 8814
  source 1..120: mol_type = other DNA

SEQ ID NO: 59419 - DNA, 120 bp, synthetic construct; identical to SEQ ID NO: 29465
  source 1..120: mol_type = other DNA

SEQ ID NO: 59420 - DNA, 120 bp, synthetic construct; identical to SEQ ID NO: 29466
  source 1..120: mol_type = other DNA

SEQ ID NO: 59421 - DNA, 120 bp, synthetic construct; identical to SEQ ID NO: 29467
  source 1..120: mol_type = other DNA

SEQ ID NO: 59422 - DNA, 120 bp, synthetic construct; identical to SEQ ID NO: 8815
  source 1..120: mol_type = other DNA

SEQ ID NO: 59423 - DNA, 120 bp, synthetic construct; identical to SEQ ID NO: 29469
  source 1..120: mol_type = other DNA

SEQ ID NO: 59424 - DNA, 120 bp, synthetic construct; identical to SEQ ID NO: 29470
  source 1..120: mol_type = other DNA

SEQ ID NO: 59425 - DNA, 120 bp, synthetic construct; identical to SEQ ID NO: 29471
  source 1..120: mol_type = other DNA

SEQ ID NO: 59426 - DNA, 120 bp, synthetic construct; identical to SEQ ID NO: 29472
  source 1..120: mol_type = other DNA

SEQ ID NO: 59427 - DNA, 120 bp, synthetic construct; identical to SEQ ID NO: 8816
  source 1..120: mol_type = other DNA

SEQ ID NO: 59428 - DNA, 120 bp, synthetic construct; identical to SEQ ID NO: 29474
  source 1..120: mol_type = other DNA

SEQ ID NO: 59429 - DNA, 120 bp, synthetic construct; identical to SEQ ID NO: 29475
  source 1..120: mol_type = other DNA

SEQ ID NO: 59430 - DNA, 120 bp, synthetic construct; identical to SEQ ID NO: 29476
  source 1..120: mol_type = other DNA

SEQ ID NO: 59431 - DNA, 120 bp, synthetic construct; identical to SEQ ID NO: 8817
  source 1..120: mol_type = other DNA

SEQ ID NO: 59432 - DNA, 120 bp, synthetic construct; identical to SEQ ID NO: 29478
  source 1..120: mol_type = other DNA

SEQ ID NO: 59433 - DNA, 120 bp, synthetic construct; identical to SEQ ID NO: 29479
  source 1..120: mol_type = other DNA

SEQ ID NO: 59434 - DNA, 120 bp, synthetic construct; identical to SEQ ID NO: 29480
  source 1..120: mol_type = other DNA

SEQ ID NO: 59435 - DNA, 120 bp, synthetic construct; identical to SEQ ID NO: 8818
  source 1..120: mol_type = other DNA

SEQ ID NO: 59436 - DNA, 120 bp, synthetic construct; identical to SEQ ID NO: 1745
  source 1..120: mol_type = other DNA

SEQ ID NO: 59437 - DNA, 120 bp, synthetic construct; identical to SEQ ID NO: 29483
  source 1..120: mol_type = other DNA

SEQ ID NO: 59438 - DNA, 120 bp, synthetic construct; identical to SEQ ID NO: 29484
  source 1..120: mol_type = other DNA

SEQ ID NO: 59439 - DNA, 120 bp, synthetic construct; identical to SEQ ID NO: 8819
  source 1..120: mol_type = other DNA

SEQ ID NO: 59440 - DNA, 120 bp, synthetic construct; identical to SEQ ID NO: 29486
  source 1..120: mol_type = other DNA

SEQ ID NO: 59441 - DNA, 120 bp, synthetic construct; identical to SEQ ID NO: 29487
  source 1..120: mol_type = other DNA

SEQ ID NO: 59442 - DNA, 120 bp, synthetic construct; identical to SEQ ID NO: 29488
  source 1..120: mol_type = other DNA

SEQ ID NO: 59443 - DNA, 120 bp, synthetic construct; identical to SEQ ID NO: 8820
  source 1..120: mol_type = other DNA

SEQ ID NO: 59444 - DNA, 120 bp, synthetic construct; identical to SEQ ID NO: 29490
  source 1..120: mol_type = other DNA

SEQ ID NO: 59445 - DNA, 120 bp, synthetic construct; identical to SEQ ID NO: 29491
  source 1..120: mol_type = other DNA

SEQ ID NO: 59446 - DNA, 120 bp, synthetic construct; identical to SEQ ID NO: 29492
  source 1..120: mol_type = other DNA

SEQ ID NO: 59447 - DNA, 120 bp, synthetic construct; identical to SEQ ID NO: 29493
  source 1..120: mol_type = other DNA

SEQ ID NO: 59448 - DNA, 120 bp, synthetic construct; identical to SEQ ID NO: 8821
  source 1..120: mol_type = other DNA

SEQ ID NO: 59449 - DNA, 120 bp, synthetic construct; identical to SEQ ID NO: 29495
  source 1..120: mol_type = other DNA

SEQ ID NO: 59450 - DNA, 120 bp, synthetic construct; identical to SEQ ID NO: 29496
  source 1..120: mol_type = other DNA

SEQ ID NO: 59451 - DNA, 120 bp, synthetic construct; identical to SEQ ID NO: 29497
  source 1..120: mol_type = other DNA

SEQ ID NO: 59452 - DNA, 120 bp, synthetic construct; identical to SEQ ID NO: 8822
  source 1..120: mol_type = other DNA

SEQ ID NO: 59453 - DNA, 120 bp, synthetic construct; identical to SEQ ID NO: 29499
  source 1..120: mol_type = other DNA

SEQ ID NO: 59454 - DNA, 120 bp, synthetic construct; identical to SEQ ID NO: 29500
  source 1..120: mol_type = other DNA

SEQ ID NO: 59455 - DNA, 120 bp, synthetic construct; identical to SEQ ID NO: 8823
  source 1..120: mol_type = other DNA

SEQ ID NO: 59456 - DNA, 120 bp, synthetic construct; identical to SEQ ID NO: 29502
  source 1..120: mol_type = other DNA

SEQ ID NO: 59457 - DNA, 120 bp, synthetic construct; identical to SEQ ID NO: 29503
  source 1..120: mol_type = other DNA

SEQ ID NO: 59458 - DNA, 120 bp, synthetic construct; identical to SEQ ID NO: 29504
  source 1..120: mol_type = other DNA

SEQ ID NO: 59459 - DNA, 120 bp, synthetic construct; identical to SEQ ID NO: 29505
  source 1..120: mol_type = other DNA

SEQ ID NO: 59460 - DNA, 120 bp, synthetic construct; identical to SEQ ID NO: 8824
  source 1..120: mol_type = other DNA

SEQ ID NO: 59461 - DNA, 120 bp, synthetic construct; identical to SEQ ID NO: 29507
  source 1..120: mol_type = other DNA

SEQ ID NO: 59462 - DNA, 120 bp, synthetic construct; identical to SEQ ID NO: 29508
  source 1..120: mol_type = other DNA

SEQ ID NO: 59463 - DNA, 120 bp, synthetic construct; identical to SEQ ID NO: 8825
  source 1..120: mol_type = other DNA

SEQ ID NO: 59464 - DNA, 120 bp, synthetic construct; identical to SEQ ID NO: 29510
  source 1..120: mol_type = other DNA

SEQ ID NO: 59465 - DNA, 120 bp, synthetic construct; identical to SEQ ID NO: 29511
  source 1..120: mol_type = other DNA

SEQ ID NO: 59466 - DNA, 120 bp, synthetic construct; identical to SEQ ID NO: 29512
  source 1..120: mol_type = other DNA

SEQ ID NO: 59467 - DNA, 120 bp, synthetic construct; identical to SEQ ID NO: 29513
  source 1..120: mol_type = other DNA

SEQ ID NO: 59468 - DNA, 120 bp, synthetic construct; identical to SEQ ID NO: 8826
  source 1..120: mol_type = other DNA

SEQ ID NO: 59469 - DNA, 120 bp, synthetic construct; identical to SEQ ID NO: 29515
  source 1..120: mol_type = other DNA

SEQ ID NO: 59470 - DNA, 120 bp, synthetic construct; identical to SEQ ID NO: 29516
  source 1..120: mol_type = other DNA

SEQ ID NO: 59471 - DNA, 120 bp, synthetic construct; identical to SEQ ID NO: 8827
  source 1..120: mol_type = other DNA

SEQ ID NO: 59472 - DNA, 120 bp, synthetic construct; identical to SEQ ID NO: 29518
  source 1..120: mol_type = other DNA

SEQ ID NO: 59473 - DNA, 120 bp, synthetic construct; identical to SEQ ID NO: 29519
  source 1..120: mol_type = other DNA

SEQ ID NO: 59474 - DNA, 120 bp, synthetic construct; identical to SEQ ID NO: 29520
  source 1..120: mol_type = other DNA

SEQ ID NO: 59475 - DNA, 120 bp, synthetic construct; identical to SEQ ID NO: 8828
  source 1..120: mol_type = other DNA

SEQ ID NO: 59476 - DNA, 120 bp, synthetic construct; identical to SEQ ID NO: 29522
  source 1..120: mol_type = other DNA

SEQ ID NO: 59477 - DNA, 120 bp, synthetic construct; identical to SEQ ID NO: 29523
  source 1..120: mol_type = other DNA

SEQ ID NO: 59478 - DNA, 120 bp, synthetic construct; identical to SEQ ID NO: 29524
  source 1..120: mol_type = other DNA

SEQ ID NO: 59479 - DNA, 120 bp, synthetic construct; identical to SEQ ID NO: 8829
  source 1..120: mol_type = other DNA

SEQ ID NO: 59480 - DNA, 120 bp, synthetic construct; identical to SEQ ID NO: 29526
  source 1..120: mol_type = other DNA

SEQ ID NO: 59481 - DNA, 120 bp, synthetic construct; identical to SEQ ID NO: 29527
  source 1..120: mol_type = other DNA

SEQ ID NO: 59482 - DNA, 120 bp, synthetic construct; identical to SEQ ID NO: 29528
  source 1..120: mol_type = other DNA

SEQ ID NO: 59483 - DNA, 120 bp, synthetic construct; identical to SEQ ID NO: 29529
  source 1..120: mol_type = other DNA

SEQ ID NO: 59484 - DNA, 120 bp, synthetic construct; identical to SEQ ID NO: 8830
  source 1..120: mol_type = other DNA

SEQ ID NO: 59485 - DNA, 120 bp, synthetic construct; identical to SEQ ID NO: 29531
  source 1..120: mol_type = other DNA

SEQ ID NO: 59486 - DNA, 120 bp, synthetic construct; identical to SEQ ID NO: 29532
  source 1..120: mol_type = other DNA

SEQ ID NO: 59487 - DNA, 120 bp, synthetic construct; identical to SEQ ID NO: 29533
  source 1..120: mol_type = other DNA

SEQ ID NO: 59488 - DNA, 120 bp, synthetic construct; identical to SEQ ID NO: 8831
  source 1..120: mol_type = other DNA

SEQ ID NO: 59489 - DNA, 120 bp, synthetic construct; identical to SEQ ID NO: 29535
  source 1..120: mol_type = other DNA

SEQ ID NO: 59490 - DNA, 120 bp, synthetic construct; identical to SEQ ID NO: 29536
  source 1..120: mol_type = other DNA

SEQ ID NO: 59491 - DNA, 120 bp, synthetic construct; identical to SEQ ID NO: 29537
  source 1..120: mol_type = other DNA

SEQ ID NO: 59492 - DNA, 120 bp, synthetic construct; identical to SEQ ID NO: 8832
  source 1..120: mol_type = other DNA

SEQ ID NO: 59493 - DNA, 120 bp, synthetic construct; identical to SEQ ID NO: 29539
  source 1..120: mol_type = other DNA

SEQ ID NO: 59494 - DNA, 120 bp, synthetic construct; identical to SEQ ID NO: 29540
  source 1..120: mol_type = other DNA

SEQ ID NO: 59495 - DNA, 120 bp, synthetic construct; identical to SEQ ID NO: 29541
  source 1..120: mol_type = other DNA

SEQ ID NO: 59496 - DNA, 120 bp, synthetic construct; identical to SEQ ID NO: 8833
  source 1..120: mol_type = other DNA

SEQ ID NO: 59497 - DNA, 120 bp, synthetic construct; identical to SEQ ID NO: 29543
  source 1..120: mol_type = other DNA

SEQ ID NO: 59498 - DNA, 120 bp, synthetic construct; identical to SEQ ID NO: 29544
  source 1..120: mol_type = other DNA

SEQ ID NO: 59499 - DNA, 120 bp, synthetic construct; identical to SEQ ID NO: 29545
  source 1..120: mol_type = other DNA

SEQ ID NO: 59500 - DNA, 120 bp, synthetic construct; identical to SEQ ID NO: 8834
  source 1..120: mol_type = other DNA

SEQ ID NO: 59501 - DNA, 120 bp, synthetic construct; identical to SEQ ID NO: 29547
  source 1..120: mol_type = other DNA

SEQ ID NO: 59502 - DNA, 120 bp, synthetic construct; identical to SEQ ID NO: 29548
  source 1..120: mol_type = other DNA

SEQ ID NO: 59503 - DNA, 120 bp, synthetic construct; identical to SEQ ID NO: 8835
  source 1..120: mol_type = other DNA

SEQ ID NO: 59504 - DNA, 120 bp, synthetic construct; identical to SEQ ID NO: 29550
  source 1..120: mol_type = other DNA

SEQ ID NO: 59505 - DNA, 120 bp, synthetic construct; identical to SEQ ID NO: 29551
  source 1..120: mol_type = other DNA

SEQ ID NO: 59506 - DNA, 120 bp, synthetic construct; identical to SEQ ID NO: 29552
  source 1..120: mol_type = other DNA

SEQ ID NO: 59507 - DNA, 120 bp, synthetic construct; identical to SEQ ID NO: 29553
  source 1..120: mol_type = other DNA

SEQ ID NO: 59508 - DNA, 120 bp, synthetic construct; identical to SEQ ID NO: 8836
  source 1..120: mol_type = other DNA

SEQ ID NO: 59509 - DNA, 120 bp, synthetic construct; identical to SEQ ID NO: 29555
  source 1..120: mol_type = other DNA

SEQ ID NO: 59510 - DNA, 120 bp, synthetic construct; identical to SEQ ID NO: 29556
  source 1..120: mol_type = other DNA

SEQ ID NO: 59511 - DNA, 120 bp, synthetic construct; identical to SEQ ID NO: 8837
  source 1..120: mol_type = other DNA

SEQ ID NO: 59512 - DNA, 120 bp, synthetic construct; identical to SEQ ID NO: 29558
  source 1..120: mol_type = other DNA

SEQ ID NO: 59513 - DNA, 120 bp, synthetic construct; identical to SEQ ID NO: 29559
  source 1..120: mol_type = other DNA

SEQ ID NO: 59514 - DNA, 120 bp, synthetic construct; identical to SEQ ID NO: 29560
  source 1..120: mol_type = other DNA

SEQ ID NO: 59515 - DNA, 120 bp, synthetic construct; identical to SEQ ID NO: 8838
  source 1..120: mol_type = other DNA

SEQ ID NO: 59516 - DNA, 120 bp, synthetic construct; identical to SEQ ID NO: 29562
  source 1..120: mol_type = other DNA

SEQ ID NO: 59517 - DNA, 120 bp, synthetic construct; identical to SEQ ID NO: 29563
  source 1..120: mol_type = other DNA

SEQ ID NO: 59518 - DNA, 120 bp, synthetic construct; identical to SEQ ID NO: 29564
  source 1..120: mol_type = other DNA

SEQ ID NO: 59519 - DNA, 120 bp, synthetic construct; identical to SEQ ID NO: 8839
  source 1..120: mol_type = other DNA

SEQ ID NO: 59520 - DNA, 120 bp, synthetic construct; identical to SEQ ID NO: 29566
  source 1..120: mol_type = other DNA

SEQ ID NO: 59521 - DNA, 120 bp, synthetic construct; identical to SEQ ID NO: 29567
  source 1..120: mol_type = other DNA

SEQ ID NO: 59522 - DNA, 120 bp, synthetic construct; identical to SEQ ID NO: 29568
  source 1..120: mol_type = other DNA

SEQ ID NO: 59523 - DNA, 120 bp, synthetic construct; identical to SEQ ID NO: 29569
  source 1..120: mol_type = other DNA

SEQ ID NO: 59524 - DNA, 120 bp, synthetic construct; identical to SEQ ID NO: 8840
  source 1..120: mol_type = other DNA

SEQ ID NO: 59525 - DNA, 120 bp, synthetic construct; identical to SEQ ID NO: 29571
  source 1..120: mol_type = other DNA

SEQ ID NO: 59526 - DNA, 120 bp, synthetic construct; identical to SEQ ID NO: 29572
  source 1..120: mol_type = other DNA

SEQ ID NO: 59527 - DNA, 120 bp, synthetic construct; identical to SEQ ID NO: 29573
  source 1..120: mol_type = other DNA

SEQ ID NO: 59528 - DNA, 120 bp, synthetic construct; identical to SEQ ID NO: 8841
  source 1..120: mol_type = other DNA

SEQ ID NO: 59529 - DNA, 120 bp, synthetic construct; identical to SEQ ID NO: 29575
  source 1..120: mol_type = other DNA

SEQ ID NO: 59530 - DNA, 120 bp, synthetic construct; identical to SEQ ID NO: 29576
  source 1..120: mol_type = other DNA

SEQ ID NO: 59531 - DNA, 120 bp, synthetic construct; identical to SEQ ID NO: 29577
  source 1..120: mol_type = other DNA

SEQ ID NO: 59532 - DNA, 120 bp, synthetic construct; identical to SEQ ID NO: 8842
  source 1..120: mol_type = other DNA

SEQ ID NO: 59533 - DNA, 120 bp, synthetic construct; identical to SEQ ID NO: 29579
  source 1..120: mol_type = other DNA

SEQ ID NO: 59534 - DNA, 120 bp, synthetic construct; identical to SEQ ID NO: 29580
  source 1..120: mol_type = other DNA

SEQ ID NO: 59535 - DNA, 120 bp, synthetic construct; identical to SEQ ID NO: 29581
  source 1..120: mol_type = other DNA

SEQ ID NO: 59536 - DNA, 120 bp, synthetic construct; identical to SEQ ID NO: 8843
  source 1..120: mol_type = other DNA

SEQ ID NO: 59537 - DNA, 120 bp, synthetic construct; identical to SEQ ID NO: 29583
  source 1..120: mol_type = other DNA

SEQ ID NO: 59538 - DNA, 120 bp, synthetic construct; identical to SEQ ID NO: 29584
  source 1..120: mol_type = other DNA

SEQ ID NO: 59539 - DNA, 120 bp, synthetic construct; identical to SEQ ID NO: 8844
  source 1..120: mol_type = other DNA

SEQ ID NO: 59540 - DNA, 120 bp, synthetic construct; identical to SEQ ID NO: 29586
  source 1..120: mol_type = other DNA

SEQ ID NO: 59541 - DNA, 120 bp, synthetic construct; identical to SEQ ID NO: 29587
  source 1..120: mol_type = other DNA

SEQ ID NO: 59542 - DNA, 120 bp, synthetic construct; identical to SEQ ID NO: 29588
  source 1..120: mol_type = other DNA

SEQ ID NO: 59543 - DNA, 120 bp, synthetic construct; identical to SEQ ID NO: 29589
  source 1..120: mol_type = other DNA

SEQ ID NO: 59544 - DNA, 120 bp, synthetic construct; identical to SEQ ID NO: 8845
  source 1..120: mol_type = other DNA

SEQ ID NO: 59545 - DNA, 120 bp, synthetic construct; identical to SEQ ID NO: 29591
  source 1..120: mol_type = other DNA

SEQ ID NO: 59546 - DNA, 120 bp, synthetic construct; identical to SEQ ID NO: 29592
  source 1..120: mol_type = other DNA

SEQ ID NO: 59547 - DNA, 120 bp, synthetic construct; identical to SEQ ID NO: 29593
  source 1..120: mol_type = other DNA

SEQ ID NO: 59548 - DNA, 120 bp, synthetic construct; identical to SEQ ID NO: 8846
  source 1..120: mol_type = other DNA

SEQ ID NO: 59549 - DNA, 120 bp, synthetic construct; identical to SEQ ID NO: 29595
  source 1..120: mol_type = other DNA

SEQ ID NO: 59550 - DNA, 120 bp, synthetic construct; identical to SEQ ID NO: 29596
  source 1..120: mol_type = other DNA

SEQ ID NO: 59551 - DNA, 120 bp, synthetic construct; identical to SEQ ID NO: 8847
  source 1..120: mol_type = other DNA

SEQ ID NO: 59552 - DNA, 120 bp, synthetic construct; identical to SEQ ID NO: 29598
  source 1..120: mol_type = other DNA

SEQ ID NO: 59553 - DNA, 120 bp, synthetic construct; identical to SEQ ID NO: 29599
  source 1..120: mol_type = other DNA

SEQ ID NO: 59554 - DNA, 120 bp, synthetic construct; identical to SEQ ID NO: 29600
  source 1..120: mol_type = other DNA

SEQ ID NO: 59555 - DNA, 120 bp, synthetic construct; identical to SEQ ID NO: 29601
  source 1..120: mol_type = other DNA

SEQ ID NO: 59556 - DNA, 120 bp, synthetic construct; identical to SEQ ID NO: 8848
  source 1..120: mol_type = other DNA

SEQ ID NO: 59557 - DNA, 120 bp, synthetic construct; identical to SEQ ID NO: 29603
  source 1..120: mol_type = other DNA

SEQ ID NO: 59558 - DNA, 120 bp, synthetic construct; identical to SEQ ID NO: 29604
  source 1..120: mol_type = other DNA

SEQ ID NO: 59559 - DNA, 120 bp, synthetic construct; identical to SEQ ID NO: 29605
  source 1..120: mol_type = other DNA

SEQ ID NO: 59560 - DNA, 120 bp, synthetic construct; identical to SEQ ID NO: 8849
  source 1..120: mol_type = other DNA

SEQ ID NO: 59561 - DNA, 120 bp, synthetic construct; identical to SEQ ID NO: 29607
  source 1..120: mol_type = other DNA

SEQ ID NO: 59562 - DNA, 120 bp, synthetic construct; identical to SEQ ID NO: 29608
  source 1..120: mol_type = other DNA

SEQ ID NO: 59563 - DNA, 120 bp, synthetic construct; identical to SEQ ID NO: 29609
  source 1..120: mol_type = other DNA

SEQ ID NO: 59564 - DNA, 120 bp, synthetic construct; identical to SEQ ID NO: 8850
  source 1..120: mol_type = other DNA

SEQ ID NO: 59565 - DNA, 120 bp, synthetic construct; identical to SEQ ID NO: 1775
  source 1..120: mol_type = other DNA

SEQ ID NO: 59566 - DNA, 120 bp, synthetic construct; identical to SEQ ID NO: 29612
  source 1..120: mol_type = other DNA

SEQ ID NO: 59567 - DNA, 120 bp, synthetic construct; identical to SEQ ID NO: 29613
  source 1..120: mol_type = other DNA

SEQ ID NO: 59568 - DNA, 120 bp, synthetic construct; identical to SEQ ID NO: 8851
  source 1..120: mol_type = other DNA

SEQ ID NO: 59569 - DNA, 120 bp, synthetic construct; identical to SEQ ID NO: 29615
  source 1..120: mol_type = other DNA

SEQ ID NO: 59570 - DNA, 120 bp, synthetic construct; identical to SEQ ID NO: 29616
  source 1..120: mol_type = other DNA

SEQ ID NO: 59571 - DNA, 120 bp, synthetic construct; identical to SEQ ID NO: 8852
  source 1..120: mol_type = other DNA

SEQ ID NO: 59572 - DNA, 120 bp, synthetic construct; identical to SEQ ID NO: 29618
  source 1..120: mol_type = other DNA

SEQ ID NO: 59573 - DNA, 120 bp, synthetic construct; identical to SEQ ID NO: 29619
  source 1..120: mol_type = other DNA

SEQ ID NO: 59574 - DNA, 120 bp, synthetic construct; identical to SEQ ID NO: 29620
  source 1..120: mol_type = other DNA

SEQ ID NO: 59575 - DNA, 120 bp, synthetic construct; identical to SEQ ID NO: 29621
  source 1..120: mol_type = other DNA

SEQ ID NO: 59576 - DNA, 120 bp, synthetic construct; identical to SEQ ID NO: 8853
  source 1..120: mol_type = other DNA

SEQ ID NO: 59577 - DNA, 120 bp, synthetic construct; identical to SEQ ID NO: 29623
  source 1..120: mol_type = other DNA

SEQ ID NO: 59578 - DNA, 120 bp, synthetic construct; identical to SEQ ID NO: 29624
  source 1..120: mol_type = other DNA

SEQ ID NO: 59579 - DNA, 120 bp, synthetic construct; identical to SEQ ID NO: 8854
  source 1..120: mol_type = other DNA

SEQ ID NO: 59580 - DNA, 120 bp, synthetic construct; identical to SEQ ID NO: 29626
  source 1..120: mol_type = other DNA

SEQ ID NO: 59581 - DNA, 120 bp, synthetic construct; identical to SEQ ID NO: 29627
  source 1..120: mol_type = other DNA

SEQ ID NO: 59582 - DNA, 120 bp, synthetic construct; identical to SEQ ID NO: 29628
  source 1..120: mol_type = other DNA

SEQ ID NO: 59583 - DNA, 120 bp, synthetic construct; identical to SEQ ID NO: 8855
  source 1..120: mol_type = other DNA

SEQ ID NO: 59584 - DNA, 120 bp, synthetic construct; identical to SEQ ID NO: 29630
  source 1..120: mol_type = other DNA

SEQ ID NO: 59585 - DNA, 120 bp, synthetic construct; identical to SEQ ID NO: 29631
  source 1..120: mol_type = other DNA

SEQ ID NO: 59586 - DNA, 120 bp, synthetic construct; identical to SEQ ID NO: 29632
  source 1..120: mol_type = other DNA

SEQ ID NO: 59587 - DNA, 120 bp, synthetic construct; identical to SEQ ID NO: 8856
  source 1..120: mol_type = other DNA

SEQ ID NO: 59588 - DNA, 120 bp, synthetic construct; identical to SEQ ID NO: 29634
  source 1..120: mol_type = other DNA

SEQ ID NO: 59589 - DNA, 120 bp, synthetic construct; identical to SEQ ID NO: 29635
  source 1..120: mol_type = other DNA

SEQ ID NO: 59590 - DNA, 120 bp, synthetic construct; identical to SEQ ID NO: 29636
  source 1..120: mol_type = other DNA

SEQ ID NO: 59591 - DNA, 120 bp, synthetic construct; identical to SEQ ID NO: 8857
  source 1..120: mol_type = other DNA

SEQ ID NO: 59592 - DNA, 120 bp, synthetic construct; identical to SEQ ID NO: 29638
  source 1..120: mol_type = other DNA

SEQ ID NO: 59593 - DNA, 120 bp, synthetic construct; identical to SEQ ID NO: 29639
  source 1..120: mol_type = other DNA

SEQ ID NO: 59594 - DNA, 120 bp, synthetic construct; identical to SEQ ID NO: 29640
  source 1..120: mol_type = other DNA

SEQ ID NO: 59595 - DNA, 120 bp, synthetic construct; identical to SEQ ID NO: 8858
  source 1..120: mol_type = other DNA

SEQ ID NO: 59596 - DNA, 120 bp, synthetic construct; identical to SEQ ID NO: 29642
  source 1..120: mol_type = other DNA

SEQ ID NO: 59597 - DNA, 120 bp, synthetic construct; identical to SEQ ID NO: 29643
  source 1..120: mol_type = other DNA

SEQ ID NO: 59598 - DNA, 120 bp, synthetic construct; identical to SEQ ID NO: 29644
  source 1..120: mol_type = other DNA

SEQ ID NO: 59599 - DNA, 120 bp, synthetic construct; identical to SEQ ID NO: 8859
  source 1..120: mol_type = other DNA

SEQ ID NO: 59600 - DNA, 120 bp, synthetic construct; identical to SEQ ID NO: 29646
  source 1..120: mol_type = other DNA

SEQ ID NO: 59601 - DNA, 120 bp, synthetic construct; identical to SEQ ID NO: 29647
  source 1..120: mol_type = other DNA

SEQ ID NO: 59602 - DNA, 120 bp, synthetic construct; identical to SEQ ID NO: 29648
  source 1..120: mol_type = other DNA

SEQ ID NO: 59603 - DNA, 120 bp, synthetic construct; identical to SEQ ID NO: 8860
  source 1..120: mol_type = other DNA

SEQ ID NO: 59604 - DNA, 120 bp, synthetic construct; identical to SEQ ID NO: 29650
  source 1..120: mol_type = other DNA

SEQ ID NO: 59605 - DNA, 120 bp, synthetic construct; identical to SEQ ID NO: 29651
  source 1..120: mol_type = other DNA

SEQ ID NO: 59606 - DNA, 120 bp, synthetic construct; identical to SEQ ID NO: 8861
  source 1..120: mol_type = other DNA

SEQ ID NO: 59607 - DNA, 120 bp, synthetic construct; identical to SEQ ID NO: 29653
  source 1..120: mol_type = other DNA

SEQ ID NO: 59608 - DNA, 120 bp, synthetic construct; identical to SEQ ID NO: 29654
  source 1..120: mol_type = other DNA

SEQ ID NO: 59609 - DNA, 120 bp, synthetic construct; identical to SEQ ID NO: 1785
  source 1..120: mol_type = other DNA

SEQ ID NO: 59610 - DNA, 120 bp, synthetic construct; identical to SEQ ID NO: 29656
  source 1..120: mol_type = other DNA

SEQ ID NO: 59611 - DNA, 120 bp, synthetic construct; identical to SEQ ID NO: 29657
  source 1..120: mol_type = other DNA

SEQ ID NO: 59612 - DNA, 120 bp, synthetic construct; identical to SEQ ID NO: 8863
  source 1..120: mol_type = other DNA

SEQ ID NO: 59613 - DNA, 120 bp, synthetic construct; identical to SEQ ID NO: 29659
  source 1..120: mol_type = other DNA

SEQ ID NO: 59614 - DNA, 120 bp, synthetic construct; identical to SEQ ID NO: 29660
  source 1..120: mol_type = other DNA

SEQ ID NO: 59615 - DNA, 120 bp, synthetic construct; identical to SEQ ID NO: 8864
  source 1..120: mol_type = other DNA

SEQ ID NO: 59616 - DNA, 120 bp, synthetic construct; identical to SEQ ID NO: 29662
  source 1..120: mol_type = other DNA

SEQ ID NO: 59617 - DNA, 120 bp, synthetic construct; identical to SEQ ID NO: 29663
  source 1..120: mol_type = other DNA

SEQ ID NO: 59618 - DNA, 120 bp, synthetic construct; identical to SEQ ID NO: 29664
  source 1..120: mol_type = other DNA

SEQ ID NO: 59619 - DNA, 120 bp, synthetic construct; identical to SEQ ID NO: 8865
  source 1..120: mol_type = other DNA

SEQ ID NO: 59620 - DNA, 120 bp, synthetic construct; identical to SEQ ID NO: 29666
  source 1..120: mol_type = other DNA

SEQ ID NO: 59621 - DNA, 120 bp, synthetic construct; identical to SEQ ID NO: 29667
  source 1..120: mol_type = other DNA

SEQ ID NO: 59622 - DNA, 120 bp, synthetic construct; identical to SEQ ID NO: 29668
  source 1..120: mol_type = other DNA

SEQ ID NO: 59623 - DNA, 120 bp, synthetic construct; identical to SEQ ID NO: 8866
  source 1..120: mol_type = other DNA

SEQ ID NO: 59624 - DNA, 120 bp, synthetic construct; identical to SEQ ID NO: 29670
  source 1..120: mol_type = other DNA

SEQ ID NO: 59625 - DNA, 120 bp, synthetic construct; identical to SEQ ID NO: 29671
  source 1..120: mol_type = other DNA

SEQ ID NO: 59626 - DNA, 120 bp, synthetic construct; identical to SEQ ID NO: 29672
  source 1..120: mol_type = other DNA

SEQ ID NO: 59627 - DNA, 120 bp, synthetic construct; identical to SEQ ID NO: 29673
  source 1..120: mol_type = other DNA

SEQ ID NO: 59628 - DNA, 120 bp, synthetic construct; identical to SEQ ID NO: 8867
  source 1..120: mol_type = other DNA

SEQ ID NO: 59629 - DNA, 120 bp, synthetic construct; identical to SEQ ID NO: 29675
  source 1..120: mol_type = other DNA

SEQ ID NO: 59630 - DNA, 120 bp, synthetic construct; identical to SEQ ID NO: 29676
  source 1..120: mol_type = other DNA

SEQ ID NO: 59631 - DNA, 120 bp, synthetic construct; identical to SEQ ID NO: 8868
  source 1..120: mol_type = other DNA

SEQ ID NO: 59632 - DNA, 120 bp, synthetic construct; identical to SEQ ID NO: 29678
  source 1..120: mol_type = other DNA

SEQ ID NO: 59633 - DNA, 120 bp, synthetic construct; identical to SEQ ID NO: 29679
  source 1..120: mol_type = other DNA

SEQ ID NO: 59634 - DNA, 120 bp, synthetic construct; identical to SEQ ID NO: 29680
  source 1..120: mol_type = other DNA

SEQ ID NO: 59635 - DNA, 120 bp, synthetic construct; identical to SEQ ID NO: 8869
  source 1..120: mol_type = other DNA

SEQ ID NO: 59636 - DNA, 120 bp, synthetic construct; identical to SEQ ID NO: 29682
  source 1..120: mol_type = other DNA

SEQ ID NO: 59637 - DNA, 120 bp, synthetic construct; identical to SEQ ID NO: 29683
  source 1..120: mol_type = other DNA

SEQ ID NO: 59638 - DNA, 120 bp, synthetic construct; identical to SEQ ID NO: 29684
  source 1..120: mol_type = other DNA

SEQ ID NO: 59639 - DNA, 120 bp, synthetic construct; identical to SEQ ID NO: 8870
  source 1..120: mol_type = other DNA

SEQ ID NO: 59640 - DNA, 120 bp, synthetic construct; identical to SEQ ID NO: 29686
  source 1..120: mol_type = other DNA

SEQ ID NO: 59641 - DNA, 120 bp, synthetic construct; identical to SEQ ID NO: 29687
  source 1..120: mol_type = other DNA

SEQ ID NO: 59642 - DNA, 120 bp, synthetic construct; identical to SEQ ID NO: 29688
  source 1..120: mol_type = other DNA

SEQ ID NO: 59643 - DNA, 120 bp, synthetic construct; identical to SEQ ID NO: 29689
  source 1..120: mol_type = other DNA

SEQ ID NO: 59644 - DNA, 120 bp, synthetic construct; identical to SEQ ID NO: 8871
  source 1..120: mol_type = other DNA

SEQ ID NO: 59645 - DNA, 120 bp, synthetic construct; identical to SEQ ID NO: 29691
  source 1..120: mol_type = other DNA

SEQ ID NO: 59646 - DNA, 120 bp, synthetic construct; identical to SEQ ID NO: 29692
  source 1..120: mol_type = other DNA

SEQ ID NO: 59647 - DNA, 120 bp, synthetic construct; identical to SEQ ID NO: 8872
  source 1..120: mol_type = other DNA

SEQ ID NO: 59648 - DNA, 120 bp, synthetic construct; identical to SEQ ID NO: 29694
  source 1..120: mol_type = other DNA

SEQ ID NO: 59649 - DNA, 120 bp, synthetic construct; identical to SEQ ID NO: 29695
  source 1..120: mol_type = other DNA

SEQ ID NO: 59650 - DNA, 120 bp, synthetic construct; identical to SEQ ID NO: 29696
  source 1..120: mol_type = other DNA

SEQ ID NO: 59651 - DNA, 120 bp, synthetic construct; identical to SEQ ID NO: 29697
  source 1..120: mol_type = other DNA

SEQ ID NO: 59652 - DNA, 120 bp, synthetic construct; identical to SEQ ID NO: 8873
  source 1..120: mol_type = other DNA

SEQ ID NO: 59653 - DNA, 120 bp, synthetic construct; identical to SEQ ID NO: 1795
  source 1..120: mol_type = other DNA

SEQ ID NO: 59654 - DNA, 120 bp, synthetic construct; identical to SEQ ID NO: 29700
  source 1..120: mol_type = other DNA

SEQ ID NO: 59655 - DNA, 120 bp, synthetic construct; identical to SEQ ID NO: 8874
  source 1..120: mol_type = other DNA

SEQ ID NO: 59656 - DNA, 120 bp, synthetic construct; identical to SEQ ID NO: 29702
  source 1..120: mol_type = other DNA

SEQ ID NO: 59657 - DNA, 120 bp, synthetic construct; identical to SEQ ID NO: 29703
  source 1..120: mol_type = other DNA

SEQ ID NO: 59658 - DNA, 120 bp, synthetic construct; identical to SEQ ID NO: 29704
  source 1..120: mol_type = other DNA

SEQ ID NO: 59659 - DNA, 120 bp, synthetic construct; identical to SEQ ID NO: 29705
  source 1..120: mol_type = other DNA

SEQ ID NO: 59660 - DNA, 120 bp, synthetic construct; identical to SEQ ID NO: 8875
  source 1..120: mol_type = other DNA

SEQ ID NO: 59661 - DNA, 120 bp, synthetic construct; identical to SEQ ID NO: 29707
  source 1..120: mol_type = other DNA

SEQ ID NO: 59662 - DNA, 120 bp, synthetic construct; identical to SEQ ID NO: 29708
  source 1..120: mol_type = other DNA

SEQ ID NO: 59663 - DNA, 120 bp, synthetic construct; identical to SEQ ID NO: 29709
  source 1..120: mol_type = other DNA

SEQ ID NO: 59664 - DNA, 120 bp, synthetic construct; identical to SEQ ID NO: 29710
  source 1..120: mol_type = other DNA

SEQ ID NO: 59665 - DNA, 120 bp, synthetic construct; identical to SEQ ID NO: 8876
  source 1..120: mol_type = other DNA

SEQ ID NO: 59666 - DNA, 120 bp, synthetic construct; identical to SEQ ID NO: 29712
  source 1..120: mol_type = other DNA

SEQ ID NO: 59667 - DNA, 120 bp, synthetic construct; identical to SEQ ID NO: 29713
  source 1..120: mol_type = other DNA

SEQ ID NO: 59668 - DNA, 120 bp, synthetic construct; identical to SEQ ID NO: 29714
  source 1..120: mol_type = other DNA

SEQ ID NO: 59669 - DNA, 120 bp, synthetic construct; identical to SEQ ID NO: 8877
  source 1..120: mol_type = other DNA

SEQ ID NO: 59670 - DNA, 120 bp, synthetic construct; identical to SEQ ID NO: 29716
  source 1..120: mol_type = other DNA

SEQ ID NO: 59671 - DNA, 120 bp, synthetic construct; identical to SEQ ID NO: 29717
  source 1..120: mol_type = other DNA

SEQ ID NO: 59672 - DNA, 120 bp, synthetic construct; identical to SEQ ID NO: 29718
  source 1..120: mol_type = other DNA

SEQ ID NO: 59673 - DNA, 120 bp, synthetic construct; identical to SEQ ID NO: 8878
  source 1..120: mol_type = other DNA

SEQ ID NO: 59674 - DNA, 120 bp, synthetic construct; identical to SEQ ID NO: 29720
  source 1..120: mol_type = other DNA

SEQ ID NO: 59675 - DNA, 120 bp, synthetic construct; identical to SEQ ID NO: 29721
  source 1..120: mol_type = other DNA

SEQ ID NO: 59676 - DNA, 120 bp, synthetic construct; identical to SEQ ID NO: 29722
  source 1..120: mol_type = other DNA

SEQ ID NO: 59677 - DNA, 120 bp, synthetic construct; identical to SEQ ID NO: 29723
  source 1..120: mol_type = other DNA

SEQ ID NO: 59678 - DNA, 120 bp, synthetic construct; identical to SEQ ID NO: 8879
  source 1..120: mol_type = other DNA

SEQ ID NO: 59679 - DNA, 120 bp, synthetic construct; identical to SEQ ID NO: 29725
  source 1..120: mol_type = other DNA

SEQ ID NO: 59680 - DNA, 120 bp, synthetic construct; identical to SEQ ID NO: 29726
  source 1..120: mol_type = other DNA

SEQ ID NO: 59681 - DNA, 120 bp, synthetic construct; identical to SEQ ID NO: 8880
  source 1..120: mol_type = other DNA

SEQ ID NO: 59682 - DNA, 120 bp, synthetic construct; identical to SEQ ID NO: 29728
  source 1..120: mol_type = other DNA

SEQ ID NO: 59683 - DNA, 120 bp, synthetic construct; identical to SEQ ID NO: 29729
  source 1..120: mol_type = other DNA

SEQ ID NO: 59684 - DNA, 120 bp, synthetic construct; identical to SEQ ID NO: 29730
  source 1..120: mol_type = other DNA

SEQ ID NO: 59685 - DNA, 120 bp, synthetic construct; identical to SEQ ID NO: 8881
  source 1..120: mol_type = other DNA

SEQ ID NO: 59686 - DNA, 120 bp, synthetic construct; identical to SEQ ID NO: 29732
  source 1..120: mol_type = other DNA

SEQ ID NO: 59687 - DNA, 120 bp, synthetic construct; identical to SEQ ID NO: 29733
  source 1..120: mol_type = other DNA

SEQ ID NO: 59688 - DNA, 120 bp, synthetic construct; identical to SEQ ID NO: 29734
  source 1..120: mol_type = other DNA

SEQ ID NO: 59689 - DNA, 120 bp, synthetic construct; identical to SEQ ID NO: 8882
  source 1..120: mol_type = other DNA

SEQ ID NO: 59690 - DNA, 120 bp, synthetic construct; identical to SEQ ID NO: 29736
  source 1..120: mol_type = other DNA

SEQ ID NO: 59691 - DNA, 120 bp, synthetic construct; identical to SEQ ID NO: 29737
  source 1..120: mol_type = other DNA

SEQ ID NO: 59692 - DNA, 120 bp, synthetic construct; identical to SEQ ID NO: 29738
  source 1..120: mol_type = other DNA

SEQ ID NO: 59693 - DNA, 120 bp, synthetic construct; identical to SEQ ID NO: 29739
  source 1..120: mol_type = other DNA

SEQ ID NO: 59694 - DNA, 120 bp, synthetic construct; identical to SEQ ID NO: 8883
  source 1..120: mol_type = other DNA

SEQ ID NO: 59695 - DNA, 120 bp, synthetic construct; identical to SEQ ID NO: 29741
  source 1..120: mol_type = other DNA

SEQ ID NO: 59696 - DNA, 120 bp, synthetic construct; identical to SEQ ID NO: 29742
  source 1..120: mol_type = other DNA

SEQ ID NO: 59697 - DNA, 120 bp, synthetic construct; identical to SEQ ID NO: 29743
  source 1..120: mol_type = other DNA

SEQ ID NO: 59698 - DNA, 120 bp, synthetic construct; identical to SEQ ID NO: 8884
  source 1..120: mol_type = other DNA

SEQ ID NO: 59699 - DNA, 120 bp, synthetic construct; identical to SEQ ID NO: 29745
  source 1..120: mol_type = other DNA

SEQ ID NO: 59700 - DNA, 120 bp, synthetic construct; identical to SEQ ID NO: 29746
  source 1..120: mol_type = other DNA

SEQ ID NO: 59701 - DNA, 120 bp, synthetic construct; identical to SEQ ID NO: 29747
  source 1..120: mol_type = other DNA

SEQ ID NO: 59702 - DNA, 120 bp, synthetic construct; identical to SEQ ID NO: 8885
  source 1..120: mol_type = other DNA

SEQ ID NO: 59703 - DNA, 120 bp, synthetic construct; identical to SEQ ID NO: 29749
  source 1..120: mol_type = other DNA

SEQ ID NO: 59704 - DNA, 120 bp, synthetic construct; identical to SEQ ID NO: 29750
  source 1..120: mol_type = other DNA

SEQ ID NO: 59705 - DNA, 120 bp, synthetic construct; identical to SEQ ID NO: 8886
  source 1..120: mol_type = other DNA

SEQ ID NO: 59706 - DNA, 120 bp, synthetic construct; identical to SEQ ID NO: 29752
  source 1..120: mol_type = other DNA

SEQ ID NO: 59707 - DNA, 120 bp, synthetic construct; identical to SEQ ID NO: 29753
  source 1..120: mol_type = other DNA

SEQ ID NO: 59708 - DNA, 120 bp, synthetic construct; identical to SEQ ID NO: 29754
  source 1..120: mol_type = other DNA

SEQ ID NO: 59709 - DNA, 120 bp, synthetic construct; identical to SEQ ID NO: 29755
  source 1..120: mol_type = other DNA

SEQ ID NO: 59710 - DNA, 120 bp, synthetic construct; identical to SEQ ID NO: 8887
  source 1..120: mol_type = other DNA

SEQ ID NO: 59711 - DNA, 120 bp, synthetic construct; identical to SEQ ID NO: 29757
  source 1..120: mol_type = other DNA

SEQ ID NO: 59712 - DNA, 120 bp, synthetic construct; identical to SEQ ID NO: 29758
  source 1..120: mol_type = other DNA

SEQ ID NO: 59713 - DNA, 120 bp, synthetic construct; identical to SEQ ID NO: 8888
  source 1..120: mol_type = other DNA

SEQ ID NO: 59714 - DNA, 120 bp, synthetic construct; identical to SEQ ID NO: 29760
  source 1..120: mol_type = other DNA

SEQ ID NO: 59715 - DNA, 120 bp, synthetic construct; identical to SEQ ID NO: 29761
  source 1..120: mol_type = other DNA

SEQ ID NO: 59716 - DNA, 120 bp, synthetic construct; identical to SEQ ID NO: 1810
  source 1..120: mol_type = other DNA

SEQ ID NO: 59717 - DNA, 120 bp, synthetic construct; identical to SEQ ID NO: 29763
  source 1..120: mol_type = other DNA

SEQ ID NO: 59718 - DNA, 120 bp, synthetic construct; identical to SEQ ID NO: 8889
  source 1..120: mol_type = other DNA

SEQ ID NO: 59719 - DNA, 120 bp, synthetic construct; identical to SEQ ID NO: 29765
  source 1..120: mol_type = other DNA

SEQ ID NO: 59720 - DNA, 120 bp, synthetic construct; identical to SEQ ID NO: 29766
  source 1..120: mol_type = other DNA

SEQ ID NO: 59721 - DNA, 120 bp, synthetic construct; identical to SEQ ID NO: 8890
  source 1..120: mol_type = other DNA

SEQ ID NO: 59722 - DNA, 120 bp, synthetic construct; identical to SEQ ID NO: 29768
  source 1..120: mol_type = other DNA

SEQ ID NO: 59723 - DNA, 120 bp, synthetic construct; identical to SEQ ID NO: 29769
  source 1..120: mol_type = other DNA

SEQ ID NO: 59724 - DNA, 120 bp, synthetic construct; identical to SEQ ID NO: 29770
  source 1..120: mol_type = other DNA

SEQ ID NO: 59725 - DNA, 120 bp, synthetic construct; identical to SEQ ID NO: 29771
  source 1..120: mol_type = other DNA

SEQ ID NO: 59726 - DNA, 120 bp, synthetic construct; identical to SEQ ID NO: 8891
  source 1..120: mol_type = other DNA

SEQ ID NO: 59727 - DNA, 120 bp, synthetic construct; identical to SEQ ID NO: 29773
  source 1..120: mol_type = other DNA

SEQ ID NO: 59728 - DNA, 120 bp, synthetic construct; identical to SEQ ID NO: 29774
  source 1..120: mol_type = other DNA

SEQ ID NO: 59729 - DNA, 120 bp, synthetic construct; identical to SEQ ID NO: 29775
  source 1..120: mol_type = other DNA

SEQ ID NO: 59730 - DNA, 120 bp, synthetic construct; identical to SEQ ID NO: 8892
  source 1..120: mol_type = other DNA

SEQ ID NO: 59731 - DNA, 120 bp, synthetic construct; identical to SEQ ID NO: 29777
  source 1..120: mol_type = other DNA

SEQ ID NO: 59732 - DNA, 120 bp, synthetic construct; identical to SEQ ID NO: 29778
  source 1..120: mol_type = other DNA

SEQ ID NO: 59733 - DNA, 120 bp, synthetic construct; identical to SEQ ID NO: 29779
  source 1..120: mol_type = other DNA

SEQ ID NO: 59734 - DNA, 120 bp, synthetic construct; identical to SEQ ID NO: 8893
  source 1..120: mol_type = other DNA

SEQ ID NO: 59735 - DNA, 120 bp, synthetic construct; identical to SEQ ID NO: 29781
  source 1..120: mol_type = other DNA

SEQ ID NO: 59736 - DNA, 120 bp, synthetic construct; identical to SEQ ID NO: 29782
  source 1..120: mol_type = other DNA

SEQ ID NO: 59737 - DNA, 120 bp, synthetic construct; identical to SEQ ID NO: 29783
  source 1..120: mol_type = other DNA

SEQ ID NO: 59738 - DNA, 120 bp, synthetic construct; identical to SEQ ID NO: 8894
  source 1..120: mol_type = other DNA

SEQ ID NO: 59739 - DNA, 120 bp, synthetic construct; identical to SEQ ID NO: 29785
  source 1..120: mol_type = other DNA

SEQ ID NO: 59740 - DNA, 120 bp, synthetic construct; identical to SEQ ID NO: 29786
  source 1..120: mol_type = other DNA

SEQ ID NO: 59741 - DNA, 120 bp, synthetic construct; identical to SEQ ID NO: 29787
  source 1..120: mol_type = other DNA

SEQ ID NO: 59742 - DNA, 120 bp, synthetic construct; identical to SEQ ID NO: 8895
  source 1..120: mol_type = other DNA

SEQ ID NO: 59743 - DNA, 120 bp, synthetic construct; identical to SEQ ID NO: 29789
  source 1..120: mol_type = other DNA

SEQ ID NO: 59744 - DNA, 120 bp, synthetic construct; identical to SEQ ID NO: 29790
  source 1..120: mol_type = other DNA

SEQ ID NO: 59745 - DNA, 120 bp, synthetic construct; identical to SEQ ID NO: 29791
  source 1..120: mol_type = other DNA

SEQ ID NO: 59746 - DNA, 120 bp, synthetic construct; identical to SEQ ID NO: 8896
  source 1..120: mol_type = other DNA

SEQ ID NO: 59747 - DNA, 120 bp, synthetic construct; identical to SEQ ID NO: 29793
  source 1..120: mol_type = other DNA

SEQ ID NO: 59748 - DNA, 120 bp, synthetic construct; identical to SEQ ID NO: 29794
  source 1..120: mol_type = other DNA

SEQ ID NO: 59749 - DNA, 120 bp, synthetic construct; identical to SEQ ID NO: 29795
  source 1..120: mol_type = other DNA

SEQ ID NO: 59750 - DNA, 120 bp, synthetic construct; identical to SEQ ID NO: 8897
  source 1..120: mol_type = other DNA

SEQ ID NO: 59751 - DNA, 120 bp, synthetic construct; identical to SEQ ID NO: 29797
  source 1..120: mol_type = other DNA

SEQ ID NO: 59752 - DNA, 120 bp, synthetic construct; identical to SEQ ID NO: 29798
  source 1..120: mol_type = other DNA

SEQ ID NO: 59753 - DNA, 120 bp, synthetic construct; identical to SEQ ID NO: 29799
  source 1..120: mol_type = other DNA

SEQ ID NO: 59754 - DNA, 120 bp, synthetic construct; identical to SEQ ID NO: 8898
  source 1..120: mol_type = other DNA

SEQ ID NO: 59755 - DNA, 120 bp, synthetic construct; identical to SEQ ID NO: 29801
  source 1..120: mol_type = other DNA

SEQ ID NO: 59756 - DNA, 120 bp, synthetic construct; identical to SEQ ID NO: 29802
  source 1..120: mol_type = other DNA

SEQ ID NO: 59757 - DNA, 120 bp, synthetic construct; identical to SEQ ID NO: 29803
  source 1..120: mol_type = other DNA

SEQ ID NO: 59758 - DNA, 120 bp, synthetic construct; identical to SEQ ID NO: 29804
  source 1..120: mol_type = other DNA

SEQ ID NO: 59759 - DNA, 120 bp, synthetic construct; identical to SEQ ID NO: 8899
  source 1..120: mol_type = other DNA

SEQ ID NO: 59760 - DNA, 120 bp, synthetic construct; identical to SEQ ID NO: 29806
  source 1..120: mol_type = other DNA

SEQ ID NO: 59761 - DNA, 120 bp, synthetic construct; identical to SEQ ID NO: 29807
  source 1..120: mol_type = other DNA

SEQ ID NO: 59762 - DNA, 120 bp, synthetic construct; identical to SEQ ID NO: 29808
  source 1..120: mol_type = other DNA

SEQ ID NO: 59763 - DNA, 120 bp, synthetic construct; identical to SEQ ID NO: 29809
  source 1..120: mol_type = other DNA

SEQ ID NO: 59764 - DNA, 120 bp, synthetic construct; identical to SEQ ID NO: 8900
  source 1..120: mol_type = other DNA

SEQ ID NO: 59765 - DNA, 120 bp, synthetic construct; identical to SEQ ID NO: 29811
  source 1..120: mol_type = other DNA

SEQ ID NO: 59766 - DNA, 120 bp, synthetic construct; identical to SEQ ID NO: 29812
  source 1..120: mol_type = other DNA

SEQ ID NO: 59767 - DNA, 120 bp, synthetic construct; identical to SEQ ID NO: 29813
  source 1..120: mol_type = other DNA

SEQ ID NO: 59768 - DNA, 120 bp, synthetic construct; identical to SEQ ID NO: 29814
  source 1..120: mol_type = other DNA

SEQ ID NO: 59769 - DNA, 120 bp, synthetic construct; identical to SEQ ID NO: 8901
  source 1..120: mol_type = other DNA

SEQ ID NO: 59770 - DNA, 120 bp, synthetic construct; identical to SEQ ID NO: 29816
  source 1..120: mol_type = other DNA

SEQ ID NO: 59771 - DNA, 120 bp, synthetic construct; identical to SEQ ID NO: 29817
  source 1..120: mol_type = other DNA

SEQ ID NO: 59772 - DNA, 120 bp, synthetic construct; identical to SEQ ID NO: 29818
  source 1..120: mol_type = other DNA

SEQ ID NO: 59773 - DNA, 120 bp, synthetic construct; identical to SEQ ID NO: 29819
  source 1..120: mol_type = other DNA

SEQ ID NO: 59774 - DNA, 120 bp, synthetic construct; identical to SEQ ID NO: 8902
  source 1..120: mol_type = other DNA

SEQ ID NO: 59775 - DNA, 120 bp, synthetic construct; identical to SEQ ID NO: 29821
  source 1..120: mol_type = other DNA

SEQ ID NO: 59776 - DNA, 120 bp, synthetic construct; identical to SEQ ID NO: 29822
  source 1..120: mol_type = other DNA

SEQ ID NO: 59777 - DNA, 120 bp, synthetic construct; identical to SEQ ID NO: 29823
  source 1..120: mol_type = other DNA

SEQ ID NO: 59778 - DNA, 120 bp, synthetic construct; identical to SEQ ID NO: 8903
  source 1..120: mol_type = other DNA

SEQ ID NO: 59779 - DNA, 120 bp, synthetic construct; identical to SEQ ID NO: 29825
  source 1..120: mol_type = other DNA

SEQ ID NO: 59780 - DNA, 120 bp, synthetic construct; identical to SEQ ID NO: 29826
  source 1..120: mol_type = other DNA

SEQ ID NO: 59781 - DNA, 120 bp, synthetic construct; identical to SEQ ID NO: 1825
  source 1..120: mol_type = other DNA

SEQ ID NO: 59782 - DNA, 120 bp, synthetic construct; identical to SEQ ID NO: 29828
  source 1..120: mol_type = other DNA

SEQ ID NO: 59783 - DNA, 120 bp, synthetic construct; identical to SEQ ID NO: 29829
  source 1..120: mol_type = other DNA

SEQ ID NO: 59784 - DNA, 120 bp, synthetic construct; identical to SEQ ID NO: 29830
  source 1..120: mol_type = other DNA

SEQ ID NO: 59785 - DNA, 120 bp, synthetic construct; identical to SEQ ID NO: 29831
  source 1..120: mol_type = other DNA

SEQ ID NO: 59786 - DNA, 120 bp, synthetic construct; identical to SEQ ID NO: 8905
  source 1..120: mol_type = other DNA

SEQ ID NO: 59787 - DNA, 120 bp, synthetic construct; identical to SEQ ID NO: 29833
  source 1..120: mol_type = other DNA

SEQ ID NO: 59788 - DNA, 120 bp, synthetic construct; identical to SEQ ID NO: 29834
  source 1..120: mol_type = other DNA

SEQ ID NO: 59789 - DNA, 120 bp, synthetic construct; identical to SEQ ID NO: 29835
  source 1..120: mol_type = other DNA

SEQ ID NO: 59790 - DNA, 120 bp, synthetic construct; identical to SEQ ID NO: 8906
  source 1..120: mol_type = other DNA

SEQ ID NO: 59791 - DNA, 120 bp, synthetic construct; identical to SEQ ID NO: 29837
  source 1..120: mol_type = other DNA

SEQ ID NO: 59792 - DNA, 120 bp, synthetic construct; identical to SEQ ID NO: 29838
  source 1..120: mol_type = other DNA

SEQ ID NO: 59793 - DNA, 120 bp, synthetic construct; identical to SEQ ID NO: 8907
  source 1..120: mol_type = other DNA

SEQ ID NO: 59794 - DNA, 120 bp, synthetic construct; identical to SEQ ID NO: 29840
  source 1..120: mol_type = other DNA

SEQ ID NO: 59795 - DNA, 120 bp, synthetic construct; identical to SEQ ID NO: 29841
  source 1..120: mol_type = other DNA

SEQ ID NO: 59796 - DNA, 120 bp, synthetic construct; identical to SEQ ID NO: 29842
  source 1..120: mol_type = other DNA

SEQ ID NO: 59797 - DNA, 120 bp, synthetic construct; identical to SEQ ID NO: 29843
  source 1..120: mol_type = other DNA

SEQ ID NO: 59798 - DNA, 120 bp, synthetic construct; identical to SEQ ID NO: 8908
  source 1..120: mol_type = other DNA

SEQ ID NO: 59799 - DNA, 120 bp, synthetic construct; identical to SEQ ID NO: 29845
  source 1..120: mol_type = other DNA

SEQ ID NO: 59800 - DNA, 120 bp, synthetic construct; identical to SEQ ID NO: 29846
  source 1..120: mol_type = other DNA

SEQ ID NO: 59801 - DNA, 120 bp, synthetic construct; identical to SEQ ID NO: 8909
  source 1..120: mol_type = other DNA

SEQ ID NO: 59802 - DNA, 120 bp, synthetic construct; identical to SEQ ID NO: 29848
  source 1..120: mol_type = other DNA

SEQ ID NO: 59803 - DNA, 120 bp, synthetic construct; identical to SEQ ID NO: 29849
  source 1..120: mol_type = other DNA

SEQ ID NO: 59804 - DNA, 120 bp, synthetic construct; identical to SEQ ID NO: 29850
  source 1..120: mol_type = other DNA

SEQ ID NO: 59805 - DNA, 120 bp, synthetic construct; identical to SEQ ID NO: 8910
  source 1..120: mol_type = other DNA

SEQ ID NO: 59806 - DNA, 120 bp, synthetic construct; identical to SEQ ID NO: 29852
  source 1..120: mol_type = other DNA

SEQ ID NO: 59807 - DNA, 120 bp, synthetic construct; identical to SEQ ID NO: 29853
  source 1..120: mol_type = other DNA

SEQ ID NO: 59808 - DNA, 120 bp, synthetic construct; identical to SEQ ID NO: 29854
  source 1..120: mol_type = other DNA

SEQ ID NO: 59809 - DNA, 120 bp, synthetic construct; identical to SEQ ID NO: 29855
  source 1..120: mol_type = other DNA

SEQ ID NO: 59810 - DNA, 120 bp, synthetic construct; identical to SEQ ID NO: 8911
  source 1..120: mol_type = other DNA

SEQ ID NO: 59811 - DNA, 120 bp, synthetic construct; identical to SEQ ID NO: 29857
  source 1..120: mol_type = other DNA

SEQ ID NO: 59812 - DNA, 120 bp, synthetic construct; identical to SEQ ID NO: 29858
  source 1..120: mol_type = other DNA

SEQ ID NO: 59813 - DNA, 120 bp, synthetic construct; identical to SEQ ID NO: 29859
  source 1..120: mol_type = other DNA

SEQ ID NO: 59814 - DNA, 120 bp, synthetic construct; identical to SEQ ID NO: 29860
  source 1..120: mol_type = other DNA

SEQ ID NO: 59815 - DNA, 120 bp, synthetic construct; identical to SEQ ID NO: 8912
  source 1..120: mol_type = other DNA

SEQ ID NO: 59816 - DNA, 120 bp, synthetic construct; identical to SEQ ID NO: 29862
  source 1..120: mol_type = other DNA

SEQ ID NO: 59817 - DNA, 120 bp, synthetic construct; identical to SEQ ID NO: 29863
  source 1..120: mol_type = other DNA

SEQ ID NO: 59818 - DNA, 120 bp, synthetic construct; identical to SEQ ID NO: 8913
  source 1..120: mol_type = other DNA

SEQ ID NO: 59819 - DNA, 120 bp, synthetic construct; identical to SEQ ID NO: 29865
  source 1..120: mol_type = other DNA

SEQ ID NO: 59820 - DNA, 120 bp, synthetic construct; identical to SEQ ID NO: 29866
  source 1..120: mol_type = other DNA

SEQ ID NO: 59821 - DNA, 120 bp, synthetic construct; identical to SEQ ID NO: 29867
  source 1..120: mol_type = other DNA

SEQ ID NO: 59822 - DNA, 120 bp, synthetic construct; identical to SEQ ID NO: 8914
  source 1..120: mol_type = other DNA

SEQ ID NO: 59823 - DNA, 120 bp, synthetic construct; identical to SEQ ID NO: 29869
  source 1..120: mol_type = other DNA

SEQ ID NO: 59824 - DNA, 120 bp, synthetic construct; identical to SEQ ID NO: 29870
  source 1..120: mol_type = other DNA

SEQ ID NO: 59825 - DNA, 120 bp, synthetic construct; identical to SEQ ID NO: 29871
  source 1..120: mol_type = other DNA

SEQ ID NO: 59826 - DNA, 120 bp, synthetic construct; identical to SEQ ID NO: 1835
  source 1..120: mol_type = other DNA

SEQ ID NO: 59827 - DNA, 120 bp, synthetic construct; identical to SEQ ID NO: 29873
  source 1..120: mol_type = other DNA

SEQ ID NO: 59828 - DNA, 120 bp, synthetic construct; identical to SEQ ID NO: 29874
  source 1..120: mol_type = other DNA

SEQ ID NO: 59829 - DNA, 120 bp, synthetic construct; identical to SEQ ID NO: 29875
  source 1..120: mol_type = other DNA

SEQ ID NO: 59830 - DNA, 120 bp, synthetic construct; identical to SEQ ID NO: 8916
  source 1..120: mol_type = other DNA

SEQ ID NO: 59831 - DNA, 120 bp, synthetic construct; identical to SEQ ID NO: 29877
  source 1..120: mol_type = other DNA

SEQ ID NO: 59832 - DNA, 120 bp, synthetic construct; identical to SEQ ID NO: 29878
  source 1..120: mol_type = other DNA

SEQ ID NO: 59833 - DNA, 120 bp, synthetic construct; identical to SEQ ID NO: 29879
  source 1..120: mol_type = other DNA

SEQ ID NO: 59834 - DNA, 120 bp, synthetic construct; identical to SEQ ID NO: 29880
  source 1..120: mol_type = other DNA

SEQ ID NO: 59835 - DNA, 120 bp, synthetic construct; identical to SEQ ID NO: 8917
  source 1..120: mol_type = other DNA

SEQ ID NO: 59836 - DNA, 120 bp, synthetic construct; identical to SEQ ID NO: 29882
  source 1..120: mol_type = other DNA

SEQ ID NO: 59837 - DNA, 120 bp, synthetic construct; identical to SEQ ID NO: 29883
  source 1..120: mol_type = other DNA

SEQ ID NO: 59838 - DNA, 120 bp, synthetic construct; identical to SEQ ID NO: 29884
  source 1..120: mol_type = other DNA

SEQ ID NO: 59839 - DNA, 120 bp, synthetic construct; identical to SEQ ID NO: 8918
  source 1..120: mol_type = other DNA

SEQ ID NO: 59840 - DNA, 120 bp, synthetic construct; identical to SEQ ID NO: 29886
  source 1..120: mol_type = other DNA

SEQ ID NO: 59841 - DNA, 120 bp, synthetic construct; identical to SEQ ID NO: 29887
  source 1..120: mol_type = other DNA

SEQ ID NO: 59842 - DNA, 120 bp, synthetic construct; identical to SEQ ID NO: 29888
  source 1..120: mol_type = other DNA

SEQ ID NO: 59843 - DNA, 120 bp, synthetic construct; identical to SEQ ID NO: 8919
  source 1..120: mol_type = other DNA

SEQ ID NO: 59844 - DNA, 120 bp, synthetic construct; identical to SEQ ID NO: 29890
  source 1..120: mol_type = other DNA

SEQ ID NO: 59845 - DNA, 120 bp, synthetic construct; identical to SEQ ID NO: 29891
  source 1..120: mol_type = other DNA

SEQ ID NO: 59846 - DNA, 120 bp, synthetic construct; identical to SEQ ID NO: 29892
  source 1..120: mol_type = other DNA

SEQ ID NO: 59847 - DNA, 120 bp, synthetic construct; identical to SEQ ID NO: 29893
  source 1..120: mol_type = other DNA

SEQ ID NO: 59848 - DNA, 120 bp, synthetic construct; identical to SEQ ID NO: 8920
  source 1..120: mol_type = other DNA

SEQ ID NO: 59849 - DNA, 120 bp, synthetic construct; identical to SEQ ID NO: 29895
  source 1..120: mol_type = other DNA

SEQ ID NO: 59850 - DNA, 120 bp, synthetic construct; identical to SEQ ID NO: 29896
  source 1..120: mol_type = other DNA

SEQ ID NO: 59851 - DNA, 120 bp, synthetic construct; identical to SEQ ID NO: 29897
  source 1..120: mol_type = other DNA

SEQ ID NO: 59852 - DNA, 120 bp, synthetic construct; identical to SEQ ID NO: 8921
  source 1..120: mol_type = other DNA

SEQ ID NO: 59853 - DNA, 120 bp, synthetic construct; identical to SEQ ID NO: 29899
  source 1..120: mol_type = other DNA

SEQ ID NO: 59854 - DNA, 120 bp, synthetic construct; identical to SEQ ID NO: 29900
  source 1..120: mol_type = other DNA

SEQ ID NO: 59855 - DNA, 120 bp, synthetic construct; identical to SEQ ID NO: 8922
  source 1..120: mol_type = other DNA

SEQ ID NO: 59856 - DNA, 120 bp, synthetic construct; identical to SEQ ID NO: 29902
  source 1..120: mol_type = other DNA

SEQ ID NO: 59857 - DNA, 120 bp, synthetic construct; identical to SEQ ID NO: 29903
  source 1..120: mol_type = other DNA

SEQ ID NO: 59858 - DNA, 120 bp, synthetic construct; identical to SEQ ID NO: 29904
  source 1..120: mol_type = other DNA

SEQ ID NO: 59859 - DNA, 120 bp, synthetic construct; identical to SEQ ID NO: 8923
  source 1..120: mol_type = other DNA

SEQ ID NO: 59860 - DNA, 120 bp, synthetic construct; identical to SEQ ID NO: 29906
  source 1..120: mol_type = other DNA

SEQ ID NO: 59861 - DNA, 120 bp, synthetic construct; identical to SEQ ID NO: 29907
  source 1..120: mol_type = other DNA

SEQ ID NO: 59862 - DNA, 120 bp, synthetic construct; identical to SEQ ID NO: 29908
  source 1..120: mol_type = other DNA

SEQ ID NO: 59863 - DNA, 120 bp, synthetic construct; identical to SEQ ID NO: 29909
  source 1..120: mol_type = other DNA

SEQ ID NO: 59864 - DNA, 120 bp, synthetic construct; identical to SEQ ID NO: 29910
  source 1..120: mol_type = other DNA

SEQ ID NO: 59865 - DNA, 120 bp, synthetic construct; identical to SEQ ID NO: 8924
  source 1..120: mol_type = other DNA

SEQ ID NO: 59866 - DNA, 120 bp, synthetic construct; identical to SEQ ID NO: 29912
  source 1..120: mol_type = other DNA

SEQ ID NO: 59867 - DNA, 120 bp, synthetic construct; identical to SEQ ID NO: 29913
  source 1..120: mol_type = other DNA

SEQ ID NO: 59868 - DNA, 120 bp, synthetic construct; identical to SEQ ID NO: 8925
  source 1..120: mol_type = other DNA

SEQ ID NO: 59869 - DNA, 120 bp, synthetic construct; identical to SEQ ID NO: 29915
  source 1..120: mol_type = other DNA

SEQ ID NO: 59870 - DNA, 120 bp, synthetic construct; identical to SEQ ID NO: 29916
  source 1..120: mol_type = other DNA

SEQ ID NO: 59871 - DNA, 120 bp, synthetic construct; identical to SEQ ID NO: 29917
  source 1..120: mol_type = other DNA

SEQ ID NO: 59872 - DNA, 120 bp, synthetic construct; identical to SEQ ID NO: 29918
  source 1..120: mol_type = other DNA

SEQ ID NO: 59873 - DNA, 120 bp, synthetic construct; identical to SEQ ID NO: 8926
  source 1..120: mol_type = other DNA

SEQ ID NO: 59874 - DNA, 120 bp, synthetic construct; identical to SEQ ID NO: 29920
  source 1..120: mol_type = other DNA

SEQ ID NO: 59875 - DNA, 120 bp, synthetic construct; identical to SEQ ID NO: 29921
  source 1..120: mol_type = other DNA

SEQ ID NO: 59876 - DNA, 120 bp, synthetic construct; identical to SEQ ID NO: 8927
  source 1..120: mol_type = other DNA

SEQ ID NO: 59877 - DNA, 120 bp, synthetic construct; identical to SEQ ID NO: 29923
  source 1..120: mol_type = other DNA

SEQ ID NO: 59878 - DNA, 120 bp, synthetic construct; identical to SEQ ID NO: 29924
  source 1..120: mol_type = other DNA

SEQ ID NO: 59879 - DNA, 120 bp, synthetic construct; identical to SEQ ID NO: 29925
  source 1..120: mol_type = other DNA

SEQ ID NO: 59880 - DNA, 120 bp, synthetic construct; identical to SEQ ID NO: 29926
  source 1..120: mol_type = other DNA

SEQ ID NO: 59881 - DNA, 120 bp, synthetic construct; identical to SEQ ID NO: 8928
  source 1..120: mol_type = other DNA

SEQ ID NO: 59882 - DNA, 120 bp, synthetic construct; identical to SEQ ID NO: 29928
  source 1..120: mol_type = other DNA

SEQ ID NO: 59883 - DNA, 120 bp, synthetic construct; identical to SEQ ID NO: 29929
  source 1..120: mol_type = other DNA

SEQ ID NO: 59884 - DNA, 120 bp, synthetic construct; identical to SEQ ID NO: 8929
  source 1..120: mol_type = other DNA

SEQ ID NO: 59885 - DNA, 120 bp, synthetic construct; identical to SEQ ID NO: 29931
  source 1..120: mol_type = other DNA

SEQ ID NO: 59886 - DNA, 120 bp, synthetic construct; identical to SEQ ID NO: 29932
  source 1..120: mol_type = other DNA

SEQ ID NO: 59887 - DNA, 120 bp, synthetic construct; identical to SEQ ID NO: 29933
  source 1..120: mol_type = other DNA

SEQ ID NO: 59888 - DNA, 120 bp, synthetic construct; identical to SEQ ID NO: 29934
  source 1..120: mol_type = other DNA

SEQ ID NO: 59889 - DNA, 120 bp, synthetic construct; identical to SEQ ID NO: 8930
  source 1..120: mol_type = other DNA

SEQ ID NO: 59890 - DNA, 120 bp, synthetic construct; identical to SEQ ID NO: 29936
  source 1..120: mol_type = other DNA

SEQ ID NO: 59891 - DNA, 120 bp, synthetic construct; identical to SEQ ID NO: 29937
  source 1..120: mol_type = other DNA

SEQ ID NO: 59892 - DNA, 120 bp, synthetic construct; identical to SEQ ID NO: 8931
  source 1..120: mol_type = other DNA

SEQ ID NO: 59893 - DNA, 120 bp, synthetic construct; identical to SEQ ID NO: 29939
  source 1..120: mol_type = other DNA

SEQ ID NO: 59894 - DNA, 120 bp, synthetic construct; identical to SEQ ID NO: 29940
  source 1..120: mol_type = other DNA

SEQ ID NO: 59895 - DNA, 120 bp, synthetic construct; identical to SEQ ID NO: 29941
  source 1..120: mol_type = other DNA

SEQ ID NO: 59896 - DNA, 120 bp, synthetic construct; identical to SEQ ID NO: 29942
  source 1..120: mol_type = other DNA

SEQ ID NO: 59897 - DNA, 120 bp, synthetic construct; identical to SEQ ID NO: 8932
  source 1..120: mol_type = other DNA

SEQ ID NO: 59898 - DNA, 120 bp, synthetic construct; identical to SEQ ID NO: 29944
  source 1..120: mol_type = other DNA

SEQ ID NO: 59899 - DNA, 120 bp, synthetic construct; identical to SEQ ID NO: 29945
  source 1..120: mol_type = other DNA

SEQ ID NO: 59900 - DNA, 120 bp, synthetic construct; identical to SEQ ID NO: 8933
  source 1..120: mol_type = other DNA

SEQ ID NO: 59901 - DNA, 120 bp, synthetic construct; identical to SEQ ID NO: 29947
  source 1..120: mol_type = other DNA

SEQ ID NO: 59902 - DNA, 120 bp, synthetic construct; identical to SEQ ID NO: 29948
  source 1..120: mol_type = other DNA

SEQ ID NO: 59903 - DNA, 120 bp, synthetic construct; identical to SEQ ID NO: 29949
  source 1..120: mol_type = other DNA

SEQ ID NO: 59904 - DNA, 120 bp, synthetic construct; identical to SEQ ID NO: 29950
  source 1..120: mol_type = other DNA

SEQ ID NO: 59905 - DNA, 120 bp, synthetic construct; identical to SEQ ID NO: 8934
  source 1..120: mol_type = other DNA

SEQ ID NO: 59906 - DNA, 120 bp, synthetic construct; identical to SEQ ID NO: 29952
  source 1..120: mol_type = other DNA

SEQ ID NO: 59907 - DNA, 120 bp, synthetic construct; identical to SEQ ID NO: 29953
  source 1..120: mol_type = other DNA

SEQ ID NO: 59908 - DNA, 120 bp, synthetic construct; identical to SEQ ID NO: 8935
  source 1..120: mol_type = other DNA

SEQ ID NO: 59909 - DNA, 120 bp, synthetic construct; identical to SEQ ID NO: 29955
  source 1..120: mol_type = other DNA

SEQ ID NO: 59910 - DNA, 120 bp, synthetic construct; identical to SEQ ID NO: 29956
  source 1..120: mol_type = other DNA

SEQ ID NO: 59911 - DNA, 120 bp, synthetic construct; identical to SEQ ID NO: 29957
  source 1..120: mol_type = other DNA

SEQ ID NO: 59912 - DNA, 120 bp, synthetic construct; identical to SEQ ID NO: 29958
  source 1..120: mol_type = other DNA

SEQ ID NO: 59913 - DNA, 120 bp, synthetic construct; identical to SEQ ID NO: 8936
  source 1..120: mol_type = other DNA

SEQ ID NO: 59914 - DNA, 120 bp, synthetic construct; identical to SEQ ID NO: 29960
  source 1..120: mol_type = other DNA

SEQ ID NO: 59915 - DNA, 120 bp, synthetic construct; identical to SEQ ID NO: 29961
  source 1..120: mol_type = other DNA

SEQ ID NO: 59916 - DNA, 120 bp, synthetic construct; identical to SEQ ID NO: 29962
  source 1..120: mol_type = other DNA

SEQ ID NO: 59917 - DNA, 120 bp, synthetic construct; identical to SEQ ID NO: 8937
  source 1..120: mol_type = other DNA

SEQ ID NO: 59918 - DNA, 120 bp, synthetic construct; identical to SEQ ID NO: 29964
  source 1..120: mol_type = other DNA

SEQ ID NO: 59919 - DNA, 120 bp, synthetic construct; identical to SEQ ID NO: 29965
  source 1..120: mol_type = other DNA

SEQ ID NO: 59920 - DNA, 120 bp, synthetic construct; identical to SEQ ID NO: 8938
  source 1..120: mol_type = other DNA

SEQ ID NO: 59921 - DNA, 120 bp, synthetic construct; identical to SEQ ID NO: 29967
  source 1..120: mol_type = other DNA

SEQ ID NO: 59922 - DNA, 120 bp, synthetic construct; identical to SEQ ID NO: 29968
  source 1..120: mol_type = other DNA

SEQ ID NO: 59923 - DNA, 120 bp, synthetic construct; identical to SEQ ID NO: 29969
  source 1..120: mol_type = other DNA

SEQ ID NO: 59924 - DNA, 120 bp, synthetic construct; identical to SEQ ID NO: 8939
  source 1..120: mol_type = other DNA

SEQ ID NO: 59925 - DNA, 120 bp, synthetic construct; identical to SEQ ID NO: 29971
  source 1..120: mol_type = other DNA

SEQ ID NO: 59926 - DNA, 120 bp, synthetic construct; identical to SEQ ID NO: 29972
  source 1..120: mol_type = other DNA

SEQ ID NO: 59927 - DNA, 120 bp, synthetic construct; identical to SEQ ID NO: 29973
  source 1..120: mol_type = other DNA

SEQ ID NO: 59928 - DNA, 120 bp, synthetic construct; identical to SEQ ID NO: 8940
  source 1..120: mol_type = other DNA

SEQ ID NO: 59929 - DNA, 120 bp, synthetic construct; identical to SEQ ID NO: 29975
  source 1..120: mol_type = other DNA

SEQ ID NO: 59930 - DNA, 120 bp, synthetic construct; identical to SEQ ID NO: 29976
  source 1..120: mol_type = other DNA

SEQ ID NO: 59931 - DNA, 120 bp, synthetic construct; identical to SEQ ID NO: 29977
  source 1..120: mol_type = other DNA

SEQ ID NO: 59932 - DNA, 120 bp, synthetic construct; identical to SEQ ID NO: 8941
  source 1..120: mol_type = other DNA

SEQ ID NO: 59933 - DNA, 120 bp, synthetic construct; identical to SEQ ID NO: 29979
  source 1..120: mol_type = other DNA

SEQ ID NO: 59934 - DNA, 120 bp, synthetic construct; identical to SEQ ID NO: 29980
  source 1..120: mol_type = other DNA

SEQ ID NO: 59935 - DNA, 120 bp, synthetic construct; identical to SEQ ID NO: 29981
  source 1..120: mol_type = other DNA

SEQ ID NO: 59936 - DNA, 120 bp, synthetic construct; identical to SEQ ID NO: 8942
  source 1..120: mol_type = other DNA

SEQ ID NO: 59937 - DNA, 120 bp, synthetic construct; identical to SEQ ID NO: 29983
  source 1..120: mol_type = other DNA

SEQ ID NO: 59938 - DNA, 120 bp, synthetic construct; identical to SEQ ID NO: 29984
  source 1..120: mol_type = other DNA

SEQ ID NO: 59939 - DNA, 120 bp, synthetic construct; identical to SEQ ID NO: 29985
  source 1..120: mol_type = other DNA

SEQ ID NO: 59940 - DNA, 120 bp, synthetic construct; identical to SEQ ID NO: 29986
  source 1..120: mol_type = other DNA

SEQ ID NO: 59941 - DNA, 120 bp, synthetic construct; identical to SEQ ID NO: 8943
  source 1..120: mol_type = other DNA

SEQ ID NO: 59942 - DNA, 120 bp, synthetic construct; identical to SEQ ID NO: 29988
  source 1..120: mol_type = other DNA

SEQ ID NO: 59943 - DNA, 120 bp, synthetic construct; identical to SEQ ID NO: 29989
  source 1..120: mol_type = other DNA

SEQ ID NO: 59944 - DNA, 120 bp, synthetic construct; identical to SEQ ID NO: 8944
  source 1..120: mol_type = other DNA

SEQ ID NO: 59945 - DNA, 120 bp, synthetic construct; identical to SEQ ID NO: 29991
  source 1..120: mol_type = other DNA

SEQ ID NO: 59946 - DNA, 120 bp, synthetic construct; identical to SEQ ID NO: 29992
  source 1..120: mol_type = other DNA

SEQ ID NO: 59947 - DNA, 120 bp, synthetic construct; identical to SEQ ID NO: 29993
  source 1..120: mol_type = other DNA

SEQ ID NO: 59948 - DNA, 120 bp, synthetic construct; identical to SEQ ID NO: 29994
  source 1..120: mol_type = other DNA

SEQ ID NO: 59949 - DNA, 120 bp, synthetic construct; identical to SEQ ID NO: 8945
  source 1..120: mol_type = other DNA

SEQ ID NO: 59950 - DNA, 120 bp, synthetic construct; identical to SEQ ID NO: 29996
  source 1..120: mol_type = other DNA

SEQ ID NO: 59951 - DNA, 120 bp, synthetic construct; identical to SEQ ID NO: 29997
  source 1..120: mol_type = other DNA

SEQ ID NO: 59952 - DNA, 120 bp, synthetic construct; identical to SEQ ID NO: 29998
  source 1..120: mol_type = other DNA

SEQ ID NO: 59953 - DNA, 120 bp, synthetic construct; identical to SEQ ID NO: 8946
  source 1..120: mol_type = other DNA

SEQ ID NO: 59954 - DNA, 120 bp, synthetic construct; identical to SEQ ID NO: 30000
  source 1..120: mol_type = other DNA

SEQ ID NO: 59955 - DNA, 120 bp, synthetic construct; identical to SEQ ID NO: 30001
  source 1..120: mol_type = other DNA

SEQ ID NO: 59956 - DNA, 120 bp, synthetic construct; identical to SEQ ID NO: 30002
  source 1..120: mol_type = other DNA

SEQ ID NO: 59957 - DNA, 120 bp, synthetic construct; identical to SEQ ID NO: 8947
  source 1..120: mol_type = other DNA

SEQ ID NO: 59958 - DNA, 120 bp, synthetic construct; identical to SEQ ID NO: 30004
  source 1..120: mol_type = other DNA

SEQ ID NO: 59959 - DNA, 120 bp, synthetic construct; identical to SEQ ID NO: 30005
  source 1..120: mol_type = other DNA

SEQ ID NO: 59960 - DNA, 120 bp, synthetic construct; identical to SEQ ID NO: 30006
  source 1..120: mol_type = other DNA

SEQ ID NO: 59961 - DNA, 120 bp, synthetic construct; identical to SEQ ID NO: 8948
  source 1..120: mol_type = other DNA

SEQ ID NO: 59962 - DNA, 120 bp, synthetic construct; identical to SEQ ID NO: 30008
  source 1..120: mol_type = other DNA

SEQ ID NO: 59963 - DNA, 120 bp, synthetic construct; identical to SEQ ID NO: 30009
  source 1..120: mol_type = other DNA

SEQ ID NO: 59964 - DNA, 120 bp, synthetic construct; identical to SEQ ID NO: 30010
  source 1..120: mol_type = other DNA

SEQ ID NO: 59965 - DNA, 120 bp, synthetic construct; identical to SEQ ID NO: 30011
  source 1..120: mol_type = other DNA

SEQ ID NO: 59966 - DNA, 120 bp, synthetic construct; identical to SEQ ID NO: 8949
  source 1..120: mol_type = other DNA

SEQ ID NO: 59967 - DNA, 120 bp, synthetic construct; identical to SEQ ID NO: 30013
  source 1..120: mol_type = other DNA

SEQ ID NO: 59968 - DNA, 120 bp, synthetic construct; identical to SEQ ID NO: 30014
  source 1..120: mol_type = other DNA

SEQ ID NO: 59969 - DNA, 120 bp, synthetic construct; identical to SEQ ID NO: 30015
  source 1..120: mol_type = other DNA

SEQ ID NO: 59970 - DNA, 120 bp, synthetic construct; identical to SEQ ID NO: 8950
  source 1..120: mol_type = other DNA

SEQ ID NO: 59971 - DNA, 120 bp, synthetic construct; identical to SEQ ID NO: 30017
  source 1..120: mol_type = other DNA

SEQ ID NO: 59972 - DNA, 120 bp, synthetic construct; identical to SEQ ID NO: 30018
  source 1..120: mol_type = other DNA

SEQ ID NO: 59973 - DNA, 120 bp, synthetic construct; identical to SEQ ID NO: 8951
  source 1..120: mol_type = other DNA

SEQ ID NO: 59974 - DNA, 120 bp, synthetic construct; identical to SEQ ID NO: 30020
  source 1..120: mol_type = other DNA

SEQ ID NO: 59975 - DNA, 120 bp, synthetic construct; identical to SEQ ID NO: 30021
  source 1..120: mol_type = other DNA

SEQ ID NO: 59976 - DNA, 120 bp, synthetic construct; identical to SEQ ID NO: 30022
  source 1..120: mol_type = other DNA

SEQ ID NO: 59977 - DNA, 120 bp, synthetic construct; identical to SEQ ID NO: 8952
  source 1..120: mol_type = other DNA

SEQ ID NO: 59978 - DNA, 120 bp, synthetic construct; identical to SEQ ID NO: 30024
  source 1..120: mol_type = other DNA

SEQ ID NO: 59979 - DNA, 120 bp, synthetic construct; identical to SEQ ID NO: 30025
  source 1..120: mol_type = other DNA

SEQ ID NO: 59980 - DNA, 120 bp, synthetic construct; identical to SEQ ID NO: 30026
  source 1..120: mol_type = other DNA

SEQ ID NO: 59981 - DNA, 120 bp, synthetic construct; identical to SEQ ID NO: 8953
  source 1..120: mol_type = other DNA

SEQ ID NO: 59982 - DNA, 120 bp, synthetic construct; identical to SEQ ID NO: 30028
  source 1..120: mol_type = other DNA

SEQ ID NO: 59983 - DNA, 120 bp, synthetic construct; identical to SEQ ID NO: 30029
  source 1..120: mol_type = other DNA

SEQ ID NO: 59984 - DNA, 120 bp, synthetic construct; identical to SEQ ID NO: 30030
  source 1..120: mol_type = other DNA

SEQ ID NO: 59985 - DNA, 120 bp, synthetic construct; identical to SEQ ID NO: 8954
  source 1..120: mol_type = other DNA

SEQ ID NO: 59986 - DNA, 120 bp, synthetic construct; identical to SEQ ID NO: 30032
  source 1..120: mol_type = other DNA

SEQ ID NO: 59987 - DNA, 120 bp, synthetic construct; identical to SEQ ID NO: 30033
  source 1..120: mol_type = other DNA

SEQ ID NO: 59988 - DNA, 120 bp, synthetic construct; identical to SEQ ID NO: 30034
  source 1..120: mol_type = other DNA

SEQ ID NO: 59989 - DNA, 120 bp, synthetic construct; identical to SEQ ID NO: 8955
  source 1..120: mol_type = other DNA

SEQ ID NO: 59990 - DNA, 120 bp, synthetic construct; identical to SEQ ID NO: 30036
  source 1..120: mol_type = other DNA

SEQ ID NO: 59991 - DNA, 120 bp, synthetic construct; identical to SEQ ID NO: 30037
  source 1..120: mol_type = other DNA

SEQ ID NO: 59992 - DNA, 120 bp, synthetic construct; identical to SEQ ID NO: 30038
  source 1..120: mol_type = other DNA

SEQ ID NO: 59993 - DNA, 120 bp, synthetic construct; identical to SEQ ID NO: 8956
  source 1..120: mol_type = other DNA

SEQ ID NO: 59994 - DNA, 120 bp, synthetic construct; identical to SEQ ID NO: 30040
  source 1..120: mol_type = other DNA

SEQ ID NO: 59995 - DNA, 120 bp, synthetic construct; identical to SEQ ID NO: 30041
  source 1..120: mol_type = other DNA

SEQ ID NO: 59996 - DNA, 120 bp, synthetic construct; identical to SEQ ID NO: 30042
  source 1..120: mol_type = other DNA

SEQ ID NO: 59997 - DNA, 120 bp, synthetic construct; identical to SEQ ID NO: 30043
  source 1..120: mol_type = other DNA

SEQ ID NO: 59998 - DNA, 120 bp, synthetic construct; identical to SEQ ID NO: 8957
  source 1..120: mol_type = other DNA

SEQ ID NO: 59999 - DNA, 120 bp, synthetic construct; identical to SEQ ID NO: 30045
  source 1..120: mol_type = other DNA

SEQ ID NO: 60000 - DNA, 120 bp, synthetic construct; identical to SEQ ID NO: 30046
  source 1..120: mol_type = other DNA

SEQ ID NO: 60001 - DNA, 120 bp, synthetic construct; identical to SEQ ID NO: 30047
  source 1..120: mol_type = other DNA

SEQ ID NO: 60002 - DNA, 120 bp, synthetic construct; identical to SEQ ID NO: 1875
  source 1..120: mol_type = other DNA

SEQ ID NO: 60003 - DNA, 120 bp, synthetic construct; identical to SEQ ID NO: 30049
  source 1..120: mol_type = other DNA

SEQ ID NO: 60004 - DNA, 120 bp, synthetic construct; identical to SEQ ID NO: 30050
  source 1..120: mol_type = other DNA

SEQ ID NO: 60005 - DNA, 120 bp, synthetic construct; identical to SEQ ID NO: 8959
  source 1..120: mol_type = other DNA

SEQ ID NO: 60006 - DNA, 120 bp, synthetic construct; identical to SEQ ID NO: 30052
  source 1..120: mol_type = other DNA

SEQ ID NO: 60007 - DNA, 120 bp, synthetic construct; identical to SEQ ID NO: 30053
  source 1..120: mol_type = other DNA

SEQ ID NO: 60008 - DNA, 120 bp, synthetic construct; identical to SEQ ID NO: 30054
  source 1..120: mol_type = other DNA

SEQ ID NO: 60009 - DNA, 120 bp, synthetic construct; identical to SEQ ID NO: 30055
  source 1..120: mol_type = other DNA

SEQ ID NO: 60010 - DNA, 120 bp, synthetic construct; identical to SEQ ID NO: 8960
  source 1..120: mol_type = other DNA

SEQ ID NO: 60011 - DNA, 120 bp, synthetic construct; identical to SEQ ID NO: 30057
  source 1..120: mol_type = other DNA

SEQ ID NO: 60012 - DNA, 120 bp, synthetic construct; identical to SEQ ID NO: 30058
  source 1..120: mol_type = other DNA

SEQ ID NO: 60013 - DNA, 120 bp, synthetic construct; identical to SEQ ID NO: 30059
  source 1..120: mol_type = other DNA

SEQ ID NO: 60014 - DNA, 120 bp, synthetic construct; identical to SEQ ID NO: 30060
  source 1..120: mol_type = other DNA

SEQ ID NO: 60015 - DNA, 120 bp, synthetic construct; identical to SEQ ID NO: 8961
  source 1..120: mol_type = other DNA

SEQ ID NO: 60016 - DNA, 120 bp, synthetic construct; identical to SEQ ID NO: 30062
  source 1..120: mol_type = other DNA

SEQ ID NO: 60017 - DNA, 120 bp, synthetic construct; identical to SEQ ID NO: 30063
  source 1..120: mol_type = other DNA

SEQ ID NO: 60018 - DNA, 120 bp, synthetic construct; identical to SEQ ID NO: 30064
  source 1..120: mol_type = other DNA

SEQ ID NO: 60019 - DNA, 120 bp, synthetic construct; identical to SEQ ID NO: 8962
  source 1..120: mol_type = other DNA

SEQ ID NO: 60020 - DNA, 120 bp, synthetic construct; identical to SEQ ID NO: 30066
  source 1..120: mol_type = other DNA

SEQ ID NO: 60021 - DNA, 120 bp, synthetic construct; identical to SEQ ID NO: 30067
  source 1..120: mol_type = other DNA

SEQ ID NO: 60022 - DNA, 120 bp, synthetic construct; identical to SEQ ID NO: 8963
  source 1..120: mol_type = other DNA

SEQ ID NO: 60023 - DNA, 120 bp, synthetic construct; identical to SEQ ID NO: 30069
  source 1..120: mol_type = other DNA

SEQ ID NO: 60024 - DNA, 120 bp, synthetic construct; identical to SEQ ID NO: 30070
  source 1..120: mol_type = other DNA

SEQ ID NO: 60025 - DNA, 120 bp, synthetic construct; identical to SEQ ID NO: 30071
  source 1..120: mol_type = other DNA

SEQ ID NO: 60026 - DNA, 120 bp, synthetic construct; identical to SEQ ID NO: 30072
  source 1..120: mol_type = other DNA

SEQ ID NO: 60027 - DNA, 120 bp, synthetic construct; identical to SEQ ID NO: 8964
  source 1..120: mol_type = other DNA

SEQ ID NO: 60028 - DNA, 120 bp, synthetic construct; identical to SEQ ID NO: 30074
  source 1..120: mol_type = other DNA

SEQ ID NO: 60029 - DNA, 120 bp, synthetic construct; identical to SEQ ID NO: 30075
  source 1..120: mol_type = other DNA

SEQ ID NO: 60030 - DNA, 120 bp, synthetic construct; identical to SEQ ID NO: 8965
  source 1..120: mol_type = other DNA

SEQ ID NO: 60031 - DNA, 120 bp, synthetic construct; identical to SEQ ID NO: 30077
  source 1..120: mol_type = other DNA

SEQ ID NO: 60032 - DNA, 120 bp, synthetic construct; identical to SEQ ID NO: 30078
  source 1..120: mol_type = other DNA

SEQ ID NO: 60033 - DNA, 120 bp, synthetic construct; identical to SEQ ID NO: 30079
  source 1..120: mol_type = other DNA

SEQ ID NO: 60034 - DNA, 120 bp, synthetic construct; identical to SEQ ID NO: 30080
  source 1..120: mol_type = other DNA

SEQ ID NO: 60035 - DNA, 120 bp, synthetic construct; identical to SEQ ID NO: 8966
  source 1..120: mol_type = other DNA

SEQ ID NO: 60036 - DNA, 120 bp, synthetic construct; identical to SEQ ID NO: 30082
  source 1..120: mol_type = other DNA

SEQ ID NO: 60037 - DNA, 120 bp, synthetic construct; identical to SEQ ID NO: 30083
  source 1..120: mol_type = other DNA

SEQ ID NO: 60038 - DNA, 120 bp, synthetic construct; identical to SEQ ID NO: 8967
  source 1..120: mol_type = other DNA

SEQ ID NO: 60039 - DNA, 120 bp, synthetic construct; identical to SEQ ID NO: 30085
  source 1..120: mol_type = other DNA

SEQ ID NO: 60040 - DNA, 120 bp, synthetic construct; identical to SEQ ID NO: 30086
  source 1..120: mol_type = other DNA

SEQ ID NO: 60041 - DNA, 120 bp, synthetic construct; identical to SEQ ID NO: 30087
  source 1..120: mol_type = other DNA

SEQ ID NO: 60042 - DNA, 120 bp, synthetic construct; identical to SEQ ID NO: 30088
  source 1..120: mol_type = other DNA

SEQ ID NO: 60043 - DNA, 120 bp, synthetic construct; identical to SEQ ID NO: 8968
  source 1..120: mol_type = other DNA

SEQ ID NO: 60044 - DNA, 120 bp, synthetic construct; identical to SEQ ID NO: 30090
  source 1..120: mol_type = other DNA

SEQ ID NO: 60045 - DNA, 120 bp, synthetic construct; identical to SEQ ID NO: 30091
  source 1..120: mol_type = other DNA

SEQ ID NO: 60046 - DNA, 120 bp, synthetic construct; identical to SEQ ID NO: 8969
  source 1..120: mol_type = other DNA

SEQ ID NO: 60047 - DNA, 120 bp, synthetic construct; identical to SEQ ID NO: 30093
  source 1..120: mol_type = other DNA

SEQ ID NO: 60048 - DNA, 120 bp, synthetic construct; identical to SEQ ID NO: 30094
  source 1..120: mol_type = other DNA

SEQ ID NO: 60049 - DNA, 120 bp, synthetic construct; identical to SEQ ID NO: 30095
  source 1..120: mol_type = other DNA

SEQ ID NO: 60050 - DNA, 120 bp, synthetic construct; identical to SEQ ID NO: 30096
  source 1..120: mol_type = other DNA

SEQ ID NO: 60051 - DNA, 120 bp, synthetic construct; identical to SEQ ID NO: 8970
  source 1..120: mol_type = other DNA

SEQ ID NO: 60052 - DNA, 120 bp, synthetic construct; identical to SEQ ID NO: 30098
  source 1..120: mol_type = other DNA

SEQ ID NO: 60053 - DNA, 120 bp, synthetic construct; identical to SEQ ID NO: 30099
  source 1..120: mol_type = other DNA

SEQ ID NO: 60054 - DNA, 120 bp, synthetic construct; identical to SEQ ID NO: 8971
  source 1..120: mol_type = other DNA

SEQ ID NO: 60055 - DNA, 120 bp, synthetic construct; identical to SEQ ID NO: 30101
  source 1..120: mol_type = other DNA

SEQ ID NO: 60056 - DNA, 120 bp, synthetic construct; identical to SEQ ID NO: 30102
  source 1..120: mol_type = other DNA

SEQ ID NO: 60057 - DNA, 120 bp, synthetic construct; identical to SEQ ID NO: 30103
  source 1..120: mol_type = other DNA

SEQ ID NO: 60058 - DNA, 120 bp, synthetic construct; identical to SEQ ID NO: 8972
  source 1..120: mol_type = other DNA

SEQ ID NO: 60059 - DNA, 120 bp, synthetic construct; identical to SEQ ID NO: 30105
  source 1..120: mol_type = other DNA

SEQ ID NO: 60060 - DNA, 120 bp, synthetic construct; identical to SEQ ID NO: 30106
  source 1..120: mol_type = other DNA

SEQ ID NO: 60061 - DNA, 120 bp, synthetic construct; identical to SEQ ID NO: 30107
  source 1..120: mol_type = other DNA

SEQ ID NO: 60062 - DNA, 120 bp, synthetic construct; identical to SEQ ID NO: 8973
  source 1..120: mol_type = other DNA

SEQ ID NO: 60063 - DNA, 120 bp, synthetic construct; identical to SEQ ID NO: 30109
  source 1..120: mol_type = other DNA

SEQ ID NO: 60064 - DNA, 120 bp, synthetic construct; identical to SEQ ID NO: 30110
  source 1..120: mol_type = other DNA

SEQ ID NO: 60065 - DNA, 120 bp, synthetic construct; identical to SEQ ID NO: 30111
  source 1..120: mol_type = other DNA

SEQ ID NO: 60066 - DNA, 120 bp, synthetic construct; identical to SEQ ID NO: 8974
  source 1..120: mol_type = other DNA

SEQ ID NO: 60067 - DNA, 120 bp, synthetic construct; identical to SEQ ID NO: 30113
  source 1..120: mol_type = other DNA

SEQ ID NO: 60068 - DNA, 120 bp, synthetic construct; identical to SEQ ID NO: 30114
  source 1..120: mol_type = other DNA

SEQ ID NO: 60069 - DNA, 120 bp, synthetic construct; identical to SEQ ID NO: 30115
  source 1..120: mol_type = other DNA

SEQ ID NO: 60070 - DNA, 120 bp, synthetic construct; identical to SEQ ID NO: 8975
  source 1..120: mol_type = other DNA

SEQ ID NO: 60071 - DNA, 120 bp, synthetic construct; identical to SEQ ID NO: 30117
  source 1..120: mol_type = other DNA

SEQ ID NO: 60072 - DNA, 120 bp, synthetic construct; identical to SEQ ID NO: 30118
  source 1..120: mol_type = other DNA

SEQ ID NO: 60073 - DNA, 120 bp, synthetic construct; identical to SEQ ID NO: 30119
  source 1..120: mol_type = other DNA

SEQ ID NO: 60074 - DNA, 120 bp, synthetic construct; identical to SEQ ID NO: 30120
  source 1..120: mol_type = other DNA

SEQ ID NO: 60075 - DNA, 120 bp, synthetic construct; identical to SEQ ID NO: 8976
  source 1..120: mol_type = other DNA

SEQ ID NO: 60076 - DNA, 120 bp, synthetic construct; identical to SEQ ID NO: 30122
  source 1..120: mol_type = other DNA

SEQ ID NO: 60077 - DNA, 120 bp, synthetic construct; identical to SEQ ID NO: 30123
  source 1..120: mol_type = other DNA

SEQ ID NO: 60078 - DNA, 120 bp, synthetic construct; identical to SEQ ID NO: 8977
  source 1..120: mol_type = other DNA

SEQ ID NO: 60079 - DNA, 120 bp, synthetic construct; identical to SEQ ID NO: 30125
  source 1..120: mol_type = other DNA

SEQ ID NO: 60080 - DNA, 120 bp, synthetic construct; identical to SEQ ID NO: 30126
  source 1..120: mol_type = other DNA

SEQ ID NO: 60081 - DNA, 120 bp, synthetic construct; identical to SEQ ID NO: 30127
  source 1..120: mol_type = other DNA

SEQ ID NO: 60082 - DNA, 120 bp, synthetic construct; identical to SEQ ID NO: 8978
  source 1..120: mol_type = other DNA

SEQ ID NO: 60083 - DNA, 120 bp, synthetic construct; identical to SEQ ID NO: 30129
  source 1..120: mol_type = other DNA

SEQ ID NO: 60084 - DNA, 120 bp, synthetic construct; identical to SEQ ID NO: 30130
  source 1..120: mol_type = other DNA

SEQ ID NO: 60085 - DNA, 120 bp, synthetic construct; identical to SEQ ID NO: 30131
  source 1..120: mol_type = other DNA

SEQ ID NO: 60086 - DNA, 120 bp, synthetic construct; identical to SEQ ID NO: 30132
  source 1..120: mol_type = other DNA

SEQ ID NO: 60087 - DNA, 120 bp, synthetic construct; identical to SEQ ID NO: 8979
  source 1..120: mol_type = other DNA

SEQ ID NO: 60088 - DNA, 120 bp, synthetic construct; identical to SEQ ID NO: 30134
  source 1..120: mol_type = other DNA

SEQ ID NO: 60089 - DNA, 120 bp, synthetic construct; identical to SEQ ID NO: 30135
  source 1..120: mol_type = other DNA

SEQ ID NO: 60090 - DNA, 120 bp, synthetic construct; identical to SEQ ID NO: 30136
  source 1..120: mol_type = other DNA

SEQ ID NO: 60091 - DNA, 120 bp, synthetic construct; identical to SEQ ID NO: 8980
  source 1..120: mol_type = other DNA

SEQ ID NO: 60092 - DNA, 120 bp, synthetic construct; identical to SEQ ID NO: 30138
  source 1..120: mol_type = other DNA

SEQ ID NO: 60093 - DNA, 120 bp, synthetic construct; identical to SEQ ID NO: 30139
  source 1..120: mol_type = other DNA

SEQ ID NO: 60094 - DNA, 120 bp, synthetic construct; identical to SEQ ID NO: 30140
  source 1..120: mol_type = other DNA

SEQ ID NO: 60095 - DNA, 120 bp, synthetic construct; identical to SEQ ID NO: 8981
  source 1..120: mol_type = other DNA

SEQ ID NO: 60096 - DNA, 120 bp, synthetic construct; identical to SEQ ID NO: 30142
  source 1..120: mol_type = other DNA

SEQ ID NO: 60097 - DNA, 120 bp, synthetic construct; identical to SEQ ID NO: 30143
  source 1..120: mol_type = other DNA

SEQ ID NO: 60098 - DNA, 120 bp, synthetic construct; identical to SEQ ID NO: 8982
  source 1..120: mol_type = other DNA

SEQ ID NO: 60099 - DNA, 120 bp, synthetic construct; identical to SEQ ID NO: 30145
  source 1..120: mol_type = other DNA

SEQ ID NO: 60100 - DNA, 120 bp, synthetic construct; identical to SEQ ID NO: 30146
  source 1..120: mol_type = other DNA

SEQ ID NO: 60101 - DNA, 120 bp, synthetic construct; identical to SEQ ID NO: 30147
  source 1..120: mol_type = other DNA

SEQ ID NO: 60102 - DNA, 120 bp, synthetic construct; identical to SEQ ID NO: 30148
  source 1..120: mol_type = other DNA

SEQ ID NO: 60103 - DNA, 120 bp, synthetic construct; identical to SEQ ID NO: 8983
  source 1..120: mol_type = other DNA

SEQ ID NO: 60104 - DNA, 120 bp, synthetic construct; identical to SEQ ID NO: 30150
  source 1..120: mol_type = other DNA

SEQ ID NO: 60105 - DNA, 120 bp, synthetic construct; identical to SEQ ID NO: 30151
  source 1..120: mol_type = other DNA

SEQ ID NO: 60106 - DNA, 120 bp, synthetic construct; identical to SEQ ID NO: 30152
  source 1..120: mol_type = other DNA

SEQ ID NO: 60107 - DNA, 120 bp, synthetic construct; identical to SEQ ID NO: 8984
  source 1..120: mol_type = other DNA

SEQ ID NO: 60108 - DNA, 120 bp, synthetic construct; identical to SEQ ID NO: 30154
  source 1..120: mol_type = other DNA

SEQ ID NO: 60109 - DNA, 120 bp, synthetic construct; identical to SEQ ID NO: 30155
  source 1..120: mol_type = other DNA

SEQ ID NO: 60110 - DNA, 120 bp, synthetic construct; identical to SEQ ID NO: 8985
  source 1..120: mol_type = other DNA

SEQ ID NO: 60111 - DNA, 120 bp, synthetic construct; identical to SEQ ID NO: 30157
  source 1..120: mol_type = other DNA

SEQ ID NO: 60112 - DNA, 120 bp, synthetic construct; identical to SEQ ID NO: 30158
  source 1..120: mol_type = other DNA

SEQ ID NO: 60113 - DNA, 120 bp, synthetic construct; identical to SEQ ID NO: 30159
  source 1..120: mol_type = other DNA

SEQ ID NO: 60114 - DNA, 120 bp, synthetic construct; identical to SEQ ID NO: 8986
  source 1..120: mol_type = other DNA

SEQ ID NO: 60115 - DNA, 120 bp, synthetic construct; identical to SEQ ID NO: 30161
  source 1..120: mol_type = other DNA

SEQ ID NO: 60116 - DNA, 120 bp, synthetic construct; identical to SEQ ID NO: 30162
  source 1..120: mol_type = other DNA

SEQ ID NO: 60117 - DNA, 120 bp, synthetic construct; identical to SEQ ID NO: 30163
  source 1..120: mol_type = other DNA

SEQ ID NO: 60118 - DNA, 120 bp, synthetic construct; identical to SEQ ID NO: 8987
  source 1..120: mol_type = other DNA

SEQ ID NO: 60119 - DNA, 120 bp, synthetic construct; identical to SEQ ID NO: 30165
  source 1..120: mol_type = other DNA

SEQ ID NO: 60120 - DNA, 120 bp, synthetic construct; identical to SEQ ID NO: 30166
  source 1..120: mol_type = other DNA

SEQ ID NO: 60121 - DNA, 120 bp, synthetic construct; identical to SEQ ID NO: 30167
  source 1..120: mol_type = other DNA

SEQ ID NO: 60122 - DNA, 120 bp, synthetic construct; identical to SEQ ID NO: 30168
  source 1..120: mol_type = other DNA

SEQ ID NO: 60123 - DNA, 120 bp, synthetic construct; identical to SEQ ID NO: 8988
  source 1..120: mol_type = other DNA

SEQ ID NO: 60124 - DNA, 120 bp, synthetic construct; identical to SEQ ID NO: 30170
  source 1..120: mol_type = other DNA

SEQ ID NO: 60125 - DNA, 120 bp, synthetic construct; identical to SEQ ID NO: 30171
  source 1..120: mol_type = other DNA

SEQ ID NO: 60126 - DNA, 120 bp, synthetic construct; identical to SEQ ID NO: 8989
  source 1..120: mol_type = other DNA

SEQ ID NO: 60127 - DNA, 120 bp, synthetic construct; identical to SEQ ID NO: 30173
  source 1..120: mol_type = other DNA

SEQ ID NO: 60128 - DNA, 120 bp, synthetic construct; identical to SEQ ID NO: 30174
  source 1..120: mol_type = other DNA

SEQ ID NO: 60129 - DNA, 120 bp, synthetic construct; identical to SEQ ID NO: 30175
  source 1..120: mol_type = other DNA

SEQ ID NO: 60130 - DNA, 120 bp, synthetic construct; identical to SEQ ID NO: 30176
  source 1..120: mol_type = other DNA

SEQ ID NO: 60131 - DNA, 120 bp, synthetic construct; identical to SEQ ID NO: 8990
  source 1..120: mol_type = other DNA

SEQ ID NO: 60132 - DNA, 120 bp, synthetic construct; identical to SEQ ID NO: 30178
  source 1..120: mol_type = other DNA

SEQ ID NO: 60133 - DNA, 120 bp, synthetic construct; identical to SEQ ID NO: 30179
  source 1..120: mol_type = other DNA

SEQ ID NO: 60134 - DNA, 120 bp, synthetic construct; identical to SEQ ID NO: 1905
  source 1..120: mol_type = other DNA

SEQ ID NO: 60135 - DNA, 120 bp, synthetic construct; identical to SEQ ID NO: 8991
  source 1..120: mol_type = other DNA

SEQ ID NO: 60136 - DNA, 120 bp, synthetic construct; identical to SEQ ID NO: 30182
  source 1..120: mol_type = other DNA

SEQ ID NO: 60137 - DNA, 120 bp, synthetic construct; identical to SEQ ID NO: 30183
  source 1..120: mol_type = other DNA

SEQ ID NO: 60138 - DNA, 120 bp, synthetic construct; identical to SEQ ID NO: 30184
  source 1..120: mol_type = other DNA

SEQ ID NO: 60139 - DNA, 120 bp, synthetic construct; identical to SEQ ID NO: 8992
  source 1..120: mol_type = other DNA

SEQ ID NO: 60140 - DNA, 120 bp, synthetic construct; identical to SEQ ID NO: 30186
  source 1..120: mol_type = other DNA

SEQ ID NO: 60141 - DNA, 120 bp, synthetic construct; identical to SEQ ID NO: 30187
  source 1..120: mol_type = other DNA

SEQ ID NO: 60142 - DNA, 120 bp, synthetic construct; identical to SEQ ID NO: 8993
  source 1..120: mol_type = other DNA

SEQ ID NO: 60143 - DNA, 120 bp, synthetic construct; identical to SEQ ID NO: 30189
  source 1..120: mol_type = other DNA

SEQ ID NO: 60144 - DNA, 120 bp, synthetic construct; identical to SEQ ID NO: 30190
  source 1..120: mol_type = other DNA

SEQ ID NO: 60145 - DNA, 120 bp, synthetic construct; identical to SEQ ID NO: 30191
  source 1..120: mol_type = other DNA

SEQ ID NO: 60146 - DNA, 120 bp, synthetic construct; identical to SEQ ID NO: 30192
  source 1..120: mol_type = other DNA

SEQ ID NO: 60147 - DNA, 120 bp, synthetic construct; identical to SEQ ID NO: 8994
  source 1..120: mol_type = other DNA

SEQ ID NO: 60148 - DNA, 120 bp, synthetic construct; identical to SEQ ID NO: 30194
  source 1..120: mol_type = other DNA

SEQ ID NO: 60149 - DNA, 120 bp, synthetic construct; identical to SEQ ID NO: 30195
  source 1..120: mol_type = other DNA

SEQ ID NO: 60150 - DNA, 120 bp, synthetic construct; identical to SEQ ID NO: 30196
  source 1..120: mol_type = other DNA

SEQ ID NO: 60151 - DNA, 120 bp, synthetic construct; identical to SEQ ID NO: 30197
  source 1..120: mol_type = other DNA

SEQ ID NO: 60152 - DNA, 120 bp, synthetic construct; identical to SEQ ID NO: 8995
  source 1..120: mol_type = other DNA

SEQ ID NO: 60153 - DNA, 120 bp, synthetic construct; identical to SEQ ID NO: 30199
  source 1..120: mol_type = other DNA

SEQ ID NO: 60154 - DNA, 120 bp, synthetic construct; identical to SEQ ID NO: 30200
  source 1..120: mol_type = other DNA

SEQ ID NO: 60155 - DNA, 120 bp, synthetic construct; identical to SEQ ID NO: 8996
  source 1..120: mol_type = other DNA

SEQ ID NO: 60156 - DNA, 120 bp, synthetic construct; identical to SEQ ID NO: 30202
  source 1..120: mol_type = other DNA

SEQ ID NO: 60157 - DNA, 120 bp, synthetic construct; identical to SEQ ID NO: 30203
  source 1..120: mol_type = other DNA

SEQ ID NO: 60158 - DNA, 120 bp, synthetic construct; identical to SEQ ID NO: 30204
  source 1..120: mol_type = other DNA

SEQ ID NO: 60159 - DNA, 120 bp, synthetic construct; identical to SEQ ID NO: 30205
  source 1..120: mol_type = other DNA

SEQ ID NO: 60160 - DNA, 120 bp, synthetic construct; identical to SEQ ID NO: 8997
  source 1..120: mol_type = other DNA

SEQ ID NO: 60161 - DNA, 120 bp, synthetic construct; identical to SEQ ID NO: 30207
  source 1..120: mol_type = other DNA

SEQ ID NO: 60162 - DNA, 120 bp, synthetic construct; identical to SEQ ID NO: 30208
  source 1..120: mol_type = other DNA

SEQ ID NO: 60163 - DNA, 120 bp, synthetic construct; identical to SEQ ID NO: 30209
  source 1..120: mol_type = other DNA

SEQ ID NO: 60164 - DNA, 120 bp, synthetic construct; identical to SEQ ID NO: 8998
  source 1..120: mol_type = other DNA

SEQ ID NO: 60165 - DNA, 120 bp, synthetic construct; identical to SEQ ID NO: 30211
  source 1..120: mol_type = other DNA

SEQ ID NO: 60166 - DNA, 120 bp, synthetic construct; identical to SEQ ID NO: 30212
  source 1..120: mol_type = other DNA

SEQ ID NO: 60167 - DNA, 120 bp, synthetic construct; identical to SEQ ID NO: 8999
  source 1..120: mol_type = other DNA

SEQ ID NO: 60168 - DNA, 120 bp, synthetic construct; identical to SEQ ID NO: 30214
  source 1..120: mol_type = other DNA

SEQ ID NO: 60169 - DNA, 120 bp, synthetic construct; identical to SEQ ID NO: 30215
  source 1..120: mol_type = other DNA

SEQ ID NO: 60170 - DNA, 120 bp, synthetic construct; identical to SEQ ID NO: 30216
  source 1..120: mol_type = other DNA

SEQ ID NO: 60171 - DNA, 120 bp, synthetic construct; identical to SEQ ID NO: 9000
  source 1..120: mol_type = other DNA

SEQ ID NO: 60172 - DNA, 120 bp, synthetic construct; identical to SEQ ID NO: 30218
  source 1..120: mol_type = other DNA

SEQ ID NO: 60173 - DNA, 120 bp, synthetic construct; identical to SEQ ID NO: 30219
  source 1..120: mol_type = other DNA

SEQ ID NO: 60174 - DNA, 120 bp, synthetic construct; identical to SEQ ID NO: 30220
  source 1..120: mol_type = other DNA

SEQ ID NO: 60175 - DNA, 120 bp, synthetic construct; identical to SEQ ID NO: 30221
  source 1..120: mol_type = other DNA

SEQ ID NO: 60176 - DNA, 120 bp, synthetic construct; identical to SEQ ID NO: 9001
  source 1..120: mol_type = other DNA

SEQ ID NO: 60177 - DNA, 120 bp, synthetic construct; identical to SEQ ID NO: 30223
  source 1..120: mol_type = other DNA

SEQ ID NO: 60178 - DNA, 120 bp, synthetic construct; identical to SEQ ID NO: 30224
  source 1..120: mol_type = other DNA

SEQ ID NO: 60179 - DNA, 120 bp, synthetic construct; identical to SEQ ID NO: 30225
  source 1..120: mol_type = other DNA

SEQ ID NO: 60180 - DNA, 120 bp, synthetic construct; identical to SEQ ID NO: 9002
  source 1..120: mol_type = other DNA

SEQ ID NO: 60181 - DNA, 120 bp, synthetic construct; identical to SEQ ID NO: 30227
  source 1..120: mol_type = other DNA

SEQ ID NO: 60182 - DNA, 120 bp, synthetic construct; identical to SEQ ID NO: 30228
  source 1..120: mol_type = other DNA

SEQ ID NO: 60183 - DNA, 120 bp, synthetic construct; identical to SEQ ID NO: 9003
  source 1..120: mol_type = other DNA

SEQ ID NO: 60184 - DNA, 120 bp, synthetic construct; identical to SEQ ID NO: 30230
  source 1..120: mol_type = other DNA

SEQ ID NO: 60185 - DNA, 120 bp, synthetic construct; identical to SEQ ID NO: 30231
  source 1..120: mol_type = other DNA

SEQ ID NO: 60186 - DNA, 120 bp, synthetic construct; identical to SEQ ID NO: 30232
  source 1..120: mol_type = other DNA

SEQ ID NO: 60187 - DNA, 120 bp, synthetic construct; identical to SEQ ID NO: 30233
  source 1..120: mol_type = other DNA

SEQ ID NO: 60188 - DNA, 120 bp, synthetic construct; identical to SEQ ID NO: 9004
  source 1..120: mol_type = other DNA

SEQ ID NO: 60189 - DNA, 120 bp, synthetic construct; identical to SEQ ID NO: 30235
  source 1..120: mol_type = other DNA

SEQ ID NO: 60190 - DNA, 120 bp, synthetic construct; identical to SEQ ID NO: 30236
  source 1..120: mol_type = other DNA

SEQ ID NO: 60191 - DNA, 120 bp, synthetic construct; identical to SEQ ID NO: 30237
  source 1..120: mol_type = other DNA

SEQ ID NO: 60192 - DNA, 120 bp, synthetic construct; identical to SEQ ID NO: 9005
  source 1..120: mol_type = other DNA

SEQ ID NO: 60193 - DNA, 120 bp, synthetic construct; identical to SEQ ID NO: 30239
  source 1..120: mol_type = other DNA

SEQ ID NO: 60194 - DNA, 120 bp, synthetic construct; identical to SEQ ID NO: 30240
  source 1..120: mol_type = other DNA

SEQ ID NO: 60195 - DNA, 120 bp, synthetic construct; identical to SEQ ID NO: 30241
  source 1..120: mol_type = other DNA

SEQ ID NO: 60196 - DNA, 120 bp, synthetic construct; identical to SEQ ID NO: 9006
  source 1..120: mol_type = other DNA

SEQ ID NO: 60197 - DNA, 120 bp, synthetic construct; identical to SEQ ID NO: 1920
  source 1..120: mol_type = other DNA

SEQ ID NO: 60198 - DNA, 120 bp, synthetic construct; identical to SEQ ID NO: 30244
  source 1..120: mol_type = other DNA

SEQ ID NO: 60199 - DNA, 120 bp, synthetic construct; identical to SEQ ID NO: 30245
  source 1..120: mol_type = other DNA

SEQ ID NO: 60200 - DNA, 120 bp, synthetic construct; identical to SEQ ID NO: 9007
  source 1..120: mol_type = other DNA

SEQ ID NO: 60201 - DNA, 120 bp, synthetic construct; identical to SEQ ID NO: 30247
  source 1..120: mol_type = other DNA

SEQ ID NO: 60202 - DNA, 120 bp, synthetic construct; identical to SEQ ID NO: 30248
  source 1..120: mol_type = other DNA

SEQ ID NO: 60203 - DNA, 120 bp, synthetic construct; identical to SEQ ID NO: 30249
  source 1..120: mol_type = other DNA

SEQ ID NO: 60204 - DNA, 120 bp, synthetic construct; identical to SEQ ID NO: 9008
  source 1..120: mol_type = other DNA

SEQ ID NO: 60205 - DNA, 120 bp, synthetic construct; identical to SEQ ID NO: 30251
  source 1..120: mol_type = other DNA

SEQ ID NO: 60206 - DNA, 120 bp, synthetic construct; identical to SEQ ID NO: 30252
  source 1..120: mol_type = other DNA

SEQ ID NO: 60207 - DNA, 120 bp, synthetic construct; identical to SEQ ID NO: 30253
  source 1..120: mol_type = other DNA

SEQ ID NO: 60208 - DNA, 120 bp, synthetic construct; identical to SEQ ID NO: 30254
  source 1..120: mol_type = other DNA

SEQ ID NO: 60209 - DNA, 120 bp, synthetic construct; identical to SEQ ID NO: 9009
  source 1..120: mol_type = other DNA

SEQ ID NO: 60210 - DNA, 120 bp, synthetic construct; identical to SEQ ID NO: 30256
  source 1..120: mol_type = other DNA

SEQ ID NO: 60211 - DNA, 120 bp, synthetic construct; identical to SEQ ID NO: 30257
  source 1..120: mol_type = other DNA

SEQ ID NO: 60212 - DNA, 120 bp, synthetic construct; identical to SEQ ID NO: 30258
  source 1..120: mol_type = other DNA

SEQ ID NO: 60213 - DNA, 120 bp, synthetic construct; identical to SEQ ID NO: 9010
  source 1..120: mol_type = other DNA

SEQ ID NO: 60214 - DNA, 120 bp, synthetic construct; identical to SEQ ID NO: 30260
  source 1..120: mol_type = other DNA

SEQ ID NO: 60215 - DNA, 120 bp, synthetic construct; identical to SEQ ID NO: 30261
  source 1..120: mol_type = other DNA

SEQ ID NO: 60216 - DNA, 120 bp, synthetic construct; identical to SEQ ID NO: 9011
  source 1..120: mol_type = other DNA

SEQ ID NO: 60217 - DNA, 120 bp, synthetic construct; identical to SEQ ID NO: 30263
  source 1..120: mol_type = other DNA

SEQ ID NO: 60218 - DNA, 120 bp, synthetic construct; identical to SEQ ID NO: 30264
  source 1..120: mol_type = other DNA

SEQ ID NO: 60219 - DNA, 120 bp, synthetic construct; identical to SEQ ID NO: 30265
  source 1..120: mol_type = other DNA

SEQ ID NO: 60220 - DNA, 120 bp, synthetic construct; identical to SEQ ID NO: 9012
  source 1..120: mol_type = other DNA

SEQ ID NO: 60221 - DNA, 120 bp, synthetic construct; identical to SEQ ID NO: 30267
  source 1..120: mol_type = other DNA

SEQ ID NO: 60222 - DNA, 120 bp, synthetic construct; identical to SEQ ID NO: 30268
  source 1..120: mol_type = other DNA

SEQ ID NO: 60223 - DNA, 120 bp, synthetic construct; identical to SEQ ID NO: 30269
  source 1..120: mol_type = other DNA

SEQ ID NO: 60224 - DNA, 120 bp, synthetic construct; identical to SEQ ID NO: 9013
  source 1..120: mol_type = other DNA

SEQ ID NO: 60225 - DNA, 120 bp, synthetic construct; identical to SEQ ID NO: 30271
  source 1..120: mol_type = other DNA

SEQ ID NO: 60226 - DNA, 120 bp, synthetic construct; identical to SEQ ID NO: 30272
  source 1..120: mol_type = other DNA

SEQ ID NO: 60227 - DNA, 120 bp, synthetic construct; identical to SEQ ID NO: 30273
  source 1..120: mol_type = other DNA

SEQ ID NO: 60228 - DNA, 120 bp, synthetic construct; identical to SEQ ID NO: 9014
  source 1..120: mol_type = other DNA

SEQ ID NO: 60229 - DNA, 120 bp, synthetic construct; identical to SEQ ID NO: 30275
  source 1..120: mol_type = other DNA

SEQ ID NO: 60230 - DNA, 120 bp, synthetic construct; identical to SEQ ID NO: 30276
  source 1..120: mol_type = other DNA

SEQ ID NO: 60231 - DNA, 120 bp, synthetic construct; identical to SEQ ID NO: 30277
  source 1..120: mol_type = other DNA

SEQ ID NO: 60232 - DNA, 120 bp, synthetic construct; identical to SEQ ID NO: 9015
  source 1..120: mol_type = other DNA

SEQ ID NO: 60233 - DNA, 120 bp, synthetic construct; identical to SEQ ID NO: 30279
  source 1..120: mol_type = other DNA

SEQ ID NO: 60234 - DNA, 120 bp, synthetic construct; identical to SEQ ID NO: 30280
  source 1..120: mol_type = other DNA

SEQ ID NO: 60235 - DNA, 120 bp, synthetic construct; identical to SEQ ID NO: 30281
  source 1..120: mol_type = other DNA

SEQ ID NO: 60236 - DNA, 120 bp, synthetic construct; identical to SEQ ID NO: 9016
  source 1..120: mol_type = other DNA

SEQ ID NO: 60237 - DNA, 120 bp, synthetic construct; identical to SEQ ID NO: 30283
  source 1..120: mol_type = other DNA

SEQ ID NO: 60238 - DNA, 120 bp, synthetic construct; identical to SEQ ID NO: 30284
  source 1..120: mol_type = other DNA

SEQ ID NO: 60239 - DNA, 120 bp, synthetic construct; identical to SEQ ID NO: 30285
  source 1..120: mol_type = other DNA

SEQ ID NO: 60240 - DNA, 120 bp, synthetic construct; identical to SEQ ID NO: 9017
  source 1..120: mol_type = other DNA

SEQ ID NO: 60241 - DNA, 120 bp, synthetic construct; identical to SEQ ID NO: 30287
  source 1..120: mol_type = other DNA

SEQ ID NO: 60242 - DNA, 120 bp, synthetic construct; identical to SEQ ID NO: 1930
  source 1..120: mol_type = other DNA

SEQ ID NO: 60243 - DNA, 120 bp, synthetic construct; identical to SEQ ID NO: 30289
  source 1..120: mol_type = other DNA

SEQ ID NO: 60244 - DNA, 120 bp, synthetic construct; identical to SEQ ID NO: 30290
  source 1..120: mol_type = other DNA

SEQ ID NO: 60245 - DNA, 120 bp, synthetic construct; identical to SEQ ID NO: 9018
  source 1..120: mol_type = other DNA

SEQ ID NO: 60246 - DNA, 120 bp, synthetic construct; identical to SEQ ID NO: 30292
  source 1..120: mol_type = other DNA

SEQ ID NO: 60247 - DNA, 120 bp, synthetic construct; identical to SEQ ID NO: 30293
  source 1..120: mol_type = other DNA

SEQ ID NO: 60248 - DNA, 120 bp, synthetic construct; identical to SEQ ID NO: 9019
  source 1..120: mol_type = other DNA

SEQ ID NO: 60249 - DNA, 120 bp, synthetic construct; identical to SEQ ID NO: 30295
  source 1..120: mol_type = other DNA

SEQ ID NO: 60250 - DNA, 120 bp, synthetic construct; identical to SEQ ID NO: 30296
  source 1..120: mol_type = other DNA

SEQ ID NO: 60251 - DNA, 120 bp, synthetic construct; identical to SEQ ID NO: 30297
  source 1..120: mol_type = other DNA

SEQ ID NO: 60252 - DNA, 120 bp, synthetic construct; identical to SEQ ID NO: 9020
  source 1..120: mol_type = other DNA

SEQ ID NO: 60253 - DNA, 120 bp, synthetic construct; identical to SEQ ID NO: 30299
  source 1..120: mol_type = other DNA

SEQ ID NO: 60254 - DNA, 120 bp, synthetic construct; identical to SEQ ID NO: 30300
  source 1..120: mol_type = other DNA

SEQ ID NO: 60255 - DNA, 120 bp, synthetic construct; identical to SEQ ID NO: 30301
  source 1..120: mol_type = other DNA

SEQ ID NO: 60256 - DNA, 120 bp, synthetic construct; identical to SEQ ID NO: 30302
  source 1..120: mol_type = other DNA

SEQ ID NO: 60257 - DNA, 120 bp, synthetic construct; identical to SEQ ID NO: 9021
  source 1..120: mol_type = other DNA

SEQ ID NO: 60258 - DNA, 120 bp, synthetic construct; identical to SEQ ID NO: 30304
  source 1..120: mol_type = other DNA

SEQ ID NO: 60259 - DNA, 120 bp, synthetic construct; identical to SEQ ID NO: 30305
  source 1..120: mol_type = other DNA

SEQ ID NO: 60260 - DNA, 120 bp, synthetic construct; identical to SEQ ID NO: 30306
  source 1..120: mol_type = other DNA

SEQ ID NO: 60261 - DNA, 120 bp, synthetic construct; identical to SEQ ID NO: 9022
  source 1..120: mol_type = other DNA

SEQ ID NO: 60262 - DNA, 120 bp, synthetic construct; identical to SEQ ID NO: 30308
  source 1..120: mol_type = other DNA

SEQ ID NO: 60263 - DNA, 120 bp, synthetic construct; identical to SEQ ID NO: 30309
  source 1..120: mol_type = other DNA

SEQ ID NO: 60264 - DNA, 120 bp, synthetic construct; identical to SEQ ID NO: 9023
  source 1..120: mol_type = other DNA

SEQ ID NO: 60265 - DNA, 120 bp, synthetic construct; identical to SEQ ID NO: 30311
  source 1..120: mol_type = other DNA

SEQ ID NO: 60266 - DNA, 120 bp, synthetic construct; identical to SEQ ID NO: 30312
  source 1..120: mol_type = other DNA

SEQ ID NO: 60267 - DNA, 120 bp, synthetic construct; identical to SEQ ID NO: 30313
  source 1..120: mol_type = other DNA

SEQ ID NO: 60268 - DNA, 120 bp, synthetic construct; identical to SEQ ID NO: 30314
  source 1..120: mol_type = other DNA

SEQ ID NO: 60269 - DNA, 120 bp, synthetic construct; identical to SEQ ID NO: 9024
  source 1..120: mol_type = other DNA

SEQ ID NO: 60270 - DNA, 120 bp, synthetic construct; identical to SEQ ID NO: 30316
  source 1..120: mol_type = other DNA

SEQ ID NO: 60271 - DNA, 120 bp, synthetic construct; identical to SEQ ID NO: 30317
  source 1..120: mol_type = other DNA

SEQ ID NO: 60272 - DNA, 120 bp, synthetic construct; identical to SEQ ID NO: 30318
  source 1..120: mol_type = other DNA

SEQ ID NO: 60273 - DNA, 120 bp, synthetic construct; identical to SEQ ID NO: 9025
  source 1..120: mol_type = other DNA

SEQ ID NO: 60274 - DNA, 120 bp, synthetic construct; identical to SEQ ID NO: 30320
  source 1..120: mol_type = other DNA

SEQ ID NO: 60275 - DNA, 120 bp, synthetic construct; identical to SEQ ID NO: 30321
  source 1..120: mol_type = other DNA

SEQ ID NO: 60276 - DNA, 120 bp, synthetic construct; identical to SEQ ID NO: 9026
  source 1..120: mol_type = other DNA

SEQ ID NO: 60277 - DNA, 120 bp, synthetic construct; identical to SEQ ID NO: 30323
  source 1..120: mol_type = other DNA

SEQ ID NO: 60278 - DNA, 120 bp, synthetic construct; identical to SEQ ID NO: 30324
  source 1..120: mol_type = other DNA

SEQ ID NO: 60279 - DNA, 120 bp, synthetic construct; identical to SEQ ID NO: 30325
  source 1..120: mol_type = other DNA

SEQ ID NO: 60280 - DNA, 120 bp, synthetic construct; identical to SEQ ID NO: 30326
  source 1..120: mol_type = other DNA

SEQ ID NO: 60281 - DNA, 120 bp, synthetic construct; identical to SEQ ID NO: 9027
  source 1..120: mol_type = other DNA

SEQ ID NO: 60282 - DNA, 120 bp, synthetic construct; identical to SEQ ID NO: 30328
  source 1..120: mol_type = other DNA

SEQ ID NO: 60283 - DNA, 120 bp, synthetic construct; identical to SEQ ID NO: 30329
  source 1..120: mol_type = other DNA

SEQ ID NO: 60284 - DNA, 120 bp, synthetic construct; identical to SEQ ID NO: 30330
  source 1..120: mol_type = other DNA

SEQ ID NO: 60285 - DNA, 120 bp, synthetic construct; identical to SEQ ID NO: 9028
  source 1..120: mol_type = other DNA

SEQ ID NO: 60286 - DNA, 120 bp, synthetic construct; identical to SEQ ID NO: 30332
  source 1..120: mol_type = other DNA

SEQ ID NO: 60287 - DNA, 120 bp, synthetic construct; identical to SEQ ID NO: 30333
  source 1..120: mol_type = other DNA

SEQ ID NO: 60288 - DNA, 120 bp, synthetic construct; identical to SEQ ID NO: 30334
  source 1..120: mol_type = other DNA

SEQ ID NO: 60289 - DNA, 120 bp, synthetic construct; identical to SEQ ID NO: 9029
  source 1..120: mol_type = other DNA

SEQ ID NO: 60290 - DNA, 120 bp, synthetic construct; identical to SEQ ID NO: 30336
  source 1..120: mol_type = other DNA

SEQ ID NO: 60291 - DNA, 120 bp, synthetic construct; identical to SEQ ID NO: 30337
  source 1..120: mol_type = other DNA

SEQ ID NO: 60292 - DNA, 120 bp, synthetic construct; identical to SEQ ID NO: 9030
  source 1..120: mol_type = other DNA

SEQ ID NO: 60293 - DNA, 120 bp, synthetic construct; identical to SEQ ID NO: 30339
  source 1..120: mol_type = other DNA

SEQ ID NO: 60294 - DNA, 120 bp, synthetic construct; identical to SEQ ID NO: 30340
  source 1..120: mol_type = other DNA

SEQ ID NO: 60295 - DNA, 120 bp, synthetic construct; identical to SEQ ID NO: 30341
  source 1..120: mol_type = other DNA

SEQ ID NO: 60296 - DNA, 120 bp, synthetic construct; identical to SEQ ID NO: 30342
  source 1..120: mol_type = other DNA

SEQ ID NO: 60297 - DNA, 120 bp, synthetic construct; identical to SEQ ID NO: 9031
  source 1..120: mol_type = other DNA

SEQ ID NO: 60298 - DNA, 120 bp, synthetic construct; identical to SEQ ID NO: 30344
  source 1..120: mol_type = other DNA

SEQ ID NO: 60299 - DNA, 120 bp, synthetic construct; identical to SEQ ID NO: 30345
  source 1..120: mol_type = other DNA

SEQ ID NO: 60300 - DNA, 120 bp, synthetic construct; identical to SEQ ID NO: 30346
  source 1..120: mol_type = other DNA

SEQ ID NO: 60301 - DNA, 120 bp, synthetic construct; identical to SEQ ID NO: 9032
  source 1..120: mol_type = other DNA

SEQ ID NO: 60302 - DNA, 120 bp, synthetic construct; identical to SEQ ID NO: 30348
  source 1..120: mol_type = other DNA

SEQ ID NO: 60303 - DNA, 120 bp, synthetic construct; identical to SEQ ID NO: 30349
  source 1..120: mol_type = other DNA

SEQ ID NO: 60304 - DNA, 120 bp, synthetic construct; identical to SEQ ID NO: 9033
  source 1..120: mol_type = other DNA

SEQ ID NO: 60305 - DNA, 120 bp, synthetic construct; identical to SEQ ID NO: 30351
  source 1..120: mol_type = other DNA

SEQ ID NO: 60306 - DNA, 120 bp, synthetic construct; identical to SEQ ID NO: 30352
  source 1..120: mol_type = other DNA

SEQ ID NO: 60307 - DNA, 120 bp, synthetic construct; identical to SEQ ID NO: 30353
  source 1..120: mol_type = other DNA

SEQ ID NO: 60308 - DNA, 120 bp, synthetic construct; identical to SEQ ID NO: 30354
  source 1..120: mol_type = other DNA

SEQ ID NO: 60309 - DNA, 120 bp, synthetic construct; identical to SEQ ID NO: 30355
  source 1..120: mol_type = other DNA

SEQ ID NO: 60310 - DNA, 120 bp, synthetic construct; identical to SEQ ID NO: 9034
  source 1..120: mol_type = other DNA

SEQ ID NO: 60311 - DNA, 120 bp, synthetic construct; identical to SEQ ID NO: 30357
  source 1..120: mol_type = other DNA

SEQ ID NO: 60312 - DNA, 120 bp, synthetic construct; identical to SEQ ID NO: 30358
  source 1..120: mol_type = other DNA

SEQ ID NO: 60313 - DNA, 120 bp, synthetic construct; identical to SEQ ID NO: 9035
  source 1..120: mol_type = other DNA

SEQ ID NO: 60314 - DNA, 120 bp, synthetic construct; identical to SEQ ID NO: 30360
  source 1..120: mol_type = other DNA

SEQ ID NO: 60315 - DNA, 120 bp, synthetic construct; identical to SEQ ID NO: 30361
  source 1..120: mol_type = other DNA

SEQ ID NO: 60316 - DNA, 120 bp, synthetic construct; identical to SEQ ID NO: 30362
  source 1..120: mol_type = other DNA

SEQ ID NO: 60317 - DNA, 120 bp, synthetic construct; identical to SEQ ID NO: 30363
  source 1..120: mol_type = other DNA

SEQ ID NO: 60318 - DNA, 120 bp, synthetic construct; identical to SEQ ID NO: 9036
  source 1..120: mol_type = other DNA

SEQ ID NO: 60319 - DNA, 120 bp, synthetic construct; identical to SEQ ID NO: 30365
  source 1..120: mol_type = other DNA

SEQ ID NO: 60320 - DNA, 120 bp, synthetic construct; identical to SEQ ID NO: 30366
  source 1..120: mol_type = other DNA

SEQ ID NO: 60321 - DNA, 120 bp, synthetic construct; identical to SEQ ID NO: 30367
  source 1..120: mol_type = other DNA

SEQ ID NO: 60322 - DNA, 120 bp, synthetic construct; identical to SEQ ID NO: 9037
  source 1..120: mol_type = other DNA

SEQ ID NO: 60323 - DNA, 120 bp, synthetic construct; identical to SEQ ID NO: 30369
  source 1..120: mol_type = other DNA

SEQ ID NO: 60324 - DNA, 120 bp, synthetic construct; identical to SEQ ID NO: 30370
  source 1..120: mol_type = other DNA

SEQ ID NO: 60325 - DNA, 120 bp, synthetic construct; identical to SEQ ID NO: 9038
  source 1..120: mol_type = other DNA

SEQ ID NO: 60326 - DNA, 120 bp, synthetic construct; identical to SEQ ID NO: 30372
  source 1..120: mol_type = other DNA

SEQ ID NO: 60327 - DNA, 120 bp, synthetic construct; identical to SEQ ID NO: 30373
  source 1..120: mol_type = other DNA

SEQ ID NO: 60328 - DNA, 120 bp, synthetic construct; identical to SEQ ID NO: 30374
  source 1..120: mol_type = other DNA

SEQ ID NO: 60329 - DNA, 120 bp, synthetic construct; identical to SEQ ID NO: 9039
  source 1..120: mol_type = other DNA

SEQ ID NO: 60330 - DNA, 120 bp, synthetic construct; identical to SEQ ID NO: 30376
  source 1..120: mol_type = other DNA

SEQ ID NO: 60331 - DNA, 120 bp, synthetic construct; identical to SEQ ID NO: 30377
  source 1..120: mol_type = other DNA

SEQ ID NO: 60332 - DNA, 120 bp, synthetic construct; identical to SEQ ID NO: 30378
  source 1..120: mol_type = other DNA

SEQ ID NO: 60333 - DNA, 120 bp, synthetic construct; identical to SEQ ID NO: 9040
  source 1..120: mol_type = other DNA

SEQ ID NO: 60334 - DNA, 120 bp, synthetic construct; identical to SEQ ID NO: 30380
  source 1..120: mol_type = other DNA

SEQ ID NO: 60335 - DNA, 120 bp, synthetic construct; identical to SEQ ID NO: 30381
  source 1..120: mol_type = other DNA

SEQ ID NO: 60336 - DNA, 120 bp, synthetic construct; identical to SEQ ID NO: 30382
  source 1..120: mol_type = other DNA

SEQ ID NO: 60337 - DNA, 120 bp, synthetic construct; identical to SEQ ID NO: 30383
  source 1..120: mol_type = other DNA

SEQ ID NO: 60338 - DNA, 120 bp, synthetic construct; identical to SEQ ID NO: 9041
  source 1..120: mol_type = other DNA

SEQ ID NO: 60339 - DNA, 120 bp, synthetic construct; identical to SEQ ID NO: 30385
  source 1..120: mol_type = other DNA

SEQ ID NO: 60340 - DNA, 120 bp, synthetic construct; identical to SEQ ID NO: 30386
  source 1..120: mol_type = other DNA

SEQ ID NO: 60341 - DNA, 120 bp, synthetic construct; identical to SEQ ID NO: 30387
  source 1..120: mol_type = other DNA

SEQ ID NO: 60342 - DNA, 120 bp, synthetic construct; identical to SEQ ID NO: 9042
  source 1..120: mol_type = other DNA

SEQ ID NO: 60343 - DNA, 120 bp, synthetic construct; identical to SEQ ID NO: 30389
  source 1..120: mol_type = other DNA

SEQ ID NO: 60344 - DNA, 120 bp, synthetic construct; identical to SEQ ID NO: 30390
  source 1..120: mol_type = other DNA

SEQ ID NO: 60345 - DNA, 120 bp, synthetic construct; identical to SEQ ID NO: 30391
  source 1..120: mol_type = other DNA

SEQ ID NO: 60346 - DNA, 120 bp, synthetic construct; identical to SEQ ID NO: 30392
  source 1..120: mol_type = other DNA

SEQ ID NO: 60347 - DNA, 120 bp, synthetic construct; identical to SEQ ID NO: 9043
  source 1..120: mol_type = other DNA

SEQ ID NO: 60348 - DNA, 120 bp, synthetic construct; identical to SEQ ID NO: 30394
  source 1..120: mol_type = other DNA

SEQ ID NO: 60349 - DNA, 120 bp, synthetic construct; identical to SEQ ID NO: 30395
  source 1..120: mol_type = other DNA

SEQ ID NO: 60350 - DNA, 120 bp, synthetic construct; identical to SEQ ID NO: 9044
  source 1..120: mol_type = other DNA

SEQ ID NO: 60351 - DNA, 120 bp, synthetic construct; identical to SEQ ID NO: 30397
  source 1..120: mol_type = other DNA

SEQ ID NO: 60352 - DNA, 120 bp, synthetic construct; identical to SEQ ID NO: 30398
  source 1..120: mol_type = other DNA

SEQ ID NO: 60353 - DNA, 120 bp, synthetic construct; identical to SEQ ID NO: 30399
  source 1..120: mol_type = other DNA

SEQ ID NO: 60354 - DNA, 120 bp, synthetic construct; identical to SEQ ID NO: 9045
  source 1..120: mol_type = other DNA

SEQ ID NO: 60355 - DNA, 120 bp, synthetic construct; identical to SEQ ID NO: 30401
  source 1..120: mol_type = other DNA

SEQ ID NO: 60356 - DNA, 120 bp, synthetic construct; identical to SEQ ID NO: 30402
  source 1..120: mol_type = other DNA

SEQ ID NO: 60357 - DNA, 120 bp, synthetic construct; identical to SEQ ID NO: 30403
  source 1..120: mol_type = other DNA

SEQ ID NO: 60358 - DNA, 120 bp, synthetic construct; identical to SEQ ID NO: 9046
  source 1..120: mol_type = other DNA

SEQ ID NO: 60359 - DNA, 120 bp, synthetic construct; identical to SEQ ID NO: 30405
  source 1..120: mol_type = other DNA

SEQ ID NO: 60360 - DNA, 120 bp, synthetic construct; identical to SEQ ID NO: 30406
  source 1..120: mol_type = other DNA

SEQ ID NO: 60361 - DNA, 120 bp, synthetic construct; identical to SEQ ID NO: 30407
  source 1..120: mol_type = other DNA

SEQ ID NO: 60362 - DNA, 120 bp, synthetic construct; identical to SEQ ID NO: 30408
  source 1..120: mol_type = other DNA

SEQ ID NO: 60363 - DNA, 120 bp, synthetic construct; identical to SEQ ID NO: 9047
  source 1..120: mol_type = other DNA

SEQ ID NO: 60364 - DNA, 120 bp, synthetic construct; identical to SEQ ID NO: 30410
  source 1..120: mol_type = other DNA

SEQ ID NO: 60365 - DNA, 120 bp, synthetic construct; identical to SEQ ID NO: 30411
  source 1..120: mol_type = other DNA

SEQ ID NO: 60366 - DNA, 120 bp, synthetic construct; identical to SEQ ID NO: 9048
  source 1..120: mol_type = other DNA

SEQ ID NO: 60367 - DNA, 120 bp, synthetic construct; identical to SEQ ID NO: 30413
  source 1..120: mol_type = other DNA

SEQ ID NO: 60368 - DNA, 120 bp, synthetic construct; identical to SEQ ID NO: 30414
  source 1..120: mol_type = other DNA

SEQ ID NO: 60369 - DNA, 120 bp, synthetic construct; identical to SEQ ID NO: 30415
  source 1..120: mol_type = other DNA

SEQ ID NO: 60370 - DNA, 120 bp, synthetic construct; identical to SEQ ID NO: 9049
  source 1..120: mol_type = other DNA

SEQ ID NO: 60371 - DNA, 120 bp, synthetic construct; identical to SEQ ID NO: 30417
  source 1..120: mol_type = other DNA

SEQ ID NO: 60372 - DNA, 120 bp, synthetic construct; identical to SEQ ID NO: 30418
  source 1..120: mol_type = other DNA

SEQ ID NO: 60373 - DNA, 120 bp, synthetic construct; identical to SEQ ID NO: 30419
  source 1..120: mol_type = other DNA

SEQ ID NO: 60374 - DNA, 120 bp, synthetic construct; identical to SEQ ID NO: 30420
  source 1..120: mol_type = other DNA

SEQ ID NO: 60375 - DNA, 120 bp, synthetic construct; identical to SEQ ID NO: 9050
  source 1..120: mol_type = other DNA

SEQ ID NO: 60376 - DNA, 120 bp, synthetic construct; identical to SEQ ID NO: 30422
  source 1..120: mol_type = other DNA

SEQ ID NO: 60377 - DNA, 120 bp, synthetic construct; identical to SEQ ID NO: 30423
  source 1..120: mol_type = other DNA

SEQ ID NO: 60378 - DNA, 120 bp, synthetic construct; identical to SEQ ID NO: 30424
  source 1..120: mol_type = other DNA

SEQ ID NO: 60379 - DNA, 120 bp, synthetic construct; identical to SEQ ID NO: 9051
  source 1..120: mol_type = other DNA

SEQ ID NO: 60380 - DNA, 120 bp, synthetic construct; identical to SEQ ID NO: 30426
  source 1..120: mol_type = other DNA

SEQ ID NO: 60381 - DNA, 120 bp, synthetic construct; identical to SEQ ID NO: 30427
  source 1..120: mol_type = other DNA

SEQ ID NO: 60382 - DNA, 120 bp, synthetic construct; identical to SEQ ID NO: 30428
  source 1..120: mol_type = other DNA

SEQ ID NO: 60383 - DNA, 120 bp, synthetic construct; identical to SEQ ID NO: 9052
  source 1..120: mol_type = other DNA

SEQ ID NO: 60384 - DNA, 120 bp, synthetic construct; identical to SEQ ID NO: 30430
  source 1..120: mol_type = other DNA

SEQ ID NO: 60385 - DNA, 120 bp, synthetic construct; identical to SEQ ID NO: 30431
  source 1..120: mol_type = other DNA

SEQ ID NO: 60386 - DNA, 120 bp, synthetic construct; identical to SEQ ID NO: 9053
  source 1..120: mol_type = other DNA

SEQ ID NO: 60387 - DNA, 120 bp, synthetic construct; identical to SEQ ID NO: 30433
  source 1..120: mol_type = other DNA

SEQ ID NO: 60388 - DNA, 120 bp, synthetic construct; identical to SEQ ID NO: 30434
  source 1..120: mol_type = other DNA

SEQ ID NO: 60389 - DNA, 120 bp, synthetic construct; identical to SEQ ID NO: 30435
  source 1..120: mol_type = other DNA

SEQ ID NO: 60390 - DNA, 120 bp, synthetic construct; identical to SEQ ID NO: 9054
  source 1..120: mol_type = other DNA

SEQ ID NO: 60391 - DNA, 120 bp, synthetic construct; identical to SEQ ID NO: 30437
  source 1..120: mol_type = other DNA

SEQ ID NO: 60392 - DNA, 120 bp, synthetic construct; identical to SEQ ID NO: 30438
  source 1..120: mol_type = other DNA

SEQ ID NO: 60393 - DNA, 120 bp, synthetic construct; identical to SEQ ID NO: 30439
  source 1..120: mol_type = other DNA

SEQ ID NO: 60394 - DNA, 120 bp, synthetic construct; identical to SEQ ID NO: 9055
  source 1..120: mol_type = other DNA

SEQ ID NO: 60395 - DNA, 120 bp, synthetic construct; identical to SEQ ID NO: 30441
  source 1..120: mol_type = other DNA

SEQ ID NO: 60396 - DNA, 120 bp, synthetic construct; identical to SEQ ID NO: 30442
  source 1..120: mol_type = other DNA

SEQ ID NO: 60397 - DNA, 120 bp, synthetic construct; identical to SEQ ID NO: 30443
  source 1..120: mol_type = other DNA

SEQ ID NO: 60398 - DNA, 120 bp, synthetic construct; identical to SEQ ID NO: 9056
  source 1..120: mol_type = other DNA

SEQ ID NO: 60399 - DNA, 120 bp, synthetic construct; identical to SEQ ID NO: 30445
  source 1..120: mol_type = other DNA

SEQ ID NO: 60400 - DNA, 120 bp, synthetic construct; identical to SEQ ID NO: 30446
  source 1..120: mol_type = other DNA

SEQ ID NO: 60401 - DNA, 120 bp, synthetic construct; identical to SEQ ID NO: 30447
  source 1..120: mol_type = other DNA

SEQ ID NO: 60402 - DNA, 120 bp, synthetic construct; identical to SEQ ID NO: 30448
  source 1..120: mol_type = other DNA

SEQ ID NO: 60403 - DNA, 120 bp, synthetic construct; identical to SEQ ID NO: 9057
  source 1..120: mol_type = other DNA

SEQ ID NO: 60404 - DNA, 120 bp, synthetic construct; identical to SEQ ID NO: 30450
  source 1..120: mol_type = other DNA

SEQ ID NO: 60405 - DNA, 120 bp, synthetic construct; identical to SEQ ID NO: 30451
  source 1..120: mol_type = other DNA

SEQ ID NO: 60406 - DNA, 120 bp, synthetic construct; identical to SEQ ID NO: 30452
  source 1..120: mol_type = other DNA

SEQ ID NO: 60407 - DNA, 120 bp, synthetic construct; identical to SEQ ID NO: 30453
  source 1..120: mol_type = other DNA

SEQ ID NO: 60408 - DNA, 120 bp, synthetic construct; identical to SEQ ID NO: 9058
  source 1..120: mol_type = other DNA

SEQ ID NO: 60409 - DNA, 120 bp, synthetic construct; identical to SEQ ID NO: 30455
  source 1..120: mol_type = other DNA

SEQ ID NO: 60410 - DNA, 120 bp, synthetic construct; identical to SEQ ID NO: 30456
  source 1..120: mol_type = other DNA

SEQ ID NO: 60411 - DNA, 120 bp, synthetic construct; identical to SEQ ID NO: 9059
  source 1..120: mol_type = other DNA

SEQ ID NO: 60412 - DNA, 120 bp, synthetic construct; identical to SEQ ID NO: 30458
  source 1..120: mol_type = other DNA

SEQ ID NO: 60413 - DNA, 120 bp, synthetic construct; identical to SEQ ID NO: 30459
  source 1..120: mol_type = other DNA

SEQ ID NO: 60414 - DNA, 120 bp, synthetic construct; identical to SEQ ID NO: 30460
  source 1..120: mol_type = other DNA

SEQ ID NO: 60415 - DNA, 120 bp, synthetic construct; identical to SEQ ID NO: 9060
  source 1..120: mol_type = other DNA

SEQ ID NO: 60416 - DNA, 120 bp, synthetic construct; identical to SEQ ID NO: 30462
  source 1..120: mol_type = other DNA

SEQ ID NO: 60417 - DNA, 120 bp, synthetic construct; identical to SEQ ID NO: 1970
  source 1..120: mol_type = other DNA

SEQ ID NO: 60418 - DNA, 120 bp, synthetic construct; identical to SEQ ID NO: 30464
  source 1..120: mol_type = other DNA

SEQ ID NO: 60419 - DNA, 120 bp, synthetic construct; identical to SEQ ID NO: 9061
  source 1..120: mol_type = other DNA

SEQ ID NO: 60420 - DNA, 120 bp, synthetic construct; identical to SEQ ID NO: 30466
  source 1..120: mol_type = other DNA

SEQ ID NO: 60421 - DNA, 120 bp, synthetic construct; identical to SEQ ID NO: 30467
  source 1..120: mol_type = other DNA

SEQ ID NO: 60422 - DNA, 120 bp, synthetic construct; identical to SEQ ID NO: 30468
  source 1..120: mol_type = other DNA

SEQ ID NO: 60423 - DNA, 120 bp, synthetic construct; identical to SEQ ID NO: 30469
  source 1..120: mol_type = other DNA

SEQ ID NO: 60424 - DNA, 120 bp, synthetic construct; identical to SEQ ID NO: 9062
  source 1..120: mol_type = other DNA

SEQ ID NO: 60425 - DNA, 120 bp, synthetic construct; identical to SEQ ID NO: 30471
  source 1..120: mol_type = other DNA

SEQ ID NO: 60426 - DNA, 120 bp, synthetic construct; identical to SEQ ID NO: 30472
  source 1..120: mol_type = other DNA

SEQ ID NO: 60427 - DNA, 120 bp, synthetic construct; identical to SEQ ID NO: 30473
  source 1..120: mol_type = other DNA

SEQ ID NO: 60428 - DNA, 120 bp, synthetic construct; identical to SEQ ID NO: 9063
  source 1..120: mol_type = other DNA

SEQ ID NO: 60429 - DNA, 120 bp, synthetic construct; identical to SEQ ID NO: 30475
  source 1..120: mol_type = other DNA

SEQ ID NO: 60430 - DNA, 120 bp, synthetic construct; identical to SEQ ID NO: 30476
  source 1..120: mol_type = other DNA

SEQ ID NO: 60431 - DNA, 120 bp, synthetic construct; identical to SEQ ID NO: 30477
  source 1..120: mol_type = other DNA

SEQ ID NO: 60432 - DNA, 120 bp, synthetic construct; identical to SEQ ID NO: 9064
  source 1..120: mol_type = other DNA

SEQ ID NO: 60433 - DNA, 120 bp, synthetic construct; identical to SEQ ID NO: 30479
  source 1..120: mol_type = other DNA

SEQ ID NO: 60434 - DNA, 120 bp, synthetic construct; identical to SEQ ID NO: 30480
  source 1..120: mol_type = other DNA

SEQ ID NO: 60435 - DNA, 120 bp, synthetic construct; identical to SEQ ID NO: 30481
  source 1..120: mol_type = other DNA

SEQ ID NO: 60436 - DNA, 120 bp, synthetic construct; identical to SEQ ID NO: 9065
  source 1..120: mol_type = other DNA

SEQ ID NO: 60437 - DNA, 120 bp, synthetic construct; identical to SEQ ID NO: 30483
  source 1..120: mol_type = other DNA

SEQ ID NO: 60438 - DNA, 120 bp, synthetic construct; identical to SEQ ID NO: 30484
  source 1..120: mol_type = other DNA

SEQ ID NO: 60439 - DNA, 120 bp, synthetic construct; identical to SEQ ID NO: 30485
  source 1..120: mol_type = other DNA

SEQ ID NO: 60440 - DNA, 120 bp, synthetic construct; identical to SEQ ID NO: 30486
  source 1..120: mol_type = other DNA

SEQ ID NO: 60441 - DNA, 120 bp, synthetic construct; identical to SEQ ID NO: 9066
  source 1..120: mol_type = other DNA

SEQ ID NO: 60442 - DNA, 120 bp, synthetic construct; identical to SEQ ID NO: 30488
  source 1..120: mol_type = other DNA

SEQ ID NO: 60443 - DNA, 120 bp, synthetic construct; identical to SEQ ID NO: 30489
  source 1..120: mol_type = other DNA

SEQ ID NO: 60444 - DNA, 120 bp, synthetic construct; identical to SEQ ID NO: 9067
  source 1..120: mol_type = other DNA

SEQ ID NO: 60445 - DNA, 120 bp, synthetic construct; identical to SEQ ID NO: 30491
  source 1..120: mol_type = other DNA

SEQ ID NO: 60446 - DNA, 120 bp, synthetic construct; identical to SEQ ID NO: 30492
  source 1..120: mol_type = other DNA

SEQ ID NO: 60447 - DNA, 120 bp, synthetic construct; identical to SEQ ID NO: 30493
  source 1..120: mol_type = other DNA

SEQ ID NO: 60448 - DNA, 120 bp, synthetic construct; identical to SEQ ID NO: 30494
  source 1..120: mol_type = other DNA

SEQ ID NO: 60449 - DNA, 120 bp, synthetic construct; identical to SEQ ID NO: 9068
  source 1..120: mol_type = other DNA

SEQ ID NO: 60450 - DNA, 120 bp, synthetic construct; identical to SEQ ID NO: 30496
  source 1..120: mol_type = other DNA

SEQ ID NO: 60451 - DNA, 120 bp, synthetic construct; identical to SEQ ID NO: 30497
  source 1..120: mol_type = other DNA

SEQ ID NO: 60452 - DNA, 120 bp, synthetic construct; identical to SEQ ID NO: 9069
  source 1..120: mol_type = other DNA

SEQ ID NO: 60453 - DNA, 120 bp, synthetic construct; identical to SEQ ID NO: 30499
  source 1..120: mol_type = other DNA

SEQ ID NO: 60454 - DNA, 120 bp, synthetic construct; identical to SEQ ID NO: 30500
  source 1..120: mol_type = other DNA

SEQ ID NO: 60455 - DNA, 120 bp, synthetic construct; identical to SEQ ID NO: 30501
  source 1..120: mol_type = other DNA

SEQ ID NO: 60456 - DNA, 120 bp, synthetic construct; identical to SEQ ID NO: 30502
  source 1..120: mol_type = other DNA

SEQ ID NO: 60457 - DNA, 120 bp, synthetic construct; identical to SEQ ID NO: 9070
  source 1..120: mol_type = other DNA

SEQ ID NO: 60458 - DNA, 120 bp, synthetic construct; identical to SEQ ID NO: 30504
  source 1..120: mol_type = other DNA

SEQ ID NO: 60459 - DNA, 120 bp, synthetic construct; identical to SEQ ID NO: 30505
  source 1..120: mol_type = other DNA

SEQ ID NO: 60460 - DNA, 120 bp, synthetic construct; identical to SEQ ID NO: 30506
  source 1..120: mol_type = other DNA

SEQ ID NO: 60461 - DNA, 120 bp, synthetic construct; identical to SEQ ID NO: 9071
  source 1..120: mol_type = other DNA

SEQ ID NO: 60462 - DNA, 120 bp, synthetic construct; identical to SEQ ID NO: 30508
  source 1..120: mol_type = other DNA

SEQ ID NO: 60463 - DNA, 120 bp, synthetic construct; identical to SEQ ID NO: 30509
  source 1..120: mol_type = other DNA

SEQ ID NO: 60464 - DNA, 120 bp, synthetic construct; identical to SEQ ID NO: 30510
  source 1..120: mol_type = other DNA

SEQ ID NO: 60465 - DNA, 120 bp, synthetic construct; identical to SEQ ID NO: 9072
  source 1..120: mol_type = other DNA

SEQ ID NO: 60466 - DNA, 120 bp, synthetic construct; identical to SEQ ID NO: 30512
  source 1..120: mol_type = other DNA

SEQ ID NO: 60467 - DNA, 120 bp, synthetic construct; identical to SEQ ID NO: 30513
  source 1..120: mol_type = other DNA

SEQ ID NO: 60468 - DNA, 120 bp, synthetic construct; identical to SEQ ID NO: 30514
  source 1..120: mol_type = other DNA

SEQ ID NO: 60469 - DNA, 120 bp, synthetic construct; identical to SEQ ID NO: 9073
  source 1..120: mol_type = other DNA

SEQ ID NO: 60470 - DNA, 120 bp, synthetic construct; identical to SEQ ID NO: 30516
  source 1..120: mol_type = other DNA

SEQ ID NO: 60471 - DNA, 120 bp, synthetic construct; identical to SEQ ID NO: 30517
  source 1..120: mol_type = other DNA

SEQ ID NO: 60472 - DNA, 120 bp, synthetic construct; identical to SEQ ID NO: 30518
  source 1..120: mol_type = other DNA

SEQ ID NO: 60473 - DNA, 120 bp, synthetic construct; identical to SEQ ID NO: 9074
  source 1..120: mol_type = other DNA

SEQ ID NO: 60474 - DNA, 120 bp, synthetic construct; identical to SEQ ID NO: 30520
  source 1..120: mol_type = other DNA

SEQ ID NO: 60475 - DNA, 120 bp, synthetic construct; identical to SEQ ID NO: 30521
  source 1..120: mol_type = other DNA

SEQ ID NO: 60476 - DNA, 120 bp, synthetic construct; identical to SEQ ID NO: 30522
  source 1..120: mol_type = other DNA

SEQ ID NO: 60477 - DNA, 120 bp, synthetic construct; identical to SEQ ID NO: 9075
  source 1..120: mol_type = other DNA

SEQ ID NO: 60478 - DNA, 120 bp, synthetic construct; identical to SEQ ID NO: 30524
  source 1..120: mol_type = other DNA

SEQ ID NO: 60479 - DNA, 120 bp, synthetic construct; identical to SEQ ID NO: 30525
  source 1..120: mol_type = other DNA

SEQ ID NO: 60480 - DNA, 120 bp, synthetic construct; identical to SEQ ID NO: 30526
  source 1..120: mol_type = other DNA

SEQ ID NO: 60481 - DNA, 120 bp, synthetic construct; identical to SEQ ID NO: 9076
  source 1..120: mol_type = other DNA

SEQ ID NO: 60482 - DNA, 120 bp, synthetic construct; identical to SEQ ID NO: 30528
  source 1..120: mol_type = other DNA

SEQ ID NO: 60483 - DNA, 120 bp, synthetic construct; identical to SEQ ID NO: 30529
  source 1..120: mol_type = other DNA

SEQ ID NO: 60484 - DNA, 120 bp, synthetic construct; identical to SEQ ID NO: 9077
  source 1..120: mol_type = other DNA

SEQ ID NO: 60485 - DNA, 120 bp, synthetic construct; identical to SEQ ID NO: 30531
  source 1..120: mol_type = other DNA

SEQ ID NO: 60486 - DNA, 120 bp, synthetic construct; identical to SEQ ID NO: 30532
  source 1..120: mol_type = other DNA

SEQ ID NO: 60487 - DNA, 120 bp, synthetic construct; identical to SEQ ID NO: 30533
  source 1..120: mol_type = other DNA

SEQ ID NO: 60488 - DNA, 120 bp, synthetic construct; identical to SEQ ID NO: 30534
  source 1..120: mol_type = other DNA

SEQ ID NO: 60489 - DNA, 120 bp, synthetic construct; identical to SEQ ID NO: 9078
  source 1..120: mol_type = other DNA

SEQ ID NO: 60490 - DNA, 120 bp, synthetic construct; identical to SEQ ID NO: 30536
  source 1..120: mol_type = other DNA

SEQ ID NO: 60491 - DNA, 120 bp, synthetic construct; identical to SEQ ID NO: 30537
  source 1..120: mol_type = other DNA

SEQ ID NO: 60492 - DNA, 120 bp, synthetic construct; identical to SEQ ID NO: 30538
  source 1..120: mol_type = other DNA

SEQ ID NO: 60493 - DNA, 120 bp, synthetic construct; identical to SEQ ID NO: 30539
  source 1..120: mol_type = other DNA

SEQ ID NO: 60494 - DNA, 120 bp, synthetic construct; identical to SEQ ID NO: 9079
  source 1..120: mol_type = other DNA

SEQ ID NO: 60495 - DNA, 120 bp, synthetic construct; identical to SEQ ID NO: 30541
  source 1..120: mol_type = other DNA

SEQ ID NO: 60496 - DNA, 120 bp, synthetic construct; identical to SEQ ID NO: 30542
  source 1..120: mol_type = other DNA

SEQ ID NO: 60497 - DNA, 120 bp, synthetic construct; identical to SEQ ID NO: 9080
  source 1..120: mol_type = other DNA

SEQ ID NO: 60498 - DNA, 120 bp, synthetic construct; identical to SEQ ID NO: 30544
  source 1..120: mol_type = other DNA

SEQ ID NO: 60499 - DNA, 120 bp, synthetic construct; identical to SEQ ID NO: 30545
  source 1..120: mol_type = other DNA

SEQ ID NO: 60500 - DNA, 120 bp, synthetic construct; identical to SEQ ID NO: 30546
  source 1..120: mol_type = other DNA

SEQ ID NO: 60501 - DNA, 120 bp, synthetic construct; identical to SEQ ID NO: 9081
  source 1..120: mol_type = other DNA

SEQ ID NO: 60502 - DNA, 120 bp, synthetic construct; identical to SEQ ID NO: 30548
  source 1..120: mol_type = other DNA

SEQ ID NO: 60503 - DNA, 120 bp, synthetic construct; identical to SEQ ID NO: 30549
  source 1..120: mol_type = other DNA

SEQ ID NO: 60504 - DNA, 120 bp, synthetic construct; identical to SEQ ID NO: 30550
  source 1..120: mol_type = other DNA

SEQ ID NO: 60505 - DNA, 120 bp, synthetic construct; identical to SEQ ID NO: 30551
  source 1..120: mol_type = other DNA

SEQ ID NO: 60506 - DNA, 120 bp, synthetic construct; identical to SEQ ID NO: 30552
  source 1..120: mol_type = other DNA

SEQ ID NO: 60507 - DNA, 120 bp, synthetic construct; identical to SEQ ID NO: 9082
  source 1..120: mol_type = other DNA

SEQ ID NO: 60508 - DNA, 120 bp, synthetic construct; identical to SEQ ID NO: 30554
  source 1..120: mol_type = other DNA

SEQ ID NO: 60509 - DNA, 120 bp, synthetic construct; identical to SEQ ID NO: 30555
  source 1..120: mol_type = other DNA

SEQ ID NO: 60510 - DNA, 120 bp, synthetic construct; identical to SEQ ID NO: 9083
  source 1..120: mol_type = other DNA

SEQ ID NO: 60511 - DNA, 120 bp, synthetic construct; identical to SEQ ID NO: 30557
  source 1..120: mol_type = other DNA

SEQ ID NO: 60512 - DNA, 120 bp, synthetic construct; identical to SEQ ID NO: 30558
  source 1..120: mol_type = other DNA

SEQ ID NO: 60513 - DNA, 120 bp, synthetic construct; identical to SEQ ID NO: 30559
  source 1..120: mol_type = other DNA

SEQ ID NO: 60514 - DNA, 120 bp, synthetic construct; identical to SEQ ID NO: 9084
  source 1..120: mol_type = other DNA

SEQ ID NO: 60515 - DNA, 120 bp, synthetic construct; identical to SEQ ID NO: 30561
  source 1..120: mol_type = other DNA

SEQ ID NO: 60516 - DNA, 120 bp, synthetic construct; identical to SEQ ID NO: 30562
  source 1..120: mol_type = other DNA

SEQ ID NO: 60517 - DNA, 120 bp, synthetic construct; identical to SEQ ID NO: 30563
  source 1..120: mol_type = other DNA

SEQ ID NO: 60518 - DNA, 120 bp, synthetic construct; identical to SEQ ID NO: 30564
  source 1..120: mol_type = other DNA

SEQ ID NO: 60519 - DNA, 120 bp, synthetic construct; identical to SEQ ID NO: 9085
  source 1..120: mol_type = other DNA

SEQ ID NO: 60520 - DNA, 120 bp, synthetic construct; identical to SEQ ID NO: 30566
  source 1..120: mol_type = other DNA

SEQ ID NO: 60521 - DNA, 120 bp, synthetic construct; identical to SEQ ID NO: 30567
  source 1..120: mol_type = other DNA

SEQ ID NO: 60522 - DNA, 120 bp, synthetic construct; identical to SEQ ID NO: 30568
  source 1..120: mol_type = other DNA

SEQ ID NO: 60523 - DNA, 120 bp, synthetic construct; identical to SEQ ID NO: 9086
  source 1..120: mol_type = other DNA

SEQ ID NO: 60524 - DNA, 120 bp, synthetic construct; identical to SEQ ID NO: 30570
  source 1..120: mol_type = other DNA

SEQ ID NO: 60525 - DNA, 120 bp, synthetic construct; identical to SEQ ID NO: 30571
  source 1..120: mol_type = other DNA

SEQ ID NO: 60526 - DNA, 120 bp, synthetic construct; identical to SEQ ID NO: 9087
  source 1..120: mol_type = other DNA

SEQ ID NO: 60527 - DNA, 120 bp, synthetic construct; identical to SEQ ID NO: 30573
  source 1..120: mol_type = other DNA

SEQ ID NO: 60528 - DNA, 120 bp, synthetic construct; identical to SEQ ID NO: 30574
  source 1..120: mol_type = other DNA

SEQ ID NO: 60529 - DNA, 120 bp, synthetic construct; identical to SEQ ID NO: 30575
  source 1..120: mol_type = other DNA

SEQ ID NO: 60530 - DNA, 120 bp, synthetic construct; identical to SEQ ID NO: 30576
  source 1..120: mol_type = other DNA

SEQ ID NO: 60531 - DNA, 120 bp, synthetic construct; identical to SEQ ID NO: 9088
  source 1..120: mol_type = other DNA

SEQ ID NO: 60532 - DNA, 120 bp, synthetic construct; identical to SEQ ID NO: 30578
  source 1..120: mol_type = other DNA

SEQ ID NO: 60533 - DNA, 120 bp, synthetic construct; identical to SEQ ID NO: 30579
  source 1..120: mol_type = other DNA

SEQ ID NO: 60534 - DNA, 120 bp, synthetic construct; identical to SEQ ID NO: 9089
  source 1..120: mol_type = other DNA

SEQ ID NO: 60535 - DNA, 120 bp, synthetic construct; identical to SEQ ID NO: 30581
  source 1..120: mol_type = other DNA

SEQ ID NO: 60536 - DNA, 120 bp, synthetic construct; identical to SEQ ID NO: 30582
  source 1..120: mol_type = other DNA

SEQ ID NO: 60537 - DNA, 120 bp, synthetic construct; identical to SEQ ID NO: 30583
  source 1..120: mol_type = other DNA

SEQ ID NO: 60538 - DNA, 120 bp, synthetic construct; identical to SEQ ID NO: 9090
  source 1..120: mol_type = other DNA

SEQ ID NO: 60539 - DNA, 120 bp, synthetic construct; identical to SEQ ID NO: 30585
  source 1..120: mol_type = other DNA

SEQ ID NO: 60540 - DNA, 120 bp, synthetic construct; identical to SEQ ID NO: 30586
  source 1..120: mol_type = other DNA

SEQ ID NO: 60541 - DNA, 120 bp, synthetic construct; identical to SEQ ID NO: 30587
  source 1..120: mol_type = other DNA

SEQ ID NO: 60542 - DNA, 120 bp, synthetic construct; identical to SEQ ID NO: 9091
  source 1..120: mol_type = other DNA

SEQ ID NO: 60543 - DNA, 120 bp, synthetic construct; identical to SEQ ID NO: 30589
  source 1..120: mol_type = other DNA

SEQ ID NO: 60544 - DNA, 120 bp, synthetic construct; identical to SEQ ID NO: 30590
  source 1..120: mol_type = other DNA

SEQ ID NO: 60545 - DNA, 120 bp, synthetic construct; identical to SEQ ID NO: 30591
  source 1..120: mol_type = other DNA

SEQ ID NO: 60546 - DNA, 120 bp, synthetic construct; identical to SEQ ID NO: 30592
  source 1..120: mol_type = other DNA

SEQ ID NO: 60547 - DNA, 120 bp, synthetic construct; identical to SEQ ID NO: 9092
  source 1..120: mol_type = other DNA

SEQ ID NO: 60548 - DNA, 120 bp, synthetic construct; identical to SEQ ID NO: 30594
  source 1..120: mol_type = other DNA

SEQ ID NO: 60549 - DNA, 120 bp, synthetic construct; identical to SEQ ID NO: 30595
  source 1..120: mol_type = other DNA

SEQ ID NO: 60550 - DNA, 120 bp, synthetic construct; identical to SEQ ID NO: 30596
  source 1..120: mol_type = other DNA

SEQ ID NO: 60551 - DNA, 120 bp, synthetic construct; identical to SEQ ID NO: 9093
  source 1..120: mol_type = other DNA

SEQ ID NO: 60552 - DNA, 120 bp, synthetic construct; identical to SEQ ID NO: 30598
  source 1..120: mol_type = other DNA

SEQ ID NO: 60553 - DNA, 120 bp, synthetic construct; identical to SEQ ID NO: 30599
  source 1..120: mol_type = other DNA

SEQ ID NO: 60554 - DNA, 120 bp, synthetic construct; identical to SEQ ID NO: 9094
  source 1..120: mol_type = other DNA

SEQ ID NO: 60555 - DNA, 120 bp, synthetic construct; identical to SEQ ID NO: 30601
  source 1..120: mol_type = other DNA

SEQ ID NO: 60556 - DNA, 120 bp, synthetic construct; identical to SEQ ID NO: 30602
  source 1..120: mol_type = other DNA

SEQ ID NO: 60557 - DNA, 120 bp, synthetic construct; identical to SEQ ID NO: 30603
  source 1..120: mol_type = other DNA

SEQ ID NO: 60558 - DNA, 120 bp, synthetic construct; identical to SEQ ID NO: 9095
  source 1..120: mol_type = other DNA

SEQ ID NO: 60559 - DNA, 120 bp, synthetic construct; identical to SEQ ID NO: 30605
  source 1..120: mol_type = other DNA

SEQ ID NO: 60560 - DNA, 120 bp, synthetic construct; identical to SEQ ID NO: 30606
  source 1..120: mol_type = other DNA

SEQ ID NO: 60561 - DNA, 120 bp, synthetic construct; identical to SEQ ID NO: 30607
  source 1..120: mol_type = other DNA

SEQ ID NO: 60562 - DNA, 120 bp, synthetic construct; identical to SEQ ID NO: 30608
  source 1..120: mol_type = other DNA

SEQ ID NO: 60563 - DNA, 120 bp, synthetic construct; identical to SEQ ID NO: 9096
  source 1..120: mol_type = other DNA

SEQ ID NO: 60564 - DNA, 120 bp, synthetic construct; identical to SEQ ID NO: 30610
  source 1..120: mol_type = other DNA

SEQ ID NO: 60565 - DNA, 120 bp, synthetic construct; identical to SEQ ID NO: 30611
  source 1..120: mol_type = other DNA

SEQ ID NO: 60566 - DNA, 120 bp, synthetic construct; identical to SEQ ID NO: 30612
  source 1..120: mol_type = other DNA

SEQ ID NO: 60567 - DNA, 120 bp, synthetic construct; identical to SEQ ID NO: 9097
  source 1..120: mol_type = other DNA

SEQ ID NO: 60568 - DNA, 120 bp, synthetic construct; identical to SEQ ID NO: 30614
  source 1..120: mol_type = other DNA

SEQ ID NO: 60569 - DNA, 120 bp, synthetic construct; identical to SEQ ID NO: 30615
  source 1..120: mol_type = other DNA

SEQ ID NO: 60570 - DNA, 120 bp, synthetic construct; identical to SEQ ID NO: 9098
  source 1..120: mol_type = other DNA

SEQ ID NO: 60571 - DNA, 120 bp, synthetic construct; identical to SEQ ID NO: 30617
  source 1..120: mol_type = other DNA

SEQ ID NO: 60572 - DNA, 120 bp, synthetic construct; identical to SEQ ID NO: 30618
  source 1..120: mol_type = other DNA

SEQ ID NO: 60573 - DNA, 120 bp, synthetic construct; identical to SEQ ID NO: 30619
  source 1..120: mol_type = other DNA

SEQ ID NO: 60574 - DNA, 120 bp, synthetic construct; identical to SEQ ID NO: 9099
  source 1..120: mol_type = other DNA

SEQ ID NO: 60575 - DNA, 120 bp, synthetic construct; identical to SEQ ID NO: 30621
  source 1..120: mol_type = other DNA

SEQ ID NO: 60576 - DNA, 120 bp, synthetic construct; identical to SEQ ID NO: 30622
  source 1..120: mol_type = other DNA

SEQ ID NO: 60577 - DNA, 120 bp, synthetic construct; identical to SEQ ID NO: 30623
  source 1..120: mol_type = other DNA

SEQ ID NO: 60578 - DNA, 120 bp, synthetic construct; identical to SEQ ID NO: 30624
  source 1..120: mol_type = other DNA

SEQ ID NO: 60579 - DNA, 120 bp, synthetic construct; identical to SEQ ID NO: 9100
  source 1..120: mol_type = other DNA

SEQ ID NO: 60580 - DNA, 120 bp, synthetic construct; identical to SEQ ID NO: 30626
  source 1..120: mol_type = other DNA

SEQ ID NO: 60581 - DNA, 120 bp, synthetic construct; identical to SEQ ID NO: 30627
  source 1..120: mol_type = other DNA

SEQ ID NO: 60582 - DNA, 120 bp, synthetic construct; identical to SEQ ID NO: 30628
  source 1..120: mol_type = other DNA

SEQ ID NO: 60583 - DNA, 120 bp, synthetic construct; identical to SEQ ID NO: 9101
  source 1..120: mol_type = other DNA

SEQ ID NO: 60584 - DNA, 120 bp, synthetic construct; identical to SEQ ID NO: 30630
  source 1..120: mol_type = other DNA

SEQ ID NO: 60585 - DNA, 120 bp, synthetic construct; identical to SEQ ID NO: 30631
  source 1..120: mol_type = other DNA

SEQ ID NO: 60586 - DNA, 120 bp, synthetic construct; identical to SEQ ID NO: 30632
  source 1..120: mol_type = other DNA

SEQ ID NO: 60587 - DNA, 120 bp, synthetic construct; identical to SEQ ID NO: 9102
  source 1..120: mol_type = other DNA

SEQ ID NO: 60588 - DNA, 120 bp, synthetic construct; identical to SEQ ID NO: 30634
  source 1..120: mol_type = other DNA

SEQ ID NO: 60589 - DNA, 120 bp, synthetic construct; identical to SEQ ID NO: 30635
  source 1..120: mol_type = other DNA

SEQ ID NO: 60590 - DNA, 120 bp, synthetic construct; identical to SEQ ID NO: 30636
  source 1..120: mol_type = other DNA

SEQ ID NO: 60591 - DNA, 120 bp, synthetic construct; identical to SEQ ID NO: 9103
  source 1..120: mol_type = other DNA

SEQ ID NO: 60592 - DNA, 120 bp, synthetic construct; identical to SEQ ID NO: 30638
  source 1..120: mol_type = other DNA

SEQ ID NO: 60593 - DNA, 120 bp, synthetic construct; identical to SEQ ID NO: 30639
  source 1..120: mol_type = other DNA

SEQ ID NO: 60594 - DNA, 120 bp, synthetic construct; identical to SEQ ID NO: 30640
  source 1..120: mol_type = other DNA

SEQ ID NO: 60595 - DNA, 120 bp, synthetic construct; identical to SEQ ID NO: 30641
  source 1..120: mol_type = other DNA

SEQ ID NO: 60596 - DNA, 120 bp, synthetic construct; identical to SEQ ID NO: 9104
  source 1..120: mol_type = other DNA

SEQ ID NO: 60597 - DNA, 120 bp, synthetic construct; identical to SEQ ID NO: 30643
  source 1..120: mol_type = other DNA

SEQ ID NO: 60598 - DNA, 120 bp, synthetic construct; identical to SEQ ID NO: 30644
  source 1..120: mol_type = other DNA

SEQ ID NO: 60599 - DNA, 120 bp, synthetic construct; identical to SEQ ID NO: 30645
  source 1..120: mol_type = other DNA

SEQ ID NO: 60600 - DNA, 120 bp, synthetic construct; identical to SEQ ID NO: 9105
  source 1..120: mol_type = other DNA

SEQ ID NO: 60601 - DNA, 120 bp, synthetic construct; identical to SEQ ID NO: 30647
  source 1..120: mol_type = other DNA

SEQ ID NO: 60602 - DNA, 120 bp, synthetic construct; identical to SEQ ID NO: 30648
  source 1..120: mol_type = other DNA

SEQ ID NO: 60603 - DNA, 120 bp, synthetic construct; identical to SEQ ID NO: 30649
  source 1..120: mol_type = other DNA

SEQ ID NO: 60604 - DNA, 120 bp, synthetic construct; identical to SEQ ID NO: 9106
  source 1..120: mol_type = other DNA

SEQ ID NO: 60605 - DNA, 120 bp, synthetic construct; identical to SEQ ID NO: 30651
  source 1..120: mol_type = other DNA

SEQ ID NO: 60606 - DNA, 120 bp, synthetic construct; identical to SEQ ID NO: 30652
  source 1..120: mol_type = other DNA

SEQ ID NO: 60607 - DNA, 120 bp, synthetic construct; identical to SEQ ID NO: 9107
  source 1..120: mol_type = other DNA

SEQ ID NO: 60608 - DNA, 120 bp, synthetic construct; identical to SEQ ID NO: 30654
  source 1..120: mol_type = other DNA

SEQ ID NO: 60609 - DNA, 120 bp, synthetic construct; identical to SEQ ID NO: 30655
  source 1..120: mol_type = other DNA

SEQ ID NO: 60610 - DNA, 120 bp, synthetic construct; identical to SEQ ID NO: 30656
  source 1..120: mol_type = other DNA

SEQ ID NO: 60611 - DNA, 120 bp, synthetic construct; identical to SEQ ID NO: 30657
  source 1..120: mol_type = other DNA

SEQ ID NO: 60612 - DNA, 120 bp, synthetic construct; identical to SEQ ID NO: 9108
  source 1..120: mol_type = other DNA

SEQ ID NO: 60613 - DNA, 120 bp, synthetic construct; identical to SEQ ID NO: 30659
  source 1..120: mol_type = other DNA

SEQ ID NO: 60614 - DNA, 120 bp, synthetic construct; identical to SEQ ID NO: 30660
  source 1..120: mol_type = other DNA

SEQ ID NO: 60615 - DNA, 120 bp, synthetic construct; identical to SEQ ID NO: 9109
  source 1..120: mol_type = other DNA

SEQ ID NO: 60616 - DNA, 120 bp, synthetic construct; identical to SEQ ID NO: 30662
  source 1..120: mol_type = other DNA

SEQ ID NO: 60617 - DNA, 120 bp, synthetic construct; identical to SEQ ID NO: 30663
  source 1..120: mol_type = other DNA

SEQ ID NO: 60618 - DNA, 120 bp, synthetic construct; identical to SEQ ID NO: 30664
  source 1..120: mol_type = other DNA

SEQ ID NO: 60619 - DNA, 120 bp, synthetic construct; identical to SEQ ID NO: 9110
  source 1..120: mol_type = other DNA

SEQ ID NO: 60620 - DNA, 120 bp, synthetic construct; identical to SEQ ID NO: 30666
  source 1..120: mol_type = other DNA

SEQ ID NO: 60621 - DNA, 120 bp, synthetic construct; identical to SEQ ID NO: 30667
  source 1..120: mol_type = other DNA

SEQ ID NO: 60622 - DNA, 120 bp, synthetic construct; identical to SEQ ID NO: 30668
  source 1..120: mol_type = other DNA

SEQ ID NO: 60623 - DNA, 120 bp, synthetic construct; identical to SEQ ID NO: 30669
  source 1..120: mol_type = other DNA

SEQ ID NO: 60624 - DNA, 120 bp, synthetic construct; identical to SEQ ID NO: 9111
  source 1..120: mol_type = other DNA

SEQ ID NO: 60625 - DNA, 120 bp, synthetic construct; identical to SEQ ID NO: 30671
  source 1..120: mol_type = other DNA

SEQ ID NO: 60626 - DNA, 120 bp, synthetic construct; identical to SEQ ID NO: 30672
  source 1..120: mol_type = other DNA

SEQ ID NO: 60627 - DNA, 120 bp, synthetic construct; identical to SEQ ID NO: 30673
  source 1..120: mol_type = other DNA

SEQ ID NO: 60628 - DNA, 120 bp, synthetic construct; identical to SEQ ID NO: 9112
  source 1..120: mol_type = other DNA

SEQ ID NO: 60629 - DNA, 120 bp, synthetic construct; identical to SEQ ID NO: 30675
  source 1..120: mol_type = other DNA

SEQ ID NO: 60630 - DNA, 120 bp, synthetic construct; identical to SEQ ID NO: 30676
  source 1..120: mol_type = other DNA

SEQ ID NO: 60631 - DNA, 120 bp, synthetic construct; identical to SEQ ID NO: 9113
  source 1..120: mol_type = other DNA

SEQ ID NO: 60632 - DNA, 120 bp, synthetic construct; identical to SEQ ID NO: 30678
  source 1..120: mol_type = other DNA

SEQ ID NO: 60633 - DNA, 120 bp, synthetic construct; identical to SEQ ID NO: 30679
  source 1..120: mol_type = other DNA

SEQ ID NO: 60634 - DNA, 120 bp, synthetic construct; identical to SEQ ID NO: 30680
  source 1..120: mol_type = other DNA

SEQ ID NO: 60635 - DNA, 120 bp, synthetic construct; identical to SEQ ID NO: 30681
  source 1..120: mol_type = other DNA

SEQ ID NO: 60636 - DNA, 120 bp, synthetic construct; identical to SEQ ID NO: 9114
  source 1..120: mol_type = other DNA

SEQ ID NO: 60637 - DNA, 120 bp, synthetic construct; identical to SEQ ID NO: 30683
  source 1..120: mol_type = other DNA

SEQ ID NO: 60638 - DNA, 120 bp, synthetic construct; identical to SEQ ID NO: 30684
  source 1..120: mol_type = other DNA

SEQ ID NO: 60639 - DNA, 120 bp, synthetic construct; identical to SEQ ID NO: 9115
  source 1..120: mol_type = other DNA

SEQ ID NO: 60640 - DNA, 120 bp, synthetic construct; identical to SEQ ID NO: 30686
  source 1..120: mol_type = other DNA

SEQ ID NO: 60641 - DNA, 120 bp, synthetic construct; identical to SEQ ID NO: 30687
  source 1..120: mol_type = other DNA

SEQ ID NO: 60642 - DNA, 120 bp, synthetic construct; identical to SEQ ID NO: 30688
  source 1..120: mol_type = other DNA

SEQ ID NO: 60643 - DNA, 120 bp, synthetic construct; identical to SEQ ID NO: 9116
  source 1..120: mol_type = other DNA

SEQ ID NO: 60644 - DNA, 120 bp, synthetic construct; identical to SEQ ID NO: 30690
  source 1..120: mol_type = other DNA

SEQ ID NO: 60645 - DNA, 120 bp, synthetic construct; identical to SEQ ID NO: 30691
  source 1..120: mol_type = other DNA

SEQ ID NO: 60646 - DNA, 120 bp, synthetic construct; identical to SEQ ID NO: 30692
  source 1..120: mol_type = other DNA

SEQ ID NO: 60647 - DNA, 120 bp, synthetic construct; identical to SEQ ID NO: 30693
  source 1..120: mol_type = other DNA

SEQ ID NO: 60648 - DNA, 120 bp, synthetic construct; identical to SEQ ID NO: 9117
  source 1..120: mol_type = other DNA

SEQ ID NO: 60649 - DNA, 120 bp, synthetic construct; identical to SEQ ID NO: 30695
  source 1..120: mol_type = other DNA

SEQ ID NO: 60650 - DNA, 120 bp, synthetic construct; identical to SEQ ID NO: 30696
  source 1..120: mol_type = other DNA

SEQ ID NO: 60651 - DNA, 120 bp, synthetic construct; identical to SEQ ID NO: 9118
  source 1..120: mol_type = other DNA

SEQ ID NO: 60652 - DNA, 120 bp, synthetic construct; identical to SEQ ID NO: 30698
  source 1..120: mol_type = other DNA

SEQ ID NO: 60653 - DNA, 120 bp, synthetic construct; identical to SEQ ID NO: 30699
  source 1..120: mol_type = other DNA

SEQ ID NO: 60654 - DNA, 120 bp, synthetic construct; identical to SEQ ID NO: 30700
  source 1..120: mol_type = other DNA

SEQ ID NO: 60655 - DNA, 120 bp, synthetic construct; identical to SEQ ID NO: 9119
  source 1..120: mol_type = other DNA

SEQ ID NO: 60656 - DNA, 120 bp, synthetic construct; identical to SEQ ID NO: 30702
  source 1..120: mol_type = other DNA

SEQ ID NO: 60657 - DNA, 120 bp, synthetic construct; identical to SEQ ID NO: 30703
  source 1..120: mol_type = other DNA

SEQ ID NO: 60658 - DNA, 120 bp, synthetic construct; identical to SEQ ID NO: 30704
  source 1..120: mol_type = other DNA

SEQ ID NO: 60659 - DNA, 120 bp, synthetic construct; identical to SEQ ID NO: 9120
  source 1..120: mol_type = other DNA

SEQ ID NO: 60660 - DNA, 120 bp, synthetic construct; identical to SEQ ID NO: 30706
  source 1..120: mol_type = other DNA

SEQ ID NO: 60661 - DNA, 120 bp, synthetic construct; identical to SEQ ID NO: 30707
  source 1..120: mol_type = other DNA

SEQ ID NO: 60662 - DNA, 120 bp, synthetic construct; identical to SEQ ID NO: 30708
  source 1..120: mol_type = other DNA

SEQ ID NO: 60663 - DNA, 120 bp, synthetic construct; identical to SEQ ID NO: 30709
  source 1..120: mol_type = other DNA

SEQ ID NO: 60664 - DNA, 120 bp, synthetic construct; identical to SEQ ID NO: 9121
  source 1..120: mol_type = other DNA

SEQ ID NO: 60665 - DNA, 120 bp, synthetic construct; identical to SEQ ID NO: 30711
  source 1..120: mol_type = other DNA

SEQ ID NO: 60666 - DNA, 120 bp, synthetic construct; identical to SEQ ID NO: 30712
  source 1..120: mol_type = other DNA

SEQ ID NO: 60667 - DNA, 120 bp, synthetic construct; identical to SEQ ID NO: 9122
  source 1..120: mol_type = other DNA

SEQ ID NO: 60668 - DNA, 120 bp, synthetic construct; identical to SEQ ID NO: 30714
  source 1..120: mol_type = other DNA

SEQ ID NO: 60669 - DNA, 120 bp, synthetic construct; identical to SEQ ID NO: 30715
  source 1..120: mol_type = other DNA

SEQ ID NO: 60670 - DNA, 120 bp, synthetic construct; identical to SEQ ID NO: 30716
  source 1..120: mol_type = other DNA

SEQ ID NO: 60671 - DNA, 120 bp, synthetic construct; identical to SEQ ID NO: 30717
  source 1..120: mol_type = other DNA

SEQ ID NO: 60672 - DNA, 120 bp, synthetic construct; identical to SEQ ID NO: 9123
  source 1..120: mol_type = other DNA

SEQ ID NO: 60673 - DNA, 120 bp, synthetic construct; identical to SEQ ID NO: 30719
  source 1..120: mol_type = other DNA

SEQ ID NO: 60674 - DNA, 120 bp, synthetic construct; identical to SEQ ID NO: 30720
  source 1..120: mol_type = other DNA

SEQ ID NO: 60675 - DNA, 120 bp, synthetic construct; identical to SEQ ID NO: 9124
  source 1..120: mol_type = other DNA

SEQ ID NO: 60676 - DNA, 120 bp, synthetic construct; identical to SEQ ID NO: 30722
  source 1..120: mol_type = other DNA

SEQ ID NO: 60677 - DNA, 120 bp, synthetic construct; identical to SEQ ID NO: 30723
  source 1..120: mol_type = other DNA

SEQ ID NO: 60678 - DNA, 120 bp, synthetic construct; identical to SEQ ID NO: 9125
  source 1..120: mol_type = other DNA

SEQ ID NO: 60679 - DNA, 120 bp, synthetic construct; identical to SEQ ID NO: 30725
  source 1..120: mol_type = other DNA

SEQ ID NO: 60680 - DNA, 120 bp, synthetic construct; identical to SEQ ID NO: 30726
  source 1..120: mol_type = other DNA

SEQ ID NO: 60681 - DNA, 120 bp, synthetic construct; identical to SEQ ID NO: 30727
  source 1..120: mol_type = other DNA

SEQ ID NO: 60682 - DNA, 120 bp, synthetic construct; identical to SEQ ID NO: 9126
  source 1..120: mol_type = other DNA

SEQ ID NO: 60683 - DNA, 120 bp, synthetic construct; identical to SEQ ID NO: 30729
  source 1..120: mol_type = other DNA

SEQ ID NO: 60684 - DNA, 120 bp, synthetic construct; identical to SEQ ID NO: 30730
  source 1..120: mol_type = other DNA

SEQ ID NO: 60685 - DNA, 120 bp, synthetic construct; identical to SEQ ID NO: 30731
  source 1..120: mol_type = other DNA

SEQ ID NO: 60686 - DNA, 120 bp, synthetic construct; identical to SEQ ID NO: 30732
  source 1..120: mol_type = other DNA

SEQ ID NO: 60687 - DNA, 120 bp, synthetic construct; identical to SEQ ID NO: 9127
  source 1..120: mol_type = other DNA

SEQ ID NO: 60688 - DNA, 120 bp, synthetic construct; identical to SEQ ID NO: 30734
  source 1..120: mol_type = other DNA

SEQ ID NO: 60689 - DNA, 120 bp, synthetic construct; identical to SEQ ID NO: 30735
  source 1..120: mol_type = other DNA

SEQ ID NO: 60690 - DNA, 120 bp, synthetic construct; identical to SEQ ID NO: 9128
  source 1..120: mol_type = other DNA

SEQ ID NO: 60691 - DNA, 120 bp, synthetic construct; identical to SEQ ID NO: 30737
  source 1..120: mol_type = other DNA

SEQ ID NO: 60692 - DNA, 120 bp, synthetic construct; identical to SEQ ID NO: 30738
  source 1..120: mol_type = other DNA

SEQ ID NO: 60693 - DNA, 120 bp, synthetic construct; identical to SEQ ID NO: 30739
  source 1..120: mol_type = other DNA

SEQ ID NO: 60694 - DNA, 120 bp, synthetic construct; identical to SEQ ID NO: 30740
  source 1..120: mol_type = other DNA

SEQ ID NO: 60695 - DNA, 120 bp, synthetic construct; identical to SEQ ID NO: 9129
  source 1..120: mol_type = other DNA

SEQ ID NO: 60696 - DNA, 120 bp, synthetic construct; identical to SEQ ID NO: 30742
  source 1..120: mol_type = other DNA

SEQ ID NO: 60697 - DNA, 120 bp, synthetic construct; identical to SEQ ID NO: 30743
  source 1..120: mol_type = other DNA

SEQ ID NO: 60698 - DNA, 120 bp, synthetic construct; identical to SEQ ID NO: 30744
  source 1..120: mol_type = other DNA

SEQ ID NO: 60699 - DNA, 120 bp, synthetic construct; identical to SEQ ID NO: 9130
  source 1..120: mol_type = other DNA

SEQ ID NO: 60700 - DNA, 120 bp, synthetic construct; identical to SEQ ID NO: 30746
  source 1..120: mol_type = other DNA

SEQ ID NO: 60701 - DNA, 120 bp, synthetic construct; identical to SEQ ID NO: 30747
  source 1..120: mol_type = other DNA

SEQ ID NO: 60702 - DNA, 120 bp, synthetic construct; identical to SEQ ID NO: 30748
  source 1..120: mol_type = other DNA

SEQ ID NO: 60703 - DNA, 120 bp, synthetic construct; identical to SEQ ID NO: 9131
  source 1..120: mol_type = other DNA

SEQ ID NO: 60704 - DNA, 120 bp, synthetic construct; identical to SEQ ID NO: 30750
  source 1..120: mol_type = other DNA

SEQ ID NO: 60705 - DNA, 120 bp, synthetic construct; identical to SEQ ID NO: 30751
  source 1..120: mol_type = other DNA

SEQ ID NO: 60706 - DNA, 120 bp, synthetic construct; identical to SEQ ID NO: 9132
  source 1..120: mol_type = other DNA

SEQ ID NO: 60707 - DNA, 120 bp, synthetic construct; identical to SEQ ID NO: 30753
  source 1..120: mol_type = other DNA

SEQ ID NO: 60708 - DNA, 120 bp, synthetic construct; identical to SEQ ID NO: 30754
  source 1..120: mol_type = other DNA

SEQ ID NO: 60709 - DNA, 120 bp, synthetic construct; identical to SEQ ID NO: 30755
  source 1..120: mol_type = other DNA

SEQ ID NO: 60710 - DNA, 120 bp, synthetic construct; identical to SEQ ID NO: 9133
  source 1..120: mol_type = other DNA

SEQ ID NO: 60711 - DNA, 120 bp, synthetic construct; identical to SEQ ID NO: 30757
  source 1..120: mol_type = other DNA

SEQ ID NO: 60712 - DNA, 120 bp, synthetic construct; identical to SEQ ID NO: 30758
  source 1..120: mol_type = other DNA

SEQ ID NO: 60713 - DNA, 120 bp, synthetic construct; identical to SEQ ID NO: 30759
  source 1..120: mol_type = other DNA

SEQ ID NO: 60714 - DNA, 120 bp, synthetic construct; identical to SEQ ID NO: 9134
  source 1..120: mol_type = other DNA

SEQ ID NO: 60715 - DNA, 120 bp, synthetic construct; identical to SEQ ID NO: 30761
  source 1..120: mol_type = other DNA

SEQ ID NO: 60716 - DNA, 120 bp, synthetic construct; identical to SEQ ID NO: 30762
  source 1..120: mol_type = other DNA

SEQ ID NO: 60717 - DNA, 120 bp, synthetic construct; identical to SEQ ID NO: 30763
  source 1..120: mol_type = other DNA

SEQ ID NO: 60718 - DNA, 120 bp, synthetic construct; identical to SEQ ID NO: 9135
  source 1..120: mol_type = other DNA

SEQ ID NO: 60719 - DNA, 120 bp, synthetic construct; identical to SEQ ID NO: 30765
  source 1..120: mol_type = other DNA

SEQ ID NO: 60720 - DNA, 120 bp, synthetic construct; identical to SEQ ID NO: 30766
  source 1..120: mol_type = other DNA

SEQ ID NO: 60721 - DNA, 120 bp, synthetic construct; identical to SEQ ID NO: 30767
  source 1..120: mol_type = other DNA

SEQ ID NO: 60722 - DNA, 120 bp, synthetic construct; identical to SEQ ID NO: 30768
  source 1..120: mol_type = other DNA

SEQ ID NO: 60723 - DNA, 120 bp, synthetic construct; identical to SEQ ID NO: 9136
  source 1..120: mol_type = other DNA

SEQ ID NO: 60724 - DNA, 120 bp, synthetic construct; identical to SEQ ID NO: 30770
  source 1..120: mol_type = other DNA

SEQ ID NO: 60725 - DNA, 120 bp, synthetic construct; identical to SEQ ID NO: 30771
  source 1..120: mol_type = other DNA

SEQ ID NO: 60726 - DNA, 120 bp, synthetic construct; identical to SEQ ID NO: 9137
  source 1..120: mol_type = other DNA

SEQ ID NO: 60727 - DNA, 120 bp, synthetic construct; identical to SEQ ID NO: 30773
  source 1..120: mol_type = other DNA

SEQ ID NO: 60728 - DNA, 120 bp, synthetic construct; identical to SEQ ID NO: 30774
  source 1..120: mol_type = other DNA

SEQ ID NO: 60729 - DNA, 120 bp, synthetic construct; identical to SEQ ID NO: 30775
  source 1..120: mol_type = other DNA

SEQ ID NO: 60730 - DNA, 120 bp, synthetic construct; identical to SEQ ID NO: 30776
  source 1..120: mol_type = other DNA

SEQ ID NO: 60731 - DNA, 120 bp, synthetic construct; identical to SEQ ID NO: 9138
  source 1..120: mol_type = other DNA

SEQ ID NO: 60732 - DNA, 120 bp, synthetic construct; identical to SEQ ID NO: 30778
  source 1..120: mol_type = other DNA

SEQ ID NO: 60733 - DNA, 120 bp, synthetic construct; identical to SEQ ID NO: 30779
  source 1..120: mol_type = other DNA

SEQ ID NO: 60734 - DNA, 120 bp, synthetic construct; identical to SEQ ID NO: 30780
  source 1..120: mol_type = other DNA

SEQ ID NO: 60735 - DNA, 120 bp, synthetic construct; identical to SEQ ID NO: 9139
  source 1..120: mol_type = other DNA

SEQ ID NO: 60736 - DNA, 120 bp, synthetic construct; identical to SEQ ID NO: 30782
  source 1..120: mol_type = other DNA

SEQ ID NO: 60737 - DNA, 120 bp, synthetic construct; identical to SEQ ID NO: 30783
  source 1..120: mol_type = other DNA

SEQ ID NO: 60738 - DNA, 120 bp, synthetic construct; identical to SEQ ID NO: 30784
  source 1..120: mol_type = other DNA

SEQ ID NO: 60739 - DNA, 120 bp, synthetic construct; identical to SEQ ID NO: 9140
  source 1..120: mol_type = other DNA

SEQ ID NO: 60740 - DNA, 120 bp, synthetic construct; identical to SEQ ID NO: 30786
  source 1..120: mol_type = other DNA

SEQ ID NO: 60741 - DNA, 120 bp, synthetic construct; identical to SEQ ID NO: 30787
  source 1..120: mol_type = other DNA

SEQ ID NO: 60742 - DNA, 120 bp, synthetic construct; identical to SEQ ID NO: 30788
  source 1..120: mol_type = other DNA

SEQ ID NO: 60743 - DNA, 120 bp, synthetic construct; identical to SEQ ID NO: 30789
  source 1..120: mol_type = other DNA

SEQ ID NO: 60744 - DNA, 120 bp, synthetic construct; identical to SEQ ID NO: 9141
  source 1..120: mol_type = other DNA

SEQ ID NO: 60745 - DNA, 120 bp, synthetic construct; identical to SEQ ID NO: 30791
  source 1..120: mol_type = other DNA

SEQ ID NO: 60746 - DNA, 120 bp, synthetic construct; identical to SEQ ID NO: 30792
  source 1..120: mol_type = other DNA

SEQ ID NO: 60747 - DNA, 120 bp, synthetic construct; identical to SEQ ID NO: 30793
  source 1..120: mol_type = other DNA

SEQ ID NO: 60748 - DNA, 120 bp, synthetic construct; identical to SEQ ID NO: 9142
  source 1..120: mol_type = other DNA

SEQ ID NO: 60749 - DNA, 120 bp, synthetic construct; identical to SEQ ID NO: 30795
  source 1..120: mol_type = other DNA

SEQ ID NO: 60750 - DNA, 120 bp, synthetic construct; identical to SEQ ID NO: 30796
  source 1..120: mol_type = other DNA

SEQ ID NO: 60751 - DNA, 120 bp, synthetic construct; identical to SEQ ID NO: 9143
  source 1..120: mol_type = other DNA

SEQ ID NO: 60752 - DNA, 120 bp, synthetic construct; identical to SEQ ID NO: 30798
  source 1..120: mol_type = other DNA

SEQ ID NO: 60753 - DNA, 120 bp, synthetic construct; identical to SEQ ID NO: 30799
  source 1..120: mol_type = other DNA

SEQ ID NO: 60754 - DNA, 120 bp, synthetic construct; identical to SEQ ID NO: 30800
  source 1..120: mol_type = other DNA

SEQ ID NO: 60755 - DNA, 120 bp, synthetic construct; identical to SEQ ID NO: 9144
  source 1..120: mol_type = other DNA

SEQ ID NO: 60756 - DNA, 120 bp, synthetic construct; identical to SEQ ID NO: 30802
  source 1..120: mol_type = other DNA

SEQ ID NO: 60757 - DNA, 120 bp, synthetic construct; identical to SEQ ID NO: 30803
  source 1..120: mol_type = other DNA

SEQ ID NO: 60758 - DNA, 120 bp, synthetic construct; identical to SEQ ID NO: 30804
  source 1..120: mol_type = other DNA

SEQ ID NO: 60759 - DNA, 120 bp, synthetic construct; identical to SEQ ID NO: 30805
  source 1..120: mol_type = other DNA

SEQ ID NO: 60760 - DNA, 120 bp, synthetic construct; identical to SEQ ID NO: 9145
  source 1..120: mol_type = other DNA

SEQ ID NO: 60761 - DNA, 120 bp, synthetic construct; identical to SEQ ID NO: 30807
  source 1..120: mol_type = other DNA

SEQ ID NO: 60762 - DNA, 120 bp, synthetic construct; identical to SEQ ID NO: 30808
  source 1..120: mol_type = other DNA

SEQ ID NO: 60763 - DNA, 120 bp, synthetic construct; identical to SEQ ID NO: 9146
  source 1..120: mol_type = other DNA

SEQ ID NO: 60764 - DNA, 120 bp, synthetic construct; identical to SEQ ID NO: 30810
  source 1..120: mol_type = other DNA

SEQ ID NO: 60765 - DNA, 120 bp, synthetic construct; identical to SEQ ID NO: 30811
  source 1..120: mol_type = other DNA

SEQ ID NO: 60766 - DNA, 120 bp, synthetic construct; identical to SEQ ID NO: 30812
  source 1..120: mol_type = other DNA

SEQ ID NO: 60767 - DNA, 120 bp, synthetic construct; identical to SEQ ID NO: 30813
  source 1..120: mol_type = other DNA

SEQ ID NO: 60768 - DNA, 120 bp, synthetic construct; identical to SEQ ID NO: 9147
  source 1..120: mol_type = other DNA

SEQ ID NO: 60769 - DNA, 120 bp, synthetic construct; identical to SEQ ID NO: 30815
  source 1..120: mol_type = other DNA

SEQ ID NO: 60770 - DNA, 120 bp, synthetic construct; identical to SEQ ID NO: 30816
  source 1..120: mol_type = other DNA

SEQ ID NO: 60771 - DNA, 120 bp, synthetic construct; identical to SEQ ID NO: 9148
  source 1..120: mol_type = other DNA

SEQ ID NO: 60772 - DNA, 120 bp, synthetic construct; identical to SEQ ID NO: 30818
  source 1..120: mol_type = other DNA

SEQ ID NO: 60773 - DNA, 120 bp, synthetic construct; identical to SEQ ID NO: 30819
  source 1..120: mol_type = other DNA

SEQ ID NO: 60774 - DNA, 120 bp, synthetic construct; identical to SEQ ID NO: 30820
  source 1..120: mol_type = other DNA

SEQ ID NO: 60775 - DNA, 120 bp, synthetic construct; identical to SEQ ID NO: 30821
  source 1..120: mol_type = other DNA

SEQ ID NO: 60776 - DNA, 120 bp, synthetic construct; identical to SEQ ID NO: 9149
  source 1..120: mol_type = other DNA

SEQ ID NO: 60777 - DNA, 120 bp, synthetic construct; identical to SEQ ID NO: 30823
  source 1..120: mol_type = other DNA

SEQ ID NO: 60778 - DNA, 120 bp, synthetic construct; identical to SEQ ID NO: 30824
  source 1..120: mol_type = other DNA

SEQ ID NO: 60779 - DNA, 120 bp, synthetic construct; identical to SEQ ID NO: 9150
  source 1..120: mol_type = other DNA

SEQ ID NO: 60780 - DNA, 120 bp, synthetic construct; identical to SEQ ID NO: 30826
  source 1..120: mol_type = other DNA

SEQ ID NO: 60781 - DNA, 120 bp, synthetic construct; identical to SEQ ID NO: 30827
  source 1..120: mol_type = other DNA

SEQ ID NO: 60782 - DNA, 120 bp, synthetic construct; identical to SEQ ID NO: 30828
  source 1..120: mol_type = other DNA

SEQ ID NO: 60783 - DNA, 120 bp, synthetic construct; identical to SEQ ID NO: 30829
  source 1..120: mol_type = other DNA

SEQ ID NO: 60784 - DNA, 120 bp, synthetic construct; identical to SEQ ID NO: 9151
  source 1..120: mol_type = other DNA

SEQ ID NO: 60785 - DNA, 120 bp, synthetic construct; identical to SEQ ID NO: 30831
  source 1..120: mol_type = other DNA

SEQ ID NO: 60786 - DNA, 120 bp, synthetic construct; identical to SEQ ID NO: 30832
  source 1..120: mol_type = other DNA

SEQ ID NO: 60787 - DNA, 120 bp, synthetic construct; identical to SEQ ID NO: 9152
  source 1..120: mol_type = other DNA

SEQ ID NO: 60788 - DNA, 120 bp, synthetic construct; identical to SEQ ID NO: 30834
  source 1..120: mol_type = other DNA

SEQ ID NO: 60789 - DNA, 120 bp, synthetic construct; identical to SEQ ID NO: 30835
  source 1..120: mol_type = other DNA

SEQ ID NO: 60790 - DNA, 120 bp, synthetic construct; identical to SEQ ID NO: 30836
  source 1..120: mol_type = other DNA

SEQ ID NO: 60791 - DNA, 120 bp, synthetic construct; identical to SEQ ID NO: 9153
  source 1..120: mol_type = other DNA

SEQ ID NO: 60792 - DNA, 120 bp, synthetic construct; identical to SEQ ID NO: 30838
  source 1..120: mol_type = other DNA

SEQ ID NO: 60793 - DNA, 120 bp, synthetic construct; identical to SEQ ID NO: 30839
  source 1..120: mol_type = other DNA

SEQ ID NO: 60794 - DNA, 120 bp, synthetic construct; identical to SEQ ID NO: 30840
  source 1..120: mol_type = other DNA

SEQ ID NO: 60795 - DNA, 120 bp, synthetic construct; identical to SEQ ID NO: 9154
  source 1..120: mol_type = other DNA

SEQ ID NO: 60796 - DNA, 120 bp, synthetic construct; identical to SEQ ID NO: 30842
  source 1..120: mol_type = other DNA

SEQ ID NO: 60797 - DNA, 120 bp, synthetic construct; identical to SEQ ID NO: 30843
  source 1..120: mol_type = other DNA

SEQ ID NO: 60798 - DNA, 120 bp, synthetic construct; identical to SEQ ID NO: 30844
  source 1..120: mol_type = other DNA

SEQ ID NO: 60799 - DNA, 120 bp, synthetic construct; identical to SEQ ID NO: 9155
  source 1..120: mol_type = other DNA

SEQ ID NO: 60800 - DNA, 120 bp, synthetic construct; identical to SEQ ID NO: 30846
  source 1..120: mol_type = other DNA

SEQ ID NO: 60801 - DNA, 120 bp, synthetic construct; identical to SEQ ID NO: 30847
  source 1..120: mol_type = other DNA

SEQ ID NO: 60802 - DNA, 120 bp, synthetic construct; identical to SEQ ID NO: 30848
  source 1..120: mol_type = other DNA

SEQ ID NO: 60803 - DNA, 120 bp, synthetic construct; identical to SEQ ID NO: 30849
  source 1..120: mol_type = other DNA

SEQ ID NO: 60804 - DNA, 120 bp, synthetic construct; identical to SEQ ID NO: 9156
  source 1..120: mol_type = other DNA

SEQ ID NO: 60805 - DNA, 120 bp, synthetic construct; identical to SEQ ID NO: 30851
  source 1..120: mol_type = other DNA

SEQ ID NO: 60806 - DNA, 120 bp, synthetic construct; identical to SEQ ID NO: 30852
  source 1..120: mol_type = other DNA

SEQ ID NO: 60807 - DNA, 120 bp, synthetic construct; identical to SEQ ID NO: 30853
  source 1..120: mol_type = other DNA

SEQ ID NO: 60808 - DNA, 120 bp, synthetic construct; identical to SEQ ID NO: 9157
  source 1..120: mol_type = other DNA

SEQ ID NO: 60809 - DNA, 120 bp, synthetic construct; identical to SEQ ID NO: 30855
  source 1..120: mol_type = other DNA

SEQ ID NO: 60810 - DNA, 120 bp, synthetic construct; identical to SEQ ID NO: 30856
  source 1..120: mol_type = other DNA

SEQ ID NO: 60811 - DNA, 120 bp, synthetic construct; identical to SEQ ID NO: 30857
  source 1..120: mol_type = other DNA

SEQ ID NO: 60812 - DNA, 120 bp, synthetic construct; identical to SEQ ID NO: 9158
  source 1..120: mol_type = other DNA

SEQ ID NO: 60813 - DNA, 120 bp, synthetic construct; identical to SEQ ID NO: 30859
  source 1..120: mol_type = other DNA

SEQ ID NO: 60814 - DNA, 120 bp, synthetic construct; identical to SEQ ID NO: 30860
  source 1..120: mol_type = other DNA

SEQ ID NO: 60815 - DNA, 120 bp, synthetic construct; identical to SEQ ID NO: 30861
  source 1..120: mol_type = other DNA

SEQ ID NO: 60816 - DNA, 120 bp, synthetic construct; identical to SEQ ID NO: 9159
  source 1..120: mol_type = other DNA

SEQ ID NO: 60817 - DNA, 120 bp, synthetic construct; identical to SEQ ID NO: 30863
  source 1..120: mol_type = other DNA

SEQ ID NO: 60818 - DNA, 120 bp, synthetic construct; identical to SEQ ID NO: 30864
  source 1..120: mol_type = other DNA

SEQ ID NO: 60819 - DNA, 120 bp, synthetic construct; identical to SEQ ID NO: 9160
  source 1..120: mol_type = other DNA

SEQ ID NO: 60820 - DNA, 120 bp, synthetic construct; identical to SEQ ID NO: 30866
  source 1..120: mol_type = other DNA

SEQ ID NO: 60821 - DNA, 120 bp, synthetic construct; identical to SEQ ID NO: 30867
  source 1..120: mol_type = other DNA

SEQ ID NO: 60822 - DNA, 120 bp, synthetic construct; identical to SEQ ID NO: 30868
  source 1..120: mol_type = other DNA

SEQ ID NO: 60823 - DNA, 120 bp, synthetic construct; identical to SEQ ID NO: 9161
  source 1..120: mol_type = other DNA

SEQ ID NO: 60824 - DNA, 120 bp, synthetic construct; identical to SEQ ID NO: 30870
  source 1..120: mol_type = other DNA

SEQ ID NO: 60825 - DNA, 120 bp, synthetic construct; identical to SEQ ID NO: 30871
  source 1..120: mol_type = other DNA

SEQ ID NO: 60826 - DNA, 120 bp, synthetic construct; identical to SEQ ID NO: 30872
  source 1..120: mol_type = other DNA

SEQ ID NO: 60827 - DNA, 120 bp, synthetic construct; identical to SEQ ID NO: 30873
  source 1..120: mol_type = other DNA

SEQ ID NO: 60828 - DNA, 120 bp, synthetic construct; identical to SEQ ID NO: 9162
  source 1..120: mol_type = other DNA

SEQ ID NO: 60829 - DNA, 120 bp, synthetic construct; identical to SEQ ID NO: 30875
  source 1..120: mol_type = other DNA

SEQ ID NO: 60830 - DNA, 120 bp, synthetic construct; identical to SEQ ID NO: 30876
  source 1..120: mol_type = other DNA

SEQ ID NO: 60831 - DNA, 120 bp, synthetic construct; identical to SEQ ID NO: 2066
  source 1..120: mol_type = other DNA

SEQ ID NO: 60832 - DNA, 120 bp, synthetic construct; identical to SEQ ID NO: 30878
  source 1..120: mol_type = other DNA

SEQ ID NO: 60833 - DNA, 120 bp, synthetic construct; identical to SEQ ID NO: 30879
  source 1..120: mol_type = other DNA

SEQ ID NO: 60834 - DNA, 120 bp, synthetic construct; identical to SEQ ID NO: 30880
  source 1..120: mol_type = other DNA

SEQ ID NO: 60835 - DNA, 120 bp, synthetic construct; identical to SEQ ID NO: 9164
  source 1..120: mol_type = other DNA

SEQ ID NO: 60836 - DNA, 120 bp, synthetic construct; identical to SEQ ID NO: 30882
  source 1..120: mol_type = other DNA

SEQ ID NO: 60837 - DNA, 120 bp, synthetic construct; identical to SEQ ID NO: 30883
  source 1..120: mol_type = other DNA

SEQ ID NO: 60838 - DNA, 120 bp, synthetic construct; identical to SEQ ID NO: 30884
  source 1..120: mol_type = other DNA

SEQ ID NO: 60839 - DNA, 120 bp, synthetic construct; identical to SEQ ID NO: 30885
  source 1..120: mol_type = other DNA

SEQ ID NO: 60840 - DNA, 120 bp, synthetic construct; identical to SEQ ID NO: 9165
  source 1..120: mol_type = other DNA

SEQ ID NO: 60841 - DNA, 120 bp, synthetic construct; identical to SEQ ID NO: 30887
  source 1..120: mol_type = other DNA

SEQ ID NO: 60842 - DNA, 120 bp, synthetic construct; identical to SEQ ID NO: 30888
  source 1..120: mol_type = other DNA

SEQ ID NO: 60843 - DNA, 120 bp, synthetic construct; identical to SEQ ID NO: 30889
  source 1..120: mol_type = other DNA

SEQ ID NO: 60844 - DNA, 120 bp, synthetic construct; identical to SEQ ID NO: 9166
  source 1..120: mol_type = other DNA

SEQ ID NO: 60845 - DNA, 120 bp, synthetic construct; identical to SEQ ID NO: 30891
  source 1..120: mol_type = other DNA

SEQ ID NO: 60846 - DNA, 120 bp, synthetic construct; identical to SEQ ID NO: 30892
  source 1..120: mol_type = other DNA

SEQ ID NO: 60847 - DNA, 120 bp, synthetic construct; identical to SEQ ID NO: 9167
  source 1..120: mol_type = other DNA

SEQ ID NO: 60848 - DNA, 120 bp, synthetic construct; identical to SEQ ID NO: 30894
  source 1..120: mol_type = other DNA

SEQ ID NO: 60849 - DNA, 120 bp, synthetic construct; identical to SEQ ID NO: 30895
  source 1..120: mol_type = other DNA

SEQ ID NO: 60850 - DNA, 120 bp, synthetic construct; identical to SEQ ID NO: 30896
  source 1..120: mol_type = other DNA

SEQ ID NO: 60851 - DNA, 120 bp, synthetic construct; identical to SEQ ID NO: 30897
  source 1..120: mol_type = other DNA

SEQ ID NO: 60852 - DNA, 120 bp, synthetic construct; identical to SEQ ID NO: 9168
  source 1..120: mol_type = other DNA

SEQ ID NO: 60853 - DNA, 120 bp, synthetic construct; identical to SEQ ID NO: 30899
  source 1..120: mol_type = other DNA

SEQ ID NO: 60854 - DNA, 120 bp, synthetic construct; identical to SEQ ID NO: 30900
  source 1..120: mol_type = other DNA

SEQ ID NO: 60855 - DNA, 120 bp, synthetic construct; identical to SEQ ID NO: 30901
  source 1..120: mol_type = other DNA

SEQ ID NO: 60856 - DNA, 120 bp, synthetic construct; identical to SEQ ID NO: 9169
  source 1..120: mol_type = other DNA

SEQ ID NO: 60857 - DNA, 120 bp, synthetic construct; identical to SEQ ID NO: 30903
  source 1..120: mol_type = other DNA

SEQ ID NO: 60858 - DNA, 120 bp, synthetic construct; identical to SEQ ID NO: 30904
  source 1..120: mol_type = other DNA

SEQ ID NO: 60859 - DNA, 120 bp, synthetic construct; identical to SEQ ID NO: 30905
  source 1..120: mol_type = other DNA

SEQ ID NO: 60860 - DNA, 120 bp, synthetic construct; identical to SEQ ID NO: 9170
  source 1..120: mol_type = other DNA

SEQ ID NO: 60861 - DNA, 120 bp, synthetic construct; identical to SEQ ID NO: 30907
  source 1..120: mol_type = other DNA

SEQ ID NO: 60862 - DNA, 120 bp, synthetic construct; identical to SEQ ID NO: 30908
  source 1..120: mol_type = other DNA

SEQ ID NO: 60863 - DNA, 120 bp, synthetic construct; identical to SEQ ID NO: 30909
  source 1..120: mol_type = other DNA

SEQ ID NO: 60864 - DNA, 120 bp, synthetic construct; identical to SEQ ID NO: 9171
  source 1..120: mol_type = other DNA

SEQ ID NO: 60865 - DNA, 120 bp, synthetic construct; identical to SEQ ID NO: 30911
  source 1..120: mol_type = other DNA

SEQ ID NO: 60866 - DNA, 120 bp, synthetic construct; identical to SEQ ID NO: 30912
  source 1..120: mol_type = other DNA

SEQ ID NO: 60867 - DNA, 120 bp, synthetic construct; identical to SEQ ID NO: 9172
  source 1..120: mol_type = other DNA

SEQ ID NO: 60868 - DNA, 120 bp, synthetic construct; identical to SEQ ID NO: 30914
  source 1..120: mol_type = other DNA

SEQ ID NO: 60869 - DNA, 120 bp, synthetic construct; identical to SEQ ID NO: 9173
  source 1..120: mol_type = other DNA

SEQ ID NO: 60870 - DNA, 120 bp, synthetic construct; identical to SEQ ID NO: 30916
  source 1..120: mol_type = other DNA

SEQ ID NO: 60871 - DNA, 120 bp, synthetic construct; identical to SEQ ID NO: 30917
  source 1..120: mol_type = other DNA

SEQ ID NO: 60872 - DNA, 120 bp, synthetic construct; identical to SEQ ID NO: 9174
  source 1..120: mol_type = other DNA

SEQ ID NO: 60873 - DNA, 120 bp, synthetic construct; identical to SEQ ID NO: 30919
  source 1..120: mol_type = other DNA

SEQ ID NO: 60874 - DNA, 120 bp, synthetic construct; identical to SEQ ID NO: 9175
  source 1..120: mol_type = other DNA

SEQ ID NO: 60875 - DNA, 120 bp, synthetic construct; identical to SEQ ID NO: 30921
  source 1..120: mol_type = other DNA

SEQ ID NO: 60876 - DNA, 120 bp, synthetic construct; identical to SEQ ID NO: 30922
  source 1..120: mol_type = other DNA

SEQ ID NO: 60877 - DNA, 120 bp, synthetic construct; identical to SEQ ID NO: 30923
  source 1..120: mol_type = other DNA

SEQ ID NO: 60878 - DNA, 120 bp, synthetic construct; identical to SEQ ID NO: 9176
  source 1..120: mol_type = other DNA

SEQ ID NO: 60879 - DNA, 120 bp, synthetic construct; identical to SEQ ID NO: 30925
  source 1..120: mol_type = other DNA

SEQ ID NO: 60880 - DNA, 120 bp, synthetic construct; identical to SEQ ID NO: 30926
  source 1..120: mol_type = other DNA

SEQ ID NO: 60881 - DNA, 120 bp, synthetic construct; identical to SEQ ID NO: 9177
  source 1..120: mol_type = other DNA

SEQ ID NO: 60882 - DNA, 120 bp, synthetic construct; identical to SEQ ID NO: 30928
  source 1..120: mol_type = other DNA

SEQ ID NO: 60883 - DNA, 120 bp, synthetic construct; identical to SEQ ID NO: 30929
  source 1..120: mol_type = other DNA

SEQ ID NO: 60884 - DNA, 120 bp, synthetic construct; identical to SEQ ID NO: 30930
  source 1..120: mol_type = other DNA

SEQ ID NO: 60885 - DNA, 120 bp, synthetic construct; identical to SEQ ID NO: 9178
  source 1..120: mol_type = other DNA

SEQ ID NO: 60886 - DNA, 120 bp, synthetic construct; identical to SEQ ID NO: 30932
  source 1..120: mol_type = other DNA

SEQ ID NO: 60887 - DNA, 120 bp, synthetic construct; identical to SEQ ID NO: 30933
  source 1..120: mol_type = other DNA

SEQ ID NO: 60888 - DNA, 120 bp, synthetic construct; identical to SEQ ID NO: 30934
  source 1..120: mol_type = other DNA

SEQ ID NO: 60889 - DNA, 120 bp, synthetic construct; identical to SEQ ID NO: 30935
  source 1..120: mol_type = other DNA

SEQ ID NO: 60890 - DNA, 120 bp, synthetic construct; identical to SEQ ID NO: 9179
  source 1..120: mol_type = other DNA

SEQ ID NO: 60891 - DNA, 120 bp, synthetic construct; identical to SEQ ID NO: 30937
  source 1..120: mol_type = other DNA

SEQ ID NO: 60892 - DNA, 120 bp, synthetic construct; identical to SEQ ID NO: 30938
  source 1..120: mol_type = other DNA

SEQ ID NO: 60893 - DNA, 120 bp, synthetic construct; identical to SEQ ID NO: 9180
  source 1..120: mol_type = other DNA

SEQ ID NO: 60894 - DNA, 120 bp, synthetic construct; identical to SEQ ID NO: 30940
  source 1..120: mol_type = other DNA

SEQ ID NO: 60895 - DNA, 120 bp, synthetic construct; identical to SEQ ID NO: 30941
  source 1..120: mol_type = other DNA

SEQ ID NO: 60896 - DNA, 120 bp, synthetic construct; identical to SEQ ID NO: 9181
  source 1..120: mol_type = other DNA

SEQ ID NO: 60897 - DNA, 120 bp, synthetic construct; identical to SEQ ID NO: 30943
  source 1..120: mol_type = other DNA

SEQ ID NO: 60898 - DNA, 120 bp, synthetic construct; identical to SEQ ID NO: 30944
  source 1..120: mol_type = other DNA

SEQ ID NO: 60899 - DNA, 120 bp, synthetic construct; identical to SEQ ID NO: 9182
  source 1..120: mol_type = other DNA

SEQ ID NO: 60900 - DNA, 120 bp, synthetic construct; identical to SEQ ID NO: 30946
  source 1..120: mol_type = other DNA

SEQ ID NO: 60901 - DNA, 120 bp, synthetic construct; identical to SEQ ID NO: 9183
  source 1..120: mol_type = other DNA

SEQ ID NO: 60902 - DNA, 120 bp, synthetic construct; identical to SEQ ID NO: 30948
  source 1..120: mol_type = other DNA

SEQ ID NO: 60903 - DNA, 120 bp, synthetic construct; identical to SEQ ID NO: 30949
  source 1..120: mol_type = other DNA

SEQ ID NO: 60904 - DNA, 120 bp, synthetic construct; identical to SEQ ID NO: 30950
  source 1..120: mol_type = other DNA

SEQ ID NO: 60905 - DNA, 120 bp, synthetic construct; identical to SEQ ID NO: 30951
  source 1..120: mol_type = other DNA

SEQ ID NO: 60906 - DNA, 120 bp, synthetic construct; identical to SEQ ID NO: 9184
  source 1..120: mol_type = other DNA

SEQ ID NO: 60907 - DNA, 120 bp, synthetic construct; identical to SEQ ID NO: 30953
  source 1..120: mol_type = other DNA

SEQ ID NO: 60908 - DNA, 120 bp, synthetic construct; identical to SEQ ID NO: 30954
  source 1..120: mol_type = other DNA

SEQ ID NO: 60909 - DNA, 120 bp, synthetic construct; identical to SEQ ID NO: 30955
  source 1..120: mol_type = other DNA

SEQ ID NO: 60910 - DNA, 120 bp, synthetic construct; identical to SEQ ID NO: 30956
  source 1..120: mol_type = other DNA

SEQ ID NO: 60911 - DNA, 120 bp, synthetic construct; identical to SEQ ID NO: 9185
  source 1..120: mol_type = other DNA

SEQ ID NO: 60912 - DNA, 120 bp, synthetic construct; identical to SEQ ID NO: 30958
  source 1..120: mol_type = other DNA

SEQ ID NO: 60913 - DNA, 120 bp, synthetic construct; identical to SEQ ID NO: 30959
  source 1..120: mol_type = other DNA

SEQ ID NO: 60914 - DNA, 120 bp, synthetic construct; identical to SEQ ID NO: 30960
  source 1..120: mol_type = other DNA

SEQ ID NO: 60915 - DNA, 120 bp, synthetic construct; identical to SEQ ID NO: 9186
  source 1..120: mol_type = other DNA

SEQ ID NO: 60916 - DNA, 120 bp, synthetic construct; identical to SEQ ID NO: 30962
  source 1..120: mol_type = other DNA

SEQ ID NO: 60917 - DNA, 120 bp, synthetic construct; identical to SEQ ID NO: 30963
  source 1..120: mol_type = other DNA

SEQ ID NO: 60918 - DNA, 120 bp, synthetic construct; identical to SEQ ID NO: 30964
  source 1..120: mol_type = other DNA

SEQ ID NO: 60919 - DNA, 120 bp, synthetic construct; identical to SEQ ID NO: 9187
  source 1..120: mol_type = other DNA

SEQ ID NO: 60920 - DNA, 120 bp, synthetic construct; identical to SEQ ID NO: 30966
  source 1..120: mol_type = other DNA

SEQ ID NO: 60921 - DNA, 120 bp, synthetic construct; identical to SEQ ID NO: 30967
  source 1..120: mol_type = other DNA

SEQ ID NO: 60922 - DNA, 120 bp, synthetic construct; identical to SEQ ID NO: 9188
  source 1..120: mol_type = other DNA

SEQ ID NO: 60923 - DNA, 120 bp, synthetic construct; identical to SEQ ID NO: 30969
  source 1..120: mol_type = other DNA

SEQ ID NO: 60924 - DNA, 120 bp, synthetic construct; identical to SEQ ID NO: 30970
  source 1..120: mol_type = other DNA

SEQ ID NO: 60925 - DNA, 120 bp, synthetic construct; identical to SEQ ID NO: 30971
  source 1..120: mol_type = other DNA

SEQ ID NO: 60926 - DNA, 120 bp, synthetic construct; identical to SEQ ID NO: 30972
  source 1..120: mol_type = other DNA

SEQ ID NO: 60927 - DNA, 120 bp, synthetic construct; identical to SEQ ID NO: 9189
  source 1..120: mol_type = other DNA

SEQ ID NO: 60928 - DNA, 120 bp, synthetic construct; identical to SEQ ID NO: 30974
  source 1..120: mol_type = other DNA

SEQ ID NO: 60929 - DNA, 120 bp, synthetic construct; identical to SEQ ID NO: 30975
  source 1..120: mol_type = other DNA

SEQ ID NO: 60930 - DNA, 120 bp, synthetic construct; identical to SEQ ID NO: 30976
  source 1..120: mol_type = other DNA

SEQ ID NO: 60931 - DNA, 120 bp, synthetic construct; identical to SEQ ID NO: 9190
  source 1..120: mol_type = other DNA

SEQ ID NO: 60932 - DNA, 120 bp, synthetic construct; identical to SEQ ID NO: 30978
  source 1..120: mol_type = other DNA

SEQ ID NO: 60933 - DNA, 120 bp, synthetic construct; identical to SEQ ID NO: 30979
  source 1..120: mol_type = other DNA

SEQ ID NO: 60934 - DNA, 120 bp, synthetic construct; identical to SEQ ID NO: 30980
  source 1..120: mol_type = other DNA

SEQ ID NO: 60935 - DNA, 120 bp, synthetic construct; identical to SEQ ID NO: 30981
  source 1..120: mol_type = other DNA

SEQ ID NO: 60936 - DNA, 120 bp, synthetic construct; identical to SEQ ID NO: 9191
  source 1..120: mol_type = other DNA

SEQ ID NO: 60937 - DNA, 120 bp, synthetic construct; identical to SEQ ID NO: 30983
  source 1..120: mol_type = other DNA

SEQ ID NO: 60938 - DNA, 120 bp, synthetic construct; identical to SEQ ID NO: 30984
  source 1..120: mol_type = other DNA

SEQ ID NO: 60939 - DNA, 120 bp, synthetic construct; identical to SEQ ID NO: 9192
  source 1..120: mol_type = other DNA

SEQ ID NO: 60940 - DNA, 120 bp, synthetic construct; identical to SEQ ID NO: 30986
  source 1..120: mol_type = other DNA

SEQ ID NO: 60941 - DNA, 120 bp, synthetic construct; identical to SEQ ID NO: 30987
  source 1..120: mol_type = other DNA

SEQ ID NO: 60942 - DNA, 120 bp, synthetic construct; identical to SEQ ID NO: 30988
  source 1..120: mol_type = other DNA

SEQ ID NO: 60943 - DNA, 120 bp, synthetic construct; identical to SEQ ID NO: 30989
  source 1..120: mol_type = other DNA

SEQ ID NO: 60944 - DNA, 120 bp, synthetic construct; identical to SEQ ID NO: 9193
  source 1..120: mol_type = other DNA

SEQ ID NO: 60945 - DNA, 120 bp, synthetic construct; identical to SEQ ID NO: 30991
  source 1..120: mol_type = other DNA

SEQ ID NO: 60946 - DNA, 120 bp, synthetic construct; identical to SEQ ID NO: 30992
  source 1..120: mol_type = other DNA

SEQ ID NO: 60947 - DNA, 120 bp, synthetic construct; identical to SEQ ID NO: 9194
  source 1..120: mol_type = other DNA

SEQ ID NO: 60948 - DNA, 120 bp, synthetic construct; identical to SEQ ID NO: 30994
  source 1..120: mol_type = other DNA

SEQ ID NO: 60949 - DNA, 120 bp, synthetic construct; identical to SEQ ID NO: 30995
  source 1..120: mol_type = other DNA

SEQ ID NO: 60950 - DNA, 120 bp, synthetic construct; identical to SEQ ID NO: 30996
  source 1..120: mol_type = other DNA

SEQ ID NO: 60951 - DNA, 120 bp, synthetic construct; identical to SEQ ID NO: 30997
  source 1..120: mol_type = other DNA

SEQ ID NO: 60952 - DNA, 120 bp, synthetic construct; identical to SEQ ID NO: 9195
  source 1..120: mol_type = other DNA

SEQ ID NO: 60953 - DNA, 120 bp, synthetic construct; identical to SEQ ID NO: 30999
  source 1..120: mol_type = other DNA

SEQ ID NO: 60954 - DNA, 120 bp, synthetic construct; identical to SEQ ID NO: 31000
  source 1..120: mol_type = other DNA

SEQ ID NO: 60955 - DNA, 120 bp, synthetic construct; identical to SEQ ID NO: 31001
  source 1..120: mol_type = other DNA

SEQ ID NO: 60956 - DNA, 120 bp, synthetic construct; identical to SEQ ID NO: 9196
  source 1..120: mol_type = other DNA

SEQ ID NO: 60957 - DNA, 120 bp, synthetic construct; identical to SEQ ID NO: 31003
  source 1..120: mol_type = other DNA

SEQ ID NO: 60958 - DNA, 120 bp, synthetic construct; identical to SEQ ID NO: 31004
  source 1..120: mol_type = other DNA

SEQ ID NO: 60959 - DNA, 120 bp, synthetic construct; identical to SEQ ID NO: 9197
  source 1..120: mol_type = other DNA

SEQ ID NO: 60960 - DNA, 120 bp, synthetic construct; identical to SEQ ID NO: 31006
  source 1..120: mol_type = other DNA

SEQ ID NO: 60961 - DNA, 120 bp, synthetic construct; identical to SEQ ID NO: 31007
  source 1..120: mol_type = other DNA

SEQ ID NO: 60962 - DNA, 120 bp, synthetic construct; identical to SEQ ID NO: 31008
  source 1..120: mol_type = other DNA

SEQ ID NO: 60963 - DNA, 120 bp, synthetic construct; identical to SEQ ID NO: 9198
  source 1..120: mol_type = other DNA

SEQ ID NO: 60964 - DNA, 120 bp, synthetic construct; identical to SEQ ID NO: 31010
  source 1..120: mol_type = other DNA

SEQ ID NO: 60965 - DNA, 120 bp, synthetic construct; identical to SEQ ID NO: 31011
  source 1..120: mol_type = other DNA

SEQ ID NO: 60966 - DNA, 120 bp, synthetic construct; identical to SEQ ID NO: 31012
  source 1..120: mol_type = other DNA

SEQ ID NO: 60967 - DNA, 120 bp, synthetic construct; identical to SEQ ID NO: 9199
  source 1..120: mol_type = other DNA

SEQ ID NO: 60968 - DNA, 120 bp, synthetic construct; identical to SEQ ID NO: 31014
  source 1..120: mol_type = other DNA

SEQ ID NO: 60969 - DNA, 120 bp, synthetic construct; identical to SEQ ID NO: 31015
  source 1..120: mol_type = other DNA

SEQ ID NO: 60970 - DNA, 120 bp, synthetic construct; identical to SEQ ID NO: 31016
  source 1..120: mol_type = other DNA

SEQ ID NO: 60971 - DNA, 120 bp, synthetic construct; identical to SEQ ID NO: 9200
  source 1..120: mol_type = other DNA

SEQ ID NO: 60972 - DNA, 120 bp, synthetic construct; identical to SEQ ID NO: 31018
  source 1..120: mol_type = other DNA

SEQ ID NO: 60973 - DNA, 120 bp, synthetic construct; identical to SEQ ID NO: 31019
  source 1..120: mol_type = other DNA

SEQ ID NO: 60974 - DNA, 120 bp, synthetic construct; identical to SEQ ID NO: 31020
  source 1..120: mol_type = other DNA

SEQ ID NO: 60975 - DNA, 120 bp, synthetic construct; identical to SEQ ID NO: 31021
  source 1..120: mol_type = other DNA

SEQ ID NO: 60976 - DNA, 120 bp, synthetic construct; identical to SEQ ID NO: 9201
  source 1..120: mol_type = other DNA

SEQ ID NO: 60977 - DNA, 120 bp, synthetic construct; identical to SEQ ID NO: 31023
  source 1..120: mol_type = other DNA

SEQ ID NO: 60978 - DNA, 120 bp, synthetic construct; identical to SEQ ID NO: 31024
  source 1..120: mol_type = other DNA

SEQ ID NO: 60979 - DNA, 120 bp, synthetic construct; identical to SEQ ID NO: 31025
  source 1..120: mol_type = other DNA

SEQ ID NO: 60980 - DNA, 120 bp, synthetic construct; identical to SEQ ID NO: 9202
  source 1..120: mol_type = other DNA

SEQ ID NO: 60981 - DNA, 120 bp, synthetic construct; identical to SEQ ID NO: 31027
  source 1..120: mol_type = other DNA

SEQ ID NO: 60982 - DNA, 120 bp, synthetic construct; identical to SEQ ID NO: 31028
  source 1..120: mol_type = other DNA

SEQ ID NO: 60983 - DNA, 120 bp, synthetic construct; identical to SEQ ID NO: 9203
  source 1..120: mol_type = other DNA

SEQ ID NO: 60984 - DNA, 120 bp, synthetic construct; identical to SEQ ID NO: 31030
  source 1..120: mol_type = other DNA

SEQ ID NO: 60985 - DNA, 120 bp, synthetic construct; identical to SEQ ID NO: 31031
  source 1..120: mol_type = other DNA

SEQ ID NO: 60986 - DNA, 120 bp, synthetic construct; identical to SEQ ID NO: 31032
  source 1..120: mol_type = other DNA

SEQ ID NO: 60987 - DNA, 120 bp, synthetic construct; identical to SEQ ID NO: 9204
  source 1..120: mol_type = other DNA

SEQ ID NO: 60988 - DNA, 120 bp, synthetic construct; identical to SEQ ID NO: 31034
  source 1..120: mol_type = other DNA

SEQ ID NO: 60989 - DNA, 120 bp, synthetic construct; identical to SEQ ID NO: 31035
  source 1..120: mol_type = other DNA

SEQ ID NO: 60990 - DNA, 120 bp, synthetic construct; identical to SEQ ID NO: 31036
  source 1..120: mol_type = other DNA

SEQ ID NO: 60991 - DNA, 120 bp, synthetic construct; identical to SEQ ID NO: 9205
  source 1..120: mol_type = other DNA

SEQ ID NO: 60992 - DNA, 120 bp, synthetic construct; identical to SEQ ID NO: 31038
  source 1..120: mol_type = other DNA

SEQ ID NO: 60993 - DNA, 120 bp, synthetic construct; identical to SEQ ID NO: 31039
  source 1..120: mol_type = other DNA

SEQ ID NO: 60994 - DNA, 120 bp, synthetic construct; identical to SEQ ID NO: 31040
  source 1..120: mol_type = other DNA

SEQ ID NO: 60995 - DNA, 120 bp, synthetic construct; identical to SEQ ID NO: 9206
  source 1..120: mol_type = other DNA

SEQ ID NO: 60996 - DNA, 120 bp, synthetic construct; identical to SEQ ID NO: 31042
  source 1..120: mol_type = other DNA

SEQ ID NO: 60997 - DNA, 120 bp, synthetic construct; identical to SEQ ID NO: 31043
  source 1..120: mol_type = other DNA

SEQ ID NO: 60998 - DNA, 120 bp, synthetic construct; identical to SEQ ID NO: 31044
  source 1..120: mol_type = other DNA

SEQ ID NO: 60999 - DNA, 120 bp, synthetic construct; identical to SEQ ID NO: 9207
  source 1..120: mol_type = other DNA

SEQ ID NO: 61000 - DNA, 120 bp, synthetic construct; identical to SEQ ID NO: 31046
  source 1..120: mol_type = other DNA

SEQ ID NO: 61001 - DNA, 120 bp, synthetic construct; identical to SEQ ID NO: 31047
  source 1..120: mol_type = other DNA

SEQ ID NO: 61002 - DNA, 120 bp, synthetic construct; identical to SEQ ID NO: 31048
  source 1..120: mol_type = other DNA

SEQ ID NO: 61003 - DNA, 120 bp, synthetic construct; identical to SEQ ID NO: 9208
  source 1..120: mol_type = other DNA

SEQ ID NO: 61004 - DNA, 120 bp, synthetic construct; identical to SEQ ID NO: 31050
  source 1..120: mol_type = other DNA

SEQ ID NO: 61005 - DNA, 120 bp, synthetic construct; identical to SEQ ID NO: 31051
  source 1..120: mol_type = other DNA

SEQ ID NO: 61006 - DNA, 120 bp, synthetic construct; identical to SEQ ID NO: 31052
  source 1..120: mol_type = other DNA

SEQ ID NO: 61007 - DNA, 120 bp, synthetic construct; identical to SEQ ID NO: 9209
  source 1..120: mol_type = other DNA

SEQ ID NO: 61008 - DNA, 120 bp, synthetic construct; identical to SEQ ID NO: 31054
  source 1..120: mol_type = other DNA

SEQ ID NO: 61009 - DNA, 120 bp, synthetic construct; identical to SEQ ID NO: 31055
  source 1..120: mol_type = other DNA

SEQ ID NO: 61010 - DNA, 120 bp, synthetic construct; identical to SEQ ID NO: 31056
  source 1..120: mol_type = other DNA

SEQ ID NO: 61011 - DNA, 120 bp, synthetic construct; identical to SEQ ID NO: 31057
  source 1..120: mol_type = other DNA

SEQ ID NO: 61012 - DNA, 120 bp, synthetic construct; identical to SEQ ID NO: 9210
  source 1..120: mol_type = other DNA

SEQ ID NO: 61013 - DNA, 120 bp, synthetic construct; identical to SEQ ID NO: 31059
  source 1..120: mol_type = other DNA

SEQ ID NO: 61014 - DNA, 120 bp, synthetic construct; identical to SEQ ID NO: 31060
  source 1..120: mol_type = other DNA

SEQ ID NO: 61015 - DNA, 120 bp, synthetic construct; identical to SEQ ID NO: 31061
  source 1..120: mol_type = other DNA

SEQ ID NO: 61016 - DNA, 120 bp, synthetic construct; identical to SEQ ID NO: 9211
  source 1..120: mol_type = other DNA

SEQ ID NO: 61017 - DNA, 120 bp, synthetic construct; identical to SEQ ID NO: 31063
  source 1..120: mol_type = other DNA

SEQ ID NO: 61018 - DNA, 120 bp, synthetic construct; identical to SEQ ID NO: 31064
  source 1..120: mol_type = other DNA

SEQ ID NO: 61019 - DNA, 120 bp, synthetic construct; identical to SEQ ID NO: 31065
  source 1..120: mol_type = other DNA

SEQ ID NO: 61020 - DNA, 120 bp, synthetic construct; identical to SEQ ID NO: 9212
  source 1..120: mol_type = other DNA

SEQ ID NO: 61021 - DNA, 120 bp, synthetic construct; identical to SEQ ID NO: 31067
  source 1..120: mol_type = other DNA

SEQ ID NO: 61022 - DNA, 120 bp, synthetic construct; identical to SEQ ID NO: 31068
  source 1..120: mol_type = other DNA

SEQ ID NO: 61023 - DNA, 120 bp, synthetic construct; identical to SEQ ID NO: 31069
  source 1..120: mol_type = other DNA

SEQ ID NO: 61024 - DNA, 120 bp, synthetic construct; identical to SEQ ID NO: 9213
  source 1..120: mol_type = other DNA

SEQ ID NO: 61025 - DNA, 120 bp, synthetic construct; identical to SEQ ID NO: 31071
  source 1..120: mol_type = other DNA

SEQ ID NO: 61026 - DNA, 120 bp, synthetic construct; identical to SEQ ID NO: 31072
  source 1..120: mol_type = other DNA

SEQ ID NO: 61027 - DNA, 120 bp, synthetic construct; identical to SEQ ID NO: 31073
  source 1..120: mol_type = other DNA

SEQ ID NO: 61028 - DNA, 120 bp, synthetic construct; identical to SEQ ID NO: 9214
  source 1..120: mol_type = other DNA

SEQ ID NO: 61029 - DNA, 120 bp, synthetic construct; identical to SEQ ID NO: 31075
  source 1..120: mol_type = other DNA

SEQ ID NO: 61030 - DNA, 120 bp, synthetic construct; identical to SEQ ID NO: 31076
  source 1..120: mol_type = other DNA

SEQ ID NO: 61031 - DNA, 120 bp, synthetic construct; identical to SEQ ID NO: 31077
  source 1..120: mol_type = other DNA

SEQ ID NO: 61032 - DNA, 120 bp, synthetic construct; identical to SEQ ID NO: 9215
  source 1..120: mol_type = other DNA

SEQ ID NO: 61033 - DNA, 120 bp, synthetic construct; identical to SEQ ID NO: 31079
  source 1..120: mol_type = other DNA

SEQ ID NO: 61034 - DNA, 120 bp, synthetic construct; identical to SEQ ID NO: 31080
  source 1..120: mol_type = other DNA

SEQ ID NO: 61035 - DNA, 120 bp, synthetic construct; identical to SEQ ID NO: 31081
  source 1..120: mol_type = other DNA

SEQ ID NO: 61036 - DNA, 120 bp, synthetic construct; identical to SEQ ID NO: 9216
  source 1..120: mol_type = other DNA

SEQ ID NO: 61037 - DNA, 120 bp, synthetic construct; identical to SEQ ID NO: 31083
  source 1..120: mol_type = other DNA

SEQ ID NO: 61038 - DNA, 120 bp, synthetic construct; identical to SEQ ID NO: 31084
  source 1..120: mol_type = other DNA

SEQ ID NO: 61039 - DNA, 120 bp, synthetic construct; identical to SEQ ID NO: 31085
  source 1..120: mol_type = other DNA

SEQ ID NO: 61040 - DNA, 120 bp, synthetic construct; identical to SEQ ID NO: 9217
  source 1..120: mol_type = other DNA

SEQ ID NO: 61041 - DNA, 120 bp, synthetic construct; identical to SEQ ID NO: 31087
  source 1..120: mol_type = other DNA

SEQ ID NO: 61042 - DNA, 120 bp, synthetic construct; identical to SEQ ID NO: 31088
  source 1..120: mol_type = other DNA

SEQ ID NO: 61043 - DNA, 120 bp, synthetic construct; identical to SEQ ID NO: 31089
  source 1..120: mol_type = other DNA

SEQ ID NO: 61044 - DNA, 120 bp, synthetic construct; identical to SEQ ID NO: 31090
  source 1..120: mol_type = other DNA

SEQ ID NO: 61045 - DNA, 120 bp, synthetic construct; identical to SEQ ID NO: 9218
  source 1..120: mol_type = other DNA

SEQ ID NO: 61046 - DNA, 120 bp, synthetic construct; identical to SEQ ID NO: 31092
  source 1..120: mol_type = other DNA

SEQ ID NO: 61047 - DNA, 120 bp, synthetic construct; identical to SEQ ID NO: 31093
  source 1..120: mol_type = other DNA

SEQ ID NO: 61048 - DNA, 120 bp, synthetic construct; identical to SEQ ID NO: 9219
  source 1..120: mol_type = other DNA

SEQ ID NO: 61049 - DNA, 120 bp, synthetic construct; identical to SEQ ID NO: 31095
  source 1..120: mol_type = other DNA

SEQ ID NO: 61050 - DNA, 120 bp, synthetic construct; identical to SEQ ID NO: 31096
  source 1..120: mol_type = other DNA

SEQ ID NO: 61051 - DNA, 120 bp, synthetic construct; identical to SEQ ID NO: 31097
  source 1..120: mol_type = other DNA

SEQ ID NO: 61052 - DNA, 120 bp, synthetic construct; identical to SEQ ID NO: 31098
  source 1..120: mol_type = other DNA

SEQ ID NO: 61053 - DNA, 120 bp, synthetic construct; identical to SEQ ID NO: 9220
  source 1..120: mol_type = other DNA

SEQ ID NO: 61054 - DNA, 120 bp, synthetic construct; identical to SEQ ID NO: 31100
  source 1..120: mol_type = other DNA

SEQ ID NO: 61055 - DNA, 120 bp, synthetic construct; identical to SEQ ID NO: 31101
  source 1..120: mol_type = other DNA

SEQ ID NO: 61056 - DNA, 120 bp, synthetic construct; identical to SEQ ID NO: 31102
  source 1..120: mol_type = other DNA

SEQ ID NO: 61057 - DNA, 120 bp, synthetic construct; identical to SEQ ID NO: 31103
  source 1..120: mol_type = other DNA

SEQ ID NO: 61058 - DNA, 120 bp, synthetic construct; identical to SEQ ID NO: 9221
  source 1..120: mol_type = other DNA

SEQ ID NO: 61059 - DNA, 120 bp, synthetic construct; identical to SEQ ID NO: 31105
  source 1..120: mol_type = other DNA

SEQ ID NO: 61060 - DNA, 120 bp, synthetic construct; identical to SEQ ID NO: 31106
  source 1..120: mol_type = other DNA

SEQ ID NO: 61061 - DNA, 120 bp, synthetic construct; identical to SEQ ID NO: 9222
  source 1..120: mol_type = other DNA

SEQ ID NO: 61062 - DNA, 120 bp, synthetic construct; identical to SEQ ID NO: 31108
  source 1..120: mol_type = other DNA

SEQ ID NO: 61063 - DNA, 120 bp, synthetic construct; identical to SEQ ID NO: 31109
  source 1..120: mol_type = other DNA

SEQ ID NO: 61064 - DNA, 120 bp, synthetic construct; identical to SEQ ID NO: 31110
  source 1..120: mol_type = other DNA

SEQ ID NO: 61065 - DNA, 120 bp, synthetic construct; identical to SEQ ID NO: 9223
  source 1..120: mol_type = other DNA

SEQ ID NO: 61066 - DNA, 120 bp, synthetic construct; identical to SEQ ID NO: 31112
  source 1..120: mol_type = other DNA

SEQ ID NO: 61067 - DNA, 120 bp, synthetic construct; identical to SEQ ID NO: 31113
  source 1..120: mol_type = other DNA

SEQ ID NO: 61068 - DNA, 120 bp, synthetic construct; identical to SEQ ID NO: 9224
  source 1..120: mol_type = other DNA

SEQ ID NO: 61069 - DNA, 120 bp, synthetic construct; identical to SEQ ID NO: 31115
  source 1..120: mol_type = other DNA

SEQ ID NO: 61070 - DNA, 120 bp, synthetic construct; identical to SEQ ID NO: 31116
  source 1..120: mol_type = other DNA

SEQ ID NO: 61071 - DNA, 120 bp, synthetic construct; identical to SEQ ID NO: 31117
  source 1..120: mol_type = other DNA

SEQ ID NO: 61072 - DNA, 120 bp, synthetic construct; identical to SEQ ID NO: 31118
  source 1..120: mol_type = other DNA

SEQ ID NO: 61073 - DNA, 120 bp, synthetic construct; identical to SEQ ID NO: 9225
  source 1..120: mol_type = other DNA

SEQ ID NO: 61074 - DNA, 120 bp, synthetic construct; identical to SEQ ID NO: 31120
  source 1..120: mol_type = other DNA

SEQ ID NO: 61075 - DNA, 120 bp, synthetic construct; identical to SEQ ID NO: 31121
  source 1..120: mol_type = other DNA

SEQ ID NO: 61076 - DNA, 120 bp, synthetic construct; identical to SEQ ID NO: 9226
  source 1..120: mol_type = other DNA

SEQ ID NO: 61077 - DNA, 120 bp, synthetic construct; identical to SEQ ID NO: 31123
  source 1..120: mol_type = other DNA

SEQ ID NO: 61078 - DNA, 120 bp, synthetic construct; identical to SEQ ID NO: 31124
  source 1..120: mol_type = other DNA

SEQ ID NO: 61079 - DNA, 120 bp, synthetic construct; identical to SEQ ID NO: 31125
  source 1..120: mol_type = other DNA

SEQ ID NO: 61080 - DNA, 120 bp, synthetic construct; identical to SEQ ID NO: 31126
  source 1..120: mol_type = other DNA

SEQ ID NO: 61081 - DNA, 120 bp, synthetic construct; identical to SEQ ID NO: 9227
  source 1..120: mol_type = other DNA

SEQ ID NO: 61082 - DNA, 120 bp, synthetic construct; identical to SEQ ID NO: 31128
  source 1..120: mol_type = other DNA

SEQ ID NO: 61083 - DNA, 120 bp, synthetic construct; identical to SEQ ID NO: 31129
  source 1..120: mol_type = other DNA

SEQ ID NO: 61084 - DNA, 120 bp, synthetic construct; identical to SEQ ID NO: 9228
  source 1..120: mol_type = other DNA

SEQ ID NO: 61085 - DNA, 120 bp, synthetic construct; identical to SEQ ID NO: 31131
  source 1..120: mol_type = other DNA

SEQ ID NO: 61086 - DNA, 120 bp, synthetic construct; identical to SEQ ID NO: 31132
  source 1..120: mol_type = other DNA

SEQ ID NO: 61087 - DNA, 120 bp, synthetic construct; identical to SEQ ID NO: 31133
  source 1..120: mol_type = other DNA

SEQ ID NO: 61088 - DNA, 120 bp, synthetic construct; identical to SEQ ID NO: 31134
  source 1..120: mol_type = other DNA

SEQ ID NO: 61089 - DNA, 120 bp, synthetic construct; identical to SEQ ID NO: 9229
  source 1..120: mol_type = other DNA

SEQ ID NO: 61090 - DNA, 120 bp, synthetic construct; identical to SEQ ID NO: 31136
  source 1..120: mol_type = other DNA

SEQ ID NO: 61091 - DNA, 120 bp, synthetic construct; identical to SEQ ID NO: 31137
  source 1..120: mol_type = other DNA

SEQ ID NO: 61092 - DNA, 120 bp, synthetic construct; identical to SEQ ID NO: 31138
  source 1..120: mol_type = other DNA

SEQ ID NO: 61093 - DNA, 120 bp, synthetic construct; identical to SEQ ID NO: 9230
  source 1..120: mol_type = other DNA

SEQ ID NO: 61094 - DNA, 120 bp, synthetic construct; identical to SEQ ID NO: 31140
  source 1..120: mol_type = other DNA

SEQ ID NO: 61095 - DNA, 120 bp, synthetic construct; identical to SEQ ID NO: 31141
  source 1..120: mol_type = other DNA

SEQ ID NO: 61096 - DNA, 120 bp, synthetic construct; identical to SEQ ID NO: 9231
  source 1..120: mol_type = other DNA

SEQ ID NO: 61097 - DNA, 120 bp, synthetic construct; identical to SEQ ID NO: 31143
  source 1..120: mol_type = other DNA

SEQ ID NO: 61098 - DNA, 120 bp, synthetic construct; identical to SEQ ID NO: 31144
  source 1..120: mol_type = other DNA

SEQ ID NO: 61099 - DNA, 120 bp, synthetic construct; identical to SEQ ID NO: 31145
  source 1..120: mol_type = other DNA

SEQ ID NO: 61100 - DNA, 120 bp, synthetic construct; identical to SEQ ID NO: 9232
  source 1..120: mol_type = other DNA

SEQ ID NO: 61101 - DNA, 120 bp, synthetic construct; identical to SEQ ID NO: 31147
  source 1..120: mol_type = other DNA

SEQ ID NO: 61102 - DNA, 120 bp, synthetic construct; identical to SEQ ID NO: 31148
  source 1..120: mol_type = other DNA

SEQ ID NO: 61103 - DNA, 120 bp, synthetic construct; identical to SEQ ID NO: 31149
  source 1..120: mol_type = other DNA

SEQ ID NO: 61104 - DNA, 120 bp, synthetic construct; identical to SEQ ID NO: 9233
  source 1..120: mol_type = other DNA

SEQ ID NO: 61105 - DNA, 120 bp, synthetic construct; identical to SEQ ID NO: 31151
  source 1..120: mol_type = other DNA

SEQ ID NO: 61106 - DNA, 120 bp, synthetic construct; identical to SEQ ID NO: 31152
  source 1..120: mol_type = other DNA

SEQ ID NO: 61107 - DNA, 120 bp, synthetic construct; identical to SEQ ID NO: 31153
  source 1..120: mol_type = other DNA

SEQ ID NO: 61108 - DNA, 120 bp, synthetic construct; identical to SEQ ID NO: 31154
  source 1..120: mol_type = other DNA

SEQ ID NO: 61109 - DNA, 120 bp, synthetic construct; identical to SEQ ID NO: 9234
  source 1..120: mol_type = other DNA

SEQ ID NO: 61110 - DNA, 120 bp, synthetic construct; identical to SEQ ID NO: 31156
  source 1..120: mol_type = other DNA

SEQ ID NO: 61111 - DNA, 120 bp, synthetic construct; identical to SEQ ID NO: 31157
  source 1..120: mol_type = other DNA

SEQ ID NO: 61112 - DNA, 120 bp, synthetic construct; identical to SEQ ID NO: 9235
  source 1..120: mol_type = other DNA

SEQ ID NO: 61113 - DNA, 120 bp, synthetic construct; identical to SEQ ID NO: 31159
  source 1..120: mol_type = other DNA

SEQ ID NO: 61114 - DNA, 120 bp, synthetic construct; identical to SEQ ID NO: 31160
  source 1..120: mol_type = other DNA

SEQ ID NO: 61115 - DNA, 120 bp, synthetic construct; identical to SEQ ID NO: 31161
  source 1..120: mol_type = other DNA

SEQ ID NO: 61116 - DNA, 120 bp, synthetic construct; identical to SEQ ID NO: 9236
  source 1..120: mol_type = other DNA

SEQ ID NO: 61117 - DNA, 120 bp, synthetic construct; identical to SEQ ID NO: 31163
  source 1..120: mol_type = other DNA

SEQ ID NO: 61118 - DNA, 120 bp, synthetic construct; identical to SEQ ID NO: 31164
  source 1..120: mol_type = other DNA

SEQ ID NO: 61119 - DNA, 120 bp, synthetic construct; identical to SEQ ID NO: 31165
  source 1..120: mol_type = other DNA

SEQ ID NO: 61120 - DNA, 120 bp, synthetic construct; identical to SEQ ID NO: 9237
  source 1..120: mol_type = other DNA

SEQ ID NO: 61121 - DNA, 120 bp, synthetic construct; identical to SEQ ID NO: 31167
  source 1..120: mol_type = other DNA

SEQ ID NO: 61122 - DNA, 120 bp, synthetic construct; identical to SEQ ID NO: 31168
  source 1..120: mol_type = other DNA

SEQ ID NO: 61123 - DNA, 120 bp, synthetic construct; identical to SEQ ID NO: 31169
  source 1..120: mol_type = other DNA

SEQ ID NO: 61124 - DNA, 120 bp, synthetic construct; identical to SEQ ID NO: 9238
  source 1..120: mol_type = other DNA

SEQ ID NO: 61125 - DNA, 120 bp, synthetic construct; identical to SEQ ID NO: 31171
  source 1..120: mol_type = other DNA

SEQ ID NO: 61126 - DNA, 120 bp, synthetic construct; identical to SEQ ID NO: 31172
  source 1..120: mol_type = other DNA

SEQ ID NO: 61127 - DNA, 120 bp, synthetic construct; identical to SEQ ID NO: 31173
  source 1..120: mol_type = other DNA

SEQ ID NO: 61128 - DNA, 120 bp, synthetic construct; identical to SEQ ID NO: 31174
  source 1..120: mol_type = other DNA

SEQ ID NO: 61129 - DNA, 120 bp, synthetic construct; identical to SEQ ID NO: 9239
  source 1..120: mol_type = other DNA

SEQ ID NO: 61130 - DNA, 120 bp, synthetic construct; identical to SEQ ID NO: 31176
  source 1..120: mol_type = other DNA

SEQ ID NO: 61131 - DNA, 120 bp, synthetic construct; identical to SEQ ID NO: 31177
  source 1..120: mol_type = other DNA

SEQ ID NO: 61132 - DNA, 120 bp, synthetic construct; identical to SEQ ID NO: 9240
  source 1..120: mol_type = other DNA

SEQ ID NO: 61133 - DNA, 120 bp, synthetic construct; identical to SEQ ID NO: 31179
  source 1..120: mol_type = other DNA

SEQ ID NO: 61134 - DNA, 120 bp, synthetic construct; identical to SEQ ID NO: 31180
  source 1..120: mol_type = other DNA

SEQ ID NO: 61135 - DNA, 120 bp, synthetic construct; identical to SEQ ID NO: 31181
  source 1..120: mol_type = other DNA

SEQ ID NO: 61136 - DNA, 120 bp, synthetic construct; identical to SEQ ID NO: 9241
  source 1..120: mol_type = other DNA

SEQ ID NO: 61137 - DNA, 120 bp, synthetic construct; identical to SEQ ID NO: 31183
  source 1..120: mol_type = other DNA

SEQ ID NO: 61138 - DNA, 120 bp, synthetic construct; identical to SEQ ID NO: 31184
  source 1..120: mol_type = other DNA

SEQ ID NO: 61139 - DNA, 120 bp, synthetic construct; identical to SEQ ID NO: 9242
  source 1..120: mol_type = other DNA

SEQ ID NO: 61140 - DNA, 120 bp, synthetic construct; identical to SEQ ID NO: 31186
  source 1..120: mol_type = other DNA

SEQ ID NO: 61141 - DNA, 120 bp, synthetic construct; identical to SEQ ID NO: 31187
  source 1..120: mol_type = other DNA

SEQ ID NO: 61142 - DNA, 120 bp, synthetic construct; identical to SEQ ID NO: 31188
  source 1..120: mol_type = other DNA

SEQ ID NO: 61143 - DNA, 120 bp, synthetic construct; identical to SEQ ID NO: 31189
  source 1..120: mol_type = other DNA

SEQ ID NO: 61144 - DNA, 120 bp, synthetic construct; identical to SEQ ID NO: 9243
  source 1..120: mol_type = other DNA

SEQ ID NO: 61145 - DNA, 120 bp, synthetic construct; identical to SEQ ID NO: 31191
  source 1..120: mol_type = other DNA

SEQ ID NO: 61146 - DNA, 120 bp, synthetic construct; identical to SEQ ID NO: 31192
  source 1..120: mol_type = other DNA

SEQ ID NO: 61147 - DNA, 120 bp, synthetic construct; identical to SEQ ID NO: 9244
  source 1..120: mol_type = other DNA

SEQ ID NO: 61148 - DNA, 120 bp, synthetic construct; identical to SEQ ID NO: 31194
  source 1..120: mol_type = other DNA

SEQ ID NO: 61149 - DNA, 120 bp, synthetic construct; identical to SEQ ID NO: 9245
  source 1..120: mol_type = other DNA

SEQ ID NO: 61150 - DNA, 120 bp, synthetic construct; identical to SEQ ID NO: 31196
  source 1..120: mol_type = other DNA

SEQ ID NO: 61151 - DNA, 120 bp, synthetic construct; identical to SEQ ID NO: 31197
  source 1..120: mol_type = other DNA

SEQ ID NO: 61152 - DNA, 120 bp, synthetic construct; identical to SEQ ID NO: 31198
  source 1..120: mol_type = other DNA

SEQ ID NO: 61153 - DNA, 120 bp, synthetic construct; identical to SEQ ID NO: 9246
  source 1..120: mol_type = other DNA

SEQ ID NO: 61154 - DNA, 120 bp, synthetic construct; identical to SEQ ID NO: 31200
  source 1..120: mol_type = other DNA

SEQ ID NO: 61155 - DNA, 120 bp, synthetic construct; identical to SEQ ID NO: 31201
  source 1..120: mol_type = other DNA

SEQ ID NO: 61156 - DNA, 120 bp, synthetic construct; identical to SEQ ID NO: 31202
  source 1..120: mol_type = other DNA

SEQ ID NO: 61157 - DNA, 120 bp, synthetic construct; identical to SEQ ID NO: 9247
  source 1..120: mol_type = other DNA

SEQ ID NO: 61158 - DNA, 120 bp, synthetic construct; identical to SEQ ID NO: 31204
  source 1..120: mol_type = other DNA

SEQ ID NO: 61159 - DNA, 120 bp, synthetic construct; identical to SEQ ID NO: 31205
  source 1..120: mol_type = other DNA

SEQ ID NO: 61160 - DNA, 120 bp, synthetic construct; identical to SEQ ID NO: 31206
  source 1..120: mol_type = other DNA

SEQ ID NO: 61161 - DNA, 120 bp, synthetic construct; identical to SEQ ID NO: 9248
  source 1..120: mol_type = other DNA

SEQ ID NO: 61162 - DNA, 120 bp, synthetic construct; identical to SEQ ID NO: 31208
  source 1..120: mol_type = other DNA

SEQ ID NO: 61163 - DNA, 120 bp, synthetic construct; identical to SEQ ID NO: 31209
  source 1..120: mol_type = other DNA

SEQ ID NO: 61164 - DNA, 120 bp, synthetic construct; identical to SEQ ID NO: 31210
  source 1..120: mol_type = other DNA

SEQ ID NO: 61165 - DNA, 120 bp, synthetic construct; identical to SEQ ID NO: 9249
  source 1..120: mol_type = other DNA

SEQ ID NO: 61166 - DNA, 120 bp, synthetic construct; identical to SEQ ID NO: 31212
  source 1..120: mol_type = other DNA

SEQ ID NO: 61167 - DNA, 120 bp, synthetic construct; identical to SEQ ID NO: 31213
  source 1..120: mol_type = other DNA

SEQ ID NO: 61168 - DNA, 120 bp, synthetic construct; identical to SEQ ID NO: 31214
  source 1..120: mol_type = other DNA

SEQ ID NO: 61169 - DNA, 120 bp, synthetic construct; identical to SEQ ID NO: 9250
  source 1..120: mol_type = other DNA

SEQ ID NO: 61170 - DNA, 120 bp, synthetic construct; identical to SEQ ID NO: 31216
  source 1..120: mol_type = other DNA

SEQ ID NO: 61171 - DNA, 120 bp, synthetic construct; identical to SEQ ID NO: 31217
  source 1..120: mol_type = other DNA

SEQ ID NO: 61172 - DNA, 120 bp, synthetic construct; identical to SEQ ID NO: 9251
  source 1..120: mol_type = other DNA

SEQ ID NO: 61173 - DNA, 120 bp, synthetic construct; identical to SEQ ID NO: 31219
  source 1..120: mol_type = other DNA

SEQ ID NO: 61174 - DNA, 120 bp, synthetic construct; identical to SEQ ID NO: 31220
  source 1..120: mol_type = other DNA

SEQ ID NO: 61175 - DNA, 120 bp, synthetic construct; identical to SEQ ID NO: 31221
  source 1..120: mol_type = other DNA

SEQ ID NO: 61176 - DNA, 120 bp, synthetic construct; identical to SEQ ID NO: 31222
  source 1..120: mol_type = other DNA

SEQ ID NO: 61177 - DNA, 120 bp, synthetic construct; identical to SEQ ID NO: 9252
  source 1..120: mol_type = other DNA

SEQ ID NO: 61178 - DNA, 120 bp, synthetic construct; identical to SEQ ID NO: 31224
  source 1..120: mol_type = other DNA

SEQ ID NO: 61179 - DNA, 120 bp, synthetic construct; identical to SEQ ID NO: 31225
  source 1..120: mol_type = other DNA

SEQ ID NO: 61180 - DNA, 120 bp, synthetic construct; identical to SEQ ID NO: 9253
  source 1..120: mol_type = other DNA

SEQ ID NO: 61181 - DNA, 120 bp, synthetic construct; identical to SEQ ID NO: 31227
  source 1..120: mol_type = other DNA

SEQ ID NO: 61182 - DNA, 120 bp, synthetic construct; identical to SEQ ID NO: 31228
  source 1..120: mol_type = other DNA

SEQ ID NO: 61183 - DNA, 120 bp, synthetic construct; identical to SEQ ID NO: 31229
  source 1..120: mol_type = other DNA

SEQ ID NO: 61184 - DNA, 120 bp, synthetic construct; identical to SEQ ID NO: 9254
  source 1..120: mol_type = other DNA

SEQ ID NO: 61185 - DNA, 120 bp, synthetic construct; identical to SEQ ID NO: 31231
  source 1..120: mol_type = other DNA

SEQ ID NO: 61186 - DNA, 120 bp, synthetic construct; identical to SEQ ID NO: 31232
  source 1..120: mol_type = other DNA

SEQ ID NO: 61187 - DNA, 120 bp, synthetic construct; identical to SEQ ID NO: 31233
  source 1..120: mol_type = other DNA

SEQ ID NO: 61188 - DNA, 120 bp, synthetic construct; identical to SEQ ID NO: 9255
  source 1..120: mol_type = other DNA

SEQ ID NO: 61189 - DNA, 120 bp, synthetic construct; identical to SEQ ID NO: 31235
  source 1..120: mol_type = other DNA

SEQ ID NO: 61190 - DNA, 120 bp, synthetic construct; identical to SEQ ID NO: 31236
  source 1..120: mol_type = other DNA

SEQ ID NO: 61191 - DNA, 120 bp, synthetic construct; identical to SEQ ID NO: 31237
  source 1..120: mol_type = other DNA

SEQ ID NO: 61192 - DNA, 120 bp, synthetic construct; identical to SEQ ID NO: 9256
  source 1..120: mol_type = other DNA

SEQ ID NO: 61193 - DNA, 120 bp, synthetic construct; identical to SEQ ID NO: 31239
  source 1..120: mol_type = other DNA

SEQ ID NO: 61194 - DNA, 120 bp, synthetic construct; identical to SEQ ID NO: 31240
  source 1..120: mol_type = other DNA

SEQ ID NO: 61195 - DNA, 120 bp, synthetic construct; identical to SEQ ID NO: 31241
  source 1..120: mol_type = other DNA

SEQ ID NO: 61196 - DNA, 120 bp, synthetic construct; identical to SEQ ID NO: 31242
  source 1..120: mol_type = other DNA

SEQ ID NO: 61197 - DNA, 120 bp, synthetic construct; identical to SEQ ID NO: 9257
  source 1..120: mol_type = other DNA

SEQ ID NO: 61198 - DNA, 120 bp, synthetic construct; identical to SEQ ID NO: 31244
  source 1..120: mol_type = other DNA

SEQ ID NO: 61199 - DNA, 120 bp, synthetic construct; identical to SEQ ID NO: 31245
  source 1..120: mol_type = other DNA

SEQ ID NO: 61200 - DNA, 120 bp, synthetic construct; identical to SEQ ID NO: 31246
  source 1..120: mol_type = other DNA

SEQ ID NO: 61201 - DNA, 120 bp, synthetic construct; identical to SEQ ID NO: 9258
  source 1..120: mol_type = other DNA

SEQ ID NO: 61202 - DNA, 120 bp, synthetic construct; identical to SEQ ID NO: 31248
  source 1..120: mol_type = other DNA

SEQ ID NO: 61203 - DNA, 120 bp, synthetic construct; identical to SEQ ID NO: 31249
  source 1..120: mol_type = other DNA

SEQ ID NO: 61204 - DNA, 120 bp, synthetic construct; identical to SEQ ID NO: 31250
  source 1..120: mol_type = other DNA

SEQ ID NO: 61205 - DNA, 120 bp, synthetic construct; identical to SEQ ID NO: 9259
  source 1..120: mol_type = other DNA

SEQ ID NO: 61206 - DNA, 120 bp, synthetic construct; identical to SEQ ID NO: 31252
  source 1..120: mol_type = other DNA

SEQ ID NO: 61207 - DNA, 120 bp, synthetic construct; identical to SEQ ID NO: 31253
  source 1..120: mol_type = other DNA

SEQ ID NO: 61208 - DNA, 120 bp, synthetic construct; identical to SEQ ID NO: 2153
  source 1..120: mol_type = other DNA

SEQ ID NO: 61209 - DNA, 120 bp, synthetic construct; identical to SEQ ID NO: 31255
  source 1..120: mol_type = other DNA

SEQ ID NO: 61210 - DNA, 120 bp, synthetic construct; identical to SEQ ID NO: 31256
  source 1..120: mol_type = other DNA

SEQ ID NO: 61211 - DNA, 120 bp, synthetic construct; identical to SEQ ID NO: 31257
  source 1..120: mol_type = other DNA

SEQ ID NO: 61212 - DNA, 120 bp, synthetic construct; identical to SEQ ID NO: 9261
  source 1..120: mol_type = other DNA

SEQ ID NO: 61213 - DNA, 120 bp, synthetic construct; identical to SEQ ID NO: 31259
  source 1..120: mol_type = other DNA

SEQ ID NO: 61214 - DNA, 120 bp, synthetic construct; identical to SEQ ID NO: 31260
  source 1..120: mol_type = other DNA

SEQ ID NO: 61215 - DNA, 120 bp, synthetic construct; identical to SEQ ID NO: 31261
  source 1..120: mol_type = other DNA

SEQ ID NO: 61216 - DNA, 120 bp, synthetic construct; identical to SEQ ID NO: 31262
  source 1..120: mol_type = other DNA

SEQ ID NO: 61217 - DNA, 120 bp, synthetic construct; identical to SEQ ID NO: 2155
  source 1..120: mol_type = other DNA

SEQ ID NO: 61218 - DNA, 120 bp, synthetic construct; identical to SEQ ID NO: 31264
  source 1..120: mol_type = other DNA

SEQ ID NO: 61219 - DNA, 120 bp, synthetic construct; identical to SEQ ID NO: 31265
  source 1..120: mol_type = other DNA

SEQ ID NO: 61220 - DNA, 120 bp, synthetic construct; identical to SEQ ID NO: 31266
  source 1..120: mol_type = other DNA

SEQ ID NO: 61221 - DNA, 120 bp, synthetic construct; identical to SEQ ID NO: 9263
  source 1..120: mol_type = other DNA

SEQ ID NO: 61222 - DNA, 120 bp, synthetic construct; identical to SEQ ID NO: 31268
  source 1..120: mol_type = other DNA

SEQ ID NO: 61223 - DNA, 120 bp, synthetic construct; identical to SEQ ID NO: 31269
  source 1..120: mol_type = other DNA

SEQ ID NO: 61224 - DNA, 120 bp, synthetic construct; identical to SEQ ID NO: 31270
  source 1..120: mol_type = other DNA

SEQ ID NO: 61225 - DNA, 120 bp, synthetic construct; identical to SEQ ID NO: 31271
  source 1..120: mol_type = other DNA

SEQ ID NO: 61226 - DNA, 120 bp, synthetic construct; identical to SEQ ID NO: 2157
  source 1..120: mol_type = other DNA

SEQ ID NO: 61227 - DNA, 120 bp, synthetic construct; identical to SEQ ID NO: 31273
  source 1..120: mol_type = other DNA

SEQ ID NO: 61228 - DNA, 120 bp, synthetic construct; identical to SEQ ID NO: 31274
  source 1..120: mol_type = other DNA

SEQ ID NO: 61229 - DNA, 120 bp, synthetic construct; identical to SEQ ID NO: 9265
  source 1..120: mol_type = other DNA

SEQ ID NO: 61230 - DNA, 120 bp, synthetic construct; identical to SEQ ID NO: 31276
  source 1..120: mol_type = other DNA

SEQ ID NO: 61231 - DNA, 120 bp, synthetic construct; identical to SEQ ID NO: 31277
  source 1..120: mol_type = other DNA

SEQ ID NO: 61232 - DNA, 120 bp, synthetic construct; identical to SEQ ID NO: 31278
  source 1..120: mol_type = other DNA

SEQ ID NO: 61233 - DNA, 120 bp, synthetic construct; identical to SEQ ID NO: 9266
  source 1..120: mol_type = other DNA

SEQ ID NO: 61234 - DNA, 120 bp, synthetic construct; identical to SEQ ID NO: 31280
  source 1..120: mol_type = other DNA

SEQ ID NO: 61235 - DNA, 120 bp, synthetic construct; identical to SEQ ID NO: 31281
  source 1..120: mol_type = other DNA

SEQ ID NO: 61236 - DNA, 120 bp, synthetic construct; identical to SEQ ID NO: 31282
  source 1..120: mol_type = other DNA

SEQ ID NO: 61237 - DNA, 120 bp, synthetic construct; identical to SEQ ID NO: 9267
  source 1..120: mol_type = other DNA

SEQ ID NO: 61238 - DNA, 120 bp, synthetic construct; identical to SEQ ID NO: 31284
  source 1..120: mol_type = other DNA

SEQ ID NO: 61239 - DNA, 120 bp, synthetic construct; identical to SEQ ID NO: 31285
  source 1..120: mol_type = other DNA

SEQ ID NO: 61240 - DNA, 120 bp, synthetic construct; identical to SEQ ID NO: 31286
  source 1..120: mol_type = other DNA

SEQ ID NO: 61241 - DNA, 120 bp, synthetic construct; identical to SEQ ID NO: 31287
  source 1..120: mol_type = other DNA

SEQ ID NO: 61242 - DNA, 120 bp, synthetic construct; identical to SEQ ID NO: 9268
  source 1..120: mol_type = other DNA

SEQ ID NO: 61243 - DNA, 120 bp, synthetic construct; identical to SEQ ID NO: 31289
  source 1..120: mol_type = other DNA

SEQ ID NO: 61244 - DNA, 120 bp, synthetic construct; identical to SEQ ID NO: 31290
  source 1..120: mol_type = other DNA

SEQ ID NO: 61245 - DNA, 120 bp, synthetic construct; identical to SEQ ID NO: 31291
  source 1..120: mol_type = other DNA

SEQ ID NO: 61246 - DNA, 120 bp, synthetic construct; identical to SEQ ID NO: 9269
  source 1..120: mol_type = other DNA

SEQ ID NO: 61247 - DNA, 120 bp, synthetic construct; identical to SEQ ID NO: 31293
  source 1..120: mol_type = other DNA

SEQ ID NO: 61248 - DNA, 120 bp, synthetic construct; identical to SEQ ID NO: 31294
  source 1..120: mol_type = other DNA

SEQ ID NO: 61249 - DNA, 120 bp, synthetic construct; identical to SEQ ID NO: 9270
  source 1..120: mol_type = other DNA

SEQ ID NO: 61250 - DNA, 120 bp, synthetic construct; identical to SEQ ID NO: 31296
  source 1..120: mol_type = other DNA

SEQ ID NO: 61251 - DNA, 120 bp, synthetic construct; identical to SEQ ID NO: 31297
  source 1..120: mol_type = other DNA

SEQ ID NO: 61252 - DNA, 120 bp, synthetic construct; identical to SEQ ID NO: 31298
  source 1..120: mol_type = other DNA

SEQ ID NO: 61253 - DNA, 120 bp, synthetic construct; identical to SEQ ID NO: 9271
  source 1..120: mol_type = other DNA

SEQ ID NO: 61254 - DNA, 120 bp, synthetic construct; identical to SEQ ID NO: 31300
  source 1..120: mol_type = other DNA

SEQ ID NO: 61255 - DNA, 120 bp, synthetic construct; identical to SEQ ID NO: 31301
  source 1..120: mol_type = other DNA

SEQ ID NO: 61256 - DNA, 120 bp, synthetic construct; identical to SEQ ID NO: 31302
  source 1..120: mol_type = other DNA

SEQ ID NO: 61257 - DNA, 120 bp, synthetic construct; identical to SEQ ID NO: 9272
  source 1..120: mol_type = other DNA

SEQ ID NO: 61258 - DNA, 120 bp, synthetic construct; identical to SEQ ID NO: 31304
  source 1..120: mol_type = other DNA

SEQ ID NO: 61259 - DNA, 120 bp, synthetic construct; identical to SEQ ID NO: 31305
  source 1..120: mol_type = other DNA

SEQ ID NO: 61260 - DNA, 120 bp, synthetic construct; identical to SEQ ID NO: 31306
  source 1..120: mol_type = other DNA

SEQ ID NO: 61261 - DNA, 120 bp, synthetic construct; identical to SEQ ID NO: 31307
  source 1..120: mol_type = other DNA

SEQ ID NO: 61262 - DNA, 120 bp, synthetic construct; identical to SEQ ID NO: 9273
  source 1..120: mol_type = other DNA

SEQ ID NO: 61263 - DNA, 120 bp, synthetic construct; identical to SEQ ID NO: 31309
  source 1..120: mol_type = other DNA

SEQ ID NO: 61264 - DNA, 120 bp, synthetic construct; identical to SEQ ID NO: 31310
  source 1..120: mol_type = other DNA

SEQ ID NO: 61265 - DNA, 120 bp, synthetic construct; identical to SEQ ID NO: 9274
  source 1..120: mol_type = other DNA

SEQ ID NO: 61266 - DNA, 120 bp, synthetic construct; identical to SEQ ID NO: 31312
  source 1..120: mol_type = other DNA

SEQ ID NO: 61267 - DNA, 120 bp, synthetic construct; identical to SEQ ID NO: 31313
  source 1..120: mol_type = other DNA

SEQ ID NO: 61268 - DNA, 120 bp, synthetic construct; identical to SEQ ID NO: 31314
  source 1..120: mol_type = other DNA

SEQ ID NO: 61269 - DNA, 120 bp, synthetic construct; identical to SEQ ID NO: 9275
  source 1..120: mol_type = other DNA

SEQ ID NO: 61270 - DNA, 120 bp, synthetic construct; identical to SEQ ID NO: 31316
  source 1..120: mol_type = other DNA

SEQ ID NO: 61271 - DNA, 120 bp, synthetic construct; identical to SEQ ID NO: 31317
  source 1..120: mol_type = other DNA

SEQ ID NO: 61272 - DNA, 120 bp, synthetic construct; identical to SEQ ID NO: 31318
  source 1..120: mol_type = other DNA

SEQ ID NO: 61273 - DNA, 120 bp, synthetic construct; identical to SEQ ID NO: 9276
  source 1..120: mol_type = other DNA

SEQ ID NO: 61274 - DNA, 120 bp, synthetic construct; identical to SEQ ID NO: 31320
  source 1..120: mol_type = other DNA

SEQ ID NO: 61275 - DNA, 120 bp, synthetic construct; identical to SEQ ID NO: 31321
  source 1..120: mol_type = other DNA

SEQ ID NO: 61276 - DNA, 120 bp, synthetic construct; identical to SEQ ID NO: 31322
  source 1..120: mol_type = other DNA

SEQ ID NO: 61277 - DNA, 120 bp, synthetic construct; identical to SEQ ID NO: 9277
  source 1..120: mol_type = other DNA

SEQ ID NO: 61278 - DNA, 120 bp, synthetic construct; identical to SEQ ID NO: 31324
  source 1..120: mol_type = other DNA

SEQ ID NO: 61279 - DNA, 120 bp, synthetic construct; identical to SEQ ID NO: 31325
  source 1..120: mol_type = other DNA

SEQ ID NO: 61280 - DNA, 120 bp, synthetic construct; identical to SEQ ID NO: 31326
  source 1..120: mol_type = other DNA

SEQ ID NO: 61281 - DNA, 120 bp, synthetic construct; identical to SEQ ID NO: 9278
  source 1..120: mol_type = other DNA

SEQ ID NO: 61282 - DNA, 120 bp, synthetic construct; identical to SEQ ID NO: 31328
  source 1..120: mol_type = other DNA

SEQ ID NO: 61283 - DNA, 120 bp, synthetic construct; identical to SEQ ID NO: 31329
  source 1..120: mol_type = other DNA

SEQ ID NO: 61284 - DNA, 120 bp, synthetic construct; identical to SEQ ID NO: 31330
  source 1..120: mol_type = other DNA

SEQ ID NO: 61285 - DNA, 120 bp, synthetic construct; identical to SEQ ID NO: 9279
  source 1..120: mol_type = other DNA

SEQ ID NO: 61286 - DNA, 120 bp, synthetic construct; identical to SEQ ID NO: 31332
  source 1..120: mol_type = other DNA

SEQ ID NO: 61287 - DNA, 120 bp, synthetic construct; identical to SEQ ID NO: 2171
  source 1..120: mol_type = other DNA

SEQ ID NO: 61288 - DNA, 120 bp, synthetic construct; identical to SEQ ID NO: 31334
  source 1..120: mol_type = other DNA

SEQ ID NO: 61289 - DNA, 120 bp, synthetic construct; identical to SEQ ID NO: 31335
  source 1..120: mol_type = other DNA

SEQ ID NO: 61290 - DNA, 120 bp, synthetic construct; identical to SEQ ID NO: 9280
  source 1..120: mol_type = other DNA

SEQ ID NO: 61291 - DNA, 120 bp, synthetic construct; identical to SEQ ID NO: 31337
  source 1..120: mol_type = other DNA

SEQ ID NO: 61292 - DNA, 120 bp, synthetic construct; identical to SEQ ID NO: 31338
  source 1..120: mol_type = other DNA

SEQ ID NO: 61293 - DNA, 120 bp, synthetic construct; identical to SEQ ID NO: 9281
  source 1..120: mol_type = other DNA

SEQ ID NO: 61294 - DNA, 120 bp, synthetic construct; identical to SEQ ID NO: 31340
  source 1..120: mol_type = other DNA

SEQ ID NO: 61295 - DNA, 120 bp, synthetic construct; identical to SEQ ID NO: 31341
  source 1..120: mol_type = other DNA

SEQ ID NO: 61296 - DNA, 120 bp, synthetic construct; identical to SEQ ID NO: 31342
  source 1..120: mol_type = other DNA

SEQ ID NO: 61297 - DNA, 120 bp, synthetic construct; identical to SEQ ID NO: 9282
  source 1..120: mol_type = other DNA

SEQ ID NO: 61298 - DNA, 120 bp, synthetic construct; identical to SEQ ID NO: 31344
  source 1..120: mol_type = other DNA

SEQ ID NO: 61299 - DNA, 120 bp, synthetic construct; identical to SEQ ID NO: 31345
  source 1..120: mol_type = other DNA

SEQ ID NO: 61300 - DNA, 120 bp, synthetic construct; identical to SEQ ID NO: 9283
  source 1..120: mol_type = other DNA

SEQ ID NO: 61301 - DNA, 120 bp, synthetic construct; identical to SEQ ID NO: 31347
  source 1..120: mol_type = other DNA

SEQ ID NO: 61302 - DNA, 120 bp, synthetic construct; identical to SEQ ID NO: 31348
  source 1..120: mol_type = other DNA

SEQ ID NO: 61303 - DNA, 120 bp, synthetic construct; identical to SEQ ID NO: 31349
  source 1..120: mol_type = other DNA

SEQ ID NO: 61304 - DNA, 120 bp, synthetic construct; identical to SEQ ID NO: 9284
  source 1..120: mol_type = other DNA

SEQ ID NO: 61305 - DNA, 120 bp, synthetic construct; identical to SEQ ID NO: 31351
  source 1..120: mol_type = other DNA

SEQ ID NO: 61306 - DNA, 120 bp, synthetic construct; identical to SEQ ID NO: 31352
  source 1..120: mol_type = other DNA

SEQ ID NO: 61307 - DNA, 120 bp, synthetic construct; identical to SEQ ID NO: 31353
  source 1..120: mol_type = other DNA

SEQ ID NO: 61308 - DNA, 120 bp, synthetic construct; identical to SEQ ID NO: 31354
  source 1..120: mol_type = other DNA

SEQ ID NO: 61309 - DNA, 120 bp, synthetic construct; identical to SEQ ID NO: 9285
  source 1..120: mol_type = other DNA

SEQ ID NO: 61310 - DNA, 120 bp, synthetic construct; identical to SEQ ID NO: 31356
  source 1..120: mol_type = other DNA

SEQ ID NO: 61311 - DNA, 120 bp, synthetic construct; identical to SEQ ID NO: 31357
  source 1..120: mol_type = other DNA

SEQ ID NO: 61312 - DNA, 120 bp, synthetic construct; identical to SEQ ID NO: 9286
  source 1..120: mol_type = other DNA

SEQ ID NO: 61313 - DNA, 120 bp, synthetic construct; identical to SEQ ID NO: 31359
  source 1..120: mol_type = other DNA

SEQ ID NO: 61314 - DNA, 120 bp, synthetic construct; identical to SEQ ID NO: 31360
  source 1..120: mol_type = other DNA

SEQ ID NO: 61315 - DNA, 120 bp, synthetic construct; identical to SEQ ID NO: 31361
  source 1..120: mol_type = other DNA

SEQ ID NO: 61316 - DNA, 120 bp, synthetic construct; identical to SEQ ID NO: 31362
  source 1..120: mol_type = other DNA

SEQ ID NO: 61317 - DNA, 120 bp, synthetic construct; identical to SEQ ID NO: 9287
  source 1..120: mol_type = other DNA

SEQ ID NO: 61318 - DNA, 120 bp, synthetic construct; identical to SEQ ID NO: 31364
  source 1..120: mol_type = other DNA

SEQ ID NO: 61319 - DNA, 120 bp, synthetic construct; identical to SEQ ID NO: 31365
  source 1..120: mol_type = other DNA

SEQ ID NO: 61320 - DNA, 120 bp, synthetic construct; identical to SEQ ID NO: 31366
  source 1..120: mol_type = other DNA

SEQ ID NO: 61321 - DNA, 120 bp, synthetic construct; identical to SEQ ID NO: 9288
  source 1..120: mol_type = other DNA

SEQ ID NO: 61322 - DNA, 120 bp, synthetic construct; identical to SEQ ID NO: 31368
  source 1..120: mol_type = other DNA

SEQ ID NO: 61323 - DNA, 120 bp, synthetic construct; identical to SEQ ID NO: 31369
  source 1..120: mol_type = other DNA

SEQ ID NO: 61324 - DNA, 120 bp, synthetic construct; identical to SEQ ID NO: 9289
  source 1..120: mol_type = other DNA

SEQ ID NO: 61325 - DNA, 120 bp, synthetic construct; identical to SEQ ID NO: 31371
  source 1..120: mol_type = other DNA

SEQ ID NO: 61326 - DNA, 120 bp, synthetic construct; identical to SEQ ID NO: 31372
  source 1..120: mol_type = other DNA

SEQ ID NO: 61327 - DNA, 120 bp, synthetic construct; identical to SEQ ID NO: 31373
  source 1..120: mol_type = other DNA

SEQ ID NO: 61328 - DNA, 120 bp, synthetic construct; identical to SEQ ID NO: 9290
  source 1..120: mol_type = other DNA

SEQ ID NO: 61329 - DNA, 120 bp, synthetic construct; identical to SEQ ID NO: 2181
  source 1..120: mol_type = other DNA

SEQ ID NO: 61330 - DNA, 120 bp, synthetic construct; identical to SEQ ID NO: 31376
  source 1..120: mol_type = other DNA

SEQ ID NO: 61331 - DNA, 120 bp, synthetic construct; identical to SEQ ID NO: 31377
  source 1..120: mol_type = other DNA

SEQ ID NO: 61332 - DNA, 120 bp, synthetic construct; identical to SEQ ID NO: 9291
  source 1..120: mol_type = other DNA

SEQ ID NO: 61333 - DNA, 120 bp, synthetic construct; identical to SEQ ID NO: 31379
  source 1..120: mol_type = other DNA

SEQ ID NO: 61334 - DNA, 120 bp, synthetic construct; identical to SEQ ID NO: 31380
  source 1..120: mol_type = other DNA

SEQ ID NO: 61335 - DNA, 120 bp, synthetic construct; identical to SEQ ID NO: 31381
  source 1..120: mol_type = other DNA

SEQ ID NO: 61336 - DNA, 120 bp, synthetic construct; identical to SEQ ID NO: 9292
  source 1..120: mol_type = other DNA

SEQ ID NO: 61337 - DNA, 120 bp, synthetic construct; identical to SEQ ID NO: 31383
  source 1..120: mol_type = other DNA

SEQ ID NO: 61338 - DNA, 120 bp, synthetic construct; identical to SEQ ID NO: 31384
  source 1..120: mol_type = other DNA

SEQ ID NO: 61339 - DNA, 120 bp, synthetic construct; identical to SEQ ID NO: 31385
  source 1..120: mol_type = other DNA

SEQ ID NO: 61340 - DNA, 120 bp, synthetic construct; identical to SEQ ID NO: 9293
  source 1..120: mol_type = other DNA

SEQ ID NO: 61341 - DNA, 120 bp, synthetic construct; identical to SEQ ID NO: 31387
  source 1..120: mol_type = other DNA

SEQ ID NO: 61342 - DNA, 120 bp, synthetic construct; identical to SEQ ID NO: 31388
  source 1..120: mol_type = other DNA

SEQ ID NO: 61343 - DNA, 120 bp, synthetic construct; identical to SEQ ID NO: 31389
  source 1..120: mol_type = other DNA

SEQ ID NO: 61344 - DNA, 120 bp, synthetic construct; identical to SEQ ID NO: 9294
  source 1..120: mol_type = other DNA

SEQ ID NO: 61345 - DNA, 120 bp, synthetic construct; identical to SEQ ID NO: 31391
  source 1..120: mol_type = other DNA

SEQ ID NO: 61346 - DNA, 120 bp, synthetic construct; identical to SEQ ID NO: 31392
  source 1..120: mol_type = other DNA

SEQ ID NO: 61347 - DNA, 120 bp, synthetic construct; identical to SEQ ID NO: 31393
  source 1..120: mol_type = other DNA

SEQ ID NO: 61348 - DNA, 120 bp, synthetic construct; identical to SEQ ID NO: 9295
  source 1..120: mol_type = other DNA

SEQ ID NO: 61349 - DNA, 120 bp, synthetic construct; identical to SEQ ID NO: 31395
  source 1..120: mol_type = other DNA

SEQ ID NO: 61350 - DNA, 120 bp, synthetic construct; identical to SEQ ID NO: 31396
  source 1..120: mol_type = other DNA

SEQ ID NO: 61351 - DNA, 120 bp, synthetic construct; identical to SEQ ID NO: 31397
  source 1..120: mol_type = other DNA

SEQ ID NO: 61352 - DNA, 120 bp, synthetic construct; identical to SEQ ID NO: 9296
  source 1..120: mol_type = other DNA

SEQ ID NO: 61353 - DNA, 120 bp, synthetic construct; identical to SEQ ID NO: 31399
  source 1..120: mol_type = other DNA

SEQ ID NO: 61354 - DNA, 120 bp, synthetic construct; identical to SEQ ID NO: 31400
  source 1..120: mol_type = other DNA

SEQ ID NO: 61355 - DNA, 120 bp, synthetic construct; identical to SEQ ID NO: 31401
  source 1..120: mol_type = other DNA

SEQ ID NO: 61356 - DNA, 120 bp, synthetic construct; identical to SEQ ID NO: 31402
  source 1..120: mol_type = other DNA

SEQ ID NO: 61357 - DNA, 120 bp, synthetic construct; identical to SEQ ID NO: 9297
  source 1..120: mol_type = other DNA

SEQ ID NO: 61358 - DNA, 120 bp, synthetic construct; identical to SEQ ID NO: 31404
  source 1..120: mol_type = other DNA

SEQ ID NO: 61359 - DNA, 120 bp, synthetic construct; identical to SEQ ID NO: 31405
  source 1..120: mol_type = other DNA

SEQ ID NO: 61360 - DNA, 120 bp, synthetic construct; identical to SEQ ID NO: 31406
  source 1..120: mol_type = other DNA

SEQ ID NO: 61361 - DNA, 120 bp, synthetic construct; identical to SEQ ID NO: 9298
  source 1..120: mol_type = other DNA

SEQ ID NO: 61362 - DNA, 120 bp, synthetic construct; identical to SEQ ID NO: 31408
  source 1..120: mol_type = other DNA

SEQ ID NO: 61363 - DNA, 120 bp, synthetic construct; identical to SEQ ID NO: 2189
  source 1..120: mol_type = other DNA

SEQ ID NO: 61364 - DNA, 120 bp, synthetic construct; identical to SEQ ID NO: 31410
  source 1..120: mol_type = other DNA

SEQ ID NO: 61365 - DNA, 120 bp, synthetic construct; identical to SEQ ID NO: 9299
  source 1..120: mol_type = other DNA

SEQ ID NO: 61366 - DNA, 120 bp, synthetic construct; identical to SEQ ID NO: 31412
  source 1..120: mol_type = other DNA

SEQ ID NO: 61367 - DNA, 120 bp, synthetic construct; identical to SEQ ID NO: 31413
  source 1..120: mol_type = other DNA

SEQ ID NO: 61368 - DNA, 120 bp, synthetic construct; identical to SEQ ID NO: 31414
  source 1..120: mol_type = other DNA

SEQ ID NO: 61369 - DNA, 120 bp, synthetic construct; identical to SEQ ID NO: 31415
  source 1..120: mol_type = other DNA

SEQ ID NO: 61370 - DNA, 120 bp, synthetic construct; identical to SEQ ID NO: 9300
  source 1..120: mol_type = other DNA

SEQ ID NO: 61371 - DNA, 120 bp, synthetic construct; identical to SEQ ID NO: 31417
  source 1..120: mol_type = other DNA

SEQ ID NO: 61372 - DNA, 120 bp, synthetic construct; identical to SEQ ID NO: 31418
  source 1..120: mol_type = other DNA

SEQ ID NO: 61373 - DNA, 120 bp, synthetic construct; identical to SEQ ID NO: 31419
  source 1..120: mol_type = other DNA

SEQ ID NO: 61374 - DNA, 120 bp, synthetic construct; identical to SEQ ID NO: 9301
  source 1..120: mol_type = other DNA

SEQ ID NO: 61375 - DNA, 120 bp, synthetic construct; identical to SEQ ID NO: 31421
  source 1..120: mol_type = other DNA

SEQ ID NO: 61376 - DNA, 120 bp, synthetic construct; identical to SEQ ID NO: 31422
  source 1..120: mol_type = other DNA

SEQ ID NO: 61377 - DNA, 120 bp, synthetic construct; identical to SEQ ID NO: 9302
  source 1..120: mol_type = other DNA

SEQ ID NO: 61378 - DNA, 120 bp, synthetic construct; identical to SEQ ID NO: 31424
  source 1..120: mol_type = other DNA

SEQ ID NO: 61379 - DNA, 120 bp, synthetic construct; identical to SEQ ID NO: 31425
  source 1..120: mol_type = other DNA

SEQ ID NO: 61380 - DNA, 120 bp, synthetic construct; identical to SEQ ID NO: 31426
  source 1..120: mol_type = other DNA

SEQ ID NO: 61381 - DNA, 120 bp, synthetic construct; identical to SEQ ID NO: 31427
  source 1..120: mol_type = other DNA

SEQ ID NO: 61382 - DNA, 120 bp, synthetic construct; identical to SEQ ID NO: 9303
  source 1..120: mol_type = other DNA

SEQ ID NO: 61383 - DNA, 120 bp, synthetic construct; identical to SEQ ID NO: 31429
  source 1..120: mol_type = other DNA

SEQ ID NO: 61384 - DNA, 120 bp, synthetic construct; identical to SEQ ID NO: 31430
  source 1..120: mol_type = other DNA

SEQ ID NO: 61385 - DNA, 120 bp, synthetic construct; identical to SEQ ID NO: 9304
  source 1..120: mol_type = other DNA

SEQ ID NO: 61386 - DNA, 120 bp, synthetic construct; identical to SEQ ID NO: 31432
  source 1..120: mol_type = other DNA

SEQ ID NO: 61387 - DNA, 120 bp, synthetic construct; identical to SEQ ID NO: 31433
  source 1..120: mol_type = other DNA

SEQ ID NO: 61388 - DNA, 120 bp, synthetic construct; identical to SEQ ID NO: 31434
  source 1..120: mol_type = other DNA

SEQ ID NO: 61389 - DNA, 120 bp, synthetic construct; identical to SEQ ID NO: 31435
  source 1..120: mol_type = other DNA

SEQ ID NO: 61390 - DNA, 120 bp, synthetic construct; identical to SEQ ID NO: 9305
  source 1..120: mol_type = other DNA

SEQ ID NO: 61391 - DNA, 120 bp, synthetic construct; identical to SEQ ID NO: 31437
  source 1..120: mol_type = other DNA

SEQ ID NO: 61392 - DNA, 120 bp, synthetic construct; identical to SEQ ID NO: 31438
  source 1..120: mol_type = other DNA

SEQ ID NO: 61393 - DNA, 120 bp, synthetic construct; identical to SEQ ID NO: 31439
  source 1..120: mol_type = other DNA

SEQ ID NO: 61394 - DNA, 120 bp, synthetic construct; identical to SEQ ID NO: 9306
  source 1..120: mol_type = other DNA

SEQ ID NO: 61395 - DNA, 120 bp, synthetic construct; identical to SEQ ID NO: 31441
  source 1..120: mol_type = other DNA

SEQ ID NO: 61396 - DNA, 120 bp, synthetic construct; identical to SEQ ID NO: 31442
  source 1..120: mol_type = other DNA

SEQ ID NO: 61397 - DNA, 120 bp, synthetic construct; identical to SEQ ID NO: 31443
  source 1..120: mol_type = other DNA

SEQ ID NO: 61398 - DNA, 120 bp, synthetic construct; identical to SEQ ID NO: 9307
  source 1..120: mol_type = other DNA

SEQ ID NO: 61399 - DNA, 120 bp, synthetic construct; identical to SEQ ID NO: 31445
  source 1..120: mol_type = other DNA

SEQ ID NO: 61400 - DNA, 120 bp, synthetic construct; identical to SEQ ID NO: 31446
  source 1..120: mol_type = other DNA

SEQ ID NO: 61401 - DNA, 120 bp, synthetic construct; identical to SEQ ID NO: 9308
  source 1..120: mol_type = other DNA

SEQ ID NO: 61402 - DNA, 120 bp, synthetic construct; identical to SEQ ID NO: 31448
  source 1..120: mol_type = other DNA

SEQ ID NO: 61403 - DNA, 120 bp, synthetic construct; identical to SEQ ID NO: 31449
  source 1..120: mol_type = other DNA

SEQ ID NO: 61404 - DNA, 120 bp, synthetic construct; identical to SEQ ID NO: 31450
  source 1..120: mol_type = other DNA

SEQ ID NO: 61405 - DNA, 120 bp, synthetic construct; identical to SEQ ID NO: 9309
  source 1..120: mol_type = other DNA

SEQ ID NO: 61406 - DNA, 120 bp, synthetic construct; identical to SEQ ID NO: 31452
  source 1..120: mol_type = other DNA

SEQ ID NO: 61407 - DNA, 120 bp, synthetic construct; identical to SEQ ID NO: 31453
  source 1..120: mol_type = other DNA

SEQ ID NO: 61408 - DNA, 120 bp, synthetic construct; identical to SEQ ID NO: 31454
  source 1..120: mol_type = other DNA

SEQ ID NO: 61409 - DNA, 120 bp, synthetic construct; identical to SEQ ID NO: 9310
  source 1..120: mol_type = other DNA

SEQ ID NO: 61410 - DNA, 120 bp, synthetic construct; identical to SEQ ID NO: 31456
  source 1..120: mol_type = other DNA

SEQ ID NO: 61411 - DNA, 120 bp, synthetic construct; identical to SEQ ID NO: 31457
  source 1..120: mol_type = other DNA

SEQ ID NO: 61412 - DNA, 120 bp, synthetic construct; identical to SEQ ID NO: 31458
  source 1..120: mol_type = other DNA

SEQ ID NO: 61413 - DNA, 120 bp, synthetic construct; identical to SEQ ID NO: 31459
  source 1..120: mol_type = other DNA

SEQ ID NO: 61414 - DNA, 120 bp, synthetic construct; identical to SEQ ID NO: 9311
  source 1..120: mol_type = other DNA

SEQ ID NO: 61415 - DNA, 120 bp, synthetic construct; identical to SEQ ID NO: 31461
  source 1..120: mol_type = other DNA

SEQ ID NO: 61416 - DNA, 120 bp, synthetic construct; identical to SEQ ID NO: 31462
  source 1..120: mol_type = other DNA

SEQ ID NO: 61417 - DNA, 120 bp, synthetic construct; identical to SEQ ID NO: 31463
  source 1..120: mol_type = other DNA

SEQ ID NO: 61418 - DNA, 120 bp, synthetic construct; identical to SEQ ID NO: 9312
  source 1..120: mol_type = other DNA

SEQ ID NO: 61419 - DNA, 120 bp, synthetic construct; identical to SEQ ID NO: 31465
  source 1..120: mol_type = other DNA

SEQ ID NO: 61420 - DNA, 120 bp, synthetic construct; identical to SEQ ID NO: 31466
  source 1..120: mol_type = other DNA

SEQ ID NO: 61421 - DNA, 120 bp, synthetic construct; identical to SEQ ID NO: 9313
  source 1..120: mol_type = other DNA

SEQ ID NO: 61422 - DNA, 120 bp, synthetic construct; identical to SEQ ID NO: 31468
  source 1..120: mol_type = other DNA

SEQ ID NO: 61423 - DNA, 120 bp, synthetic construct; identical to SEQ ID NO: 31469
  source 1..120: mol_type = other DNA

SEQ ID NO: 61424 - DNA, 120 bp, synthetic construct; identical to SEQ ID NO: 31470
  source 1..120: mol_type = other DNA

SEQ ID NO: 61425 - DNA, 120 bp, synthetic construct; identical to SEQ ID NO: 31471
  source 1..120: mol_type = other DNA

SEQ ID NO: 61426 - DNA, 120 bp, synthetic construct; identical to SEQ ID NO: 9314
  source 1..120: mol_type = other DNA

SEQ ID NO: 61427 - DNA, 120 bp, synthetic construct; identical to SEQ ID NO: 31473
  source 1..120: mol_type = other DNA

SEQ ID NO: 61428 - DNA, 120 bp, synthetic construct; identical to SEQ ID NO: 31474
  source 1..120: mol_type = other DNA

SEQ ID NO: 61429 - DNA, 120 bp, synthetic construct; identical to SEQ ID NO: 31475
  source 1..120: mol_type = other DNA

SEQ ID NO: 61430 - DNA, 120 bp, synthetic construct; identical to SEQ ID NO: 9315
  source 1..120: mol_type = other DNA

SEQ ID NO: 61431 - DNA, 120 bp, synthetic construct; identical to SEQ ID NO: 31477
  source 1..120: mol_type = other DNA

SEQ ID NO: 61432 - DNA, 120 bp, synthetic construct; identical to SEQ ID NO: 31478
  source 1..120: mol_type = other DNA

SEQ ID NO: 61433 - DNA, 120 bp, synthetic construct; identical to SEQ ID NO: 31479
  source 1..120: mol_type = other DNA

SEQ ID NO: 61434 - DNA, 120 bp, synthetic construct; identical to SEQ ID NO: 9316
  source 1..120: mol_type = other DNA

SEQ ID NO: 61435 - DNA, 120 bp, synthetic construct; identical to SEQ ID NO: 31481
  source 1..120: mol_type = other DNA

SEQ ID NO: 61436 - DNA, 120 bp, synthetic construct; identical to SEQ ID NO: 31482
  source 1..120: mol_type = other DNA

SEQ ID NO: 61437 - DNA, 120 bp, synthetic construct; identical to SEQ ID NO: 31483
  source 1..120: mol_type = other DNA

SEQ ID NO: 61438 - DNA, 120 bp, synthetic construct; identical to SEQ ID NO: 31484
  source 1..120: mol_type = other DNA

SEQ ID NO: 61439 - DNA, 120 bp, synthetic construct; identical to SEQ ID NO: 9317
  source 1..120: mol_type = other DNA

SEQ ID NO: 61440 - DNA, 120 bp, synthetic construct; identical to SEQ ID NO: 31486
  source 1..120: mol_type = other DNA

SEQ ID NO: 61441 - DNA, 120 bp, synthetic construct; identical to SEQ ID NO: 31487
  source 1..120: mol_type = other DNA

SEQ ID NO: 61442 - DNA, 120 bp, synthetic construct; identical to SEQ ID NO: 9318
  source 1..120: mol_type = other DNA

SEQ ID NO: 61443 - DNA, 120 bp, synthetic construct; identical to SEQ ID NO: 31489
  source 1..120: mol_type = other DNA

SEQ ID NO: 61444 - DNA, 120 bp, synthetic construct; identical to SEQ ID NO: 31490
  source 1..120: mol_type = other DNA

SEQ ID NO: 61445 - DNA, 120 bp, synthetic construct; identical to SEQ ID NO: 31491
  source 1..120: mol_type = other DNA

SEQ ID NO: 61446 - DNA, 120 bp, synthetic construct; identical to SEQ ID NO: 31492
  source 1..120: mol_type = other DNA

SEQ ID NO: 61447 - DNA, 120 bp, synthetic construct; identical to SEQ ID NO: 9319
  source 1..120: mol_type = other DNA

SEQ ID NO: 61448 - DNA, 120 bp, synthetic construct; identical to SEQ ID NO: 31494
  source 1..120: mol_type = other DNA

SEQ ID NO: 61449 - DNA, 120 bp, synthetic construct; identical to SEQ ID NO: 31495
  source 1..120: mol_type = other DNA

SEQ ID NO: 61450 - DNA, 120 bp, synthetic construct; identical to SEQ ID NO: 2209
  source 1..120: mol_type = other DNA

SEQ ID NO: 61451 - DNA, 120 bp, synthetic construct; identical to SEQ ID NO: 9320
  source 1..120: mol_type = other DNA

SEQ ID NO: 61452 - DNA, 120 bp, synthetic construct; identical to SEQ ID NO: 31498
  source 1..120: mol_type = other DNA

SEQ ID NO: 61453 - DNA, 120 bp, synthetic construct; identical to SEQ ID NO: 31499
  source 1..120: mol_type = other DNA

SEQ ID NO: 61454 - DNA, 120 bp, synthetic construct; identical to SEQ ID NO: 31500
  source 1..120: mol_type = other DNA

SEQ ID NO: 61455 - DNA, 120 bp, synthetic construct; identical to SEQ ID NO: 9321
  source 1..120: mol_type = other DNA

SEQ ID NO: 61456 - DNA, 120 bp, synthetic construct; identical to SEQ ID NO: 31502
  source 1..120: mol_type = other DNA

SEQ ID NO: 61457 - DNA, 120 bp, synthetic construct; identical to SEQ ID NO: 31503
  source 1..120: mol_type = other DNA

SEQ ID NO: 61458 - DNA, 120 bp, synthetic construct; identical to SEQ ID NO: 9322
  source 1..120: mol_type = other DNA

SEQ ID NO: 61459 - DNA, 120 bp, synthetic construct; identical to SEQ ID NO: 31505
  source 1..120: mol_type = other DNA

SEQ ID NO: 61460 - DNA, 120 bp, synthetic construct; identical to SEQ ID NO: 31506
  source 1..120: mol_type = other DNA

SEQ ID NO: 61461 - DNA, 120 bp, synthetic construct; identical to SEQ ID NO: 31507
  source 1..120: mol_type = other DNA

SEQ ID NO: 61462 - DNA, 120 bp, synthetic construct; identical to SEQ ID NO: 9323
  source 1..120: mol_type = other DNA

SEQ ID NO: 61463 - DNA, 120 bp, synthetic construct; identical to SEQ ID NO: 31509
  source 1..120: mol_type = other DNA

SEQ ID NO: 61464 - DNA, 120 bp, synthetic construct; identical to SEQ ID NO: 31510
  source 1..120: mol_type = other DNA

SEQ ID NO: 61465 - DNA, 120 bp, synthetic construct; identical to SEQ ID NO: 31511
  source 1..120: mol_type = other DNA

SEQ ID NO: 61466 - DNA, 120 bp, synthetic construct; identical to SEQ ID NO: 31512
  source 1..120: mol_type = other DNA

SEQ ID NO: 61467 - DNA, 120 bp, synthetic construct; identical to SEQ ID NO: 9324
  source 1..120: mol_type = other DNA

SEQ ID NO: 61468 - DNA, 120 bp, synthetic construct; identical to SEQ ID NO: 31514
  source 1..120: mol_type = other DNA

SEQ ID NO: 61469 - DNA, 120 bp, synthetic construct; identical to SEQ ID NO: 31515
  source 1..120: mol_type = other DNA

SEQ ID NO: 61470 - DNA, 120 bp, synthetic construct; identical to SEQ ID NO: 31516
  source 1..120: mol_type = other DNA

SEQ ID NO: 61471 - DNA, 120 bp, synthetic construct; identical to SEQ ID NO: 9325
  source 1..120: mol_type = other DNA

SEQ ID NO: 61472 - DNA, 120 bp, synthetic construct; identical to SEQ ID NO: 31518
  source 1..120: mol_type = other DNA

SEQ ID NO: 61473 - DNA, 120 bp, synthetic construct; identical to SEQ ID NO: 31519
  source 1..120: mol_type = other DNA

SEQ ID NO: 61474 - DNA, 120 bp, synthetic construct; identical to SEQ ID NO: 9326
  source 1..120: mol_type = other DNA

SEQ ID NO: 61475 - DNA, 120 bp, synthetic construct; identical to SEQ ID NO: 31521
  source 1..120: mol_type = other DNA

SEQ ID NO: 61476 - DNA, 120 bp, synthetic construct; identical to SEQ ID NO: 31522
  source 1..120: mol_type = other DNA

SEQ ID NO: 61477 - DNA, 120 bp, synthetic construct; identical to SEQ ID NO: 31523
  source 1..120: mol_type = other DNA

SEQ ID NO: 61478 - DNA, 120 bp, synthetic construct; identical to SEQ ID NO: 9327
  source 1..120: mol_type = other DNA

SEQ ID NO: 61479 - DNA, 120 bp, synthetic construct; identical to SEQ ID NO: 31525
  source 1..120: mol_type = other DNA

SEQ ID NO: 61480 - DNA, 120 bp, synthetic construct; identical to SEQ ID NO: 31526
  source 1..120: mol_type = other DNA

SEQ ID NO: 61481 - DNA, 120 bp, synthetic construct; identical to SEQ ID NO: 31527
  source 1..120: mol_type = other DNA

SEQ ID NO: 61482 - DNA, 120 bp, synthetic construct; identical to SEQ ID NO: 31528
  source 1..120: mol_type = other DNA

SEQ ID NO: 61483 - DNA, 120 bp, synthetic construct; identical to SEQ ID NO: 9328
  source 1..120: mol_type = other DNA

SEQ ID NO: 61484 - DNA, 120 bp, synthetic construct; identical to SEQ ID NO: 31530
  source 1..120: mol_type = other DNA

SEQ ID NO: 61485 - DNA, 120 bp, synthetic construct; identical to SEQ ID NO: 31531
  source 1..120: mol_type = other DNA

SEQ ID NO: 61486 - DNA, 120 bp, synthetic construct; identical to SEQ ID NO: 31532
  source 1..120: mol_type = other DNA

SEQ ID NO: 61487 - DNA, 120 bp, synthetic construct; identical to SEQ ID NO: 9329
  source 1..120: mol_type = other DNA

SEQ ID NO: 61488 - DNA, 120 bp, synthetic construct; identical to SEQ ID NO: 31534
  source 1..120: mol_type = other DNA

SEQ ID NO: 61489 - DNA, 120 bp, synthetic construct; identical to SEQ ID NO: 31535
  source 1..120: mol_type = other DNA

SEQ ID NO: 61490 - DNA, 120 bp, synthetic construct; identical to SEQ ID NO: 31536
  source 1..120: mol_type = other DNA

SEQ ID NO: 61491 - DNA, 120 bp, synthetic construct; identical to SEQ ID NO: 9330
  source 1..120: mol_type = other DNA

SEQ ID NO: 61492 - DNA, 120 bp, synthetic construct; identical to SEQ ID NO: 31538
  source 1..120: mol_type = other DNA

SEQ ID NO: 61493 - DNA, 120 bp, synthetic construct; identical to SEQ ID NO: 31539
  source 1..120: mol_type = other DNA

SEQ ID NO: 61494 - DNA, 120 bp, synthetic construct; identical to SEQ ID NO: 31540
  source 1..120: mol_type = other DNA

SEQ ID NO: 61495 - DNA, 120 bp, synthetic construct; identical to SEQ ID NO: 9331
  source 1..120: mol_type = other DNA

SEQ ID NO: 61496 - DNA, 120 bp, synthetic construct; identical to SEQ ID NO: 31542
  source 1..120: mol_type = other DNA

SEQ ID NO: 61497 - DNA, 120 bp, synthetic construct; identical to SEQ ID NO: 31543
  source 1..120: mol_type = other DNA

SEQ ID NO: 61498 - DNA, 120 bp, synthetic construct; identical to SEQ ID NO: 31544
  source 1..120: mol_type = other DNA

SEQ ID NO: 61499 - DNA, 120 bp, synthetic construct; identical to SEQ ID NO: 9332
  source 1..120: mol_type = other DNA

SEQ ID NO: 61500 - DNA, 120 bp, synthetic construct; identical to SEQ ID NO: 31546
  source 1..120: mol_type = other DNA

SEQ ID NO: 61501 - DNA, 120 bp, synthetic construct; identical to SEQ ID NO: 31547
  source 1..120: mol_type = other DNA

SEQ ID NO: 61502 - DNA, 120 bp, synthetic construct; identical to SEQ ID NO: 9333
  source 1..120: mol_type = other DNA

SEQ ID NO: 61503 - DNA, 120 bp, synthetic construct; identical to SEQ ID NO: 31549
  source 1..120: mol_type = other DNA

SEQ ID NO: 61504 - DNA, 120 bp, synthetic construct; identical to SEQ ID NO: 31550
  source 1..120: mol_type = other DNA

SEQ ID NO: 61505 - DNA, 120 bp, synthetic construct; identical to SEQ ID NO: 31551
  source 1..120: mol_type = other DNA

SEQ ID NO: 61506 - DNA, 120 bp, synthetic construct; identical to SEQ ID NO: 9334
  source 1..120: mol_type = other DNA

SEQ ID NO: 61507 - DNA, 120 bp, synthetic construct; identical to SEQ ID NO: 31553
  source 1..120: mol_type = other DNA

SEQ ID NO: 61508 - DNA, 120 bp, synthetic construct; identical to SEQ ID NO: 31554
  source 1..120: mol_type = other DNA

SEQ ID NO: 61509 - DNA, 120 bp, synthetic construct; identical to SEQ ID NO: 31555
  source 1..120: mol_type = other DNA

SEQ ID NO: 61510 - DNA, 120 bp, synthetic construct; identical to SEQ ID NO: 31556
  source 1..120: mol_type = other DNA

SEQ ID NO: 61511 - DNA, 120 bp, synthetic construct; identical to SEQ ID NO: 9335
  source 1..120: mol_type = other DNA

SEQ ID NO: 61512 - DNA, 120 bp, synthetic construct; identical to SEQ ID NO: 31558
  source 1..120: mol_type = other DNA

SEQ ID NO: 61513 - DNA, 120 bp, synthetic construct; identical to SEQ ID NO: 31559
  source 1..120: mol_type = other DNA

SEQ ID NO: 61514 - DNA, 120 bp, synthetic construct; identical to SEQ ID NO: 9336
  source 1..120: mol_type = other DNA

SEQ ID NO: 61515 - DNA, 120 bp, synthetic construct; identical to SEQ ID NO: 31561
  source 1..120: mol_type = other DNA

SEQ ID NO: 61516 - DNA, 120 bp, synthetic construct; identical to SEQ ID NO: 31562
  source 1..120: mol_type = other DNA

SEQ ID NO: 61517 - DNA, 120 bp, synthetic construct; identical to SEQ ID NO: 31563
  source 1..120: mol_type = other DNA

SEQ ID NO: 61518 - DNA, 120 bp, synthetic construct; identical to SEQ ID NO: 31564
  source 1..120: mol_type = other DNA

SEQ ID NO: 61519 - DNA, 120 bp, synthetic construct; identical to SEQ ID NO: 9337
  source 1..120: mol_type = other DNA

SEQ ID NO: 61520 - DNA, 120 bp, synthetic construct; identical to SEQ ID NO: 31566
  source 1..120: mol_type = other DNA

SEQ ID NO: 61521 - DNA, 120 bp, synthetic construct; identical to SEQ ID NO: 31567
  source 1..120: mol_type = other DNA

SEQ ID NO: 61522 - DNA, 120 bp, synthetic construct; identical to SEQ ID NO: 9338
  source 1..120: mol_type = other DNA

SEQ ID NO: 61523 - DNA, 120 bp, synthetic construct; identical to SEQ ID NO: 31569
  source 1..120: mol_type = other DNA

SEQ ID NO: 61524 - DNA, 120 bp, synthetic construct; identical to SEQ ID NO: 31570
  source 1..120: mol_type = other DNA

SEQ ID NO: 61525 - DNA, 120 bp, synthetic construct; identical to SEQ ID NO: 31571
  source 1..120: mol_type = other DNA

SEQ ID NO: 61526 - DNA, 120 bp, synthetic construct; identical to SEQ ID NO: 9339
  source 1..120: mol_type = other DNA

SEQ ID NO: 61527 - DNA, 120 bp, synthetic construct; identical to SEQ ID NO: 31573
  source 1..120: mol_type = other DNA

SEQ ID NO: 61528 - DNA, 120 bp, synthetic construct; identical to SEQ ID NO: 31574
  source 1..120: mol_type = other DNA

SEQ ID NO: 61529 - DNA, 120 bp, synthetic construct; identical to SEQ ID NO: 31575
  source 1..120: mol_type = other DNA

SEQ ID NO: 61530 - DNA, 120 bp, synthetic construct; identical to SEQ ID NO: 31576
  source 1..120: mol_type = other DNA

SEQ ID NO: 61531 - DNA, 120 bp, synthetic construct; identical to SEQ ID NO: 9340
  source 1..120: mol_type = other DNA

SEQ ID NO: 61532 - DNA, 120 bp, synthetic construct; identical to SEQ ID NO: 31578
  source 1..120: mol_type = other DNA

SEQ ID NO: 61533 - DNA, 120 bp, synthetic construct; identical to SEQ ID NO: 31579
  source 1..120: mol_type = other DNA

SEQ ID NO: 61534 - DNA, 120 bp, synthetic construct; identical to SEQ ID NO: 9341
  source 1..120: mol_type = other DNA

SEQ ID NO: 61535 - DNA, 120 bp, synthetic construct; identical to SEQ ID NO: 31581
  source 1..120: mol_type = other DNA

SEQ ID NO: 61536 - DNA, 120 bp, synthetic construct; identical to SEQ ID NO: 31582
  source 1..120: mol_type = other DNA

SEQ ID NO: 61537 - DNA, 120 bp, synthetic construct; identical to SEQ ID NO: 31583
  source 1..120: mol_type = other DNA

SEQ ID NO: 61538 - DNA, 120 bp, synthetic construct; identical to SEQ ID NO: 9342
  source 1..120: mol_type = other DNA

SEQ ID NO: 61539 - DNA, 120 bp, synthetic construct; identical to SEQ ID NO: 31585
  source 1..120: mol_type = other DNA

SEQ ID NO: 61540 - DNA, 120 bp, synthetic construct; identical to SEQ ID NO: 31586
  source 1..120: mol_type = other DNA

SEQ ID NO: 61541 - DNA, 120 bp, synthetic construct; identical to SEQ ID NO: 31587
  source 1..120: mol_type = other DNA

SEQ ID NO: 61542 - DNA, 120 bp, synthetic construct; identical to SEQ ID NO: 9343
  source 1..120: mol_type = other DNA

SEQ ID NO: 61543 - DNA, 120 bp, synthetic construct; identical to SEQ ID NO: 31589
  source 1..120: mol_type = other DNA

SEQ ID NO: 61544 - DNA, 120 bp, synthetic construct; identical to SEQ ID NO: 31590
  source 1..120: mol_type = other DNA

SEQ ID NO: 61545 - DNA, 120 bp, synthetic construct; identical to SEQ ID NO: 31591
  source 1..120: mol_type = other DNA

SEQ ID NO: 61546 - DNA, 120 bp, synthetic construct; identical to SEQ ID NO: 9344
  source 1..120: mol_type = other DNA

SEQ ID NO: 61547 - DNA, 120 bp, synthetic construct; identical to SEQ ID NO: 31593
  source 1..120: mol_type = other DNA

SEQ ID NO: 61548 - DNA, 120 bp, synthetic construct; identical to SEQ ID NO: 31594
  source 1..120: mol_type = other DNA

SEQ ID NO: 61549 - DNA, 120 bp, synthetic construct; identical to SEQ ID NO: 31595
  source 1..120: mol_type = other DNA

SEQ ID NO: 61550 - DNA, 120 bp, synthetic construct; identical to SEQ ID NO: 31596
  source 1..120: mol_type = other DNA

SEQ ID NO: 61551 - DNA, 120 bp, synthetic construct; identical to SEQ ID NO: 9345
  source 1..120: mol_type = other DNA

SEQ ID NO: 61552 - DNA, 120 bp, synthetic construct; identical to SEQ ID NO: 31598
  source 1..120: mol_type = other DNA

SEQ ID NO: 61553 - DNA, 120 bp, synthetic construct; identical to SEQ ID NO: 31599
  source 1..120: mol_type = other DNA

SEQ ID NO: 61554 - DNA, 120 bp, synthetic construct; identical to SEQ ID NO: 9346
  source 1..120: mol_type = other DNA

SEQ ID NO: 61555 - DNA, 120 bp, synthetic construct; identical to SEQ ID NO: 31601
  source 1..120: mol_type = other DNA

SEQ ID NO: 61556 - DNA, 120 bp, synthetic construct; identical to SEQ ID NO: 31602
  source 1..120: mol_type = other DNA

SEQ ID NO: 61557 - DNA, 120 bp, synthetic construct; identical to SEQ ID NO: 31603
  source 1..120: mol_type = other DNA

SEQ ID NO: 61558 - DNA, 120 bp, synthetic construct; identical to SEQ ID NO: 9347
  source 1..120: mol_type = other DNA

SEQ ID NO: 61559 - DNA, 120 bp, synthetic construct; identical to SEQ ID NO: 31605
  source 1..120: mol_type = other DNA

SEQ ID NO: 61560 - DNA, 120 bp, synthetic construct; identical to SEQ ID NO: 31606
  source 1..120: mol_type = other DNA

SEQ ID NO: 61561 - DNA, 120 bp, synthetic construct; identical to SEQ ID NO: 31607
  source 1..120: mol_type = other DNA

SEQ ID NO: 61562 - DNA, 120 bp, synthetic construct; identical to SEQ ID NO: 9348
  source 1..120: mol_type = other DNA

SEQ ID NO: 61563 - DNA, 120 bp, synthetic construct; identical to SEQ ID NO: 31609
  source 1..120: mol_type = other DNA

SEQ ID NO: 61564 - DNA, 120 bp, synthetic construct; identical to SEQ ID NO: 31610
  source 1..120: mol_type = other DNA

SEQ ID NO: 61565 - DNA, 120 bp, synthetic construct; identical to SEQ ID NO: 31611
  source 1..120: mol_type = other DNA

SEQ ID NO: 61566 - DNA, 120 bp, synthetic construct; identical to SEQ ID NO: 9349
  source 1..120: mol_type = other DNA

SEQ ID NO: 61567 - DNA, 120 bp, synthetic construct; identical to SEQ ID NO: 31613
  source 1..120: mol_type = other DNA

SEQ ID NO: 61568 - DNA, 120 bp, synthetic construct; identical to SEQ ID NO: 31614
  source 1..120: mol_type = other DNA

SEQ ID NO: 61569 - DNA, 120 bp, synthetic construct; identical to SEQ ID NO: 31615
  source 1..120: mol_type = other DNA

SEQ ID NO: 61570 - DNA, 120 bp, synthetic construct; identical to SEQ ID NO: 9350
  source 1..120: mol_type = other DNA

SEQ ID NO: 61571 - DNA, 120 bp, synthetic construct; identical to SEQ ID NO: 31617
  source 1..120: mol_type = other DNA

SEQ ID NO: 61572 - DNA, 120 bp, synthetic construct; identical to SEQ ID NO: 31618
  source 1..120: mol_type = other DNA

SEQ ID NO: 61573 - DNA, 120 bp, synthetic construct; identical to SEQ ID NO: 9351
  source 1..120: mol_type = other DNA

SEQ ID NO: 61574 - DNA, 120 bp, synthetic construct; identical to SEQ ID NO: 31620
  source 1..120: mol_type = other DNA

SEQ ID NO: 61575 - DNA, 120 bp, synthetic construct; identical to SEQ ID NO: 31621
  source 1..120: mol_type = other DNA

SEQ ID NO: 61576 - DNA, 120 bp, synthetic construct; identical to SEQ ID NO: 31622
  source 1..120: mol_type = other DNA

SEQ ID NO: 61577 - DNA, 120 bp, synthetic construct; identical to SEQ ID NO: 9352
  source 1..120: mol_type = other DNA

SEQ ID NO: 61578 - DNA, 120 bp, synthetic construct; identical to SEQ ID NO: 31624
  source 1..120: mol_type = other DNA

SEQ ID NO: 61579 - DNA, 120 bp, synthetic construct; identical to SEQ ID NO: 31625
  source 1..120: mol_type = other DNA

SEQ ID NO: 61580 - DNA, 120 bp, synthetic construct; identical to SEQ ID NO: 31626
  source 1..120: mol_type = other DNA

SEQ ID NO: 61581 - DNA, 120 bp, synthetic construct; identical to SEQ ID NO: 9353
  source 1..120: mol_type = other DNA

SEQ ID NO: 61582 - DNA, 120 bp, synthetic construct; identical to SEQ ID NO: 31628
  source 1..120: mol_type = other DNA

SEQ ID NO: 61583 - DNA, 120 bp, synthetic construct; identical to SEQ ID NO: 31629
  source 1..120: mol_type = other DNA

SEQ ID NO: 61584 - DNA, 120 bp, synthetic construct; identical to SEQ ID NO: 31630
  source 1..120: mol_type = other DNA

SEQ ID NO: 61585 - DNA, 120 bp, synthetic construct; identical to SEQ ID NO: 31631
  source 1..120: mol_type = other DNA

SEQ ID NO: 61586 - DNA, 120 bp, synthetic construct; identical to SEQ ID NO: 9354
  source 1..120: mol_type = other DNA

SEQ ID NO: 61587 - DNA, 120 bp, synthetic construct; identical to SEQ ID NO: 31633
  source 1..120: mol_type = other DNA

SEQ ID NO: 61588 - DNA, 120 bp, synthetic construct; identical to SEQ ID NO: 31634
  source 1..120: mol_type = other DNA

SEQ ID NO: 61589 - DNA, 120 bp, synthetic construct; identical to SEQ ID NO: 9355
  source 1..120: mol_type = other DNA

SEQ ID NO: 61590 - DNA, 120 bp, synthetic construct; identical to SEQ ID NO: 31636
  source 1..120: mol_type = other DNA

SEQ ID NO: 61591 - DNA, 120 bp, synthetic construct; identical to SEQ ID NO: 31637
  source 1..120: mol_type = other DNA

SEQ ID NO: 61592 - DNA, 120 bp, synthetic construct; identical to SEQ ID NO: 31638
  source 1..120: mol_type = other DNA

SEQ ID NO: 61593 - DNA, 120 bp, synthetic construct; identical to SEQ ID NO: 31639
  source 1..120: mol_type = other DNA

SEQ ID NO: 61594 - DNA, 120 bp, synthetic construct; identical to SEQ ID NO: 9356
  source 1..120: mol_type = other DNA

SEQ ID NO: 61595 - DNA, 120 bp, synthetic construct; identical to SEQ ID NO: 31641
  source 1..120: mol_type = other DNA

SEQ ID NO: 61596 - DNA, 120 bp, synthetic construct; identical to SEQ ID NO: 31642
  source 1..120: mol_type = other DNA

SEQ ID NO: 61597 - DNA, 120 bp, synthetic construct; identical to SEQ ID NO: 31643
  source 1..120: mol_type = other DNA

SEQ ID NO: 61598 - DNA, 120 bp, synthetic construct; identical to SEQ ID NO: 31644
  source 1..120: mol_type = other DNA

SEQ ID NO: 61599 - DNA, 120 bp, synthetic construct; identical to SEQ ID NO: 9357
  source 1..120: mol_type = other DNA

SEQ ID NO: 61600 - DNA, 120 bp, synthetic construct; identical to SEQ ID NO: 31646
  source 1..120: mol_type = other DNA

SEQ ID NO: 61601 - DNA, 120 bp, synthetic construct; identical to SEQ ID NO: 31647
  source 1..120: mol_type = other DNA

SEQ ID NO: 61602 - DNA, 120 bp, synthetic construct; identical to SEQ ID NO: 9358
  source 1..120: mol_type = other DNA

SEQ ID NO: 61603 - DNA, 120 bp, synthetic construct; identical to SEQ ID NO: 31649
  source 1..120: mol_type = other DNA

SEQ ID NO: 61604 - DNA, 120 bp, synthetic construct; identical to SEQ ID NO: 31650
  source 1..120: mol_type = other DNA

SEQ ID NO: 61605 - DNA, 120 bp, synthetic construct; identical to SEQ ID NO: 31651
  source 1..120: mol_type = other DNA

SEQ ID NO: 61606 - DNA, 120 bp, synthetic construct; identical to SEQ ID NO: 9359
  source 1..120: mol_type = other DNA

SEQ ID NO: 61607 - DNA, 120 bp, synthetic construct; identical to SEQ ID NO: 31653
  source 1..120: mol_type = other DNA

SEQ ID NO: 61608 - DNA, 120 bp, synthetic construct; identical to SEQ ID NO: 31654
  source 1..120: mol_type = other DNA

SEQ ID NO: 61609 - DNA, 120 bp, synthetic construct; identical to SEQ ID NO: 9360
  source 1..120: mol_type = other DNA

SEQ ID NO: 61610 - DNA, 120 bp, synthetic construct; identical to SEQ ID NO: 31656
  source 1..120: mol_type = other DNA

SEQ ID NO: 61611 - DNA, 120 bp, synthetic construct; identical to SEQ ID NO: 31657
  source 1..120: mol_type = other DNA

SEQ ID NO: 61612 - DNA, 120 bp, synthetic construct; identical to SEQ ID NO: 31658
  source 1..120: mol_type = other DNA

SEQ ID NO: 61613 - DNA, 120 bp, synthetic construct; identical to SEQ ID NO: 9361
  source 1..120: mol_type = other DNA

SEQ ID NO: 61614 - DNA, 120 bp, synthetic construct; identical to SEQ ID NO: 31660
  source 1..120: mol_type = other DNA

SEQ ID NO: 61615 - DNA, 120 bp, synthetic construct; identical to SEQ ID NO: 31661
  source 1..120: mol_type = other DNA

SEQ ID NO: 61616 - DNA, 120 bp, synthetic construct; identical to SEQ ID NO: 31662
  source 1..120: mol_type = other DNA

SEQ ID NO: 61617 - DNA, 120 bp, synthetic construct; identical to SEQ ID NO: 9362
  source 1..120: mol_type = other DNA

SEQ ID NO: 61618 - DNA, 120 bp, synthetic construct; identical to SEQ ID NO: 31664
  source 1..120: mol_type = other DNA

SEQ ID NO: 61619 - DNA, 120 bp, synthetic construct; identical to SEQ ID NO: 31665
  source 1..120: mol_type = other DNA

SEQ ID NO: 61620 - DNA, 120 bp, synthetic construct; identical to SEQ ID NO: 31666
  source 1..120: mol_type = other DNA

SEQ ID NO: 61621 - DNA, 120 bp, synthetic construct; identical to SEQ ID NO: 31667
  source 1..120: mol_type = other DNA

SEQ ID NO: 61622 - DNA, 120 bp, synthetic construct; identical to SEQ ID NO: 9363
  source 1..120: mol_type = other DNA

SEQ ID NO: 61623 - DNA, 120 bp, synthetic construct; identical to SEQ ID NO: 31669
  source 1..120: mol_type = other DNA

SEQ ID NO: 61624 - DNA, 120 bp, synthetic construct; identical to SEQ ID NO: 31670
  source 1..120: mol_type = other DNA

SEQ ID NO: 61625 - DNA, 120 bp, synthetic construct; identical to SEQ ID NO: 31671
  source 1..120: mol_type = other DNA

SEQ ID NO: 61626 - DNA, 120 bp, synthetic construct; identical to SEQ ID NO: 9364
  source 1..120: mol_type = other DNA

SEQ ID NO: 61627 - DNA, 120 bp, synthetic construct; identical to SEQ ID NO: 31673
  source 1..120: mol_type = other DNA

SEQ ID NO: 61628 - DNA, 120 bp, synthetic construct; identical to SEQ ID NO: 31674
  source 1..120: mol_type = other DNA

SEQ ID NO: 61629 - DNA, 120 bp, synthetic construct; identical to SEQ ID NO: 9365
  source 1..120: mol_type = other DNA

SEQ ID NO: 61630 - DNA, 120 bp, synthetic construct; identical to SEQ ID NO: 31676
  source 1..120: mol_type = other DNA

SEQ ID NO: 61631 - DNA, 120 bp, synthetic construct; identical to SEQ ID NO: 31677
  source 1..120: mol_type = other DNA

SEQ ID NO: 61632 - DNA, 120 bp, synthetic construct; identical to SEQ ID NO: 31678
  source 1..120: mol_type = other DNA

SEQ ID NO: 61633 - DNA, 120 bp, synthetic construct; identical to SEQ ID NO: 9366
  source 1..120: mol_type = other DNA

SEQ ID NO: 61634 - DNA, 120 bp, synthetic construct; identical to SEQ ID NO: 31680
  source 1..120: mol_type = other DNA

SEQ ID NO: 61635 - DNA, 120 bp, synthetic construct; identical to SEQ ID NO: 31681
  source 1..120: mol_type = other DNA

SEQ ID NO: 61636 - DNA, 120 bp, synthetic construct; identical to SEQ ID NO: 31682
  source 1..120: mol_type = other DNA

SEQ ID NO: 61637 - DNA, 120 bp, synthetic construct; identical to SEQ ID NO: 9367
  source 1..120: mol_type = other DNA

SEQ ID NO: 61638 - DNA, 120 bp, synthetic construct; identical to SEQ ID NO: 31684
  source 1..120: mol_type = other DNA

SEQ ID NO: 61639 - DNA, 120 bp, synthetic construct; identical to SEQ ID NO: 31685
  source 1..120: mol_type = other DNA

SEQ ID NO: 61640 - DNA, 120 bp, synthetic construct; identical to SEQ ID NO: 31686
  source 1..120: mol_type = other DNA

SEQ ID NO: 61641 - DNA, 120 bp, synthetic construct; identical to SEQ ID NO: 31687
  source 1..120: mol_type = other DNA

SEQ ID NO: 61642 - DNA, 120 bp, synthetic construct; identical to SEQ ID NO: 9368
  source 1..120: mol_type = other DNA

SEQ ID NO: 61643 - DNA, 120 bp, synthetic construct; identical to SEQ ID NO: 31689
  source 1..120: mol_type = other DNA

SEQ ID NO: 61644 - DNA, 120 bp, synthetic construct; identical to SEQ ID NO: 31690
  source 1..120: mol_type = other DNA

SEQ ID NO: 61645 - DNA, 120 bp, synthetic construct; identical to SEQ ID NO: 31691
  source 1..120: mol_type = other DNA

SEQ ID NO: 61646 - DNA, 120 bp, synthetic construct; identical to SEQ ID NO: 9369
  source 1..120: mol_type = other DNA

SEQ ID NO: 61647 - DNA, 120 bp, synthetic construct; identical to SEQ ID NO: 31693
  source 1..120: mol_type = other DNA

SEQ ID NO: 61648 - DNA, 120 bp, synthetic construct; identical to SEQ ID NO: 31694
  source 1..120: mol_type = other DNA

SEQ ID NO: 61649 - DNA, 120 bp, synthetic construct; identical to SEQ ID NO: 31695
  source 1..120: mol_type = other DNA

SEQ ID NO: 61650 - DNA, 120 bp, synthetic construct; identical to SEQ ID NO: 9370
  source 1..120: mol_type = other DNA

SEQ ID NO: 61651 - DNA, 120 bp, synthetic construct; identical to SEQ ID NO: 31697
  source 1..120: mol_type = other DNA

SEQ ID NO: 61652 - DNA, 120 bp, synthetic construct; identical to SEQ ID NO: 31698
  source 1..120: mol_type = other DNA

SEQ ID NO: 61653 - DNA, 120 bp, synthetic construct; identical to SEQ ID NO: 9371
  source 1..120: mol_type = other DNA

SEQ ID NO: 61654 - DNA, 120 bp, synthetic construct; identical to SEQ ID NO: 31700
  source 1..120: mol_type = other DNA

SEQ ID NO: 61655 - DNA, 120 bp, synthetic construct; identical to SEQ ID NO: 31701
  source 1..120: mol_type = other DNA

SEQ ID NO: 61656 - DNA, 120 bp, synthetic construct; identical to SEQ ID NO: 31702
  source 1..120: mol_type = other DNA

SEQ ID NO: 61657 - DNA, 120 bp, synthetic construct; identical to SEQ ID NO: 9372
  source 1..120: mol_type = other DNA

SEQ ID NO: 61658 - DNA, 120 bp, synthetic construct; identical to SEQ ID NO: 31704
  source 1..120: mol_type = other DNA

SEQ ID NO: 61659 - DNA, 120 bp, synthetic construct; identical to SEQ ID NO: 31705
  source 1..120: mol_type = other DNA

SEQ ID NO: 61660 - DNA, 120 bp, synthetic construct; identical to SEQ ID NO: 31706
  source 1..120: mol_type = other DNA

SEQ ID NO: 61661 - DNA, 120 bp, synthetic construct; identical to SEQ ID NO: 31707
  source 1..120: mol_type = other DNA

SEQ ID NO: 61662 - DNA, 120 bp, synthetic construct; identical to SEQ ID NO: 9373
  source 1..120: mol_type = other DNA

SEQ ID NO: 61663 - DNA, 120 bp, synthetic construct; identical to SEQ ID NO: 31709
  source 1..120: mol_type = other DNA

SEQ ID NO: 61664 - DNA, 120 bp, synthetic construct; identical to SEQ ID NO: 31710
  source 1..120: mol_type = other DNA

SEQ ID NO: 61665 - DNA, 120 bp, synthetic construct; identical to SEQ ID NO: 31711
  source 1..120: mol_type = other DNA

SEQ ID NO: 61666 - DNA, 120 bp, synthetic construct; identical to SEQ ID NO: 9374
  source 1..120: mol_type = other DNA

SEQ ID NO: 61667 - DNA, 120 bp, synthetic construct; identical to SEQ ID NO: 31713
  source 1..120: mol_type = other DNA

SEQ ID NO: 61668 - DNA, 120 bp, synthetic construct; identical to SEQ ID NO: 31714
  source 1..120: mol_type = other DNA

SEQ ID NO: 61669 - DNA, 120 bp, synthetic construct; identical to SEQ ID NO: 9375
  source 1..120: mol_type = other DNA

SEQ ID NO: 61670 - DNA, 120 bp, synthetic construct; identical to SEQ ID NO: 31716
  source 1..120: mol_type = other DNA

SEQ ID NO: 61671 - DNA, 120 bp, synthetic construct; identical to SEQ ID NO: 31717
  source 1..120: mol_type = other DNA

SEQ ID NO: 61672 - DNA, 120 bp, synthetic construct; identical to SEQ ID NO: 31718
  source 1..120: mol_type = other DNA

SEQ ID NO: 61673 - DNA, 120 bp, synthetic construct; identical to SEQ ID NO: 31719
  source 1..120: mol_type = other DNA

SEQ ID NO: 61674 - DNA, 120 bp, synthetic construct; identical to SEQ ID NO: 9376
  source 1..120: mol_type = other DNA

SEQ ID NO: 61675 - DNA, 120 bp, synthetic construct; identical to SEQ ID NO: 31721
  source 1..120: mol_type = other DNA

SEQ ID NO: 61676 - DNA, 120 bp, synthetic construct; identical to SEQ ID NO: 31722
  source 1..120: mol_type = other DNA

SEQ ID NO: 61677 - DNA, 120 bp, synthetic construct; identical to SEQ ID NO: 31723
  source 1..120: mol_type = other DNA

SEQ ID NO: 61678 - DNA, 120 bp, synthetic construct; identical to SEQ ID NO: 9377
  source 1..120: mol_type = other DNA

SEQ ID NO: 61679 - DNA, 120 bp, synthetic construct; identical to SEQ ID NO: 31725
  source 1..120: mol_type = other DNA

SEQ ID NO: 61680 - DNA, 120 bp, synthetic construct; identical to SEQ ID NO: 31726
  source 1..120: mol_type = other DNA

SEQ ID NO: 61681 - DNA, 120 bp, synthetic construct; identical to SEQ ID NO: 31727
  source 1..120: mol_type = other DNA

SEQ ID NO: 61682 - DNA, 120 bp, synthetic construct; identical to SEQ ID NO: 9378
  source 1..120: mol_type = other DNA

SEQ ID NO: 61683 - DNA, 120 bp, synthetic construct; identical to SEQ ID NO: 31729
  source 1..120: mol_type = other DNA

SEQ ID NO: 61684 - DNA, 120 bp, synthetic construct; identical to SEQ ID NO: 31730
  source 1..120: mol_type = other DNA

SEQ ID NO: 61685 - DNA, 120 bp, synthetic construct; identical to SEQ ID NO: 31731
  source 1..120: mol_type = other DNA

SEQ ID NO: 61686 - DNA, 120 bp, synthetic construct; identical to SEQ ID NO: 9379
  source 1..120: mol_type = other DNA

SEQ ID NO: 61687 - DNA, 120 bp, synthetic construct; identical to SEQ ID NO: 31733
  source 1..120: mol_type = other DNA

SEQ ID NO: 61688 - DNA, 120 bp, synthetic construct; identical to SEQ ID NO: 31734
  source 1..120: mol_type = other DNA

SEQ ID NO: 61689 - DNA, 120 bp, synthetic construct; identical to SEQ ID NO: 31735
  source 1..120: mol_type = other DNA

SEQ ID NO: 61690 - DNA, 120 bp, synthetic construct; identical to SEQ ID NO: 9380
  source 1..120: mol_type = other DNA

SEQ ID NO: 61691 - DNA, 120 bp, synthetic construct; identical to SEQ ID NO: 31737
  source 1..120: mol_type = other DNA

SEQ ID NO: 61692 - DNA, 120 bp, synthetic construct; identical to SEQ ID NO: 31738
  source 1..120: mol_type = other DNA

SEQ ID NO: 61693 - DNA, 120 bp, synthetic construct; identical to SEQ ID NO: 31739
  source 1..120: mol_type = other DNA

SEQ ID NO: 61694 - DNA, 120 bp, synthetic construct; identical to SEQ ID NO: 9381
  source 1..120: mol_type = other DNA

SEQ ID NO: 61695 - DNA, 120 bp, synthetic construct; identical to SEQ ID NO: 31741
  source 1..120: mol_type = other DNA

SEQ ID NO: 61696 - DNA, 120 bp, synthetic construct; identical to SEQ ID NO: 31742
  source 1..120: mol_type = other DNA

SEQ ID NO: 61697 - DNA, 120 bp, synthetic construct; identical to SEQ ID NO: 9382
  source 1..120: mol_type = other DNA

SEQ ID NO: 61698 - DNA, 120 bp, synthetic construct; identical to SEQ ID NO: 31744
  source 1..120: mol_type = other DNA

SEQ ID NO: 61699 - DNA, 120 bp, synthetic construct; identical to SEQ ID NO: 31745
  source 1..120: mol_type = other DNA

SEQ ID NO: 61700 - DNA, 120 bp, synthetic construct; identical to SEQ ID NO: 2268
  source 1..120: mol_type = other DNA

SEQ ID NO: 61701 - DNA, 120 bp, synthetic construct; identical to SEQ ID NO: 9383
  source 1..120: mol_type = other DNA

SEQ ID NO: 61702 - DNA, 120 bp, synthetic construct; identical to SEQ ID NO: 31748
  source 1..120: mol_type = other DNA

SEQ ID NO: 61703 - DNA, 120 bp, synthetic construct; identical to SEQ ID NO: 31749
  source 1..120: mol_type = other DNA

SEQ ID NO: 61704 - DNA, 120 bp, synthetic construct; identical to SEQ ID NO: 31750
  source 1..120: mol_type = other DNA

SEQ ID NO: 61705 - DNA, 120 bp, synthetic construct; identical to SEQ ID NO: 31751
  source 1..120: mol_type = other DNA

SEQ ID NO: 61706 - DNA, 120 bp, synthetic construct; identical to SEQ ID NO: 9384
  source 1..120: mol_type = other DNA

SEQ ID NO: 61707 - DNA, 120 bp, synthetic construct; identical to SEQ ID NO: 31753
  source 1..120: mol_type = other DNA

SEQ ID NO: 61708 - DNA, 120 bp, synthetic construct; identical to SEQ ID NO: 31754
  source 1..120: mol_type = other DNA

SEQ ID NO: 61709 - DNA, 120 bp, synthetic construct; identical to SEQ ID NO: 9385
  source 1..120: mol_type = other DNA

SEQ ID NO: 61710 - DNA, 120 bp, synthetic construct; identical to SEQ ID NO: 31756
  source 1..120: mol_type = other DNA

SEQ ID NO: 61711 - DNA, 120 bp, synthetic construct; identical to SEQ ID NO: 31757
  source 1..120: mol_type = other DNA

SEQ ID NO: 61712 - DNA, 120 bp, synthetic construct; identical to SEQ ID NO: 31758
  source 1..120: mol_type = other DNA

SEQ ID NO: 61713 - DNA, 120 bp, synthetic construct; identical to SEQ ID NO: 9386
  source 1..120: mol_type = other DNA

SEQ ID NO: 61714 - DNA, 120 bp, synthetic construct; identical to SEQ ID NO: 31760
  source 1..120: mol_type = other DNA

SEQ ID NO: 61715 - DNA, 120 bp, synthetic construct; identical to SEQ ID NO: 31761
  source 1..120: mol_type = other DNA

SEQ ID NO: 61716 - DNA, 120 bp, synthetic construct; identical to SEQ ID NO: 31762
  source 1..120: mol_type = other DNA

SEQ ID NO: 61717 - DNA, 120 bp, synthetic construct; identical to SEQ ID NO: 9387
  source 1..120: mol_type = other DNA

SEQ ID NO: 61718 - DNA, 120 bp, synthetic construct; identical to SEQ ID NO: 31764
  source 1..120: mol_type = other DNA

SEQ ID NO: 61719 - DNA, 120 bp, synthetic construct; identical to SEQ ID NO: 31765
  source 1..120: mol_type = other DNA

SEQ ID NO: 61720 - DNA, 120 bp, synthetic construct; identical to SEQ ID NO: 31766
  source 1..120: mol_type = other DNA

SEQ ID NO: 61721 - DNA, 120 bp, synthetic construct; identical to SEQ ID NO: 9388
  source 1..120: mol_type = other DNA

SEQ ID NO: 61722 - DNA, 120 bp, synthetic construct; identical to SEQ ID NO: 31768
  source 1..120: mol_type = other DNA

SEQ ID NO: 61723 - DNA, 120 bp, synthetic construct; identical to SEQ ID NO: 31769
  source 1..120: mol_type = other DNA

SEQ ID NO: 61724 - DNA, 120 bp, synthetic construct; identical to SEQ ID NO: 31770
  source 1..120: mol_type = other DNA

SEQ ID NO: 61725 - DNA, 120 bp, synthetic construct; identical to SEQ ID NO: 9389
  source 1..120: mol_type = other DNA

SEQ ID NO: 61726 - DNA, 120 bp, synthetic construct; identical to SEQ ID NO: 31772
  source 1..120: mol_type = other DNA

SEQ ID NO: 61727 - DNA, 120 bp, synthetic construct; identical to SEQ ID NO: 31773
  source 1..120: mol_type = other DNA

SEQ ID NO: 61728 - DNA, 120 bp, synthetic construct; identical to SEQ ID NO: 31774
  source 1..120: mol_type = other DNA

SEQ ID NO: 61729 - DNA, 120 bp, synthetic construct; identical to SEQ ID NO: 9390
  source 1..120: mol_type = other DNA

SEQ ID NO: 61730 - DNA, 120 bp, synthetic construct; identical to SEQ ID NO: 31776
  source 1..120: mol_type = other DNA

SEQ ID NO: 61731 - DNA, 120 bp, synthetic construct; identical to SEQ ID NO: 31777
  source 1..120: mol_type = other DNA

SEQ ID NO: 61732 - DNA, 120 bp, synthetic construct; identical to SEQ ID NO: 31778
  source 1..120: mol_type = other DNA

SEQ ID NO: 61733 - DNA, 120 bp, synthetic construct; identical to SEQ ID NO: 31779
  source 1..120: mol_type = other DNA

SEQ ID NO: 61734 - DNA, 120 bp, synthetic construct; identical to SEQ ID NO: 9391
  source 1..120: mol_type = other DNA

SEQ ID NO: 61735 - DNA, 120 bp, synthetic construct; identical to SEQ ID NO: 31781
  source 1..120: mol_type = other DNA

SEQ ID NO: 61736 - DNA, 120 bp, synthetic construct; identical to SEQ ID NO: 31782
  source 1..120: mol_type = other DNA

SEQ ID NO: 61737 - DNA, 120 bp, synthetic construct; identical to SEQ ID NO: 31783
  source 1..120: mol_type = other DNA

SEQ ID NO: 61738 - DNA, 120 bp, synthetic construct; identical to SEQ ID NO: 9392
  source 1..120: mol_type = other DNA

SEQ ID NO: 61739 - DNA, 120 bp, synthetic construct; identical to SEQ ID NO: 31785
  source 1..120: mol_type = other DNA

SEQ ID NO: 61740 - DNA, 120 bp, synthetic construct; identical to SEQ ID NO: 31786
  source 1..120: mol_type = other DNA

SEQ ID NO: 61741 - DNA, 120 bp, synthetic construct; identical to SEQ ID NO: 31787
  source 1..120: mol_type = other DNA

SEQ ID NO: 61742 - DNA, 120 bp, synthetic construct; identical to SEQ ID NO: 9393
  source 1..120: mol_type = other DNA

SEQ ID NO: 61743 - DNA, 120 bp, synthetic construct; identical to SEQ ID NO: 31789
  source 1..120: mol_type = other DNA

SEQ ID NO: 61744 - DNA, 120 bp, synthetic construct; identical to SEQ ID NO: 31790
  source 1..120: mol_type = other DNA

SEQ ID NO: 61745 - DNA, 120 bp, synthetic construct; identical to SEQ ID NO: 9394
  source 1..120: mol_type = other DNA

SEQ ID NO: 61746 - DNA, 120 bp, synthetic construct; identical to SEQ ID NO: 31792
  source 1..120: mol_type = other DNA

SEQ ID NO: 61747 - DNA, 120 bp, synthetic construct; identical to SEQ ID NO: 31793
  source 1..120: mol_type = other DNA

SEQ ID NO: 61748 - DNA, 120 bp, synthetic construct; identical to SEQ ID NO: 31794
  source 1..120: mol_type = other DNA

SEQ ID NO: 61749 - DNA, 120 bp, synthetic construct; identical to SEQ ID NO: 9395
  source 1..120: mol_type = other DNA

SEQ ID NO: 61750 - DNA, 120 bp, synthetic construct; identical to SEQ ID NO: 31796
  source 1..120: mol_type = other DNA

SEQ ID NO: 61751 - DNA, 120 bp, synthetic construct; identical to SEQ ID NO: 31797
  source 1..120: mol_type = other DNA

SEQ ID NO: 61752 - DNA, 120 bp, synthetic construct; identical to SEQ ID NO: 31798
  source 1..120: mol_type = other DNA

SEQ ID NO: 61753 - DNA, 120 bp, synthetic construct; identical to SEQ ID NO: 31799
  source 1..120: mol_type = other DNA

SEQ ID NO: 61754 - DNA, 120 bp, synthetic construct; identical to SEQ ID NO: 9396
  source 1..120: mol_type = other DNA

SEQ ID NO: 61755 - DNA, 120 bp, synthetic construct; identical to SEQ ID NO: 31801
  source 1..120: mol_type = other DNA

SEQ ID NO: 61756 - DNA, 120 bp, synthetic construct; identical to SEQ ID NO: 31802
  source 1..120: mol_type = other DNA

SEQ ID NO: 61757 - DNA, 120 bp, synthetic construct; identical to SEQ ID NO: 31803
  source 1..120: mol_type = other DNA

SEQ ID NO: 61758 - DNA, 120 bp, synthetic construct; identical to SEQ ID NO: 9397
  source 1..120: mol_type = other DNA

SEQ ID NO: 61759 - DNA, 120 bp, synthetic construct; identical to SEQ ID NO: 31805
  source 1..120: mol_type = other DNA

SEQ ID NO: 61760 - DNA, 120 bp, synthetic construct; identical to SEQ ID NO: 31806
  source 1..120: mol_type = other DNA

SEQ ID NO: 61761 - DNA, 120 bp, synthetic construct; identical to SEQ ID NO: 9398
  source 1..120: mol_type = other DNA

SEQ ID NO: 61762 - DNA, 120 bp, synthetic construct; identical to SEQ ID NO: 31808
  source 1..120: mol_type = other DNA

SEQ ID NO: 61763 - DNA, 120 bp, synthetic construct; identical to SEQ ID NO: 31809
  source 1..120: mol_type = other DNA

SEQ ID NO: 61764 - DNA, 120 bp, synthetic construct; identical to SEQ ID NO: 31810
  source 1..120: mol_type = other DNA

SEQ ID NO: 61765 - DNA, 120 bp, synthetic construct; identical to SEQ ID NO: 9399
  source 1..120: mol_type = other DNA

SEQ ID NO: 61766 - DNA, 120 bp, synthetic construct; identical to SEQ ID NO: 31812
  source 1..120: mol_type = other DNA

SEQ ID NO: 61767 - DNA, 120 bp, synthetic construct; identical to SEQ ID NO: 31813
  source 1..120: mol_type = other DNA

SEQ ID NO: 61768 - DNA, 120 bp, synthetic construct; identical to SEQ ID NO: 31814
  source 1..120: mol_type = other DNA

SEQ ID NO: 61769 - DNA, 120 bp, synthetic construct; identical to SEQ ID NO: 31815
  source 1..120: mol_type = other DNA

SEQ ID NO: 61770 - DNA, 120 bp, synthetic construct; identical to SEQ ID NO: 9400
  source 1..120: mol_type = other DNA

SEQ ID NO: 61771 - DNA, 120 bp, synthetic construct; identical to SEQ ID NO: 31817
  source 1..120: mol_type = other DNA

SEQ ID NO: 61772 - DNA, 120 bp, synthetic construct; identical to SEQ ID NO: 31818
  source 1..120: mol_type = other DNA

SEQ ID NO: 61773 - DNA, 120 bp, synthetic construct; identical to SEQ ID NO: 31819
  source 1..120: mol_type = other DNA

SEQ ID NO: 61774 - DNA, 120 bp, synthetic construct; identical to SEQ ID NO: 9401
  source 1..120: mol_type = other DNA

SEQ ID NO: 61775 - DNA, 120 bp, synthetic construct; identical to SEQ ID NO: 31821
  source 1..120: mol_type = other DNA

SEQ ID NO: 61776 - DNA, 120 bp, synthetic construct; identical to SEQ ID NO: 31822
  source 1..120: mol_type = other DNA

SEQ ID NO: 61777 - DNA, 120 bp, synthetic construct; identical to SEQ ID NO: 31823
  source 1..120: mol_type = other DNA

SEQ ID NO: 61778 - DNA, 120 bp, synthetic construct; identical to SEQ ID NO: 9402
  source 1..120: mol_type = other DNA

SEQ ID NO: 61779 - DNA, 120 bp, synthetic construct; identical to SEQ ID NO: 31825
  source 1..120: mol_type = other DNA

SEQ ID NO: 61780 - DNA, 120 bp, synthetic construct; identical to SEQ ID NO: 31826
  source 1..120: mol_type = other DNA

SEQ ID NO: 61781 - DNA, 120 bp, synthetic construct; identical to SEQ ID NO: 9403
  source 1..120: mol_type = other DNA

SEQ ID NO: 61782 - DNA, 120 bp, synthetic construct; identical to SEQ ID NO: 31828
  source 1..120: mol_type = other DNA

SEQ ID NO: 61783 - DNA, 120 bp, synthetic construct; identical to SEQ ID NO: 31829
  source 1..120: mol_type = other DNA

SEQ ID NO: 61784 - DNA, 120 bp, synthetic construct; identical to SEQ ID NO: 31830
  source 1..120: mol_type = other DNA

SEQ ID NO: 61785 - DNA, 120 bp, synthetic construct; identical to SEQ ID NO: 9404
  source 1..120: mol_type = other DNA

SEQ ID NO: 61786 - DNA, 120 bp, synthetic construct; identical to SEQ ID NO: 31832
  source 1..120: mol_type = other DNA

SEQ ID NO: 61787 - DNA, 120 bp, synthetic construct; identical to SEQ ID NO: 31833
  source 1..120: mol_type = other DNA

SEQ ID NO: 61788 - DNA, 120 bp, synthetic construct; identical to SEQ ID NO: 31834
  source 1..120: mol_type = other DNA

SEQ ID NO: 61789 - DNA, 120 bp, synthetic construct; identical to SEQ ID NO: 9405
  source 1..120: mol_type = other DNA

SEQ ID NO: 61790 - DNA, 120 bp, synthetic construct; identical to SEQ ID NO: 31836
  source 1..120: mol_type = other DNA

SEQ ID NO: 61791 - DNA, 120 bp, synthetic construct; identical to SEQ ID NO: 31837
  source 1..120: mol_type = other DNA

SEQ ID NO: 61792 - DNA, 120 bp, synthetic construct; identical to SEQ ID NO: 31838
  source 1..120: mol_type = other DNA

SEQ ID NO: 61793 - DNA, 120 bp, synthetic construct; identical to SEQ ID NO: 9406
  source 1..120: mol_type = other DNA

SEQ ID NO: 61794 - DNA, 120 bp, synthetic construct; identical to SEQ ID NO: 31840
  source 1..120: mol_type = other DNA

SEQ ID NO: 61795 - DNA, 120 bp, synthetic construct; identical to SEQ ID NO: 31841
  source 1..120: mol_type = other DNA

SEQ ID NO: 61796 - DNA, 120 bp, synthetic construct; identical to SEQ ID NO: 31842
  source 1..120: mol_type = other DNA

SEQ ID NO: 61797 - DNA, 120 bp, synthetic construct; identical to SEQ ID NO: 9407
  source 1..120: mol_type = other DNA

SEQ ID NO: 61798 - DNA, 120 bp, synthetic construct; identical to SEQ ID NO: 31844
  source 1..120: mol_type = other DNA

SEQ ID NO: 61799 - DNA, 120 bp, synthetic construct; identical to SEQ ID NO: 31845
  source 1..120: mol_type = other DNA

SEQ ID NO: 61800 - DNA, 120 bp, synthetic construct; identical to SEQ ID NO: 31846
  source 1..120: mol_type = other DNA

SEQ ID NO: 61801 - DNA, 120 bp, synthetic construct; identical to SEQ ID NO: 31847
  source 1..120: mol_type = other DNA

SEQ ID NO: 61802 - DNA, 120 bp, synthetic construct; identical to SEQ ID NO: 9408
  source 1..120: mol_type = other DNA

SEQ ID NO: 61803 - DNA, 120 bp, synthetic construct; identical to SEQ ID NO: 31849
  source 1..120: mol_type = other DNA

SEQ ID NO: 61804 - DNA, 120 bp, synthetic construct; identical to SEQ ID NO: 31850
  source 1..120: mol_type = other DNA

SEQ ID NO: 61805 - DNA, 120 bp, synthetic construct; identical to SEQ ID NO: 9409
  source 1..120: mol_type = other DNA

SEQ ID NO: 61806 - DNA, 120 bp, synthetic construct; identical to SEQ ID NO: 31852
  source 1..120: mol_type = other DNA

SEQ ID NO: 61807 - DNA, 120 bp, synthetic construct; identical to SEQ ID NO: 31853
  source 1..120: mol_type = other DNA

SEQ ID NO: 61808 - DNA, 120 bp, synthetic construct; identical to SEQ ID NO: 31854
  source 1..120: mol_type = other DNA

SEQ ID NO: 61809 - DNA, 120 bp, synthetic construct; identical to SEQ ID NO: 31855
  source 1..120: mol_type = other DNA

SEQ ID NO: 61810 - DNA, 120 bp, synthetic construct; identical to SEQ ID NO: 9410
  source 1..120: mol_type = other DNA

SEQ ID NO: 61811 - DNA, 120 bp, synthetic construct; identical to SEQ ID NO: 31857
  source 1..120: mol_type = other DNA

SEQ ID NO: 61812 - DNA, 120 bp, synthetic construct; identical to SEQ ID NO: 31858
  source 1..120: mol_type = other DNA

SEQ ID NO: 61813 - DNA, 120 bp, synthetic construct; identical to SEQ ID NO: 31859
  source 1..120: mol_type = other DNA

SEQ ID NO: 61814 - DNA, 120 bp, synthetic construct; identical to SEQ ID NO: 9411
  source 1..120: mol_type = other DNA

SEQ ID NO: 61815 - DNA, 120 bp, synthetic construct; identical to SEQ ID NO: 31861
  source 1..120: mol_type = other DNA

SEQ ID NO: 61816 - DNA, 120 bp, synthetic construct; identical to SEQ ID NO: 31862
  source 1..120: mol_type = other DNA

SEQ ID NO: 61817 - DNA, 120 bp, synthetic construct; identical to SEQ ID NO: 31863
  source 1..120: mol_type = other DNA

SEQ ID NO: 61818 - DNA, 120 bp, synthetic construct; identical to SEQ ID NO: 9412
  source 1..120: mol_type = other DNA

SEQ ID NO: 61819 - DNA, 120 bp, synthetic construct; identical to SEQ ID NO: 31865
  source 1..120: mol_type = other DNA

SEQ ID NO: 61820 - DNA, 120 bp, synthetic construct; identical to SEQ ID NO: 31866
  source 1..120: mol_type = other DNA

SEQ ID NO: 61821 - DNA, 120 bp, synthetic construct; identical to SEQ ID NO: 31867
  source 1..120: mol_type = other DNA

SEQ ID NO: 61822 - DNA, 120 bp, synthetic construct; identical to SEQ ID NO: 9413
  source 1..120: mol_type = other DNA

SEQ ID NO: 61823 - DNA, 120 bp, synthetic construct; identical to SEQ ID NO: 31869
  source 1..120: mol_type = other DNA

SEQ ID NO: 61824 - DNA, 120 bp, synthetic construct; identical to SEQ ID NO: 31870
  source 1..120: mol_type = other DNA

SEQ ID NO: 61825 - DNA, 120 bp, synthetic construct; identical to SEQ ID NO: 31871
  source 1..120: mol_type = other DNA

SEQ ID NO: 61826 - DNA, 120 bp, synthetic construct; identical to SEQ ID NO: 9414
  source 1..120: mol_type = other DNA

SEQ ID NO: 61827 - DNA, 120 bp, synthetic construct; identical to SEQ ID NO: 31873
  source 1..120: mol_type = other DNA

SEQ ID NO: 61828 - DNA, 120 bp, synthetic construct; identical to SEQ ID NO: 31874
  source 1..120: mol_type = other DNA

SEQ ID NO: 61829 - DNA, 120 bp, synthetic construct; identical to SEQ ID NO: 31875
  source 1..120: mol_type = other DNA

SEQ ID NO: 61830 - DNA, 120 bp, synthetic construct; identical to SEQ ID NO: 31876
  source 1..120: mol_type = other DNA

SEQ ID NO: 61831 - DNA, 120 bp, synthetic construct; identical to SEQ ID NO: 9415
  source 1..120: mol_type = other DNA

SEQ ID NO: 61832 - DNA, 120 bp, synthetic construct; identical to SEQ ID NO: 31878
  source 1..120: mol_type = other DNA

SEQ ID NO: 61833 - DNA, 120 bp, synthetic construct; identical to SEQ ID NO: 9416
  source 1..120: mol_type = other DNA

SEQ ID NO: 61834 - DNA, 120 bp, synthetic construct; identical to SEQ ID NO: 31880
  source 1..120: mol_type = other DNA

SEQ ID NO: 61835 - DNA, 120 bp, synthetic construct; identical to SEQ ID NO: 31881
  source 1..120: mol_type = other DNA

SEQ ID NO: 61836 - DNA, 120 bp, synthetic construct; identical to SEQ ID NO: 9417
  source 1..120: mol_type = other DNA

SEQ ID NO: 61837 - DNA, 120 bp, synthetic construct; identical to SEQ ID NO: 31883
  source 1..120: mol_type = other DNA

SEQ ID NO: 61838 - DNA, 120 bp, synthetic construct; identical to SEQ ID NO: 9418
  source 1..120: mol_type = other DNA

SEQ ID NO: 61839 - DNA, 120 bp, synthetic construct; identical to SEQ ID NO: 31885
  source 1..120: mol_type = other DNA

SEQ ID NO: 61840 - DNA, 120 bp, synthetic construct; identical to SEQ ID NO: 31886
  source 1..120: mol_type = other DNA

SEQ ID NO: 61841 - DNA, 120 bp, synthetic construct; identical to SEQ ID NO: 31887
  source 1..120: mol_type = other DNA

SEQ ID NO: 61842 - DNA, 120 bp, synthetic construct; identical to SEQ ID NO: 31888
  source 1..120: mol_type = other DNA

SEQ ID NO: 61843 - DNA, 120 bp, synthetic construct; identical to SEQ ID NO: 9419
  source 1..120: mol_type = other DNA

SEQ ID NO: 61844 - DNA, 120 bp, synthetic construct; identical to SEQ ID NO: 31890
  source 1..120: mol_type = other DNA

SEQ ID NO: 61845 - DNA, 120 bp, synthetic construct; identical to SEQ ID NO: 31891
  source 1..120: mol_type = other DNA

SEQ ID NO: 61846 - DNA, 120 bp, synthetic construct; identical to SEQ ID NO: 9420
  source 1..120: mol_type = other DNA

SEQ ID NO: 61847 - DNA, 120 bp, synthetic construct; identical to SEQ ID NO: 31893
  source 1..120: mol_type = other DNA

SEQ ID NO: 61848 - DNA, 120 bp, synthetic construct; identical to SEQ ID NO: 31894
  source 1..120: mol_type = other DNA

SEQ ID NO: 61849 - DNA, 120 bp, synthetic construct; identical to SEQ ID NO: 31895
  source 1..120: mol_type = other DNA

SEQ ID NO: 61850 - DNA, 120 bp, synthetic construct; identical to SEQ ID NO: 9421
  source 1..120: mol_type = other DNA

SEQ ID NO: 61851 - DNA, 120 bp, synthetic construct; identical to SEQ ID NO: 31897
  source 1..120: mol_type = other DNA

SEQ ID NO: 61852 - DNA, 120 bp, synthetic construct; identical to SEQ ID NO: 31898
  source 1..120: mol_type = other DNA

SEQ ID NO: 61853 - DNA, 120 bp, synthetic construct; identical to SEQ ID NO: 31899
  source 1..120: mol_type = other DNA

SEQ ID NO: 61854 - DNA, 120 bp, synthetic construct; identical to SEQ ID NO: 31900
  source 1..120: mol_type = other DNA

SEQ ID NO: 61855 - DNA, 120 bp, synthetic construct; identical to SEQ ID NO: 9422
  source 1..120: mol_type = other DNA

SEQ ID NO: 61856 - DNA, 120 bp, synthetic construct; identical to SEQ ID NO: 31902
  source 1..120: mol_type = other DNA

SEQ ID NO: 61857 - DNA, 120 bp, synthetic construct; identical to SEQ ID NO: 31903
  source 1..120: mol_type = other DNA

SEQ ID NO: 61858 - DNA, 120 bp, synthetic construct; identical to SEQ ID NO: 31904
  source 1..120: mol_type = other DNA

SEQ ID NO: 61859 - DNA, 120 bp, synthetic construct; identical to SEQ ID NO: 9423
  source 1..120: mol_type = other DNA

SEQ ID NO: 61860 - DNA, 120 bp, synthetic construct; identical to SEQ ID NO: 31906
  source 1..120: mol_type = other DNA

SEQ ID NO: 61861 - DNA, 120 bp, synthetic construct; identical to SEQ ID NO: 31907
  source 1..120: mol_type = other DNA

SEQ ID NO: 61862 - DNA, 120 bp, synthetic construct; identical to SEQ ID NO: 9424
  source 1..120: mol_type = other DNA

SEQ ID NO: 61863 - DNA, 120 bp, synthetic construct; identical to SEQ ID NO: 31909
  source 1..120: mol_type = other DNA

SEQ ID NO: 61864 - DNA, 120 bp, synthetic construct; identical to SEQ ID NO: 31910
  source 1..120: mol_type = other DNA

SEQ ID NO: 61865 - DNA, 120 bp, synthetic construct; identical to SEQ ID NO: 31911
  source 1..120: mol_type = other DNA

SEQ ID NO: 61866 - DNA, 120 bp, synthetic construct; identical to SEQ ID NO: 31912
  source 1..120: mol_type = other DNA

SEQ ID NO: 61867 - DNA, 120 bp, synthetic construct; identical to SEQ ID NO: 9425
  source 1..120: mol_type = other DNA

SEQ ID NO: 61868 - DNA, 120 bp, synthetic construct; identical to SEQ ID NO: 31914
  source 1..120: mol_type = other DNA

SEQ ID NO: 61869 - DNA, 120 bp, synthetic construct; identical to SEQ ID NO: 31915
  source 1..120: mol_type = other DNA

SEQ ID NO: 61870 - DNA, 120 bp, synthetic construct; identical to SEQ ID NO: 31916
  source 1..120: mol_type = other DNA

SEQ ID NO: 61871 - DNA, 120 bp, synthetic construct; identical to SEQ ID NO: 9426
  source 1..120: mol_type = other DNA

SEQ ID NO: 61872 - DNA, 120 bp, synthetic construct; identical to SEQ ID NO: 31918
  source 1..120: mol_type = other DNA

SEQ ID NO: 61873 - DNA, 120 bp, synthetic construct; identical to SEQ ID NO: 31919
  source 1..120: mol_type = other DNA

SEQ ID NO: 61874 - DNA, 120 bp, synthetic construct; identical to SEQ ID NO: 31920
  source 1..120: mol_type = other DNA

SEQ ID NO: 61875 - DNA, 120 bp, synthetic construct; identical to SEQ ID NO: 9427
  source 1..120: mol_type = other DNA

SEQ ID NO: 61876 - DNA, 120 bp, synthetic construct; identical to SEQ ID NO: 31922
  source 1..120: mol_type = other DNA

SEQ ID NO: 61877 - DNA, 120 bp, synthetic construct; identical to SEQ ID NO: 31923
  source 1..120: mol_type = other DNA

SEQ ID NO: 61878 - DNA, 120 bp, synthetic construct; identical to SEQ ID NO: 31924
  source 1..120: mol_type = other DNA

SEQ ID NO: 61879 - DNA, 120 bp, synthetic construct; identical to SEQ ID NO: 9428
  source 1..120: mol_type = other DNA

SEQ ID NO: 61880 - DNA, 120 bp, synthetic construct; identical to SEQ ID NO: 31926
  source 1..120: mol_type = other DNA

SEQ ID NO: 61881 - DNA, 120 bp, synthetic construct; identical to SEQ ID NO: 31927
  source 1..120: mol_type = other DNA

SEQ ID NO: 61882 - DNA, 120 bp, synthetic construct; identical to SEQ ID NO: 31928
  source 1..120: mol_type = other DNA

SEQ ID NO: 61883 - DNA, 120 bp, synthetic construct; identical to SEQ ID NO: 9429
  source 1..120: mol_type = other DNA

SEQ ID NO: 61884 - DNA, 120 bp, synthetic construct; identical to SEQ ID NO: 31930
  source 1..120: mol_type = other DNA

SEQ ID NO: 61885 - DNA, 120 bp, synthetic construct; identical to SEQ ID NO: 31931
  source 1..120: mol_type = other DNA

SEQ ID NO: 61886 - DNA, 120 bp, synthetic construct; identical to SEQ ID NO: 31932
  source 1..120: mol_type = other DNA

SEQ ID NO: 61887 - DNA, 120 bp, synthetic construct; identical to SEQ ID NO: 9430
  source 1..120: mol_type = other DNA

SEQ ID NO: 61888 - DNA, 120 bp, synthetic construct; identical to SEQ ID NO: 31934
  source 1..120: mol_type = other DNA

SEQ ID NO: 61889 - DNA, 120 bp, synthetic construct; identical to SEQ ID NO: 31935
  source 1..120: mol_type = other DNA

SEQ ID NO: 61890 - DNA, 120 bp, synthetic construct; identical to SEQ ID NO: 9431
  source 1..120: mol_type = other DNA

SEQ ID NO: 61891 - DNA, 120 bp, synthetic construct; identical to SEQ ID NO: 31937
  source 1..120: mol_type = other DNA

SEQ ID NO: 61892 - DNA, 120 bp, synthetic construct; identical to SEQ ID NO: 31938
  source 1..120: mol_type = other DNA

SEQ ID NO: 61893 - DNA, 120 bp, synthetic construct; identical to SEQ ID NO: 9432
  source 1..120: mol_type = other DNA

SEQ ID NO: 61894 - DNA, 120 bp, synthetic construct; identical to SEQ ID NO: 31940
  source 1..120: mol_type = other DNA

SEQ ID NO: 61895 - DNA, 120 bp, synthetic construct; identical to SEQ ID NO: 31941
  source 1..120: mol_type = other DNA

SEQ ID NO: 61896 - DNA, 120 bp, synthetic construct; identical to SEQ ID NO: 31942
  source 1..120: mol_type = other DNA

SEQ ID NO: 61897 - DNA, 120 bp, synthetic construct; identical to SEQ ID NO: 9433
  source 1..120: mol_type = other DNA

SEQ ID NO: 61898 - DNA, 120 bp, synthetic construct; identical to SEQ ID NO: 31944
  source 1..120: mol_type = other DNA

SEQ ID NO: 61899 - DNA, 120 bp, synthetic construct; identical to SEQ ID NO: 31945
  source 1..120: mol_type = other DNA

SEQ ID NO: 61900 - DNA, 120 bp, synthetic construct; identical to SEQ ID NO: 31946
  source 1..120: mol_type = other DNA

SEQ ID NO: 61901 - DNA, 120 bp, synthetic construct; identical to SEQ ID NO: 9434
  source 1..120: mol_type = other DNA

SEQ ID NO: 61902 - DNA, 120 bp, synthetic construct; identical to SEQ ID NO: 31948
  source 1..120: mol_type = other DNA

SEQ ID NO: 61903 - DNA, 120 bp, synthetic construct; identical to SEQ ID NO: 31949
  source 1..120: mol_type = other DNA

SEQ ID NO: 61904 - DNA, 120 bp, synthetic construct; identical to SEQ ID NO: 31950
  source 1..120: mol_type = other DNA

SEQ ID NO: 61905 - DNA, 120 bp, synthetic construct; identical to SEQ ID NO: 31951
  source 1..120: mol_type = other DNA

SEQ ID NO: 61906 - DNA, 120 bp, synthetic construct; identical to SEQ ID NO: 9435
  source 1..120: mol_type = other DNA

SEQ ID NO: 61907 - DNA, 120 bp, synthetic construct; identical to SEQ ID NO: 31953
  source 1..120: mol_type = other DNA

SEQ ID NO: 61908 - DNA, 120 bp, synthetic construct; identical to SEQ ID NO: 31954
  source 1..120: mol_type = other DNA

SEQ ID NO: 61909 - DNA, 120 bp, synthetic construct; identical to SEQ ID NO: 9436
  source 1..120: mol_type = other DNA

SEQ ID NO: 61910 - DNA, 120 bp, synthetic construct; identical to SEQ ID NO: 31956
  source 1..120: mol_type = other DNA

SEQ ID NO: 61911 - DNA, 120 bp, synthetic construct; identical to SEQ ID NO: 31957
  source 1..120: mol_type = other DNA

SEQ ID NO: 61912 - DNA, 120 bp, synthetic construct; identical to SEQ ID NO: 31958
  source 1..120: mol_type = other DNA

SEQ ID NO: 61913 - DNA, 120 bp, synthetic construct; identical to SEQ ID NO: 31959
  source 1..120: mol_type = other DNA

SEQ ID NO: 61914 - DNA, 120 bp, synthetic construct; identical to SEQ ID NO: 9437
  source 1..120: mol_type = other DNA

SEQ ID NO: 61915 - DNA, 120 bp, synthetic construct; identical to SEQ ID NO: 31961
  source 1..120: mol_type = other DNA

SEQ ID NO: 61916 - DNA, 120 bp, synthetic construct; identical to SEQ ID NO: 9438
  source 1..120: mol_type = other DNA

SEQ ID NO: 61917 - DNA, 120 bp, synthetic construct; identical to SEQ ID NO: 31963
  source 1..120: mol_type = other DNA

SEQ ID NO: 61918 - DNA, 120 bp, synthetic construct; identical to SEQ ID NO: 31964
  source 1..120: mol_type = other DNA

SEQ ID NO: 61919 - DNA, 120 bp, synthetic construct; identical to SEQ ID NO: 31965
  source 1..120: mol_type = other DNA

SEQ ID NO: 61920 - DNA, 120 bp, synthetic construct; identical to SEQ ID NO: 9439
  source 1..120: mol_type = other DNA

SEQ ID NO: 61921 - DNA, 120 bp, synthetic construct; identical to SEQ ID NO: 31967
  source 1..120: mol_type = other DNA

SEQ ID NO: 61922 - DNA, 120 bp, synthetic construct; identical to SEQ ID NO: 9440
  source 1..120: mol_type = other DNA

SEQ ID NO: 61923 - DNA, 120 bp, synthetic construct; identical to SEQ ID NO: 31969
  source 1..120: mol_type = other DNA

SEQ ID NO: 61924 - DNA, 120 bp, synthetic construct; identical to SEQ ID NO: 31970
  source 1..120: mol_type = other DNA

SEQ ID NO: 61925 - DNA, 120 bp, synthetic construct; identical to SEQ ID NO: 9441
  source 1..120: mol_type = other DNA

SEQ ID NO: 61926 - DNA, 120 bp, synthetic construct; identical to SEQ ID NO: 31972
  source 1..120: mol_type = other DNA

SEQ ID NO: 61927 - DNA, 120 bp, synthetic construct; identical to SEQ ID NO: 31973
  source 1..120: mol_type = other DNA

SEQ ID NO: 61928 - DNA, 120 bp, synthetic construct; identical to SEQ ID NO: 31974
  source 1..120: mol_type = other DNA

SEQ ID NO: 61929 - DNA, 120 bp, synthetic construct; identical to SEQ ID NO: 31975
  source 1..120: mol_type = other DNA

SEQ ID NO: 61930 - DNA, 120 bp, synthetic construct; identical to SEQ ID NO: 9442
  source 1..120: mol_type = other DNA

SEQ ID NO: 61931 - DNA, 120 bp, synthetic construct; identical to SEQ ID NO: 31977
  source 1..120: mol_type = other DNA

SEQ ID NO: 61932 - DNA, 120 bp, synthetic construct; identical to SEQ ID NO: 31978
  source 1..120: mol_type = other DNA

SEQ ID NO: 61933 - DNA, 120 bp, synthetic construct; identical to SEQ ID NO: 31979
  source 1..120: mol_type = other DNA

SEQ ID NO: 61934 - DNA, 120 bp, synthetic construct; identical to SEQ ID NO: 9443
  source 1..120: mol_type = other DNA

SEQ ID NO: 61935 - DNA, 120 bp, synthetic construct; identical to SEQ ID NO: 31981
  source 1..120: mol_type = other DNA

SEQ ID NO: 61936 - DNA, 120 bp, synthetic construct; identical to SEQ ID NO: 31982
  source 1..120: mol_type = other DNA

SEQ ID NO: 61937 - DNA, 120 bp, synthetic construct; identical to SEQ ID NO: 31983
  source 1..120: mol_type = other DNA

SEQ ID NO: 61938 - DNA, 120 bp, synthetic construct; identical to SEQ ID NO: 9444
  source 1..120: mol_type = other DNA

SEQ ID NO: 61939 - DNA, 120 bp, synthetic construct; identical to SEQ ID NO: 31985
  source 1..120: mol_type = other DNA

SEQ ID NO: 61940 - DNA, 120 bp, synthetic construct; identical to SEQ ID NO: 31986
  source 1..120: mol_type = other DNA

SEQ ID NO: 61941 - DNA, 120 bp, synthetic construct; identical to SEQ ID NO: 9445
  source 1..120: mol_type = other DNA

SEQ ID NO: 61942 - DNA, 120 bp, synthetic construct; identical to SEQ ID NO: 31988
  source 1..120: mol_type = other DNA

SEQ ID NO: 61943 - DNA, 120 bp, synthetic construct; identical to SEQ ID NO: 31989
  source 1..120: mol_type = other DNA

SEQ ID NO: 61944 - DNA, 120 bp, synthetic construct; identical to SEQ ID NO: 31990
  source 1..120: mol_type = other DNA

SEQ ID NO: 61945 - DNA, 120 bp, synthetic construct; identical to SEQ ID NO: 9446
  source 1..120: mol_type = other DNA

SEQ ID NO: 61946 - DNA, 120 bp, synthetic construct; identical to SEQ ID NO: 31992
  source 1..120: mol_type = other DNA

SEQ ID NO: 61947 - DNA, 120 bp, synthetic construct; identical to SEQ ID NO: 31993
  source 1..120: mol_type = other DNA

SEQ ID NO: 61948 - DNA, 120 bp, synthetic construct; identical to SEQ ID NO: 31994
  source 1..120: mol_type = other DNA

SEQ ID NO: 61949 - DNA, 120 bp, synthetic construct; identical to SEQ ID NO: 31995
  source 1..120: mol_type = other DNA

SEQ ID NO: 61950 - DNA, 120 bp, synthetic construct; identical to SEQ ID NO: 9447
  source 1..120: mol_type = other DNA

SEQ ID NO: 61951 - DNA, 120 bp, synthetic construct; identical to SEQ ID NO: 31997
  source 1..120: mol_type = other DNA

SEQ ID NO: 61952 - DNA, 120 bp, synthetic construct; identical to SEQ ID NO: 31998
  source 1..120: mol_type = other DNA

SEQ ID NO: 61953 - DNA, 120 bp, synthetic construct; identical to SEQ ID NO: 31999
  source 1..120: mol_type = other DNA

SEQ ID NO: 61954 - DNA, 120 bp, synthetic construct; identical to SEQ ID NO: 9448
  source 1..120: mol_type = other DNA

SEQ ID NO: 61955 - DNA, 120 bp, synthetic construct; identical to SEQ ID NO: 32001
  source 1..120: mol_type = other DNA

SEQ ID NO: 61956 - DNA, 120 bp, synthetic construct; identical to SEQ ID NO: 32002
  source 1..120: mol_type = other DNA

SEQ ID NO: 61957 - DNA, 120 bp, synthetic construct; identical to SEQ ID NO: 32003
  source 1..120: mol_type = other DNA

SEQ ID NO: 61958 - DNA, 120 bp, synthetic construct; identical to SEQ ID NO: 32004
  source 1..120: mol_type = other DNA

SEQ ID NO: 61959 - DNA, 120 bp, synthetic construct; identical to SEQ ID NO: 9449
  source 1..120: mol_type = other DNA

SEQ ID NO: 61960 - DNA, 120 bp, synthetic construct; identical to SEQ ID NO: 32006
  source 1..120: mol_type = other DNA

SEQ ID NO: 61961 - DNA, 120 bp, synthetic construct; identical to SEQ ID NO: 9450
  source 1..120: mol_type = other DNA

SEQ ID NO: 61962 - DNA, 120 bp, synthetic construct; identical to SEQ ID NO: 32008
  source 1..120: mol_type = other DNA

SEQ ID NO: 61963 - DNA, 120 bp, synthetic construct; identical to SEQ ID NO: 32009
  source 1..120: mol_type = other DNA

SEQ ID NO: 61964 - DNA, 120 bp, synthetic construct; identical to SEQ ID NO: 32010
  source 1..120: mol_type = other DNA

SEQ ID NO: 61965 - DNA, 120 bp, synthetic construct; identical to SEQ ID NO: 32011
  source 1..120: mol_type = other DNA

SEQ ID NO: 61966 - DNA, 120 bp, synthetic construct; identical to SEQ ID NO: 9451
  source 1..120: mol_type = other DNA

SEQ ID NO: 61967 - DNA, 120 bp, synthetic construct; identical to SEQ ID NO: 32013
  source 1..120: mol_type = other DNA

SEQ ID NO: 61968 - DNA, 120 bp, synthetic construct; identical to SEQ ID NO: 32014
  source 1..120: mol_type = other DNA

SEQ ID NO: 61969 - DNA, 120 bp, synthetic construct; identical to SEQ ID NO: 32015
  source 1..120: mol_type = other DNA

SEQ ID NO: 61970 - DNA, 120 bp, synthetic construct; identical to SEQ ID NO: 9452
  source 1..120: mol_type = other DNA

SEQ ID NO: 61971 - DNA, 120 bp, synthetic construct; identical to SEQ ID NO: 32017
  source 1..120: mol_type = other DNA

SEQ ID NO: 61972 - DNA, 120 bp, synthetic construct; identical to SEQ ID NO: 32018
  source 1..120: mol_type = other DNA

SEQ ID NO: 61973 - DNA, 120 bp, synthetic construct; identical to SEQ ID NO: 32019
  source 1..120: mol_type = other DNA

SEQ ID NO: 61974 - DNA, 120 bp, synthetic construct; identical to SEQ ID NO: 32020
  source 1..120: mol_type = other DNA

SEQ ID NO: 61975 - DNA, 120 bp, synthetic construct; identical to SEQ ID NO: 9453
  source 1..120: mol_type = other DNA

SEQ ID NO: 61976 - DNA, 120 bp, synthetic construct; identical to SEQ ID NO: 32022
  source 1..120: mol_type = other DNA

SEQ ID NO: 61977 - DNA, 120 bp, synthetic construct; identical to SEQ ID NO: 32023
  source 1..120: mol_type = other DNA

SEQ ID NO: 61978 - DNA, 120 bp, synthetic construct; identical to SEQ ID NO: 9454
  source 1..120: mol_type = other DNA

SEQ ID NO: 61979 - DNA, 120 bp, synthetic construct; identical to SEQ ID NO: 32025
  source 1..120: mol_type = other DNA

SEQ ID NO: 61980 - DNA, 120 bp, synthetic construct; identical to SEQ ID NO: 32026
  source 1..120: mol_type = other DNA

SEQ ID NO: 61981 - DNA, 120 bp, synthetic construct; identical to SEQ ID NO: 32027
  source 1..120: mol_type = other DNA

SEQ ID NO: 61982 - DNA, 120 bp, synthetic construct; identical to SEQ ID NO: 9455
  source 1..120: mol_type = other DNA

SEQ ID NO: 61983 - DNA, 120 bp, synthetic construct; identical to SEQ ID NO: 32029
  source 1..120: mol_type = other DNA

SEQ ID NO: 61984 - DNA, 120 bp, synthetic construct; identical to SEQ ID NO: 32030
  source 1..120: mol_type = other DNA

SEQ ID NO: 61985 - DNA, 120 bp, synthetic construct; identical to SEQ ID NO: 9456
  source 1..120: mol_type = other DNA

SEQ ID NO: 61986 - DNA, 120 bp, synthetic construct; identical to SEQ ID NO: 32032
  source 1..120: mol_type = other DNA

SEQ ID NO: 61987 - DNA, 120 bp, synthetic construct; identical to SEQ ID NO: 9457
  source 1..120: mol_type = other DNA

SEQ ID NO: 61988 - DNA, 120 bp, synthetic construct; identical to SEQ ID NO: 32034
  source 1..120: mol_type = other DNA

SEQ ID NO: 61989 - DNA, 120 bp, synthetic construct; identical to SEQ ID NO: 32035
  source 1..120: mol_type = other DNA

SEQ ID NO: 61990 - DNA, 120 bp, synthetic construct; identical to SEQ ID NO: 32036
  source 1..120: mol_type = other DNA

SEQ ID NO: 61991 - DNA, 120 bp, synthetic construct; identical to SEQ ID NO: 9458
  source 1..120: mol_type = other DNA

SEQ ID NO: 61992 - DNA, 120 bp, synthetic construct; identical to SEQ ID NO: 32038
  source 1..120: mol_type = other DNA

SEQ ID NO: 61993 - DNA, 120 bp, synthetic construct; identical to SEQ ID NO: 32039
  source 1..120: mol_type = other DNA

SEQ ID NO: 61994 - DNA, 120 bp, synthetic construct; identical to SEQ ID NO: 32040
  source 1..120: mol_type = other DNA

SEQ ID NO: 61995 - DNA, 120 bp, synthetic construct; identical to SEQ ID NO: 9459
  source 1..120: mol_type = other DNA

SEQ ID NO: 61996 - DNA, 120 bp, synthetic construct; identical to SEQ ID NO: 32042
  source 1..120: mol_type = other DNA

SEQ ID NO: 61997 - DNA, 120 bp, synthetic construct; identical to SEQ ID NO: 32043
  source 1..120: mol_type = other DNA

SEQ ID NO: 61998 - DNA, 120 bp, synthetic construct; identical to SEQ ID NO: 32044
  source 1..120: mol_type = other DNA

SEQ ID NO: 61999 - DNA, 120 bp, synthetic construct; identical to SEQ ID NO: 9460
  source 1..120: mol_type = other DNA

SEQ ID NO: 62000 - DNA, 120 bp, synthetic construct; identical to SEQ ID NO: 32046
  source 1..120: mol_type = other DNA

SEQ ID NO: 62001 - DNA, 120 bp, synthetic construct; identical to SEQ ID NO: 32047
  source 1..120: mol_type = other DNA

SEQ ID NO: 62002 - DNA, 120 bp, synthetic construct; identical to SEQ ID NO: 32048
  source 1..120: mol_type = other DNA

SEQ ID NO: 62003 - DNA, 120 bp, synthetic construct; identical to SEQ ID NO: 9461
  source 1..120: mol_type = other DNA

SEQ ID NO: 62004 - DNA, 120 bp, synthetic construct; identical to SEQ ID NO: 32050
  source 1..120: mol_type = other DNA

SEQ ID NO: 62005 - DNA, 120 bp, synthetic construct; identical to SEQ ID NO: 32051
  source 1..120: mol_type = other DNA

SEQ ID NO: 62006 - DNA, 120 bp, synthetic construct; identical to SEQ ID NO: 32052
  source 1..120: mol_type = other DNA

SEQ ID NO: 62007 - DNA, 120 bp, synthetic construct; identical to SEQ ID NO: 9462
  source 1..120: mol_type = other DNA

SEQ ID NO: 62008 - DNA, 120 bp, synthetic construct; identical to SEQ ID NO: 32054
  source 1..120: mol_type = other DNA

SEQ ID NO: 62009 - DNA, 120 bp, synthetic construct; identical to SEQ ID NO: 32055
  source 1..120: mol_type = other DNA

SEQ ID NO: 62010 - DNA, 120 bp, synthetic construct; identical to SEQ ID NO: 32056
  source 1..120: mol_type = other DNA

SEQ ID NO: 62011 - DNA, 120 bp, synthetic construct; identical to SEQ ID NO: 32057
  source 1..120: mol_type = other DNA

SEQ ID NO: 62012 - DNA, 120 bp, synthetic construct; identical to SEQ ID NO: 9463
  source 1..120: mol_type = other DNA

SEQ ID NO: 62013 - DNA, 120 bp, synthetic construct; identical to SEQ ID NO: 2341
  source 1..120: mol_type = other DNA

SEQ ID NO: 62014 - DNA, 120 bp, synthetic construct; identical to SEQ ID NO: 32060
  source 1..120: mol_type = other DNA

SEQ ID NO: 62015 - DNA, 120 bp, synthetic construct; identical to SEQ ID NO: 32061
  source 1..120: mol_type = other DNA

SEQ ID NO: 62016 - DNA, 120 bp, synthetic construct; identical to SEQ ID NO: 9464
  source 1..120: mol_type = other DNA

SEQ ID NO: 62017 - DNA, 120 bp, synthetic construct; identical to SEQ ID NO: 32063
  source 1..120: mol_type = other DNA

SEQ ID NO: 62018 - DNA, 120 bp, synthetic construct; identical to SEQ ID NO: 32064
  source 1..120: mol_type = other DNA

SEQ ID NO: 62019 - DNA, 120 bp, synthetic construct; identical to SEQ ID NO: 9465
  source 1..120: mol_type = other DNA

SEQ ID NO: 62020 - DNA, 120 bp, synthetic construct; identical to SEQ ID NO: 32066
  source 1..120: mol_type = other DNA

SEQ ID NO: 62021 - DNA, 120 bp, synthetic construct; identical to SEQ ID NO: 32067
  source 1..120: mol_type = other DNA

SEQ ID NO: 62022 - DNA, 120 bp, synthetic construct; identical to SEQ ID NO: 32068
  source 1..120: mol_type = other DNA

SEQ ID NO: 62023 - DNA, 120 bp, synthetic construct; identical to SEQ ID NO: 32069
  source 1..120: mol_type = other DNA

SEQ ID NO: 62024 - DNA, 120 bp, synthetic construct; identical to SEQ ID NO: 9466
  source 1..120: mol_type = other DNA

SEQ ID NO: 62025 - DNA, 120 bp, synthetic construct; identical to SEQ ID NO: 32071
  source 1..120: mol_type = other DNA

SEQ ID NO: 62026 - DNA, 120 bp, synthetic construct; identical to SEQ ID NO: 32072
  source 1..120: mol_type = other DNA

SEQ ID NO: 62027 - DNA, 120 bp, synthetic construct; identical to SEQ ID NO: 9467
  source 1..120: mol_type = other DNA

SEQ ID NO: 62028 - DNA, 120 bp, synthetic construct; identical to SEQ ID NO: 32074
  source 1..120: mol_type = other DNA

SEQ ID NO: 62029 - DNA, 120 bp, synthetic construct; identical to SEQ ID NO: 32075
  source 1..120: mol_type = other DNA

SEQ ID NO: 62030 - DNA, 120 bp, synthetic construct; identical to SEQ ID NO: 32076
  source 1..120: mol_type = other DNA

SEQ ID NO: 62031 - DNA, 120 bp, synthetic construct; identical to SEQ ID NO: 32077
  source 1..120: mol_type = other DNA

SEQ ID NO: 62032 - DNA, 120 bp, synthetic construct; identical to SEQ ID NO: 9468
  source 1..120: mol_type = other DNA

SEQ ID NO: 62033 - DNA, 120 bp, synthetic construct; identical to SEQ ID NO: 32079
  source 1..120: mol_type = other DNA

SEQ ID NO: 62034 - DNA, 120 bp, synthetic construct; identical to SEQ ID NO: 32080
  source 1..120: mol_type = other DNA

SEQ ID NO: 62035 - DNA, 120 bp, synthetic construct; identical to SEQ ID NO: 32081
  source 1..120: mol_type = other DNA

SEQ ID NO: 62036 - DNA, 120 bp, synthetic construct; identical to SEQ ID NO: 9469
  source 1..120: mol_type = other DNA

SEQ ID NO: 62037 - DNA, 120 bp, synthetic construct; identical to SEQ ID NO: 32083
  source 1..120: mol_type = other DNA

SEQ ID NO: 62038 - DNA, 120 bp, synthetic construct; identical to SEQ ID NO: 32084
  source 1..120: mol_type = other DNA

SEQ ID NO: 62039 - DNA, 120 bp, synthetic construct; identical to SEQ ID NO: 32085
  source 1..120: mol_type = other DNA

SEQ ID NO: 62040 - DNA, 120 bp, synthetic construct; identical to SEQ ID NO: 32086
  source 1..120: mol_type = other DNA

SEQ ID NO: 62041 - DNA, 120 bp, synthetic construct; identical to SEQ ID NO: 9470
  source 1..120: mol_type = other DNA

SEQ ID NO: 62042 - DNA, 120 bp, synthetic construct; identical to SEQ ID NO: 32088
  source 1..120: mol_type = other DNA

SEQ ID NO: 62043 - DNA, 120 bp, synthetic construct; identical to SEQ ID NO: 32089
  source 1..120: mol_type = other DNA

SEQ ID NO: 62044 - DNA, 120 bp, synthetic construct; identical to SEQ ID NO: 32090
  source 1..120: mol_type = other DNA

SEQ ID NO: 62045 - DNA, 120 bp, synthetic construct; identical to SEQ ID NO: 9471
  source 1..120: mol_type = other DNA

SEQ ID NO: 62046 - DNA, 120 bp, synthetic construct; identical to SEQ ID NO: 32092
  source 1..120: mol_type = other DNA

SEQ ID NO: 62047 - DNA, 120 bp, synthetic construct; identical to SEQ ID NO: 32093
  source 1..120: mol_type = other DNA

SEQ ID NO: 62048 - DNA, 120 bp, synthetic construct; identical to SEQ ID NO: 9472
  source 1..120: mol_type = other DNA

SEQ ID NO: 62049 - DNA, 120 bp, synthetic construct; identical to SEQ ID NO: 32095
  source 1..120: mol_type = other DNA

SEQ ID NO: 62050 - DNA, 120 bp, synthetic construct; identical to SEQ ID NO: 32096
  source 1..120: mol_type = other DNA

SEQ ID NO: 62051 - DNA, 120 bp, synthetic construct; identical to SEQ ID NO: 32097
  source 1..120: mol_type = other DNA

SEQ ID NO: 62052 - DNA, 120 bp, synthetic construct; identical to SEQ ID NO: 9473
  source 1..120: mol_type = other DNA

SEQ ID NO: 62053 - DNA, 120 bp, synthetic construct; identical to SEQ ID NO: 32099
  source 1..120: mol_type = other DNA

SEQ ID NO: 62054 - DNA, 120 bp, synthetic construct; identical to SEQ ID NO: 32100
  source 1..120: mol_type = other DNA

SEQ ID NO: 62055 - DNA, 120 bp, synthetic construct; identical to SEQ ID NO: 32101
  source 1..120: mol_type = other DNA

SEQ ID NO: 62056 - DNA, 120 bp, synthetic construct; identical to SEQ ID NO: 32102
  source 1..120: mol_type = other DNA

SEQ ID NO: 62057 - DNA, 120 bp, synthetic construct; identical to SEQ ID NO: 2351
  source 1..120: mol_type = other DNA

SEQ ID NO: 62058 - DNA, 120 bp, synthetic construct; identical to SEQ ID NO: 32104
  source 1..120: mol_type = other DNA

SEQ ID NO: 62059 - DNA, 120 bp, synthetic construct; identical to SEQ ID NO: 32105
  source 1..120: mol_type = other DNA

SEQ ID NO: 62060 - DNA, 120 bp, synthetic construct; identical to SEQ ID NO: 32106
  source 1..120: mol_type = other DNA

SEQ ID NO: 62061 - DNA, 120 bp, synthetic construct; identical to SEQ ID NO: 9475
  source 1..120: mol_type = other DNA

SEQ ID NO: 62062 - DNA, 120 bp, synthetic construct; identical to SEQ ID NO: 32108
  source 1..120: mol_type = other DNA

SEQ ID NO: 62063 - DNA, 120 bp, synthetic construct; identical to SEQ ID NO: 32109
  source 1..120: mol_type = other DNA

SEQ ID NO: 62064 - DNA, 120 bp, synthetic construct; identical to SEQ ID NO: 32110
  source 1..120: mol_type = other DNA

SEQ ID NO: 62065 - DNA, 120 bp, synthetic construct; identical to SEQ ID NO: 9476
  source 1..120: mol_type = other DNA

SEQ ID NO: 62066 - DNA, 120 bp, synthetic construct; identical to SEQ ID NO: 32112
  source 1..120: mol_type = other DNA

SEQ ID NO: 62067 - DNA, 120 bp, synthetic construct; identical to SEQ ID NO: 32113
  source 1..120: mol_type = other DNA

SEQ ID NO: 62068 - DNA, 120 bp, synthetic construct; identical to SEQ ID NO: 32114
  source 1..120: mol_type = other DNA

SEQ ID NO: 62069 - DNA, 120 bp, synthetic construct; identical to SEQ ID NO: 9477
  source 1..120: mol_type = other DNA

SEQ ID NO: 62070 - DNA, 120 bp, synthetic construct; identical to SEQ ID NO: 32116
  source 1..120: mol_type = other DNA

SEQ ID NO: 62071 - DNA, 120 bp, synthetic construct; identical to SEQ ID NO: 32117
  source 1..120: mol_type = other DNA

SEQ ID NO: 62072 - DNA, 120 bp, synthetic construct; identical to SEQ ID NO: 32118
  source 1..120: mol_type = other DNA

SEQ ID NO: 62073 - DNA, 120 bp, synthetic construct; identical to SEQ ID NO: 9478
  source 1..120: mol_type = other DNA

SEQ ID NO: 62074 - DNA, 120 bp, synthetic construct; identical to SEQ ID NO: 32120
  source 1..120: mol_type = other DNA

SEQ ID NO: 62075 - DNA, 120 bp, synthetic construct; identical to SEQ ID NO: 32121
  source 1..120: mol_type = other DNA

SEQ ID NO: 62076 - DNA, 120 bp, synthetic construct; identical to SEQ ID NO: 32122
  source 1..120: mol_type = other DNA

SEQ ID NO: 62077 - DNA, 120 bp, synthetic construct; identical to SEQ ID NO: 32123
  source 1..120: mol_type = other DNA

SEQ ID NO: 62078 - DNA, 120 bp, synthetic construct; identical to SEQ ID NO: 2356
  source 1..120: mol_type = other DNA

SEQ ID NO: 62079 - DNA, 120 bp, synthetic construct; identical to SEQ ID NO: 32125
  source 1..120: mol_type = other DNA

SEQ ID NO: 62080 - DNA, 120 bp, synthetic construct; identical to SEQ ID NO: 32126
  source 1..120: mol_type = other DNA

SEQ ID NO: 62081 - DNA, 120 bp, synthetic construct; identical to SEQ ID NO: 9480
  source 1..120: mol_type = other DNA

SEQ ID NO: 62082 - DNA, 120 bp, synthetic construct; identical to SEQ ID NO: 32128
  source 1..120: mol_type = other DNA

SEQ ID NO: 62083 - DNA, 120 bp, synthetic construct; identical to SEQ ID NO: 32129
  source 1..120: mol_type = other DNA

SEQ ID NO: 62084 - DNA, 120 bp, synthetic construct; identical to SEQ ID NO: 32130
  source 1..120: mol_type = other DNA

SEQ ID NO: 62085 - DNA, 120 bp, synthetic construct; identical to SEQ ID NO: 32131
  source 1..120: mol_type = other DNA

SEQ ID NO: 62086 - DNA, 120 bp, synthetic construct; identical to SEQ ID NO: 9481
  source 1..120: mol_type = other DNA

SEQ ID NO: 62087 - DNA, 120 bp, synthetic construct; identical to SEQ ID NO: 32133
  source 1..120: mol_type = other DNA

SEQ ID NO: 62088 - DNA, 120 bp, synthetic construct; identical to SEQ ID NO: 32134
  source 1..120: mol_type = other DNA

SEQ ID NO: 62089 - DNA, 120 bp, synthetic construct; identical to SEQ ID NO: 9482
  source 1..120: mol_type = other DNA

SEQ ID NO: 62090 - DNA, 120 bp, synthetic construct; identical to SEQ ID NO: 32136
  source 1..120: mol_type = other DNA

SEQ ID NO: 62091 - DNA, 120 bp, synthetic construct; identical to SEQ ID NO: 32137
  source 1..120: mol_type = other DNA

SEQ ID NO: 62092 - DNA, 120 bp, synthetic construct; identical to SEQ ID NO: 32138
  source 1..120: mol_type = other DNA

SEQ ID NO: 62093 - DNA, 120 bp, synthetic construct; identical to SEQ ID NO: 32139
  source 1..120: mol_type = other DNA

SEQ ID NO: 62094 - DNA, 120 bp, synthetic construct; identical to SEQ ID NO: 9483
  source 1..120: mol_type = other DNA

SEQ ID NO: 62095 - DNA, 120 bp, synthetic construct; identical to SEQ ID NO: 32141
  source 1..120: mol_type = other DNA

SEQ ID NO: 62096 - DNA, 120 bp, synthetic construct; identical to SEQ ID NO: 32142
  source 1..120: mol_type = other DNA

SEQ ID NO: 62097 - DNA, 120 bp, synthetic construct; identical to SEQ ID NO: 32143
  source 1..120: mol_type = other DNA

SEQ ID NO: 62098 - DNA, 120 bp, synthetic construct; identical to SEQ ID NO: 9484
  source 1..120: mol_type = other DNA

SEQ ID NO: 62099 - DNA, 120 bp, synthetic construct; identical to SEQ ID NO: 32145
  source 1..120: mol_type = other DNA

SEQ ID NO: 62100 - DNA, 120 bp, synthetic construct; identical to SEQ ID NO: 32146
  source 1..120: mol_type = other DNA

SEQ ID NO: 62101 - DNA, 120 bp, synthetic construct; identical to SEQ ID NO: 9485
  source 1..120: mol_type = other DNA

SEQ ID NO: 62102 - DNA, 120 bp, synthetic construct; identical to SEQ ID NO: 32148
  source 1..120: mol_type = other DNA

SEQ ID NO: 62103 - DNA, 120 bp, synthetic construct; identical to SEQ ID NO: 32149
  source 1..120: mol_type = other DNA

SEQ ID NO: 62104 - DNA, 120 bp, synthetic construct; identical to SEQ ID NO: 32150
  source 1..120: mol_type = other DNA

SEQ ID NO: 62105 - DNA, 120 bp, synthetic construct; identical to SEQ ID NO: 9486
  source 1..120: mol_type = other DNA

SEQ ID NO: 62106 - DNA, 120 bp, synthetic construct; identical to SEQ ID NO: 32152
  source 1..120: mol_type = other DNA

SEQ ID NO: 62107 - DNA, 120 bp, synthetic construct; identical to SEQ ID NO: 32153
  source 1..120: mol_type = other DNA

SEQ ID NO: 62108 - DNA, 120 bp, synthetic construct; identical to SEQ ID NO: 32154
  source 1..120: mol_type = other DNA

SEQ ID NO: 62109 - DNA, 120 bp, synthetic construct; identical to SEQ ID NO: 32155
  source 1..120: mol_type = other DNA

SEQ ID NO: 62110 - DNA, 120 bp, synthetic construct; identical to SEQ ID NO: 9487
  source 1..120: mol_type = other DNA

SEQ ID NO: 62111 - DNA, 120 bp, synthetic construct; identical to SEQ ID NO: 32157
  source 1..120: mol_type = other DNA

SEQ ID NO: 62112 - DNA, 120 bp, synthetic construct; identical to SEQ ID NO: 32158
  source 1..120: mol_type = other DNA

SEQ ID NO: 62113 - DNA, 120 bp, synthetic construct; identical to SEQ ID NO: 32159
  source 1..120: mol_type = other DNA

SEQ ID NO: 62114 - DNA, 120 bp, synthetic construct; identical to SEQ ID NO: 9488
  source 1..120: mol_type = other DNA

SEQ ID NO: 62115 - DNA, 120 bp, synthetic construct; identical to SEQ ID NO: 32161
  source 1..120: mol_type = other DNA

SEQ ID NO: 62116 - DNA, 120 bp, synthetic construct; identical to SEQ ID NO: 32162
  source 1..120: mol_type = other DNA

SEQ ID NO: 62117 - DNA, 120 bp, synthetic construct; identical to SEQ ID NO: 32163
  source 1..120: mol_type = other DNA

SEQ ID NO: 62118 - DNA, 120 bp, synthetic construct; identical to SEQ ID NO: 9489
  source 1..120: mol_type = other DNA

SEQ ID NO: 62119 - DNA, 120 bp, synthetic construct; identical to SEQ ID NO: 32165
  source 1..120: mol_type = other DNA

SEQ ID NO: 62120 - DNA, 120 bp, synthetic construct; identical to SEQ ID NO: 32166
  source 1..120: mol_type = other DNA

SEQ ID NO: 62121 - DNA, 120 bp, synthetic construct; identical to SEQ ID NO: 32167
  source 1..120: mol_type = other DNA

SEQ ID NO: 62122 - DNA, 120 bp, synthetic construct; identical to SEQ ID NO: 32168
  source 1..120: mol_type = other DNA

SEQ ID NO: 62123 - DNA, 120 bp, synthetic construct; identical to SEQ ID NO: 9490
  source 1..120: mol_type = other DNA

SEQ ID NO: 62124 - DNA, 120 bp, synthetic construct; identical to SEQ ID NO: 32170
  source 1..120: mol_type = other DNA

SEQ ID NO: 62125 - DNA, 120 bp, synthetic construct; identical to SEQ ID NO: 32171
  source 1..120: mol_type = other DNA

SEQ ID NO: 62126 - DNA, 120 bp, synthetic construct; identical to SEQ ID NO: 32172
  source 1..120: mol_type = other DNA

SEQ ID NO: 62127 - DNA, 120 bp, synthetic construct; identical to SEQ ID NO: 9491
  source 1..120: mol_type = other DNA

SEQ ID NO: 62128 - DNA, 120 bp, synthetic construct; identical to SEQ ID NO: 32174
  source 1..120: mol_type = other DNA

SEQ ID NO: 62129 - DNA, 120 bp, synthetic construct; identical to SEQ ID NO: 32175
  source 1..120: mol_type = other DNA

SEQ ID NO: 62130 - DNA, 120 bp, synthetic construct; identical to SEQ ID NO: 32176
  source 1..120: mol_type = other DNA

SEQ ID NO: 62131 - DNA, 120 bp, synthetic construct; identical to SEQ ID NO: 9492
  source 1..120: mol_type = other DNA

SEQ ID NO: 62132 - DNA, 120 bp, synthetic construct; identical to SEQ ID NO: 32178
  source 1..120: mol_type = other DNA

SEQ ID NO: 62133 - DNA, 120 bp, synthetic construct; identical to SEQ ID NO: 32179
  source 1..120: mol_type = other DNA

SEQ ID NO: 62134 - DNA, 120 bp, synthetic construct; identical to SEQ ID NO: 9493
  source 1..120: mol_type = other DNA

SEQ ID NO: 62135 - DNA, 120 bp, synthetic construct; identical to SEQ ID NO: 32181
  source 1..120: mol_type = other DNA

SEQ ID NO: 62136 - DNA, 120 bp, synthetic construct; identical to SEQ ID NO: 32182
  source 1..120: mol_type = other DNA

SEQ ID NO: 62137 - DNA, 120 bp, synthetic construct; identical to SEQ ID NO: 32183
  source 1..120: mol_type = other DNA

SEQ ID NO: 62138 - DNA, 120 bp, synthetic construct; identical to SEQ ID NO: 9494
  source 1..120: mol_type = other DNA

SEQ ID NO: 62139 - DNA, 120 bp, synthetic construct; identical to SEQ ID NO: 32185
  source 1..120: mol_type = other DNA

SEQ ID NO: 62140 - DNA, 120 bp, synthetic construct; identical to SEQ ID NO: 32186
  source 1..120: mol_type = other DNA

SEQ ID NO: 62141 - DNA, 120 bp, synthetic construct; identical to SEQ ID NO: 32187
  source 1..120: mol_type = other DNA

SEQ ID NO: 62142 - DNA, 120 bp, synthetic construct; identical to SEQ ID NO: 32188
  source 1..120: mol_type = other DNA

SEQ ID NO: 62143 - DNA, 120 bp, synthetic construct; identical to SEQ ID NO: 9495
  source 1..120: mol_type = other DNA

SEQ ID NO: 62144 - DNA, 120 bp, synthetic construct; identical to SEQ ID NO: 32190
  source 1..120: mol_type = other DNA

SEQ ID NO: 62145 - DNA, 120 bp, synthetic construct; identical to SEQ ID NO: 32191
  source 1..120: mol_type = other DNA

SEQ ID NO: 62146 - DNA, 120 bp, synthetic construct; identical to SEQ ID NO: 32192
  source 1..120: mol_type = other DNA

SEQ ID NO: 62147 - DNA, 120 bp, synthetic construct; identical to SEQ ID NO: 9496
  source 1..120: mol_type = other DNA

SEQ ID NO: 62148 - DNA, 120 bp, synthetic construct; identical to SEQ ID NO: 32194
  source 1..120: mol_type = other DNA

SEQ ID NO: 62149 - DNA, 120 bp, synthetic construct; identical to SEQ ID NO: 32195
  source 1..120: mol_type = other DNA

SEQ ID NO: 62150 - DNA, 120 bp, synthetic construct; identical to SEQ ID NO: 32196
  source 1..120: mol_type = other DNA

SEQ ID NO: 62151 - DNA, 120 bp, synthetic construct; identical to SEQ ID NO: 9497
  source 1..120: mol_type = other DNA

SEQ ID NO: 62152 - DNA, 120 bp, synthetic construct; identical to SEQ ID NO: 32198
  source 1..120: mol_type = other DNA

SEQ ID NO: 62153 - DNA, 120 bp, synthetic construct; identical to SEQ ID NO: 32199
  source 1..120: mol_type = other DNA

SEQ ID NO: 62154 - DNA, 120 bp, synthetic construct; identical to SEQ ID NO: 9498
  source 1..120: mol_type = other DNA

SEQ ID NO: 62155 - DNA, 120 bp, synthetic construct; identical to SEQ ID NO: 32201
  source 1..120: mol_type = other DNA

SEQ ID NO: 62156 - DNA, 120 bp, synthetic construct; identical to SEQ ID NO: 32202
  source 1..120: mol_type = other DNA

SEQ ID NO: 62157 - DNA, 120 bp, synthetic construct; identical to SEQ ID NO: 32203
  source 1..120: mol_type = other DNA

SEQ ID NO: 62158 - DNA, 120 bp, synthetic construct; identical to SEQ ID NO: 32204
  source 1..120: mol_type = other DNA

SEQ ID NO: 62159 - DNA, 120 bp, synthetic construct; identical to SEQ ID NO: 9499
  source 1..120: mol_type = other DNA

SEQ ID NO: 62160 - DNA, 120 bp, synthetic construct; identical to SEQ ID NO: 32206
  source 1..120: mol_type = other DNA

SEQ ID NO: 62161 - DNA, 120 bp, synthetic construct; identical to SEQ ID NO: 32207
  source 1..120: mol_type = other DNA

SEQ ID NO: 62162 - DNA, 120 bp, synthetic construct; identical to SEQ ID NO: 9500
  source 1..120: mol_type = other DNA

SEQ ID NO: 62163 - DNA, 120 bp, synthetic construct; identical to SEQ ID NO: 32209
  source 1..120: mol_type = other DNA

SEQ ID NO: 62164 - DNA, 120 bp, synthetic construct; identical to SEQ ID NO: 32210
  source 1..120: mol_type = other DNA

SEQ ID NO: 62165 - DNA, 120 bp, synthetic construct; identical to SEQ ID NO: 32211
  source 1..120: mol_type = other DNA

SEQ ID NO: 62166 - DNA, 120 bp, synthetic construct; identical to SEQ ID NO: 9501
  source 1..120: mol_type = other DNA

SEQ ID NO: 62167 - DNA, 120 bp, synthetic construct; identical to SEQ ID NO: 32213
  source 1..120: mol_type = other DNA

SEQ ID NO: 62168 - DNA, 120 bp, synthetic construct; identical to SEQ ID NO: 32214
  source 1..120: mol_type = other DNA

SEQ ID NO: 62169 - DNA, 120 bp, synthetic construct; identical to SEQ ID NO: 32215
  source 1..120: mol_type = other DNA

SEQ ID NO: 62170 - DNA, 120 bp, synthetic construct; identical to SEQ ID NO: 32216
  source 1..120: mol_type = other DNA

SEQ ID NO: 62171 - DNA, 120 bp, synthetic construct; identical to SEQ ID NO: 9502
  source 1..120: mol_type = other DNA

SEQ ID NO: 62172 - DNA, 120 bp, synthetic construct; identical to SEQ ID NO: 32218
  source 1..120: mol_type = other DNA

SEQ ID NO: 62173 - DNA, 120 bp, synthetic construct; identical to SEQ ID NO: 32219
  source 1..120: mol_type = other DNA

SEQ ID NO: 62174 - DNA, 120 bp, synthetic construct; identical to SEQ ID NO: 9503
  source 1..120: mol_type = other DNA

SEQ ID NO: 62175 - DNA, 120 bp, synthetic construct; identical to SEQ ID NO: 32221
  source 1..120: mol_type = other DNA

SEQ ID NO: 62176 - DNA, 120 bp, synthetic construct; identical to SEQ ID NO: 32222
  source 1..120: mol_type = other DNA

SEQ ID NO: 62177 - DNA, 120 bp, synthetic construct; identical to SEQ ID NO: 32223
  source 1..120: mol_type = other DNA

SEQ ID NO: 62178 - DNA, 120 bp, synthetic construct; identical to SEQ ID NO: 9504
  source 1..120: mol_type = other DNA

SEQ ID NO: 62179 - DNA, 120 bp, synthetic construct; identical to SEQ ID NO: 32225
  source 1..120: mol_type = other DNA

SEQ ID NO: 62180 - DNA, 120 bp, synthetic construct; identical to SEQ ID NO: 32226
  source 1..120: mol_type = other DNA

SEQ ID NO: 62181 - DNA, 120 bp, synthetic construct; identical to SEQ ID NO: 32227
  source 1..120: mol_type = other DNA

SEQ ID NO: 62182 - DNA, 120 bp, synthetic construct; identical to SEQ ID NO: 32228
  source 1..120: mol_type = other DNA

SEQ ID NO: 62183 - DNA, 120 bp, synthetic construct; identical to SEQ ID NO: 9505
  source 1..120: mol_type = other DNA

SEQ ID NO: 62184 - DNA, 120 bp, synthetic construct; identical to SEQ ID NO: 32230
  source 1..120: mol_type = other DNA

SEQ ID NO: 62185 - DNA, 120 bp, synthetic construct; identical to SEQ ID NO: 32231
  source 1..120: mol_type = other DNA

SEQ ID NO: 62186 - DNA, 120 bp, synthetic construct; identical to SEQ ID NO: 32232
  source 1..120: mol_type = other DNA

SEQ ID NO: 62187 - DNA, 120 bp, synthetic construct; identical to SEQ ID NO: 9506
  source 1..120: mol_type = other DNA

SEQ ID NO: 62188 - DNA, 120 bp, synthetic construct; identical to SEQ ID NO: 32234
  source 1..120: mol_type = other DNA

SEQ ID NO: 62189 - DNA, 120 bp, synthetic construct; identical to SEQ ID NO: 32235
  source 1..120: mol_type = other DNA

SEQ ID NO: 62190 - DNA, 120 bp, synthetic construct; identical to SEQ ID NO: 32236
  source 1..120: mol_type = other DNA

SEQ ID NO: 62191 - DNA, 120 bp, synthetic construct; identical to SEQ ID NO: 9507
  source 1..120: mol_type = other DNA

SEQ ID NO: 62192 - DNA, 120 bp, synthetic construct; identical to SEQ ID NO: 32238
  source 1..120: mol_type = other DNA

SEQ ID NO: 62193 - DNA, 120 bp, synthetic construct; identical to SEQ ID NO: 32239
  source 1..120: mol_type = other DNA

SEQ ID NO: 62194 - DNA, 120 bp, synthetic construct; identical to SEQ ID NO: 9508
  source 1..120: mol_type = other DNA

SEQ ID NO: 62195 - DNA, 120 bp, synthetic construct; identical to SEQ ID NO: 32241
  source 1..120: mol_type = other DNA

SEQ ID NO: 62196 - DNA, 120 bp, synthetic construct; identical to SEQ ID NO: 32242
  source 1..120: mol_type = other DNA

SEQ ID NO: 62197 - DNA, 120 bp, synthetic construct; identical to SEQ ID NO: 32243
  source 1..120: mol_type = other DNA

SEQ ID NO: 62198 - DNA, 120 bp, synthetic construct; identical to SEQ ID NO: 32244
  source 1..120: mol_type = other DNA

SEQ ID NO: 62199 - DNA, 120 bp, synthetic construct; identical to SEQ ID NO: 9509
  source 1..120: mol_type = other DNA

SEQ ID NO: 62200 - DNA, 120 bp, synthetic construct; identical to SEQ ID NO: 32246
  source 1..120: mol_type = other DNA

SEQ ID NO: 62201 - DNA, 120 bp, synthetic construct; identical to SEQ ID NO: 32247
  source 1..120: mol_type = other DNA

SEQ ID NO: 62202 - DNA, 120 bp, synthetic construct; identical to SEQ ID NO: 32248
  source 1..120: mol_type = other DNA

SEQ ID NO: 62203 - DNA, 120 bp, synthetic construct; identical to SEQ ID NO: 9510
  source 1..120: mol_type = other DNA

SEQ ID NO: 62204 - DNA, 120 bp, synthetic construct; identical to SEQ ID NO: 32250
  source 1..120: mol_type = other DNA

SEQ ID NO: 62205 - DNA, 120 bp, synthetic construct; identical to SEQ ID NO: 32251
  source 1..120: mol_type = other DNA

SEQ ID NO: 62206 - DNA, 120 bp, synthetic construct; identical to SEQ ID NO: 32252
  source 1..120: mol_type = other DNA

SEQ ID NO: 62207 - DNA, 120 bp, synthetic construct; identical to SEQ ID NO: 32253
  source 1..120: mol_type = other DNA

SEQ ID NO: 62208 - DNA, 120 bp, synthetic construct; identical to SEQ ID NO: 9511
  source 1..120: mol_type = other DNA

SEQ ID NO: 62209 - DNA, 120 bp, synthetic construct; identical to SEQ ID NO: 32255
  source 1..120: mol_type = other DNA

SEQ ID NO: 62210 - DNA, 120 bp, synthetic construct; identical to SEQ ID NO: 2386
  source 1..120: mol_type = other DNA

SEQ ID NO: 62211 - DNA, 120 bp, synthetic construct; identical to SEQ ID NO: 32257
  source 1..120: mol_type = other DNA

SEQ ID NO: 62212 - DNA, 120 bp, synthetic construct; identical to SEQ ID NO: 32258
  source 1..120: mol_type = other DNA

SEQ ID NO: 62213 - DNA, 120 bp, synthetic construct; identical to SEQ ID NO: 32259
  source 1..120: mol_type = other DNA

SEQ ID NO: 62214 - DNA, 120 bp, synthetic construct; identical to SEQ ID NO: 9513
  source 1..120: mol_type = other DNA

SEQ ID NO: 62215 - DNA, 120 bp, synthetic construct; identical to SEQ ID NO: 32261
  source 1..120: mol_type = other DNA

SEQ ID NO: 62216 - DNA, 120 bp, synthetic construct; identical to SEQ ID NO: 32262
  source 1..120: mol_type = other DNA

SEQ ID NO: 62217 - DNA, 120 bp, synthetic construct; identical to SEQ ID NO: 9514
  source 1..120: mol_type = other DNA

SEQ ID NO: 62218 - DNA, 120 bp, synthetic construct; identical to SEQ ID NO: 32264
  source 1..120: mol_type = other DNA

SEQ ID NO: 62219 - DNA, 120 bp, synthetic construct; identical to SEQ ID NO: 32265
  source 1..120: mol_type = other DNA

SEQ ID NO: 62220 - DNA, 120 bp, synthetic construct; identical to SEQ ID NO: 32266
  source 1..120: mol_type = other DNA

SEQ ID NO: 62221 - DNA, 120 bp, synthetic construct; identical to SEQ ID NO: 9515
  source 1..120: mol_type = other DNA

SEQ ID NO: 62222 - DNA, 120 bp, synthetic construct; identical to SEQ ID NO: 32268
  source 1..120: mol_type = other DNA

SEQ ID NO: 62223 - DNA, 120 bp, synthetic construct; identical to SEQ ID NO: 32269
  source 1..120: mol_type = other DNA

SEQ ID NO: 62224 - DNA, 120 bp, synthetic construct; identical to SEQ ID NO: 32270
  source 1..120: mol_type = other DNA

SEQ ID NO: 62225 - DNA, 120 bp, synthetic construct; identical to SEQ ID NO: 9516
  source 1..120: mol_type = other DNA

SEQ ID NO: 62226 - DNA, 120 bp, synthetic construct; identical to SEQ ID NO: 32272
  source 1..120: mol_type = other DNA

SEQ ID NO: 62227 - DNA, 120 bp, synthetic construct; identical to SEQ ID NO: 32273
  source 1..120: mol_type = other DNA

SEQ ID NO: 62228 - DNA, 120 bp, synthetic construct; identical to SEQ ID NO: 32274
  source 1..120: mol_type = other DNA

SEQ ID NO: 62229 - DNA, 120 bp, synthetic construct; identical to SEQ ID NO: 9517
  source 1..120: mol_type = other DNA

SEQ ID NO: 62230 - DNA, 120 bp, synthetic construct; identical to SEQ ID NO: 2391
  source 1..120: mol_type = other DNA

SEQ ID NO: 62231 - DNA, 120 bp, synthetic construct; identical to SEQ ID NO: 32277
  source 1..120: mol_type = other DNA

SEQ ID NO: 62232 - DNA, 120 bp, synthetic construct; identical to SEQ ID NO: 32278
  source 1..120: mol_type = other DNA

SEQ ID NO: 62233 - DNA, 120 bp, synthetic construct; identical to SEQ ID NO: 9518
  source 1..120: mol_type = other DNA

SEQ ID NO: 62234 - DNA, 120 bp, synthetic construct; identical to SEQ ID NO: 32280
  source 1..120: mol_type = other DNA

SEQ ID NO: 62235 - DNA, 120 bp, synthetic construct; identical to SEQ ID NO: 32281
  source 1..120: mol_type = other DNA

SEQ ID NO: 62236 - DNA, 120 bp, synthetic construct; identical to SEQ ID NO: 32282
  source 1..120: mol_type = other DNA

SEQ ID NO: 62237 - DNA, 120 bp, synthetic construct; identical to SEQ ID NO: 9519
  source 1..120: mol_type = other DNA

SEQ ID NO: 62238 - DNA, 120 bp, synthetic construct; identical to SEQ ID NO: 32284
  source 1..120: mol_type = other DNA

SEQ ID NO: 62239 - DNA, 120 bp, synthetic construct; identical to SEQ ID NO: 32285
  source 1..120: mol_type = other DNA

SEQ ID NO: 62240 - DNA, 120 bp, synthetic construct; identical to SEQ ID NO: 32286
  source 1..120: mol_type = other DNA

SEQ ID NO: 62241 - DNA, 120 bp, synthetic construct; identical to SEQ ID NO: 9520
  source 1..120: mol_type = other DNA

SEQ ID NO: 62242 - DNA, 120 bp, synthetic construct; identical to SEQ ID NO: 32288
  source 1..120: mol_type = other DNA

SEQ ID NO: 62243 - DNA, 120 bp, synthetic construct; identical to SEQ ID NO: 32289
  source 1..120: mol_type = other DNA

SEQ ID NO: 62244 - DNA, 120 bp, synthetic construct; identical to SEQ ID NO: 32290
  source 1..120: mol_type = other DNA

SEQ ID NO: 62245 - DNA, 120 bp, synthetic construct; identical to SEQ ID NO: 32291
  source 1..120: mol_type = other DNA

SEQ ID NO: 62246 - DNA, 120 bp, synthetic construct; identical to SEQ ID NO: 9521
  source 1..120: mol_type = other DNA

SEQ ID NO: 62247 - DNA, 120 bp, synthetic construct; identical to SEQ ID NO: 32293
  source 1..120: mol_type = other DNA

SEQ ID NO: 62248 - DNA, 120 bp, synthetic construct; identical to SEQ ID NO: 32294
  source 1..120: mol_type = other DNA

SEQ ID NO: 62249 - DNA, 120 bp, synthetic construct; identical to SEQ ID NO: 32295
  source 1..120: mol_type = other DNA

SEQ ID NO: 62250 - DNA, 120 bp, synthetic construct; identical to SEQ ID NO: 9522
  source 1..120: mol_type = other DNA

SEQ ID NO: 62251 - DNA, 120 bp, synthetic construct; identical to SEQ ID NO: 32297
  source 1..120: mol_type = other DNA

SEQ ID NO: 62252 - DNA, 120 bp, synthetic construct; identical to SEQ ID NO: 32298
  source 1..120: mol_type = other DNA

SEQ ID NO: 62253 - DNA, 120 bp, synthetic construct; identical to SEQ ID NO: 32299
  source 1..120: mol_type = other DNA

SEQ ID NO: 62254 - DNA, 120 bp, synthetic construct; identical to SEQ ID NO: 9523
  source 1..120: mol_type = other DNA

SEQ ID NO: 62255 - DNA, 120 bp, synthetic construct; identical to SEQ ID NO: 32301
  source 1..120: mol_type = other DNA

SEQ ID NO: 62256 - DNA, 120 bp, synthetic construct; identical to SEQ ID NO: 32302
  source 1..120: mol_type = other DNA

SEQ ID NO: 62257 - DNA, 120 bp, synthetic construct; identical to SEQ ID NO: 32303
  source 1..120: mol_type = other DNA

SEQ ID NO: 62258 - DNA, 120 bp, synthetic construct; identical to SEQ ID NO: 9524
  source 1..120: mol_type = other DNA

SEQ ID NO: 62259 - DNA, 120 bp, synthetic construct; identical to SEQ ID NO: 32305
  source 1..120: mol_type = other DNA

SEQ ID NO: 62260 - DNA, 120 bp, synthetic construct; identical to SEQ ID NO: 32306
  source 1..120: mol_type = other DNA

SEQ ID NO: 62261 - DNA, 120 bp, synthetic construct; identical to SEQ ID NO: 9525
  source 1..120: mol_type = other DNA

SEQ ID NO: 62262 - DNA, 120 bp, synthetic construct; identical to SEQ ID NO: 32308
  source 1..120: mol_type = other DNA

SEQ ID NO: 62263 - DNA, 120 bp, synthetic construct; identical to SEQ ID NO: 32309
  source 1..120: mol_type = other DNA

SEQ ID NO: 62264 - DNA, 120 bp, synthetic construct; identical to SEQ ID NO: 32310
  source 1..120: mol_type = other DNA

SEQ ID NO: 62265 - DNA, 120 bp, synthetic construct; identical to SEQ ID NO: 9526
  source 1..120: mol_type = other DNA

SEQ ID NO: 62266 - DNA, 120 bp, synthetic construct; identical to SEQ ID NO: 32312
  source 1..120: mol_type = other DNA

SEQ ID NO: 62267 - DNA, 120 bp, synthetic construct; identical to SEQ ID NO: 32313
  source 1..120: mol_type = other DNA

SEQ ID NO: 62268 - DNA, 120 bp, synthetic construct; identical to SEQ ID NO: 32314
  source 1..120: mol_type = other DNA

SEQ ID NO: 62269 - DNA, 120 bp, synthetic construct; identical to SEQ ID NO: 32315
  source 1..120: mol_type = other DNA

SEQ ID NO: 62270 - DNA, 120 bp, synthetic construct; identical to SEQ ID NO: 9527
  source 1..120: mol_type = other DNA

SEQ ID NO: 62271 - DNA, 120 bp, synthetic construct; identical to SEQ ID NO: 32317
  source 1..120: mol_type = other DNA

SEQ ID NO: 62272 - DNA, 120 bp, synthetic construct; identical to SEQ ID NO: 32318
  source 1..120: mol_type = other DNA

SEQ ID NO: 62273 - DNA, 120 bp, synthetic construct; identical to SEQ ID NO: 9528
  source 1..120: mol_type = other DNA

SEQ ID NO: 62274 - DNA, 120 bp, synthetic construct; identical to SEQ ID NO: 32320
  source 1..120: mol_type = other DNA

SEQ ID NO: 62275 - DNA, 120 bp, synthetic construct; identical to SEQ ID NO: 32321
  source 1..120: mol_type = other DNA

SEQ ID NO: 62276 - DNA, 120 bp, synthetic construct; identical to SEQ ID NO: 32322
  source 1..120: mol_type = other DNA

SEQ ID NO: 62277 - DNA, 120 bp, synthetic construct; identical to SEQ ID NO: 9529
  source 1..120: mol_type = other DNA

SEQ ID NO: 62278 - DNA, 120 bp, synthetic construct; identical to SEQ ID NO: 32324
  source 1..120: mol_type = other DNA

SEQ ID NO: 62279 - DNA, 120 bp, synthetic construct; identical to SEQ ID NO: 32325
  source 1..120: mol_type = other DNA

SEQ ID NO: 62280 - DNA, 120 bp, synthetic construct; identical to SEQ ID NO: 32326
  source 1..120: mol_type = other DNA

SEQ ID NO: 62281 - DNA, 120 bp, synthetic construct; identical to SEQ ID NO: 32327
  source 1..120: mol_type = other DNA

SEQ ID NO: 62282 - DNA, 120 bp, synthetic construct; identical to SEQ ID NO: 9530
  source 1..120: mol_type = other DNA

SEQ ID NO: 62283 - DNA, 120 bp, synthetic construct; identical to SEQ ID NO: 32329
  source 1..120: mol_type = other DNA

SEQ ID NO: 62284 - DNA, 120 bp, synthetic construct; identical to SEQ ID NO: 32330
  source 1..120: mol_type = other DNA

SEQ ID NO: 62285 - DNA, 120 bp, synthetic construct; identical to SEQ ID NO: 32331
  source 1..120: mol_type = other DNA

SEQ ID NO: 62286 - DNA, 120 bp, synthetic construct; identical to SEQ ID NO: 9531
  source 1..120: mol_type = other DNA

SEQ ID NO: 62287 - DNA, 120 bp, synthetic construct; identical to SEQ ID NO: 32333
  source 1..120: mol_type = other DNA

SEQ ID NO: 62288 - DNA, 120 bp, synthetic construct; identical to SEQ ID NO: 32334
  source 1..120: mol_type = other DNA

SEQ ID NO: 62289 - DNA, 120 bp, synthetic construct; identical to SEQ ID NO: 9532
  source 1..120: mol_type = other DNA

SEQ ID NO: 62290 - DNA, 120 bp, synthetic construct; identical to SEQ ID NO: 32336
  source 1..120: mol_type = other DNA

SEQ ID NO: 62291 - DNA, 120 bp, synthetic construct; identical to SEQ ID NO: 32337
  source 1..120: mol_type = other DNA

SEQ ID NO: 62292 - DNA, 120 bp, synthetic construct; identical to SEQ ID NO: 32338
  source 1..120: mol_type = other DNA

SEQ ID NO: 62293 - DNA, 120 bp, synthetic construct; identical to SEQ ID NO: 9533
  source 1..120: mol_type = other DNA

SEQ ID NO: 62294 - DNA, 120 bp, synthetic construct; identical to SEQ ID NO: 32340
  source 1..120: mol_type = other DNA

SEQ ID NO: 62295 - DNA, 120 bp, synthetic construct; identical to SEQ ID NO: 32341
  source 1..120: mol_type = other DNA

SEQ ID NO: 62296 - DNA, 120 bp, synthetic construct; identical to SEQ ID NO: 32342
  source 1..120: mol_type = other DNA

SEQ ID NO: 62297 - DNA, 120 bp, synthetic construct; identical to SEQ ID NO: 9534
  source 1..120: mol_type = other DNA

SEQ ID NO: 62298 - DNA, 120 bp, synthetic construct; identical to SEQ ID NO: 32344
  source 1..120: mol_type = other DNA

SEQ ID NO: 62299 - DNA, 120 bp, synthetic construct; identical to SEQ ID NO: 32345
  source 1..120: mol_type = other DNA

SEQ ID NO: 62300 - DNA, 120 bp, synthetic construct; identical to SEQ ID NO: 32346
  source 1..120: mol_type = other DNA

SEQ ID NO: 62301 - DNA, 120 bp, synthetic construct; identical to SEQ ID NO: 9535
  source 1..120: mol_type = other DNA

SEQ ID NO: 62302 - DNA, 120 bp, synthetic construct; identical to SEQ ID NO: 32348
  source 1..120: mol_type = other DNA

SEQ ID NO: 62303 - DNA, 120 bp, synthetic construct; identical to SEQ ID NO: 32349
  source 1..120: mol_type = other DNA

SEQ ID NO: 62304 - DNA, 120 bp, synthetic construct; identical to SEQ ID NO: 32350
  source 1..120: mol_type = other DNA

SEQ ID NO: 62305 - DNA, 120 bp, synthetic construct; identical to SEQ ID NO: 32351
  source 1..120: mol_type = other DNA

SEQ ID NO: 62306 - DNA, 120 bp, synthetic construct; identical to SEQ ID NO: 9536
  source 1..120: mol_type = other DNA

SEQ ID NO: 62307 - DNA, 120 bp, synthetic construct; identical to SEQ ID NO: 32353
  source 1..120: mol_type = other DNA

SEQ ID NO: 62308 - DNA, 120 bp, synthetic construct; identical to SEQ ID NO: 32354
  source 1..120: mol_type = other DNA

SEQ ID NO: 62309 - DNA, 120 bp, synthetic construct; identical to SEQ ID NO: 32355
  source 1..120: mol_type = other DNA

SEQ ID NO: 62310 - DNA, 120 bp, synthetic construct; identical to SEQ ID NO: 32356
  source 1..120: mol_type = other DNA

SEQ ID NO: 62311 - DNA, 120 bp, synthetic construct; identical to SEQ ID NO: 9537
  source 1..120: mol_type = other DNA

SEQ ID NO: 62312 - DNA, 120 bp, synthetic construct; identical to SEQ ID NO: 32358
  source 1..120: mol_type = other DNA

SEQ ID NO: 62313 - DNA, 120 bp, synthetic construct; identical to SEQ ID NO: 32359
  source 1..120: mol_type = other DNA

SEQ ID NO: 62314 - DNA, 120 bp, synthetic construct; identical to SEQ ID NO: 9538
  source 1..120: mol_type = other DNA

SEQ ID NO: 62315 - DNA, 120 bp, synthetic construct; identical to SEQ ID NO: 32361
  source 1..120: mol_type = other DNA

SEQ ID NO: 62316 - DNA, 120 bp, synthetic construct; identical to SEQ ID NO: 32362
  source 1..120: mol_type = other DNA

SEQ ID NO: 62317 - DNA, 120 bp, synthetic construct; identical to SEQ ID NO: 32363
  source 1..120: mol_type = other DNA

SEQ ID NO: 62318 - DNA, 120 bp, synthetic construct; identical to SEQ ID NO: 9539
  source 1..120: mol_type = other DNA

SEQ ID NO: 62319 - DNA, 120 bp, synthetic construct; identical to SEQ ID NO: 32365
  source 1..120: mol_type = other DNA

SEQ ID NO: 62320 - DNA, 120 bp, synthetic construct; identical to SEQ ID NO: 32366
  source 1..120: mol_type = other DNA

SEQ ID NO: 62321 - DNA, 120 bp, synthetic construct; identical to SEQ ID NO: 32367
  source 1..120: mol_type = other DNA

SEQ ID NO: 62322 - DNA, 120 bp, synthetic construct; identical to SEQ ID NO: 9540
  source 1..120: mol_type = other DNA

SEQ ID NO: 62323 - DNA, 120 bp, synthetic construct; identical to SEQ ID NO: 32369
  source 1..120: mol_type = other DNA

SEQ ID NO: 62324 - DNA, 120 bp, synthetic construct; identical to SEQ ID NO: 32370
  source 1..120: mol_type = other DNA

SEQ ID NO: 62325 - DNA, 120 bp, synthetic construct; identical to SEQ ID NO: 32371
  source 1..120: mol_type = other DNA

SEQ ID NO: 62326 - DNA, 120 bp, synthetic construct; identical to SEQ ID NO: 9541
  source 1..120: mol_type = other DNA

SEQ ID NO: 62327 - DNA, 120 bp, synthetic construct; identical to SEQ ID NO: 32373
  source 1..120: mol_type = other DNA

SEQ ID NO: 62328 - DNA, 120 bp, synthetic construct; identical to SEQ ID NO: 32374
  source 1..120: mol_type = other DNA

SEQ ID NO: 62329 - DNA, 120 bp, synthetic construct; identical to SEQ ID NO: 32375
  source 1..120: mol_type = other DNA

SEQ ID NO: 62330 - DNA, 120 bp, synthetic construct; identical to SEQ ID NO: 9542
  source 1..120: mol_type = other DNA

SEQ ID NO: 62331 - DNA, 120 bp, synthetic construct; identical to SEQ ID NO: 32377
  source 1..120: mol_type = other DNA

SEQ ID NO: 62332 - DNA, 120 bp, synthetic construct; identical to SEQ ID NO: 32378
  source 1..120: mol_type = other DNA

SEQ ID NO: 62333 - DNA, 120 bp, synthetic construct; identical to SEQ ID NO: 32379
  source 1..120: mol_type = other DNA

SEQ ID NO: 62334 - DNA, 120 bp, synthetic construct; identical to SEQ ID NO: 32380
  source 1..120: mol_type = other DNA

SEQ ID NO: 62335 - DNA, 120 bp, synthetic construct; identical to SEQ ID NO: 9543
  source 1..120: mol_type = other DNA

SEQ ID NO: 62336 - DNA, 120 bp, synthetic construct; identical to SEQ ID NO: 32382
  source 1..120: mol_type = other DNA

SEQ ID NO: 62337 - DNA, 120 bp, synthetic construct; identical to SEQ ID NO: 32383
  source 1..120: mol_type = other DNA

SEQ ID NO: 62338 - DNA, 120 bp, synthetic construct; identical to SEQ ID NO: 32384
  source 1..120: mol_type = other DNA

SEQ ID NO: 62339 - DNA, 120 bp, synthetic construct; identical to SEQ ID NO: 32385
  source 1..120: mol_type = other DNA

SEQ ID NO: 62340 - DNA, 120 bp, synthetic construct; identical to SEQ ID NO: 9544
  source 1..120: mol_type = other DNA

SEQ ID NO: 62341 - DNA, 120 bp, synthetic construct; identical to SEQ ID NO: 32387
  source 1..120: mol_type = other DNA

SEQ ID NO: 62342 - DNA, 120 bp, synthetic construct; identical to SEQ ID NO: 32388
  source 1..120: mol_type = other DNA

SEQ ID NO: 62343 - DNA, 120 bp, synthetic construct; identical to SEQ ID NO: 32389
  source 1..120: mol_type = other DNA

SEQ ID NO: 62344 - DNA, 120 bp, synthetic construct; identical to SEQ ID NO: 9545
  source 1..120: mol_type = other DNA

SEQ ID NO: 62345 - DNA, 120 bp, synthetic construct; identical to SEQ ID NO: 32391
  source 1..120: mol_type = other DNA

SEQ ID NO: 62346 - DNA, 120 bp, synthetic construct; identical to SEQ ID NO: 32392
  source 1..120: mol_type = other DNA

SEQ ID NO: 62347 - DNA, 120 bp, synthetic construct; identical to SEQ ID NO: 9546
  source 1..120: mol_type = other DNA

SEQ ID NO: 62348 - DNA, 120 bp, synthetic construct; identical to SEQ ID NO: 32394
  source 1..120: mol_type = other DNA

SEQ ID NO: 62349 - DNA, 120 bp, synthetic construct; identical to SEQ ID NO: 32395
  source 1..120: mol_type = other DNA

SEQ ID NO: 62350 - DNA, 120 bp, synthetic construct; identical to SEQ ID NO: 32396
  source 1..120: mol_type = other DNA

SEQ ID NO: 62351 - DNA, 120 bp, synthetic construct; identical to SEQ ID NO: 9547
  source 1..120: mol_type = other DNA

SEQ ID NO: 62352 - DNA, 120 bp, synthetic construct; identical to SEQ ID NO: 32398
  source 1..120: mol_type = other DNA

SEQ ID NO: 62353 - DNA, 120 bp, synthetic construct; identical to SEQ ID NO: 32399
  source 1..120: mol_type = other DNA

SEQ ID NO: 62354 - DNA, 120 bp, synthetic construct; identical to SEQ ID NO: 32400
  source 1..120: mol_type = other DNA

SEQ ID NO: 62355 - DNA, 120 bp, synthetic construct; identical to SEQ ID NO: 9548
  source 1..120: mol_type = other DNA

SEQ ID NO: 62356 - DNA, 120 bp, synthetic construct; identical to SEQ ID NO: 32402
  source 1..120: mol_type = other DNA

SEQ ID NO: 62357 - DNA, 120 bp, synthetic construct; identical to SEQ ID NO: 32403
  source 1..120: mol_type = other DNA

SEQ ID NO: 62358 - DNA, 120 bp, synthetic construct; identical to SEQ ID NO: 32404
  source 1..120: mol_type = other DNA

SEQ ID NO: 62359 - DNA, 120 bp, synthetic construct; identical to SEQ ID NO: 9549
  source 1..120: mol_type = other DNA

SEQ ID NO: 62360 - DNA, 120 bp, synthetic construct; identical to SEQ ID NO: 32406
  source 1..120: mol_type = other DNA

SEQ ID NO: 62361 - DNA, 120 bp, synthetic construct; identical to SEQ ID NO: 32407
  source 1..120: mol_type = other DNA

SEQ ID NO: 62362 - DNA, 120 bp, synthetic construct; identical to SEQ ID NO: 32408
  source 1..120: mol_type = other DNA

SEQ ID NO: 62363 - DNA, 120 bp, synthetic construct; identical to SEQ ID NO: 9550
  source 1..120: mol_type = other DNA

SEQ ID NO: 62364 - DNA, 120 bp, synthetic construct; identical to SEQ ID NO: 32410
  source 1..120: mol_type = other DNA

SEQ ID NO: 62365 - DNA, 120 bp, synthetic construct; identical to SEQ ID NO: 32411
  source 1..120: mol_type = other DNA

SEQ ID NO: 62366 - DNA, 120 bp, synthetic construct; identical to SEQ ID NO: 32412
  source 1..120: mol_type = other DNA

SEQ ID NO: 62367 - DNA, 120 bp, synthetic construct; identical to SEQ ID NO: 32413
  source 1..120: mol_type = other DNA

SEQ ID NO: 62368 - DNA, 120 bp, synthetic construct; identical to SEQ ID NO: 9551
  source 1..120: mol_type = other DNA

SEQ ID NO: 62369 - DNA, 120 bp, synthetic construct; identical to SEQ ID NO: 32415
  source 1..120: mol_type = other DNA

SEQ ID NO: 62370 - DNA, 120 bp, synthetic construct; identical to SEQ ID NO: 32416
  source 1..120: mol_type = other DNA

SEQ ID NO: 62371 - DNA, 120 bp, synthetic construct; identical to SEQ ID NO: 32417
  source 1..120: mol_type = other DNA

SEQ ID NO: 62372 - DNA, 120 bp, synthetic construct; identical to SEQ ID NO: 9552
  source 1..120: mol_type = other DNA

SEQ ID NO: 62373 - DNA, 120 bp, synthetic construct; identical to SEQ ID NO: 32419
  source 1..120: mol_type = other DNA

SEQ ID NO: 62374 - DNA, 120 bp, synthetic construct; identical to SEQ ID NO: 32420
  source 1..120: mol_type = other DNA

SEQ ID NO: 62375 - DNA, 120 bp, synthetic construct; identical to SEQ ID NO: 32421
  source 1..120: mol_type = other DNA

SEQ ID NO: 62376 - DNA, 120 bp, synthetic construct; identical to SEQ ID NO: 9553
  source 1..120: mol_type = other DNA

SEQ ID NO: 62377 - DNA, 120 bp, synthetic construct; identical to SEQ ID NO: 32423
  source 1..120: mol_type = other DNA

SEQ ID NO: 62378 - DNA, 120 bp, synthetic construct; identical to SEQ ID NO: 32424
  source 1..120: mol_type = other DNA

SEQ ID NO: 62379 - DNA, 120 bp, synthetic construct; identical to SEQ ID NO: 32425
  source 1..120: mol_type = other DNA

SEQ ID NO: 62380 - DNA, 120 bp, synthetic construct; identical to SEQ ID NO: 9554
  source 1..120: mol_type = other DNA

SEQ ID NO: 62381 - DNA, 120 bp, synthetic construct; identical to SEQ ID NO: 32427
  source 1..120: mol_type = other DNA

SEQ ID NO: 62382 - DNA, 120 bp, synthetic construct; identical to SEQ ID NO: 32428
  source 1..120: mol_type = other DNA

SEQ ID NO: 62383 - DNA, 120 bp, synthetic construct; identical to SEQ ID NO: 2426
  source 1..120: mol_type = other DNA

SEQ ID NO: 62384 - DNA, 120 bp, synthetic construct; identical to SEQ ID NO: 32430
  source 1..120: mol_type = other DNA

SEQ ID NO: 62385 - DNA, 120 bp, synthetic construct; identical to SEQ ID NO: 32431
  source 1..120: mol_type = other DNA

SEQ ID NO: 62386 - DNA, 120 bp, synthetic construct; identical to SEQ ID NO: 32432
  source 1..120: mol_type = other DNA

SEQ ID NO: 62387 - DNA, 120 bp, synthetic construct; identical to SEQ ID NO: 32433
  source 1..120: mol_type = other DNA

SEQ ID NO: 62388 - DNA, 120 bp, synthetic construct; identical to SEQ ID NO: 9556
  source 1..120: mol_type = other DNA

SEQ ID NO: 62389 - DNA, 120 bp, synthetic construct; identical to SEQ ID NO: 32435
  source 1..120: mol_type = other DNA

SEQ ID NO: 62390 - DNA, 120 bp, synthetic construct; identical to SEQ ID NO: 32436
  source 1..120: mol_type = other DNA

SEQ ID NO: 62391 - DNA, 120 bp, synthetic construct; identical to SEQ ID NO: 9557
  source 1..120: mol_type = other DNA

SEQ ID NO: 62392 - DNA, 120 bp, synthetic construct; identical to SEQ ID NO: 32438
  source 1..120: mol_type = other DNA

SEQ ID NO: 62393 - DNA, 120 bp, synthetic construct; identical to SEQ ID NO: 32439
  source 1..120: mol_type = other DNA

SEQ ID NO: 62394 - DNA, 120 bp, synthetic construct; identical to SEQ ID NO: 32440
  source 1..120: mol_type = other DNA

SEQ ID NO: 62395 - DNA, 120 bp, synthetic construct; identical to SEQ ID NO: 9558
  source 1..120: mol_type = other DNA

SEQ ID NO: 62396 - DNA, 120 bp, synthetic construct; identical to SEQ ID NO: 32442
  source 1..120: mol_type = other DNA

SEQ ID NO: 62397 - DNA, 120 bp, synthetic construct; identical to SEQ ID NO: 32443
  source 1..120: mol_type = other DNA

SEQ ID NO: 62398 - DNA, 120 bp, synthetic construct; identical to SEQ ID NO: 32444
  source 1..120: mol_type = other DNA

SEQ ID NO: 62399 - DNA, 120 bp, synthetic construct; identical to SEQ ID NO: 32445
  source 1..120: mol_type = other DNA

SEQ ID NO: 62400 - DNA, 120 bp, synthetic construct; identical to SEQ ID NO: 9559
  source 1..120: mol_type = other DNA

SEQ ID NO: 62401 - DNA, 120 bp, synthetic construct; identical to SEQ ID NO: 32447
  source 1..120: mol_type = other DNA

SEQ ID NO: 62402 - DNA, 120 bp, synthetic construct; identical to SEQ ID NO: 32448
  source 1..120: mol_type = other DNA

SEQ ID NO: 62403 - DNA, 120 bp, synthetic construct; identical to SEQ ID NO: 32449
  source 1..120: mol_type = other DNA

SEQ ID NO: 62404 - DNA, 120 bp, synthetic construct; identical to SEQ ID NO: 9560
  source 1..120: mol_type = other DNA

SEQ ID NO: 62405 - DNA, 120 bp, synthetic construct; identical to SEQ ID NO: 32451
  source 1..120: mol_type = other DNA

SEQ ID NO: 62406 - DNA, 120 bp, synthetic construct; identical to SEQ ID NO: 32452
  source 1..120: mol_type = other DNA

SEQ ID NO: 62407 - DNA, 120 bp, synthetic construct; identical to SEQ ID NO: 32453
  source 1..120: mol_type = other DNA

SEQ ID NO: 62408 - DNA, 120 bp, synthetic construct; identical to SEQ ID NO: 9561
  source 1..120: mol_type = other DNA

SEQ ID NO: 62409 - DNA, 120 bp, synthetic construct; identical to SEQ ID NO: 32455
  source 1..120: mol_type = other DNA

SEQ ID NO: 62410 - DNA, 120 bp, synthetic construct; identical to SEQ ID NO: 32456
  source 1..120: mol_type = other DNA

SEQ ID NO: 62411 - DNA, 120 bp, synthetic construct; identical to SEQ ID NO: 9562
  source 1..120: mol_type = other DNA

SEQ ID NO: 62412 - DNA, 120 bp, synthetic construct; identical to SEQ ID NO: 32458
  source 1..120: mol_type = other DNA

SEQ ID NO: 62413 - DNA, 120 bp, synthetic construct; identical to SEQ ID NO: 32459
  source 1..120: mol_type = other DNA

SEQ ID NO: 62414 - DNA, 120 bp, synthetic construct; identical to SEQ ID NO: 32460
  source 1..120: mol_type = other DNA

SEQ ID NO: 62415 - DNA, 120 bp, synthetic construct; identical to SEQ ID NO: 32461
  source 1..120: mol_type = other DNA

SEQ ID NO: 62416 - DNA, 120 bp, synthetic construct; identical to SEQ ID NO: 9563
  source 1..120: mol_type = other DNA

SEQ ID NO: 62417 - DNA, 120 bp, synthetic construct; identical to SEQ ID NO: 32463
  source 1..120: mol_type = other DNA

SEQ ID NO: 62418 - DNA, 120 bp, synthetic construct; identical to SEQ ID NO: 32464
  source 1..120: mol_type = other DNA

SEQ ID NO: 62419 - DNA, 120 bp, synthetic construct; identical to SEQ ID NO: 32465
  source 1..120: mol_type = other DNA

SEQ ID NO: 62420 - DNA, 120 bp, synthetic construct; identical to SEQ ID NO: 9564
  source 1..120: mol_type = other DNA

SEQ ID NO: 62421 - DNA, 120 bp, synthetic construct; identical to SEQ ID NO: 32467
  source 1..120: mol_type = other DNA

SEQ ID NO: 62422 - DNA, 120 bp, synthetic construct; identical to SEQ ID NO: 32468
  source 1..120: mol_type = other DNA

SEQ ID NO: 62423 - DNA, 120 bp, synthetic construct; identical to SEQ ID NO: 32469
  source 1..120: mol_type = other DNA

SEQ ID NO: 62424 - DNA, 120 bp, synthetic construct; identical to SEQ ID NO: 9565
  source 1..120: mol_type = other DNA

SEQ ID NO: 62425 - DNA, 120 bp, synthetic construct; identical to SEQ ID NO: 32471
  source 1..120: mol_type = other DNA

SEQ ID NO: 62426 - DNA, 120 bp, synthetic construct; identical to SEQ ID NO: 32472
  source 1..120: mol_type = other DNA

SEQ ID NO: 62427 - DNA, 120 bp, synthetic construct; identical to SEQ ID NO: 32473
  source 1..120: mol_type = other DNA

SEQ ID NO: 62428 - DNA, 120 bp, synthetic construct; identical to SEQ ID NO: 9566
  source 1..120: mol_type = other DNA

SEQ ID NO: 62429 - DNA, 120 bp, synthetic construct; identical to SEQ ID NO: 32475
  source 1..120: mol_type = other DNA

SEQ ID NO: 62430 - DNA, 120 bp, synthetic construct; identical to SEQ ID NO: 32476
  source 1..120: mol_type = other DNA

SEQ ID NO: 62431 - DNA, 120 bp, synthetic construct; identical to SEQ ID NO: 9567
  source 1..120: mol_type = other DNA

SEQ ID NO: 62432 - DNA, 120 bp, synthetic construct; identical to SEQ ID NO: 32478
  source 1..120: mol_type = other DNA

SEQ ID NO: 62433 - DNA, 120 bp, synthetic construct; identical to SEQ ID NO: 32479
  source 1..120: mol_type = other DNA

SEQ ID NO: 62434 - DNA, 120 bp, synthetic construct; identical to SEQ ID NO: 32480
  source 1..120: mol_type = other DNA

SEQ ID NO: 62435 - DNA, 120 bp, synthetic construct; identical to SEQ ID NO: 9568
  source 1..120: mol_type = other DNA

SEQ ID NO: 62436 - DNA, 120 bp, synthetic construct; identical to SEQ ID NO: 32482
  source 1..120: mol_type = other DNA

SEQ ID NO: 62437 - DNA, 120 bp, synthetic construct; identical to SEQ ID NO: 32483
  source 1..120: mol_type = other DNA

SEQ ID NO: 62438 - DNA, 120 bp, synthetic construct; identical to SEQ ID NO: 32484
  source 1..120: mol_type = other DNA

SEQ ID NO: 62439 - DNA, 120 bp, synthetic construct; identical to SEQ ID NO: 9569
  source 1..120: mol_type = other DNA

SEQ ID NO: 62440 - DNA, 120 bp, synthetic construct; identical to SEQ ID NO: 32486
  source 1..120: mol_type = other DNA

SEQ ID NO: 62441 - DNA, 120 bp, synthetic construct; identical to SEQ ID NO: 32487
  source 1..120: mol_type = other DNA

SEQ ID NO: 62442 - DNA, 120 bp, synthetic construct; identical to SEQ ID NO: 32488
  source 1..120: mol_type = other DNA

SEQ ID NO: 62443 - DNA, 120 bp, synthetic construct; identical to SEQ ID NO: 32489
  source 1..120: mol_type = other DNA

SEQ ID NO: 62444 - DNA, 120 bp, synthetic construct; identical to SEQ ID NO: 9570
  source 1..120: mol_type = other DNA

SEQ ID NO: 62445 - DNA, 120 bp, synthetic construct; identical to SEQ ID NO: 32491
  source 1..120: mol_type = other DNA

SEQ ID NO: 62446 - DNA, 120 bp, synthetic construct; identical to SEQ ID NO: 32492
  source 1..120: mol_type = other DNA

SEQ ID NO: 62447 - DNA, 120 bp, synthetic construct; identical to SEQ ID NO: 9571
  source 1..120: mol_type = other DNA

SEQ ID NO: 62448 - DNA, 120 bp, synthetic construct; identical to SEQ ID NO: 32494
  source 1..120: mol_type = other DNA

SEQ ID NO: 62449 - DNA, 120 bp, synthetic construct; identical to SEQ ID NO: 32495
  source 1..120: mol_type = other DNA

SEQ ID NO: 62450 - DNA, 120 bp, synthetic construct; identical to SEQ ID NO: 32496
  source 1..120: mol_type = other DNA

SEQ ID NO: 62451 - DNA, 120 bp, synthetic construct; identical to SEQ ID NO: 9572
  source 1..120: mol_type = other DNA

SEQ ID NO: 62452 - DNA, 120 bp, synthetic construct; identical to SEQ ID NO: 32498
  source 1..120: mol_type = other DNA

SEQ ID NO: 62453 - DNA, 120 bp, synthetic construct; identical to SEQ ID NO: 32499
  source 1..120: mol_type = other DNA

SEQ ID NO: 62454 - DNA, 120 bp, synthetic construct; identical to SEQ ID NO: 32500
  source 1..120: mol_type = other DNA

SEQ ID NO: 62455 - DNA, 120 bp, synthetic construct; identical to SEQ ID NO: 9573
  source 1..120: mol_type = other DNA

SEQ ID NO: 62456 - DNA, 120 bp, synthetic construct; identical to SEQ ID NO: 32502
  source 1..120: mol_type = other DNA

SEQ ID NO: 62457 - DNA, 120 bp, synthetic construct; identical to SEQ ID NO: 32503
  source 1..120: mol_type = other DNA

SEQ ID NO: 62458 - DNA, 120 bp, synthetic construct; identical to SEQ ID NO: 32504
  source 1..120: mol_type = other DNA

SEQ ID NO: 62459 - DNA, 120 bp, synthetic construct; identical to SEQ ID NO: 32505
  source 1..120: mol_type = other DNA

SEQ ID NO: 62460 - DNA, 120 bp, synthetic construct; identical to SEQ ID NO: 9574
  source 1..120: mol_type = other DNA

SEQ ID NO: 62461 - DNA, 120 bp, synthetic construct; identical to SEQ ID NO: 32507
  source 1..120: mol_type = other DNA

SEQ ID NO: 62462 - DNA, 120 bp, synthetic construct; identical to SEQ ID NO: 32508
  source 1..120: mol_type = other DNA

SEQ ID NO: 62463 - DNA, 120 bp, synthetic construct; identical to SEQ ID NO: 32509
  source 1..120: mol_type = other DNA

SEQ ID NO: 62464 - DNA, 120 bp, synthetic construct; identical to SEQ ID NO: 9575
  source 1..120: mol_type = other DNA

SEQ ID NO: 62465 - DNA, 120 bp, synthetic construct; identical to SEQ ID NO: 32511
  source 1..120: mol_type = other DNA

SEQ ID NO: 62466 - DNA, 120 bp, synthetic construct; identical to SEQ ID NO: 32512
  source 1..120: mol_type = other DNA

SEQ ID NO: 62467 - DNA, 120 bp, synthetic construct; identical to SEQ ID NO: 9576
  source 1..120: mol_type = other DNA

SEQ ID NO: 62468 - DNA, 120 bp, synthetic construct; identical to SEQ ID NO: 32514
  source 1..120: mol_type = other DNA

SEQ ID NO: 62469 - DNA, 120 bp, synthetic construct; identical to SEQ ID NO: 32515
  source 1..120: mol_type = other DNA

SEQ ID NO: 62470 - DNA, 120 bp, synthetic construct; identical to SEQ ID NO: 32516
  source 1..120: mol_type = other DNA

SEQ ID NO: 62471 - DNA, 120 bp, synthetic construct; identical to SEQ ID NO: 9577
  source 1..120: mol_type = other DNA

SEQ ID NO: 62472 - DNA, 120 bp, synthetic construct; identical to SEQ ID NO: 32518
  source 1..120: mol_type = other DNA

SEQ ID NO: 62473 - DNA, 120 bp, synthetic construct; identical to SEQ ID NO: 32519
  source 1..120: mol_type = other DNA

SEQ ID NO: 62474 - DNA, 120 bp, synthetic construct; identical to SEQ ID NO: 32520
  source 1..120: mol_type = other DNA

SEQ ID NO: 62475 - DNA, 120 bp, synthetic construct; identical to SEQ ID NO: 9578
  source 1..120: mol_type = other DNA

SEQ ID NO: 62476 - DNA, 120 bp, synthetic construct; identical to SEQ ID NO: 32522
  source 1..120: mol_type = other DNA

SEQ ID NO: 62477 - DNA, 120 bp, synthetic construct; identical to SEQ ID NO: 32523
  source 1..120: mol_type = other DNA

SEQ ID NO: 62478 - DNA, 120 bp, synthetic construct; identical to SEQ ID NO: 32524
  source 1..120: mol_type = other DNA

SEQ ID NO: 62479 - DNA, 120 bp, synthetic construct; identical to SEQ ID NO: 9579
  source 1..120: mol_type = other DNA

SEQ ID NO: 62480 - DNA, 120 bp, synthetic construct; identical to SEQ ID NO: 32526
  source 1..120: mol_type = other DNA

SEQ ID NO: 62481 - DNA, 120 bp, synthetic construct; identical to SEQ ID NO: 32527
  source 1..120: mol_type = other DNA

SEQ ID NO: 62482 - DNA, 120 bp, synthetic construct; identical to SEQ ID NO: 32528
  source 1..120: mol_type = other DNA

SEQ ID NO: 62483 - DNA, 120 bp, synthetic construct; identical to SEQ ID NO: 32529
  source 1..120: mol_type = other DNA

SEQ ID NO: 62484 - DNA, 120 bp, synthetic construct; identical to SEQ ID NO: 9580
  source 1..120: mol_type = other DNA

SEQ ID NO: 62485 - DNA, 120 bp, synthetic construct; identical to SEQ ID NO: 32531
  source 1..120: mol_type = other DNA

SEQ ID NO: 62486 - DNA, 120 bp, synthetic construct; identical to SEQ ID NO: 32532
  source 1..120: mol_type = other DNA

SEQ ID NO: 62487 - DNA, 120 bp, synthetic construct; identical to SEQ ID NO: 9581
  source 1..120: mol_type = other DNA

SEQ ID NO: 62488 - DNA, 120 bp, synthetic construct; identical to SEQ ID NO: 32534
  source 1..120: mol_type = other DNA

SEQ ID NO: 62489 - DNA, 120 bp, synthetic construct; identical to SEQ ID NO: 32535
  source 1..120: mol_type = other DNA

SEQ ID NO: 62490 - DNA, 120 bp, synthetic construct; identical to SEQ ID NO: 32536
  source 1..120: mol_type = other DNA

SEQ ID NO: 62491 - DNA, 120 bp, synthetic construct; identical to SEQ ID NO: 9582
  source 1..120: mol_type = other DNA

SEQ ID NO: 62492 - DNA, 120 bp, synthetic construct; identical to SEQ ID NO: 32538
  source 1..120: mol_type = other DNA

SEQ ID NO: 62493 - DNA, 120 bp, synthetic construct; identical to SEQ ID NO: 32539
  source 1..120: mol_type = other DNA

SEQ ID NO: 62494 - DNA, 120 bp, synthetic construct; identical to SEQ ID NO: 32540
  source 1..120: mol_type = other DNA

SEQ ID NO: 62495 - DNA, 120 bp, synthetic construct; identical to SEQ ID NO: 9583
  source 1..120: mol_type = other DNA

SEQ ID NO: 62496 - DNA, 120 bp, synthetic construct; identical to SEQ ID NO: 32542
  source 1..120: mol_type = other DNA

SEQ ID NO: 62497 - DNA, 120 bp, synthetic construct; identical to SEQ ID NO: 32543
  source 1..120: mol_type = other DNA

SEQ ID NO: 62498 - DNA, 120 bp, synthetic construct; identical to SEQ ID NO: 32544
  source 1..120: mol_type = other DNA

SEQ ID NO: 62499 - DNA, 120 bp, synthetic construct; identical to SEQ ID NO: 9584
  source 1..120: mol_type = other DNA

SEQ ID NO: 62500 - DNA, 120 bp, synthetic construct; identical to SEQ ID NO: 32546
  source 1..120: mol_type = other DNA

SEQ ID NO: 62501 - DNA, 120 bp, synthetic construct; identical to SEQ ID NO: 32547
  source 1..120: mol_type = other DNA

SEQ ID NO: 62502 - DNA, 120 bp, synthetic construct; identical to SEQ ID NO: 32548
  source 1..120: mol_type = other DNA

SEQ ID NO: 62503 - DNA, 120 bp, synthetic construct; identical to SEQ ID NO: 32549
  source 1..120: mol_type = other DNA

SEQ ID NO: 62504 - DNA, 120 bp, synthetic construct; identical to SEQ ID NO: 9585
  source 1..120: mol_type = other DNA

SEQ ID NO: 62505 - DNA, 120 bp, synthetic construct; identical to SEQ ID NO: 32551
  source 1..120: mol_type = other DNA

SEQ ID NO: 62506 - DNA, 120 bp, synthetic construct; identical to SEQ ID NO: 32552
  source 1..120: mol_type = other DNA

SEQ ID NO: 62507 - DNA, 120 bp, synthetic construct; identical to SEQ ID NO: 9586
  source 1..120: mol_type = other DNA

SEQ ID NO: 62508 - DNA, 120 bp, synthetic construct; identical to SEQ ID NO: 32554
  source 1..120: mol_type = other DNA

SEQ ID NO: 62509 - DNA, 120 bp, synthetic construct; identical to SEQ ID NO: 32555
  source 1..120: mol_type = other DNA

SEQ ID NO: 62510 - DNA, 120 bp, synthetic construct; identical to SEQ ID NO: 32556
  source 1..120: mol_type = other DNA

SEQ ID NO: 62511 - DNA, 120 bp, synthetic construct; identical to SEQ ID NO: 9587
  source 1..120: mol_type = other DNA

SEQ ID NO: 62512 - DNA, 120 bp, synthetic construct; identical to SEQ ID NO: 32558
  source 1..120: mol_type = other DNA

SEQ ID NO: 62513 - DNA, 120 bp, synthetic construct; identical to SEQ ID NO: 32559
  source 1..120: mol_type = other DNA

SEQ ID NO: 62514 - DNA, 120 bp, synthetic construct; identical to SEQ ID NO: 32560
  source 1..120: mol_type = other DNA

SEQ ID NO: 62515 - DNA, 120 bp, synthetic construct; identical to SEQ ID NO: 32561
  source 1..120: mol_type = other DNA

SEQ ID NO: 62516 - DNA, 120 bp, synthetic construct; identical to SEQ ID NO: 9588
  source 1..120: mol_type = other DNA

SEQ ID NO: 62517 - DNA, 120 bp, synthetic construct; identical to SEQ ID NO: 32563
  source 1..120: mol_type = other DNA

SEQ ID NO: 62518 - DNA, 120 bp, synthetic construct; identical to SEQ ID NO: 32564
  source 1..120: mol_type = other DNA

SEQ ID NO: 62519 - DNA, 120 bp, synthetic construct; identical to SEQ ID NO: 32565
  source 1..120: mol_type = other DNA

SEQ ID NO: 62520 - DNA, 120 bp, synthetic construct; identical to SEQ ID NO: 9589
  source 1..120: mol_type = other DNA

SEQ ID NO: 62521 - DNA, 120 bp, synthetic construct; identical to SEQ ID NO: 32567
  source 1..120: mol_type = other DNA

SEQ ID NO: 62522 - DNA, 120 bp, synthetic construct; identical to SEQ ID NO: 32568
  source 1..120: mol_type = other DNA

SEQ ID NO: 62523 - DNA, 120 bp, synthetic construct; identical to SEQ ID NO: 32569
  source 1..120: mol_type = other DNA

SEQ ID NO: 62524 - DNA, 120 bp, synthetic construct; identical to SEQ ID NO: 9590
  source 1..120: mol_type = other DNA

SEQ ID NO: 62525 - DNA, 120 bp, synthetic construct; identical to SEQ ID NO: 32571
  source 1..120: mol_type = other DNA

SEQ ID NO: 62526 - DNA, 120 bp, synthetic construct; identical to SEQ ID NO: 32572
  source 1..120: mol_type = other DNA

SEQ ID NO: 62527 - DNA, 120 bp, synthetic construct; identical to SEQ ID NO: 32573
  source 1..120: mol_type = other DNA

SEQ ID NO: 62528 - DNA, 120 bp, synthetic construct; identical to SEQ ID NO: 9591
  source 1..120: mol_type = other DNA

SEQ ID NO: 62529 - DNA, 120 bp, synthetic construct; identical to SEQ ID NO: 32575
  source 1..120: mol_type = other DNA

SEQ ID NO: 62530 - DNA, 120 bp, synthetic construct; identical to SEQ ID NO: 32576
  source 1..120: mol_type = other DNA

SEQ ID NO: 62531 - DNA, 120 bp, synthetic construct; identical to SEQ ID NO: 9592
  source 1..120: mol_type = other DNA

SEQ ID NO: 62532 - DNA, 120 bp, synthetic construct; identical to SEQ ID NO: 32578
  source 1..120: mol_type = other DNA

SEQ ID NO: 62533 - DNA, 120 bp, synthetic construct; identical to SEQ ID NO: 32579
  source 1..120: mol_type = other DNA

SEQ ID NO: 62534 - DNA, 120 bp, synthetic construct; identical to SEQ ID NO: 32580
  source 1..120: mol_type = other DNA

SEQ ID NO: 62535 - DNA, 120 bp, synthetic construct; identical to SEQ ID NO: 9593
  source 1..120: mol_type = other DNA

SEQ ID NO: 62536 - DNA, 120 bp, synthetic construct; identical to SEQ ID NO: 32582
  source 1..120: mol_type = other DNA

SEQ ID NO: 62537 - DNA, 120 bp, synthetic construct; identical to SEQ ID NO: 32583
  source 1..120: mol_type = other DNA

SEQ ID NO: 62538 - DNA, 120 bp, synthetic construct; identical to SEQ ID NO: 32584
  source 1..120: mol_type = other DNA

SEQ ID NO: 62539 - DNA, 120 bp, synthetic construct; identical to SEQ ID NO: 9594
  source 1..120: mol_type = other DNA

SEQ ID NO: 62540 - DNA, 120 bp, synthetic construct; identical to SEQ ID NO: 32586
  source 1..120: mol_type = other DNA

SEQ ID NO: 62541 - DNA, 120 bp, synthetic construct; identical to SEQ ID NO: 32587
  source 1..120: mol_type = other DNA

SEQ ID NO: 62542 - DNA, 120 bp, synthetic construct; identical to SEQ ID NO: 32588
  source 1..120: mol_type = other DNA

SEQ ID NO: 62543 - DNA, 120 bp, synthetic construct; identical to SEQ ID NO: 9595
  source 1..120: mol_type = other DNA

SEQ ID NO: 62544 - DNA, 120 bp, synthetic construct; identical to SEQ ID NO: 32590
  source 1..120: mol_type = other DNA

SEQ ID NO: 62545 - DNA, 120 bp, synthetic construct; identical to SEQ ID NO: 32591
  source 1..120: mol_type = other DNA

SEQ ID NO: 62546 - DNA, 120 bp, synthetic construct; identical to SEQ ID NO: 32592
  source 1..120: mol_type = other DNA

SEQ ID NO: 62547 - DNA, 120 bp, synthetic construct; identical to SEQ ID NO: 9596
  source 1..120: mol_type = other DNA

SEQ ID NO: 62548 - DNA, 120 bp, synthetic construct; identical to SEQ ID NO: 32594
  source 1..120: mol_type = other DNA

SEQ ID NO: 62549 - DNA, 120 bp, synthetic construct; identical to SEQ ID NO: 32595
  source 1..120: mol_type = other DNA

SEQ ID NO: 62550 - DNA, 120 bp, synthetic construct; identical to SEQ ID NO: 32596
  source 1..120: mol_type = other DNA

SEQ ID NO: 62551 - DNA, 120 bp, synthetic construct; identical to SEQ ID NO: 32597
  source 1..120: mol_type = other DNA

SEQ ID NO: 62552 - DNA, 120 bp, synthetic construct; identical to SEQ ID NO: 9597
  source 1..120: mol_type = other DNA

SEQ ID NO: 62553 - DNA, 120 bp, synthetic construct; identical to SEQ ID NO: 32599
  source 1..120: mol_type = other DNA

SEQ ID NO: 62554 - DNA, 120 bp, synthetic construct; identical to SEQ ID NO: 32600
  source 1..120: mol_type = other DNA

SEQ ID NO: 62555 - DNA, 120 bp, synthetic construct; identical to SEQ ID NO: 32601
  source 1..120: mol_type = other DNA

SEQ ID NO: 62556 - DNA, 120 bp, synthetic construct; identical to SEQ ID NO: 9598
  source 1..120: mol_type = other DNA

SEQ ID NO: 62557 - DNA, 120 bp, synthetic construct; identical to SEQ ID NO: 32603
  source 1..120: mol_type = other DNA

SEQ ID NO: 62558 - DNA, 120 bp, synthetic construct; identical to SEQ ID NO: 32604
  source 1..120: mol_type = other DNA

SEQ ID NO: 62559 - DNA, 120 bp, synthetic construct; identical to SEQ ID NO: 32605
  source 1..120: mol_type = other DNA

SEQ ID NO: 62560 - DNA, 120 bp, synthetic construct; identical to SEQ ID NO: 9599
  source 1..120: mol_type = other DNA

SEQ ID NO: 62561 - DNA, 120 bp, synthetic construct; identical to SEQ ID NO: 32607
  source 1..120: mol_type = other DNA

SEQ ID NO: 62562 - DNA, 120 bp, synthetic construct; identical to SEQ ID NO: 32608
  source 1..120: mol_type = other DNA

SEQ ID NO: 62563 - DNA, 120 bp, synthetic construct; identical to SEQ ID NO: 32609
  source 1..120: mol_type = other DNA

SEQ ID NO: 62564 - DNA, 120 bp, synthetic construct; identical to SEQ ID NO: 9600
  source 1..120: mol_type = other DNA

SEQ ID NO: 62565 - DNA, 120 bp, synthetic construct; identical to SEQ ID NO: 32611
  source 1..120: mol_type = other DNA

SEQ ID NO: 62566 - DNA, 120 bp, synthetic construct; identical to SEQ ID NO: 32612
  source 1..120: mol_type = other DNA

SEQ ID NO: 62567 - DNA, 120 bp, synthetic construct; identical to SEQ ID NO: 32613
  source 1..120: mol_type = other DNA

SEQ ID NO: 62568 - DNA, 120 bp, synthetic construct; identical to SEQ ID NO: 32614
  source 1..120: mol_type = other DNA

SEQ ID NO: 62569 - DNA, 120 bp, synthetic construct; identical to SEQ ID NO: 9601
  source 1..120: mol_type = other DNA

SEQ ID NO: 62570 - DNA, 120 bp, synthetic construct; identical to SEQ ID NO: 32616
  source 1..120: mol_type = other DNA

SEQ ID NO: 62571 - DNA, 120 bp, synthetic construct; identical to SEQ ID NO: 32617
  source 1..120: mol_type = other DNA

SEQ ID NO: 62572 - DNA, 120 bp, synthetic construct; identical to SEQ ID NO: 9602
  source 1..120: mol_type = other DNA

SEQ ID NO: 62573 - DNA, 120 bp, synthetic construct; identical to SEQ ID NO: 32619
  source 1..120: mol_type = other DNA

SEQ ID NO: 62574 - DNA, 120 bp, synthetic construct; identical to SEQ ID NO: 32620
  source 1..120: mol_type = other DNA

SEQ ID NO: 62575 - DNA, 120 bp, synthetic construct; identical to SEQ ID NO: 32621
  source 1..120: mol_type = other DNA

SEQ ID NO: 62576 - DNA, 120 bp, synthetic construct; identical to SEQ ID NO: 32622
  source 1..120: mol_type = other DNA

SEQ ID NO: 62577 - DNA, 120 bp, synthetic construct; identical to SEQ ID NO: 9603
  source 1..120: mol_type = other DNA

SEQ ID NO: 62578 - DNA, 120 bp, synthetic construct; identical to SEQ ID NO: 32624
  source 1..120: mol_type = other DNA

SEQ ID NO: 62579 - DNA, 120 bp, synthetic construct; identical to SEQ ID NO: 32625
  source 1..120: mol_type = other DNA

SEQ ID NO: 62580 - DNA, 120 bp, synthetic construct; identical to SEQ ID NO: 9604
  source 1..120: mol_type = other DNA

SEQ ID NO: 62581 - DNA, 120 bp, synthetic construct; identical to SEQ ID NO: 32627
  source 1..120: mol_type = other DNA

SEQ ID NO: 62582 - DNA, 120 bp, synthetic construct; identical to SEQ ID NO: 32628
  source 1..120: mol_type = other DNA

SEQ ID NO: 62583 - DNA, 120 bp, synthetic construct; identical to SEQ ID NO: 32629
  source 1..120: mol_type = other DNA

SEQ ID NO: 62584 - DNA, 120 bp, synthetic construct; identical to SEQ ID NO: 9605
  source 1..120: mol_type = other DNA

SEQ ID NO: 62585 - DNA, 120 bp, synthetic construct; identical to SEQ ID NO: 32631
  source 1..120: mol_type = other DNA

SEQ ID NO: 62586 - DNA, 120 bp, synthetic construct; identical to SEQ ID NO: 32632
  source 1..120: mol_type = other DNA

SEQ ID NO: 62587 - DNA, 120 bp, synthetic construct; identical to SEQ ID NO: 32633
  source 1..120: mol_type = other DNA

SEQ ID NO: 62588 - DNA, 120 bp, synthetic construct; identical to SEQ ID NO: 9606
  source 1..120: mol_type = other DNA

SEQ ID NO: 62589 - DNA, 120 bp, synthetic construct; identical to SEQ ID NO: 32635
  source 1..120: mol_type = other DNA

SEQ ID NO: 62590 - DNA, 120 bp, synthetic construct; identical to SEQ ID NO: 32636
  source 1..120: mol_type = other DNA

SEQ ID NO: 62591 - DNA, 120 bp, synthetic construct; identical to SEQ ID NO: 32637
  source 1..120: mol_type = other DNA

SEQ ID NO: 62592 - DNA, 120 bp, synthetic construct; identical to SEQ ID NO: 32638
  source 1..120: mol_type = other DNA

SEQ ID NO: 62593 - DNA, 120 bp, synthetic construct; identical to SEQ ID NO: 9607
  source 1..120: mol_type = other DNA

SEQ ID NO: 62594 - DNA, 120 bp, synthetic construct; identical to SEQ ID NO: 32640
  source 1..120: mol_type = other DNA

SEQ ID NO: 62595 - DNA, 120 bp, synthetic construct; identical to SEQ ID NO: 32641
  source 1..120: mol_type = other DNA

SEQ ID NO: 62596 - DNA, 120 bp, synthetic construct; identical to SEQ ID NO: 9608
  source 1..120: mol_type = other DNA

SEQ ID NO: 62597 - DNA, 120 bp, synthetic construct; identical to SEQ ID NO: 32643
  source 1..120: mol_type = other DNA

SEQ ID NO: 62598 - DNA, 120 bp, synthetic construct; identical to SEQ ID NO: 32644
  source 1..120: mol_type = other DNA

SEQ ID NO: 62599 - DNA, 120 bp, synthetic construct; identical to SEQ ID NO: 32645
  source 1..120: mol_type = other DNA

SEQ ID NO: 62600 - DNA, 120 bp, synthetic construct; identical to SEQ ID NO: 9609
  source 1..120: mol_type = other DNA

SEQ ID NO: 62601 - DNA, 120 bp, synthetic construct; identical to SEQ ID NO: 32647
  source 1..120: mol_type = other DNA

SEQ ID NO: 62602 - DNA, 120 bp, synthetic construct; identical to SEQ ID NO: 32648
  source 1..120: mol_type = other DNA

SEQ ID NO: 62603 - DNA, 120 bp, synthetic construct; identical to SEQ ID NO: 32649
  source 1..120: mol_type = other DNA

SEQ ID NO: 62604 - DNA, 120 bp, synthetic construct; identical to SEQ ID NO: 9610
  source 1..120: mol_type = other DNA

SEQ ID NO: 62605 - DNA, 120 bp, synthetic construct; identical to SEQ ID NO: 32651
  source 1..120: mol_type = other DNA

SEQ ID NO: 62606 - DNA, 120 bp, synthetic construct; identical to SEQ ID NO: 32652
  source 1..120: mol_type = other DNA

SEQ ID NO: 62607 - DNA, 120 bp, synthetic construct; identical to SEQ ID NO: 32653
  source 1..120: mol_type = other DNA

SEQ ID NO: 62608 - DNA, 120 bp, synthetic construct; identical to SEQ ID NO: 9611
  source 1..120: mol_type = other DNA

SEQ ID NO: 62609 - DNA, 120 bp, synthetic construct; identical to SEQ ID NO: 32655
  source 1..120: mol_type = other DNA

SEQ ID NO: 62610 - DNA, 120 bp, synthetic construct; identical to SEQ ID NO: 32656
  source 1..120: mol_type = other DNA

SEQ ID NO: 62611 - DNA, 120 bp, synthetic construct; identical to SEQ ID NO: 32657
  source 1..120: mol_type = other DNA

SEQ ID NO: 62612 - DNA, 120 bp, synthetic construct; identical to SEQ ID NO: 9612
  source 1..120: mol_type = other DNA

SEQ ID NO: 62613 - DNA, 120 bp, synthetic construct; identical to SEQ ID NO: 32659
  source 1..120: mol_type = other DNA

SEQ ID NO: 62614 - DNA, 120 bp, synthetic construct; identical to SEQ ID NO: 32660
  source 1..120: mol_type = other DNA

SEQ ID NO: 62615 - DNA, 120 bp, synthetic construct; identical to SEQ ID NO: 32661
  source 1..120: mol_type = other DNA

SEQ ID NO: 62616 - DNA, 120 bp, synthetic construct; identical to SEQ ID NO: 32662
  source 1..120: mol_type = other DNA

SEQ ID NO: 62617 - DNA, 120 bp, synthetic construct; identical to SEQ ID NO: 9613
  source 1..120: mol_type = other DNA

SEQ ID NO: 62618 - DNA, 120 bp, synthetic construct; identical to SEQ ID NO: 32664
  source 1..120: mol_type = other DNA

SEQ ID NO: 62619 - DNA, 120 bp, synthetic construct; identical to SEQ ID NO: 32665
  source 1..120: mol_type = other DNA

SEQ ID NO: 62620 - DNA, 120 bp, synthetic construct; identical to SEQ ID NO: 9614
  source 1..120: mol_type = other DNA

SEQ ID NO: 62621 - DNA, 120 bp, synthetic construct; identical to SEQ ID NO: 32667
  source 1..120: mol_type = other DNA

SEQ ID NO: 62622 - DNA, 120 bp, synthetic construct; identical to SEQ ID NO: 32668
  source 1..120: mol_type = other DNA

SEQ ID NO: 62623 - DNA, 120 bp, synthetic construct; identical to SEQ ID NO: 32669
  source 1..120: mol_type = other DNA

SEQ ID NO: 62624 - DNA, 120 bp, synthetic construct; identical to SEQ ID NO: 32670
  source 1..120: mol_type = other DNA

SEQ ID NO: 62625 - DNA, 120 bp, synthetic construct; identical to SEQ ID NO: 9615
  source 1..120: mol_type = other DNA

SEQ ID NO: 62626 - DNA, 120 bp, synthetic construct; identical to SEQ ID NO: 32672
  source 1..120: mol_type = other DNA

SEQ ID NO: 62627 - DNA, 120 bp, synthetic construct; identical to SEQ ID NO: 32673
  source 1..120: mol_type = other DNA

SEQ ID NO: 62628 - DNA, 120 bp, synthetic construct; identical to SEQ ID NO: 9616
  source 1..120: mol_type = other DNA

SEQ ID NO: 62629 - DNA, 120 bp, synthetic construct; identical to SEQ ID NO: 32675
  source 1..120: mol_type = other DNA

SEQ ID NO: 62630 - DNA, 120 bp, synthetic construct; identical to SEQ ID NO: 32676
  source 1..120: mol_type = other DNA

SEQ ID NO: 62631 - DNA, 120 bp, synthetic construct; identical to SEQ ID NO: 32677
  source 1..120: mol_type = other DNA

SEQ ID NO: 62632 - DNA, 120 bp, synthetic construct; identical to SEQ ID NO: 32678
  source 1..120: mol_type = other DNA

SEQ ID NO: 62633 - DNA, 120 bp, synthetic construct; identical to SEQ ID NO: 9617
  source 1..120: mol_type = other DNA

SEQ ID NO: 62634 - DNA, 120 bp, synthetic construct; identical to SEQ ID NO: 32680
  source 1..120: mol_type = other DNA

SEQ ID NO: 62635 - DNA, 120 bp, synthetic construct; identical to SEQ ID NO: 32681
  source 1..120: mol_type = other DNA

SEQ ID NO: 62636 - DNA, 120 bp, synthetic construct; identical to SEQ ID NO: 9618
  source 1..120: mol_type = other DNA

SEQ ID NO: 62637 - DNA, 120 bp, synthetic construct; identical to SEQ ID NO: 32683
  source 1..120: mol_type = other DNA

SEQ ID NO: 62638 - DNA, 120 bp, synthetic construct; identical to SEQ ID NO: 32684
  source 1..120: mol_type = other DNA

SEQ ID NO: 62639 - DNA, 120 bp, synthetic construct; identical to SEQ ID NO: 32685
  source 1..120: mol_type = other DNA

SEQ ID NO: 62640 - DNA, 120 bp, synthetic construct; identical to SEQ ID NO: 9619
  source 1..120: mol_type = other DNA

SEQ ID NO: 62641 - DNA, 120 bp, synthetic construct; identical to SEQ ID NO: 32687
  source 1..120: mol_type = other DNA

SEQ ID NO: 62642 - DNA, 120 bp, synthetic construct; identical to SEQ ID NO: 32688
  source 1..120: mol_type = other DNA

SEQ ID NO: 62643 - DNA, 120 bp, synthetic construct; identical to SEQ ID NO: 32689
  source 1..120: mol_type = other DNA

SEQ ID NO: 62644 - DNA, 120 bp, synthetic construct; identical to SEQ ID NO: 9620
  source 1..120: mol_type = other DNA

SEQ ID NO: 62645 - DNA, 120 bp, synthetic construct; identical to SEQ ID NO: 32691
  source 1..120: mol_type = other DNA

SEQ ID NO: 62646 - DNA, 120 bp, synthetic construct; identical to SEQ ID NO: 32692
  source 1..120: mol_type = other DNA

SEQ ID NO: 62647 - DNA, 120 bp, synthetic construct; identical to SEQ ID NO: 32693
  source 1..120: mol_type = other DNA

SEQ ID NO: 62648 - DNA, 120 bp, synthetic construct; identical to SEQ ID NO: 9621
  source 1..120: mol_type = other DNA

SEQ ID NO: 62649 - DNA, 120 bp, synthetic construct; identical to SEQ ID NO: 32695
  source 1..120: mol_type = other DNA

SEQ ID NO: 62650 - DNA, 120 bp, synthetic construct; identical to SEQ ID NO: 32696
  source 1..120: mol_type = other DNA

SEQ ID NO: 62651 - DNA, 120 bp, synthetic construct; identical to SEQ ID NO: 9622
  source 1..120: mol_type = other DNA

SEQ ID NO: 62652 - DNA, 120 bp, synthetic construct; identical to SEQ ID NO: 32698
  source 1..120: mol_type = other DNA

SEQ ID NO: 62653 - DNA, 120 bp, synthetic construct; identical to SEQ ID NO: 32699
  source 1..120: mol_type = other DNA

SEQ ID NO: 62654 - DNA, 120 bp, synthetic construct; identical to SEQ ID NO: 32700
  source 1..120: mol_type = other DNA

SEQ ID NO: 62655 - DNA, 120 bp, synthetic construct; identical to SEQ ID NO: 32701
  source 1..120: mol_type = other DNA

SEQ ID NO: 62656 - DNA, 120 bp, synthetic construct; identical to SEQ ID NO: 9623
  source 1..120: mol_type = other DNA

SEQ ID NO: 62657 - DNA, 120 bp, synthetic construct; identical to SEQ ID NO: 32703
  source 1..120: mol_type = other DNA

SEQ ID NO: 62658 - DNA, 120 bp, synthetic construct; identical to SEQ ID NO: 32704
  source 1..120: mol_type = other DNA

SEQ ID NO: 62659 - DNA, 120 bp, synthetic construct; identical to SEQ ID NO: 9624
  source 1..120: mol_type = other DNA

SEQ ID NO: 62660 - DNA, 120 bp, synthetic construct; identical to SEQ ID NO: 32706
  source 1..120: mol_type = other DNA

SEQ ID NO: 62661 - DNA, 120 bp, synthetic construct; identical to SEQ ID NO: 32707
  source 1..120: mol_type = other DNA

SEQ ID NO: 62662 - DNA, 120 bp, synthetic construct; identical to SEQ ID NO: 32708
  source 1..120: mol_type = other DNA

SEQ ID NO: 62663 - DNA, 120 bp, synthetic construct; identical to SEQ ID NO: 32709
  source 1..120: mol_type = other DNA

SEQ ID NO: 62664 - DNA, 120 bp, synthetic construct; identical to SEQ ID NO: 9625
  source 1..120: mol_type = other DNA

SEQ ID NO: 62665 - DNA, 120 bp, synthetic construct; identical to SEQ ID NO: 32711
  source 1..120: mol_type = other DNA

SEQ ID NO: 62666 - DNA, 120 bp, synthetic construct; identical to SEQ ID NO: 32712
  source 1..120: mol_type = other DNA

SEQ ID NO: 62667 - DNA, 120 bp, synthetic construct; identical to SEQ ID NO: 32713
  source 1..120: mol_type = other DNA

SEQ ID NO: 62668 - DNA, 120 bp, synthetic construct; identical to SEQ ID NO: 9626
  source 1..120: mol_type = other DNA

SEQ ID NO: 62669 - DNA, 120 bp, synthetic construct; identical to SEQ ID NO: 32715
  source 1..120: mol_type = other DNA

SEQ ID NO: 62670 - DNA, 120 bp, synthetic construct; identical to SEQ ID NO: 32716
  source 1..120: mol_type = other DNA

SEQ ID NO: 62671 - DNA, 120 bp, synthetic construct; identical to SEQ ID NO: 32717
  source 1..120: mol_type = other DNA

SEQ ID NO: 62672 - DNA, 120 bp, synthetic construct; identical to SEQ ID NO: 9627
  source 1..120: mol_type = other DNA

SEQ ID NO: 62673 - DNA, 120 bp, synthetic construct; identical to SEQ ID NO: 32719
  source 1..120: mol_type = other DNA

SEQ ID NO: 62674 - DNA, 120 bp, synthetic construct; identical to SEQ ID NO: 32720
  source 1..120: mol_type = other DNA

SEQ ID NO: 62675 - DNA, 120 bp, synthetic construct; identical to SEQ ID NO: 32721
  source 1..120: mol_type = other DNA

SEQ ID NO: 62676 - DNA, 120 bp, synthetic construct; identical to SEQ ID NO: 9628
  source 1..120: mol_type = other DNA

SEQ ID NO: 62677 - DNA, 120 bp, synthetic construct; identical to SEQ ID NO: 32723
  source 1..120: mol_type = other DNA

SEQ ID NO: 62678 - DNA, 120 bp, synthetic construct; identical to SEQ ID NO: 32724
  source 1..120: mol_type = other DNA

SEQ ID NO: 62679 - DNA, 120 bp, synthetic construct; identical to SEQ ID NO: 32725
  source 1..120: mol_type = other DNA

SEQ ID NO: 62680 - DNA, 120 bp, synthetic construct; identical to SEQ ID NO: 9629
  source 1..120: mol_type = other DNA

SEQ ID NO: 62681 - DNA, 120 bp, synthetic construct; identical to SEQ ID NO: 32727
  source 1..120: mol_type = other DNA

SEQ ID NO: 62682 - DNA, 120 bp, synthetic construct; identical to SEQ ID NO: 32728
  source 1..120: mol_type = other DNA

SEQ ID NO: 62683 - DNA, 120 bp, synthetic construct; identical to SEQ ID NO: 9630
  source 1..120: mol_type = other DNA

SEQ ID NO: 62684 - DNA, 120 bp, synthetic construct; identical to SEQ ID NO: 32730
  source 1..120: mol_type = other DNA

SEQ ID NO: 62685 - DNA, 120 bp, synthetic construct; identical to SEQ ID NO: 32731
  source 1..120: mol_type = other DNA

SEQ ID NO: 62686 - DNA, 120 bp, synthetic construct; identical to SEQ ID NO: 32732
  source 1..120: mol_type = other DNA

SEQ ID NO: 62687 - DNA, 120 bp, synthetic construct; identical to SEQ ID NO: 9631
  source 1..120: mol_type = other DNA

SEQ ID NO: 62688 - DNA, 120 bp, synthetic construct; identical to SEQ ID NO: 32734
  source 1..120: mol_type = other DNA

SEQ ID NO: 62689 - DNA, 120 bp, synthetic construct; identical to SEQ ID NO: 32735
  source 1..120: mol_type = other DNA

SEQ ID NO: 62690 - DNA, 120 bp, synthetic construct; identical to SEQ ID NO: 32736
  source 1..120: mol_type = other DNA

SEQ ID NO: 62691 - DNA, 120 bp, synthetic construct; identical to SEQ ID NO: 32737
  source 1..120: mol_type = other DNA

SEQ ID NO: 62692 - DNA, 120 bp, synthetic construct; identical to SEQ ID NO: 9632
  source 1..120: mol_type = other DNA

SEQ ID NO: 62693 - DNA, 120 bp, synthetic construct; identical to SEQ ID NO: 32739
  source 1..120: mol_type = other DNA

SEQ ID NO: 62694 - DNA, 120 bp, synthetic construct; identical to SEQ ID NO: 32740
  source 1..120: mol_type = other DNA

SEQ ID NO: 62695 - DNA, 120 bp, synthetic construct; identical to SEQ ID NO: 32741
  source 1..120: mol_type = other DNA

SEQ ID NO: 62696 - DNA, 120 bp, synthetic construct; identical to SEQ ID NO: 9633
  source 1..120: mol_type = other DNA

SEQ ID NO: 62697 - DNA, 120 bp, synthetic construct; identical to SEQ ID NO: 32743
  source 1..120: mol_type = other DNA

SEQ ID NO: 62698 - DNA, 120 bp, synthetic construct; identical to SEQ ID NO: 32744
  source 1..120: mol_type = other DNA

SEQ ID NO: 62699 - DNA, 120 bp, synthetic construct; identical to SEQ ID NO: 32745
  source 1..120: mol_type = other DNA

SEQ ID NO: 62700 - DNA, 120 bp, synthetic construct; identical to SEQ ID NO: 9634
  source 1..120: mol_type = other DNA

SEQ ID NO: 62701 - DNA, 120 bp, synthetic construct; identical to SEQ ID NO: 32747
  source 1..120: mol_type = other DNA

SEQ ID NO: 62702 - DNA, 120 bp, synthetic construct; identical to SEQ ID NO: 32748
  source 1..120: mol_type = other DNA

SEQ ID NO: 62703 - DNA, 120 bp, synthetic construct; identical to SEQ ID NO: 32749
  source 1..120: mol_type = other DNA

SEQ ID NO: 62704 - DNA, 120 bp, synthetic construct; identical to SEQ ID NO: 9635
  source 1..120: mol_type = other DNA

SEQ ID NO: 62705 - DNA, 120 bp, synthetic construct; identical to SEQ ID NO: 32751
  source 1..120: mol_type = other DNA

SEQ ID NO: 62706 - DNA, 120 bp, synthetic construct; identical to SEQ ID NO: 32752
  source 1..120: mol_type = other DNA

SEQ ID NO: 62707 - DNA, 120 bp, synthetic construct; identical to SEQ ID NO: 9636
  source 1..120: mol_type = other DNA

SEQ ID NO: 62708 - DNA, 120 bp, synthetic construct; identical to SEQ ID NO: 32754
  source 1..120: mol_type = other DNA

SEQ ID NO: 62709 - DNA, 120 bp, synthetic construct; identical to SEQ ID NO: 32755
  source 1..120: mol_type = other DNA

SEQ ID NO: 62710 - DNA, 120 bp, synthetic construct; identical to SEQ ID NO: 32756
  source 1..120: mol_type = other DNA

SEQ ID NO: 62711 - DNA, 120 bp, synthetic construct; identical to SEQ ID NO: 9637
  source 1..120: mol_type = other DNA

SEQ ID NO: 62712 - DNA, 120 bp, synthetic construct; identical to SEQ ID NO: 32758
  source 1..120: mol_type = other DNA

SEQ ID NO: 62713 - DNA, 120 bp, synthetic construct; identical to SEQ ID NO: 32759
  source 1..120: mol_type = other DNA

SEQ ID NO: 62714 - DNA, 120 bp, synthetic construct; identical to SEQ ID NO: 32760
  source 1..120: mol_type = other DNA

SEQ ID NO: 62715 - DNA, 120 bp, synthetic construct; identical to SEQ ID NO: 9638
  source 1..120: mol_type = other DNA

SEQ ID NO: 62716 - DNA, 120 bp, synthetic construct; identical to SEQ ID NO: 32762
  source 1..120: mol_type = other DNA

SEQ ID NO: 62717 - DNA, 120 bp, synthetic construct; identical to SEQ ID NO: 32763
  source 1..120: mol_type = other DNA

SEQ ID NO: 62718 - DNA, 120 bp, synthetic construct; identical to SEQ ID NO: 32764
  source 1..120: mol_type = other DNA

SEQ ID NO: 62719 - DNA, 120 bp, synthetic construct; identical to SEQ ID NO: 9639
  source 1..120: mol_type = other DNA

SEQ ID NO: 62720 - DNA, 120 bp, synthetic construct; identical to SEQ ID NO: 32766
  source 1..120: mol_type = other DNA

SEQ ID NO: 62721 - DNA, 120 bp, synthetic construct; identical to SEQ ID NO: 32767
  source 1..120: mol_type = other DNA

SEQ ID NO: 62722 - DNA, 120 bp, synthetic construct; identical to SEQ ID NO: 32768
  source 1..120: mol_type = other DNA

SEQ ID NO: 62723 - DNA, 120 bp, synthetic construct; identical to SEQ ID NO: 32769
  source 1..120: mol_type = other DNA

SEQ ID NO: 62724 - DNA, 120 bp, synthetic construct; identical to SEQ ID NO: 9640
  source 1..120: mol_type = other DNA

SEQ ID NO: 62725 - DNA, 120 bp, synthetic construct; identical to SEQ ID NO: 32771
  source 1..120: mol_type = other DNA

SEQ ID NO: 62726 - DNA, 120 bp, synthetic construct; identical to SEQ ID NO: 32772
  source 1..120: mol_type = other DNA

SEQ ID NO: 62727 - DNA, 120 bp, synthetic construct; identical to SEQ ID NO: 32773
  source 1..120: mol_type = other DNA

SEQ ID NO: 62728 - DNA, 120 bp, synthetic construct; identical to SEQ ID NO: 9641
  source 1..120: mol_type = other DNA

SEQ ID NO: 62729 - DNA, 120 bp, synthetic construct; identical to SEQ ID NO: 32775
  source 1..120: mol_type = other DNA

SEQ ID NO: 62730 - DNA, 120 bp, synthetic construct; identical to SEQ ID NO: 32776
  source 1..120: mol_type = other DNA

SEQ ID NO: 62731 - DNA, 120 bp, synthetic construct; identical to SEQ ID NO: 9642
  source 1..120: mol_type = other DNA

SEQ ID NO: 62732 - DNA, 120 bp, synthetic construct; identical to SEQ ID NO: 32778
  source 1..120: mol_type = other DNA

SEQ ID NO: 62733 - DNA, 120 bp, synthetic construct; identical to SEQ ID NO: 32779
  source 1..120: mol_type = other DNA

SEQ ID NO: 62734 - DNA, 120 bp, synthetic construct; identical to SEQ ID NO: 32780
  source 1..120: mol_type = other DNA

SEQ ID NO: 62735 - DNA, 120 bp, synthetic construct; identical to SEQ ID NO: 9643
  source 1..120: mol_type = other DNA

SEQ ID NO: 62736 - DNA, 120 bp, synthetic construct; identical to SEQ ID NO: 32782
  source 1..120: mol_type = other DNA

SEQ ID NO: 62737 - DNA, 120 bp, synthetic construct; identical to SEQ ID NO: 32783
  source 1..120: mol_type = other DNA

SEQ ID NO: 62738 - DNA, 120 bp, synthetic construct; identical to SEQ ID NO: 32784
  source 1..120: mol_type = other DNA

SEQ ID NO: 62739 - DNA, 120 bp, synthetic construct; identical to SEQ ID NO: 9644
  source 1..120: mol_type = other DNA

SEQ ID NO: 62740 - DNA, 120 bp, synthetic construct; identical to SEQ ID NO: 32786
  source 1..120: mol_type = other DNA

SEQ ID NO: 62741 - DNA, 120 bp, synthetic construct; identical to SEQ ID NO: 32787
  source 1..120: mol_type = other DNA

SEQ ID NO: 62742 - DNA, 120 bp, synthetic construct; identical to SEQ ID NO: 32788
  source 1..120: mol_type = other DNA

SEQ ID NO: 62743 - DNA, 120 bp, synthetic construct; identical to SEQ ID NO: 32789
  source 1..120: mol_type = other DNA

SEQ ID NO: 62744 - DNA, 120 bp, synthetic construct; identical to SEQ ID NO: 9645
  source 1..120: mol_type = other DNA

SEQ ID NO: 62745 - DNA, 120 bp, synthetic construct; identical to SEQ ID NO: 32791
  source 1..120: mol_type = other DNA

SEQ ID NO: 62746 - DNA, 120 bp, synthetic construct; identical to SEQ ID NO: 32792
  source 1..120: mol_type = other DNA

SEQ ID NO: 62747 - DNA, 120 bp, synthetic construct; identical to SEQ ID NO: 9646
  source 1..120: mol_type = other DNA

SEQ ID NO: 62748 - DNA, 120 bp, synthetic construct; identical to SEQ ID NO: 32794
  source 1..120: mol_type = other DNA

SEQ ID NO: 62749 - DNA, 120 bp, synthetic construct; identical to SEQ ID NO: 2511
  source 1..120: mol_type = other DNA

SEQ ID NO: 62750 - DNA, 120 bp, synthetic construct; identical to SEQ ID NO: 32796
  source 1..120: mol_type = other DNA

SEQ ID NO: 62751 - DNA, 120 bp, synthetic construct; identical to SEQ ID NO: 9647
  source 1..120: mol_type = other DNA

SEQ ID NO: 62752 - DNA, 120 bp, synthetic construct; identical to SEQ ID NO: 32798
  source 1..120: mol_type = other DNA

SEQ ID NO: 62753 - DNA, 120 bp, synthetic construct; identical to SEQ ID NO: 32799
  source 1..120: mol_type = other DNA

SEQ ID NO: 62754 - DNA, 120 bp, synthetic construct; identical to SEQ ID NO: 32800
  source 1..120: mol_type = other DNA

SEQ ID NO: 62755 - DNA, 120 bp, synthetic construct; identical to SEQ ID NO: 32801
  source 1..120: mol_type = other DNA

SEQ ID NO: 62756 - DNA, 120 bp, synthetic construct; identical to SEQ ID NO: 9648
  source 1..120: mol_type = other DNA

SEQ ID NO: 62757 - DNA, 120 bp, synthetic construct; identical to SEQ ID NO: 32803
  source 1..120: mol_type = other DNA

SEQ ID NO: 62758 - DNA, 120 bp, synthetic construct; identical to SEQ ID NO: 32804
  source 1..120: mol_type = other DNA

SEQ ID NO: 62759 - DNA, 120 bp, synthetic construct; identical to SEQ ID NO: 32805
  source 1..120: mol_type = other DNA

SEQ ID NO: 62760 - DNA, 120 bp, synthetic construct; identical to SEQ ID NO: 9649
  source 1..120: mol_type = other DNA

SEQ ID NO: 62761 - DNA, 120 bp, synthetic construct; identical to SEQ ID NO: 32807
  source 1..120: mol_type = other DNA

SEQ ID NO: 62762 - DNA, 120 bp, synthetic construct; identical to SEQ ID NO: 32808
  source 1..120: mol_type = other DNA

SEQ ID NO: 62763 - DNA, 120 bp, synthetic construct; identical to SEQ ID NO: 9650
  source 1..120: mol_type = other DNA

SEQ ID NO: 62764 - DNA, 120 bp, synthetic construct; identical to SEQ ID NO: 32810
  source 1..120: mol_type = other DNA

SEQ ID NO: 62765 - DNA, 120 bp, synthetic construct; identical to SEQ ID NO: 32811
  source 1..120: mol_type = other DNA

SEQ ID NO: 62766 - DNA, 120 bp, synthetic construct; identical to SEQ ID NO: 32812
  source 1..120: mol_type = other DNA

SEQ ID NO: 62767 - DNA, 120 bp, synthetic construct; identical to SEQ ID NO: 9651
  source 1..120: mol_type = other DNA

SEQ ID NO: 62768 - DNA, 120 bp, synthetic construct; identical to SEQ ID NO: 32814
  source 1..120: mol_type = other DNA

SEQ ID NO: 62769 - DNA, 120 bp, synthetic construct; identical to SEQ ID NO: 32815
  source 1..120: mol_type = other DNA

SEQ ID NO: 62770 - DNA, 120 bp, synthetic construct; identical to SEQ ID NO: 32816
  source 1..120: mol_type = other DNA

SEQ ID NO: 62771 - DNA, 120 bp, synthetic construct; identical to SEQ ID NO: 9652
  source 1..120: mol_type = other DNA

SEQ ID NO: 62772 - DNA, 120 bp, synthetic construct; identical to SEQ ID NO: 32818
  source 1..120: mol_type = other DNA

SEQ ID NO: 62773 - DNA, 120 bp, synthetic construct; identical to SEQ ID NO: 32819
  source 1..120: mol_type = other DNA

SEQ ID NO: 62774 - DNA, 120 bp, synthetic construct; identical to SEQ ID NO: 32820
  source 1..120: mol_type = other DNA

SEQ ID NO: 62775 - DNA, 120 bp, synthetic construct; identical to SEQ ID NO: 9653
  source 1..120: mol_type = other DNA

SEQ ID NO: 62776 - DNA, 120 bp, synthetic construct; identical to SEQ ID NO: 32822
  source 1..120: mol_type = other DNA

SEQ ID NO: 62777 - DNA, 120 bp, synthetic construct; identical to SEQ ID NO: 32823
  source 1..120: mol_type = other DNA

SEQ ID NO: 62778 - DNA, 120 bp, synthetic construct; identical to SEQ ID NO: 32824
  source 1..120: mol_type = other DNA

SEQ ID NO: 62779 - DNA, 120 bp, synthetic construct; identical to SEQ ID NO: 32825
  source 1..120: mol_type = other DNA

SEQ ID NO: 62780 - DNA, 120 bp, synthetic construct; identical to SEQ ID NO: 9654
  source 1..120: mol_type = other DNA

SEQ ID NO: 62781 - DNA, 120 bp, synthetic construct; identical to SEQ ID NO: 32827
  source 1..120: mol_type = other DNA

SEQ ID NO: 62782 - DNA, 120 bp, synthetic construct; identical to SEQ ID NO: 32828
  source 1..120: mol_type = other DNA

SEQ ID NO: 62783 - DNA, 120 bp, synthetic construct; identical to SEQ ID NO: 32829
  source 1..120: mol_type = other DNA

SEQ ID NO: 62784 - DNA, 120 bp, synthetic construct; identical to SEQ ID NO: 9655
  source 1..120: mol_type = other DNA

SEQ ID NO: 62785 - DNA, 120 bp, synthetic construct; identical to SEQ ID NO: 32831
  source 1..120: mol_type = other DNA

SEQ ID NO: 62786 - DNA, 120 bp, synthetic construct; identical to SEQ ID NO: 32832
  source 1..120: mol_type = other DNA

SEQ ID NO: 62787 - DNA, 120 bp, synthetic construct; identical to SEQ ID NO: 9656
  source 1..120: mol_type = other DNA

SEQ ID NO: 62788 - DNA, 120 bp, synthetic construct; identical to SEQ ID NO: 32834
  source 1..120: mol_type = other DNA

SEQ ID NO: 62789 - DNA, 120 bp, synthetic construct; identical to SEQ ID NO: 32835
  source 1..120: mol_type = other DNA

SEQ ID NO: 62790 - DNA, 120 bp, synthetic construct; identical to SEQ ID NO: 32836
  source 1..120: mol_type = other DNA

SEQ ID NO: 62791 - DNA, 120 bp, synthetic construct; identical to SEQ ID NO: 32837
  source 1..120: mol_type = other DNA

SEQ ID NO: 62792 - DNA, 120 bp, synthetic construct; identical to SEQ ID NO: 9657
  source 1..120: mol_type = other DNA

SEQ ID NO: 62793 - DNA, 120 bp, synthetic construct; identical to SEQ ID NO: 32839
  source 1..120: mol_type = other DNA

SEQ ID NO: 62794 - DNA, 120 bp, synthetic construct; identical to SEQ ID NO: 32840
  source 1..120: mol_type = other DNA

SEQ ID NO: 62795 - DNA, 120 bp, synthetic construct; identical to SEQ ID NO: 32841
  source 1..120: mol_type = other DNA

SEQ ID NO: 62796 - DNA, 120 bp, synthetic construct; identical to SEQ ID NO: 9658
  source 1..120: mol_type = other DNA

SEQ ID NO: 62797 - DNA, 120 bp, synthetic construct; identical to SEQ ID NO: 32843
  source 1..120: mol_type = other DNA

SEQ ID NO: 62798 - DNA, 120 bp, synthetic construct; identical to SEQ ID NO: 32844
  source 1..120: mol_type = other DNA

SEQ ID NO: 62799 - DNA, 120 bp, synthetic construct; identical to SEQ ID NO: 32845
  source 1..120: mol_type = other DNA

SEQ ID NO: 62800 - DNA, 120 bp, synthetic construct; identical to SEQ ID NO: 32846
  source 1..120: mol_type = other DNA

SEQ ID NO: 62801 - DNA, 120 bp, synthetic construct; identical to SEQ ID NO: 9659
  source 1..120: mol_type = other DNA

SEQ ID NO: 62802 - DNA, 120 bp, synthetic construct; identical to SEQ ID NO: 32848
  source 1..120: mol_type = other DNA

SEQ ID NO: 62803 - DNA, 120 bp, synthetic construct; identical to SEQ ID NO: 32849
  source 1..120: mol_type = other DNA

SEQ ID NO: 62804 - DNA, 120 bp, synthetic construct; identical to SEQ ID NO: 32850
  source 1..120: mol_type = other DNA

SEQ ID NO: 62805 - DNA, 120 bp, synthetic construct; identical to SEQ ID NO: 9660
  source 1..120: mol_type = other DNA

SEQ ID NO: 62806 - DNA, 120 bp, synthetic construct; identical to SEQ ID NO: 32852
  source 1..120: mol_type = other DNA

SEQ ID NO: 62807 - DNA, 120 bp, synthetic construct; identical to SEQ ID NO: 32853
  source 1..120: mol_type = other DNA

SEQ ID NO: 62808 - DNA, 120 bp, synthetic construct; identical to SEQ ID NO: 9661
  source 1..120: mol_type = other DNA

SEQ ID NO: 62809 - DNA, 120 bp, synthetic construct; identical to SEQ ID NO: 32855
  source 1..120: mol_type = other DNA

SEQ ID NO: 62810 - DNA, 120 bp, synthetic construct; identical to SEQ ID NO: 32856
  source 1..120: mol_type = other DNA

SEQ ID NO: 62811 - DNA, 120 bp, synthetic construct; identical to SEQ ID NO: 32857
  source 1..120: mol_type = other DNA

SEQ ID NO: 62812 - DNA, 120 bp, synthetic construct; identical to SEQ ID NO: 9662
  source 1..120: mol_type = other DNA

SEQ ID NO: 62813 - DNA, 120 bp, synthetic construct; identical to SEQ ID NO: 32859
  source 1..120: mol_type = other DNA

SEQ ID NO: 62814 - DNA, 120 bp, synthetic construct; identical to SEQ ID NO: 32860
  source 1..120: mol_type = other DNA

SEQ ID NO: 62815 - DNA, 120 bp, synthetic construct; identical to SEQ ID NO: 32861
  source 1..120: mol_type = other DNA

SEQ ID NO: 62816 - DNA, 120 bp, synthetic construct; identical to SEQ ID NO: 9663
  source 1..120: mol_type = other DNA

SEQ ID NO: 62817 - DNA, 120 bp, synthetic construct; identical to SEQ ID NO: 32863
  source 1..120: mol_type = other DNA

SEQ ID NO: 62818 - DNA, 120 bp, synthetic construct; identical to SEQ ID NO: 32864
  source 1..120: mol_type = other DNA

SEQ ID NO: 62819 - DNA, 120 bp, synthetic construct; identical to SEQ ID NO: 32865
  source 1..120: mol_type = other DNA

SEQ ID NO: 62820 - DNA, 120 bp, synthetic construct; identical to SEQ ID NO: 32866
  source 1..120: mol_type = other DNA

SEQ ID NO: 62821 - DNA, 120 bp, synthetic construct; identical to SEQ ID NO: 9664
  source 1..120: mol_type = other DNA

SEQ ID NO: 62822 - DNA, 120 bp, synthetic construct; identical to SEQ ID NO: 32868
  source 1..120: mol_type = other DNA

SEQ ID NO: 62823 - DNA, 120 bp, synthetic construct; identical to SEQ ID NO: 32869
  source 1..120: mol_type = other DNA

SEQ ID NO: 62824 - DNA, 120 bp, synthetic construct; identical to SEQ ID NO: 9665
  source 1..120: mol_type = other DNA

SEQ ID NO: 62825 - DNA, 120 bp, synthetic construct; identical to SEQ ID NO: 32871
  source 1..120: mol_type = other DNA

SEQ ID NO: 62826 - DNA, 120 bp, synthetic construct; identical to SEQ ID NO: 32872
  source 1..120: mol_type = other DNA

SEQ ID NO: 62827 - DNA, 120 bp, synthetic construct; identical to SEQ ID NO: 32873
  source 1..120: mol_type = other DNA

SEQ ID NO: 62828 - DNA, 120 bp, synthetic construct; identical to SEQ ID NO: 32874
  source 1..120: mol_type = other DNA

SEQ ID NO: 62829 - DNA, 120 bp, synthetic construct; identical to SEQ ID NO: 9666
  source 1..120: mol_type = other DNA

SEQ ID NO: 62830 - DNA, 120 bp, synthetic construct; identical to SEQ ID NO: 32876
  source 1..120: mol_type = other DNA

SEQ ID NO: 62831 - DNA, 120 bp, synthetic construct; identical to SEQ ID NO: 32877
  source 1..120: mol_type = other DNA

SEQ ID NO: 62832 - DNA, 120 bp, synthetic construct; identical to SEQ ID NO: 32878
  source 1..120: mol_type = other DNA

SEQ ID NO: 62833 - DNA, 120 bp, synthetic construct; identical to SEQ ID NO: 9667
  source 1..120: mol_type = other DNA

SEQ ID NO: 62834 - DNA, 120 bp, synthetic construct; identical to SEQ ID NO: 32880
  source 1..120: mol_type = other DNA

SEQ ID NO: 62835 - DNA, 120 bp, synthetic construct; identical to SEQ ID NO: 32881
  source 1..120: mol_type = other DNA

SEQ ID NO: 62836 - DNA, 120 bp, synthetic construct; identical to SEQ ID NO: 32882
  source 1..120: mol_type = other DNA

SEQ ID NO: 62837 - DNA, 120 bp, synthetic construct; identical to SEQ ID NO: 9668
  source 1..120: mol_type = other DNA

SEQ ID NO: 62838 - DNA, 120 bp, synthetic construct; identical to SEQ ID NO: 32884
  source 1..120: mol_type = other DNA

SEQ ID NO: 62839 - DNA, 120 bp, synthetic construct; identical to SEQ ID NO: 32885
  source 1..120: mol_type = other DNA

SEQ ID NO: 62840 - DNA, 120 bp, synthetic construct; identical to SEQ ID NO: 9669
  source 1..120: mol_type = other DNA

SEQ ID NO: 62841 - DNA, 120 bp, synthetic construct; identical to SEQ ID NO: 32887
  source 1..120: mol_type = other DNA

SEQ ID NO: 62842 - DNA, 120 bp, synthetic construct; identical to SEQ ID NO: 32888
  source 1..120: mol_type = other DNA

SEQ ID NO: 62843 - DNA, 120 bp, synthetic construct; identical to SEQ ID NO: 32889
  source 1..120: mol_type = other DNA

SEQ ID NO: 62844 - DNA, 120 bp, synthetic construct; identical to SEQ ID NO: 9670
  source 1..120: mol_type = other DNA

SEQ ID NO: 62845 - DNA, 120 bp, synthetic construct; identical to SEQ ID NO: 32891
  source 1..120: mol_type = other DNA

SEQ ID NO: 62846 - DNA, 120 bp, synthetic construct; identical to SEQ ID NO: 32892
  source 1..120: mol_type = other DNA

SEQ ID NO: 62847 - DNA, 120 bp, synthetic construct; identical to SEQ ID NO: 32893
  source 1..120: mol_type = other DNA

SEQ ID NO: 62848 - DNA, 120 bp, synthetic construct; identical to SEQ ID NO: 32894
  source 1..120: mol_type = other DNA

SEQ ID NO: 62849 - DNA, 120 bp, synthetic construct; identical to SEQ ID NO: 9671
  source 1..120: mol_type = other DNA

SEQ ID NO: 62850 - DNA, 120 bp, synthetic construct; identical to SEQ ID NO: 32896
  source 1..120: mol_type = other DNA

SEQ ID NO: 62851 - DNA, 120 bp, synthetic construct; identical to SEQ ID NO: 32897
  source 1..120: mol_type = other DNA

SEQ ID NO: 62852 - DNA, 120 bp, synthetic construct; identical to SEQ ID NO: 32898
  source 1..120: mol_type = other DNA

SEQ ID NO: 62853 - DNA, 120 bp, synthetic construct; identical to SEQ ID NO: 9672
  source 1..120: mol_type = other DNA

SEQ ID NO: 62854 - DNA, 120 bp, synthetic construct; identical to SEQ ID NO: 32900
  source 1..120: mol_type = other DNA

SEQ ID NO: 62855 - DNA, 120 bp, synthetic construct; identical to SEQ ID NO: 32901
  source 1..120: mol_type = other DNA

SEQ ID NO: 62856 - DNA, 120 bp, synthetic construct; identical to SEQ ID NO: 32902
  source 1..120: mol_type = other DNA

SEQ ID NO: 62857 - DNA, 120 bp, synthetic construct; identical to SEQ ID NO: 9673
  source 1..120: mol_type = other DNA

SEQ ID NO: 62858 - DNA, 120 bp, synthetic construct; identical to SEQ ID NO: 32904
  source 1..120: mol_type = other DNA

SEQ ID NO: 62859 - DNA, 120 bp, synthetic construct; identical to SEQ ID NO: 32905
  source 1..120: mol_type = other DNA

SEQ ID NO: 62860 - DNA, 120 bp, synthetic construct; identical to SEQ ID NO: 32906
  source 1..120: mol_type = other DNA

SEQ ID NO: 62861 - DNA, 120 bp, synthetic construct; identical to SEQ ID NO: 32907
  source 1..120: mol_type = other DNA

SEQ ID NO: 62862 - DNA, 120 bp, synthetic construct; identical to SEQ ID NO: 9674
  source 1..120: mol_type = other DNA

SEQ ID NO: 62863 - DNA, 120 bp, synthetic construct; identical to SEQ ID NO: 32909
  source 1..120: mol_type = other DNA

SEQ ID NO: 62864 - DNA, 120 bp, synthetic construct; identical to SEQ ID NO: 32910
  source 1..120: mol_type = other DNA

SEQ ID NO: 62865 - DNA, 120 bp, synthetic construct; identical to SEQ ID NO: 32911
  source 1..120: mol_type = other DNA

SEQ ID NO: 62866 - DNA, 120 bp, synthetic construct; identical to SEQ ID NO: 9675
  source 1..120: mol_type = other DNA

SEQ ID NO: 62867 - DNA, 120 bp, synthetic construct; identical to SEQ ID NO: 32913
  source 1..120: mol_type = other DNA

SEQ ID NO: 62868 - DNA, 120 bp, synthetic construct; identical to SEQ ID NO: 32914
  source 1..120: mol_type = other DNA

SEQ ID NO: 62869 - DNA, 120 bp, synthetic construct; identical to SEQ ID NO: 32915
  source 1..120: mol_type = other DNA

SEQ ID NO: 62870 - DNA, 120 bp, synthetic construct; identical to SEQ ID NO: 9676
  source 1..120: mol_type = other DNA

SEQ ID NO: 62871 - DNA, 120 bp, synthetic construct; identical to SEQ ID NO: 32917
  source 1..120: mol_type = other DNA

SEQ ID NO: 62872 - DNA, 120 bp, synthetic construct; identical to SEQ ID NO: 32918
  source 1..120: mol_type = other DNA

SEQ ID NO: 62873 - DNA, 120 bp, synthetic construct; identical to SEQ ID NO: 9677
  source 1..120: mol_type = other DNA

SEQ ID NO: 62874 - DNA, 120 bp, synthetic construct; identical to SEQ ID NO: 32920
  source 1..120: mol_type = other DNA

SEQ ID NO: 62875 - DNA, 120 bp, synthetic construct; identical to SEQ ID NO: 32921
  source 1..120: mol_type = other DNA

SEQ ID NO: 62876 - DNA, 120 bp, synthetic construct; identical to SEQ ID NO: 32922
  source 1..120: mol_type = other DNA

SEQ ID NO: 62877 - DNA, 120 bp, synthetic construct; identical to SEQ ID NO: 9678
  source 1..120: mol_type = other DNA

SEQ ID NO: 62878 - DNA, 120 bp, synthetic construct; identical to SEQ ID NO: 32924
  source 1..120: mol_type = other DNA

SEQ ID NO: 62879 - DNA, 120 bp, synthetic construct; identical to SEQ ID NO: 32925
  source 1..120: mol_type = other DNA

SEQ ID NO: 62880 - DNA, 120 bp, synthetic construct; identical to SEQ ID NO: 32926
  source 1..120: mol_type = other DNA

SEQ ID NO: 62881 - DNA, 120 bp, synthetic construct; identical to SEQ ID NO: 2541
  source 1..120: mol_type = other DNA

SEQ ID NO: 62882 - DNA, 120 bp, synthetic construct; identical to SEQ ID NO: 32928
  source 1..120: mol_type = other DNA

SEQ ID NO: 62883 - DNA, 120 bp, synthetic construct; identical to SEQ ID NO: 32929
  source 1..120: mol_type = other DNA

SEQ ID NO: 62884 - DNA, 120 bp, synthetic construct; identical to SEQ ID NO: 32930
  source 1..120: mol_type = other DNA

SEQ ID NO: 62885 - DNA, 120 bp, synthetic construct; identical to SEQ ID NO: 32931
  source 1..120: mol_type = other DNA

SEQ ID NO: 62886 - DNA, 120 bp, synthetic construct; identical to SEQ ID NO: 9680
  source 1..120: mol_type = other DNA

SEQ ID NO: 62887 - DNA, 120 bp, synthetic construct; identical to SEQ ID NO: 32933
  source 1..120: mol_type = other DNA

SEQ ID NO: 62888 - DNA, 120 bp, synthetic construct; identical to SEQ ID NO: 32934
  source 1..120: mol_type = other DNA

SEQ ID NO: 62889 - DNA, 120 bp, synthetic construct; identical to SEQ ID NO: 9681
  source 1..120: mol_type = other DNA

SEQ ID NO: 62890 - DNA, 120 bp, synthetic construct; identical to SEQ ID NO: 32936
  source 1..120: mol_type = other DNA

SEQ ID NO: 62891 - DNA, 120 bp, synthetic construct; identical to SEQ ID NO: 32937
  source 1..120: mol_type = other DNA

SEQ ID NO: 62892 - DNA, 120 bp, synthetic construct; identical to SEQ ID NO: 32938
  source 1..120: mol_type = other DNA

SEQ ID NO: 62893 - DNA, 120 bp, synthetic construct; identical to SEQ ID NO: 32939
  source 1..120: mol_type = other DNA

SEQ ID NO: 62894 - DNA, 120 bp, synthetic construct; identical to SEQ ID NO: 32940
  source 1..120: mol_type = other DNA

SEQ ID NO: 62895 - DNA, 120 bp, synthetic construct; identical to SEQ ID NO: 9682
  source 1..120: mol_type = other DNA

SEQ ID NO: 62896 - DNA, 120 bp, synthetic construct; identical to SEQ ID NO: 32942
  source 1..120: mol_type = other DNA

SEQ ID NO: 62897 - DNA, 120 bp, synthetic construct; identical to SEQ ID NO: 32943
  source 1..120: mol_type = other DNA

SEQ ID NO: 62898 - DNA, 120 bp, synthetic construct; identical to SEQ ID NO: 9683
  source 1..120: mol_type = other DNA

SEQ ID NO: 62899 - DNA, 120 bp, synthetic construct; identical to SEQ ID NO: 32945
  source 1..120: mol_type = other DNA

SEQ ID NO: 62900 - DNA, 120 bp, synthetic construct; identical to SEQ ID NO: 32946
  source 1..120: mol_type = other DNA

SEQ ID NO: 62901 - DNA, 120 bp, synthetic construct; identical to SEQ ID NO: 32947
  source 1..120: mol_type = other DNA

SEQ ID NO: 62902 - DNA, 120 bp, synthetic construct; identical to SEQ ID NO: 9684
  source 1..120: mol_type = other DNA

SEQ ID NO: 62903 - DNA, 120 bp, synthetic construct; identical to SEQ ID NO: 32949
  source 1..120: mol_type = other DNA

SEQ ID NO: 62904 - DNA, 120 bp, synthetic construct; identical to SEQ ID NO: 32950
  source 1..120: mol_type = other DNA

SEQ ID NO: 62905 - DNA, 120 bp, synthetic construct; identical to SEQ ID NO: 32951
  source 1..120: mol_type = other DNA

SEQ ID NO: 62906 - DNA, 120 bp, synthetic construct; identical to SEQ ID NO: 9685
  source 1..120: mol_type = other DNA

SEQ ID NO: 62907 - DNA, 120 bp, synthetic construct; identical to SEQ ID NO: 32953
  source 1..120: mol_type = other DNA

SEQ ID NO: 62908 - DNA, 120 bp, synthetic construct; identical to SEQ ID NO: 32954
  source 1..120: mol_type = other DNA

SEQ ID NO: 62909 - DNA, 120 bp, synthetic construct; identical to SEQ ID NO: 32955
  source 1..120: mol_type = other DNA

SEQ ID NO: 62910 - DNA, 120 bp, synthetic construct; identical to SEQ ID NO: 9686
  source 1..120: mol_type = other DNA

SEQ ID NO: 62911 - DNA, 120 bp, synthetic construct; identical to SEQ ID NO: 32957
  source 1..120: mol_type = other DNA

SEQ ID NO: 62912 - DNA, 120 bp, synthetic construct; identical to SEQ ID NO: 32958
  source 1..120: mol_type = other DNA

SEQ ID NO: 62913 - DNA, 120 bp, synthetic construct; identical to SEQ ID NO: 32959
  source 1..120: mol_type = other DNA

SEQ ID NO: 62914 - DNA, 120 bp, synthetic construct; identical to SEQ ID NO: 32960
  source 1..120: mol_type = other DNA

SEQ ID NO: 62915 - DNA, 120 bp, synthetic construct; identical to SEQ ID NO: 9687
  source 1..120: mol_type = other DNA

SEQ ID NO: 62916 - DNA, 120 bp, synthetic construct; identical to SEQ ID NO: 32962
  source 1..120: mol_type = other DNA

SEQ ID NO: 62917 - DNA, 120 bp, synthetic construct; identical to SEQ ID NO: 32963
  source 1..120: mol_type = other DNA

SEQ ID NO: 62918 - DNA, 120 bp, synthetic construct; identical to SEQ ID NO: 9688
  source 1..120: mol_type = other DNA

SEQ ID NO: 62919 - DNA, 120 bp, synthetic construct; identical to SEQ ID NO: 32965
  source 1..120: mol_type = other DNA

SEQ ID NO: 62920 - DNA, 120 bp, synthetic construct; identical to SEQ ID NO: 32966
  source 1..120: mol_type = other DNA

SEQ ID NO: 62921 - DNA, 120 bp, synthetic construct; identical to SEQ ID NO: 32967
  source 1..120: mol_type = other DNA

SEQ ID NO: 62922 - DNA, 120 bp, synthetic construct; identical to SEQ ID NO: 32968
  source 1..120: mol_type = other DNA

SEQ ID NO: 62923 - DNA, 120 bp, synthetic construct; identical to SEQ ID NO: 9689
  source 1..120: mol_type = other DNA

SEQ ID NO: 62924 - DNA, 120 bp, synthetic construct; identical to SEQ ID NO: 32970
  source 1..120: mol_type = other DNA

SEQ ID NO: 62925 - DNA, 120 bp, synthetic construct; identical to SEQ ID NO: 32971
  source 1..120: mol_type = other DNA

SEQ ID NO: 62926 - DNA, 120 bp, synthetic construct; identical to SEQ ID NO: 9690
  source 1..120: mol_type = other DNA

SEQ ID NO: 62927 - DNA, 120 bp, synthetic construct; identical to SEQ ID NO: 32973
  source 1..120: mol_type = other DNA

SEQ ID NO: 62928 - DNA, 120 bp, synthetic construct; identical to SEQ ID NO: 32974
  source 1..120: mol_type = other DNA

SEQ ID NO: 62929 - DNA, 120 bp, synthetic construct; identical to SEQ ID NO: 32975
  source 1..120: mol_type = other DNA

SEQ ID NO: 62930 - DNA, 120 bp, synthetic construct; identical to SEQ ID NO: 9691
  source 1..120: mol_type = other DNA

SEQ ID NO: 62931 - DNA, 120 bp, synthetic construct; identical to SEQ ID NO: 32977
  source 1..120: mol_type = other DNA

SEQ ID NO: 62932 - DNA, 120 bp, synthetic construct; identical to SEQ ID NO: 32978
  source 1..120: mol_type = other DNA

SEQ ID NO: 62933 - DNA, 120 bp, synthetic construct; identical to SEQ ID NO: 32979
  source 1..120: mol_type = other DNA

SEQ ID NO: 62934 - DNA, 120 bp, synthetic construct; identical to SEQ ID NO: 32980
  source 1..120: mol_type = other DNA

SEQ ID NO: 62935 - DNA, 120 bp, synthetic construct; identical to SEQ ID NO: 9692
  source 1..120: mol_type = other DNA

SEQ ID NO: 62936 - DNA, 120 bp, synthetic construct; identical to SEQ ID NO: 32982
  source 1..120: mol_type = other DNA

SEQ ID NO: 62937 - DNA, 120 bp, synthetic construct; identical to SEQ ID NO: 32983
  source 1..120: mol_type = other DNA

SEQ ID NO: 62938 - DNA, 120 bp, synthetic construct; identical to SEQ ID NO: 9693
  source 1..120: mol_type = other DNA

SEQ ID NO: 62939 - DNA, 120 bp, synthetic construct; identical to SEQ ID NO: 32985
  source 1..120: mol_type = other DNA

SEQ ID NO: 62940 - DNA, 120 bp, synthetic construct; identical to SEQ ID NO: 32986
  source 1..120: mol_type = other DNA

SEQ ID NO: 62941 - DNA, 120 bp, synthetic construct; identical to SEQ ID NO: 32987
  source 1..120: mol_type = other DNA

SEQ ID NO: 62942 - DNA, 120 bp, synthetic construct; identical to SEQ ID NO: 32988
  source 1..120: mol_type = other DNA

SEQ ID NO: 62943 - DNA, 120 bp, synthetic construct; identical to SEQ ID NO: 9694
  source 1..120: mol_type = other DNA

SEQ ID NO: 62944 - DNA, 120 bp, synthetic construct; identical to SEQ ID NO: 32990
  source 1..120: mol_type = other DNA

SEQ ID NO: 62945 - DNA, 120 bp, synthetic construct; identical to SEQ ID NO: 32991
  source 1..120: mol_type = other DNA

SEQ ID NO: 62946 - DNA, 120 bp, synthetic construct; identical to SEQ ID NO: 32992
  source 1..120: mol_type = other DNA

SEQ ID NO: 62947 - DNA, 120 bp, synthetic construct; identical to SEQ ID NO: 9695
  source 1..120: mol_type = other DNA

SEQ ID NO: 62948 - DNA, 120 bp, synthetic construct; identical to SEQ ID NO: 32994
  source 1..120: mol_type = other DNA

SEQ ID NO: 62949 - DNA, 120 bp, synthetic construct; identical to SEQ ID NO: 32995
  source 1..120: mol_type = other DNA

SEQ ID NO: 62950 - DNA, 120 bp, synthetic construct; identical to SEQ ID NO: 9696
  source 1..120: mol_type = other DNA

SEQ ID NO: 62951 - DNA, 120 bp, synthetic construct; identical to SEQ ID NO: 32997
  source 1..120: mol_type = other DNA

SEQ ID NO: 62952 - DNA, 120 bp, synthetic construct; identical to SEQ ID NO: 32998
  source 1..120: mol_type = other DNA

SEQ ID NO: 62953 - DNA, 120 bp, synthetic construct; identical to SEQ ID NO: 32999
  source 1..120: mol_type = other DNA

SEQ ID NO: 62954 - DNA, 120 bp, synthetic construct; identical to SEQ ID NO: 9697
  source 1..120: mol_type = other DNA

SEQ ID NO: 62955 - DNA, 120 bp, synthetic construct; identical to SEQ ID NO: 33001
  source 1..120: mol_type = other DNA

SEQ ID NO: 62956 - DNA, 120 bp, synthetic construct; identical to SEQ ID NO: 33002
  source 1..120: mol_type = other DNA

SEQ ID NO: 62957 - DNA, 120 bp, synthetic construct; identical to SEQ ID NO: 9698
  source 1..120: mol_type = other DNA

SEQ ID NO: 62958 - DNA, 120 bp, synthetic construct; identical to SEQ ID NO: 33004
  source 1..120: mol_type = other DNA

SEQ ID NO: 62959 - DNA, 120 bp, synthetic construct; identical to SEQ ID NO: 33005
  source 1..120: mol_type = other DNA

SEQ ID NO: 62960 - DNA, 120 bp, synthetic construct; identical to SEQ ID NO: 9699
  source 1..120: mol_type = other DNA

SEQ ID NO: 62961 - DNA, 120 bp, synthetic construct; identical to SEQ ID NO: 33007
  source 1..120: mol_type = other DNA

SEQ ID NO: 62962 - DNA, 120 bp, synthetic construct; identical to SEQ ID NO: 33008
  source 1..120: mol_type = other DNA

SEQ ID NO: 62963 - DNA, 120 bp, synthetic construct; identical to SEQ ID NO: 33009
  source 1..120: mol_type = other DNA

SEQ ID NO: 62964 - DNA, 120 bp, synthetic construct; identical to SEQ ID NO: 9700
  source 1..120: mol_type = other DNA

SEQ ID NO: 62965 - DNA, 120 bp, synthetic construct; identical to SEQ ID NO: 33011
  source 1..120: mol_type = other DNA

SEQ ID NO: 62966 - DNA, 120 bp, synthetic construct; identical to SEQ ID NO: 33012
  source 1..120: mol_type = other DNA

SEQ ID NO: 62967 - DNA, 120 bp, synthetic construct; identical to SEQ ID NO: 9701
  source 1..120: mol_type = other DNA

SEQ ID NO: 62968 - DNA, 120 bp, synthetic construct; identical to SEQ ID NO: 33014
  source 1..120: mol_type = other DNA

SEQ ID NO: 62969 - DNA, 120 bp, synthetic construct; identical to SEQ ID NO: 2561
  source 1..120: mol_type = other DNA

SEQ ID NO: 62970 - DNA, 120 bp, synthetic construct; identical to SEQ ID NO: 33016
  source 1..120: mol_type = other DNA

SEQ ID NO: 62971 - DNA, 120 bp, synthetic construct; identical to SEQ ID NO: 33017
  source 1..120: mol_type = other DNA

SEQ ID NO: 62972 - DNA, 120 bp, synthetic construct; identical to SEQ ID NO: 9702
  source 1..120: mol_type = other DNA

SEQ ID NO: 62973 - DNA, 120 bp, synthetic construct; identical to SEQ ID NO: 33019
  source 1..120: mol_type = other DNA

SEQ ID NO: 62974 - DNA, 120 bp, synthetic construct; identical to SEQ ID NO: 33020
  source 1..120: mol_type = other DNA

SEQ ID NO: 62975 - DNA, 120 bp, synthetic construct; identical to SEQ ID NO: 9703
  source 1..120: mol_type = other DNA

SEQ ID NO: 62976 - DNA, 120 bp, synthetic construct; identical to SEQ ID NO: 33022
  source 1..120: mol_type = other DNA

SEQ ID NO: 62977 - DNA, 120 bp, synthetic construct; identical to SEQ ID NO: 33023
  source 1..120: mol_type = other DNA

SEQ ID NO: 62978 - DNA, 120 bp, synthetic construct; identical to SEQ ID NO: 33024
  source 1..120: mol_type = other DNA

SEQ ID NO: 62979 - DNA, 120 bp, synthetic construct; identical to SEQ ID NO: 9704
  source 1..120: mol_type = other DNA

SEQ ID NO: 62980 - DNA, 120 bp, synthetic construct; identical to SEQ ID NO: 33026
  source 1..120: mol_type = other DNA

SEQ ID NO: 62981 - DNA, 120 bp, synthetic construct; identical to SEQ ID NO: 33027
  source 1..120: mol_type = other DNA

SEQ ID NO: 62982 - DNA, 120 bp, synthetic construct; identical to SEQ ID NO: 33028
  source 1..120: mol_type = other DNA

SEQ ID NO: 62983 - DNA, 120 bp, synthetic construct; identical to SEQ ID NO: 33029
  source 1..120: mol_type = other DNA

SEQ ID NO: 62984 - DNA, 120 bp, synthetic construct; identical to SEQ ID NO: 9705
  source 1..120: mol_type = other DNA

SEQ ID NO: 62985 - DNA, 120 bp, synthetic construct; identical to SEQ ID NO: 33031
  source 1..120: mol_type = other DNA

SEQ ID NO: 62986 - DNA, 120 bp, synthetic construct; identical to SEQ ID NO: 33032
  source 1..120: mol_type = other DNA

SEQ ID NO: 62987 - DNA, 120 bp, synthetic construct; identical to SEQ ID NO: 9706
  source 1..120: mol_type = other DNA

SEQ ID NO: 62988 - DNA, 120 bp, synthetic construct; identical to SEQ ID NO: 33034
  source 1..120: mol_type = other DNA

SEQ ID NO: 62989 - DNA, 120 bp, synthetic construct; identical to SEQ ID NO: 33035
  source 1..120: mol_type = other DNA

SEQ ID NO: 62990 - DNA, 120 bp, synthetic construct; identical to SEQ ID NO: 33036
  source 1..120: mol_type = other DNA

SEQ ID NO: 62991 - DNA, 120 bp, synthetic construct; identical to SEQ ID NO: 9707
  source 1..120: mol_type = other DNA

SEQ ID NO: 62992 - DNA, 120 bp, synthetic construct; identical to SEQ ID NO: 33038
  source 1..120: mol_type = other DNA

SEQ ID NO: 62993 - DNA, 120 bp, synthetic construct; identical to SEQ ID NO: 33039
  source 1..120: mol_type = other DNA

SEQ ID NO: 62994 - DNA, 120 bp, synthetic construct; identical to SEQ ID NO: 33040
  source 1..120: mol_type = other DNA

SEQ ID NO: 62995 - DNA, 120 bp, synthetic construct; identical to SEQ ID NO: 9708
  source 1..120: mol_type = other DNA

SEQ ID NO: 62996 - DNA, 120 bp, synthetic construct; identical to SEQ ID NO: 33042
  source 1..120: mol_type = other DNA

SEQ ID NO: 62997 - DNA, 120 bp, synthetic construct; identical to SEQ ID NO: 33043
  source 1..120: mol_type = other DNA

SEQ ID NO: 62998 - DNA, 120 bp, synthetic construct; identical to SEQ ID NO: 33044
  source 1..120: mol_type = other DNA

SEQ ID NO: 62999 - DNA, 120 bp, synthetic construct; identical to SEQ ID NO: 9709
  source 1..120: mol_type = other DNA

SEQ ID NO: 63000 - DNA, 120 bp, synthetic construct; identical to SEQ ID NO: 33046
  source 1..120: mol_type = other DNA

SEQ ID NO: 63001 - DNA, 120 bp, synthetic construct; identical to SEQ ID NO: 33047
  source 1..120: mol_type = other DNA

SEQ ID NO: 63002 - DNA, 120 bp, synthetic construct; identical to SEQ ID NO: 33048
  source 1..120: mol_type = other DNA

SEQ ID NO: 63003 - DNA, 120 bp, synthetic construct; identical to SEQ ID NO: 9710
  source 1..120: mol_type = other DNA

SEQ ID NO: 63004 - DNA, 120 bp, synthetic construct; identical to SEQ ID NO: 33050
  source 1..120: mol_type = other DNA

SEQ ID NO: 63005 - DNA, 120 bp, synthetic construct; identical to SEQ ID NO: 33051
  source 1..120: mol_type = other DNA

SEQ ID NO: 63006 - DNA, 120 bp, synthetic construct; identical to SEQ ID NO: 33052
  source 1..120: mol_type = other DNA

SEQ ID NO: 63007 - DNA, 120 bp, synthetic construct; identical to SEQ ID NO: 9711
  source 1..120: mol_type = other DNA

SEQ ID NO: 63008 - DNA, 120 bp, synthetic construct; identical to SEQ ID NO: 33054
  source 1..120: mol_type = other DNA

SEQ ID NO: 63009 - DNA, 120 bp, synthetic construct; identical to SEQ ID NO: 33055
  source 1..120: mol_type = other DNA

SEQ ID NO: 63010 - DNA, 120 bp, synthetic construct; identical to SEQ ID NO: 33056
  source 1..120: mol_type = other DNA

SEQ ID NO: 63011 - DNA, 120 bp, synthetic construct; identical to SEQ ID NO: 33057
  source 1..120: mol_type = other DNA

SEQ ID NO: 63012 - DNA, 120 bp, synthetic construct; identical to SEQ ID NO: 9712
  source 1..120: mol_type = other DNA

SEQ ID NO: 63013 - DNA, 120 bp, synthetic construct; identical to SEQ ID NO: 33059
  source 1..120: mol_type = other DNA

SEQ ID NO: 63014 - DNA, 120 bp, synthetic construct; identical to SEQ ID NO: 33060
  source 1..120: mol_type = other DNA

SEQ ID NO: 63015 - DNA, 120 bp, synthetic construct; identical to SEQ ID NO: 33061
  source 1..120: mol_type = other DNA

SEQ ID NO: 63016 - DNA, 120 bp, synthetic construct; identical to SEQ ID NO: 9713
  source 1..120: mol_type = other DNA

SEQ ID NO: 63017 - DNA, 120 bp, synthetic construct; identical to SEQ ID NO: 33063
  source 1..120: mol_type = other DNA

SEQ ID NO: 63018 - DNA, 120 bp, synthetic construct; identical to SEQ ID NO: 33064
  source 1..120: mol_type = other DNA

SEQ ID NO: 63019 - DNA, 120 bp, synthetic construct; identical to SEQ ID NO: 33065
  source 1..120: mol_type = other DNA

SEQ ID NO: 63020 - DNA, 120 bp, synthetic construct; identical to SEQ ID NO: 9714
  source 1..120: mol_type = other DNA

SEQ ID NO: 63021 - DNA, 120 bp, synthetic construct; identical to SEQ ID NO: 33067
  source 1..120: mol_type = other DNA

SEQ ID NO: 63022 - DNA, 120 bp, synthetic construct; identical to SEQ ID NO: 33068
  source 1..120: mol_type = other DNA

SEQ ID NO: 63023 - DNA, 120 bp, synthetic construct; identical to SEQ ID NO: 9715
  source 1..120: mol_type = other DNA

SEQ ID NO: 63024 - DNA, 120 bp, synthetic construct; identical to SEQ ID NO: 33070
  source 1..120: mol_type = other DNA

SEQ ID NO: 63025 - DNA, 120 bp, synthetic construct; identical to SEQ ID NO: 33071
  source 1..120: mol_type = other DNA

SEQ ID NO: 63026 - DNA, 120 bp, synthetic construct; identical to SEQ ID NO: 33072
  source 1..120: mol_type = other DNA

SEQ ID NO: 63027 - DNA, 120 bp, synthetic construct; identical to SEQ ID NO: 9716
  source 1..120: mol_type = other DNA

SEQ ID NO: 63028 - DNA, 120 bp, synthetic construct; identical to SEQ ID NO: 33074
  source 1..120: mol_type = other DNA

SEQ ID NO: 63029 - DNA, 120 bp, synthetic construct; identical to SEQ ID NO: 33075
  source 1..120: mol_type = other DNA

SEQ ID NO: 63030 - DNA, 120 bp, synthetic construct; identical to SEQ ID NO: 33076
  source 1..120: mol_type = other DNA

SEQ ID NO: 63031 - DNA, 120 bp, synthetic construct; identical to SEQ ID NO: 9717
  source 1..120: mol_type = other DNA

SEQ ID NO: 63032 - DNA, 120 bp, synthetic construct; identical to SEQ ID NO: 33078
  source 1..120: mol_type = other DNA

SEQ ID NO: 63033 - DNA, 120 bp, synthetic construct; identical to SEQ ID NO: 33079
  source 1..120: mol_type = other DNA

SEQ ID NO: 63034 - DNA, 120 bp, synthetic construct; identical to SEQ ID NO: 33080
  source 1..120: mol_type = other DNA

SEQ ID NO: 63035 - DNA, 120 bp, synthetic construct; identical to SEQ ID NO: 33081
  source 1..120: mol_type = other DNA

SEQ ID NO: 63036 - DNA, 120 bp, synthetic construct; identical to SEQ ID NO: 9718
  source 1..120: mol_type = other DNA

SEQ ID NO: 63037 - DNA, 120 bp, synthetic construct; identical to SEQ ID NO: 33083
  source 1..120: mol_type = other DNA

SEQ ID NO: 63038 - DNA, 120 bp, synthetic construct; identical to SEQ ID NO: 33084
  source 1..120: mol_type = other DNA

SEQ ID NO: 63039 - DNA, 120 bp, synthetic construct; identical to SEQ ID NO: 9719
  source 1..120: mol_type = other DNA

SEQ ID NO: 63040 - DNA, 120 bp, synthetic construct; identical to SEQ ID NO: 33086
  source 1..120: mol_type = other DNA

SEQ ID NO: 63041 - DNA, 120 bp, synthetic construct; identical to SEQ ID NO: 33087
  source 1..120: mol_type = other DNA

SEQ ID NO: 63042 - DNA, 120 bp, synthetic construct; identical to SEQ ID NO: 33088
  source 1..120: mol_type = other DNA

SEQ ID NO: 63043 - DNA, 120 bp, synthetic construct; identical to SEQ ID NO: 33089
  source 1..120: mol_type = other DNA

SEQ ID NO: 63044 - DNA, 120 bp, synthetic construct; identical to SEQ ID NO: 9720
  source 1..120: mol_type = other DNA

SEQ ID NO: 63045 - DNA, 120 bp, synthetic construct; identical to SEQ ID NO: 33091
  source 1..120: mol_type = other DNA

SEQ ID NO: 63046 - DNA, 120 bp, synthetic construct; identical to SEQ ID NO: 33092
  source 1..120: mol_type = other DNA

SEQ ID NO: 63047 - DNA, 120 bp, synthetic construct; identical to SEQ ID NO: 9721
  source 1..120: mol_type = other DNA

SEQ ID NO: 63048 - DNA, 120 bp, synthetic construct; identical to SEQ ID NO: 33094
  source 1..120: mol_type = other DNA

SEQ ID NO: 63049 - DNA, 120 bp, synthetic construct; identical to SEQ ID NO: 33095
  source 1..120: mol_type = other DNA

SEQ ID NO: 63050 - DNA, 120 bp, synthetic construct; identical to SEQ ID NO: 33096
  source 1..120: mol_type = other DNA

SEQ ID NO: 63051 - DNA, 120 bp, synthetic construct; identical to SEQ ID NO: 9722
  source 1..120: mol_type = other DNA

SEQ ID NO: 63052 - DNA, 120 bp, synthetic construct; identical to SEQ ID NO: 33098
  source 1..120: mol_type = other DNA

SEQ ID NO: 63053 - DNA, 120 bp, synthetic construct; identical to SEQ ID NO: 33099
  source 1..120: mol_type = other DNA

SEQ ID NO: 63054 - DNA, 120 bp, synthetic construct; identical to SEQ ID NO: 33100
  source 1..120: mol_type = other DNA

SEQ ID NO: 63055 - DNA, 120 bp, synthetic construct; identical to SEQ ID NO: 33101
  source 1..120: mol_type = other DNA

SEQ ID NO: 63056 - DNA, 120 bp, synthetic construct; identical to SEQ ID NO: 9723
  source 1..120: mol_type = other DNA

SEQ ID NO: 63057 - DNA, 120 bp, synthetic construct; identical to SEQ ID NO: 33103
  source 1..120: mol_type = other DNA

SEQ ID NO: 63058 - DNA, 120 bp, synthetic construct; identical to SEQ ID NO: 33104
  source 1..120: mol_type = other DNA

SEQ ID NO: 63059 - DNA, 120 bp, synthetic construct; identical to SEQ ID NO: 33105
  source 1..120: mol_type = other DNA

SEQ ID NO: 63060 - DNA, 120 bp, synthetic construct; identical to SEQ ID NO: 9724
  source 1..120: mol_type = other DNA

SEQ ID NO: 63061 - DNA, 120 bp, synthetic construct; identical to SEQ ID NO: 33107
  source 1..120: mol_type = other DNA

SEQ ID NO: 63062 - DNA, 120 bp, synthetic construct; identical to SEQ ID NO: 33108
  source 1..120: mol_type = other DNA

SEQ ID NO: 63063 - DNA, 120 bp, synthetic construct; identical to SEQ ID NO: 9725
  source 1..120: mol_type = other DNA

SEQ ID NO: 63064 - DNA, 120 bp, synthetic construct; identical to SEQ ID NO: 33110
  source 1..120: mol_type = other DNA

SEQ ID NO: 63065 - DNA, 120 bp, synthetic construct; identical to SEQ ID NO: 33111
  source 1..120: mol_type = other DNA

SEQ ID NO: 63066 - DNA, 120 bp, synthetic construct; identical to SEQ ID NO: 33112
  source 1..120: mol_type = other DNA

SEQ ID NO: 63067 - DNA, 120 bp, synthetic construct; identical to SEQ ID NO: 9726
  source 1..120: mol_type = other DNA

SEQ ID NO: 63068 - DNA, 120 bp, synthetic construct; identical to SEQ ID NO: 33114
  source 1..120: mol_type = other DNA

SEQ ID NO: 63069 - DNA, 120 bp, synthetic construct; identical to SEQ ID NO: 33115
  source 1..120: mol_type = other DNA

SEQ ID NO: 63070 - DNA, 120 bp, synthetic construct; identical to SEQ ID NO: 33116
  source 1..120: mol_type = other DNA

SEQ ID NO: 63071 - DNA, 120 bp, synthetic construct; identical to SEQ ID NO: 33117
  source 1..120: mol_type = other DNA

SEQ ID NO: 63072 - DNA, 120 bp, synthetic construct; identical to SEQ ID NO: 9727
  source 1..120: mol_type = other DNA

SEQ ID NO: 63073 - DNA, 120 bp, synthetic construct; identical to SEQ ID NO: 33119
  source 1..120: mol_type = other DNA

SEQ ID NO: 63074 - DNA, 120 bp, synthetic construct; identical to SEQ ID NO: 33120
  source 1..120: mol_type = other DNA

SEQ ID NO: 63075 - DNA, 120 bp, synthetic construct; identical to SEQ ID NO: 33121
  source 1..120: mol_type = other DNA

SEQ ID NO: 63076 - DNA, 120 bp, synthetic construct; identical to SEQ ID NO: 9728
  source 1..120: mol_type = other DNA

SEQ ID NO: 63077 - DNA, 120 bp, synthetic construct; identical to SEQ ID NO: 33123
  source 1..120: mol_type = other DNA

SEQ ID NO: 63078 - DNA, 120 bp, synthetic construct; identical to SEQ ID NO: 33124
  source 1..120: mol_type = other DNA

SEQ ID NO: 63079 - DNA, 120 bp, synthetic construct; identical to SEQ ID NO: 33125
  source 1..120: mol_type = other DNA

SEQ ID NO: 63080 - DNA, 120 bp, synthetic construct; identical to SEQ ID NO: 2587
  source 1..120: mol_type = other DNA

SEQ ID NO: 63081 - DNA, 120 bp, synthetic construct; identical to SEQ ID NO: 33127
  source 1..120: mol_type = other DNA

SEQ ID NO: 63082 - DNA, 120 bp, synthetic construct; identical to SEQ ID NO: 33128
  source 1..120: mol_type = other DNA

SEQ ID NO: 63083 - DNA, 120 bp, synthetic construct; identical to SEQ ID NO: 9730
  source 1..120: mol_type = other DNA

SEQ ID NO: 63084 - DNA, 120 bp, synthetic construct; identical to SEQ ID NO: 33130
  source 1..120: mol_type = other DNA

SEQ ID NO: 63085 - DNA, 120 bp, synthetic construct; identical to SEQ ID NO: 33131
  source 1..120: mol_type = other DNA

SEQ ID NO: 63086 - DNA, 120 bp, synthetic construct; identical to SEQ ID NO: 33132
  source 1..120: mol_type = other DNA

SEQ ID NO: 63087 - DNA, 120 bp, synthetic construct; identical to SEQ ID NO: 33133
  source 1..120: mol_type = other DNA

SEQ ID NO: 63088 - DNA, 120 bp, synthetic construct; identical to SEQ ID NO: 9731
  source 1..120: mol_type = other DNA

SEQ ID NO: 63089 - DNA, 120 bp, synthetic construct; identical to SEQ ID NO: 33135
  source 1..120: mol_type = other DNA

SEQ ID NO: 63090 - DNA, 120 bp, synthetic construct; identical to SEQ ID NO: 33136
  source 1..120: mol_type = other DNA

SEQ ID NO: 63091 - DNA, 120 bp, synthetic construct; identical to SEQ ID NO: 33137
  source 1..120: mol_type = other DNA

SEQ ID NO: 63092 - DNA, 120 bp, synthetic construct; identical to SEQ ID NO: 9732
  source 1..120: mol_type = other DNA

SEQ ID NO: 63093 - DNA, 120 bp, synthetic construct; identical to SEQ ID NO: 33139
  source 1..120: mol_type = other DNA

SEQ ID NO: 63094 - DNA, 120 bp, synthetic construct; identical to SEQ ID NO: 33140
  source 1..120: mol_type = other DNA

SEQ ID NO: 63095 - DNA, 120 bp, synthetic construct; identical to SEQ ID NO: 33141
  source 1..120: mol_type = other DNA

SEQ ID NO: 63096 - DNA, 120 bp, synthetic construct; identical to SEQ ID NO: 9733
  source 1..120: mol_type = other DNA

SEQ ID NO: 63097 - DNA, 120 bp, synthetic construct; identical to SEQ ID NO: 33143
  source 1..120: mol_type = other DNA

SEQ ID NO: 63098 - DNA, 120 bp, synthetic construct; identical to SEQ ID NO: 33144
  source 1..120: mol_type = other DNA

SEQ ID NO: 63099 - DNA, 120 bp, synthetic construct; identical to SEQ ID NO: 33145
  source 1..120: mol_type = other DNA

SEQ ID NO: 63100 - DNA, 120 bp, synthetic construct; identical to SEQ ID NO: 9734
  source 1..120: mol_type = other DNA

SEQ ID NO: 63101 - DNA, 120 bp, synthetic construct; identical to SEQ ID NO: 33147
  source 1..120: mol_type = other DNA

SEQ ID NO: 63102 - DNA, 120 bp, synthetic construct; identical to SEQ ID NO: 33148
  source 1..120: mol_type = other DNA

SEQ ID NO: 63103 - DNA, 120 bp, synthetic construct; identical to SEQ ID NO: 33149
  source 1..120: mol_type = other DNA

SEQ ID NO: 63104 - DNA, 120 bp, synthetic construct; identical to SEQ ID NO: 9735
  source 1..120: mol_type = other DNA

SEQ ID NO: 63105 - DNA, 120 bp, synthetic construct; identical to SEQ ID NO: 33151
  source 1..120: mol_type = other DNA

SEQ ID NO: 63106 - DNA, 120 bp, synthetic construct; identical to SEQ ID NO: 33152
  source 1..120: mol_type = other DNA

SEQ ID NO: 63107 - DNA, 120 bp, synthetic construct; identical to SEQ ID NO: 33153
  source 1..120: mol_type = other DNA

SEQ ID NO: 63108 - DNA, 120 bp, synthetic construct; identical to SEQ ID NO: 9736
  source 1..120: mol_type = other DNA

SEQ ID NO: 63109 - DNA, 120 bp, synthetic construct; identical to SEQ ID NO: 33155
  source 1..120: mol_type = other DNA

SEQ ID NO: 63110 - DNA, 120 bp, synthetic construct; identical to SEQ ID NO: 33156
  source 1..120: mol_type = other DNA

SEQ ID NO: 63111 - DNA, 120 bp, synthetic construct; identical to SEQ ID NO: 9737
  source 1..120: mol_type = other DNA

SEQ ID NO: 63112 - DNA, 120 bp, synthetic construct; identical to SEQ ID NO: 33158
  source 1..120: mol_type = other DNA

SEQ ID NO: 63113 - DNA, 120 bp, synthetic construct; identical to SEQ ID NO: 33159
  source 1..120: mol_type = other DNA

SEQ ID NO: 63114 - DNA, 120 bp, synthetic construct; identical to SEQ ID NO: 33160
  source 1..120: mol_type = other DNA

SEQ ID NO: 63115 - DNA, 120 bp, synthetic construct; identical to SEQ ID NO: 33161
  source 1..120: mol_type = other DNA

SEQ ID NO: 63116 - DNA, 120 bp, synthetic construct; identical to SEQ ID NO: 9738
  source 1..120: mol_type = other DNA

SEQ ID NO: 63117 - DNA, 120 bp, synthetic construct; identical to SEQ ID NO: 33163
  source 1..120: mol_type = other DNA

SEQ ID NO: 63118 - DNA, 120 bp, synthetic construct; identical to SEQ ID NO: 33164
  source 1..120: mol_type = other DNA

SEQ ID NO: 63119 - DNA, 120 bp, synthetic construct; identical to SEQ ID NO: 9739
  source 1..120: mol_type = other DNA

SEQ ID NO: 63120 - DNA, 120 bp, synthetic construct; identical to SEQ ID NO: 33166
  source 1..120: mol_type = other DNA

SEQ ID NO: 63121 - DNA, 120 bp, synthetic construct; identical to SEQ ID NO: 33167
  source 1..120: mol_type = other DNA

SEQ ID NO: 63122 - DNA, 120 bp, synthetic construct; identical to SEQ ID NO: 33168
  source 1..120: mol_type = other DNA

SEQ ID NO: 63123 - DNA, 120 bp, synthetic construct; identical to SEQ ID NO: 9740
  source 1..120: mol_type = other DNA

SEQ ID NO: 63124 - DNA, 120 bp, synthetic construct; identical to SEQ ID NO: 33170
  source 1..120: mol_type = other DNA

SEQ ID NO: 63125 - DNA, 120 bp, synthetic construct; identical to SEQ ID NO: 33171
  source 1..120: mol_type = other DNA

SEQ ID NO: 63126 - DNA, 120 bp, synthetic construct; identical to SEQ ID NO: 33172
  source 1..120: mol_type = other DNA

SEQ ID NO: 63127 - DNA, 120 bp, synthetic construct; identical to SEQ ID NO: 33173
  source 1..120: mol_type = other DNA

SEQ ID NO: 63128 - DNA, 120 bp, synthetic construct; identical to SEQ ID NO: 9741
  source 1..120: mol_type = other DNA

SEQ ID NO: 63129 - DNA, 120 bp, synthetic construct; identical to SEQ ID NO: 33175
  source 1..120: mol_type = other DNA

SEQ ID NO: 63130 - DNA, 120 bp, synthetic construct; identical to SEQ ID NO: 33176
  source 1..120: mol_type = other DNA

SEQ ID NO: 63131 - DNA, 120 bp, synthetic construct; identical to SEQ ID NO: 33177
  source 1..120: mol_type = other DNA

SEQ ID NO: 63132 - DNA, 120 bp, synthetic construct; identical to SEQ ID NO: 9742
  source 1..120: mol_type = other DNA

SEQ ID NO: 63133 - DNA, 120 bp, synthetic construct; identical to SEQ ID NO: 33179
  source 1..120: mol_type = other DNA

SEQ ID NO: 63134 - DNA, 120 bp, synthetic construct; identical to SEQ ID NO: 33180
  source 1..120: mol_type = other DNA

SEQ ID NO: 63135 - DNA, 120 bp, synthetic construct; identical to SEQ ID NO: 9743
  source 1..120: mol_type = other DNA

SEQ ID NO: 63136 - DNA, 120 bp, synthetic construct; identical to SEQ ID NO: 33182
  source 1..120: mol_type = other DNA

SEQ ID NO: 63137 - DNA, 120 bp, synthetic construct; identical to SEQ ID NO: 33183
  source 1..120: mol_type = other DNA

SEQ ID NO: 63138 - DNA, 120 bp, synthetic construct; identical to SEQ ID NO: 33184
  source 1..120: mol_type = other DNA

SEQ ID NO: 63139 - DNA, 120 bp, synthetic construct; identical to SEQ ID NO: 33185
  source 1..120: mol_type = other DNA

SEQ ID NO: 63140 - DNA, 120 bp, synthetic construct; identical to SEQ ID NO: 9744
  source 1..120: mol_type = other DNA

SEQ ID NO: 63141 - DNA, 120 bp, synthetic construct; identical to SEQ ID NO: 33187
  source 1..120: mol_type = other DNA

SEQ ID NO: 63142 - DNA, 120 bp, synthetic construct; identical to SEQ ID NO: 33188
  source 1..120: mol_type = other DNA

SEQ ID NO: 63143 - DNA, 120 bp, synthetic construct; identical to SEQ ID NO: 33189
  source 1..120: mol_type = other DNA

SEQ ID NO: 63144 - DNA, 120 bp, synthetic construct; identical to SEQ ID NO: 9745
  source 1..120: mol_type = other DNA

SEQ ID NO: 63145 - DNA, 120 bp, synthetic construct; identical to SEQ ID NO: 33191
  source 1..120: mol_type = other DNA

SEQ ID NO: 63146 - DNA, 120 bp, synthetic construct; identical to SEQ ID NO: 33192
  source 1..120: mol_type = other DNA

SEQ ID NO: 63147 - DNA, 120 bp, synthetic construct; identical to SEQ ID NO: 33193
  source 1..120: mol_type = other DNA

SEQ ID NO: 63148 - DNA, 120 bp, synthetic construct; identical to SEQ ID NO: 9746
  source 1..120: mol_type = other DNA

SEQ ID NO: 63149 - DNA, 120 bp, synthetic construct; identical to SEQ ID NO: 33195
  source 1..120: mol_type = other DNA

SEQ ID NO: 63150 - DNA, 120 bp, synthetic construct; identical to SEQ ID NO: 33196
  source 1..120: mol_type = other DNA

SEQ ID NO: 63151 - DNA, 120 bp, synthetic construct; identical to SEQ ID NO: 33197
  source 1..120: mol_type = other DNA

SEQ ID NO: 63152 - DNA, 120 bp, synthetic construct; identical to SEQ ID NO: 33198
  source 1..120: mol_type = other DNA

SEQ ID NO: 63153 - DNA, 120 bp, synthetic construct; identical to SEQ ID NO: 9747
  source 1..120: mol_type = other DNA

SEQ ID NO: 63154 - DNA, 120 bp, synthetic construct; identical to SEQ ID NO: 33200
  source 1..120: mol_type = other DNA

SEQ ID NO: 63155 - DNA, 120 bp, synthetic construct; identical to SEQ ID NO: 33201
  source 1..120: mol_type = other DNA

SEQ ID NO: 63156 - DNA, 120 bp, synthetic construct; identical to SEQ ID NO: 33202
  source 1..120: mol_type = other DNA

SEQ ID NO: 63157 - DNA, 120 bp, synthetic construct; identical to SEQ ID NO: 9748
  source 1..120: mol_type = other DNA

SEQ ID NO: 63158 - DNA, 120 bp, synthetic construct; identical to SEQ ID NO: 33204
  source 1..120: mol_type = other DNA

SEQ ID NO: 63159 - DNA, 120 bp, synthetic construct; identical to SEQ ID NO: 33205
  source 1..120: mol_type = other DNA

SEQ ID NO: 63160 - DNA, 120 bp, synthetic construct; identical to SEQ ID NO: 33206
  source 1..120: mol_type = other DNA

SEQ ID NO: 63161 - DNA, 120 bp, synthetic construct; identical to SEQ ID NO: 33207
  source 1..120: mol_type = other DNA

SEQ ID NO: 63162 - DNA, 120 bp, synthetic construct; identical to SEQ ID NO: 9749
  source 1..120: mol_type = other DNA

SEQ ID NO: 63163 - DNA, 120 bp, synthetic construct; identical to SEQ ID NO: 33209
  source 1..120: mol_type = other DNA

SEQ ID NO: 63164 - DNA, 120 bp, synthetic construct; identical to SEQ ID NO: 33210
  source 1..120: mol_type = other DNA

SEQ ID NO: 63165 - DNA, 120 bp, synthetic construct; identical to SEQ ID NO: 9750
  source 1..120: mol_type = other DNA

SEQ ID NO: 63166 - DNA, 120 bp, synthetic construct; identical to SEQ ID NO: 33212
  source 1..120: mol_type = other DNA

SEQ ID NO: 63167 - DNA, 120 bp, synthetic construct; identical to SEQ ID NO: 33213
  source 1..120: mol_type = other DNA

SEQ ID NO: 63168 - DNA, 120 bp, synthetic construct; identical to SEQ ID NO: 33214
  source 1..120: mol_type = other DNA

SEQ ID NO: 63169 - DNA, 120 bp, synthetic construct; identical to SEQ ID NO: 9751
  source 1..120: mol_type = other DNA

SEQ ID NO: 63170 - DNA, 120 bp, synthetic construct; identical to SEQ ID NO: 33216
  source 1..120: mol_type = other DNA

SEQ ID NO: 63171 - DNA, 120 bp, synthetic construct; identical to SEQ ID NO: 33217
  source 1..120: mol_type = other DNA

SEQ ID NO: 63172 - DNA, 120 bp, synthetic construct; identical to SEQ ID NO: 33218
  source 1..120: mol_type = other DNA

SEQ ID NO: 63173 - DNA, 120 bp, synthetic construct; identical to SEQ ID NO: 9752
  source 1..120: mol_type = other DNA

SEQ ID NO: 63174 - DNA, 120 bp, synthetic construct; identical to SEQ ID NO: 33220
  source 1..120: mol_type = other DNA

SEQ ID NO: 63175 - DNA, 120 bp, synthetic construct; identical to SEQ ID NO: 33221
  source 1..120: mol_type = other DNA

SEQ ID NO: 63176 - DNA, 120 bp, synthetic construct; identical to SEQ ID NO: 33222
  source 1..120: mol_type = other DNA

SEQ ID NO: 63177 - DNA, 120 bp, synthetic construct; identical to SEQ ID NO: 9753
  source 1..120: mol_type = other DNA

SEQ ID NO: 63178 - DNA, 120 bp, synthetic construct; identical to SEQ ID NO: 33224
  source 1..120: mol_type = other DNA

SEQ ID NO: 63179 - DNA, 120 bp, synthetic construct; identical to SEQ ID NO: 33225
  source 1..120: mol_type = other DNA

SEQ ID NO: 63180 - DNA, 120 bp, synthetic construct; identical to SEQ ID NO: 33226
  source 1..120: mol_type = other DNA

SEQ ID NO: 63181 - DNA, 120 bp, synthetic construct; identical to SEQ ID NO: 9754
  source 1..120: mol_type = other DNA

SEQ ID NO: 63182 - DNA, 120 bp, synthetic construct; identical to SEQ ID NO: 33228
  source 1..120: mol_type = other DNA

SEQ ID NO: 63183 - DNA, 120 bp, synthetic construct; identical to SEQ ID NO: 33229
  source 1..120: mol_type = other DNA

SEQ ID NO: 63184 - DNA, 120 bp, synthetic construct; identical to SEQ ID NO: 2611
  source 1..120: mol_type = other DNA

SEQ ID NO: 63185 - DNA, 120 bp, synthetic construct; identical to SEQ ID NO: 9755
  source 1..120: mol_type = other DNA

SEQ ID NO: 63186 - DNA, 120 bp, synthetic construct; identical to SEQ ID NO: 33232
  source 1..120: mol_type = other DNA

SEQ ID NO: 63187 - DNA, 120 bp, synthetic construct; identical to SEQ ID NO: 33233
  source 1..120: mol_type = other DNA

SEQ ID NO: 63188 - DNA, 120 bp, synthetic construct; identical to SEQ ID NO: 33234
  source 1..120: mol_type = other DNA

SEQ ID NO: 63189 - DNA, 120 bp, synthetic construct; identical to SEQ ID NO: 33235
  source 1..120: mol_type = other DNA

SEQ ID NO: 63190 - DNA, 120 bp, synthetic construct; identical to SEQ ID NO: 9756
  source 1..120: mol_type = other DNA

SEQ ID NO: 63191 - DNA, 120 bp, synthetic construct; identical to SEQ ID NO: 33237
  source 1..120: mol_type = other DNA

SEQ ID NO: 63192 - DNA, 120 bp, synthetic construct; identical to SEQ ID NO: 33238
  source 1..120: mol_type = other DNA

SEQ ID NO: 63193 - DNA, 120 bp, synthetic construct; identical to SEQ ID NO: 9757
  source 1..120: mol_type = other DNA

SEQ ID NO: 63194 - DNA, 120 bp, synthetic construct; identical to SEQ ID NO: 33240
  source 1..120: mol_type = other DNA

SEQ ID NO: 63195 - DNA, 120 bp, synthetic construct; identical to SEQ ID NO: 9758
  source 1..120: mol_type = other DNA

SEQ ID NO: 63196 - DNA, 120 bp, synthetic construct; identical to SEQ ID NO: 33242
  source 1..120: mol_type = other DNA

SEQ ID NO: 63197 - DNA, 120 bp, synthetic construct; identical to SEQ ID NO: 33243
  source 1..120: mol_type = other DNA

SEQ ID NO: 63198 - DNA, 120 bp, synthetic construct; identical to SEQ ID NO: 33244
  source 1..120: mol_type = other DNA

SEQ ID NO: 63199 - DNA, 120 bp, synthetic construct; identical to SEQ ID NO: 9759
  source 1..120: mol_type = other DNA

SEQ ID NO: 63200 - DNA, 120 bp, synthetic construct; identical to SEQ ID NO: 33246
  source 1..120: mol_type = other DNA

SEQ ID NO: 63201 - DNA, 120 bp, synthetic construct; identical to SEQ ID NO: 33247
  source 1..120: mol_type = other DNA

SEQ ID NO: 63202 - DNA, 120 bp, synthetic construct; identical to SEQ ID NO: 33248
  source 1..120: mol_type = other DNA

SEQ ID NO: 63203 - DNA, 120 bp, synthetic construct; identical to SEQ ID NO: 9760
  source 1..120: mol_type = other DNA

SEQ ID NO: 63204 - DNA, 120 bp, synthetic construct; identical to SEQ ID NO: 33250
  source 1..120: mol_type = other DNA

SEQ ID NO: 63205 - DNA, 120 bp, synthetic construct; identical to SEQ ID NO: 33251
  source 1..120: mol_type = other DNA

SEQ ID NO: 63206 - DNA, 120 bp, synthetic construct; identical to SEQ ID NO: 9761
  source 1..120: mol_type = other DNA

SEQ ID NO: 63207 - DNA, 120 bp, synthetic construct; identical to SEQ ID NO: 33253
  source 1..120: mol_type = other DNA

SEQ ID NO: 63208 - DNA, 120 bp, synthetic construct; identical to SEQ ID NO: 33254
  source 1..120: mol_type = other DNA

SEQ ID NO: 63209 - DNA, 120 bp, synthetic construct; identical to SEQ ID NO: 33255
  source 1..120: mol_type = other DNA

SEQ ID NO: 63210 - DNA, 120 bp, synthetic construct; identical to SEQ ID NO: 33256
  source 1..120: mol_type = other DNA

SEQ ID NO: 63211 - DNA, 120 bp, synthetic construct; identical to SEQ ID NO: 9762
  source 1..120: mol_type = other DNA

SEQ ID NO: 63212 - DNA, 120 bp, synthetic construct; identical to SEQ ID NO: 33258
  source 1..120: mol_type = other DNA

SEQ ID NO: 63213 - DNA, 120 bp, synthetic construct; identical to SEQ ID NO: 33259
  source 1..120: mol_type = other DNA

SEQ ID NO: 63214 - DNA, 120 bp, synthetic construct; identical to SEQ ID NO: 33260
  source 1..120: mol_type = other DNA

SEQ ID NO: 63215 - DNA, 120 bp, synthetic construct; identical to SEQ ID NO: 9763
  source 1..120: mol_type = other DNA

SEQ ID NO: 63216 - DNA, 120 bp, synthetic construct; identical to SEQ ID NO: 33262
  source 1..120: mol_type = other DNA

SEQ ID NO: 63217 - DNA, 120 bp, synthetic construct; identical to SEQ ID NO: 33263
  source 1..120: mol_type = other DNA

SEQ ID NO: 63218 - DNA, 120 bp, synthetic construct; identical to SEQ ID NO: 33264
  source 1..120: mol_type = other DNA

SEQ ID NO: 63219 - DNA, 120 bp, synthetic construct; identical to SEQ ID NO: 9764
  source 1..120: mol_type = other DNA

SEQ ID NO: 63220 - DNA, 120 bp, synthetic construct; identical to SEQ ID NO: 33266
  source 1..120: mol_type = other DNA

SEQ ID NO: 63221 - DNA, 120 bp, synthetic construct; identical to SEQ ID NO: 33267
  source 1..120: mol_type = other DNA

SEQ ID NO: 63222 - DNA, 120 bp, synthetic construct; identical to SEQ ID NO: 9765
  source 1..120: mol_type = other DNA

SEQ ID NO: 63223 - DNA, 120 bp, synthetic construct; identical to SEQ ID NO: 33269
  source 1..120: mol_type = other DNA

SEQ ID NO: 63224 - DNA, 120 bp, synthetic construct; identical to SEQ ID NO: 33270
  source 1..120: mol_type = other DNA

SEQ ID NO: 63225 - DNA, 120 bp, synthetic construct; identical to SEQ ID NO: 33271
  source 1..120: mol_type = other DNA

SEQ ID NO: 63226 - DNA, 120 bp, synthetic construct; identical to SEQ ID NO: 33272
  source 1..120: mol_type = other DNA

SEQ ID NO: 63227 - DNA, 120 bp, synthetic construct; identical to SEQ ID NO: 9766
  source 1..120: mol_type = other DNA

SEQ ID NO: 63228 - DNA, 120 bp, synthetic construct; identical to SEQ ID NO: 33274
  source 1..120: mol_type = other DNA

SEQ ID NO: 63229 - DNA, 120 bp, synthetic construct; identical to SEQ ID NO: 33275
  source 1..120: mol_type = other DNA

SEQ ID NO: 63230 - DNA, 120 bp, synthetic construct; identical to SEQ ID NO: 9767
  source 1..120: mol_type = other DNA

SEQ ID NO: 63231 - DNA, 120 bp, synthetic construct; identical to SEQ ID NO: 33277
  source 1..120: mol_type = other DNA

SEQ ID NO: 63232 - DNA, 120 bp, synthetic construct; identical to SEQ ID NO: 33278
  source 1..120: mol_type = other DNA

SEQ ID NO: 63233 - DNA, 120 bp, synthetic construct; identical to SEQ ID NO: 33279
  source 1..120: mol_type = other DNA

SEQ ID NO: 63234 - DNA, 120 bp, synthetic construct; identical to SEQ ID NO: 33280
  source 1..120: mol_type = other DNA

SEQ ID NO: 63235 - DNA, 120 bp, synthetic construct; identical to SEQ ID NO: 9768
  source 1..120: mol_type = other DNA

SEQ ID NO: 63236 - DNA, 120 bp, synthetic construct; identical to SEQ ID NO: 33282
  source 1..120: mol_type = other DNA

SEQ ID NO: 63237 - DNA, 120 bp, synthetic construct; identical to SEQ ID NO: 33283
  source 1..120: mol_type = other DNA

SEQ ID NO: 63238 - DNA, 120 bp, synthetic construct; identical to SEQ ID NO: 9769
  source 1..120: mol_type = other DNA

SEQ ID NO: 63239 - DNA, 120 bp, synthetic construct; identical to SEQ ID NO: 33285
  source 1..120: mol_type = other DNA

SEQ ID NO: 63240 - DNA, 120 bp, synthetic construct; identical to SEQ ID NO: 33286
  source 1..120: mol_type = other DNA

SEQ ID NO: 63241 - DNA, 120 bp, synthetic construct; identical to SEQ ID NO: 33287
  source 1..120: mol_type = other DNA

SEQ ID NO: 63242 - DNA, 120 bp, synthetic construct; identical to SEQ ID NO: 33288
  source 1..120: mol_type = other DNA

SEQ ID NO: 63243 - DNA, 120 bp, synthetic construct; identical to SEQ ID NO: 9770
  source 1..120: mol_type = other DNA

SEQ ID NO: 63244 - DNA, 120 bp, synthetic construct; identical to SEQ ID NO: 33290
  source 1..120: mol_type = other DNA

SEQ ID NO: 63245 - DNA, 120 bp, synthetic construct; identical to SEQ ID NO: 33291
  source 1..120: mol_type = other DNA

SEQ ID NO: 63246 - DNA, 120 bp, synthetic construct; identical to SEQ ID NO: 9771
  source 1..120: mol_type = other DNA

SEQ ID NO: 63247 - DNA, 120 bp, synthetic construct; identical to SEQ ID NO: 33293
  source 1..120: mol_type = other DNA

SEQ ID NO: 63248 - DNA, 120 bp, synthetic construct; identical to SEQ ID NO: 33294
  source 1..120: mol_type = other DNA

SEQ ID NO: 63249 - DNA, 120 bp, synthetic construct; identical to SEQ ID NO: 33295
  source 1..120: mol_type = other DNA

SEQ ID NO: 63250 - DNA, 120 bp, synthetic construct; identical to SEQ ID NO: 33296
  source 1..120: mol_type = other DNA

SEQ ID NO: 63251 - DNA, 120 bp, synthetic construct; identical to SEQ ID NO: 33297
  source 1..120: mol_type = other DNA

SEQ ID NO: 63252 - DNA, 120 bp, synthetic construct; identical to SEQ ID NO: 9772
  source 1..120: mol_type = other DNA

SEQ ID NO: 63253 - DNA, 120 bp, synthetic construct; identical to SEQ ID NO: 33299
  source 1..120: mol_type = other DNA

SEQ ID NO: 63254 - DNA, 120 bp, synthetic construct; identical to SEQ ID NO: 33300
  source 1..120: mol_type = other DNA

SEQ ID NO: 63255 - DNA, 120 bp, synthetic construct; identical to SEQ ID NO: 33301
  source 1..120: mol_type = other DNA

SEQ ID NO: 63256 - DNA, 120 bp, synthetic construct; identical to SEQ ID NO: 9773
  source 1..120: mol_type = other DNA

SEQ ID NO: 63257 - DNA, 120 bp, synthetic construct; identical to SEQ ID NO: 33303
  source 1..120: mol_type = other DNA

SEQ ID NO: 63258 - DNA, 120 bp, synthetic construct; identical to SEQ ID NO: 33304
  source 1..120: mol_type = other DNA

SEQ ID NO: 63259 - DNA, 120 bp, synthetic construct; identical to SEQ ID NO: 9774
  source 1..120: mol_type = other DNA

SEQ ID NO: 63260 - DNA, 120 bp, synthetic construct; identical to SEQ ID NO: 33306
  source 1..120: mol_type = other DNA

SEQ ID NO: 63261 - DNA, 120 bp, synthetic construct; identical to SEQ ID NO: 33307
  source 1..120: mol_type = other DNA

SEQ ID NO: 63262 - DNA, 120 bp, synthetic construct; identical to SEQ ID NO: 33308
  source 1..120: mol_type = other DNA

SEQ ID NO: 63263 - DNA, 120 bp, synthetic construct; identical to SEQ ID NO: 33309
  source 1..120: mol_type = other DNA

SEQ ID NO: 63264 - DNA, 120 bp, synthetic construct; identical to SEQ ID NO: 9775
  source 1..120: mol_type = other DNA

SEQ ID NO: 63265 - DNA, 120 bp, synthetic construct; identical to SEQ ID NO: 33311
  source 1..120: mol_type = other DNA

SEQ ID NO: 63266 - DNA, 120 bp, synthetic construct; identical to SEQ ID NO: 33312
  source 1..120: mol_type = other DNA

SEQ ID NO: 63267 - DNA, 120 bp, synthetic construct; identical to SEQ ID NO: 9776
  source 1..120: mol_type = other DNA

SEQ ID NO: 63268 - DNA, 120 bp, synthetic construct; identical to SEQ ID NO: 33314
  source 1..120: mol_type = other DNA

SEQ ID NO: 63269 - DNA, 120 bp, synthetic construct; identical to SEQ ID NO: 33315
  source 1..120: mol_type = other DNA

SEQ ID NO: 63270 - DNA, 120 bp, synthetic construct; identical to SEQ ID NO: 33316
  source 1..120: mol_type = other DNA

SEQ ID NO: 63271 - DNA, 120 bp, synthetic construct; identical to SEQ ID NO: 9777
  source 1..120: mol_type = other DNA

SEQ ID NO: 63272 - DNA, 120 bp, synthetic construct; identical to SEQ ID NO: 33318
  source 1..120: mol_type = other DNA

SEQ ID NO: 63273 - DNA, 120 bp, synthetic construct; identical to SEQ ID NO: 33319
  source 1..120: mol_type = other DNA

SEQ ID NO: 63274 - DNA, 120 bp, synthetic construct; identical to SEQ ID NO: 33320
  source 1..120: mol_type = other DNA

SEQ ID NO: 63275 - DNA, 120 bp, synthetic construct; identical to SEQ ID NO: 9778
  source 1..120: mol_type = other DNA

SEQ ID NO: 63276 - DNA, 120 bp, synthetic construct; identical to SEQ ID NO: 33322
  source 1..120: mol_type = other DNA

SEQ ID NO: 63277 - DNA, 120 bp, synthetic construct; identical to SEQ ID NO: 33323
  source 1..120: mol_type = other DNA

SEQ ID NO: 63278 - DNA, 120 bp, synthetic construct; identical to SEQ ID NO: 33324
  source 1..120: mol_type = other DNA

SEQ ID NO: 63279 - DNA, 120 bp, synthetic construct; identical to SEQ ID NO: 33325
  source 1..120: mol_type = other DNA

SEQ ID NO: 63280 - DNA, 120 bp, synthetic construct; identical to SEQ ID NO: 9779
  source 1..120: mol_type = other DNA

SEQ ID NO: 63281 - DNA, 120 bp, synthetic construct; identical to SEQ ID NO: 33327
  source 1..120: mol_type = other DNA

SEQ ID NO: 63282 - DNA, 120 bp, synthetic construct; identical to SEQ ID NO: 33328
  source 1..120: mol_type = other DNA

SEQ ID NO: 63283 - DNA, 120 bp, synthetic construct; identical to SEQ ID NO: 33329
  source 1..120: mol_type = other DNA

SEQ ID NO: 63284 - DNA, 120 bp, synthetic construct; identical to SEQ ID NO: 9780
  source 1..120: mol_type = other DNA

SEQ ID NO: 63285 - DNA, 120 bp, synthetic construct; identical to SEQ ID NO: 33331
  source 1..120: mol_type = other DNA

SEQ ID NO: 63286 - DNA, 120 bp, synthetic construct; identical to SEQ ID NO: 33332
  source 1..120: mol_type = other DNA

SEQ ID NO: 63287 - DNA, 120 bp, synthetic construct; identical to SEQ ID NO: 9781
  source 1..120: mol_type = other DNA

SEQ ID NO: 63288 - DNA, 120 bp, synthetic construct; identical to SEQ ID NO: 33334
  source 1..120: mol_type = other DNA

SEQ ID NO: 63289 - DNA, 120 bp, synthetic construct; identical to SEQ ID NO: 33335
  source 1..120: mol_type = other DNA

SEQ ID NO: 63290 - DNA, 120 bp, synthetic construct; identical to SEQ ID NO: 33336
  source 1..120: mol_type = other DNA

SEQ ID NO: 63291 - DNA, 120 bp, synthetic construct; identical to SEQ ID NO: 33337
  source 1..120: mol_type = other DNA

SEQ ID NO: 63292 - DNA, 120 bp, synthetic construct; identical to SEQ ID NO: 9782
  source 1..120: mol_type = other DNA

SEQ ID NO: 63293 - DNA, 120 bp, synthetic construct; identical to SEQ ID NO: 33339
  source 1..120: mol_type = other DNA

SEQ ID NO: 63294 - DNA, 120 bp, synthetic construct; identical to SEQ ID NO: 33340
  source 1..120: mol_type = other DNA

SEQ ID NO: 63295 - DNA, 120 bp, synthetic construct; identical to SEQ ID NO: 33341
  source 1..120: mol_type = other DNA

SEQ ID NO: 63296 - DNA, 120 bp, synthetic construct; identical to SEQ ID NO: 9783
  source 1..120: mol_type = other DNA

SEQ ID NO: 63297 - DNA, 120 bp, synthetic construct; identical to SEQ ID NO: 33343
  source 1..120: mol_type = other DNA

SEQ ID NO: 63298 - DNA, 120 bp, synthetic construct; identical to SEQ ID NO: 33344
  source 1..120: mol_type = other DNA

SEQ ID NO: 63299 - DNA, 120 bp, synthetic construct; identical to SEQ ID NO: 9784
  source 1..120: mol_type = other DNA

SEQ ID NO: 63300 - DNA, 120 bp, synthetic construct; identical to SEQ ID NO: 33346
  source 1..120: mol_type = other DNA

SEQ ID NO: 63301 - DNA, 120 bp, synthetic construct; identical to SEQ ID NO: 33347
  source 1..120: mol_type = other DNA

SEQ ID NO: 63302 - DNA, 120 bp, synthetic construct; identical to SEQ ID NO: 33348
  source 1..120: mol_type = other DNA

SEQ ID NO: 63303 - DNA, 120 bp, synthetic construct; identical to SEQ ID NO: 33349
  source 1..120: mol_type = other DNA

SEQ ID NO: 63304 - DNA, 120 bp, synthetic construct; identical to SEQ ID NO: 9785
  source 1..120: mol_type = other DNA

SEQ ID NO: 63305 - DNA, 120 bp, synthetic construct; identical to SEQ ID NO: 2639
  source 1..120: mol_type = other DNA

SEQ ID NO: 63306 - DNA, 120 bp, synthetic construct; identical to SEQ ID NO: 33352
  source 1..120: mol_type = other DNA

SEQ ID NO: 63307 - DNA, 120 bp, synthetic construct; identical to SEQ ID NO: 33353
  source 1..120: mol_type = other DNA

SEQ ID NO: 63308 - DNA, 120 bp, synthetic construct; identical to SEQ ID NO: 9786
  source 1..120: mol_type = other DNA

SEQ ID NO: 63309 - DNA, 120 bp, synthetic construct; identical to SEQ ID NO: 33355
  source 1..120: mol_type = other DNA

SEQ ID NO: 63310 - DNA, 120 bp, synthetic construct; identical to SEQ ID NO: 33356
  source 1..120: mol_type = other DNA

SEQ ID NO: 63311 - DNA, 120 bp, synthetic construct; identical to SEQ ID NO: 33357
  source 1..120: mol_type = other DNA

SEQ ID NO: 63312 - DNA, 120 bp, synthetic construct; identical to SEQ ID NO: 9787
  source 1..120: mol_type = other DNA

SEQ ID NO: 63313 - DNA, 120 bp, synthetic construct; identical to SEQ ID NO: 33359
  source 1..120: mol_type = other DNA

SEQ ID NO: 63314 - DNA, 120 bp, synthetic construct; identical to SEQ ID NO: 33360
  source 1..120: mol_type = other DNA

SEQ ID NO: 63315 - DNA, 120 bp, synthetic construct; identical to SEQ ID NO: 33361
  source 1..120: mol_type = other DNA

SEQ ID NO: 63316 - DNA, 120 bp, synthetic construct; identical to SEQ ID NO: 9788
  source 1..120: mol_type = other DNA

SEQ ID NO: 63317 - DNA, 120 bp, synthetic construct; identical to SEQ ID NO: 33363
  source 1..120: mol_type = other DNA

SEQ ID NO: 63318 - DNA, 120 bp, synthetic construct; identical to SEQ ID NO: 33364
  source 1..120: mol_type = other DNA

SEQ ID NO: 63319 - DNA, 120 bp, synthetic construct; identical to SEQ ID NO: 33365
  source 1..120: mol_type = other DNA

SEQ ID NO: 63320 - DNA, 120 bp, synthetic construct; identical to SEQ ID NO: 9789
  source 1..120: mol_type = other DNA

SEQ ID NO: 63321 - DNA, 120 bp, synthetic construct; identical to SEQ ID NO: 33367
  source 1..120: mol_type = other DNA

SEQ ID NO: 63322 - DNA, 120 bp, synthetic construct; identical to SEQ ID NO: 33368
  source 1..120: mol_type = other DNA

SEQ ID NO: 63323 - DNA, 120 bp, synthetic construct; identical to SEQ ID NO: 33369
  source 1..120: mol_type = other DNA

SEQ ID NO: 63324 - DNA, 120 bp, synthetic construct; identical to SEQ ID NO: 9790
  source 1..120: mol_type = other DNA

SEQ ID NO: 63325 - DNA, 120 bp, synthetic construct; identical to SEQ ID NO: 33371
  source 1..120: mol_type = other DNA

SEQ ID NO: 63326 - DNA, 120 bp, synthetic construct; identical to SEQ ID NO: 33372
  source 1..120: mol_type = other DNA

SEQ ID NO: 63327 - DNA, 120 bp, synthetic construct; identical to SEQ ID NO: 33373
  source 1..120: mol_type = other DNA

SEQ ID NO: 63328 - DNA, 120 bp, synthetic construct; identical to SEQ ID NO: 9791
  source 1..120: mol_type = other DNA

SEQ ID NO: 63329 - DNA, 120 bp, synthetic construct; identical to SEQ ID NO: 33375
  source 1..120: mol_type = other DNA

SEQ ID NO: 63330 - DNA, 120 bp, synthetic construct; identical to SEQ ID NO: 33376
  source 1..120: mol_type = other DNA

SEQ ID NO: 63331 - DNA, 120 bp, synthetic construct; identical to SEQ ID NO: 2645
  source 1..120: mol_type = other DNA

SEQ ID NO: 63332 - DNA, 120 bp, synthetic construct; identical to SEQ ID NO: 33378
  source 1..120: mol_type = other DNA

SEQ ID NO: 63333 - DNA, 120 bp, synthetic construct; identical to SEQ ID NO: 9792
  source 1..120: mol_type = other DNA

SEQ ID NO: 63334 - DNA, 120 bp, synthetic construct; identical to SEQ ID NO: 33380
  source 1..120: mol_type = other DNA

SEQ ID NO: 63335 - DNA, 120 bp, synthetic construct; identical to SEQ ID NO: 33381
  source 1..120: mol_type = other DNA

SEQ ID NO: 63336 - DNA, 120 bp, synthetic construct; identical to SEQ ID NO: 33382
  source 1..120: mol_type = other DNA

SEQ ID NO: 63337 - DNA, 120 bp, synthetic construct; identical to SEQ ID NO: 33383
  source 1..120: mol_type = other DNA

SEQ ID NO: 63338 - DNA, 120 bp, synthetic construct; identical to SEQ ID NO: 9793
  source 1..120: mol_type = other DNA

SEQ ID NO: 63339 - DNA, 120 bp, synthetic construct; identical to SEQ ID NO: 33385
  source 1..120: mol_type = other DNA

SEQ ID NO: 63340 - DNA, 120 bp, synthetic construct; identical to SEQ ID NO: 33386
  source 1..120: mol_type = other DNA

SEQ ID NO: 63341 - DNA, 120 bp, synthetic construct; identical to SEQ ID NO: 9794
  source 1..120: mol_type = other DNA

SEQ ID NO: 63342 - DNA, 120 bp, synthetic construct; identical to SEQ ID NO: 33388
  source 1..120: mol_type = other DNA

SEQ ID NO: 63343 - DNA, 120 bp, synthetic construct; identical to SEQ ID NO: 33389
  source 1..120: mol_type = other DNA

SEQ ID NO: 63344 - DNA, 120 bp, synthetic construct; identical to SEQ ID NO: 33390
  source 1..120: mol_type = other DNA

SEQ ID NO: 63345 - DNA, 120 bp, synthetic construct; identical to SEQ ID NO: 9795
  source 1..120: mol_type = other DNA

SEQ ID NO: 63346 - DNA, 120 bp, synthetic construct; identical to SEQ ID NO: 33392
  source 1..120: mol_type = other DNA

SEQ ID NO: 63347 - DNA, 120 bp, synthetic construct; identical to SEQ ID NO: 33393
  source 1..120: mol_type = other DNA

SEQ ID NO: 63348 - DNA, 120 bp, synthetic construct; identical to SEQ ID NO: 33394
  source 1..120: mol_type = other DNA

SEQ ID NO: 63349 - DNA, 120 bp, synthetic construct; identical to SEQ ID NO: 9796
  source 1..120: mol_type = other DNA

SEQ ID NO: 63350 - DNA, 120 bp, synthetic construct; identical to SEQ ID NO: 33396
  source 1..120: mol_type = other DNA

SEQ ID NO: 63351 - DNA, 120 bp, synthetic construct; identical to SEQ ID NO: 33397
  source 1..120: mol_type = other DNA

SEQ ID NO: 63352 - DNA, 120 bp, synthetic construct; identical to SEQ ID NO: 33398
  source 1..120: mol_type = other DNA

SEQ ID NO: 63353 - DNA, 120 bp, synthetic construct; identical to SEQ ID NO: 9797
  source 1..120: mol_type = other DNA

SEQ ID NO: 63354 - DNA, 120 bp, synthetic construct; identical to SEQ ID NO: 33400
  source 1..120: mol_type = other DNA

SEQ ID NO: 63355 - DNA, 120 bp, synthetic construct; identical to SEQ ID NO: 33401
  source 1..120: mol_type = other DNA

SEQ ID NO: 63356 - DNA, 120 bp, synthetic construct; identical to SEQ ID NO: 33402
  source 1..120: mol_type = other DNA

SEQ ID NO: 63357 - DNA, 120 bp, synthetic construct; identical to SEQ ID NO: 9798
  source 1..120: mol_type = other DNA

SEQ ID NO: 63358 - DNA, 120 bp, synthetic construct; identical to SEQ ID NO: 33404
  source 1..120: mol_type = other DNA

SEQ ID NO: 63359 - DNA, 120 bp, synthetic construct; identical to SEQ ID NO: 33405
  source 1..120: mol_type = other DNA

SEQ ID NO: 63360 - DNA, 120 bp, synthetic construct; identical to SEQ ID NO: 33406
  source 1..120: mol_type = other DNA

SEQ ID NO: 63361 - DNA, 120 bp, synthetic construct; identical to SEQ ID NO: 33407
  source 1..120: mol_type = other DNA

SEQ ID NO: 63362 - DNA, 120 bp, synthetic construct; identical to SEQ ID NO: 9799
  source 1..120: mol_type = other DNA

SEQ ID NO: 63363 - DNA, 120 bp, synthetic construct; identical to SEQ ID NO: 33409
  source 1..120: mol_type = other DNA

SEQ ID NO: 63364 - DNA, 120 bp, synthetic construct; identical to SEQ ID NO: 33410
  source 1..120: mol_type = other DNA

SEQ ID NO: 63365 - DNA, 120 bp, synthetic construct; identical to SEQ ID NO: 9800
  source 1..120: mol_type = other DNA

SEQ ID NO: 63366 - DNA, 120 bp, synthetic construct; identical to SEQ ID NO: 33412
  source 1..120: mol_type = other DNA

SEQ ID NO: 63367 - DNA, 120 bp, synthetic construct; identical to SEQ ID NO: 33413
  source 1..120: mol_type = other DNA

SEQ ID NO: 63368 - DNA, 120 bp, synthetic construct; identical to SEQ ID NO: 33414
  source 1..120: mol_type = other DNA

SEQ ID NO: 63369 - DNA, 120 bp, synthetic construct; identical to SEQ ID NO: 9801
  source 1..120: mol_type = other DNA

SEQ ID NO: 63370 - DNA, 120 bp, synthetic construct; identical to SEQ ID NO: 33416
  source 1..120: mol_type = other DNA

SEQ ID NO: 63371 - DNA, 120 bp, synthetic construct; identical to SEQ ID NO: 33417
  source 1..120: mol_type = other DNA

SEQ ID NO: 63372 - DNA, 120 bp, synthetic construct; identical to SEQ ID NO: 33418
  source 1..120: mol_type = other DNA

SEQ ID NO: 63373 - DNA, 120 bp, synthetic construct; identical to SEQ ID NO: 9802
  source 1..120: mol_type = other DNA

SEQ ID NO: 63374 - DNA, 120 bp, synthetic construct; identical to SEQ ID NO: 33420
  source 1..120: mol_type = other DNA

SEQ ID NO: 63375 - DNA, 120 bp, synthetic construct; identical to SEQ ID NO: 33421
  source 1..120: mol_type = other DNA

SEQ ID NO: 63376 - DNA, 120 bp, synthetic construct; identical to SEQ ID NO: 33422
  source 1..120: mol_type = other DNA

SEQ ID NO: 63377 - DNA, 120 bp, synthetic construct; identical to SEQ ID NO: 9803
  source 1..120: mol_type = other DNA

SEQ ID NO: 63378 - DNA, 120 bp, synthetic construct; identical to SEQ ID NO: 33424
  source 1..120: mol_type = other DNA

SEQ ID NO: 63379 - DNA, 120 bp, synthetic construct; identical to SEQ ID NO: 33425
  source 1..120: mol_type = other DNA

SEQ ID NO: 63380 - DNA, 120 bp, synthetic construct; identical to SEQ ID NO: 33426
  source 1..120: mol_type = other DNA

SEQ ID NO: 63381 - DNA, 120 bp, synthetic construct; identical to SEQ ID NO: 9804
  source 1..120: mol_type = other DNA

SEQ ID NO: 63382 - DNA, 120 bp, synthetic construct; identical to SEQ ID NO: 33428
  source 1..120: mol_type = other DNA

SEQ ID NO: 63383 - DNA, 120 bp, synthetic construct; identical to SEQ ID NO: 33429
  source 1..120: mol_type = other DNA

SEQ ID NO: 63384 - DNA, 120 bp, synthetic construct; identical to SEQ ID NO: 33430
  source 1..120: mol_type = other DNA

SEQ ID NO: 63385 - DNA, 120 bp, synthetic construct; identical to SEQ ID NO: 9805
  source 1..120: mol_type = other DNA

SEQ ID NO: 63386 - DNA, 120 bp, synthetic construct; identical to SEQ ID NO: 33432
  source 1..120: mol_type = other DNA

SEQ ID NO: 63387 - DNA, 120 bp, synthetic construct; identical to SEQ ID NO: 33433
  source 1..120: mol_type = other DNA

SEQ ID NO: 63388 - DNA, 120 bp, synthetic construct; identical to SEQ ID NO: 33434
  source 1..120: mol_type = other DNA

SEQ ID NO: 63389 - DNA, 120 bp, synthetic construct; identical to SEQ ID NO: 33435
  source 1..120: mol_type = other DNA

SEQ ID NO: 63390 - DNA, 120 bp, synthetic construct; identical to SEQ ID NO: 9806
  source 1..120: mol_type = other DNA

SEQ ID NO: 63391 - DNA, 120 bp, synthetic construct; identical to SEQ ID NO: 33437
  source 1..120: mol_type = other DNA

SEQ ID NO: 63392 - DNA, 120 bp, synthetic construct; identical to SEQ ID NO: 33438
  source 1..120: mol_type = other DNA

SEQ ID NO: 63393 - DNA, 120 bp, synthetic construct; identical to SEQ ID NO: 33439
  source 1..120: mol_type = other DNA

SEQ ID NO: 63394 - DNA, 120 bp, synthetic construct; identical to SEQ ID NO: 9807
  source 1..120: mol_type = other DNA

SEQ ID NO: 63395 - DNA, 120 bp, synthetic construct; identical to SEQ ID NO: 33441
  source 1..120: mol_type = other DNA

SEQ ID NO: 63396 - DNA, 120 bp, synthetic construct; identical to SEQ ID NO: 33442
  source 1..120: mol_type = other DNA

SEQ ID NO: 63397 - DNA, 120 bp, synthetic construct; identical to SEQ ID NO: 33443
  source 1..120: mol_type = other DNA

SEQ ID NO: 63398 - DNA, 120 bp, synthetic construct; identical to SEQ ID NO: 9808
  source 1..120: mol_type = other DNA

SEQ ID NO: 63399 - DNA, 120 bp, synthetic construct; identical to SEQ ID NO: 33445
  source 1..120: mol_type = other DNA

SEQ ID NO: 63400 - DNA, 120 bp, synthetic construct; identical to SEQ ID NO: 33446
  source 1..120: mol_type = other DNA

SEQ ID NO: 63401 - DNA, 120 bp, synthetic construct; identical to SEQ ID NO: 33447
  source 1..120: mol_type = other DNA

SEQ ID NO: 63402 - DNA, 120 bp, synthetic construct; identical to SEQ ID NO: 9809
  source 1..120: mol_type = other DNA

SEQ ID NO: 63403 - DNA, 120 bp, synthetic construct; identical to SEQ ID NO: 33449
  source 1..120: mol_type = other DNA

SEQ ID NO: 63404 - DNA, 120 bp, synthetic construct; identical to SEQ ID NO: 33450
  source 1..120: mol_type = other DNA

SEQ ID NO: 63405 - DNA, 120 bp, synthetic construct; identical to SEQ ID NO: 9810
  source 1..120: mol_type = other DNA

SEQ ID NO: 63406 - DNA, 120 bp, synthetic construct; identical to SEQ ID NO: 33452
  source 1..120: mol_type = other DNA

SEQ ID NO: 63407 - DNA, 120 bp, synthetic construct; identical to SEQ ID NO: 33453
  source 1..120: mol_type = other DNA

SEQ ID NO: 63408 - DNA, 120 bp, synthetic construct; identical to SEQ ID NO: 33454
  source 1..120: mol_type = other DNA

SEQ ID NO: 63409 - DNA, 120 bp, synthetic construct; identical to SEQ ID NO: 9811
  source 1..120: mol_type = other DNA

SEQ ID NO: 63410 - DNA, 120 bp, synthetic construct; identical to SEQ ID NO: 33456
  source 1..120: mol_type = other DNA

SEQ ID NO: 63411 - DNA, 120 bp, synthetic construct; identical to SEQ ID NO: 33457
  source 1..120: mol_type = other DNA

SEQ ID NO: 63412 - DNA, 120 bp, synthetic construct; identical to SEQ ID NO: 33458
  source 1..120: mol_type = other DNA

SEQ ID NO: 63413 - DNA, 120 bp, synthetic construct; identical to SEQ ID NO: 9812
  source 1..120: mol_type = other DNA

SEQ ID NO: 63414 - DNA, 120 bp, synthetic construct; identical to SEQ ID NO: 33460
  source 1..120: mol_type = other DNA

SEQ ID NO: 63415 - DNA, 120 bp, synthetic construct; identical to SEQ ID NO: 33461
  source 1..120: mol_type = other DNA

SEQ ID NO: 63416 - DNA, 120 bp, synthetic construct; identical to SEQ ID NO: 33462
  source 1..120: mol_type = other DNA

SEQ ID NO: 63417 - DNA, 120 bp, synthetic construct; identical to SEQ ID NO: 9813
  source 1..120: mol_type = other DNA

SEQ ID NO: 63418 - DNA, 120 bp, synthetic construct; identical to SEQ ID NO: 33464
  source 1..120: mol_type = other DNA

SEQ ID NO: 63419 - DNA, 120 bp, synthetic construct; identical to SEQ ID NO: 33465
  source 1..120: mol_type = other DNA

SEQ ID NO: 63420 - DNA, 120 bp, synthetic construct; identical to SEQ ID NO: 33466
  source 1..120: mol_type = other DNA

SEQ ID NO: 63421 - DNA, 120 bp, synthetic construct; identical to SEQ ID NO: 33467
  source 1..120: mol_type = other DNA

SEQ ID NO: 63422 - DNA, 120 bp, synthetic construct; identical to SEQ ID NO: 9814
  source 1..120: mol_type = other DNA

SEQ ID NO: 63423 - DNA, 120 bp, synthetic construct; identical to SEQ ID NO: 33469
  source 1..120: mol_type = other DNA

SEQ ID NO: 63424 - DNA, 120 bp, synthetic construct; identical to SEQ ID NO: 33470
  source 1..120: mol_type = other DNA

SEQ ID NO: 63425 - DNA, 120 bp, synthetic construct; identical to SEQ ID NO: 33471
  source 1..120: mol_type = other DNA

SEQ ID NO: 63426 - DNA, 120 bp, synthetic construct; identical to SEQ ID NO: 9815
  source 1..120: mol_type = other DNA

SEQ ID NO: 63427 - DNA, 120 bp, synthetic construct; identical to SEQ ID NO: 33473
  source 1..120: mol_type = other DNA

SEQ ID NO: 63428 - DNA, 120 bp, synthetic construct; identical to SEQ ID NO: 33474
  source 1..120: mol_type = other DNA

SEQ ID NO: 63429 - DNA, 120 bp, synthetic construct; identical to SEQ ID NO: 33475
  source 1..120: mol_type = other DNA

SEQ ID NO: 63430 - DNA, 120 bp, synthetic construct; identical to SEQ ID NO: 9816
  source 1..120: mol_type = other DNA

SEQ ID NO: 63431 - DNA, 120 bp, synthetic construct; identical to SEQ ID NO: 33477
  source 1..120: mol_type = other DNA

SEQ ID NO: 63432 - DNA, 120 bp, synthetic construct; identical to SEQ ID NO: 33478
  source 1..120: mol_type = other DNA

SEQ ID NO: 63433 - DNA, 120 bp, synthetic construct; identical to SEQ ID NO: 33479
  source 1..120: mol_type = other DNA

SEQ ID NO: 63434 - DNA, 120 bp, synthetic construct; identical to SEQ ID NO: 9817
  source 1..120: mol_type = other DNA

SEQ ID NO: 63435 - DNA, 120 bp, synthetic construct; identical to SEQ ID NO: 33481
  source 1..120: mol_type = other DNA

SEQ ID NO: 63436 - DNA, 120 bp, synthetic construct; identical to SEQ ID NO: 33482
  source 1..120: mol_type = other DNA

SEQ ID NO: 63437 - DNA, 120 bp, synthetic construct; identical to SEQ ID NO: 9818
  source 1..120: mol_type = other DNA

SEQ ID NO: 63438 - DNA, 120 bp, synthetic construct; identical to SEQ ID NO: 33484
  source 1..120: mol_type = other DNA

SEQ ID NO: 63439 - DNA, 120 bp, synthetic construct; identical to SEQ ID NO: 33485
  source 1..120: mol_type = other DNA

SEQ ID NO: 63440 - DNA, 120 bp, synthetic construct; identical to SEQ ID NO: 33486
  source 1..120: mol_type = other DNA

SEQ ID NO: 63441 - DNA, 120 bp, synthetic construct; identical to SEQ ID NO: 9819
  source 1..120: mol_type = other DNA

SEQ ID NO: 63442 - DNA, 120 bp, synthetic construct; identical to SEQ ID NO: 33488
  source 1..120: mol_type = other DNA

SEQ ID NO: 63443 - DNA, 120 bp, synthetic construct; identical to SEQ ID NO: 33489
  source 1..120: mol_type = other DNA

SEQ ID NO: 63444 - DNA, 120 bp, synthetic construct; identical to SEQ ID NO: 2671
  source 1..120: mol_type = other DNA

SEQ ID NO: 63445 - DNA, 120 bp, synthetic construct; identical to SEQ ID NO: 9820
  source 1..120: mol_type = other DNA

SEQ ID NO: 63446 - DNA, 120 bp, synthetic construct; identical to SEQ ID NO: 33492
  source 1..120: mol_type = other DNA

SEQ ID NO: 63447 - DNA, 120 bp, synthetic construct; identical to SEQ ID NO: 9821
  source 1..120: mol_type = other DNA

SEQ ID NO: 63448 - DNA, 120 bp, synthetic construct; identical to SEQ ID NO: 33494
  source 1..120: mol_type = other DNA

SEQ ID NO: 63449 - DNA, 120 bp, synthetic construct; identical to SEQ ID NO: 33495
  source 1..120: mol_type = other DNA

SEQ ID NO: 63450 - DNA, 120 bp, synthetic construct; identical to SEQ ID NO: 2672
  source 1..120: mol_type = other DNA

SEQ ID NO: 63451 - DNA, 120 bp, synthetic construct; identical to SEQ ID NO: 33497
  source 1..120: mol_type = other DNA

SEQ ID NO: 63452 - DNA, 120 bp, synthetic construct; identical to SEQ ID NO: 9822
  source 1..120: mol_type = other DNA

SEQ ID NO: 63453 - DNA, 120 bp, synthetic construct; identical to SEQ ID NO: 33499
  source 1..120: mol_type = other DNA

SEQ ID NO: 63454 - DNA, 120 bp, synthetic construct; identical to SEQ ID NO: 33500
  source 1..120: mol_type = other DNA

SEQ ID NO: 63455 - DNA, 120 bp, synthetic construct; identical to SEQ ID NO: 33501
  source 1..120: mol_type = other DNA

SEQ ID NO: 63456 - DNA, 120 bp, synthetic construct; identical to SEQ ID NO: 9823
  source 1..120: mol_type = other DNA

SEQ ID NO: 63457 - DNA, 120 bp, synthetic construct; identical to SEQ ID NO: 33503
  source 1..120: mol_type = other DNA

SEQ ID NO: 63458 - DNA, 120 bp, synthetic construct; identical to SEQ ID NO: 33504
  source 1..120: mol_type = other DNA

SEQ ID NO: 63459 - DNA, 120 bp, synthetic construct; identical to SEQ ID NO: 33505
  source 1..120: mol_type = other DNA

SEQ ID NO: 63460 - DNA, 120 bp, synthetic construct; identical to SEQ ID NO: 9824
  source 1..120: mol_type = other DNA

SEQ ID NO: 63461 - DNA, 120 bp, synthetic construct; identical to SEQ ID NO: 33507
  source 1..120: mol_type = other DNA

SEQ ID NO: 63462 - DNA, 120 bp, synthetic construct; identical to SEQ ID NO: 33508
  source 1..120: mol_type = other DNA

SEQ ID NO: 63463 - DNA, 120 bp, synthetic construct; identical to SEQ ID NO: 33509
  source 1..120: mol_type = other DNA

SEQ ID NO: 63464 - DNA, 120 bp, synthetic construct; identical to SEQ ID NO: 33510
  source 1..120: mol_type = other DNA

SEQ ID NO: 63465 - DNA, 120 bp, synthetic construct; identical to SEQ ID NO: 9825
  source 1..120: mol_type = other DNA

SEQ ID NO: 63466 - DNA, 120 bp, synthetic construct; identical to SEQ ID NO: 33512
  source 1..120: mol_type = other DNA

SEQ ID NO: 63467 - DNA, 120 bp, synthetic construct; identical to SEQ ID NO: 33513
  source 1..120: mol_type = other DNA

SEQ ID NO: 63468 - DNA, 120 bp, synthetic construct; identical to SEQ ID NO: 33514
  source 1..120: mol_type = other DNA

SEQ ID NO: 63469 - DNA, 120 bp, synthetic construct; identical to SEQ ID NO: 9826
  source 1..120: mol_type = other DNA

SEQ ID NO: 63470 - DNA, 120 bp, synthetic construct; identical to SEQ ID NO: 33516
  source 1..120: mol_type = other DNA

SEQ ID NO: 63471 - DNA, 120 bp, synthetic construct; identical to SEQ ID NO: 33517
  source 1..120: mol_type = other DNA

SEQ ID NO: 63472 - DNA, 120 bp, synthetic construct; identical to SEQ ID NO: 33518
  source 1..120: mol_type = other DNA

SEQ ID NO: 63473 - DNA, 120 bp, synthetic construct; identical to SEQ ID NO: 9827
  source 1..120: mol_type = other DNA

SEQ ID NO: 63474 - DNA, 120 bp, synthetic construct; identical to SEQ ID NO: 33520
  source 1..120: mol_type = other DNA

SEQ ID NO: 63475 - DNA, 120 bp, synthetic construct; identical to SEQ ID NO: 33521
  source 1..120: mol_type = other DNA

SEQ ID NO: 63476 - DNA, 120 bp, synthetic construct; identical to SEQ ID NO: 9828
  source 1..120: mol_type = other DNA

SEQ ID NO: 63477 - DNA, 120 bp, synthetic construct; identical to SEQ ID NO: 33523
  source 1..120: mol_type = other DNA

SEQ ID NO: 63478 - DNA, 120 bp, synthetic construct; identical to SEQ ID NO: 33524
  source 1..120: mol_type = other DNA

SEQ ID NO: 63479 - DNA, 120 bp, synthetic construct; identical to SEQ ID NO: 33525
  source 1..120: mol_type = other DNA

SEQ ID NO: 63480 - DNA, 120 bp, synthetic construct; identical to SEQ ID NO: 9829
  source 1..120: mol_type = other DNA

SEQ ID NO: 63481 - DNA, 120 bp, synthetic construct; identical to SEQ ID NO: 33527
  source 1..120: mol_type = other DNA

SEQ ID NO: 63482 - DNA, 120 bp, synthetic construct; identical to SEQ ID NO: 33528
  source 1..120: mol_type = other DNA

SEQ ID NO: 63483 - DNA, 120 bp, synthetic construct; identical to SEQ ID NO: 33529
  source 1..120: mol_type = other DNA

SEQ ID NO: 63484 - DNA, 120 bp, synthetic construct; identical to SEQ ID NO: 33530
  source 1..120: mol_type = other DNA

SEQ ID NO: 63485 - DNA, 120 bp, synthetic construct; identical to SEQ ID NO: 9830
  source 1..120: mol_type = other DNA

SEQ ID NO: 63486 - DNA, 120 bp, synthetic construct; identical to SEQ ID NO: 33532
  source 1..120: mol_type = other DNA

SEQ ID NO: 63487 - DNA, 120 bp, synthetic construct; identical to SEQ ID NO: 33533
  source 1..120: mol_type = other DNA

SEQ ID NO: 63488 - DNA, 120 bp, synthetic construct; identical to SEQ ID NO: 9831
  source 1..120: mol_type = other DNA

SEQ ID NO: 63489 - DNA, 120 bp, synthetic construct; identical to SEQ ID NO: 33535
  source 1..120: mol_type = other DNA

SEQ ID NO: 63490 - DNA, 120 bp, synthetic construct; identical to SEQ ID NO: 2682
  source 1..120: mol_type = other DNA

SEQ ID NO: 63491 - DNA, 120 bp, synthetic construct; identical to SEQ ID NO: 33537
  source 1..120: mol_type = other DNA

SEQ ID NO: 63492 - DNA, 120 bp, synthetic construct; identical to SEQ ID NO: 9832
  source 1..120: mol_type = other DNA

SEQ ID NO: 63493 - DNA, 120 bp, synthetic construct; identical to SEQ ID NO: 33539
  source 1..120: mol_type = other DNA

SEQ ID NO: 63494 - DNA, 120 bp, synthetic construct; identical to SEQ ID NO: 33540
  source 1..120: mol_type = other DNA

SEQ ID NO: 63495 - DNA, 120 bp, synthetic construct; identical to SEQ ID NO: 33541
  source 1..120: mol_type = other DNA

SEQ ID NO: 63496 - DNA, 120 bp, synthetic construct; identical to SEQ ID NO: 33542
  source 1..120: mol_type = other DNA

SEQ ID NO: 63497 - DNA, 120 bp, synthetic construct; identical to SEQ ID NO: 9833
  source 1..120: mol_type = other DNA

SEQ ID NO: 63498 - DNA, 120 bp, synthetic construct; identical to SEQ ID NO: 9834
  source 1..120: mol_type = other DNA

SEQ ID NO: 63499 - DNA, 120 bp, synthetic construct; identical to SEQ ID NO: 33545
  source 1..120: mol_type = other DNA

SEQ ID NO: 63500 - DNA, 120 bp, synthetic construct; identical to SEQ ID NO: 33546
  source 1..120: mol_type = other DNA

SEQ ID NO: 63501 - DNA, 120 bp, synthetic construct; identical to SEQ ID NO: 33547
  source 1..120: mol_type = other DNA

SEQ ID NO: 63502 - DNA, 120 bp, synthetic construct; identical to SEQ ID NO: 9835
  source 1..120: mol_type = other DNA

SEQ ID NO: 63503 - DNA, 120 bp, synthetic construct; identical to SEQ ID NO: 33549
  source 1..120: mol_type = other DNA

SEQ ID NO: 63504 - DNA, 120 bp, synthetic construct; identical to SEQ ID NO: 33550
  source 1..120: mol_type = other DNA

SEQ ID NO: 63505 - DNA, 120 bp, synthetic construct; identical to SEQ ID NO: 33551
  source 1..120: mol_type = other DNA

SEQ ID NO: 63506 - DNA, 120 bp, synthetic construct; identical to SEQ ID NO: 33552
  source 1..120: mol_type = other DNA

SEQ ID NO: 63507 - DNA, 120 bp, synthetic construct; identical to SEQ ID NO: 9836
  source 1..120: mol_type = other DNA

SEQ ID NO: 63508 - DNA, 120 bp, synthetic construct; identical to SEQ ID NO: 33554
  source 1..120: mol_type = other DNA

SEQ ID NO: 63509 - DNA, 120 bp, synthetic construct; identical to SEQ ID NO: 33555
  source 1..120: mol_type = other DNA

SEQ ID NO: 63510 - DNA, 120 bp, synthetic construct; identical to SEQ ID NO: 33556
  source 1..120: mol_type = other DNA

SEQ ID NO: 63511 - DNA, 120 bp, synthetic construct; identical to SEQ ID NO: 9837
  source 1..120: mol_type = other DNA

SEQ ID NO: 63512 - DNA, 120 bp, synthetic construct; identical to SEQ ID NO: 33558
  source 1..120: mol_type = other DNA

SEQ ID NO: 63513 - DNA, 120 bp, synthetic construct; identical to SEQ ID NO: 33559
  source 1..120: mol_type = other DNA

SEQ ID NO: 63514 - DNA, 120 bp, synthetic construct; identical to SEQ ID NO: 9838
  source 1..120: mol_type = other DNA

SEQ ID NO: 63515 - DNA, 120 bp, synthetic construct; identical to SEQ ID NO: 33561
  source 1..120: mol_type = other DNA

SEQ ID NO: 63516 - DNA, 120 bp, synthetic construct; identical to SEQ ID NO: 33562
  source 1..120: mol_type = other DNA

SEQ ID NO: 63517 - DNA, 120 bp, synthetic construct; identical to SEQ ID NO: 33563
  source 1..120: mol_type = other DNA

SEQ ID NO: 63518 - DNA, 120 bp, synthetic construct; identical to SEQ ID NO: 9839
  source 1..120: mol_type = other DNA

SEQ ID NO: 63519 - DNA, 120 bp, synthetic construct; identical to SEQ ID NO: 33565
  source 1..120: mol_type = other DNA

SEQ ID NO: 63520 - DNA, 120 bp, synthetic construct; identical to SEQ ID NO: 33566
  source 1..120: mol_type = other DNA

SEQ ID NO: 63521 - DNA, 120 bp, synthetic construct; identical to SEQ ID NO: 33567
  source 1..120: mol_type = other DNA

SEQ ID NO: 63522 - DNA, 120 bp, synthetic construct; identical to SEQ ID NO: 9840
  source 1..120: mol_type = other DNA

SEQ ID NO: 63523 - DNA, 120 bp, synthetic construct; identical to SEQ ID NO: 33569
  source 1..120: mol_type = other DNA

SEQ ID NO: 63524 - DNA, 120 bp, synthetic construct; identical to SEQ ID NO: 33570
  source 1..120: mol_type = other DNA

SEQ ID NO: 63525 - DNA, 120 bp, synthetic construct; identical to SEQ ID NO: 33571
  source 1..120: mol_type = other DNA

SEQ ID NO: 63526 - DNA, 120 bp, synthetic construct; identical to SEQ ID NO: 9841
  source 1..120: mol_type = other DNA

SEQ ID NO: 63527 - DNA, 120 bp, synthetic construct; identical to SEQ ID NO: 33573
  source 1..120: mol_type = other DNA

SEQ ID NO: 63528 - DNA, 120 bp, synthetic construct; identical to SEQ ID NO: 33574
  source 1..120: mol_type = other DNA

SEQ ID NO: 63529 - DNA, 120 bp, synthetic construct; identical to SEQ ID NO: 33575
  source 1..120: mol_type = other DNA

SEQ ID NO: 63530 - DNA, 120 bp, synthetic construct; identical to SEQ ID NO: 33576
  source 1..120: mol_type = other DNA

SEQ ID NO: 63531 - DNA, 120 bp, synthetic construct; identical to SEQ ID NO: 9842
  source 1..120: mol_type = other DNA

SEQ ID NO: 63532 - DNA, 120 bp, synthetic construct; identical to SEQ ID NO: 33578
  source 1..120: mol_type = other DNA

SEQ ID NO: 63533 - DNA, 120 bp, synthetic construct; identical to SEQ ID NO: 33579
  source 1..120: mol_type = other DNA

SEQ ID NO: 63534 - DNA, 120 bp, synthetic construct; identical to SEQ ID NO: 33580
  source 1..120: mol_type = other DNA

SEQ ID NO: 63535 - DNA, 120 bp, synthetic construct; identical to SEQ ID NO: 9843
  source 1..120: mol_type = other DNA

SEQ ID NO: 63536 - DNA, 120 bp, synthetic construct; identical to SEQ ID NO: 33582
  source 1..120: mol_type = other DNA

SEQ ID NO: 63537 - DNA, 120 bp, synthetic construct; identical to SEQ ID NO: 33583
  source 1..120: mol_type = other DNA

SEQ ID NO: 63538 - DNA, 120 bp, synthetic construct; identical to SEQ ID NO: 9844
  source 1..120: mol_type = other DNA

SEQ ID NO: 63539 - DNA, 120 bp, synthetic construct; identical to SEQ ID NO: 33585
  source 1..120: mol_type = other DNA

SEQ ID NO: 63540 - DNA, 120 bp, synthetic construct; identical to SEQ ID NO: 33586
  source 1..120: mol_type = other DNA

SEQ ID NO: 63541 - DNA, 120 bp, synthetic construct; identical to SEQ ID NO: 33587
  source 1..120: mol_type = other DNA

SEQ ID NO: 63542 - DNA, 120 bp, synthetic construct; identical to SEQ ID NO: 33588
  source 1..120: mol_type = other DNA

SEQ ID NO: 63543 - DNA, 120 bp, synthetic construct; identical to SEQ ID NO: 9845
  source 1..120: mol_type = other DNA

SEQ ID NO: 63544 - DNA, 120 bp, synthetic construct; identical to SEQ ID NO: 33590
  source 1..120: mol_type = other DNA

SEQ ID NO: 63545 - DNA, 120 bp, synthetic construct; identical to SEQ ID NO: 33591
  source 1..120: mol_type = other DNA

SEQ ID NO: 63546 - DNA, 120 bp, synthetic construct; identical to SEQ ID NO: 33592
  source 1..120: mol_type = other DNA

SEQ ID NO: 63547 - DNA, 120 bp, synthetic construct; identical to SEQ ID NO: 9846
  source 1..120: mol_type = other DNA

SEQ ID NO: 63548 - DNA, 120 bp, synthetic construct; identical to SEQ ID NO: 33594
  source 1..120: mol_type = other DNA

SEQ ID NO: 63549 - DNA, 120 bp, synthetic construct; identical to SEQ ID NO: 33595
  source 1..120: mol_type = other DNA

SEQ ID NO: 63550 - DNA, 120 bp, synthetic construct; identical to SEQ ID NO: 33596
  source 1..120: mol_type = other DNA

SEQ ID NO: 63551 - DNA, 120 bp, synthetic construct; identical to SEQ ID NO: 9847
  source 1..120: mol_type = other DNA

SEQ ID NO: 63552 - DNA, 120 bp, synthetic construct; identical to SEQ ID NO: 33598
  source 1..120: mol_type = other DNA

SEQ ID NO: 63553 - DNA, 120 bp, synthetic construct; identical to SEQ ID NO: 33599
  source 1..120: mol_type = other DNA

SEQ ID NO: 63554 - DNA, 120 bp, synthetic construct; identical to SEQ ID NO: 33600
  source 1..120: mol_type = other DNA

SEQ ID NO: 63555 - DNA, 120 bp, synthetic construct; identical to SEQ ID NO: 9848
  source 1..120: mol_type = other DNA

SEQ ID NO: 63556 - DNA, 120 bp, synthetic construct; identical to SEQ ID NO: 33602
  source 1..120: mol_type = other DNA

SEQ ID NO: 63557 - DNA, 120 bp, synthetic construct; identical to SEQ ID NO: 33603
  source 1..120: mol_type = other DNA

SEQ ID NO: 63558 - DNA, 120 bp, synthetic construct; identical to SEQ ID NO: 33604
  source 1..120: mol_type = other DNA

SEQ ID NO: 63559 - DNA, 120 bp, synthetic construct; identical to SEQ ID NO: 9849
  source 1..120: mol_type = other DNA

SEQ ID NO: 63560 - DNA, 120 bp, synthetic construct; identical to SEQ ID NO: 33606
  source 1..120: mol_type = other DNA

SEQ ID NO: 63561 - DNA, 120 bp, synthetic construct; identical to SEQ ID NO: 33607
  source 1..120: mol_type = other DNA

SEQ ID NO: 63562 - DNA, 120 bp, synthetic construct; identical to SEQ ID NO: 33608
  source 1..120: mol_type = other DNA

SEQ ID NO: 63563 - DNA, 120 bp, synthetic construct; identical to SEQ ID NO: 9850
  source 1..120: mol_type = other DNA

SEQ ID NO: 63564 - DNA, 120 bp, synthetic construct; identical to SEQ ID NO: 33610
  source 1..120: mol_type = other DNA

SEQ ID NO: 63565 - DNA, 120 bp, synthetic construct; identical to SEQ ID NO: 33611
  source 1..120: mol_type = other DNA

SEQ ID NO: 63566 - DNA, 120 bp, synthetic construct; identical to SEQ ID NO: 9851
  source 1..120: mol_type = other DNA

SEQ ID NO: 63567 - DNA, 120 bp, synthetic construct; identical to SEQ ID NO: 33613
  source 1..120: mol_type = other DNA

SEQ ID NO: 63568 - DNA, 120 bp, synthetic construct; identical to SEQ ID NO: 33614
  source 1..120: mol_type = other DNA

SEQ ID NO: 63569 - DNA, 120 bp, synthetic construct; identical to SEQ ID NO: 33615
  source 1..120: mol_type = other DNA

SEQ ID NO: 63570 - DNA, 120 bp, synthetic construct; identical to SEQ ID NO: 33616
  source 1..120: mol_type = other DNA

SEQ ID NO: 63571 - DNA, 120 bp, synthetic construct; identical to SEQ ID NO: 9852
  source 1..120: mol_type = other DNA

SEQ ID NO: 63572 - DNA, 120 bp, synthetic construct; identical to SEQ ID NO: 33618
  source 1..120: mol_type = other DNA

SEQ ID NO: 63573 - DNA, 120 bp, synthetic construct; identical to SEQ ID NO: 33619
  source 1..120: mol_type = other DNA

SEQ ID NO: 63574 - DNA, 120 bp, synthetic construct; identical to SEQ ID NO: 9853
  source 1..120: mol_type = other DNA

SEQ ID NO: 63575 - DNA, 120 bp, synthetic construct; identical to SEQ ID NO: 33621
  source 1..120: mol_type = other DNA

SEQ ID NO: 63576 - DNA, 120 bp, synthetic construct; identical to SEQ ID NO: 33622
  source 1..120: mol_type = other DNA

SEQ ID NO: 63577 - DNA, 120 bp, synthetic construct; identical to SEQ ID NO: 33623
  source 1..120: mol_type = other DNA

SEQ ID NO: 63578 - DNA, 120 bp, synthetic construct; identical to SEQ ID NO: 9854
  source 1..120: mol_type = other DNA

SEQ ID NO: 63579 - DNA, 120 bp, synthetic construct; identical to SEQ ID NO: 33625
  source 1..120: mol_type = other DNA

SEQ ID NO: 63580 - DNA, 120 bp, synthetic construct; identical to SEQ ID NO: 33626
  source 1..120: mol_type = other DNA

SEQ ID NO: 63581 - DNA, 120 bp, synthetic construct; identical to SEQ ID NO: 33627
  source 1..120: mol_type = other DNA

SEQ ID NO: 63582 - DNA, 120 bp, synthetic construct; identical to SEQ ID NO: 33628
  source 1..120: mol_type = other DNA

SEQ ID NO: 63583 - DNA, 120 bp, synthetic construct; identical to SEQ ID NO: 9855
  source 1..120: mol_type = other DNA

SEQ ID NO: 63584 - DNA, 120 bp, synthetic construct; identical to SEQ ID NO: 33630
  source 1..120: mol_type = other DNA

SEQ ID NO: 63585 - DNA, 120 bp, synthetic construct; identical to SEQ ID NO: 33631
  source 1..120: mol_type = other DNA

SEQ ID NO: 63586 - DNA, 120 bp, synthetic construct; identical to SEQ ID NO: 33632
  source 1..120: mol_type = other DNA

SEQ ID NO: 63587 - DNA, 120 bp, synthetic construct; identical to SEQ ID NO: 9856
  source 1..120: mol_type = other DNA

SEQ ID NO: 63588 - DNA, 120 bp, synthetic construct; identical to SEQ ID NO: 33634
  source 1..120: mol_type = other DNA

SEQ ID NO: 63589 - DNA, 120 bp, synthetic construct; identical to SEQ ID NO: 33635
  source 1..120: mol_type = other DNA

SEQ ID NO: 63590 - DNA, 120 bp, synthetic construct; identical to SEQ ID NO: 9857
  source 1..120: mol_type = other DNA

SEQ ID NO: 63591 - DNA, 120 bp, synthetic construct; identical to SEQ ID NO: 33637
  source 1..120: mol_type = other DNA

SEQ ID NO: 63592 - DNA, 120 bp, synthetic construct; identical to SEQ ID NO: 33638
  source 1..120: mol_type = other DNA

SEQ ID NO: 63593 - DNA, 120 bp, synthetic construct; identical to SEQ ID NO: 33639
  source 1..120: mol_type = other DNA

SEQ ID NO: 63594 - DNA, 120 bp, synthetic construct; identical to SEQ ID NO: 9858
  source 1..120: mol_type = other DNA

SEQ ID NO: 63595 - DNA, 120 bp, synthetic construct; identical to SEQ ID NO: 33641
  source 1..120: mol_type = other DNA

SEQ ID NO: 63596 - DNA, 120 bp, synthetic construct; identical to SEQ ID NO: 33642
  source 1..120: mol_type = other DNA

SEQ ID NO: 63597 - DNA, 120 bp, synthetic construct; identical to SEQ ID NO: 9859
  source 1..120: mol_type = other DNA

SEQ ID NO: 63598 - DNA, 120 bp, synthetic construct; identical to SEQ ID NO: 33644
  source 1..120: mol_type = other DNA

SEQ ID NO: 63599 - DNA, 120 bp, synthetic construct; identical to SEQ ID NO: 33645
  source 1..120: mol_type = other DNA

SEQ ID NO: 63600 - DNA, 120 bp, synthetic construct; identical to SEQ ID NO: 9860
  source 1..120: mol_type = other DNA

SEQ ID NO: 63601 - DNA, 120 bp, synthetic construct; identical to SEQ ID NO: 33647
  source 1..120: mol_type = other DNA

SEQ ID NO: 63602 - DNA, 120 bp, synthetic construct; identical to SEQ ID NO: 33648
  source 1..120: mol_type = other DNA

SEQ ID NO: 63603 - DNA, 120 bp, synthetic construct; identical to SEQ ID NO: 33649
  source 1..120: mol_type = other DNA

SEQ ID NO: 63604 - DNA, 120 bp, synthetic construct; identical to SEQ ID NO: 9861
  source 1..120: mol_type = other DNA

SEQ ID NO: 63605 - DNA, 120 bp, synthetic construct; identical to SEQ ID NO: 33651
  source 1..120: mol_type = other DNA

SEQ ID NO: 63606 - DNA, 120 bp, synthetic construct; identical to SEQ ID NO: 33652
  source 1..120: mol_type = other DNA

SEQ ID NO: 63607 - DNA, 120 bp, synthetic construct; identical to SEQ ID NO: 9862
  source 1..120: mol_type = other DNA

SEQ ID NO: 63608 - DNA, 120 bp, synthetic construct; identical to SEQ ID NO: 33654
  source 1..120: mol_type = other DNA

SEQ ID NO: 63609 - DNA, 120 bp, synthetic construct; identical to SEQ ID NO: 33655
  source 1..120: mol_type = other DNA

SEQ ID NO: 63610 - DNA, 120 bp, synthetic construct; identical to SEQ ID NO: 33656
  source 1..120: mol_type = other DNA

SEQ ID NO: 63611 - DNA, 120 bp, synthetic construct; identical to SEQ ID NO: 33657
  source 1..120: mol_type = other DNA

SEQ ID NO: 63612 - DNA, 120 bp, synthetic construct; identical to SEQ ID NO: 9863
  source 1..120: mol_type = other DNA

SEQ ID NO: 63613 - DNA, 120 bp, synthetic construct; identical to SEQ ID NO: 33659
  source 1..120: mol_type = other DNA

SEQ ID NO: 63614 - DNA, 120 bp, synthetic construct; identical to SEQ ID NO: 33660
  source 1..120: mol_type = other DNA

SEQ ID NO: 63615 - DNA, 120 bp, synthetic construct; identical to SEQ ID NO: 33661
  source 1..120: mol_type = other DNA

SEQ ID NO: 63616 - DNA, 120 bp, synthetic construct; identical to SEQ ID NO: 9864
  source 1..120: mol_type = other DNA

SEQ ID NO: 63617 - DNA, 120 bp, synthetic construct; identical to SEQ ID NO: 33663
  source 1..120: mol_type = other DNA

SEQ ID NO: 63618 - DNA, 120 bp, synthetic construct; identical to SEQ ID NO: 33664
  source 1..120: mol_type = other DNA

SEQ ID NO: 63619 - DNA, 120 bp, synthetic construct; identical to SEQ ID NO: 9865
  source 1..120: mol_type = other DNA

SEQ ID NO: 63620 - DNA, 120 bp, synthetic construct; identical to SEQ ID NO: 33666
  source 1..120: mol_type = other DNA

SEQ ID NO: 63621 - DNA, 120 bp, synthetic construct; identical to SEQ ID NO: 33667
  source 1..120: mol_type = other DNA

SEQ ID NO: 63622 - DNA, 120 bp, synthetic construct; identical to SEQ ID NO: 33668
  source 1..120: mol_type = other DNA

SEQ ID NO: 63623 - DNA, 120 bp, synthetic construct; identical to SEQ ID NO: 33669
  source 1..120: mol_type = other DNA

SEQ ID NO: 63624 - DNA, 120 bp, synthetic construct; identical to SEQ ID NO: 9866
  source 1..120: mol_type = other DNA

SEQ ID NO: 63625 - DNA, 120 bp, synthetic construct; identical to SEQ ID NO: 33671
  source 1..120: mol_type = other DNA

SEQ ID NO: 63626 - DNA, 120 bp, synthetic construct; identical to SEQ ID NO: 33672
  source 1..120: mol_type = other DNA

SEQ ID NO: 63627 - DNA, 120 bp, synthetic construct; identical to SEQ ID NO: 33673
  source 1..120: mol_type = other DNA

SEQ ID NO: 63628 - DNA, 120 bp, synthetic construct; identical to SEQ ID NO: 9867
  source 1..120: mol_type = other DNA

SEQ ID NO: 63629 - DNA, 120 bp, synthetic construct; identical to SEQ ID NO: 33675
  source 1..120: mol_type = other DNA

SEQ ID NO: 63630 - DNA, 120 bp, synthetic construct; identical to SEQ ID NO: 33676
  source 1..120: mol_type = other DNA

SEQ ID NO: 63631 - DNA, 120 bp, synthetic construct; identical to SEQ ID NO: 9868
  source 1..120: mol_type = other DNA

SEQ ID NO: 63632 - DNA, 120 bp, synthetic construct; identical to SEQ ID NO: 33678
  source 1..120: mol_type = other DNA

SEQ ID NO: 63633 - DNA, 120 bp, synthetic construct; identical to SEQ ID NO: 33679
  source 1..120: mol_type = other DNA

SEQ ID NO: 63634 - DNA, 120 bp, synthetic construct; identical to SEQ ID NO: 33680
  source 1..120: mol_type = other DNA

SEQ ID NO: 63635 - DNA, 120 bp, synthetic construct; identical to SEQ ID NO: 9869
  source 1..120: mol_type = other DNA

SEQ ID NO: 63636 - DNA, 120 bp, synthetic construct; identical to SEQ ID NO: 33682
  source 1..120: mol_type = other DNA

SEQ ID NO: 63637 - DNA, 120 bp, synthetic construct; identical to SEQ ID NO: 33683
  source 1..120: mol_type = other DNA

SEQ ID NO: 63638 - DNA, 120 bp, synthetic construct; identical to SEQ ID NO: 33684
  source 1..120: mol_type = other DNA

SEQ ID NO: 63639 - DNA, 120 bp, synthetic construct; identical to SEQ ID NO: 9870
  source 1..120: mol_type = other DNA

SEQ ID NO: 63640 - DNA, 120 bp, synthetic construct; identical to SEQ ID NO: 33686
  source 1..120: mol_type = other DNA

SEQ ID NO: 63641 - DNA, 120 bp, synthetic construct; identical to SEQ ID NO: 33687
  source 1..120: mol_type = other DNA

SEQ ID NO: 63642 - DNA, 120 bp, synthetic construct; identical to SEQ ID NO: 9871
  source 1..120: mol_type = other DNA

SEQ ID NO: 63643 - DNA, 120 bp, synthetic construct; identical to SEQ ID NO: 33689
  source 1..120: mol_type = other DNA

SEQ ID NO: 63644 - DNA, 120 bp, synthetic construct; identical to SEQ ID NO: 33690
  source 1..120: mol_type = other DNA

SEQ ID NO: 63645 - DNA, 120 bp, synthetic construct; identical to SEQ ID NO: 33691
  source 1..120: mol_type = other DNA

SEQ ID NO: 63646 - DNA, 120 bp, synthetic construct; identical to SEQ ID NO: 9872
  source 1..120: mol_type = other DNA

SEQ ID NO: 63647 - DNA, 120 bp, synthetic construct; identical to SEQ ID NO: 33693
  source 1..120: mol_type = other DNA

SEQ ID NO: 63648 - DNA, 120 bp, synthetic construct; identical to SEQ ID NO: 33694
  source 1..120: mol_type = other DNA

SEQ ID NO: 63649 - DNA, 120 bp, synthetic construct; identical to SEQ ID NO: 33695
  source 1..120: mol_type = other DNA

SEQ ID NO: 63650 - DNA, 120 bp, synthetic construct; identical to SEQ ID NO: 33696
  source 1..120: mol_type = other DNA

SEQ ID NO: 63651 - DNA, 120 bp, synthetic construct; identical to SEQ ID NO: 9873
  source 1..120: mol_type = other DNA

SEQ ID NO: 63652 - DNA, 120 bp, synthetic construct; identical to SEQ ID NO: 33698
  source 1..120: mol_type = other DNA

SEQ ID NO: 63653 - DNA, 120 bp, synthetic construct; identical to SEQ ID NO: 33699
  source 1..120: mol_type = other DNA

SEQ ID NO: 63654 - DNA, 120 bp, synthetic construct; identical to SEQ ID NO: 9874
  source 1..120: mol_type = other DNA

SEQ ID NO: 63655 - DNA, 120 bp, synthetic construct; identical to SEQ ID NO: 33701
  source 1..120: mol_type = other DNA

SEQ ID NO: 63656 - DNA, 120 bp, synthetic construct; identical to SEQ ID NO: 33702
  source 1..120: mol_type = other DNA

SEQ ID NO: 63657 - DNA, 120 bp, synthetic construct; identical to SEQ ID NO: 33703
  source 1..120: mol_type = other DNA

SEQ ID NO: 63658 - DNA, 120 bp, synthetic construct; identical to SEQ ID NO: 33704
  source 1..120: mol_type = other DNA

SEQ ID NO: 63659 - DNA, 120 bp, synthetic construct; identical to SEQ ID NO: 9875
  source 1..120: mol_type = other DNA

SEQ ID NO: 63660 - DNA, 120 bp, synthetic construct; identical to SEQ ID NO: 33706
  source 1..120: mol_type = other DNA

SEQ ID NO: 63661 - DNA, 120 bp, synthetic construct; identical to SEQ ID NO: 33707
  source 1..120: mol_type = other DNA

SEQ ID NO: 63662 - DNA, 120 bp, synthetic construct; identical to SEQ ID NO: 33708
  source 1..120: mol_type = other DNA

SEQ ID NO: 63663 - DNA, 120 bp, synthetic construct; identical to SEQ ID NO: 9876
  source 1..120: mol_type = other DNA

SEQ ID NO: 63664 - DNA, 120 bp, synthetic construct; identical to SEQ ID NO: 33710
  source 1..120: mol_type = other DNA

SEQ ID NO: 63665 - DNA, 120 bp, synthetic construct; identical to SEQ ID NO: 33711
  source 1..120: mol_type = other DNA

SEQ ID NO: 63666 - DNA, 120 bp, synthetic construct; identical to SEQ ID NO: 33712
  source 1..120: mol_type = other DNA

SEQ ID NO: 63667 - DNA, 120 bp, synthetic construct; identical to SEQ ID NO: 9877
  source 1..120: mol_type = other DNA

SEQ ID NO: 63668 - DNA, 120 bp, synthetic construct; identical to SEQ ID NO: 33714
  source 1..120: mol_type = other DNA

SEQ ID NO: 63669 - DNA, 120 bp, synthetic construct; identical to SEQ ID NO: 33715
  source 1..120: mol_type = other DNA

SEQ ID NO: 63670 - DNA, 120 bp, synthetic construct; identical to SEQ ID NO: 33716
  source 1..120: mol_type = other DNA

SEQ ID NO: 63671 - DNA, 120 bp, synthetic construct; identical to SEQ ID NO: 9878
  source 1..120: mol_type = other DNA

SEQ ID NO: 63672 - DNA, 120 bp, synthetic construct; identical to SEQ ID NO: 33718
  source 1..120: mol_type = other DNA

SEQ ID NO: 63673 - DNA, 120 bp, synthetic construct; identical to SEQ ID NO: 33719
  source 1..120: mol_type = other DNA

SEQ ID NO: 63674 - DNA, 120 bp, synthetic construct; identical to SEQ ID NO: 33720
  source 1..120: mol_type = other DNA

SEQ ID NO: 63675 - DNA, 120 bp, synthetic construct; identical to SEQ ID NO: 9879
  source 1..120: mol_type = other DNA

SEQ ID NO: 63676 - DNA, 120 bp, synthetic construct; identical to SEQ ID NO: 33722
  source 1..120: mol_type = other DNA

SEQ ID NO: 63677 - DNA, 120 bp, synthetic construct; identical to SEQ ID NO: 33723
  source 1..120: mol_type = other DNA

SEQ ID NO: 63678 - DNA, 120 bp, synthetic construct; identical to SEQ ID NO: 33724
  source 1..120: mol_type = other DNA

SEQ ID NO: 63679 - DNA, 120 bp, synthetic construct; identical to SEQ ID NO: 9880
  source 1..120: mol_type = other DNA

SEQ ID NO: 63680 - DNA, 120 bp, synthetic construct; identical to SEQ ID NO: 33726
  source 1..120: mol_type = other DNA

SEQ ID NO: 63681 - DNA, 120 bp, synthetic construct; identical to SEQ ID NO: 33727
  source 1..120: mol_type = other DNA

SEQ ID NO: 63682 - DNA, 120 bp, synthetic construct; identical to SEQ ID NO: 9881
  source 1..120: mol_type = other DNA

SEQ ID NO: 63683 - DNA, 120 bp, synthetic construct; identical to SEQ ID NO: 33729
  source 1..120: mol_type = other DNA

SEQ ID NO: 63684 - DNA, 120 bp, synthetic construct; identical to SEQ ID NO: 33730
  source 1..120: mol_type = other DNA

SEQ ID NO: 63685 - DNA, 120 bp, synthetic construct; identical to SEQ ID NO: 33731
  source 1..120: mol_type = other DNA

SEQ ID NO: 63686 - DNA, 120 bp, synthetic construct; identical to SEQ ID NO: 33732
  source 1..120: mol_type = other DNA

SEQ ID NO: 63687 - DNA, 120 bp, synthetic construct; identical to SEQ ID NO: 9882
  source 1..120: mol_type = other DNA

SEQ ID NO: 63688 - DNA, 120 bp, synthetic construct; identical to SEQ ID NO: 33734
  source 1..120: mol_type = other DNA

SEQ ID NO: 63689 - DNA, 120 bp, synthetic construct; identical to SEQ ID NO: 33735
  source 1..120: mol_type = other DNA

SEQ ID NO: 63690 - DNA, 120 bp, synthetic construct; identical to SEQ ID NO: 9883
  source 1..120: mol_type = other DNA

SEQ ID NO: 63691 - DNA, 120 bp, synthetic construct; identical to SEQ ID NO: 33737
  source 1..120: mol_type = other DNA

SEQ ID NO: 63692 - DNA, 120 bp, synthetic construct; identical to SEQ ID NO: 33738
  source 1..120: mol_type = other DNA

SEQ ID NO: 63693 - DNA, 120 bp, synthetic construct; identical to SEQ ID NO: 33739
  source 1..120: mol_type = other DNA

SEQ ID NO: 63694 - DNA, 120 bp, synthetic construct; identical to SEQ ID NO: 33740
  source 1..120: mol_type = other DNA

SEQ ID NO: 63695 - DNA, 120 bp, synthetic construct; identical to SEQ ID NO: 9884
  source 1..120: mol_type = other DNA

SEQ ID NO: 63696 - DNA, 120 bp, synthetic construct; identical to SEQ ID NO: 33742
  source 1..120: mol_type = other DNA

SEQ ID NO: 63697 - DNA, 120 bp, synthetic construct; identical to SEQ ID NO: 33743
  source 1..120: mol_type = other DNA

SEQ ID NO: 63698 - DNA, 120 bp, synthetic construct; identical to SEQ ID NO: 33744
  source 1..120: mol_type = other DNA

SEQ ID NO: 63699 - DNA, 120 bp, synthetic construct; identical to SEQ ID NO: 9885
  source 1..120: mol_type = other DNA

SEQ ID NO: 63700 - DNA, 120 bp, synthetic construct; identical to SEQ ID NO: 33746
  source 1..120: mol_type = other DNA

SEQ ID NO: 63701 - DNA, 120 bp, synthetic construct; identical to SEQ ID NO: 33747
  source 1..120: mol_type = other DNA

SEQ ID NO: 63702 - DNA, 120 bp, synthetic construct; identical to SEQ ID NO: 33748
  source 1..120: mol_type = other DNA

SEQ ID NO: 63703 - DNA, 120 bp, synthetic construct; identical to SEQ ID NO: 9886
  source 1..120: mol_type = other DNA

SEQ ID NO: 63704 - DNA, 120 bp, synthetic construct; identical to SEQ ID NO: 33750
  source 1..120: mol_type = other DNA

SEQ ID NO: 63705 - DNA, 120 bp, synthetic construct; identical to SEQ ID NO: 33751
  source 1..120: mol_type = other DNA

SEQ ID NO: 63706 - DNA, 120 bp, synthetic construct; identical to SEQ ID NO: 9887
  source 1..120: mol_type = other DNA

SEQ ID NO: 63707 - DNA, 120 bp, synthetic construct; identical to SEQ ID NO: 33753
  source 1..120: mol_type = other DNA

SEQ ID NO: 63708 - DNA, 120 bp, synthetic construct; identical to SEQ ID NO: 33754
  source 1..120: mol_type = other DNA

SEQ ID NO: 63709 - DNA, 120 bp, synthetic construct; identical to SEQ ID NO: 33755
  source 1..120: mol_type = other DNA

SEQ ID NO: 63710 - DNA, 120 bp, synthetic construct; identical to SEQ ID NO: 9888
  source 1..120: mol_type = other DNA

SEQ ID NO: 63711 - DNA, 120 bp, synthetic construct; identical to SEQ ID NO: 33757
  source 1..120: mol_type = other DNA

SEQ ID NO: 63712 - DNA, 120 bp, synthetic construct; identical to SEQ ID NO: 33758
  source 1..120: mol_type = other DNA

SEQ ID NO: 63713 - DNA, 120 bp, synthetic construct; identical to SEQ ID NO: 33759
  source 1..120: mol_type = other DNA

SEQ ID NO: 63714 - DNA, 120 bp, synthetic construct; identical to SEQ ID NO: 9889
  source 1..120: mol_type = other DNA

SEQ ID NO: 63715 - DNA, 120 bp, synthetic construct; identical to SEQ ID NO: 33761
  source 1..120: mol_type = other DNA

SEQ ID NO: 63716 - DNA, 120 bp, synthetic construct; identical to SEQ ID NO: 33762
  source 1..120: mol_type = other DNA

SEQ ID NO: 63717 - DNA, 120 bp, synthetic construct; identical to SEQ ID NO: 33763
  source 1..120: mol_type = other DNA

SEQ ID NO: 63718 - DNA, 120 bp, synthetic construct; identical to SEQ ID NO: 33764
  source 1..120: mol_type = other DNA

SEQ ID NO: 63719 - DNA, 120 bp, synthetic construct; identical to SEQ ID NO: 9890
  source 1..120: mol_type = other DNA

SEQ ID NO: 63720 - DNA, 120 bp, synthetic construct; identical to SEQ ID NO: 33766
  source 1..120: mol_type = other DNA

SEQ ID NO: 63721 - DNA, 120 bp, synthetic construct; identical to SEQ ID NO: 33767
  source 1..120: mol_type = other DNA

SEQ ID NO: 63722 - DNA, 120 bp, synthetic construct; identical to SEQ ID NO: 9891
  source 1..120: mol_type = other DNA

SEQ ID NO: 63723 - DNA, 120 bp, synthetic construct; identical to SEQ ID NO: 33769
  source 1..120: mol_type = other DNA

SEQ ID NO: 63724 - DNA, 120 bp, synthetic construct; identical to SEQ ID NO: 33770
  source 1..120: mol_type = other DNA

SEQ ID NO: 63725 - DNA, 120 bp, synthetic construct; identical to SEQ ID NO: 9892
  source 1..120: mol_type = other DNA

SEQ ID NO: 63726 - DNA, 120 bp, synthetic construct; identical to SEQ ID NO: 33772
  source 1..120: mol_type = other DNA

SEQ ID NO: 63727 - DNA, 120 bp, synthetic construct; identical to SEQ ID NO: 33773
  source 1..120: mol_type = other DNA

SEQ ID NO: 63728 - DNA, 120 bp, synthetic construct; identical to SEQ ID NO: 33774
  source 1..120: mol_type = other DNA

SEQ ID NO: 63729 - DNA, 120 bp, synthetic construct; identical to SEQ ID NO: 33775
  source 1..120: mol_type = other DNA

SEQ ID NO: 63730 - DNA, 120 bp, synthetic construct; identical to SEQ ID NO: 9893
  source 1..120: mol_type = other DNA

SEQ ID NO: 63731 - DNA, 120 bp, synthetic construct; identical to SEQ ID NO: 33777
  source 1..120: mol_type = other DNA

SEQ ID NO: 63732 - DNA, 120 bp, synthetic construct; identical to SEQ ID NO: 33778
  source 1..120: mol_type = other DNA

SEQ ID NO: 63733 - DNA, 120 bp, synthetic construct; identical to SEQ ID NO: 33779
  source 1..120: mol_type = other DNA

SEQ ID NO: 63734 - DNA, 120 bp, synthetic construct; identical to SEQ ID NO: 9894
  source 1..120: mol_type = other DNA

SEQ ID NO: 63735 - DNA, 120 bp, synthetic construct; identical to SEQ ID NO: 33781
  source 1..120: mol_type = other DNA

SEQ ID NO: 63736 - DNA, 120 bp, synthetic construct; identical to SEQ ID NO: 33782
  source 1..120: mol_type = other DNA

SEQ ID NO: 63737 - DNA, 120 bp, synthetic construct; identical to SEQ ID NO: 9895
  source 1..120: mol_type = other DNA

SEQ ID NO: 63738 - DNA, 120 bp, synthetic construct; identical to SEQ ID NO: 33784
  source 1..120: mol_type = other DNA

SEQ ID NO: 63739 - DNA, 120 bp, synthetic construct; identical to SEQ ID NO: 33785
  source 1..120: mol_type = other DNA

SEQ ID NO: 63740 - DNA, 120 bp, synthetic construct; identical to SEQ ID NO: 33786
  source 1..120: mol_type = other DNA

SEQ ID NO: 63741 - DNA, 120 bp, synthetic construct; identical to SEQ ID NO: 9896
  source 1..120: mol_type = other DNA

SEQ ID NO: 63742 - DNA, 120 bp, synthetic construct; identical to SEQ ID NO: 33788
  source 1..120: mol_type = other DNA

SEQ ID NO: 63743 - DNA, 120 bp, synthetic construct; identical to SEQ ID NO: 33789
  source 1..120: mol_type = other DNA

SEQ ID NO: 63744 - DNA, 120 bp, synthetic construct; identical to SEQ ID NO: 33790
  source 1..120: mol_type = other DNA

SEQ ID NO: 63745 - DNA, 120 bp, synthetic construct; identical to SEQ ID NO: 9897
  source 1..120: mol_type = other DNA

SEQ ID NO: 63746 - DNA, 120 bp, synthetic construct; identical to SEQ ID NO: 33792
  source 1..120: mol_type = other DNA

SEQ ID NO: 63747 - DNA, 120 bp, synthetic construct; identical to SEQ ID NO: 33793
  source 1..120: mol_type = other DNA

SEQ ID NO: 63748 - DNA, 120 bp, synthetic construct; identical to SEQ ID NO: 33794
  source 1..120: mol_type = other DNA

SEQ ID NO: 63749 - DNA, 120 bp, synthetic construct; identical to SEQ ID NO: 33795
  source 1..120: mol_type = other DNA

SEQ ID NO: 63750 - DNA, 120 bp, synthetic construct; identical to SEQ ID NO: 9898
  source 1..120: mol_type = other DNA

SEQ ID NO: 63751 - DNA, 120 bp, synthetic construct; identical to SEQ ID NO: 33797
  source 1..120: mol_type = other DNA

SEQ ID NO: 63752 - DNA, 120 bp, synthetic construct; identical to SEQ ID NO: 33798
  source 1..120: mol_type = other DNA

SEQ ID NO: 63753 - DNA, 120 bp, synthetic construct; identical to SEQ ID NO: 9899
  source 1..120: mol_type = other DNA

SEQ ID NO: 63754 - DNA, 120 bp, synthetic construct; identical to SEQ ID NO: 33800
  source 1..120: mol_type = other DNA

SEQ ID NO: 63755 - DNA, 120 bp, synthetic construct; identical to SEQ ID NO: 33801
  source 1..120: mol_type = other DNA

SEQ ID NO: 63756 - DNA, 120 bp, synthetic construct; identical to SEQ ID NO: 33802
  source 1..120: mol_type = other DNA

SEQ ID NO: 63757 - DNA, 120 bp, synthetic construct; identical to SEQ ID NO: 33803
  source 1..120: mol_type = other DNA

SEQ ID NO: 63758 - DNA, 120 bp, synthetic construct; identical to SEQ ID NO: 9900
  source 1..120: mol_type = other DNA

SEQ ID NO: 63759 - DNA, 120 bp, synthetic construct; identical to SEQ ID NO: 33805
  source 1..120: mol_type = other DNA

SEQ ID NO: 63760 - DNA, 120 bp, synthetic construct; identical to SEQ ID NO: 33806
  source 1..120: mol_type = other DNA

SEQ ID NO: 63761 - DNA, 120 bp, synthetic construct; identical to SEQ ID NO: 33807
  source 1..120: mol_type = other DNA

SEQ ID NO: 63762 - DNA, 120 bp, synthetic construct; identical to SEQ ID NO: 9901
  source 1..120: mol_type = other DNA

SEQ ID NO: 63763 - DNA, 120 bp, synthetic construct; identical to SEQ ID NO: 33809
  source 1..120: mol_type = other DNA

SEQ ID NO: 63764 - DNA, 120 bp, synthetic construct; identical to SEQ ID NO: 33810
  source 1..120: mol_type = other DNA

SEQ ID NO: 63765 - DNA, 120 bp, synthetic construct; identical to SEQ ID NO: 33811
  source 1..120: mol_type = other DNA

SEQ ID NO: 63766 - DNA, 120 bp, synthetic construct; identical to SEQ ID NO: 9902
  source 1..120: mol_type = other DNA

SEQ ID NO: 63767 - DNA, 120 bp, synthetic construct; identical to SEQ ID NO: 33813
  source 1..120: mol_type = other DNA

SEQ ID NO: 63768 - DNA, 120 bp, synthetic construct; identical to SEQ ID NO: 9903
  source 1..120: mol_type = other DNA

SEQ ID NO: 63769 - DNA, 120 bp, synthetic construct; identical to SEQ ID NO: 33815
  source 1..120: mol_type = other DNA

SEQ ID NO: 63770 - DNA, 120 bp, synthetic construct; identical to SEQ ID NO: 33816
  source 1..120: mol_type = other DNA

SEQ ID NO: 63771 - DNA, 120 bp, synthetic construct; identical to SEQ ID NO: 9904
  source 1..120: mol_type = other DNA

SEQ ID NO: 63772 - DNA, 120 bp, synthetic construct; identical to SEQ ID NO: 33818
  source 1..120: mol_type = other DNA

SEQ ID NO: 63773 - DNA, 120 bp, synthetic construct; identical to SEQ ID NO: 9905
  source 1..120: mol_type = other DNA

SEQ ID NO: 63774 - DNA, 120 bp, synthetic construct; identical to SEQ ID NO: 33820
  source 1..120: mol_type = other DNA

SEQ ID NO: 63775 - DNA, 120 bp, synthetic construct; identical to SEQ ID NO: 33821
  source 1..120: mol_type = other DNA

SEQ ID NO: 63776 - DNA, 120 bp, synthetic construct; identical to SEQ ID NO: 33822
  source 1..120: mol_type = other DNA

SEQ ID NO: 63777 - DNA, 120 bp, synthetic construct; identical to SEQ ID NO: 9906
  source 1..120: mol_type = other DNA

SEQ ID NO: 63778 - DNA, 120 bp, synthetic construct; identical to SEQ ID NO: 33824
  source 1..120: mol_type = other DNA

SEQ ID NO: 63779 - DNA, 120 bp, synthetic construct; identical to SEQ ID NO: 33825
  source 1..120: mol_type = other DNA

SEQ ID NO: 63780 - DNA, 120 bp, synthetic construct; identical to SEQ ID NO: 33826
  source 1..120: mol_type = other DNA

SEQ ID NO: 63781 - DNA, 120 bp, synthetic construct; identical to SEQ ID NO: 9907
  source 1..120: mol_type = other DNA

SEQ ID NO: 63782 - DNA, 120 bp, synthetic construct; identical to SEQ ID NO: 33828
  source 1..120: mol_type = other DNA

SEQ ID NO: 63783 - DNA, 120 bp, synthetic construct; identical to SEQ ID NO: 33829
  source 1..120: mol_type = other DNA

SEQ ID NO: 63784 - DNA, 120 bp, synthetic construct; identical to SEQ ID NO: 33830
  source 1..120: mol_type = other DNA

SEQ ID NO: 63785 - DNA, 120 bp, synthetic construct; identical to SEQ ID NO: 33831
  source 1..120: mol_type = other DNA

SEQ ID NO: 63786 - DNA, 120 bp, synthetic construct; identical to SEQ ID NO: 9908
  source 1..120: mol_type = other DNA

SEQ ID NO: 63787 - DNA, 120 bp, synthetic construct; identical to SEQ ID NO: 33833
  source 1..120: mol_type = other DNA

SEQ ID NO: 63788 - DNA, 120 bp, synthetic construct; identical to SEQ ID NO: 33834
  source 1..120: mol_type = other DNA

SEQ ID NO: 63789 - DNA, 120 bp, synthetic construct; identical to SEQ ID NO: 33835
  source 1..120: mol_type = other DNA

SEQ ID NO: 63790 - DNA, 120 bp, synthetic construct; identical to SEQ ID NO: 9909
  source 1..120: mol_type = other DNA

SEQ ID NO: 63791 - DNA, 120 bp, synthetic construct; identical to SEQ ID NO: 33837
  source 1..120: mol_type = other DNA

SEQ ID NO: 63792 - DNA, 120 bp, synthetic construct; identical to SEQ ID NO: 33838
  source 1..120: mol_type = other DNA

SEQ ID NO: 63793 - DNA, 120 bp, synthetic construct; identical to SEQ ID NO: 9910
  source 1..120: mol_type = other DNA

SEQ ID NO: 63794 - DNA, 120 bp, synthetic construct; identical to SEQ ID NO: 33840
  source 1..120: mol_type = other DNA

SEQ ID NO: 63795 - DNA, 120 bp, synthetic construct; identical to SEQ ID NO: 33841
  source 1..120: mol_type = other DNA

SEQ ID NO: 63796 - DNA, 120 bp, synthetic construct; identical to SEQ ID NO: 33842
  source 1..120: mol_type = other DNA

SEQ ID NO: 63797 - DNA, 120 bp, synthetic construct; identical to SEQ ID NO: 9911
  source 1..120: mol_type = other DNA

SEQ ID NO: 63798 - DNA, 120 bp, synthetic construct; identical to SEQ ID NO: 33844
  source 1..120: mol_type = other DNA

SEQ ID NO: 63799 - DNA, 120 bp, synthetic construct; identical to SEQ ID NO: 33845
  source 1..120: mol_type = other DNA

SEQ ID NO: 63800 - DNA, 120 bp, synthetic construct; identical to SEQ ID NO: 33846
  source 1..120: mol_type = other DNA

SEQ ID NO: 63801 - DNA, 120 bp, synthetic construct; identical to SEQ ID NO: 9912
  source 1..120: mol_type = other DNA

SEQ ID NO: 63802 - DNA, 120 bp, synthetic construct; identical to SEQ ID NO: 33848
  source 1..120: mol_type = other DNA

SEQ ID NO: 63803 - DNA, 120 bp, synthetic construct; identical to SEQ ID NO: 33849
  source 1..120: mol_type = other DNA

SEQ ID NO: 63804 - DNA, 120 bp, synthetic construct; identical to SEQ ID NO: 33850
  source 1..120: mol_type = other DNA

SEQ ID NO: 63805 - DNA, 120 bp, synthetic construct; identical to SEQ ID NO: 33851
  source 1..120: mol_type = other DNA

SEQ ID NO: 63806 - DNA, 120 bp, synthetic construct; identical to SEQ ID NO: 9913
  source 1..120: mol_type = other DNA

SEQ ID NO: 63807 - DNA, 120 bp, synthetic construct; identical to SEQ ID NO: 33853
  source 1..120: mol_type = other DNA

SEQ ID NO: 63808 - DNA, 120 bp, synthetic construct; identical to SEQ ID NO: 33854
  source 1..120: mol_type = other DNA

SEQ ID NO: 63809 - DNA, 120 bp, synthetic construct; identical to SEQ ID NO: 33855
  source 1..120: mol_type = other DNA

SEQ ID NO: 63810 - DNA, 120 bp, synthetic construct; identical to SEQ ID NO: 9914
  source 1..120: mol_type = other DNA

SEQ ID NO: 63811 - DNA, 120 bp, synthetic construct; identical to SEQ ID NO: 33857
  source 1..120: mol_type = other DNA

SEQ ID NO: 63812 - DNA, 120 bp, synthetic construct; identical to SEQ ID NO: 33858
  source 1..120: mol_type = other DNA

SEQ ID NO: 63813 - DNA, 120 bp, synthetic construct; identical to SEQ ID NO: 33859
  source 1..120: mol_type = other DNA

SEQ ID NO: 63814 - DNA, 120 bp, synthetic construct; identical to SEQ ID NO: 9915
  source 1..120: mol_type = other DNA

SEQ ID NO: 63815 - DNA, 120 bp, synthetic construct; identical to SEQ ID NO: 33861
  source 1..120: mol_type = other DNA

SEQ ID NO: 63816 - DNA, 120 bp, synthetic construct; identical to SEQ ID NO: 33862
  source 1..120: mol_type = other DNA

SEQ ID NO: 63817 - DNA, 120 bp, synthetic construct; identical to SEQ ID NO: 9916
  source 1..120: mol_type = other DNA

SEQ ID NO: 63818 - DNA, 120 bp, synthetic construct; identical to SEQ ID NO: 33864
  source 1..120: mol_type = other DNA

SEQ ID NO: 63819 - DNA, 120 bp, synthetic construct; identical to SEQ ID NO: 33865
  source 1..120: mol_type = other DNA

SEQ ID NO: 63820 - DNA, 120 bp, synthetic construct; identical to SEQ ID NO: 33866
  source 1..120: mol_type = other DNA

SEQ ID NO: 63821 - DNA, 120 bp, synthetic construct; identical to SEQ ID NO: 33867
  source 1..120: mol_type = other DNA

SEQ ID NO: 63822 - DNA, 120 bp, synthetic construct; identical to SEQ ID NO: 9917
  source 1..120: mol_type = other DNA

SEQ ID NO: 63823 - DNA, 120 bp, synthetic construct; identical to SEQ ID NO: 33869
  source 1..120: mol_type = other DNA

SEQ ID NO: 63824 - DNA, 120 bp, synthetic construct; identical to SEQ ID NO: 33870
  source 1..120: mol_type = other DNA

SEQ ID NO: 63825 - DNA, 120 bp, synthetic construct; identical to SEQ ID NO: 33871
  source 1..120: mol_type = other DNA

SEQ ID NO: 63826 - DNA, 120 bp, synthetic construct; identical to SEQ ID NO: 9918
  source 1..120: mol_type = other DNA

SEQ ID NO: 63827 - DNA, 120 bp, synthetic construct; identical to SEQ ID NO: 33873
  source 1..120: mol_type = other DNA

SEQ ID NO: 63828 - DNA, 120 bp, synthetic construct; identical to SEQ ID NO: 33874
  source 1..120: mol_type = other DNA

SEQ ID NO: 63829 - DNA, 120 bp, synthetic construct; identical to SEQ ID NO: 9919
  source 1..120: mol_type = other DNA

SEQ ID NO: 63830 - DNA, 120 bp, synthetic construct; identical to SEQ ID NO: 33876
  source 1..120: mol_type = other DNA

SEQ ID NO: 63831 - DNA, 120 bp, synthetic construct; identical to SEQ ID NO: 33877
  source 1..120: mol_type = other DNA

SEQ ID NO: 63832 - DNA, 120 bp, synthetic construct; identical to SEQ ID NO: 33878
  source 1..120: mol_type = other DNA

SEQ ID NO: 63833 - DNA, 120 bp, synthetic construct; identical to SEQ ID NO: 33879
  source 1..120: mol_type = other DNA

SEQ ID NO: 63834 - DNA, 120 bp, synthetic construct; identical to SEQ ID NO: 9920
  source 1..120: mol_type = other DNA

SEQ ID NO: 63835 - DNA, 120 bp, synthetic construct; identical to SEQ ID NO: 33881
  source 1..120: mol_type = other DNA

SEQ ID NO: 63836 - DNA, 120 bp, synthetic construct; identical to SEQ ID NO: 33882
  source 1..120: mol_type = other DNA

SEQ ID NO: 63837 - DNA, 120 bp, synthetic construct; identical to SEQ ID NO: 9921
  source 1..120: mol_type = other DNA

SEQ ID NO: 63838 - DNA, 120 bp, synthetic construct; identical to SEQ ID NO: 33884
  source 1..120: mol_type = other DNA

SEQ ID NO: 63839 - DNA, 120 bp, synthetic construct; identical to SEQ ID NO: 33885
  source 1..120: mol_type = other DNA

SEQ ID NO: 63840 - DNA, 120 bp, synthetic construct; identical to SEQ ID NO: 33886
  source 1..120: mol_type = other DNA

SEQ ID NO: 63841 - DNA, 120 bp, synthetic construct; identical to SEQ ID NO: 9922
  source 1..120: mol_type = other DNA

SEQ ID NO: 63842 - DNA, 120 bp, synthetic construct; identical to SEQ ID NO: 33888
  source 1..120: mol_type = other DNA

SEQ ID NO: 63843 - DNA, 120 bp, synthetic construct; identical to SEQ ID NO: 33889
  source 1..120: mol_type = other DNA

SEQ ID NO: 63844 - DNA, 120 bp, synthetic construct; identical to SEQ ID NO: 33890
  source 1..120: mol_type = other DNA

SEQ ID NO: 63845 - DNA, 120 bp, synthetic construct; identical to SEQ ID NO: 9923
  source 1..120: mol_type = other DNA

SEQ ID NO: 63846 - DNA, 120 bp, synthetic construct; identical to SEQ ID NO: 33892
  source 1..120: mol_type = other DNA

SEQ ID NO: 63847 - DNA, 120 bp, synthetic construct; identical to SEQ ID NO: 33893
  source 1..120: mol_type = other DNA

SEQ ID NO: 63848 - DNA, 120 bp, synthetic construct; identical to SEQ ID NO: 33894
  source 1..120: mol_type = other DNA

SEQ ID NO: 63849 - DNA, 120 bp, synthetic construct; identical to SEQ ID NO: 9924
  source 1..120: mol_type = other DNA

SEQ ID NO: 63850 - DNA, 120 bp, synthetic construct; identical to SEQ ID NO: 33896
  source 1..120: mol_type = other DNA

SEQ ID NO: 63851 - DNA, 120 bp, synthetic construct; identical to SEQ ID NO: 33897
  source 1..120: mol_type = other DNA

SEQ ID NO: 63852 - DNA, 120 bp, synthetic construct; identical to SEQ ID NO: 33898
  source 1..120: mol_type = other DNA

SEQ ID NO: 63853 - DNA, 120 bp, synthetic construct; identical to SEQ ID NO: 33899
  source 1..120: mol_type = other DNA

SEQ ID NO: 63854 - DNA, 120 bp, synthetic construct; identical to SEQ ID NO: 9925
  source 1..120: mol_type = other DNA

SEQ ID NO: 63855 - DNA, 120 bp, synthetic construct; identical to SEQ ID NO: 33901
  source 1..120: mol_type = other DNA

SEQ ID NO: 63856 - DNA, 120 bp, synthetic construct; identical to SEQ ID NO: 33902
  source 1..120: mol_type = other DNA

SEQ ID NO: 63857 - DNA, 120 bp, synthetic construct; identical to SEQ ID NO: 33903
  source 1..120: mol_type = other DNA

SEQ ID NO: 63858 - DNA, 120 bp, synthetic construct; identical to SEQ ID NO: 9926
  source 1..120: mol_type = other DNA

SEQ ID NO: 63859 - DNA, 120 bp, synthetic construct; identical to SEQ ID NO: 33905
  source 1..120: mol_type = other DNA

SEQ ID NO: 63860 - DNA, 120 bp, synthetic construct; identical to SEQ ID NO: 33906
  source 1..120: mol_type = other DNA

SEQ ID NO: 63861 - DNA, 120 bp, synthetic construct; identical to SEQ ID NO: 9927
  source 1..120: mol_type = other DNA

SEQ ID NO: 63862 - DNA, 120 bp, synthetic construct; identical to SEQ ID NO: 33908
  source 1..120: mol_type = other DNA

SEQ ID NO: 63863 - DNA, 120 bp, synthetic construct; identical to SEQ ID NO: 33909
  source 1..120: mol_type = other DNA

SEQ ID NO: 63864 - DNA, 120 bp, synthetic construct; identical to SEQ ID NO: 33910
  source 1..120: mol_type = other DNA

SEQ ID NO: 63865 - DNA, 120 bp, synthetic construct; identical to SEQ ID NO: 9928
  source 1..120: mol_type = other DNA

SEQ ID NO: 63866 - DNA, 120 bp, synthetic construct; identical to SEQ ID NO: 33912
  source 1..120: mol_type = other DNA

SEQ ID NO: 63867 - DNA, 120 bp, synthetic construct; identical to SEQ ID NO: 33913
  source 1..120: mol_type = other DNA

SEQ ID NO: 63868 - DNA, 120 bp, synthetic construct; identical to SEQ ID NO: 33914
  source 1..120: mol_type = other DNA

SEQ ID NO: 63869 - DNA, 120 bp, synthetic construct; identical to SEQ ID NO: 33915
  source 1..120: mol_type = other DNA

SEQ ID NO: 63870 - DNA, 120 bp, synthetic construct; identical to SEQ ID NO: 9929
  source 1..120: mol_type = other DNA

SEQ ID NO: 63871 - DNA, 120 bp, synthetic construct; identical to SEQ ID NO: 33917
  source 1..120: mol_type = other DNA

SEQ ID NO: 63872 - DNA, 120 bp, synthetic construct; identical to SEQ ID NO: 33918
  source 1..120: mol_type = other DNA

SEQ ID NO: 63873 - DNA, 120 bp, synthetic construct; identical to SEQ ID NO: 33919
  source 1..120: mol_type = other DNA

SEQ ID NO: 63874 - DNA, 120 bp, synthetic construct; identical to SEQ ID NO: 9930
  source 1..120: mol_type = other DNA

SEQ ID NO: 63875 - DNA, 120 bp, synthetic construct; identical to SEQ ID NO: 33921
  source 1..120: mol_type = other DNA

SEQ ID NO: 63876 - DNA, 120 bp, synthetic construct; identical to SEQ ID NO: 33922
  source 1..120: mol_type = other DNA

SEQ ID NO: 63877 - DNA, 120 bp, synthetic construct; identical to SEQ ID NO: 33923
  source 1..120: mol_type = other DNA

SEQ ID NO: 63878 - DNA, 120 bp, synthetic construct; identical to SEQ ID NO: 9931
  source 1..120: mol_type = other DNA

SEQ ID NO: 63879 - DNA, 120 bp, synthetic construct; identical to SEQ ID NO: 33925
  source 1..120: mol_type = other DNA

SEQ ID NO: 63880 - DNA, 120 bp, synthetic construct; identical to SEQ ID NO: 33926
  source 1..120: mol_type = other DNA

SEQ ID NO: 63881 - DNA, 120 bp, synthetic construct; identical to SEQ ID NO: 9932
  source 1..120: mol_type = other DNA

SEQ ID NO: 63882 - DNA, 120 bp, synthetic construct; identical to SEQ ID NO: 33928
  source 1..120: mol_type = other DNA

SEQ ID NO: 63883 - DNA, 120 bp, synthetic construct; identical to SEQ ID NO: 33929
  source 1..120: mol_type = other DNA

SEQ ID NO: 63884 - DNA, 120 bp, synthetic construct; identical to SEQ ID NO: 33930
  source 1..120: mol_type = other DNA

SEQ ID NO: 63885 - DNA, 120 bp, synthetic construct; identical to SEQ ID NO: 9933
  source 1..120: mol_type = other DNA

SEQ ID NO: 63886 - DNA, 120 bp, synthetic construct; identical to SEQ ID NO: 33932
  source 1..120: mol_type = other DNA

SEQ ID NO: 63887 - DNA, 120 bp, synthetic construct; identical to SEQ ID NO: 33933
  source 1..120: mol_type = other DNA

SEQ ID NO: 63888 - DNA, 120 bp, synthetic construct; identical to SEQ ID NO: 33934
  source 1..120: mol_type = other DNA

SEQ ID NO: 63889 - DNA, 120 bp, synthetic construct; identical to SEQ ID NO: 33935
  source 1..120: mol_type = other DNA

SEQ ID NO: 63890 - DNA, 120 bp, synthetic construct; identical to SEQ ID NO: 9934
  source 1..120: mol_type = other DNA

SEQ ID NO: 63891 - DNA, 120 bp, synthetic construct; identical to SEQ ID NO: 33937
  source 1..120: mol_type = other DNA

SEQ ID NO: 63892 - DNA, 120 bp, synthetic construct; identical to SEQ ID NO: 33938
  source 1..120: mol_type = other DNA

SEQ ID NO: 63893 - DNA, 120 bp, synthetic construct; identical to SEQ ID NO: 9935
  source 1..120: mol_type = other DNA

SEQ ID NO: 63894 - DNA, 120 bp, synthetic construct; identical to SEQ ID NO: 33940
  source 1..120: mol_type = other DNA

SEQ ID NO: 63895 - DNA, 120 bp, synthetic construct; identical to SEQ ID NO: 33941
  source 1..120: mol_type = other DNA

SEQ ID NO: 63896 - DNA, 120 bp, synthetic construct; identical to SEQ ID NO: 33942
  source 1..120: mol_type = other DNA

SEQ ID NO: 63897 - DNA, 120 bp, synthetic construct; identical to SEQ ID NO: 33943
  source 1..120: mol_type = other DNA

SEQ ID NO: 63898 - DNA, 120 bp, synthetic construct; identical to SEQ ID NO: 9936
  source 1..120: mol_type = other DNA

SEQ ID NO: 63899 - DNA, 120 bp, synthetic construct; identical to SEQ ID NO: 33945
  source 1..120: mol_type = other DNA

SEQ ID NO: 63900 - DNA, 120 bp, synthetic construct; identical to SEQ ID NO: 33946
  source 1..120: mol_type = other DNA

SEQ ID NO: 63901 - DNA, 120 bp, synthetic construct; identical to SEQ ID NO: 9937
  source 1..120: mol_type = other DNA

SEQ ID NO: 63902 - DNA, 120 bp, synthetic construct; identical to SEQ ID NO: 33948
  source 1..120: mol_type = other DNA

SEQ ID NO: 63903 - DNA, 120 bp, synthetic construct; identical to SEQ ID NO: 33949
  source 1..120: mol_type = other DNA

SEQ ID NO: 63904 - DNA, 120 bp, synthetic construct; identical to SEQ ID NO: 33950
  source 1..120: mol_type = other DNA

SEQ ID NO: 63905 - DNA, 120 bp, synthetic construct; identical to SEQ ID NO: 9938
  source 1..120: mol_type = other DNA

SEQ ID NO: 63906 - DNA, 120 bp, synthetic construct; identical to SEQ ID NO: 33952
  source 1..120: mol_type = other DNA

SEQ ID NO: 63907 - DNA, 120 bp, synthetic construct; identical to SEQ ID NO: 33953
  source 1..120: mol_type = other DNA

SEQ ID NO: 63908 - DNA, 120 bp, synthetic construct; identical to SEQ ID NO: 33954
  source 1..120: mol_type = other DNA

SEQ ID NO: 63909 - DNA, 120 bp, synthetic construct; identical to SEQ ID NO: 33955
  source 1..120: mol_type = other DNA

SEQ ID NO: 63910 - DNA, 120 bp, synthetic construct; identical to SEQ ID NO: 9939
  source 1..120: mol_type = other DNA

SEQ ID NO: 63911 - DNA, 120 bp, synthetic construct; identical to SEQ ID NO: 33957
  source 1..120: mol_type = other DNA

SEQ ID NO: 63912 - DNA, 120 bp, synthetic construct; identical to SEQ ID NO: 33958
  source 1..120: mol_type = other DNA

SEQ ID NO: 63913 - DNA, 120 bp, synthetic construct; identical to SEQ ID NO: 9940
  source 1..120: mol_type = other DNA

SEQ ID NO: 63914 - DNA, 120 bp, synthetic construct; identical to SEQ ID NO: 33960
  source 1..120: mol_type = other DNA

SEQ ID NO: 63915 - DNA, 120 bp, synthetic construct; identical to SEQ ID NO: 33961
  source 1..120: mol_type = other DNA

SEQ ID NO: 63916 - DNA, 120 bp, synthetic construct; identical to SEQ ID NO: 33962
  source 1..120: mol_type = other DNA

SEQ ID NO: 63917 - DNA, 120 bp, synthetic construct; identical to SEQ ID NO: 9941
  source 1..120: mol_type = other DNA

SEQ ID NO: 63918 - DNA, 120 bp, synthetic construct; identical to SEQ ID NO: 33964
  source 1..120: mol_type = other DNA

SEQ ID NO: 63919 - DNA, 120 bp, synthetic construct; identical to SEQ ID NO: 33965
  source 1..120: mol_type = other DNA

SEQ ID NO: 63920 - DNA, 120 bp, synthetic construct; identical to SEQ ID NO: 33966
  source 1..120: mol_type = other DNA

SEQ ID NO: 63921 - DNA, 120 bp, synthetic construct; identical to SEQ ID NO: 9942
  source 1..120: mol_type = other DNA

SEQ ID NO: 63922 - DNA, 120 bp, synthetic construct; identical to SEQ ID NO: 33968
  source 1..120: mol_type = other DNA

SEQ ID NO: 63923 - DNA, 120 bp, synthetic construct; identical to SEQ ID NO: 33969
  source 1..120: mol_type = other DNA

SEQ ID NO: 63924 - DNA, 120 bp, synthetic construct; identical to SEQ ID NO: 33970
  source 1..120: mol_type = other DNA

SEQ ID NO: 63925 - DNA, 120 bp, synthetic construct; identical to SEQ ID NO: 9943
  source 1..120: mol_type = other DNA

SEQ ID NO: 63926 - DNA, 120 bp, synthetic construct; identical to SEQ ID NO: 33972
  source 1..120: mol_type = other DNA

SEQ ID NO: 63927 - DNA, 120 bp, synthetic construct; identical to SEQ ID NO: 33973
  source 1..120: mol_type = other DNA

SEQ ID NO: 63928 - DNA, 120 bp, synthetic construct; identical to SEQ ID NO: 33974
  source 1..120: mol_type = other DNA

SEQ ID NO: 63929 - DNA, 120 bp, synthetic construct; identical to SEQ ID NO: 33975
  source 1..120: mol_type = other DNA

SEQ ID NO: 63930 - DNA, 120 bp, synthetic construct; identical to SEQ ID NO: 9944
  source 1..120: mol_type = other DNA

SEQ ID NO: 63931 - DNA, 120 bp, synthetic construct; identical to SEQ ID NO: 33977
  source 1..120: mol_type = other DNA

SEQ ID NO: 63932 - DNA, 120 bp, synthetic construct; identical to SEQ ID NO: 33978
  source 1..120: mol_type = other DNA

SEQ ID NO: 63933 - DNA, 120 bp, synthetic construct; identical to SEQ ID NO: 9945
  source 1..120: mol_type = other DNA

SEQ ID NO: 63934 - DNA, 120 bp, synthetic construct; identical to SEQ ID NO: 33980
  source 1..120: mol_type = other DNA

SEQ ID NO: 63935 - DNA, 120 bp, synthetic construct; identical to SEQ ID NO: 33981
  source 1..120: mol_type = other DNA

SEQ ID NO: 63936 - DNA, 120 bp, synthetic construct; identical to SEQ ID NO: 33982
  source 1..120: mol_type = other DNA

SEQ ID NO: 63937 - DNA, 120 bp, synthetic construct; identical to SEQ ID NO: 9946
  source 1..120: mol_type = other DNA

SEQ ID NO: 63938 - DNA, 120 bp, synthetic construct; identical to SEQ ID NO: 33984
  source 1..120: mol_type = other DNA

SEQ ID NO: 63939 - DNA, 120 bp, synthetic construct; identical to SEQ ID NO: 33985
  source 1..120: mol_type = other DNA

SEQ ID NO: 63940 - DNA, 120 bp, synthetic construct; identical to SEQ ID NO: 33986
  source 1..120: mol_type = other DNA

SEQ ID NO: 63941 - DNA, 120 bp, synthetic construct; identical to SEQ ID NO: 9947
  source 1..120: mol_type = other DNA

SEQ ID NO: 63942 - DNA, 120 bp, synthetic construct; identical to SEQ ID NO: 33988
  source 1..120: mol_type = other DNA

SEQ ID NO: 63943 - DNA, 120 bp, synthetic construct; identical to SEQ ID NO: 33989
  source 1..120: mol_type = other DNA

SEQ ID NO: 63944 - DNA, 120 bp, synthetic construct; identical to SEQ ID NO: 33990
  source 1..120: mol_type = other DNA

SEQ ID NO: 63945 - DNA, 120 bp, synthetic construct; identical to SEQ ID NO: 9948
  source 1..120: mol_type = other DNA

SEQ ID NO: 63946 - DNA, 120 bp, synthetic construct; identical to SEQ ID NO: 33992
  source 1..120: mol_type = other DNA

SEQ ID NO: 63947 - DNA, 120 bp, synthetic construct; identical to SEQ ID NO: 33993
  source 1..120: mol_type = other DNA

SEQ ID NO: 63948 - DNA, 120 bp, synthetic construct; identical to SEQ ID NO: 33994
  source 1..120: mol_type = other DNA

SEQ ID NO: 63949 - DNA, 120 bp, synthetic construct; identical to SEQ ID NO: 33995
  source 1..120: mol_type = other DNA

SEQ ID NO: 63950 - DNA, 120 bp, synthetic construct; identical to SEQ ID NO: 9949
  source 1..120: mol_type = other DNA

SEQ ID NO: 63951 - DNA, 120 bp, synthetic construct; identical to SEQ ID NO: 33997
  source 1..120: mol_type = other DNA

SEQ ID NO: 63952 - DNA, 120 bp, synthetic construct; identical to SEQ ID NO: 33998
  source 1..120: mol_type = other DNA

SEQ ID NO: 63953 - DNA, 120 bp, synthetic construct; identical to SEQ ID NO: 9950
  source 1..120: mol_type = other DNA

SEQ ID NO: 63954 - DNA, 120 bp, synthetic construct; identical to SEQ ID NO: 34000
  source 1..120: mol_type = other DNA

SEQ ID NO: 63955 - DNA, 120 bp, synthetic construct; identical to SEQ ID NO: 34001
  source 1..120: mol_type = other DNA

SEQ ID NO: 63956 - DNA, 120 bp, synthetic construct; identical to SEQ ID NO: 34002
  source 1..120: mol_type = other DNA

SEQ ID NO: 63957 - DNA, 120 bp, synthetic construct; identical to SEQ ID NO: 34003
  source 1..120: mol_type = other DNA

SEQ ID NO: 63958 - DNA, 120 bp, synthetic construct; identical to SEQ ID NO: 9951
  source 1..120: mol_type = other DNA

SEQ ID NO: 63959 - DNA, 120 bp, synthetic construct; identical to SEQ ID NO: 34005
  source 1..120: mol_type = other DNA

SEQ ID NO: 63960 - DNA, 120 bp, synthetic construct; identical to SEQ ID NO: 34006
  source 1..120: mol_type = other DNA

SEQ ID NO: 63961 - DNA, 120 bp, synthetic construct; identical to SEQ ID NO: 9952
  source 1..120: mol_type = other DNA

SEQ ID NO: 63962 - DNA, 120 bp, synthetic construct; identical to SEQ ID NO: 34008
  source 1..120: mol_type = other DNA

SEQ ID NO: 63963 - DNA, 120 bp, synthetic construct; identical to SEQ ID NO: 34009
  source 1..120: mol_type = other DNA

SEQ ID NO: 63964 - DNA, 120 bp, synthetic construct; identical to SEQ ID NO: 34010
  source 1..120: mol_type = other DNA

SEQ ID NO: 63965 - DNA, 120 bp, synthetic construct; identical to SEQ ID NO: 9953
  source 1..120: mol_type = other DNA

SEQ ID NO: 63966 - DNA, 120 bp, synthetic construct; identical to SEQ ID NO: 34012
  source 1..120: mol_type = other DNA

SEQ ID NO: 63967 - DNA, 120 bp, synthetic construct; identical to SEQ ID NO: 34013
  source 1..120: mol_type = other DNA

SEQ ID NO: 63968 - DNA, 120 bp, synthetic construct; identical to SEQ ID NO: 34014
  source 1..120: mol_type = other DNA

SEQ ID NO: 63969 - DNA, 120 bp, synthetic construct; identical to SEQ ID NO: 34015
  source 1..120: mol_type = other DNA

SEQ ID NO: 63970 - DNA, 120 bp, synthetic construct; identical to SEQ ID NO: 9954
  source 1..120: mol_type = other DNA

SEQ ID NO: 63971 - DNA, 120 bp, synthetic construct; identical to SEQ ID NO: 34017
  source 1..120: mol_type = other DNA

SEQ ID NO: 63972 - DNA, 120 bp, synthetic construct; identical to SEQ ID NO: 34018
  source 1..120: mol_type = other DNA

SEQ ID NO: 63973 - DNA, 120 bp, synthetic construct; identical to SEQ ID NO: 9955
  source 1..120: mol_type = other DNA

SEQ ID NO: 63974 - DNA, 120 bp, synthetic construct; identical to SEQ ID NO: 34020
  source 1..120: mol_type = other DNA

SEQ ID NO: 63975 - DNA, 120 bp, synthetic construct; identical to SEQ ID NO: 34021
  source 1..120: mol_type = other DNA

SEQ ID NO: 63976 - DNA, 120 bp, synthetic construct; identical to SEQ ID NO: 34022
  source 1..120: mol_type = other DNA

SEQ ID NO: 63977 - DNA, 120 bp, synthetic construct; identical to SEQ ID NO: 9956
  source 1..120: mol_type = other DNA

SEQ ID NO: 63978 - DNA, 120 bp, synthetic construct; identical to SEQ ID NO: 34024
  source 1..120: mol_type = other DNA

SEQ ID NO: 63979 - DNA, 120 bp, synthetic construct; identical to SEQ ID NO: 34025
  source 1..120: mol_type = other DNA

SEQ ID NO: 63980 - DNA, 120 bp, synthetic construct; identical to SEQ ID NO: 34026
  source 1..120: mol_type = other DNA

SEQ ID NO: 63981 - DNA, 120 bp, synthetic construct; identical to SEQ ID NO: 9957
  source 1..120: mol_type = other DNA

SEQ ID NO: 63982 - DNA, 120 bp, synthetic construct; identical to SEQ ID NO: 34028
  source 1..120: mol_type = other DNA

SEQ ID NO: 63983 - DNA, 120 bp, synthetic construct; identical to SEQ ID NO: 34029
  source 1..120: mol_type = other DNA

SEQ ID NO: 63984 - DNA, 120 bp, synthetic construct; identical to SEQ ID NO: 34030
  source 1..120: mol_type = other DNA

SEQ ID NO: 63985 - DNA, 120 bp, synthetic construct; identical to SEQ ID NO: 34031
  source 1..120: mol_type = other DNA

SEQ ID NO: 63986 - DNA, 120 bp, synthetic construct; identical to SEQ ID NO: 9958
  source 1..120: mol_type = other DNA

SEQ ID NO: 63987 - DNA, 120 bp, synthetic construct; identical to SEQ ID NO: 34033
  source 1..120: mol_type = other DNA

SEQ ID NO: 63988 - DNA, 120 bp, synthetic construct; identical to SEQ ID NO: 34034
  source 1..120: mol_type = other DNA

SEQ ID NO: 63989 - DNA, 120 bp, synthetic construct; identical to SEQ ID NO: 9959
  source 1..120: mol_type = other DNA

SEQ ID NO: 63990 - DNA, 120 bp, synthetic construct; identical to SEQ ID NO: 34036
  source 1..120: mol_type = other DNA

SEQ ID NO: 63991 - DNA, 120 bp, synthetic construct; identical to SEQ ID NO: 34037
  source 1..120: mol_type = other DNA

SEQ ID NO: 63992 - DNA, 120 bp, synthetic construct; identical to SEQ ID NO: 34038
  source 1..120: mol_type = other DNA

SEQ ID NO: 63993 - DNA, 120 bp, synthetic construct; identical to SEQ ID NO: 9960
  source 1..120: mol_type = other DNA

SEQ ID NO: 63994 - DNA, 120 bp, synthetic construct; identical to SEQ ID NO: 34040
  source 1..120: mol_type = other DNA

SEQ ID NO: 63995 - DNA, 120 bp, synthetic construct; identical to SEQ ID NO: 34041
  source 1..120: mol_type = other DNA

SEQ ID NO: 63996 - DNA, 120 bp, synthetic construct; identical to SEQ ID NO: 34042
  source 1..120: mol_type = other DNA

SEQ ID NO: 63997 - DNA, 120 bp, synthetic construct; identical to SEQ ID NO: 9961
  source 1..120: mol_type = other DNA

SEQ ID NO: 63998 - DNA, 120 bp, synthetic construct; identical to SEQ ID NO: 34044
  source 1..120: mol_type = other DNA

SEQ ID NO: 63999 - DNA, 120 bp, synthetic construct; identical to SEQ ID NO: 34045
  source 1..120: mol_type = other DNA

SEQ ID NO: 64000 - DNA, 120 bp, synthetic construct; identical to SEQ ID NO: 34046
  source 1..120: mol_type = other DNA

SEQ ID NO: 64001 - DNA, 120 bp, synthetic construct; identical to SEQ ID NO: 34047
  source 1..120: mol_type = other DNA

SEQ ID NO: 64002 - DNA, 120 bp, synthetic construct; identical to SEQ ID NO: 9962
  source 1..120: mol_type = other DNA

SEQ ID NO: 64003 - DNA, 120 bp, synthetic construct; identical to SEQ ID NO: 34049
  source 1..120: mol_type = other DNA

SEQ ID NO: 64004 - DNA, 120 bp, synthetic construct; identical to SEQ ID NO: 34050
  source 1..120: mol_type = other DNA

SEQ ID NO: 64005 - DNA, 120 bp, synthetic construct; identical to SEQ ID NO: 34051
  source 1..120: mol_type = other DNA

SEQ ID NO: 64006 - DNA, 120 bp, synthetic construct; identical to SEQ ID NO: 9963
  source 1..120: mol_type = other DNA

SEQ ID NO: 64007 - DNA, 120 bp, synthetic construct; identical to SEQ ID NO: 34053
  source 1..120: mol_type = other DNA

SEQ ID NO: 64008 - DNA, 120 bp, synthetic construct; identical to SEQ ID NO: 34054
  source 1..120: mol_type = other DNA

SEQ ID NO: 64009 - DNA, 120 bp, synthetic construct; identical to SEQ ID NO: 34055
  source 1..120: mol_type = other DNA

SEQ ID NO: 64010 - DNA, 120 bp, synthetic construct; identical to SEQ ID NO: 9964
  source 1..120: mol_type = other DNA

SEQ ID NO: 64011 - DNA, 120 bp, synthetic construct; identical to SEQ ID NO: 34057
  source 1..120: mol_type = other DNA

SEQ ID NO: 64012 - DNA, 120 bp, synthetic construct; identical to SEQ ID NO: 34058
  source 1..120: mol_type = other DNA

SEQ ID NO: 64013 - DNA, 120 bp, synthetic construct; identical to SEQ ID NO: 34059
  source 1..120: mol_type = other DNA

SEQ ID NO: 64014 - DNA, 120 bp, synthetic construct; identical to SEQ ID NO: 34060
  source 1..120: mol_type = other DNA

SEQ ID NO: 64015 - DNA, 120 bp, synthetic construct; identical to SEQ ID NO: 9965
  source 1..120: mol_type = other DNA

SEQ ID NO: 64016 - DNA, 120 bp, synthetic construct; identical to SEQ ID NO: 34062
  source 1..120: mol_type = other DNA

SEQ ID NO: 64017 - DNA, 120 bp, synthetic construct; identical to SEQ ID NO: 34063
  source 1..120: mol_type = other DNA

SEQ ID NO: 64018 - DNA, 120 bp, synthetic construct; identical to SEQ ID NO: 34064
  source 1..120: mol_type = other DNA

SEQ ID NO: 64019 - DNA, 120 bp, synthetic construct; identical to SEQ ID NO: 9966
  source 1..120: mol_type = other DNA

SEQ ID NO: 64020 - DNA, 120 bp, synthetic construct; identical to SEQ ID NO: 34066
  source 1..120: mol_type = other DNA

SEQ ID NO: 64021 - DNA, 120 bp, synthetic construct; identical to SEQ ID NO: 34067
  source 1..120: mol_type = other DNA

SEQ ID NO: 64022 - DNA, 120 bp, synthetic construct; identical to SEQ ID NO: 9967
  source 1..120: mol_type = other DNA

SEQ ID NO: 64023 - DNA, 120 bp, synthetic construct; identical to SEQ ID NO: 34069
  source 1..120: mol_type = other DNA

SEQ ID NO: 64024 - DNA, 120 bp, synthetic construct; identical to SEQ ID NO: 34070
  source 1..120: mol_type = other DNA

SEQ ID NO: 64025 - DNA, 120 bp, synthetic construct; identical to SEQ ID NO: 34071
  source 1..120: mol_type = other DNA

SEQ ID NO: 64026 - DNA, 120 bp, synthetic construct; identical to SEQ ID NO: 9968
  source 1..120: mol_type = other DNA

SEQ ID NO: 64027 - DNA, 120 bp, synthetic construct; identical to SEQ ID NO: 34073
  source 1..120: mol_type = other DNA

SEQ ID NO: 64028 - DNA, 120 bp, synthetic construct; identical to SEQ ID NO: 34074
  source 1..120: mol_type = other DNA

SEQ ID NO: 64029 - DNA, 120 bp, synthetic construct; identical to SEQ ID NO: 34075
  source 1..120: mol_type = other DNA

SEQ ID NO: 64030 - DNA, 120 bp, synthetic construct; identical to SEQ ID NO: 34076
  source 1..120: mol_type = other DNA

SEQ ID NO: 64031 - DNA, 120 bp, synthetic construct; identical to SEQ ID NO: 9969
  source 1..120: mol_type = other DNA

SEQ ID NO: 64032 - DNA, 120 bp, synthetic construct; identical to SEQ ID NO: 34078
  source 1..120: mol_type = other DNA

SEQ ID NO: 64033 - DNA, 120 bp, synthetic construct; identical to SEQ ID NO: 34079
  source 1..120: mol_type = other DNA

SEQ ID NO: 64034 - DNA, 120 bp, synthetic construct; identical to SEQ ID NO: 34080
  source 1..120: mol_type = other DNA

SEQ ID NO: 64035 - DNA, 120 bp, synthetic construct; identical to SEQ ID NO: 9970
  source 1..120: mol_type = other DNA

SEQ ID NO: 64036 - DNA, 120 bp, synthetic construct; identical to SEQ ID NO: 34082
  source 1..120: mol_type = other DNA

SEQ ID NO: 64037 - DNA, 120 bp, synthetic construct; identical to SEQ ID NO: 34083
  source 1..120: mol_type = other DNA

SEQ ID NO: 64038 - DNA, 120 bp, synthetic construct; identical to SEQ ID NO: 34084
  source 1..120: mol_type = other DNA

SEQ ID NO: 64039 - DNA, 120 bp, synthetic construct; identical to SEQ ID NO: 34085
  source 1..120: mol_type = other DNA

SEQ ID NO: 64040 - DNA, 120 bp, synthetic construct; identical to SEQ ID NO: 9971
  source 1..120: mol_type = other DNA

SEQ ID NO: 64041 - DNA, 120 bp, synthetic construct; identical to SEQ ID NO: 34087
  source 1..120: mol_type = other DNA

SEQ ID NO: 64042 - DNA, 120 bp, synthetic construct; identical to SEQ ID NO: 34088
  source 1..120: mol_type = other DNA

SEQ ID NO: 64043 - DNA, 120 bp, synthetic construct; identical to SEQ ID NO: 9972
  source 1..120: mol_type = other DNA

SEQ ID NO: 64044 - DNA, 120 bp, synthetic construct; identical to SEQ ID NO: 34090
  source 1..120: mol_type = other DNA

SEQ ID NO: 64045 - DNA, 120 bp, synthetic construct; identical to SEQ ID NO: 34091
  source 1..120: mol_type = other DNA

SEQ ID NO: 64046 - DNA, 120 bp, synthetic construct; identical to SEQ ID NO: 34092
  source 1..120: mol_type = other DNA

SEQ ID NO: 64047 - DNA, 120 bp, synthetic construct; identical to SEQ ID NO: 34093
  source 1..120: mol_type = other DNA

SEQ ID NO: 64048 - DNA, 120 bp, synthetic construct; identical to SEQ ID NO: 9973
  source 1..120: mol_type = other DNA

SEQ ID NO: 64049 - DNA, 120 bp, synthetic construct; identical to SEQ ID NO: 34095
  source 1..120: mol_type = other DNA

SEQ ID NO: 64050 - DNA, 120 bp, synthetic construct; identical to SEQ ID NO: 34096
  source 1..120: mol_type = other DNA

SEQ ID NO: 64051 - DNA, 120 bp, synthetic construct; identical to SEQ ID NO: 34097
  source 1..120: mol_type = other DNA

SEQ ID NO: 64052 - DNA, 120 bp, synthetic construct; identical to SEQ ID NO: 9974
  source 1..120: mol_type = other DNA

SEQ ID NO: 64053 - DNA, 120 bp, synthetic construct; identical to SEQ ID NO: 34099
  source 1..120: mol_type = other DNA

SEQ ID NO: 64054 - DNA, 120 bp, synthetic construct; identical to SEQ ID NO: 34100
  source 1..120: mol_type = other DNA

SEQ ID NO: 64055 - DNA, 120 bp, synthetic construct; identical to SEQ ID NO: 9975
  source 1..120: mol_type = other DNA

SEQ ID NO: 64056 - DNA, 120 bp, synthetic construct; identical to SEQ ID NO: 34102
  source 1..120: mol_type = other DNA

SEQ ID NO: 64057 - DNA, 120 bp, synthetic construct; identical to SEQ ID NO: 34103
  source 1..120: mol_type = other DNA

SEQ ID NO: 64058 - DNA, 120 bp, synthetic construct; identical to SEQ ID NO: 34104
  source 1..120: mol_type = other DNA

SEQ ID NO: 64059 - DNA, 120 bp, synthetic construct; identical to SEQ ID NO: 9976
  source 1..120: mol_type = other DNA

SEQ ID NO: 64060 - DNA, 120 bp, synthetic construct; identical to SEQ ID NO: 34106
  source 1..120: mol_type = other DNA

SEQ ID NO: 64061 - DNA, 120 bp, synthetic construct; identical to SEQ ID NO: 34107
  source 1..120: mol_type = other DNA

SEQ ID NO: 64062 - DNA, 120 bp, synthetic construct; identical to SEQ ID NO: 34108
  source 1..120: mol_type = other DNA

SEQ ID NO: 64063 - DNA, 120 bp, synthetic construct; identical to SEQ ID NO: 34109
  source 1..120: mol_type = other DNA

SEQ ID NO: 64064 - DNA, 120 bp, synthetic construct; identical to SEQ ID NO: 9977
  source 1..120: mol_type = other DNA

SEQ ID NO: 64065 - DNA, 120 bp, synthetic construct; identical to SEQ ID NO: 34111
  source 1..120: mol_type = other DNA

SEQ ID NO: 64066 - DNA, 120 bp, synthetic construct; identical to SEQ ID NO: 34112
  source 1..120: mol_type = other DNA

SEQ ID NO: 64067 - DNA, 120 bp, synthetic construct; identical to SEQ ID NO: 9978
  source 1..120: mol_type = other DNA

SEQ ID NO: 64068 - DNA, 120 bp, synthetic construct; identical to SEQ ID NO: 34114
  source 1..120: mol_type = other DNA

SEQ ID NO: 64069 - DNA, 120 bp, synthetic construct; identical to SEQ ID NO: 34115
  source 1..120: mol_type = other DNA

SEQ ID NO: 64070 - DNA, 120 bp, synthetic construct; identical to SEQ ID NO: 34116
  source 1..120: mol_type = other DNA

SEQ ID NO: 64071 - DNA, 120 bp, synthetic construct; identical to SEQ ID NO: 9979
  source 1..120: mol_type = other DNA

SEQ ID NO: 64072 - DNA, 120 bp, synthetic construct; identical to SEQ ID NO: 34118
  source 1..120: mol_type = other DNA

SEQ ID NO: 64073 - DNA, 120 bp, synthetic construct; identical to SEQ ID NO: 34119
  source 1..120: mol_type = other DNA

SEQ ID NO: 64074 - DNA, 120 bp, synthetic construct; identical to SEQ ID NO: 34120
  source 1..120: mol_type = other DNA

SEQ ID NO: 64075 - DNA, 120 bp, synthetic construct; identical to SEQ ID NO: 34121
  source 1..120: mol_type = other DNA

SEQ ID NO: 64076 - DNA, 120 bp, synthetic construct; identical to SEQ ID NO: 9980
  source 1..120: mol_type = other DNA

SEQ ID NO: 64077 - DNA, 120 bp, synthetic construct; identical to SEQ ID NO: 34123
  source 1..120: mol_type = other DNA

SEQ ID NO: 64078 - DNA, 120 bp, synthetic construct; identical to SEQ ID NO: 34124
  source 1..120: mol_type = other DNA

SEQ ID NO: 64079 - DNA, 120 bp, synthetic construct; identical to SEQ ID NO: 34125
  source 1..120: mol_type = other DNA

SEQ ID NO: 64080 - DNA, 120 bp, synthetic construct; identical to SEQ ID NO: 9981
  source 1..120: mol_type = other DNA

SEQ ID NO: 64081 - DNA, 120 bp, synthetic construct; identical to SEQ ID NO: 34127
  source 1..120: mol_type = other DNA

SEQ ID NO: 64082 - DNA, 120 bp, synthetic construct; identical to SEQ ID NO: 34128
  source 1..120: mol_type = other DNA

SEQ ID NO: 64083 - DNA, 120 bp, synthetic construct; identical to SEQ ID NO: 9982
  source 1..120: mol_type = other DNA

SEQ ID NO: 64084 - DNA, 120 bp, synthetic construct; identical to SEQ ID NO: 34130
  source 1..120: mol_type = other DNA

SEQ ID NO: 64085 - DNA, 120 bp, synthetic construct; identical to SEQ ID NO: 34131
  source 1..120: mol_type = other DNA

SEQ ID NO: 64086 - DNA, 120 bp, synthetic construct; identical to SEQ ID NO: 34132
  source 1..120: mol_type = other DNA

SEQ ID NO: 64087 - DNA, 120 bp, synthetic construct; identical to SEQ ID NO: 9983
  source 1..120: mol_type = other DNA

SEQ ID NO: 64088 - DNA, 120 bp, synthetic construct; identical to SEQ ID NO: 34134
  source 1..120: mol_type = other DNA

SEQ ID NO: 64089 - DNA, 120 bp, synthetic construct; identical to SEQ ID NO: 34135
  source 1..120: mol_type = other DNA

SEQ ID NO: 64090 - DNA, 120 bp, synthetic construct; identical to SEQ ID NO: 34136
  source 1..120: mol_type = other DNA

SEQ ID NO: 64091 - DNA, 120 bp, synthetic construct; identical to SEQ ID NO: 9984
  source 1..120: mol_type = other DNA

SEQ ID NO: 64092 - DNA, 120 bp, synthetic construct; identical to SEQ ID NO: 34138
  source 1..120: mol_type = other DNA

SEQ ID NO: 64093 - DNA, 120 bp, synthetic construct; identical to SEQ ID NO: 34139
  source 1..120: mol_type = other DNA

SEQ ID NO: 64094 - DNA, 120 bp, synthetic construct; identical to SEQ ID NO: 34140
  source 1..120: mol_type = other DNA

SEQ ID NO: 64095 - DNA, 120 bp, synthetic construct; identical to SEQ ID NO: 34141
  source 1..120: mol_type = other DNA

SEQ ID NO: 64096 - DNA, 120 bp, synthetic construct; identical to SEQ ID NO: 9985
  source 1..120: mol_type = other DNA

SEQ ID NO: 64097 - DNA, 120 bp, synthetic construct; identical to SEQ ID NO: 34143
  source 1..120: mol_type = other DNA

SEQ ID NO: 64098 - DNA, 120 bp, synthetic construct; identical to SEQ ID NO: 34144
  source 1..120: mol_type = other DNA

SEQ ID NO: 64099 - DNA, 120 bp, synthetic construct; identical to SEQ ID NO: 9986
  source 1..120: mol_type = other DNA

SEQ ID NO: 64100 - DNA, 120 bp, synthetic construct; identical to SEQ ID NO: 34146
  source 1..120: mol_type = other DNA

SEQ ID NO: 64101 - DNA, 120 bp, synthetic construct; identical to SEQ ID NO: 34147
  source 1..120: mol_type = other DNA

SEQ ID NO: 64102 - DNA, 120 bp, synthetic construct; identical to SEQ ID NO: 34148
  source 1..120: mol_type = other DNA

SEQ ID NO: 64103 - DNA, 120 bp, synthetic construct; identical to SEQ ID NO: 9987
  source 1..120: mol_type = other DNA

SEQ ID NO: 64104 - DNA, 120 bp, synthetic construct; identical to SEQ ID NO: 34150
  source 1..120: mol_type = other DNA

SEQ ID NO: 64105 - DNA, 120 bp, synthetic construct; identical to SEQ ID NO: 34151
  source 1..120: mol_type = other DNA

SEQ ID NO: 64106 - DNA, 120 bp, synthetic construct; identical to SEQ ID NO: 34152
  source 1..120: mol_type = other DNA

SEQ ID NO: 64107 - DNA, 120 bp, synthetic construct; identical to SEQ ID NO: 34153
  source 1..120: mol_type = other DNA

SEQ ID NO: 64108 - DNA, 120 bp, synthetic construct; identical to SEQ ID NO: 9988
  source 1..120: mol_type = other DNA

SEQ ID NO: 64109 - DNA, 120 bp, synthetic construct; identical to SEQ ID NO: 34155
  source 1..120: mol_type = other DNA

SEQ ID NO: 64110 - DNA, 120 bp, synthetic construct; identical to SEQ ID NO: 34156
  source 1..120: mol_type = other DNA

SEQ ID NO: 64111 - DNA, 120 bp, synthetic construct; identical to SEQ ID NO: 9989
  source 1..120: mol_type = other DNA

SEQ ID NO: 64112 - DNA, 120 bp, synthetic construct; identical to SEQ ID NO: 34158
  source 1..120: mol_type = other DNA

SEQ ID NO: 64113 - DNA, 120 bp, synthetic construct; identical to SEQ ID NO: 34159
  source 1..120: mol_type = other DNA

SEQ ID NO: 64114 - DNA, 120 bp, synthetic construct; identical to SEQ ID NO: 2826
  source 1..120: mol_type = other DNA

SEQ ID NO: 64115 - DNA, 120 bp, synthetic construct; identical to SEQ ID NO: 34161
  source 1..120: mol_type = other DNA

SEQ ID NO: 64116 - DNA, 120 bp, synthetic construct; identical to SEQ ID NO: 9990
  source 1..120: mol_type = other DNA

SEQ ID NO: 64117 - DNA, 120 bp, synthetic construct; identical to SEQ ID NO: 34163
  source 1..120: mol_type = other DNA

SEQ ID NO: 64118 - DNA, 120 bp, synthetic construct; identical to SEQ ID NO: 34164
  source 1..120: mol_type = other DNA

SEQ ID NO: 64119 - DNA, 120 bp, synthetic construct; identical to SEQ ID NO: 34165
  source 1..120: mol_type = other DNA

SEQ ID NO: 64120 - DNA, 120 bp, synthetic construct; identical to SEQ ID NO: 9991
  source 1..120: mol_type = other DNA

SEQ ID NO: 64121 - DNA, 120 bp, synthetic construct; identical to SEQ ID NO: 34167
  source 1..120: mol_type = other DNA

SEQ ID NO: 64122 - DNA, 120 bp, synthetic construct; identical to SEQ ID NO: 34168
  source 1..120: mol_type = other DNA

SEQ ID NO: 64123 - DNA, 120 bp, synthetic construct; identical to SEQ ID NO: 9992
  source 1..120: mol_type = other DNA

SEQ ID NO: 64124 - DNA, 120 bp, synthetic construct; identical to SEQ ID NO: 34170
  source 1..120: mol_type = other DNA

SEQ ID NO: 64125 - DNA, 120 bp, synthetic construct; identical to SEQ ID NO: 34171
  source 1..120: mol_type = other DNA

SEQ ID NO: 64126 - DNA, 120 bp, synthetic construct; identical to SEQ ID NO: 34172
  source 1..120: mol_type = other DNA

SEQ ID NO: 64127 - DNA, 120 bp, synthetic construct; identical to SEQ ID NO: 9993
  source 1..120: mol_type = other DNA

SEQ ID NO: 64128 - DNA, 120 bp, synthetic construct; identical to SEQ ID NO: 34174
  source 1..120: mol_type = other DNA

SEQ ID NO: 64129 - DNA, 120 bp, synthetic construct; identical to SEQ ID NO: 34175
  source 1..120: mol_type = other DNA

SEQ ID NO: 64130 - DNA, 120 bp, synthetic construct; identical to SEQ ID NO: 34176
  source 1..120: mol_type = other DNA

SEQ ID NO: 64131 - DNA, 120 bp, synthetic construct; identical to SEQ ID NO: 34177
  source 1..120: mol_type = other DNA

SEQ ID NO: 64132 - DNA, 120 bp, synthetic construct; identical to SEQ ID NO: 9994
  source 1..120: mol_type = other DNA

SEQ ID NO: 64133 - DNA, 120 bp, synthetic construct; identical to SEQ ID NO: 34179
  source 1..120: mol_type = other DNA

SEQ ID NO: 64134 - DNA, 120 bp, synthetic construct; identical to SEQ ID NO: 34180
  source 1..120: mol_type = other DNA

SEQ ID NO: 64135 - DNA, 120 bp, synthetic construct; identical to SEQ ID NO: 9995
  source 1..120: mol_type = other DNA

SEQ ID NO: 64136 - DNA, 120 bp, synthetic construct; identical to SEQ ID NO: 34182
  source 1..120: mol_type = other DNA

SEQ ID NO: 64137 - DNA, 120 bp, synthetic construct; identical to SEQ ID NO: 34183
  source 1..120: mol_type = other DNA

SEQ ID NO: 64138 - DNA, 120 bp, synthetic construct; identical to SEQ ID NO: 34184
  source 1..120: mol_type = other DNA

SEQ ID NO: 64139 - DNA, 120 bp, synthetic construct; identical to SEQ ID NO: 9996
  source 1..120: mol_type = other DNA

SEQ ID NO: 64140 - DNA, 120 bp, synthetic construct; identical to SEQ ID NO: 34186
  source 1..120: mol_type = other DNA

SEQ ID NO: 64141 - DNA, 120 bp, synthetic construct; identical to SEQ ID NO: 34187
  source 1..120: mol_type = other DNA

SEQ ID NO: 64142 - DNA, 120 bp, synthetic construct; identical to SEQ ID NO: 34188
  source 1..120: mol_type = other DNA

SEQ ID NO: 64143 - DNA, 120 bp, synthetic construct; identical to SEQ ID NO: 34189
  source 1..120: mol_type = other DNA

SEQ ID NO: 64144 - DNA, 120 bp, synthetic construct; identical to SEQ ID NO: 9997
  source 1..120: mol_type = other DNA

SEQ ID NO: 64145 - DNA, 120 bp, synthetic construct; identical to SEQ ID NO: 34191
  source 1..120: mol_type = other DNA

SEQ ID NO: 64146 - DNA, 120 bp, synthetic construct; identical to SEQ ID NO: 34192
  source 1..120: mol_type = other DNA

SEQ ID NO: 64147 - DNA, 120 bp, synthetic construct; identical to SEQ ID NO: 34193
  source 1..120: mol_type = other DNA

SEQ ID NO: 64148 - DNA, 120 bp, synthetic construct; identical to SEQ ID NO: 9998
  source 1..120: mol_type = other DNA

SEQ ID NO: 64149 - DNA, 120 bp, synthetic construct; identical to SEQ ID NO: 34195
  source 1..120: mol_type = other DNA

SEQ ID NO: 64150 - DNA, 120 bp, synthetic construct; identical to SEQ ID NO: 34196
  source 1..120: mol_type = other DNA

SEQ ID NO: 64151 - DNA, 120 bp, synthetic construct; identical to SEQ ID NO: 34197
  source 1..120: mol_type = other DNA

SEQ ID NO: 64152 - DNA, 120 bp, synthetic construct; identical to SEQ ID NO: 9999
  source 1..120: mol_type = other DNA

SEQ ID NO: 64153 - DNA, 120 bp, synthetic construct; identical to SEQ ID NO: 34199
  source 1..120: mol_type = other DNA

SEQ ID NO: 64154 - DNA, 120 bp, synthetic construct; identical to SEQ ID NO: 34200
  source 1..120: mol_type = other DNA

SEQ ID NO: 64155 - DNA, 120 bp, synthetic construct; identical to SEQ ID NO: 34201
  source 1..120: mol_type = other DNA

SEQ ID NO: 64156 - DNA, 120 bp, synthetic construct; identical to SEQ ID NO: 10000
  source 1..120: mol_type = other DNA

SEQ ID NO: 64157 - DNA, 120 bp, synthetic construct; identical to SEQ ID NO: 34203
  source 1..120: mol_type = other DNA

SEQ ID NO: 64158 - DNA, 120 bp, synthetic construct; identical to SEQ ID NO: 34204
  source 1..120: mol_type = other DNA

SEQ ID NO: 64159 - DNA, 120 bp, synthetic construct; identical to SEQ ID NO: 34205
  source 1..120: mol_type = other DNA

SEQ ID NO: 64160 - DNA, 120 bp, synthetic construct; identical to SEQ ID NO: 10001
  source 1..120: mol_type = other DNA

SEQ ID NO: 64161 - DNA, 120 bp, synthetic construct; identical to SEQ ID NO: 34207
  source 1..120: mol_type = other DNA

SEQ ID NO: 64162 - DNA, 120 bp, synthetic construct; identical to SEQ ID NO: 34208
  source 1..120: mol_type = other DNA

SEQ ID NO: 64163 - DNA, 120 bp, synthetic construct; identical to SEQ ID NO: 10002
  source 1..120: mol_type = other DNA

SEQ ID NO: 64164 - DNA, 120 bp, synthetic construct; identical to SEQ ID NO: 34210
  source 1..120: mol_type = other DNA

SEQ ID NO: 64165 - DNA, 120 bp, synthetic construct; identical to SEQ ID NO: 34211
  source 1..120: mol_type = other DNA

SEQ ID NO: 64166 - DNA, 120 bp, synthetic construct; identical to SEQ ID NO: 34212
  source 1..120: mol_type = other DNA

SEQ ID NO: 64167 - DNA, 120 bp, synthetic construct; identical to SEQ ID NO: 10003
  source 1..120: mol_type = other DNA

SEQ ID NO: 64168 - DNA, 120 bp, synthetic construct; identical to SEQ ID NO: 34214
  source 1..120: mol_type = other DNA

SEQ ID NO: 64169 - DNA, 120 bp, synthetic construct; identical to SEQ ID NO: 34215
  source 1..120: mol_type = other DNA

SEQ ID NO: 64170 - DNA, 120 bp, synthetic construct; identical to SEQ ID NO: 34216
  source 1..120: mol_type = other DNA

SEQ ID NO: 64171 - DNA, 120 bp, synthetic construct; identical to SEQ ID NO: 10004
  source 1..120: mol_type = other DNA

SEQ ID NO: 64172 - DNA, 120 bp, synthetic construct; identical to SEQ ID NO: 34218
  source 1..120: mol_type = other DNA

SEQ ID NO: 64173 - DNA, 120 bp, synthetic construct; identical to SEQ ID NO: 34219
  source 1..120: mol_type = other DNA

SEQ ID NO: 64174 - DNA, 120 bp, synthetic construct; identical to SEQ ID NO: 34220
  source 1..120: mol_type = other DNA

SEQ ID NO: 64175 - DNA, 120 bp, synthetic construct; identical to SEQ ID NO: 10005
  source 1..120: mol_type = other DNA

SEQ ID NO: 64176 - DNA, 120 bp, synthetic construct; identical to SEQ ID NO: 34222
  source 1..120: mol_type = other DNA

SEQ ID NO: 64177 - DNA, 120 bp, synthetic construct; identical to SEQ ID NO: 34223
  source 1..120: mol_type = other DNA

SEQ ID NO: 64178 - DNA, 120 bp, synthetic construct; identical to SEQ ID NO: 34224
  source 1..120: mol_type = other DNA

SEQ ID NO: 64179 - DNA, 120 bp, synthetic construct; identical to SEQ ID NO: 10006
  source 1..120: mol_type = other DNA

SEQ ID NO: 64180 - DNA, 120 bp, synthetic construct; identical to SEQ ID NO: 34226
  source 1..120: mol_type = other DNA

SEQ ID NO: 64181 - DNA, 120 bp, synthetic construct; identical to SEQ ID NO: 34227
  source 1..120: mol_type = other DNA

SEQ ID NO: 64182 - DNA, 120 bp, synthetic construct; identical to SEQ ID NO: 34228
  source 1..120: mol_type = other DNA

SEQ ID NO: 64183 - DNA, 120 bp, synthetic construct; identical to SEQ ID NO: 10007
  source 1..120: mol_type = other DNA

SEQ ID NO: 64184 - DNA, 120 bp, synthetic construct; identical to SEQ ID NO: 34230
  source 1..120: mol_type = other DNA

SEQ ID NO: 64185 - DNA, 120 bp, synthetic construct; identical to SEQ ID NO: 34231
  source 1..120: mol_type = other DNA

SEQ ID NO: 64186 - DNA, 120 bp, synthetic construct; identical to SEQ ID NO: 34232
  source 1..120: mol_type = other DNA

SEQ ID NO: 64187 - DNA, 120 bp, synthetic construct; identical to SEQ ID NO: 34233
  source 1..120: mol_type = other DNA

SEQ ID NO: 64188 - DNA, 120 bp, synthetic construct; identical to SEQ ID NO: 10008
  source 1..120: mol_type = other DNA

SEQ ID NO: 64189 - DNA, 120 bp, synthetic construct; identical to SEQ ID NO: 34235
  source 1..120: mol_type = other DNA

SEQ ID NO: 64190 - DNA, 120 bp, synthetic construct; identical to SEQ ID NO: 34236
  source 1..120: mol_type = other DNA

SEQ ID NO: 64191 - DNA, 120 bp, synthetic construct; identical to SEQ ID NO: 34237
  source 1..120: mol_type = other DNA

SEQ ID NO: 64192 - DNA, 120 bp, synthetic construct; identical to SEQ ID NO: 10009
  source 1..120: mol_type = other DNA

SEQ ID NO: 64193 - DNA, 120 bp, synthetic construct; identical to SEQ ID NO: 34239
  source 1..120: mol_type = other DNA

SEQ ID NO: 64194 - DNA, 120 bp, synthetic construct; identical to SEQ ID NO: 34240
  source 1..120: mol_type = other DNA

SEQ ID NO: 64195 - DNA, 120 bp, synthetic construct; identical to SEQ ID NO: 34241
  source 1..120: mol_type = other DNA

SEQ ID NO: 64196 - DNA, 120 bp, synthetic construct; identical to SEQ ID NO: 10010
  source 1..120: mol_type = other DNA

SEQ ID NO: 64197 - DNA, 120 bp, synthetic construct; identical to SEQ ID NO: 34243
  source 1..120: mol_type = other DNA

SEQ ID NO: 64198 - DNA, 120 bp, synthetic construct; identical to SEQ ID NO: 10011
  source 1..120: mol_type = other DNA

SEQ ID NO: 64199 - DNA, 120 bp, synthetic construct; identical to SEQ ID NO: 34245
  source 1..120: mol_type = other DNA

SEQ ID NO: 64200 - DNA, 120 bp, synthetic construct; identical to SEQ ID NO: 34246
  source 1..120: mol_type = other DNA

SEQ ID NO: 64201 - DNA, 120 bp, synthetic construct; identical to SEQ ID NO: 10012
  source 1..120: mol_type = other DNA

SEQ ID NO: 64202 - DNA, 120 bp, synthetic construct; identical to SEQ ID NO: 34248
  source 1..120: mol_type = other DNA

SEQ ID NO: 64203 - DNA, 120 bp, synthetic construct; identical to SEQ ID NO: 10013
  source 1..120: mol_type = other DNA

SEQ ID NO: 64204 - DNA, 120 bp, synthetic construct; identical to SEQ ID NO: 34250
  source 1..120: mol_type = other DNA

SEQ ID NO: 64205 - DNA, 120 bp, synthetic construct; identical to SEQ ID NO: 34251
  source 1..120: mol_type = other DNA

SEQ ID NO: 64206 - DNA, 120 bp, synthetic construct; identical to SEQ ID NO: 34252
  source 1..120: mol_type = other DNA

SEQ ID NO: 64207 - DNA, 120 bp, synthetic construct; identical to SEQ ID NO: 10014
  source 1..120: mol_type = other DNA

SEQ ID NO: 64208 - DNA, 120 bp, synthetic construct; identical to SEQ ID NO: 34254
  source 1..120: mol_type = other DNA

SEQ ID NO: 64209 - DNA, 120 bp, synthetic construct; identical to SEQ ID NO: 34255
  source 1..120: mol_type = other DNA

SEQ ID NO: 64210 - DNA, 120 bp, synthetic construct; identical to SEQ ID NO: 34256
  source 1..120: mol_type = other DNA

SEQ ID NO: 64211 - DNA, 120 bp, synthetic construct; identical to SEQ ID NO: 34257
  source 1..120: mol_type = other DNA

SEQ ID NO: 64212 - DNA, 120 bp, synthetic construct; identical to SEQ ID NO: 10015
  source 1..120: mol_type = other DNA

SEQ ID NO: 64213 - DNA, 120 bp, synthetic construct; identical to SEQ ID NO: 34259
  source 1..120: mol_type = other DNA

SEQ ID NO: 64214 - DNA, 120 bp, synthetic construct; identical to SEQ ID NO: 34260
  source 1..120: mol_type = other DNA

SEQ ID NO: 64215 - DNA, 120 bp, synthetic construct; identical to SEQ ID NO: 34261
  source 1..120: mol_type = other DNA

SEQ ID NO: 64216 - DNA, 120 bp, synthetic construct; identical to SEQ ID NO: 10016
  source 1..120: mol_type = other DNA

SEQ ID NO: 64217 - DNA, 120 bp, synthetic construct; identical to SEQ ID NO: 34263
  source 1..120: mol_type = other DNA

SEQ ID NO: 64218 - DNA, 120 bp, synthetic construct; identical to SEQ ID NO: 34264
  source 1..120: mol_type = other DNA

SEQ ID NO: 64219 - DNA, 120 bp, synthetic construct; identical to SEQ ID NO: 10017
  source 1..120: mol_type = other DNA

SEQ ID NO: 64220 - DNA, 120 bp, synthetic construct; identical to SEQ ID NO: 34266
  source 1..120: mol_type = other DNA

SEQ ID NO: 64221 - DNA, 120 bp, synthetic construct; identical to SEQ ID NO: 34267
  source 1..120: mol_type = other DNA

SEQ ID NO: 64222 - DNA, 120 bp, synthetic construct; identical to SEQ ID NO: 34268
  source 1..120: mol_type = other DNA

SEQ ID NO: 64223 - DNA, 120 bp, synthetic construct; identical to SEQ ID NO: 10018
  source 1..120: mol_type = other DNA

SEQ ID NO: 64224 - DNA, 120 bp, synthetic construct; identical to SEQ ID NO: 34270
  source 1..120: mol_type = other DNA

SEQ ID NO: 64225 - DNA, 120 bp, synthetic construct; identical to SEQ ID NO: 34271
  source 1..120: mol_type = other DNA

SEQ ID NO: 64226 - DNA, 120 bp, synthetic construct; identical to SEQ ID NO: 34272
  source 1..120: mol_type = other DNA

SEQ ID NO: 64227 - DNA, 120 bp, synthetic construct; identical to SEQ ID NO: 10019
  source 1..120: mol_type = other DNA

SEQ ID NO: 64228 - DNA, 120 bp, synthetic construct; identical to SEQ ID NO: 34274
  source 1..120: mol_type = other DNA

SEQ ID NO: 64229 - DNA, 120 bp, synthetic construct; identical to SEQ ID NO: 34275
  source 1..120: mol_type = other DNA

SEQ ID NO: 64230 - DNA, 120 bp, synthetic construct; identical to SEQ ID NO: 34276
  source 1..120: mol_type = other DNA

SEQ ID NO: 64231 - DNA, 120 bp, synthetic construct; identical to SEQ ID NO: 10020
  source 1..120: mol_type = other DNA

SEQ ID NO: 64232 - DNA, 120 bp, synthetic construct; identical to SEQ ID NO: 34278
  source 1..120: mol_type = other DNA

SEQ ID NO: 64233 - DNA, 120 bp, synthetic construct; identical to SEQ ID NO: 34279
  source 1..120: mol_type = other DNA

SEQ ID NO: 64234 - DNA, 120 bp, synthetic construct; identical to SEQ ID NO: 34280
  source 1..120: mol_type = other DNA

SEQ ID NO: 64235 - DNA, 120 bp, synthetic construct; identical to SEQ ID NO: 10021
  source 1..120: mol_type = other DNA

SEQ ID NO: 64236 - DNA, 120 bp, synthetic construct; identical to SEQ ID NO: 34282
  source 1..120: mol_type = other DNA

SEQ ID NO: 64237 - DNA, 120 bp, synthetic construct; identical to SEQ ID NO: 34283
  source 1..120: mol_type = other DNA

SEQ ID NO: 64238 - DNA, 120 bp, synthetic construct; identical to SEQ ID NO: 34284
  source 1..120: mol_type = other DNA

SEQ ID NO: 64239 - DNA, 120 bp, synthetic construct; identical to SEQ ID NO: 10022
  source 1..120: mol_type = other DNA

SEQ ID NO: 64240 - DNA, 120 bp, synthetic construct; identical to SEQ ID NO: 34286
  source 1..120: mol_type = other DNA

SEQ ID NO: 64241 - DNA, 120 bp, synthetic construct; identical to SEQ ID NO: 34287
  source 1..120: mol_type = other DNA

SEQ ID NO: 64242 - DNA, 120 bp, synthetic construct; identical to SEQ ID NO: 34288
  source 1..120: mol_type = other DNA

SEQ ID NO: 64243 - DNA, 120 bp, synthetic construct; identical to SEQ ID NO: 34289
  source 1..120: mol_type = other DNA

SEQ ID NO: 64244 - DNA, 120 bp, synthetic construct; identical to SEQ ID NO: 10023
  source 1..120: mol_type = other DNA

SEQ ID NO: 64245 - DNA, 120 bp, synthetic construct; identical to SEQ ID NO: 34291
  source 1..120: mol_type = other DNA

SEQ ID NO: 64246 - DNA, 120 bp, synthetic construct; identical to SEQ ID NO: 34292
  source 1..120: mol_type = other DNA

SEQ ID NO: 64247 - DNA, 120 bp, synthetic construct; identical to SEQ ID NO: 34293
  source 1..120: mol_type = other DNA

SEQ ID NO: 64248 - DNA, 120 bp, synthetic construct; identical to SEQ ID NO: 10024
  source 1..120: mol_type = other DNA

SEQ ID NO: 64249 - DNA, 120 bp, synthetic construct; identical to SEQ ID NO: 34295
  source 1..120: mol_type = other DNA

SEQ ID NO: 64250 - DNA, 120 bp, synthetic construct; identical to SEQ ID NO: 34296
  source 1..120: mol_type = other DNA

SEQ ID NO: 64251 - DNA, 120 bp, synthetic construct; identical to SEQ ID NO: 10025
  source 1..120: mol_type = other DNA

SEQ ID NO: 64252 - DNA, 120 bp, synthetic construct; identical to SEQ ID NO: 34298
  source 1..120: mol_type = other DNA

SEQ ID NO: 64253 - DNA, 120 bp, synthetic construct; identical to SEQ ID NO: 34299
  source 1..120: mol_type = other DNA

SEQ ID NO: 64254 - DNA, 120 bp, synthetic construct; identical to SEQ ID NO: 34300
  source 1..120: mol_type = other DNA

SEQ ID NO: 64255 - DNA, 120 bp, synthetic construct; identical to SEQ ID NO: 34301
  source 1..120: mol_type = other DNA

SEQ ID NO: 64256 - DNA, 120 bp, synthetic construct; identical to SEQ ID NO: 10026
  source 1..120: mol_type = other DNA

SEQ ID NO: 64257 - DNA, 120 bp, synthetic construct; identical to SEQ ID NO: 34303
  source 1..120: mol_type = other DNA

SEQ ID NO: 64258 - DNA, 120 bp, synthetic construct; identical to SEQ ID NO: 34304
  source 1..120: mol_type = other DNA

SEQ ID NO: 64259 - DNA, 120 bp, synthetic construct; identical to SEQ ID NO: 10027
  source 1..120: mol_type = other DNA

SEQ ID NO: 64260 - DNA, 120 bp, synthetic construct; identical to SEQ ID NO: 34306
  source 1..120: mol_type = other DNA

SEQ ID NO: 64261 - DNA, 120 bp, synthetic construct; identical to SEQ ID NO: 34307
  source 1..120: mol_type = other DNA

SEQ ID NO: 64262 - DNA, 120 bp, synthetic construct; identical to SEQ ID NO: 10028
  source 1..120: mol_type = other DNA

SEQ ID NO: 64263 - DNA, 120 bp, synthetic construct; identical to SEQ ID NO: 34309
  source 1..120: mol_type = other DNA

SEQ ID NO: 64264 - DNA, 120 bp, synthetic construct; identical to SEQ ID NO: 34310
  source 1..120: mol_type = other DNA

SEQ ID NO: 64265 - DNA, 120 bp, synthetic construct; identical to SEQ ID NO: 10029
  source 1..120: mol_type = other DNA

SEQ ID NO: 64266 - DNA, 120 bp, synthetic construct; identical to SEQ ID NO: 34312
  source 1..120: mol_type = other DNA

SEQ ID NO: 64267 - DNA, 120 bp, synthetic construct; identical to SEQ ID NO: 34313
  source 1..120: mol_type = other DNA

SEQ ID NO: 64268 - DNA, 120 bp, synthetic construct; identical to SEQ ID NO: 34314
  source 1..120: mol_type = other DNA

SEQ ID NO: 64269 - DNA, 120 bp, synthetic construct; identical to SEQ ID NO: 10030
  source 1..120: mol_type = other DNA

SEQ ID NO: 64270 - DNA, 120 bp, synthetic construct; identical to SEQ ID NO: 34316
  source 1..120: mol_type = other DNA

SEQ ID NO: 64271 - DNA, 120 bp, synthetic construct; identical to SEQ ID NO: 34317
  source 1..120: mol_type = other DNA

SEQ ID NO: 64272 - DNA, 120 bp, synthetic construct; identical to SEQ ID NO: 10031
  source 1..120: mol_type = other DNA

SEQ ID NO: 64273 - DNA, 120 bp, synthetic construct; identical to SEQ ID NO: 34319
  source 1..120: mol_type = other DNA

SEQ ID NO: 64274 - DNA, 120 bp, synthetic construct; identical to SEQ ID NO: 34320
  source 1..120: mol_type = other DNA

SEQ ID NO: 64275 - DNA, 120 bp, synthetic construct; identical to SEQ ID NO: 34321
  source 1..120: mol_type = other DNA

SEQ ID NO: 64276 - DNA, 120 bp, synthetic construct; identical to SEQ ID NO: 10032
  source 1..120: mol_type = other DNA

SEQ ID NO: 64277 - DNA, 120 bp, synthetic construct; identical to SEQ ID NO: 34323
  source 1..120: mol_type = other DNA

SEQ ID NO: 64278 - DNA, 120 bp, synthetic construct; identical to SEQ ID NO: 34324
  source 1..120: mol_type = other DNA

SEQ ID NO: 64279 - DNA, 120 bp, synthetic construct; identical to SEQ ID NO: 34325
  source 1..120: mol_type = other DNA

SEQ ID NO: 64280 - DNA, 120 bp, synthetic construct; identical to SEQ ID NO: 34326
  source 1..120: mol_type = other DNA

SEQ ID NO: 64281 - DNA, 120 bp, synthetic construct; identical to SEQ ID NO: 10033
  source 1..120: mol_type = other DNA

SEQ ID NO: 64282 - DNA, 120 bp, synthetic construct; identical to SEQ ID NO: 34328
  source 1..120: mol_type = other DNA

SEQ ID NO: 64283 - DNA, 120 bp, synthetic construct; identical to SEQ ID NO: 2865
  source 1..120: mol_type = other DNA

SEQ ID NO: 64284 - DNA, 120 bp, synthetic construct; identical to SEQ ID NO: 10034
  source 1..120: mol_type = other DNA

SEQ ID NO: 64285 - DNA, 120 bp, synthetic construct; identical to SEQ ID NO: 34331
  source 1..120: mol_type = other DNA

SEQ ID NO: 64286 - DNA, 120 bp, synthetic construct; identical to SEQ ID NO: 34332
  source 1..120: mol_type = other DNA

SEQ ID NO: 64287 - DNA, 120 bp, synthetic construct; identical to SEQ ID NO: 34333
  source 1..120: mol_type = other DNA

SEQ ID NO: 64288 - DNA, 120 bp, synthetic construct; identical to SEQ ID NO: 10035
  source 1..120: mol_type = other DNA

SEQ ID NO: 64289 - DNA, 120 bp, synthetic construct; identical to SEQ ID NO: 34335
  source 1..120: mol_type = other DNA

SEQ ID NO: 64290 - DNA, 120 bp, synthetic construct; identical to SEQ ID NO: 34336
  source 1..120: mol_type = other DNA

SEQ ID NO: 64291 - DNA, 120 bp, synthetic construct; identical to SEQ ID NO: 34337
  source 1..120: mol_type = other DNA

SEQ ID NO: 64292 - DNA, 120 bp, synthetic construct; identical to SEQ ID NO: 10036
  source 1..120: mol_type = other DNA

SEQ ID NO: 64293 - DNA, 120 bp, synthetic construct; identical to SEQ ID NO: 34339
  source 1..120: mol_type = other DNA

SEQ ID NO: 64294 - DNA, 120 bp, synthetic construct; identical to SEQ ID NO: 34340
  source 1..120: mol_type = other DNA

SEQ ID NO: 64295 - DNA, 120 bp, synthetic construct; identical to SEQ ID NO: 34341
  source 1..120: mol_type = other DNA

SEQ ID NO: 64296 - DNA, 120 bp, synthetic construct; identical to SEQ ID NO: 34342
  source 1..120: mol_type = other DNA

SEQ ID NO: 64297 - DNA, 120 bp, synthetic construct; identical to SEQ ID NO: 10037
  source 1..120: mol_type = other DNA

SEQ ID NO: 64298 - DNA, 120 bp, synthetic construct; identical to SEQ ID NO: 34344
  source 1..120: mol_type = other DNA

SEQ ID NO: 64299 - DNA, 120 bp, synthetic construct; identical to SEQ ID NO: 34345
  source 1..120: mol_type = other DNA

SEQ ID NO: 64300 - DNA, 120 bp, synthetic construct; identical to SEQ ID NO: 10038
  source 1..120: mol_type = other DNA

SEQ ID NO: 64301 - DNA, 120 bp, synthetic construct; identical to SEQ ID NO: 34347
  source 1..120: mol_type = other DNA

SEQ ID NO: 64302 - DNA, 120 bp, synthetic construct; identical to SEQ ID NO: 34348
  source 1..120: mol_type = other DNA

SEQ ID NO: 64303 - DNA, 120 bp, synthetic construct; identical to SEQ ID NO: 34349
  source 1..120: mol_type = other DNA

SEQ ID NO: 64304 - DNA, 120 bp, synthetic construct; identical to SEQ ID NO: 34350
  source 1..120: mol_type = other DNA

SEQ ID NO: 64305 - DNA, 120 bp, synthetic construct; identical to SEQ ID NO: 2870
  source 1..120: mol_type = other DNA

SEQ ID NO: 64306 - DNA, 120 bp, synthetic construct; identical to SEQ ID NO: 34352
  source 1..120: mol_type = other DNA

SEQ ID NO: 64307 - DNA, 120 bp, synthetic construct; identical to SEQ ID NO: 34353
  source 1..120: mol_type = other DNA

SEQ ID NO: 64308 - DNA, 120 bp, synthetic construct; identical to SEQ ID NO: 34354
  source 1..120: mol_type = other DNA

SEQ ID NO: 64309 - DNA, 120 bp, synthetic construct; identical to SEQ ID NO: 34355
  source 1..120: mol_type = other DNA

SEQ ID NO: 64310 - DNA, 120 bp, synthetic construct; identical to SEQ ID NO: 10040
  source 1..120: mol_type = other DNA

SEQ ID NO: 64311 - DNA, 120 bp, synthetic construct; identical to SEQ ID NO: 34357
  source 1..120: mol_type = other DNA

SEQ ID NO: 64312 - DNA, 120 bp, synthetic construct; identical to SEQ ID NO: 34358
  source 1..120: mol_type = other DNA

SEQ ID NO: 64313 - DNA, 120 bp, synthetic construct; identical to SEQ ID NO: 10041
  source 1..120: mol_type = other DNA

SEQ ID NO: 64314 - DNA, 120 bp, synthetic construct; identical to SEQ ID NO: 34360
  source 1..120: mol_type = other DNA

SEQ ID NO: 64315 - DNA, 120 bp, synthetic construct; identical to SEQ ID NO: 34361
  source 1..120: mol_type = other DNA

SEQ ID NO: 64316 - DNA, 120 bp, synthetic construct; identical to SEQ ID NO: 34362
  source 1..120: mol_type = other DNA

SEQ ID NO: 64317 - DNA, 120 bp, synthetic construct; identical to SEQ ID NO: 10042
  source 1..120: mol_type = other DNA

SEQ ID NO: 64318 - DNA, 120 bp, synthetic construct; identical to SEQ ID NO: 34364
  source 1..120: mol_type = other DNA

SEQ ID NO: 64319 - DNA, 120 bp, synthetic construct; identical to SEQ ID NO: 34365
  source 1..120: mol_type = other DNA

SEQ ID NO: 64320 - DNA, 120 bp, synthetic construct; identical to SEQ ID NO: 34366
  source 1..120: mol_type = other DNA

SEQ ID NO: 64321 - DNA, 120 bp, synthetic construct; identical to SEQ ID NO: 34367
  source 1..120: mol_type = other DNA

SEQ ID NO: 64322 - DNA, 120 bp, synthetic construct; identical to SEQ ID NO: 10043
  source 1..120: mol_type = other DNA

SEQ ID NO: 64323 - DNA, 120 bp, synthetic construct; identical to SEQ ID NO: 34369
  source 1..120: mol_type = other DNA

SEQ ID NO: 64324 - DNA, 120 bp, synthetic construct; identical to SEQ ID NO: 34370
  source 1..120: mol_type = other DNA

SEQ ID NO: 64325 - DNA, 120 bp, synthetic construct; identical to SEQ ID NO: 10044
  source 1..120: mol_type = other DNA

SEQ ID NO: 64326 - DNA, 120 bp, synthetic construct; identical to SEQ ID NO: 34372
  source 1..120: mol_type = other DNA

SEQ ID NO: 64327 - DNA, 120 bp, synthetic construct; identical to SEQ ID NO: 34373
  source 1..120: mol_type = other DNA

SEQ ID NO: 64328 - DNA, 120 bp, synthetic construct; identical to SEQ ID NO: 34374
  source 1..120: mol_type = other DNA

SEQ ID NO: 64329 - DNA, 120 bp, synthetic construct; identical to SEQ ID NO: 34375
  source 1..120: mol_type = other DNA

SEQ ID NO: 64330 - DNA, 120 bp, synthetic construct; identical to SEQ ID NO: 10045
  source 1..120: mol_type = other DNA

SEQ ID NO: 64331 - DNA, 120 bp, synthetic construct; identical to SEQ ID NO: 34377
  source 1..120: mol_type = other DNA

SEQ ID NO: 64332 - DNA, 120 bp, synthetic construct; identical to SEQ ID NO: 34378
  source 1..120: mol_type = other DNA

SEQ ID NO: 64333 - DNA, 120 bp, synthetic construct; identical to SEQ ID NO: 10046
  source 1..120: mol_type = other DNA

SEQ ID NO: 64334 - DNA, 120 bp, synthetic construct; identical to SEQ ID NO: 34380
  source 1..120: mol_type = other DNA

SEQ ID NO: 64335 - DNA, 120 bp, synthetic construct; identical to SEQ ID NO: 34381
  source 1..120: mol_type = other DNA

SEQ ID NO: 64336 - DNA, 120 bp, synthetic construct; identical to SEQ ID NO: 34382
  source 1..120: mol_type = other DNA

SEQ ID NO: 64337 - DNA, 120 bp, synthetic construct; identical to SEQ ID NO: 34383
  source 1..120: mol_type = other DNA

SEQ ID NO: 64338 - DNA, 120 bp, synthetic construct; identical to SEQ ID NO: 10047
  source 1..120: mol_type = other DNA

SEQ ID NO: 64339 - DNA, 120 bp, synthetic construct; identical to SEQ ID NO: 34385
  source 1..120: mol_type = other DNA

SEQ ID NO: 64340 - DNA, 120 bp, synthetic construct; identical to SEQ ID NO: 34386
  source 1..120: mol_type = other DNA

SEQ ID NO: 64341 - DNA, 120 bp, synthetic construct; identical to SEQ ID NO: 34387
  source 1..120: mol_type = other DNA

SEQ ID NO: 64342 - DNA, 120 bp, synthetic construct; identical to SEQ ID NO: 10048
  source 1..120: mol_type = other DNA

SEQ ID NO: 64343 - DNA, 120 bp, synthetic construct; identical to SEQ ID NO: 34389
  source 1..120: mol_type = other DNA

SEQ ID NO: 64344 - DNA, 120 bp, synthetic construct; identical to SEQ ID NO: 34390
  source 1..120: mol_type = other DNA

SEQ ID NO: 64345 - DNA, 120 bp, synthetic construct; identical to SEQ ID NO: 34391
  source 1..120: mol_type = other DNA

SEQ ID NO: 64346 - DNA, 120 bp, synthetic construct; identical to SEQ ID NO: 2880
  source 1..120: mol_type = other DNA

SEQ ID NO: 64347 - DNA, 120 bp, synthetic construct; identical to SEQ ID NO: 34393
  source 1..120: mol_type = other DNA

SEQ ID NO: 64348 - DNA, 120 bp, synthetic construct; identical to SEQ ID NO: 34394
  source 1..120: mol_type = other DNA

SEQ ID NO: 64349 - DNA, 120 bp, synthetic construct; identical to SEQ ID NO: 10050
  source 1..120: mol_type = other DNA

SEQ ID NO: 64350 - DNA, 120 bp, synthetic construct; identical to SEQ ID NO: 34396
  source 1..120: mol_type = other DNA

SEQ ID NO: 64351 - DNA, 120 bp, synthetic construct; identical to SEQ ID NO: 34397
  source 1..120: mol_type = other DNA

SEQ ID NO: 64352 - DNA, 120 bp, synthetic construct; identical to SEQ ID NO: 34398
  source 1..120: mol_type = other DNA

SEQ ID NO: 64353 - DNA, 120 bp, synthetic construct; identical to SEQ ID NO: 10051
  source 1..120: mol_type = other DNA

SEQ ID NO: 64354 - DNA, 120 bp, synthetic construct; identical to SEQ ID NO: 34400
  source 1..120: mol_type = other DNA

SEQ ID NO: 64355 - DNA, 120 bp, synthetic construct; identical to SEQ ID NO: 34401
  source 1..120: mol_type = other DNA

SEQ ID NO: 64356 - DNA, 120 bp, synthetic construct; identical to SEQ ID NO: 34402
  source 1..120: mol_type = other DNA

SEQ ID NO: 64357 - DNA, 120 bp, synthetic construct; identical to SEQ ID NO: 10052
  source 1..120: mol_type = other DNA

SEQ ID NO: 64358 - DNA, 120 bp, synthetic construct; identical to SEQ ID NO: 10053
  source 1..120: mol_type = other DNA

SEQ ID NO: 64359 - DNA, 120 bp, synthetic construct; identical to SEQ ID NO: 34405
  source 1..120: mol_type = other DNA

SEQ ID NO: 64360 - DNA, 120 bp, synthetic construct; identical to SEQ ID NO: 34406
  source 1..120: mol_type = other DNA

SEQ ID NO: 64361 - DNA, 120 bp, synthetic construct; identical to SEQ ID NO: 34407
  source 1..120: mol_type = other DNA

SEQ ID NO: 64362 - DNA, 120 bp, synthetic construct; identical to SEQ ID NO: 10054
  source 1..120: mol_type = other DNA

SEQ ID NO: 64363 - DNA, 120 bp, synthetic construct; identical to SEQ ID NO: 10055
  source 1..120: mol_type = other DNA

SEQ ID NO: 64364 - DNA, 120 bp, synthetic construct; identical to SEQ ID NO: 34410
  source 1..120: mol_type = other DNA

SEQ ID NO: 64365 - DNA, 120 bp, synthetic construct; identical to SEQ ID NO: 34411
  source 1..120: mol_type = other DNA

SEQ ID NO: 64366 - DNA, 120 bp, synthetic construct; identical to SEQ ID NO: 34412
  source 1..120: mol_type = other DNA

SEQ ID NO: 64367 - DNA, 120 bp, synthetic construct; identical to SEQ ID NO: 34413
  source 1..120: mol_type = other DNA

SEQ ID NO: 64368 - DNA, 120 bp, synthetic construct; identical to SEQ ID NO: 10056
  source 1..120: mol_type = other DNA

SEQ ID NO: 64369 - DNA, 120 bp, synthetic construct; identical to SEQ ID NO: 34415
  source 1..120: mol_type = other DNA

SEQ ID NO: 64370 - DNA, 120 bp, synthetic construct; identical to SEQ ID NO: 34416
  source 1..120: mol_type = other DNA

SEQ ID NO: 64371 - DNA, 120 bp, synthetic construct; identical to SEQ ID NO: 34417
  source 1..120: mol_type = other DNA

SEQ ID NO: 64372 - DNA, 120 bp, synthetic construct; identical to SEQ ID NO: 10057
  source 1..120: mol_type = other DNA

SEQ ID NO: 64373 - DNA, 120 bp, synthetic construct; identical to SEQ ID NO: 34419
  source 1..120: mol_type = other DNA

SEQ ID NO: 64374 - DNA, 120 bp, synthetic construct; identical to SEQ ID NO: 34420
  source 1..120: mol_type = other DNA

SEQ ID NO: 64375 - DNA, 120 bp, synthetic construct; identical to SEQ ID NO: 10058
  source 1..120: mol_type = other DNA

SEQ ID NO: 64376 - DNA, 120 bp, synthetic construct; identical to SEQ ID NO: 34422
  source 1..120: mol_type = other DNA

SEQ ID NO: 64377 - DNA, 120 bp, synthetic construct; identical to SEQ ID NO: 34423
  source 1..120: mol_type = other DNA

SEQ ID NO: 64378 - DNA, 120 bp, synthetic construct; identical to SEQ ID NO: 34424
  source 1..120: mol_type = other DNA

SEQ ID NO: 64379 - DNA, 120 bp, synthetic construct; identical to SEQ ID NO: 10059
  source 1..120: mol_type = other DNA

SEQ ID NO: 64380 - DNA, 120 bp, synthetic construct; identical to SEQ ID NO: 34426
  source 1..120: mol_type = other DNA

SEQ ID NO: 64381 - DNA, 120 bp, synthetic construct; identical to SEQ ID NO: 34427
  source 1..120: mol_type = other DNA

SEQ ID NO: 64382 - DNA, 120 bp, synthetic construct; identical to SEQ ID NO: 34428
  source 1..120: mol_type = other DNA

SEQ ID NO: 64383 - DNA, 120 bp, synthetic construct; identical to SEQ ID NO: 10060
  source 1..120: mol_type = other DNA

SEQ ID NO: 64384 - DNA, 120 bp, synthetic construct; identical to SEQ ID NO: 34430
  source 1..120: mol_type = other DNA

SEQ ID NO: 64385 - DNA, 120 bp, synthetic construct; identical to SEQ ID NO: 2889
  source 1..120: mol_type = other DNA

SEQ ID NO: 64386 - DNA, 120 bp, synthetic construct; identical to SEQ ID NO: 34432
  source 1..120: mol_type = other DNA

SEQ ID NO: 64387 - DNA, 120 bp, synthetic construct; identical to SEQ ID NO: 10061
  source 1..120: mol_type = other DNA

SEQ ID NO: 64388 - DNA, 120 bp, synthetic construct; identical to SEQ ID NO: 34434
  source 1..120: mol_type = other DNA

SEQ ID NO: 64389 - DNA, 120 bp, synthetic construct; identical to SEQ ID NO: 34435
  source 1..120: mol_type = other DNA

SEQ ID NO: 64390 - DNA, 120 bp, synthetic construct; identical to SEQ ID NO: 34436
  source 1..120: mol_type = other DNA

SEQ ID NO: 64391 - DNA, 120 bp, synthetic construct; identical to SEQ ID NO: 10062
  source 1..120: mol_type = other DNA

SEQ ID NO: 64392 - DNA, 120 bp, synthetic construct; identical to SEQ ID NO: 34438
  source 1..120: mol_type = other DNA

SEQ ID NO: 64393 - DNA, 120 bp, synthetic construct; identical to SEQ ID NO: 34439
  source 1..120: mol_type = other DNA

SEQ ID NO: 64394 - DNA, 120 bp, synthetic construct; identical to SEQ ID NO: 34440
  source 1..120: mol_type = other DNA

SEQ ID NO: 64395 - DNA, 120 bp, synthetic construct; identical to SEQ ID NO: 10063
  source 1..120: mol_type = other DNA

SEQ ID NO: 64396 - DNA, 120 bp, synthetic construct; identical to SEQ ID NO: 34442
  source 1..120: mol_type = other DNA

SEQ ID NO: 64397 - DNA, 120 bp, synthetic construct; identical to SEQ ID NO: 34443
  source 1..120: mol_type = other DNA

SEQ ID NO: 64398 - DNA, 120 bp, synthetic construct; identical to SEQ ID NO: 34444
  source 1..120: mol_type = other DNA

SEQ ID NO: 64399 - DNA, 120 bp, synthetic construct; identical to SEQ ID NO: 34445
  source 1..120: mol_type = other DNA

SEQ ID NO: 64400 - DNA, 120 bp, synthetic construct; identical to SEQ ID NO: 10064
  source 1..120: mol_type = other DNA

SEQ ID NO: 64401 - DNA, 120 bp, synthetic construct; identical to SEQ ID NO: 2893
  source 1..120: mol_type = other DNA

SEQ ID NO: 64402 - DNA, 120 bp, synthetic construct; identical to SEQ ID NO: 34448
  source 1..120: mol_type = other DNA

SEQ ID NO: 64403 - DNA, 120 bp, synthetic construct; identical to SEQ ID NO: 10065
  source 1..120: mol_type = other DNA

SEQ ID NO: 64404 - DNA, 120 bp, synthetic construct; identical to SEQ ID NO: 10066
  source 1..120: mol_type = other DNA

SEQ ID NO: 64405 - DNA, 120 bp, synthetic construct; identical to SEQ ID NO: 34451
  source 1..120: mol_type = other DNA

SEQ ID NO: 64406 - DNA, 120 bp, synthetic construct; identical to SEQ ID NO: 34452
  source 1..120: mol_type = other DNA

SEQ ID NO: 64407 - DNA, 120 bp, synthetic construct; identical to SEQ ID NO: 34453
  source 1..120: mol_type = other DNA

SEQ ID NO: 64408 - DNA, 120 bp, synthetic construct; identical to SEQ ID NO: 10067
  source 1..120: mol_type = other DNA

SEQ ID NO: 64409 - DNA, 120 bp, synthetic construct; identical to SEQ ID NO: 34455
  source 1..120: mol_type = other DNA

SEQ ID NO: 64410 - DNA, 120 bp, synthetic construct; identical to SEQ ID NO: 34456
  source 1..120: mol_type = other DNA

SEQ ID NO: 64411 - DNA, 120 bp, synthetic construct; identical to SEQ ID NO: 34457
  source 1..120: mol_type = other DNA

SEQ ID NO: 64412 - DNA, 120 bp, synthetic construct; identical to SEQ ID NO: 10068
  source 1..120: mol_type = other DNA

SEQ ID NO: 64413 - DNA, 120 bp, synthetic construct; identical to SEQ ID NO: 34459
  source 1..120: mol_type = other DNA

SEQ ID NO: 64414 - DNA, 120 bp, synthetic construct; identical to SEQ ID NO: 34460
  source 1..120: mol_type = other DNA

SEQ ID NO: 64415 - DNA, 120 bp, synthetic construct; identical to SEQ ID NO: 34461
  source 1..120: mol_type = other DNA

SEQ ID NO: 64416 - DNA, 120 bp, synthetic construct; identical to SEQ ID NO: 34462
  source 1..120: mol_type = other DNA

SEQ ID NO: 64417 - DNA, 120 bp, synthetic construct; identical to SEQ ID NO: 10069
  source 1..120: mol_type = other DNA

SEQ ID NO: 64418 - DNA, 120 bp, synthetic construct; identical to SEQ ID NO: 34464
  source 1..120: mol_type = other DNA

SEQ ID NO: 64419 - DNA, 120 bp, synthetic construct; identical to SEQ ID NO: 34465
  source 1..120: mol_type = other DNA

SEQ ID NO: 64420 - DNA, 120 bp, synthetic construct; identical to SEQ ID NO: 34466
  source 1..120: mol_type = other DNA

SEQ ID NO: 64421 - DNA, 120 bp, synthetic construct; identical to SEQ ID NO: 34467
  source 1..120: mol_type = other DNA

SEQ ID NO: 64422 - DNA, 120 bp, synthetic construct; identical to SEQ ID NO: 10070
  source 1..120: mol_type = other DNA

SEQ ID NO: 64423 - DNA, 120 bp, synthetic construct; identical to SEQ ID NO: 34469
  source 1..120: mol_type = other DNA

SEQ ID NO: 64424 - DNA, 120 bp, synthetic construct; identical to SEQ ID NO: 34470
  source 1..120: mol_type = other DNA

SEQ ID NO: 64425 - DNA, 120 bp, synthetic construct; identical to SEQ ID NO: 10071
  source 1..120: mol_type = other DNA

SEQ ID NO: 64426 - DNA, 120 bp, synthetic construct; identical to SEQ ID NO: 34472
  source 1..120: mol_type = other DNA

SEQ ID NO: 64427 - DNA, 120 bp, synthetic construct; identical to SEQ ID NO: 34473
  source 1..120: mol_type = other DNA

SEQ ID NO: 64428 - DNA, 120 bp, synthetic construct; identical to SEQ ID NO: 34474
  source 1..120: mol_type = other DNA

SEQ ID NO: 64429 - DNA, 120 bp, synthetic construct; identical to SEQ ID NO: 10072
  source 1..120: mol_type = other DNA

SEQ ID NO: 64430 - DNA, 120 bp, synthetic construct; identical to SEQ ID NO: 34476
  source 1..120: mol_type = other DNA

SEQ ID NO: 64431 - DNA, 120 bp, synthetic construct; identical to SEQ ID NO: 34477
  source 1..120: mol_type = other DNA

SEQ ID NO: 64432 - DNA, 120 bp, synthetic construct; identical to SEQ ID NO: 34478
  source 1..120: mol_type = other DNA

SEQ ID NO: 64433 - DNA, 120 bp, synthetic construct; identical to SEQ ID NO: 10073
  source 1..120: mol_type = other DNA

SEQ ID NO: 64434 - DNA, 120 bp, synthetic construct; identical to SEQ ID NO: 34480
  source 1..120: mol_type = other DNA

SEQ ID NO: 64435 - DNA, 120 bp, synthetic construct; identical to SEQ ID NO: 34481
  source 1..120: mol_type = other DNA

SEQ ID NO: 64436 - DNA, 120 bp, synthetic construct; identical to SEQ ID NO: 34482
  source 1..120: mol_type = other DNA

SEQ ID NO: 64437 - DNA, 120 bp, synthetic construct; identical to SEQ ID NO: 10074
  source 1..120: mol_type = other DNA

SEQ ID NO: 64438 - DNA, 120 bp, synthetic construct; identical to SEQ ID NO: 34484
  source 1..120: mol_type = other DNA

SEQ ID NO: 64439 - DNA, 120 bp, synthetic construct; identical to SEQ ID NO: 34485
  source 1..120: mol_type = other DNA

SEQ ID NO: 64440 - DNA, 120 bp, synthetic construct; identical to SEQ ID NO: 34486
  source 1..120: mol_type = other DNA

SEQ ID NO: 64441 - DNA, 120 bp, synthetic construct; identical to SEQ ID NO: 10075
  source 1..120: mol_type = other DNA

SEQ ID NO: 64442 - DNA, 120 bp, synthetic construct; identical to SEQ ID NO: 34488
  source 1..120: mol_type = other DNA

SEQ ID NO: 64443 - DNA, 120 bp, synthetic construct; identical to SEQ ID NO: 34489
  source 1..120: mol_type = other DNA

SEQ ID NO: 64444 - DNA, 120 bp, synthetic construct; identical to SEQ ID NO: 34490
  source 1..120: mol_type = other DNA

SEQ ID NO: 64445 - DNA, 120 bp, synthetic construct; identical to SEQ ID NO: 34491
  source 1..120: mol_type = other DNA

SEQ ID NO: 64446 - DNA, 120 bp, synthetic construct; identical to SEQ ID NO: 10076
  source 1..120: mol_type = other DNA

SEQ ID NO: 64447 - DNA, 120 bp, synthetic construct; identical to SEQ ID NO: 34493
  source 1..120: mol_type = other DNA

SEQ ID NO: 64448 - DNA, 120 bp, synthetic construct; identical to SEQ ID NO: 34494
  source 1..120: mol_type = other DNA

SEQ ID NO: 64449 - DNA, 120 bp, synthetic construct; identical to SEQ ID NO: 10077
  source 1..120: mol_type = other DNA

SEQ ID NO: 64450 - DNA, 120 bp, synthetic construct; identical to SEQ ID NO: 34496
  source 1..120: mol_type = other DNA

SEQ ID NO: 64451 - DNA, 120 bp, synthetic construct; identical to SEQ ID NO: 34497
  source 1..120: mol_type = other DNA

SEQ ID NO: 64452 - DNA, 120 bp, synthetic construct; identical to SEQ ID NO: 34498
  source 1..120: mol_type = other DNA

SEQ ID NO: 64453 - DNA, 120 bp, synthetic construct; identical to SEQ ID NO: 34499
  source 1..120: mol_type = other DNA

SEQ ID NO: 64454 - DNA, 120 bp, synthetic construct; identical to SEQ ID NO: 10078
  source 1..120: mol_type = other DNA

SEQ ID NO: 64455 - DNA, 120 bp, synthetic construct; identical to SEQ ID NO: 34501
  source 1..120: mol_type = other DNA

SEQ ID NO: 64456 - DNA, 120 bp, synthetic construct; identical to SEQ ID NO: 34502
  source 1..120: mol_type = other DNA

SEQ ID NO: 64457 - DNA, 120 bp, synthetic construct; identical to SEQ ID NO: 34503
  source 1..120: mol_type = other DNA

SEQ ID NO: 64458 - DNA, 120 bp, synthetic construct; identical to SEQ ID NO: 10079
  source 1..120: mol_type = other DNA

SEQ ID NO: 64459 - DNA, 120 bp, synthetic construct; identical to SEQ ID NO: 34505
  source 1..120: mol_type = other DNA

SEQ ID NO: 64460 - DNA, 120 bp, synthetic construct; identical to SEQ ID NO: 34506
  source 1..120: mol_type = other DNA

SEQ ID NO: 64461 - DNA, 120 bp, synthetic construct; identical to SEQ ID NO: 10080
  source 1..120: mol_type = other DNA

SEQ ID NO: 64462 - DNA, 120 bp, synthetic construct; identical to SEQ ID NO: 34508
  source 1..120: mol_type = other DNA

SEQ ID NO: 64463 - DNA, 120 bp, synthetic construct; identical to SEQ ID NO: 34509
  source 1..120: mol_type = other DNA

SEQ ID NO: 64464 - DNA, 120 bp, synthetic construct; identical to SEQ ID NO: 34510
  source 1..120: mol_type = other DNA

SEQ ID NO: 64465 - DNA, 120 bp, synthetic construct; identical to SEQ ID NO: 34511
  source 1..120: mol_type = other DNA

SEQ ID NO: 64466 - DNA, 120 bp, synthetic construct; identical to SEQ ID NO: 10081
  source 1..120: mol_type = other DNA

SEQ ID NO: 64467 - DNA, 120 bp, synthetic construct; identical to SEQ ID NO: 34513
  source 1..120: mol_type = other DNA

SEQ ID NO: 64468 - DNA, 120 bp, synthetic construct; identical to SEQ ID NO: 34514
  source 1..120: mol_type = other DNA

SEQ ID NO: 64469 - DNA, 120 bp, synthetic construct; identical to SEQ ID NO: 10082
  source 1..120: mol_type = other DNA

SEQ ID NO: 64470 - DNA, 120 bp, synthetic construct; identical to SEQ ID NO: 34516
  source 1..120: mol_type = other DNA

SEQ ID NO: 64471 - DNA, 120 bp, synthetic construct; identical to SEQ ID NO: 34517
  source 1..120: mol_type = other DNA

SEQ ID NO: 64472 - DNA, 120 bp, synthetic construct; identical to SEQ ID NO: 34518
  source 1..120: mol_type = other DNA

SEQ ID NO: 64473 - DNA, 120 bp, synthetic construct; identical to SEQ ID NO: 34519
  source 1..120: mol_type = other DNA

SEQ ID NO: 64474 - DNA, 120 bp, synthetic construct; identical to SEQ ID NO: 10083
  source 1..120: mol_type = other DNA

SEQ ID NO: 64475 - DNA, 120 bp, synthetic construct; identical to SEQ ID NO: 34521
  source 1..120: mol_type = other DNA

SEQ ID NO: 64476 - DNA, 120 bp, synthetic construct; identical to SEQ ID NO: 34522
  source 1..120: mol_type = other DNA

SEQ ID NO: 64477 - DNA, 120 bp, synthetic construct; identical to SEQ ID NO: 10084
  source 1..120: mol_type = other DNA

SEQ ID NO: 64478 - DNA, 120 bp, synthetic construct; identical to SEQ ID NO: 34524
  source 1..120: mol_type = other DNA

SEQ ID NO: 64479 - DNA, 120 bp, synthetic construct; identical to SEQ ID NO: 34525
  source 1..120: mol_type = other DNA

SEQ ID NO: 64480 - DNA, 120 bp, synthetic construct; identical to SEQ ID NO: 34526
  source 1..120: mol_type = other DNA

SEQ ID NO: 64481 - DNA, 120 bp, synthetic construct; identical to SEQ ID NO: 10085
  source 1..120: mol_type = other DNA

SEQ ID NO: 64482 - DNA, 120 bp, synthetic construct; identical to SEQ ID NO: 34528
  source 1..120: mol_type = other DNA

SEQ ID NO: 64483 - DNA, 120 bp, synthetic construct; identical to SEQ ID NO: 34529
  source 1..120: mol_type = other DNA

SEQ ID NO: 64484 - DNA, 120 bp, synthetic construct; identical to SEQ ID NO: 34530
  source 1..120: mol_type = other DNA

SEQ ID NO: 64485 - DNA, 120 bp, synthetic construct; identical to SEQ ID NO: 34531
  source 1..120: mol_type = other DNA

SEQ ID NO: 64486 - DNA, 120 bp, synthetic construct; identical to SEQ ID NO: 10086
  source 1..120: mol_type = other DNA

SEQ ID NO: 64487 - DNA, 120 bp, synthetic construct; identical to SEQ ID NO: 34533
  source 1..120: mol_type = other DNA

SEQ ID NO: 64488 - DNA, 120 bp, synthetic construct; identical to SEQ ID NO: 34534
  source 1..120: mol_type = other DNA

SEQ ID NO: 64489 - DNA, 120 bp, synthetic construct; identical to SEQ ID NO: 34535
  source 1..120: mol_type = other DNA

SEQ ID NO: 64490 - DNA, 120 bp, synthetic construct; identical to SEQ ID NO: 10087
  source 1..120: mol_type = other DNA

SEQ ID NO: 64491 - DNA, 120 bp, synthetic construct; identical to SEQ ID NO: 34537
  source 1..120: mol_type = other DNA

SEQ ID NO: 64492 - DNA, 120 bp, synthetic construct; identical to SEQ ID NO: 34538
  source 1..120: mol_type = other DNA

SEQ ID NO: 64493 - DNA, 120 bp, synthetic construct; identical to SEQ ID NO: 10088
  source 1..120: mol_type = other DNA

SEQ ID NO: 64494 - DNA, 120 bp, synthetic construct; identical to SEQ ID NO: 34540
  source 1..120: mol_type = other DNA

SEQ ID NO: 64495 - DNA, 120 bp, synthetic construct; identical to SEQ ID NO: 34541
  source 1..120: mol_type = other DNA

SEQ ID NO: 64496 - DNA, 120 bp, synthetic construct; identical to SEQ ID NO: 34542
  source 1..120: mol_type = other DNA

SEQ ID NO: 64497 - DNA, 120 bp, synthetic construct; identical to SEQ ID NO: 10089
  source 1..120: mol_type = other DNA

SEQ ID NO: 64498 - DNA, 120 bp, synthetic construct; identical to SEQ ID NO: 34544
  source 1..120: mol_type = other DNA

SEQ ID NO: 64499 - DNA, 120 bp, synthetic construct; identical to SEQ ID NO: 34545
  source 1..120: mol_type = other DNA

SEQ ID NO: 64500 - DNA, 120 bp, synthetic construct; identical to SEQ ID NO: 34546
  source 1..120: mol_type = other DNA

SEQ ID NO: 64501 - DNA, 120 bp, synthetic construct; identical to SEQ ID NO: 34547
  source 1..120: mol_type = other DNA

SEQ ID NO: 64502 - DNA, 120 bp, synthetic construct; identical to SEQ ID NO: 10090
  source 1..120: mol_type = other DNA

SEQ ID NO: 64503 - DNA, 120 bp, synthetic construct; identical to SEQ ID NO: 34549
  source 1..120: mol_type = other DNA

SEQ ID NO: 64504 - DNA, 120 bp, synthetic construct; identical to SEQ ID NO: 34550
  source 1..120: mol_type = other DNA

SEQ ID NO: 64505 - DNA, 120 bp, synthetic construct; identical to SEQ ID NO: 10091
  source 1..120: mol_type = other DNA

SEQ ID NO: 64506 - DNA, 120 bp, synthetic construct; identical to SEQ ID NO: 34552
  source 1..120: mol_type = other DNA

SEQ ID NO: 64507 - DNA, 120 bp, synthetic construct; identical to SEQ ID NO: 34553
  source 1..120: mol_type = other DNA

SEQ ID NO: 64508 - DNA, 120 bp, synthetic construct; identical to SEQ ID NO: 34554
  source 1..120: mol_type = other DNA

SEQ ID NO: 64509 - DNA, 120 bp, synthetic construct; identical to SEQ ID NO: 34555
  source 1..120: mol_type = other DNA

SEQ ID NO: 64510 - DNA, 120 bp, synthetic construct; identical to SEQ ID NO: 10092
  source 1..120: mol_type = other DNA

SEQ ID NO: 64511 - DNA, 120 bp, synthetic construct; identical to SEQ ID NO: 34557
  source 1..120: mol_type = other DNA

SEQ ID NO: 64512 - DNA, 120 bp, synthetic construct; identical to SEQ ID NO: 34558
  source 1..120: mol_type = other DNA

SEQ ID NO: 64513 - DNA, 120 bp, synthetic construct; identical to SEQ ID NO: 10093
  source 1..120: mol_type = other DNA

SEQ ID NO: 64514 - DNA, 120 bp, synthetic construct; identical to SEQ ID NO: 34560
  source 1..120: mol_type = other DNA

SEQ ID NO: 64515 - DNA, 120 bp, synthetic construct; identical to SEQ ID NO: 34561
  source 1..120: mol_type = other DNA

SEQ ID NO: 64516 - DNA, 120 bp, synthetic construct; identical to SEQ ID NO: 34562
  source 1..120: mol_type = other DNA

SEQ ID NO: 64517 - DNA, 120 bp, synthetic construct; identical to SEQ ID NO: 34563
  source 1..120: mol_type = other DNA

SEQ ID NO: 64518 - DNA, 120 bp, synthetic construct; identical to SEQ ID NO: 10094
  source 1..120: mol_type = other DNA

SEQ ID NO: 64519 - DNA, 120 bp, synthetic construct; identical to SEQ ID NO: 34565
  source 1..120: mol_type = other DNA

SEQ ID NO: 64520 - DNA, 120 bp, synthetic construct; identical to SEQ ID NO: 34566
  source 1..120: mol_type = other DNA

SEQ ID NO: 64521 - DNA, 120 bp, synthetic construct; identical to SEQ ID NO: 34567
  source 1..120: mol_type = other DNA

SEQ ID NO: 64522 - DNA, 120 bp, synthetic construct; identical to SEQ ID NO: 10095
  source 1..120: mol_type = other DNA

SEQ ID NO: 64523 - DNA, 120 bp, synthetic construct; identical to SEQ ID NO: 34569
  source 1..120: mol_type = other DNA

SEQ ID NO: 64524 - DNA, 120 bp, synthetic construct; identical to SEQ ID NO: 34570
  source 1..120: mol_type = other DNA

SEQ ID NO: 64525 - DNA, 120 bp, synthetic construct; identical to SEQ ID NO: 10096
  source 1..120: mol_type = other DNA

SEQ ID NO: 64526 - DNA, 120 bp, synthetic construct; identical to SEQ ID NO: 34572
  source 1..120: mol_type = other DNA

SEQ ID NO: 64527 - DNA, 120 bp, synthetic construct; identical to SEQ ID NO: 34573
  source 1..120: mol_type = other DNA

SEQ ID NO: 64528 - DNA, 120 bp, synthetic construct; identical to SEQ ID NO: 34574
  source 1..120: mol_type = other DNA

SEQ ID NO: 64529 - DNA, 120 bp, synthetic construct; identical to SEQ ID NO: 34575
  source 1..120: mol_type = other DNA

SEQ ID NO: 64530 - DNA, 120 bp, synthetic construct; identical to SEQ ID NO: 10097
  source 1..120: mol_type = other DNA

SEQ ID NO: 64531 - DNA, 120 bp, synthetic construct; identical to SEQ ID NO: 34577
  source 1..120: mol_type = other DNA

SEQ ID NO: 64532 - DNA, 120 bp, synthetic construct; identical to SEQ ID NO: 34578
  source 1..120: mol_type = other DNA

SEQ ID NO: 64533 - DNA, 120 bp, synthetic construct; identical to SEQ ID NO: 10098
  source 1..120: mol_type = other DNA

SEQ ID NO: 64534 - DNA, 120 bp, synthetic construct; identical to SEQ ID NO: 34580
  source 1..120: mol_type = other DNA

SEQ ID NO: 64535 - DNA, 120 bp, synthetic construct; identical to SEQ ID NO: 34581
  source 1..120: mol_type = other DNA

SEQ ID NO: 64536 - DNA, 120 bp, synthetic construct; identical to SEQ ID NO: 2925
  source 1..120: mol_type = other DNA

SEQ ID NO: 64537 - DNA, 120 bp, synthetic construct; identical to SEQ ID NO: 10099
  source 1..120: mol_type = other DNA

SEQ ID NO: 64538 - DNA, 120 bp, synthetic construct; identical to SEQ ID NO: 34584
  source 1..120: mol_type = other DNA

SEQ ID NO: 64539 - DNA, 120 bp, synthetic construct; identical to SEQ ID NO: 34585
  source 1..120: mol_type = other DNA

SEQ ID NO: 64540 - DNA, 120 bp, synthetic construct; identical to SEQ ID NO: 34586
  source 1..120: mol_type = other DNA

SEQ ID NO: 64541 - DNA, 120 bp, synthetic construct; identical to SEQ ID NO: 34587
  source 1..120: mol_type = other DNA

SEQ ID NO: 64542 - DNA, 120 bp, synthetic construct; identical to SEQ ID NO: 10100
  source 1..120: mol_type = other DNA

SEQ ID NO: 64543 - DNA, 120 bp, synthetic construct; identical to SEQ ID NO: 34589
  source 1..120: mol_type = other DNA

SEQ ID NO: 64544 - DNA, 120 bp, synthetic construct; identical to SEQ ID NO: 34590
  source 1..120: mol_type = other DNA

SEQ ID NO: 64545 - DNA, 120 bp, synthetic construct; identical to SEQ ID NO: 34591
  source 1..120: mol_type = other DNA

SEQ ID NO: 64546 - DNA, 120 bp, synthetic construct; identical to SEQ ID NO: 10101
  source 1..120: mol_type = other DNA

SEQ ID NO: 64547 - DNA, 120 bp, synthetic construct; identical to SEQ ID NO: 34593
  source 1..120: mol_type = other DNA

SEQ ID NO: 64548 - DNA, 120 bp, synthetic construct; identical to SEQ ID NO: 34594
  source 1..120: mol_type = other DNA

SEQ ID NO: 64549 - DNA, 120 bp, synthetic construct; identical to SEQ ID NO: 34595
  source 1..120: mol_type = other DNA

SEQ ID NO: 64550 - DNA, 120 bp, synthetic construct; identical to SEQ ID NO: 10102
  source 1..120: mol_type = other DNA

SEQ ID NO: 64551 - DNA, 120 bp, synthetic construct; identical to SEQ ID NO: 34597
  source 1..120: mol_type = other DNA

SEQ ID NO: 64552 - DNA, 120 bp, synthetic construct; identical to SEQ ID NO: 34598
  source 1..120: mol_type = other DNA

SEQ ID NO: 64553 - DNA, 120 bp, synthetic construct; identical to SEQ ID NO: 34599
  source 1..120: mol_type = other DNA

SEQ ID NO: 64554 - DNA, 120 bp, synthetic construct; identical to SEQ ID NO: 10103
  source 1..120: mol_type = other DNA

SEQ ID NO: 64555 - DNA, 120 bp, synthetic construct; identical to SEQ ID NO: 34601
  source 1..120: mol_type = other DNA

SEQ ID NO: 64556 - DNA, 120 bp, synthetic construct; identical to SEQ ID NO: 34602
  source 1..120: mol_type = other DNA

SEQ ID NO: 64557 - DNA, 120 bp, synthetic construct; identical to SEQ ID NO: 34603
  source 1..120: mol_type = other DNA

SEQ ID NO: 64558 - DNA, 120 bp, synthetic construct; identical to SEQ ID NO: 10104
  source 1..120: mol_type = other DNA

SEQ ID NO: 64559 - DNA, 120 bp, synthetic construct; identical to SEQ ID NO: 34605
  source 1..120: mol_type = other DNA

SEQ ID NO: 64560 - DNA, 120 bp, synthetic construct; identical to SEQ ID NO: 34606
  source 1..120: mol_type = other DNA

SEQ ID NO: 64561 - DNA, 120 bp, synthetic construct; identical to SEQ ID NO: 10105
  source 1..120: mol_type = other DNA

SEQ ID NO: 64562 - DNA, 120 bp, synthetic construct; identical to SEQ ID NO: 34608
  source 1..120: mol_type = other DNA

SEQ ID NO: 64563 - DNA, 120 bp, synthetic construct; identical to SEQ ID NO: 34609
  source 1..120: mol_type = other DNA

SEQ ID NO: 64564 - DNA, 120 bp, synthetic construct; identical to SEQ ID NO: 34610
  source 1..120: mol_type = other DNA

SEQ ID NO: 64565 - DNA, 120 bp, synthetic construct; identical to SEQ ID NO: 10106
  source 1..120: mol_type = other DNA

SEQ ID NO: 64566 - DNA, 120 bp, synthetic construct; identical to SEQ ID NO: 34612
  source 1..120: mol_type = other DNA

SEQ ID NO: 64567 - DNA, 120 bp, synthetic construct; identical to SEQ ID NO: 34613
  source 1..120: mol_type = other DNA

SEQ ID NO: 64568 - DNA, 120 bp, synthetic construct; identical to SEQ ID NO: 34614
  source 1..120: mol_type = other DNA

SEQ ID NO: 64569 - DNA, 120 bp, synthetic construct; identical to SEQ ID NO: 34615
  source 1..120: mol_type = other DNA

SEQ ID NO: 64570 - DNA, 120 bp, synthetic construct; identical to SEQ ID NO: 10107
  source 1..120: mol_type = other DNA

SEQ ID NO: 64571 - DNA, 120 bp, synthetic construct; identical to SEQ ID NO: 34617
  source 1..120: mol_type = other DNA

SEQ ID NO: 64572 - DNA, 120 bp, synthetic construct; identical to SEQ ID NO: 34618
  source 1..120: mol_type = other DNA

SEQ ID NO: 64573 - DNA, 120 bp, synthetic construct; identical to SEQ ID NO: 34619
  source 1..120: mol_type = other DNA

SEQ ID NO: 64574 - DNA, 120 bp, synthetic construct; identical to SEQ ID NO: 2934
  source 1..120: mol_type = other DNA

SEQ ID NO: 64575 - DNA, 120 bp, synthetic construct; identical to SEQ ID NO: 34621
  source 1..120: mol_type = other DNA

SEQ ID NO: 64576 - DNA, 120 bp, synthetic construct; identical to SEQ ID NO: 34622
  source 1..120: mol_type = other DNA

SEQ ID NO: 64577 - DNA, 120 bp, synthetic construct; identical to SEQ ID NO: 34623
  source 1..120: mol_type = other DNA

SEQ ID NO: 64578 - DNA, 120 bp, synthetic construct; identical to SEQ ID NO: 10109
  source 1..120: mol_type = other DNA

SEQ ID NO: 64579 - DNA, 120 bp, synthetic construct; identical to SEQ ID NO: 34625
  source 1..120: mol_type = other DNA

SEQ ID NO: 64580 - DNA, 120 bp, synthetic construct; identical to SEQ ID NO: 34626
  source 1..120: mol_type = other DNA

SEQ ID NO: 64581 - DNA, 120 bp, synthetic construct; identical to SEQ ID NO: 34627
  source 1..120: mol_type = other DNA

SEQ ID NO: 64582 - DNA, 120 bp, synthetic construct; identical to SEQ ID NO: 10110
  source 1..120: mol_type = other DNA

SEQ ID NO: 64583 - DNA, 120 bp, synthetic construct; identical to SEQ ID NO: 34629
  source 1..120: mol_type = other DNA

SEQ ID NO: 64584 - DNA, 120 bp, synthetic construct; identical to SEQ ID NO: 34630
  source 1..120: mol_type = other DNA

SEQ ID NO: 64585 - DNA, 120 bp, synthetic construct; identical to SEQ ID NO: 34631
  source 1..120: mol_type = other DNA

SEQ ID NO: 64586 - DNA, 120 bp, synthetic construct; identical to SEQ ID NO: 10111
  source 1..120: mol_type = other DNA

SEQ ID NO: 64587 - DNA, 120 bp, synthetic construct; identical to SEQ ID NO: 34633
  source 1..120: mol_type = other DNA

SEQ ID NO: 64588 - DNA, 120 bp, synthetic construct; identical to SEQ ID NO: 34634
  source 1..120: mol_type = other DNA

SEQ ID NO: 64589 - DNA, 120 bp, synthetic construct; identical to SEQ ID NO: 34635
  source 1..120: mol_type = other DNA

SEQ ID NO: 64590 - DNA, 120 bp, synthetic construct; identical to SEQ ID NO: 10112
  source 1..120: mol_type = other DNA

SEQ ID NO: 64591 - DNA, 120 bp, synthetic construct; identical to SEQ ID NO: 34637
  source 1..120: mol_type = other DNA

SEQ ID NO: 64592 - DNA, 120 bp, synthetic construct; identical to SEQ ID NO: 34638
  source 1..120: mol_type = other DNA

SEQ ID NO: 64593 - DNA, 120 bp, synthetic construct; identical to SEQ ID NO: 34639
  source 1..120: mol_type = other DNA

SEQ ID NO: 64594 - DNA, 120 bp, synthetic construct; identical to SEQ ID NO: 10113
  source 1..120: mol_type = other DNA

SEQ ID NO: 64595 - DNA, 120 bp, synthetic construct; identical to SEQ ID NO: 34641
  source 1..120: mol_type = other DNA

SEQ ID NO: 64596 - DNA, 120 bp, synthetic construct; identical to SEQ ID NO: 34642
  source 1..120: mol_type = other DNA

SEQ ID NO: 64597 - DNA, 120 bp, synthetic construct; identical to SEQ ID NO: 34643
  source 1..120: mol_type = other DNA

SEQ ID NO: 64598 - DNA, 120 bp, synthetic construct; identical to SEQ ID NO: 34644
  source 1..120: mol_type = other DNA

SEQ ID NO: 64599 - DNA, 120 bp, synthetic construct; identical to SEQ ID NO: 10114
  source 1..120: mol_type = other DNA

SEQ ID NO: 64600 - DNA, 120 bp, synthetic construct; identical to SEQ ID NO: 34646
  source 1..120: mol_type = other DNA

SEQ ID NO: 64601 - DNA, 120 bp, synthetic construct; identical to SEQ ID NO: 34647
  source 1..120: mol_type = other DNA

SEQ ID NO: 64602 - DNA, 120 bp, synthetic construct; identical to SEQ ID NO: 34648
  source 1..120: mol_type = other DNA

SEQ ID NO: 64603 - DNA, 120 bp, synthetic construct; identical to SEQ ID NO: 10115
  source 1..120: mol_type = other DNA

SEQ ID NO: 64604 - DNA, 120 bp, synthetic construct; identical to SEQ ID NO: 34650
  source 1..120: mol_type = other DNA

SEQ ID NO: 64605 - DNA, 120 bp, synthetic construct; identical to SEQ ID NO: 34651
  source 1..120: mol_type = other DNA

SEQ ID NO: 64606 - DNA, 120 bp, synthetic construct; identical to SEQ ID NO: 34652
  source 1..120: mol_type = other DNA

SEQ ID NO: 64607 - DNA, 120 bp, synthetic construct; identical to SEQ ID NO: 10116
  source 1..120: mol_type = other DNA

SEQ ID NO: 64608 - DNA, 120 bp, synthetic construct; identical to SEQ ID NO: 10117
  source 1..120: mol_type = other DNA

SEQ ID NO: 64609 - DNA, 120 bp, synthetic construct; identical to SEQ ID NO: 34655
  source 1..120: mol_type = other DNA

SEQ ID NO: 64610 - DNA, 120 bp, synthetic construct; identical to SEQ ID NO: 34656
  source 1..120: mol_type = other DNA

SEQ ID NO: 64611 - DNA, 120 bp, synthetic construct; identical to SEQ ID NO: 10118
  source 1..120: mol_type = other DNA

SEQ ID NO: 64612 - DNA, 120 bp, synthetic construct; identical to SEQ ID NO: 34658
  source 1..120: mol_type = other DNA

SEQ ID NO: 64613 - DNA, 120 bp, synthetic construct; identical to SEQ ID NO: 34659
  source 1..120: mol_type = other DNA

SEQ ID NO: 64614 - DNA, 120 bp, synthetic construct; identical to SEQ ID NO: 34660
  source 1..120: mol_type = other DNA

SEQ ID NO: 64615 - DNA, 120 bp, synthetic construct; identical to SEQ ID NO: 34661
  source 1..120: mol_type = other DNA

SEQ ID NO: 64616 - DNA, 120 bp, synthetic construct; identical to SEQ ID NO: 10119
  source 1..120: mol_type = other DNA

SEQ ID NO: 64617 - DNA, 120 bp, synthetic construct; identical to SEQ ID NO: 34663
  source 1..120: mol_type = other DNA

SEQ ID NO: 64618 - DNA, 120 bp, synthetic construct; identical to SEQ ID NO: 34664
  source 1..120: mol_type = other DNA

SEQ ID NO: 64619 - DNA, 120 bp, synthetic construct; identical to SEQ ID NO: 34665
  source 1..120: mol_type = other DNA

SEQ ID NO: 64620 - DNA, 120 bp, synthetic construct; identical to SEQ ID NO: 10120
  source 1..120: mol_type = other DNA

SEQ ID NO: 64621 - DNA, 120 bp, synthetic construct; identical to SEQ ID NO: 34667
  source 1..120: mol_type = other DNA

SEQ ID NO: 64622 - DNA, 120 bp, synthetic construct; identical to SEQ ID NO: 34668
  source 1..120: mol_type = other DNA

SEQ ID NO: 64623 - DNA, 120 bp, synthetic construct; identical to SEQ ID NO: 10121
  source 1..120: mol_type = other DNA

SEQ ID NO: 64624 - DNA, 120 bp, synthetic construct; identical to SEQ ID NO: 34670
  source 1..120: mol_type = other DNA

SEQ ID NO: 64625 - DNA, 120 bp, synthetic construct; identical to SEQ ID NO: 34671
  source 1..120: mol_type = other DNA

SEQ ID NO: 64626 - DNA, 120 bp, synthetic construct; identical to SEQ ID NO: 34672
  source 1..120: mol_type = other DNA

SEQ ID NO: 64627 - DNA, 120 bp, synthetic construct; identical to SEQ ID NO: 34673
  source 1..120: mol_type = other DNA

SEQ ID NO: 64628 - DNA, 120 bp, synthetic construct; identical to SEQ ID NO: 10122
  source 1..120: mol_type = other DNA

SEQ ID NO: 64629 - DNA, 120 bp, synthetic construct; identical to SEQ ID NO: 34675
  source 1..120: mol_type = other DNA

SEQ ID NO: 64630 - DNA, 120 bp, synthetic construct; identical to SEQ ID NO: 34676
  source 1..120: mol_type = other DNA

SEQ ID NO: 64631 - DNA, 120 bp, synthetic construct; identical to SEQ ID NO: 10123
  source 1..120: mol_type = other DNA

SEQ ID NO: 64632 - DNA, 120 bp, synthetic construct; identical to SEQ ID NO: 34678
  source 1..120: mol_type = other DNA

SEQ ID NO: 64633 - DNA, 120 bp, synthetic construct; identical to SEQ ID NO: 34679
  source 1..120: mol_type = other DNA

SEQ ID NO: 64634 - DNA, 120 bp, synthetic construct; identical to SEQ ID NO: 34680
  source 1..120: mol_type = other DNA

SEQ ID NO: 64635 - DNA, 120 bp, synthetic construct; identical to SEQ ID NO: 34681
  source 1..120: mol_type = other DNA

SEQ ID NO: 64636 - DNA, 120 bp, synthetic construct; identical to SEQ ID NO: 10124
  source 1..120: mol_type = other DNA

SEQ ID NO: 64637 - DNA, 120 bp, synthetic construct; identical to SEQ ID NO: 34683
  source 1..120: mol_type = other DNA

SEQ ID NO: 64638 - DNA, 120 bp, synthetic construct; identical to SEQ ID NO: 34684
  source 1..120: mol_type = other DNA

SEQ ID NO: 64639 - DNA, 120 bp, synthetic construct; identical to SEQ ID NO: 10125
  source 1..120: mol_type = other DNA

SEQ ID NO: 64640 - DNA, 120 bp, synthetic construct; identical to SEQ ID NO: 34686
  source 1..120: mol_type = other DNA

SEQ ID NO: 64641 - DNA, 120 bp, synthetic construct; identical to SEQ ID NO: 34687
  source 1..120: mol_type = other DNA

SEQ ID NO: 64642 - DNA, 120 bp, synthetic construct; identical to SEQ ID NO: 34688
  source 1..120: mol_type = other DNA

SEQ ID NO: 64643 - DNA, 120 bp, synthetic construct; identical to SEQ ID NO: 34689
  source 1..120: mol_type = other DNA

SEQ ID NO: 64644 - DNA, 120 bp, synthetic construct; identical to SEQ ID NO: 10126
  source 1..120: mol_type = other DNA

SEQ ID NO: 64645 - DNA, 120 bp, synthetic construct; identical to SEQ ID NO: 34691
  source 1..120: mol_type = other DNA

SEQ ID NO: 64646 - DNA, 120 bp, synthetic construct; identical to SEQ ID NO: 34692
  source 1..120: mol_type = other DNA

SEQ ID NO: 64647 - DNA, 120 bp, synthetic construct; identical to SEQ ID NO: 10127
  source 1..120: mol_type = other DNA

SEQ ID NO: 64648 - DNA, 120 bp, synthetic construct; identical to SEQ ID NO: 34694
  source 1..120: mol_type = other DNA

SEQ ID NO: 64649 - DNA, 120 bp, synthetic construct; identical to SEQ ID NO: 34695
  source 1..120: mol_type = other DNA

SEQ ID NO: 64650 - DNA, 120 bp, synthetic construct; identical to SEQ ID NO: 34696
  source 1..120: mol_type = other DNA

SEQ ID NO: 64651 - DNA, 120 bp, synthetic construct; identical to SEQ ID NO: 10128
  source 1..120: mol_type = other DNA

SEQ ID NO: 64652 - DNA, 120 bp, synthetic construct; identical to SEQ ID NO: 34698
  source 1..120: mol_type = other DNA

SEQ ID NO: 64653 - DNA, 120 bp, synthetic construct; identical to SEQ ID NO: 34699
  source 1..120: mol_type = other DNA

SEQ ID NO: 64654 - DNA, 120 bp, synthetic construct; identical to SEQ ID NO: 34700
  source 1..120: mol_type = other DNA

SEQ ID NO: 64655 - DNA, 120 bp, synthetic construct; identical to SEQ ID NO: 34701
  source 1..120: mol_type = other DNA

SEQ ID NO: 64656 - DNA, 120 bp, synthetic construct; identical to SEQ ID NO: 10129
  source 1..120: mol_type = other DNA

SEQ ID NO: 64657 - DNA, 120 bp, synthetic construct; identical to SEQ ID NO: 34703
  source 1..120: mol_type = other DNA

SEQ ID NO: 64658 - DNA, 120 bp, synthetic construct; identical to SEQ ID NO: 34704
  source 1..120: mol_type = other DNA

SEQ ID NO: 64659 - DNA, 120 bp, synthetic construct; identical to SEQ ID NO: 34705
  source 1..120: mol_type = other DNA

SEQ ID NO: 64660 - DNA, 120 bp, synthetic construct; identical to SEQ ID NO: 10130
  source 1..120: mol_type = other DNA

SEQ ID NO: 64661 - DNA, 120 bp, synthetic construct; identical to SEQ ID NO: 34707
  source 1..120: mol_type = other DNA

SEQ ID NO: 64662 - DNA, 120 bp, synthetic construct; identical to SEQ ID NO: 34708
  source 1..120: mol_type = other DNA

SEQ ID NO: 64663 - DNA, 120 bp, synthetic construct; identical to SEQ ID NO: 10131
  source 1..120: mol_type = other DNA

SEQ ID NO: 64664 - DNA, 120 bp, synthetic construct; identical to SEQ ID NO: 34710
  source 1..120: mol_type = other DNA

SEQ ID NO: 64665 - DNA, 120 bp, synthetic construct; identical to SEQ ID NO: 34711
  source 1..120: mol_type = other DNA

SEQ ID NO: 64666 - DNA, 120 bp, synthetic construct; identical to SEQ ID NO: 34712
  source 1..120: mol_type = other DNA

SEQ ID NO: 64667 - DNA, 120 bp, synthetic construct; identical to SEQ ID NO: 10132
  source 1..120: mol_type = other DNA

SEQ ID NO: 64668 - DNA, 120 bp, synthetic construct; identical to SEQ ID NO: 34714
  source 1..120: mol_type = other DNA

SEQ ID NO: 64669 - DNA, 120 bp, synthetic construct; identical to SEQ ID NO: 34715
  source 1..120: mol_type = other DNA

SEQ ID NO: 64670 - DNA, 120 bp, synthetic construct; identical to SEQ ID NO: 34716
  source 1..120: mol_type = other DNA

SEQ ID NO: 64671 - DNA, 120 bp, synthetic construct; identical to SEQ ID NO: 34717
  source 1..120: mol_type = other DNA

SEQ ID NO: 64672 - DNA, 120 bp, synthetic construct; identical to SEQ ID NO: 10133
  source 1..120: mol_type = other DNA

SEQ ID NO: 64673 - DNA, 120 bp, synthetic construct; identical to SEQ ID NO: 34719
  source 1..120: mol_type = other DNA

SEQ ID NO: 64674 - DNA, 120 bp, synthetic construct; identical to SEQ ID NO: 10134
  source 1..120: mol_type = other DNA

SEQ ID NO: 64675 - DNA, 120 bp, synthetic construct; identical to SEQ ID NO: 34721
  source 1..120: mol_type = other DNA

SEQ ID NO: 64676 - DNA, 120 bp, synthetic construct; identical to SEQ ID NO: 34722
  source 1..120: mol_type = other DNA

SEQ ID NO: 64677 - DNA, 120 bp, synthetic construct; identical to SEQ ID NO: 10135
  source 1..120: mol_type = other DNA

SEQ ID NO: 64678 - DNA, 120 bp, synthetic construct; identical to SEQ ID NO: 34724
  source 1..120: mol_type = other DNA

SEQ ID NO: 64679 - DNA, 120 bp, synthetic construct; identical to SEQ ID NO: 34725
  source 1..120: mol_type = other DNA

SEQ ID NO: 64680 - DNA, 120 bp, synthetic construct; identical to SEQ ID NO: 10136
  source 1..120: mol_type = other DNA

SEQ ID NO: 64681 - DNA, 120 bp, synthetic construct; identical to SEQ ID NO: 34727
  source 1..120: mol_type = other DNA

SEQ ID NO: 64682 - DNA, 120 bp, synthetic construct; identical to SEQ ID NO: 34728
  source 1..120: mol_type = other DNA

SEQ ID NO: 64683 - DNA, 120 bp, synthetic construct; identical to SEQ ID NO: 10137
  source 1..120: mol_type = other DNA

SEQ ID NO: 64684 - DNA, 120 bp, synthetic construct; identical to SEQ ID NO: 34730
  source 1..120: mol_type = other DNA

SEQ ID NO: 64685 - DNA, 120 bp, synthetic construct; identical to SEQ ID NO: 34731
  source 1..120: mol_type = other DNA

SEQ ID NO: 64686 - DNA, 120 bp, synthetic construct; identical to SEQ ID NO: 34732
  source 1..120: mol_type = other DNA

SEQ ID NO: 64687 - DNA, 120 bp, synthetic construct; identical to SEQ ID NO: 10138
  source 1..120: mol_type = other DNA

SEQ ID NO: 64688 - DNA, 120 bp, synthetic construct; identical to SEQ ID NO: 34734
  source 1..120: mol_type = other DNA

SEQ ID NO: 64689 - DNA, 120 bp, synthetic construct; identical to SEQ ID NO: 34735
  source 1..120: mol_type = other DNA

SEQ ID NO: 64690 - DNA, 120 bp, synthetic construct; identical to SEQ ID NO: 34736
  source 1..120: mol_type = other DNA

SEQ ID NO: 64691 - DNA, 120 bp, synthetic construct; identical to SEQ ID NO: 34737
  source 1..120: mol_type = other DNA

SEQ ID NO: 64692 - DNA, 120 bp, synthetic construct; identical to SEQ ID NO: 10139
  source 1..120: mol_type = other DNA

SEQ ID NO: 64693 - DNA, 120 bp, synthetic construct; identical to SEQ ID NO: 34739
  source 1..120: mol_type = other DNA

SEQ ID NO: 64694 - DNA, 120 bp, synthetic construct; identical to SEQ ID NO: 34740
  source 1..120: mol_type = other DNA

SEQ ID NO: 64695 - DNA, 120 bp, synthetic construct; identical to SEQ ID NO: 34741
  source 1..120: mol_type = other DNA

SEQ ID NO: 64696 - DNA, 120 bp, synthetic construct; identical to SEQ ID NO: 10140
  source 1..120: mol_type = other DNA

SEQ ID NO: 64697 - DNA, 120 bp, synthetic construct; identical to SEQ ID NO: 34743
  source 1..120: mol_type = other DNA

SEQ ID NO: 64698 - DNA, 120 bp, synthetic construct; identical to SEQ ID NO: 34744
  source 1..120: mol_type = other DNA

SEQ ID NO: 64699 - DNA, 120 bp, synthetic construct; identical to SEQ ID NO: 34745
  source 1..120: mol_type = other DNA

SEQ ID NO: 64700 - DNA, 120 bp, synthetic construct; identical to SEQ ID NO: 10141
  source 1..120: mol_type = other DNA

SEQ ID NO: 64701 - DNA, 120 bp, synthetic construct; identical to SEQ ID NO: 34747
  source 1..120: mol_type = other DNA

SEQ ID NO: 64702 - DNA, 120 bp, synthetic construct; identical to SEQ ID NO: 34748
  source 1..120: mol_type = other DNA

SEQ ID NO: 64703 - DNA, 120 bp, synthetic construct; identical to SEQ ID NO: 10142
  source 1..120: mol_type = other DNA

SEQ ID NO: 64704 - DNA, 120 bp, synthetic construct; identical to SEQ ID NO: 34750
  source 1..120: mol_type = other DNA

SEQ ID NO: 64705 - DNA, 120 bp, synthetic construct; identical to SEQ ID NO: 34751
  source 1..120: mol_type = other DNA

SEQ ID NO: 64706 - DNA, 120 bp, synthetic construct; identical to SEQ ID NO: 34752
  source 1..120: mol_type = other DNA

SEQ ID NO: 64707 - DNA, 120 bp, synthetic construct; identical to SEQ ID NO: 10143
  source 1..120: mol_type = other DNA

SEQ ID NO: 64708 - DNA, 120 bp, synthetic construct; identical to SEQ ID NO: 34754
  source 1..120: mol_type = other DNA

SEQ ID NO: 64709 - DNA, 120 bp, synthetic construct; identical to SEQ ID NO: 34755
  source 1..120: mol_type = other DNA

SEQ ID NO: 64710 - DNA, 120 bp, synthetic construct; identical to SEQ ID NO: 34756
  source 1..120: mol_type = other DNA

SEQ ID NO: 64711 - DNA, 120 bp, synthetic construct; identical to SEQ ID NO: 10144
  source 1..120: mol_type = other DNA

SEQ ID NO: 64712 - DNA, 120 bp, synthetic construct; identical to SEQ ID NO: 34758
  source 1..120: mol_type = other DNA

SEQ ID NO: 64713 - DNA, 120 bp, synthetic construct; identical to SEQ ID NO: 34759
  source 1..120: mol_type = other DNA

SEQ ID NO: 64714 - DNA, 120 bp, synthetic construct; identical to SEQ ID NO: 34760
  source 1..120: mol_type = other DNA

SEQ ID NO: 64715 - DNA, 120 bp, synthetic construct; identical to SEQ ID NO: 10145
  source 1..120: mol_type = other DNA

SEQ ID NO: 64716 - DNA, 120 bp, synthetic construct; identical to SEQ ID NO: 34762
  source 1..120: mol_type = other DNA

SEQ ID NO: 64717 - DNA, 120 bp, synthetic construct; identical to SEQ ID NO: 34763
  source 1..120: mol_type = other DNA

SEQ ID NO: 64718 - DNA, 120 bp, synthetic construct; identical to SEQ ID NO: 34764
  source 1..120: mol_type = other DNA

SEQ ID NO: 64719 - DNA, 120 bp, synthetic construct; identical to SEQ ID NO: 34765
  source 1..120: mol_type = other DNA

SEQ ID NO: 64720 - DNA, 120 bp, synthetic construct; identical to SEQ ID NO: 10146
  source 1..120: mol_type = other DNA

SEQ ID NO: 64721 - DNA, 120 bp, synthetic construct; identical to SEQ ID NO: 34767
  source 1..120: mol_type = other DNA

SEQ ID NO: 64722 - DNA, 120 bp, synthetic construct; identical to SEQ ID NO: 34768
  source 1..120: mol_type = other DNA

SEQ ID NO: 64723 - DNA, 120 bp, synthetic construct; identical to SEQ ID NO: 10147
  source 1..120: mol_type = other DNA

SEQ ID NO: 64724 - DNA, 120 bp, synthetic construct; identical to SEQ ID NO: 34770
  source 1..120: mol_type = other DNA

SEQ ID NO: 64725 - DNA, 120 bp, synthetic construct; identical to SEQ ID NO: 34771
  source 1..120: mol_type = other DNA

SEQ ID NO: 64726 - DNA, 120 bp, synthetic construct; identical to SEQ ID NO: 34772
  source 1..120: mol_type = other DNA

SEQ ID NO: 64727 - DNA, 120 bp, synthetic construct; identical to SEQ ID NO: 34773
  source 1..120: mol_type = other DNA

SEQ ID NO: 64728 - DNA, 120 bp, synthetic construct; identical to SEQ ID NO: 10148
  source 1..120: mol_type = other DNA

SEQ ID NO: 64729 - DNA, 120 bp, synthetic construct; identical to SEQ ID NO: 34775
  source 1..120: mol_type = other DNA

SEQ ID NO: 64730 - DNA, 120 bp, synthetic construct; identical to SEQ ID NO: 34776
  source 1..120: mol_type = other DNA

SEQ ID NO: 64731 - DNA, 120 bp, synthetic construct; identical to SEQ ID NO: 10149
  source 1..120: mol_type = other DNA

SEQ ID NO: 64732 - DNA, 120 bp, synthetic construct; identical to SEQ ID NO: 34778
  source 1..120: mol_type = other DNA

SEQ ID NO: 64733 - DNA, 120 bp, synthetic construct; identical to SEQ ID NO: 34779
  source 1..120: mol_type = other DNA

SEQ ID NO: 64734 - DNA, 120 bp, synthetic construct; identical to SEQ ID NO: 34780
  source 1..120: mol_type = other DNA

SEQ ID NO: 64735 - DNA, 120 bp, synthetic construct; identical to SEQ ID NO: 10150
  source 1..120: mol_type = other DNA

SEQ ID NO: 64736 - DNA, 120 bp, synthetic construct; identical to SEQ ID NO: 34782
  source 1..120: mol_type = other DNA

SEQ ID NO: 64737 - DNA, 120 bp, synthetic construct; identical to SEQ ID NO: 34783
  source 1..120: mol_type = other DNA

SEQ ID NO: 64738 - DNA, 120 bp, synthetic construct; identical to SEQ ID NO: 34784
  source 1..120: mol_type = other DNA

SEQ ID NO: 64739 - DNA, 120 bp, synthetic construct; identical to SEQ ID NO: 10151
  source 1..120: mol_type = other DNA

SEQ ID NO: 64740 - DNA, 120 bp, synthetic construct; identical to SEQ ID NO: 34786
  source 1..120: mol_type = other DNA

SEQ ID NO: 64741 - DNA, 120 bp, synthetic construct; identical to SEQ ID NO: 34787
  source 1..120: mol_type = other DNA

SEQ ID NO: 64742 - DNA, 120 bp, synthetic construct; identical to SEQ ID NO: 34788
  source 1..120: mol_type = other DNA

SEQ ID NO: 64743 - DNA, 120 bp, synthetic construct; identical to SEQ ID NO: 34789
  source 1..120: mol_type = other DNA

SEQ ID NO: 64744 - DNA, 120 bp, synthetic construct; identical to SEQ ID NO: 10152
  source 1..120: mol_type = other DNA

SEQ ID NO: 64745 - DNA, 120 bp, synthetic construct; identical to SEQ ID NO: 34791
  source 1..120: mol_type = other DNA

SEQ ID NO: 64746 - DNA, 120 bp, synthetic construct; identical to SEQ ID NO: 34792
  source 1..120: mol_type = other DNA

SEQ ID NO: 64747 - DNA, 120 bp, synthetic construct; identical to SEQ ID NO: 34793
  source 1..120: mol_type = other DNA

SEQ ID NO: 64748 - DNA, 120 bp, synthetic construct; identical to SEQ ID NO: 10153
  source 1..120: mol_type = other DNA

SEQ ID NO: 64749 - DNA, 120 bp, synthetic construct; identical to SEQ ID NO: 34795
  source 1..120: mol_type = other DNA

SEQ ID NO: 64750 - DNA, 120 bp, synthetic construct; identical to SEQ ID NO: 34796
  source 1..120: mol_type = other DNA

SEQ ID NO: 64751 - DNA, 120 bp, synthetic construct; identical to SEQ ID NO: 10154
  source 1..120: mol_type = other DNA

SEQ ID NO: 64752 - DNA, 120 bp, synthetic construct; identical to SEQ ID NO: 34798
  source 1..120: mol_type = other DNA

SEQ ID NO: 64753 - DNA, 120 bp, synthetic construct; identical to SEQ ID NO: 34799
  source 1..120: mol_type = other DNA

SEQ ID NO: 64754 - DNA, 120 bp, synthetic construct; identical to SEQ ID NO: 34800
  source 1..120: mol_type = other DNA

SEQ ID NO: 64755 - DNA, 120 bp, synthetic construct; identical to SEQ ID NO: 10155
  source 1..120: mol_type = other DNA

SEQ ID NO: 64756 - DNA, 120 bp, synthetic construct; identical to SEQ ID NO: 34802
  source 1..120: mol_type = other DNA

SEQ ID NO: 64757 - DNA, 120 bp, synthetic construct; identical to SEQ ID NO: 34803
  source 1..120: mol_type = other DNA

SEQ ID NO: 64758 - DNA, 120 bp, synthetic construct; identical to SEQ ID NO: 34804
  source 1..120: mol_type = other DNA

SEQ ID NO: 64759 - DNA, 120 bp, synthetic construct; identical to SEQ ID NO: 34805
  source 1..120: mol_type = other DNA

SEQ ID NO: 64760 - DNA, 120 bp, synthetic construct; identical to SEQ ID NO: 10156
  source 1..120: mol_type = other DNA

SEQ ID NO: 64761 - DNA, 120 bp, synthetic construct; identical to SEQ ID NO: 34807
  source 1..120: mol_type = other DNA

SEQ ID NO: 64762 - DNA, 120 bp, synthetic construct; identical to SEQ ID NO: 34808
  source 1..120: mol_type = other DNA

SEQ ID NO: 64763 - DNA, 120 bp, synthetic construct; identical to SEQ ID NO: 10157
  source 1..120: mol_type = other DNA

SEQ ID NO: 64764 - DNA, 120 bp, synthetic construct; identical to SEQ ID NO: 34810
  source 1..120: mol_type = other DNA

SEQ ID NO: 64765 - DNA, 120 bp, synthetic construct; identical to SEQ ID NO: 34811
  source 1..120: mol_type = other DNA

SEQ ID NO: 64766 - DNA, 120 bp, synthetic construct; identical to SEQ ID NO: 34812
  source 1..120: mol_type = other DNA

SEQ ID NO: 64767 - DNA, 120 bp, synthetic construct; identical to SEQ ID NO: 34813
  source 1..120: mol_type = other DNA

SEQ ID NO: 64768 - DNA, 120 bp, synthetic construct; identical to SEQ ID NO: 10158
  source 1..120: mol_type = other DNA

SEQ ID NO: 64769 - DNA, 120 bp, synthetic construct; identical to SEQ ID NO: 34815
  source 1..120: mol_type = other DNA

SEQ ID NO: 64770 - DNA, 120 bp, synthetic construct; identical to SEQ ID NO: 34816
  source 1..120: mol_type = other DNA

SEQ ID NO: 64771 - DNA, 120 bp, synthetic construct; identical to SEQ ID NO: 34817
  source 1..120: mol_type = other DNA

SEQ ID NO: 64772 - DNA, 120 bp, synthetic construct; identical to SEQ ID NO: 10159
  source 1..120: mol_type = other DNA

SEQ ID NO: 64773 - DNA, 120 bp, synthetic construct; identical to SEQ ID NO: 34819
  source 1..120: mol_type = other DNA

SEQ ID NO: 64774 - DNA, 120 bp, synthetic construct; identical to SEQ ID NO: 34820
  source 1..120: mol_type = other DNA

SEQ ID NO: 64775 - DNA, 120 bp, synthetic construct; identical to SEQ ID NO: 34821
  source 1..120: mol_type = other DNA

SEQ ID NO: 64776 - DNA, 120 bp, synthetic construct; identical to SEQ ID NO: 10160
  source 1..120: mol_type = other DNA

SEQ ID NO: 64777 - DNA, 120 bp, synthetic construct; identical to SEQ ID NO: 34823
  source 1..120: mol_type = other DNA

SEQ ID NO: 64778 - DNA, 120 bp, synthetic construct; identical to SEQ ID NO: 10161
  source 1..120: mol_type = other DNA

SEQ ID NO: 64779 - DNA, 120 bp, synthetic construct; identical to SEQ ID NO: 34825
  source 1..120: mol_type = other DNA

SEQ ID NO: 64780 - DNA, 120 bp, synthetic construct; identical to SEQ ID NO: 34826
  source 1..120: mol_type = other DNA

SEQ ID NO: 64781 - DNA, 120 bp, synthetic construct; identical to SEQ ID NO: 34827
  source 1..120: mol_type = other DNA

SEQ ID NO: 64782 - DNA, 120 bp, synthetic construct; identical to SEQ ID NO: 34828
  source 1..120: mol_type = other DNA

SEQ ID NO: 64783 - DNA, 120 bp, synthetic construct; identical to SEQ ID NO: 10162
  source 1..120: mol_type = other DNA

SEQ ID NO: 64784 - DNA, 120 bp, synthetic construct; identical to SEQ ID NO: 34830
  source 1..120: mol_type = other DNA

SEQ ID NO: 64785 - DNA, 120 bp, synthetic construct; identical to SEQ ID NO: 34831
  source 1..120: mol_type = other DNA

SEQ ID NO: 64786 - DNA, 120 bp, synthetic construct; identical to SEQ ID NO: 34832
  source 1..120: mol_type = other DNA

SEQ ID NO: 64787 - DNA, 120 bp, synthetic construct; identical to SEQ ID NO: 10163
  source 1..120: mol_type = other DNA

SEQ ID NO: 64788 - DNA, 120 bp, synthetic construct; identical to SEQ ID NO: 34834
  source 1..120: mol_type = other DNA

SEQ ID NO: 64789 - DNA, 120 bp, synthetic construct; identical to SEQ ID NO: 34835
  source 1..120: mol_type = other DNA

SEQ ID NO: 64790 - DNA, 120 bp, synthetic construct; identical to SEQ ID NO: 34836
  source 1..120: mol_type = other DNA

SEQ ID NO: 64791 - DNA, 120 bp, synthetic construct; identical to SEQ ID NO: 34837
  source 1..120: mol_type = other DNA

SEQ ID NO: 64792 - DNA, 120 bp, synthetic construct; identical to SEQ ID NO: 10164
  source 1..120: mol_type = other DNA

SEQ ID NO: 64793 - DNA, 120 bp, synthetic construct; identical to SEQ ID NO: 34839
  source 1..120: mol_type = other DNA

SEQ ID NO: 64794 - DNA, 120 bp, synthetic construct; identical to SEQ ID NO: 34840
  source 1..120: mol_type = other DNA

SEQ ID NO: 64795 - DNA, 120 bp, synthetic construct; identical to SEQ ID NO: 34841
  source 1..120: mol_type = other DNA

SEQ ID NO: 64796 - DNA, 120 bp, synthetic construct; identical to SEQ ID NO: 10165
  source 1..120: mol_type = other DNA

SEQ ID NO: 64797 - DNA, 120 bp, synthetic construct; identical to SEQ ID NO: 34843
  source 1..120: mol_type = other DNA

SEQ ID NO: 64798 - DNA, 120 bp, synthetic construct; identical to SEQ ID NO: 34844
  source 1..120: mol_type = other DNA

SEQ ID NO: 64799 - DNA, 120 bp, synthetic construct; identical to SEQ ID NO: 10166
  source 1..120: mol_type = other DNA

SEQ ID NO: 64800 - DNA, 120 bp, synthetic construct; identical to SEQ ID NO: 34846
  source 1..120: mol_type = other DNA

SEQ ID NO: 64801 - DNA, 120 bp, synthetic construct; identical to SEQ ID NO: 34847
  source 1..120: mol_type = other DNA

SEQ ID NO: 64802 - DNA, 120 bp, synthetic construct; identical to SEQ ID NO: 34848
  source 1..120: mol_type = other DNA

SEQ ID NO: 64803 - DNA, 120 bp, synthetic construct; identical to SEQ ID NO: 10167
  source 1..120: mol_type = other DNA

SEQ ID NO: 64804 - DNA, 120 bp, synthetic construct; identical to SEQ ID NO: 34850
  source 1..120: mol_type = other DNA

SEQ ID NO: 64805 - DNA, 120 bp, synthetic construct; identical to SEQ ID NO: 34851
  source 1..120: mol_type = other DNA

SEQ ID NO: 64806 - DNA, 120 bp, synthetic construct; identical to SEQ ID NO: 34852
  source 1..120: mol_type = other DNA

SEQ ID NO: 64807 - DNA, 120 bp, synthetic construct; identical to SEQ ID NO: 10168
  source 1..120: mol_type = other DNA

SEQ ID NO: 64808 - DNA, 120 bp, synthetic construct; identical to SEQ ID NO: 34854
  source 1..120: mol_type = other DNA

SEQ ID NO: 64809 - DNA, 120 bp, synthetic construct; identical to SEQ ID NO: 34855
  source 1..120: mol_type = other DNA

SEQ ID NO: 64810 - DNA, 120 bp, synthetic construct; identical to SEQ ID NO: 2989
  source 1..120: mol_type = other DNA

SEQ ID NO: 64811 - DNA, 120 bp, synthetic construct; identical to SEQ ID NO: 34857
  source 1..120: mol_type = other DNA

SEQ ID NO: 64812 - DNA, 120 bp, synthetic construct; identical to SEQ ID NO: 10169
  source 1..120: mol_type = other DNA

SEQ ID NO: 64813 - DNA, 120 bp, synthetic construct; identical to SEQ ID NO: 34859
  source 1..120: mol_type = other DNA

SEQ ID NO: 64814 - DNA, 120 bp, synthetic construct; identical to SEQ ID NO: 34860
  source 1..120: mol_type = other DNA

SEQ ID NO: 64815 - DNA, 120 bp, synthetic construct; identical to SEQ ID NO: 34861
  source 1..120: mol_type = other DNA

SEQ ID NO: 64816 - DNA, 120 bp, synthetic construct; identical to SEQ ID NO: 10170
  source 1..120: mol_type = other DNA

SEQ ID NO: 64817 - DNA, 120 bp, synthetic construct; identical to SEQ ID NO: 34863
  source 1..120: mol_type = other DNA

SEQ ID NO: 64818 - DNA, 120 bp, synthetic construct; identical to SEQ ID NO: 34864
  source 1..120: mol_type = other DNA

SEQ ID NO: 64819 - DNA, 120 bp, synthetic construct; identical to SEQ ID NO: 10171
  source 1..120: mol_type = other DNA

SEQ ID NO: 64820 - DNA, 120 bp, synthetic construct; identical to SEQ ID NO: 34866
  source 1..120: mol_type = other DNA

SEQ ID NO: 64821 - DNA, 120 bp, synthetic construct; identical to SEQ ID NO: 34867
  source 1..120: mol_type = other DNA

SEQ ID NO: 64822 - DNA, 120 bp, synthetic construct; identical to SEQ ID NO: 34868
  source 1..120: mol_type = other DNA

SEQ ID NO: 64823 - DNA, 120 bp, synthetic construct; identical to SEQ ID NO: 10172
  source 1..120: mol_type = other DNA

SEQ ID NO: 64824 - DNA, 120 bp, synthetic construct; identical to SEQ ID NO: 34870
  source 1..120: mol_type = other DNA

SEQ ID NO: 64825 - DNA, 120 bp, synthetic construct; identical to SEQ ID NO: 34871
  source 1..120: mol_type = other DNA

SEQ ID NO: 64826 - DNA, 120 bp, synthetic construct; identical to SEQ ID NO: 34872
  source 1..120: mol_type = other DNA

SEQ ID NO: 64827 - DNA, 120 bp, synthetic construct; identical to SEQ ID NO: 2993
  source 1..120: mol_type = other DNA

SEQ ID NO: 64828 - DNA, 120 bp, synthetic construct; identical to SEQ ID NO: 34874
  source 1..120: mol_type = other DNA

SEQ ID NO: 64829 - DNA, 120 bp, synthetic construct; identical to SEQ ID NO: 34875
  source 1..120: mol_type = other DNA

SEQ ID NO: 64830 - DNA, 120 bp, synthetic construct; identical to SEQ ID NO: 34876
  source 1..120: mol_type = other DNA

SEQ ID NO: 64831 - DNA, 120 bp, synthetic construct; identical to SEQ ID NO: 2994
  source 1..120: mol_type = other DNA

SEQ ID NO: 64832 - DNA, 120 bp, synthetic construct; identical to SEQ ID NO: 10174
  source 1..120: mol_type = other DNA

SEQ ID NO: 64833 - DNA, 120 bp, synthetic construct; identical to SEQ ID NO: 34879
  source 1..120: mol_type = other DNA

SEQ ID NO: 64834 - DNA, 120 bp, synthetic construct; identical to SEQ ID NO: 34880
  source 1..120: mol_type = other DNA

SEQ ID NO: 64835 - DNA, 120 bp, synthetic construct; identical to SEQ ID NO: 10175
  source 1..120: mol_type = other DNA

SEQ ID NO: 64836 - DNA, 120 bp, synthetic construct; identical to SEQ ID NO: 34882
  source 1..120: mol_type = other DNA

SEQ ID NO: 64837 - DNA, 120 bp, synthetic construct; identical to SEQ ID NO: 34883
  source 1..120: mol_type = other DNA

SEQ ID NO: 64838 - DNA, 120 bp, synthetic construct; identical to SEQ ID NO: 34884
  source 1..120: mol_type = other DNA

SEQ ID NO: 64839 - DNA, 120 bp, synthetic construct; identical to SEQ ID NO: 10176
  source 1..120: mol_type = other DNA

SEQ ID NO: 64840 - DNA, 120 bp, synthetic construct; identical to SEQ ID NO: 34886
  source 1..120: mol_type = other DNA

SEQ ID NO: 64841 - DNA, 120 bp, synthetic construct; identical to SEQ ID NO: 34887
  source 1..120: mol_type = other DNA

SEQ ID NO: 64842 - DNA, 120 bp, synthetic construct; identical to SEQ ID NO: 34888
  source 1..120: mol_type = other DNA

SEQ ID NO: 64843 - DNA, 120 bp, synthetic construct; identical to SEQ ID NO: 34889
  source 1..120: mol_type = other DNA

SEQ ID NO: 64844 - DNA, 120 bp, synthetic construct; identical to SEQ ID NO: 10177
  source 1..120: mol_type = other DNA

SEQ ID NO: 64845 - DNA, 120 bp, synthetic construct; identical to SEQ ID NO: 34891
  source 1..120: mol_type = other DNA

SEQ ID NO: 64846 - DNA, 120 bp, synthetic construct; identical to SEQ ID NO: 34892
  source 1..120: mol_type = other DNA

SEQ ID NO: 64847 - DNA, 120 bp, synthetic construct; identical to SEQ ID NO: 10178
  source 1..120: mol_type = other DNA

SEQ ID NO: 64848 - DNA, 120 bp, synthetic construct; identical to SEQ ID NO: 34894
  source 1..120: mol_type = other DNA

SEQ ID NO: 64849 - DNA, 120 bp, synthetic construct; identical to SEQ ID NO: 34895
  source 1..120: mol_type = other DNA

SEQ ID NO: 64850 - DNA, 120 bp, synthetic construct; identical to SEQ ID NO: 34896
  source 1..120: mol_type = other DNA

SEQ ID NO: 64851 - DNA, 120 bp, synthetic construct; identical to SEQ ID NO: 10179
  source 1..120: mol_type = other DNA

SEQ ID NO: 64852 - DNA, 120 bp, synthetic construct; identical to SEQ ID NO: 34898
  source 1..120: mol_type = other DNA

SEQ ID NO: 64853 - DNA, 120 bp, synthetic construct; identical to SEQ ID NO: 2999
  source 1..120: mol_type = other DNA

SEQ ID NO: 64854 - DNA, 120 bp, synthetic construct; identical to SEQ ID NO: 34900
  source 1..120: mol_type = other DNA

SEQ ID NO: 64855 - DNA, 120 bp, synthetic construct; identical to SEQ ID NO: 34901
  source 1..120: mol_type = other DNA

SEQ ID NO: 64856 - DNA, 120 bp, synthetic construct; identical to SEQ ID NO: 10180
  source 1..120: mol_type = other DNA

SEQ ID NO: 64857 - DNA, 120 bp, synthetic construct; identical to SEQ ID NO: 34903
  source 1..120: mol_type = other DNA

SEQ ID NO: 64858 - DNA, 120 bp, synthetic construct; identical to SEQ ID NO: 34904
  source 1..120: mol_type = other DNA

SEQ ID NO: 64859 - DNA, 120 bp, synthetic construct; identical to SEQ ID NO: 34905
  source 1..120: mol_type = other DNA

SEQ ID NO: 64860 - DNA, 120 bp, synthetic construct; identical to SEQ ID NO: 10181
  source 1..120: mol_type = other DNA

SEQ ID NO: 64861 - DNA, 120 bp, synthetic construct; identical to SEQ ID NO: 34907
  source 1..120: mol_type = other DNA

SEQ ID NO: 64862 - DNA, 120 bp, synthetic construct; identical to SEQ ID NO: 34908
  source 1..120: mol_type = other DNA

SEQ ID NO: 64863 - DNA, 120 bp, synthetic construct; identical to SEQ ID NO: 10182
  source 1..120: mol_type = other DNA

SEQ ID NO: 64864 - DNA, 120 bp, synthetic construct; identical to SEQ ID NO: 34910
  source 1..120: mol_type = other DNA

SEQ ID NO: 64865 - DNA, 120 bp, synthetic construct; identical to SEQ ID NO: 34911
  source 1..120: mol_type = other DNA

SEQ ID NO: 64866 - DNA, 120 bp, synthetic construct; identical to SEQ ID NO: 34912
  source 1..120: mol_type = other DNA

SEQ ID NO: 64867 - DNA, 120 bp, synthetic construct; identical to SEQ ID NO: 34913
  source 1..120: mol_type = other DNA

SEQ ID NO: 64868 - DNA, 120 bp, synthetic construct; identical to SEQ ID NO: 10183
  source 1..120: mol_type = other DNA

SEQ ID NO: 64869 - DNA, 120 bp, synthetic construct; identical to SEQ ID NO: 34915
  source 1..120: mol_type = other DNA

SEQ ID NO: 64870 - DNA, 120 bp, synthetic construct; identical to SEQ ID NO: 34916
  source 1..120: mol_type = other DNA

SEQ ID NO: 64871 - DNA, 120 bp, synthetic construct; identical to SEQ ID NO: 34917
  source 1..120: mol_type = other DNA

SEQ ID NO: 64872 - DNA, 120 bp, synthetic construct; identical to SEQ ID NO: 10184
  source 1..120: mol_type = other DNA

SEQ ID NO: 64873 - DNA, 120 bp, synthetic construct; identical to SEQ ID NO: 34919
  source 1..120: mol_type = other DNA

SEQ ID NO: 64874 - DNA, 120 bp, synthetic construct; identical to SEQ ID NO: 34920
  source 1..120: mol_type = other DNA

SEQ ID NO: 64875 - DNA, 120 bp, synthetic construct; identical to SEQ ID NO: 10185
  source 1..120: mol_type = other DNA

SEQ ID NO: 64876 - DNA, 120 bp, synthetic construct; identical to SEQ ID NO: 34922
  source 1..120: mol_type = other DNA

SEQ ID NO: 64877 - DNA, 120 bp, synthetic construct; identical to SEQ ID NO: 34923
  source 1..120: mol_type = other DNA

SEQ ID NO: 64878 - DNA, 120 bp, synthetic construct; identical to SEQ ID NO: 34924
  source 1..120: mol_type = other DNA

SEQ ID NO: 64879 - DNA, 120 bp, synthetic construct; identical to SEQ ID NO: 10186
  source 1..120: mol_type = other DNA

SEQ ID NO: 64880 - DNA, 120 bp, synthetic construct; identical to SEQ ID NO: 34926
  source 1..120: mol_type = other DNA

SEQ ID NO: 64881 - DNA, 120 bp, synthetic construct; identical to SEQ ID NO: 34927
  source 1..120: mol_type = other DNA

SEQ ID NO: 64882 - DNA, 120 bp, synthetic construct; identical to SEQ ID NO: 34928
  source 1..120: mol_type = other DNA

SEQ ID NO: 64883 - DNA, 120 bp, synthetic construct; identical to SEQ ID NO: 34929
  source 1..120: mol_type = other DNA

SEQ ID NO: 64884 - DNA, 120 bp, synthetic construct; identical to SEQ ID NO: 10187
  source 1..120: mol_type = other DNA

SEQ ID NO: 64885 - DNA, 120 bp, synthetic construct; identical to SEQ ID NO: 34931
  source 1..120: mol_type = other DNA

SEQ ID NO: 64886 - DNA, 120 bp, synthetic construct; identical to SEQ ID NO: 34932
  source 1..120: mol_type = other DNA

SEQ ID NO: 64887 - DNA, 120 bp, synthetic construct; identical to SEQ ID NO: 34933
  source 1..120: mol_type = other DNA

SEQ ID NO: 64888 - DNA, 120 bp, synthetic construct; identical to SEQ ID NO: 10188
  source 1..120: mol_type = other DNA

SEQ ID NO: 64889 - DNA, 120 bp, synthetic construct; identical to SEQ ID NO: 34935
  source 1..120: mol_type = other DNA

SEQ ID NO: 64890 - DNA, 120 bp, synthetic construct; identical to SEQ ID NO: 34936
  source 1..120: mol_type = other DNA

SEQ ID NO: 64891 - DNA, 120 bp, synthetic construct; identical to SEQ ID NO: 34937
  source 1..120: mol_type = other DNA

SEQ ID NO: 64892 - DNA, 120 bp, synthetic construct; identical to SEQ ID NO: 10189
  source 1..120: mol_type = other DNA

SEQ ID NO: 64893 - DNA, 120 bp, synthetic construct; identical to SEQ ID NO: 34939
  source 1..120: mol_type = other DNA

SEQ ID NO: 64894 - DNA, 120 bp, synthetic construct; identical to SEQ ID NO: 34940
  source 1..120: mol_type = other DNA

SEQ ID NO: 64895 - DNA, 120 bp, synthetic construct; identical to SEQ ID NO: 34941
  source 1..120: mol_type = other DNA

SEQ ID NO: 64896 - DNA, 120 bp, synthetic construct; identical to SEQ ID NO: 10190
  source 1..120: mol_type = other DNA

SEQ ID NO: 64897 - DNA, 120 bp, synthetic construct; identical to SEQ ID NO: 34943
  source 1..120: mol_type = other DNA

SEQ ID NO: 64898 - DNA, 120 bp, synthetic construct; identical to SEQ ID NO: 34944
  source 1..120: mol_type = other DNA

SEQ ID NO: 64899 - DNA, 120 bp, synthetic construct; identical to SEQ ID NO: 10191
  source 1..120: mol_type = other DNA

SEQ ID NO: 64900 - DNA, 120 bp, synthetic construct; identical to SEQ ID NO: 34946
  source 1..120: mol_type = other DNA

SEQ ID NO: 64901 - DNA, 120 bp, synthetic construct; identical to SEQ ID NO: 34947
  source 1..120: mol_type = other DNA

SEQ ID NO: 64902 - DNA, 120 bp, synthetic construct; identical to SEQ ID NO: 34948
  source 1..120: mol_type = other DNA

SEQ ID NO: 64903 - DNA, 120 bp, synthetic construct; identical to SEQ ID NO: 10192
  source 1..120: mol_type = other DNA

SEQ ID NO: 64904 - DNA, 120 bp, synthetic construct; identical to SEQ ID NO: 34950
  source 1..120: mol_type = other DNA

SEQ ID NO: 64905 - DNA, 120 bp, synthetic construct; identical to SEQ ID NO: 34951
  source 1..120: mol_type = other DNA

SEQ ID NO: 64906 - DNA, 120 bp, synthetic construct; identical to SEQ ID NO: 10193
  source 1..120: mol_type = other DNA

SEQ ID NO: 64907 - DNA, 120 bp, synthetic construct; identical to SEQ ID NO: 34953
  source 1..120: mol_type = other DNA

SEQ ID NO: 64908 - DNA, 120 bp, synthetic construct; identical to SEQ ID NO: 34954
  source 1..120: mol_type = other DNA

SEQ ID NO: 64909 - DNA, 120 bp, synthetic construct; identical to SEQ ID NO: 10194
  source 1..120: mol_type = other DNA

SEQ ID NO: 64910 - DNA, 120 bp, synthetic construct; identical to SEQ ID NO: 34956
  source 1..120: mol_type = other DNA

SEQ ID NO: 64911 - DNA, 120 bp, synthetic construct; identical to SEQ ID NO: 34957
  source 1..120: mol_type = other DNA

SEQ ID NO: 64912 - DNA, 120 bp, synthetic construct; identical to SEQ ID NO: 10195
  source 1..120: mol_type = other DNA

SEQ ID NO: 64913 - DNA, 120 bp, synthetic construct; identical to SEQ ID NO: 34959
  source 1..120: mol_type = other DNA

SEQ ID NO: 64914 - DNA, 120 bp, synthetic construct; identical to SEQ ID NO: 34960
  source 1..120: mol_type = other DNA

SEQ ID NO: 64915 - DNA, 120 bp, synthetic construct; identical to SEQ ID NO: 34961
  source 1..120: mol_type = other DNA

SEQ ID NO: 64916 - DNA, 120 bp, synthetic construct; identical to SEQ ID NO: 3013
  source 1..120: mol_type = other DNA

SEQ ID NO: 64917 - DNA, 120 bp, synthetic construct; identical to SEQ ID NO: 34963
  source 1..120: mol_type = other DNA

SEQ ID NO: 64918 - DNA, 120 bp, synthetic construct; identical to SEQ ID NO: 34964
  source 1..120: mol_type = other DNA

SEQ ID NO: 64919 - DNA, 120 bp, synthetic construct; identical to SEQ ID NO: 34965
  source 1..120: mol_type = other DNA

SEQ ID NO: 64920 - DNA, 120 bp, synthetic construct; identical to SEQ ID NO: 10197
  source 1..120: mol_type = other DNA

SEQ ID NO: 64921 - DNA, 120 bp, synthetic construct; identical to SEQ ID NO: 34967
  source 1..120: mol_type = other DNA

SEQ ID NO: 64922 - DNA, 120 bp, synthetic construct; identical to SEQ ID NO: 34968
  source 1..120: mol_type = other DNA

SEQ ID NO: 64923 - DNA, 120 bp, synthetic construct; identical to SEQ ID NO: 10198
  source 1..120: mol_type = other DNA

SEQ ID NO: 64924 - DNA, 120 bp, synthetic construct; identical to SEQ ID NO: 34970
  source 1..120: mol_type = other DNA

SEQ ID NO: 64925 - DNA, 120 bp, synthetic construct; identical to SEQ ID NO: 34971
  source 1..120: mol_type = other DNA

SEQ ID NO: 64926 - DNA, 120 bp, synthetic construct; identical to SEQ ID NO: 34972
  source 1..120: mol_type = other DNA

SEQ ID NO: 64927 - DNA, 120 bp, synthetic construct; identical to SEQ ID NO: 10199
  source 1..120: mol_type = other DNA

SEQ ID NO: 64928 - DNA, 120 bp, synthetic construct; identical to SEQ ID NO: 34974
  source 1..120: mol_type = other DNA

SEQ ID NO: 64929 - DNA, 120 bp, synthetic construct; identical to SEQ ID NO: 34975
  source 1..120: mol_type = other DNA

SEQ ID NO: 64930 - DNA, 120 bp, synthetic construct; identical to SEQ ID NO: 34976
  source 1..120: mol_type = other DNA

SEQ ID NO: 64931 - DNA, 120 bp, synthetic construct; identical to SEQ ID NO: 10200
  source 1..120: mol_type = other DNA

SEQ ID NO: 64932 - DNA, 120 bp, synthetic construct; identical to SEQ ID NO: 34978
  source 1..120: mol_type = other DNA

SEQ ID NO: 64933 - DNA, 120 bp, synthetic construct; identical to SEQ ID NO: 34979
  source 1..120: mol_type = other DNA

SEQ ID NO: 64934 - DNA, 120 bp, synthetic construct; identical to SEQ ID NO: 34980
  source 1..120: mol_type = other DNA

SEQ ID NO: 64935 - DNA, 120 bp, synthetic construct; identical to SEQ ID NO: 34981
  source 1..120: mol_type = other DNA

SEQ ID NO: 64936 - DNA, 120 bp, synthetic construct; identical to SEQ ID NO: 10201
  source 1..120: mol_type = other DNA

SEQ ID NO: 64937 - DNA, 120 bp, synthetic construct; identical to SEQ ID NO: 34983
  source 1..120: mol_type = other DNA

SEQ ID NO: 64938 - DNA, 120 bp, synthetic construct; identical to SEQ ID NO: 34984
  source 1..120: mol_type = other DNA

SEQ ID NO: 64939 - DNA, 120 bp, synthetic construct; identical to SEQ ID NO: 34985
  source 1..120: mol_type = other DNA

SEQ ID NO: 64940 - DNA, 120 bp, synthetic construct; identical to SEQ ID NO: 10202
  source 1..120: mol_type = other DNA

SEQ ID NO: 64941 - DNA, 120 bp, synthetic construct; identical to SEQ ID NO: 34987
  source 1..120: mol_type = other DNA

SEQ ID NO: 64942 - DNA, 120 bp, synthetic construct; identical to SEQ ID NO: 34988
  source 1..120: mol_type = other DNA

SEQ ID NO: 64943 - DNA, 120 bp, synthetic construct; identical to SEQ ID NO: 34989
  source 1..120: mol_type = other DNA

SEQ ID NO: 64944 - DNA, 120 bp, synthetic construct; identical to SEQ ID NO: 10203
  source 1..120: mol_type = other DNA

SEQ ID NO: 64945 - DNA, 120 bp, synthetic construct; identical to SEQ ID NO: 34991
  source 1..120: mol_type = other DNA

SEQ ID NO: 64946 - DNA, 120 bp, synthetic construct; identical to SEQ ID NO: 34992
  source 1..120: mol_type = other DNA

SEQ ID NO: 64947 - DNA, 120 bp, synthetic construct; identical to SEQ ID NO: 34993
  source 1..120: mol_type = other DNA

SEQ ID NO: 64948 - DNA, 120 bp, synthetic construct; identical to SEQ ID NO: 10204
  source 1..120: mol_type = other DNA

SEQ ID NO: 64949 - DNA, 120 bp, synthetic construct; identical to SEQ ID NO: 34995
  source 1..120: mol_type = other DNA

SEQ ID NO: 64950 - DNA, 120 bp, synthetic construct; identical to SEQ ID NO: 34996
  source 1..120: mol_type = other DNA

SEQ ID NO: 64951 - DNA, 120 bp, synthetic construct; identical to SEQ ID NO: 10205
  source 1..120: mol_type = other DNA

SEQ ID NO: 64952 - DNA, 120 bp, synthetic construct; identical to SEQ ID NO: 34998
  source 1..120: mol_type = other DNA

SEQ ID NO: 64953 - DNA, 120 bp, synthetic construct; identical to SEQ ID NO: 34999
  source 1..120: mol_type = other DNA

SEQ ID NO: 64954 - DNA, 120 bp, synthetic construct; identical to SEQ ID NO: 35000
  source 1..120: mol_type = other DNA

SEQ ID NO: 64955 - DNA, 120 bp, synthetic construct; identical to SEQ ID NO: 35001
  source 1..120: mol_type = other DNA

SEQ ID NO: 64956 - DNA, 120 bp, synthetic construct; identical to SEQ ID NO: 10206
  source 1..120: mol_type = other DNA

SEQ ID NO: 64957 - DNA, 120 bp, synthetic construct; identical to SEQ ID NO: 35003
  source 1..120: mol_type = other DNA

SEQ ID NO: 64958 - DNA, 120 bp, synthetic construct; identical to SEQ ID NO: 35004
  source 1..120: mol_type = other DNA

SEQ ID NO: 64959 - DNA, 120 bp, synthetic construct; identical to SEQ ID NO: 35005
  source 1..120: mol_type = other DNA

SEQ ID NO: 64960 - DNA, 120 bp, synthetic construct; identical to SEQ ID NO: 10207
  source 1..120: mol_type = other DNA

SEQ ID NO: 64961 - DNA, 120 bp, synthetic construct; identical to SEQ ID NO: 35007
  source 1..120: mol_type = other DNA

SEQ ID NO: 64962 - DNA, 120 bp, synthetic construct; identical to SEQ ID NO: 35008
  source 1..120: mol_type = other DNA

SEQ ID NO: 64963 - DNA, 120 bp, synthetic construct; identical to SEQ ID NO: 35009
  source 1..120: mol_type = other DNA

SEQ ID NO: 64964 - DNA, 120 bp, synthetic construct; identical to SEQ ID NO: 10208
  source 1..120: mol_type = other DNA

SEQ ID NO: 64965 - DNA, 120 bp, synthetic construct; identical to SEQ ID NO: 3025
  source 1..120: mol_type = other DNA

SEQ ID NO: 64966 - DNA, 120 bp, synthetic construct; identical to SEQ ID NO: 35012
  source 1..120: mol_type = other DNA

SEQ ID NO: 64967 - DNA, 120 bp, synthetic construct; identical to SEQ ID NO: 35013
  source 1..120: mol_type = other DNA

SEQ ID NO: 64968 - DNA, 120 bp, synthetic construct; identical to SEQ ID NO: 10209
  source 1..120: mol_type = other DNA

SEQ ID NO: 64969 - DNA, 120 bp, synthetic construct; identical to SEQ ID NO: 35015
  source 1..120: mol_type = other DNA

SEQ ID NO: 64970 - DNA, 120 bp, synthetic construct; identical to SEQ ID NO: 35016
  source 1..120: mol_type = other DNA

SEQ ID NO: 64971 - DNA, 120 bp, synthetic construct; identical to SEQ ID NO: 35017
  source 1..120: mol_type = other DNA

SEQ ID NO: 64972 - DNA, 120 bp, synthetic construct; identical to SEQ ID NO: 10210
  source 1..120: mol_type = other DNA

SEQ ID NO: 64973 - DNA, 120 bp, synthetic construct; identical to SEQ ID NO: 35019
  source 1..120: mol_type = other DNA

SEQ ID NO: 64974 - DNA, 120 bp, synthetic construct; identical to SEQ ID NO: 35020
  source 1..120: mol_type = other DNA

SEQ ID NO: 64975 - DNA, 120 bp, synthetic construct; identical to SEQ ID NO: 35021
  source 1..120: mol_type = other DNA

SEQ ID NO: 64976 - DNA, 120 bp, synthetic construct; identical to SEQ ID NO: 10211
  source 1..120: mol_type = other DNA

SEQ ID NO: 64977 - DNA, 120 bp, synthetic construct; identical to SEQ ID NO: 35023
  source 1..120: mol_type = other DNA

SEQ ID NO: 64978 - DNA, 120 bp, synthetic construct; identical to SEQ ID NO: 35024
  source 1..120: mol_type = other DNA

SEQ ID NO: 64979 - DNA, 120 bp, synthetic construct; identical to SEQ ID NO: 35025
  source 1..120: mol_type = other DNA

SEQ ID NO: 64980 - DNA, 120 bp, synthetic construct; identical to SEQ ID NO: 10212
  source 1..120: mol_type = other DNA

SEQ ID NO: 64981 - DNA, 120 bp, synthetic construct; identical to SEQ ID NO: 35027
  source 1..120: mol_type = other DNA

SEQ ID NO: 64982 - DNA, 120 bp, synthetic construct; identical to SEQ ID NO: 35028
  source 1..120: mol_type = other DNA

SEQ ID NO: 64983 - DNA, 120 bp, synthetic construct; identical to SEQ ID NO: 10213
  source 1..120: mol_type = other DNA

SEQ ID NO: 64984 - DNA, 120 bp, synthetic construct; identical to SEQ ID NO: 35030
  source 1..120: mol_type = other DNA

SEQ ID NO: 64985 - DNA, 120 bp, synthetic construct; identical to SEQ ID NO: 35031
  source 1..120: mol_type = other DNA

SEQ ID NO: 64986 - DNA, 120 bp, synthetic construct; identical to SEQ ID NO: 35032
  source 1..120: mol_type = other DNA

SEQ ID NO: 64987 - DNA, 120 bp, synthetic construct; identical to SEQ ID NO: 35033
  source 1..120: mol_type = other DNA

SEQ ID NO: 64988 - DNA, 120 bp, synthetic construct; identical to SEQ ID NO: 10214
  source 1..120: mol_type = other DNA

SEQ ID NO: 64989 - DNA, 120 bp, synthetic construct; identical to SEQ ID NO: 35035
  source 1..120: mol_type = other DNA

SEQ ID NO: 64990 - DNA, 120 bp, synthetic construct; identical to SEQ ID NO: 35036
  source 1..120: mol_type = other DNA

SEQ ID NO: 64991 - DNA, 120 bp, synthetic construct; identical to SEQ ID NO: 10215
  source 1..120: mol_type = other DNA

SEQ ID NO: 64992 - DNA, 120 bp, synthetic construct; identical to SEQ ID NO: 35038
  source 1..120: mol_type = other DNA

SEQ ID NO: 64993 - DNA, 120 bp, synthetic construct; identical to SEQ ID NO: 35039
  source 1..120: mol_type = other DNA

SEQ ID NO: 64994 - DNA, 120 bp, synthetic construct; identical to SEQ ID NO: 35040
  source 1..120: mol_type = other DNA

SEQ ID NO: 64995 - DNA, 120 bp, synthetic construct; identical to SEQ ID NO: 35041
  source 1..120: mol_type = other DNA

SEQ ID NO: 64996 - DNA, 120 bp, synthetic construct; identical to SEQ ID NO: 10216
  source 1..120: mol_type = other DNA

SEQ ID NO: 64997 - DNA, 120 bp, synthetic construct; identical to SEQ ID NO: 35043
  source 1..120: mol_type = other DNA

SEQ ID NO: 64998 - DNA, 120 bp, synthetic construct; identical to SEQ ID NO: 35044
  source 1..120: mol_type = other DNA

SEQ ID NO: 64999 - DNA, 120 bp, synthetic construct; identical to SEQ ID NO: 35045
  source 1..120: mol_type = other DNA

SEQ ID NO: 65000 - DNA, 120 bp, synthetic construct; identical to SEQ ID NO: 10217
  source 1..120: mol_type = other DNA

SEQ ID NO: 65001 - DNA, 120 bp, synthetic construct; identical to SEQ ID NO: 35047
  source 1..120: mol_type = other DNA

SEQ ID NO: 65002 - DNA, 120 bp, synthetic construct; identical to SEQ ID NO: 35048
  source 1..120: mol_type = other DNA

SEQ ID NO: 65003 - DNA, 120 bp, synthetic construct; identical to SEQ ID NO: 10218
  source 1..120: mol_type = other DNA

SEQ ID NO: 65004 - DNA, 120 bp, synthetic construct; identical to SEQ ID NO: 35050
  source 1..120: mol_type = other DNA

SEQ ID NO: 65005 - DNA, 120 bp, synthetic construct; identical to SEQ ID NO: 3034
  source 1..120: mol_type = other DNA

SEQ ID NO: 65006 - DNA, 120 bp, synthetic construct; identical to SEQ ID NO: 35052
  source 1..120: mol_type = other DNA

SEQ ID NO: 65007 - DNA, 120 bp, synthetic construct; identical to SEQ ID NO: 10219
  source 1..120: mol_type = other DNA

SEQ ID NO: 65008 - DNA, 120 bp, synthetic construct; identical to SEQ ID NO: 35054
  source 1..120: mol_type = other DNA

SEQ ID NO: 65009 - DNA, 120 bp, synthetic construct; identical to SEQ ID NO: 35055
  source 1..120: mol_type = other DNA

SEQ ID NO: 65010 - DNA, 120 bp, synthetic construct; identical to SEQ ID NO: 35056
  source 1..120: mol_type = other DNA

SEQ ID NO: 65011 - DNA, 120 bp, synthetic construct; identical to SEQ ID NO: 10220
  source 1..120: mol_type = other DNA

SEQ ID NO: 65012 - DNA, 120 bp, synthetic construct; identical to SEQ ID NO: 35058
  source 1..120: mol_type = other DNA

SEQ ID NO: 65013 - DNA, 120 bp, synthetic construct; identical to SEQ ID NO: 35059
  source 1..120: mol_type = other DNA

SEQ ID NO: 65014 - DNA, 120 bp, synthetic construct; identical to SEQ ID NO: 35060
  source 1..120: mol_type = other DNA

SEQ ID NO: 65015 - DNA, 120 bp, synthetic construct; identical to SEQ ID NO: 35061
  source 1..120: mol_type = other DNA

SEQ ID NO: 65016 - DNA, 120 bp, synthetic construct; identical to SEQ ID NO: 10221
  source 1..120: mol_type = other DNA

SEQ ID NO: 65017 - DNA, 120 bp, synthetic construct; identical to SEQ ID NO: 35063
  source 1..120: mol_type = other DNA

SEQ ID NO: 65018 - DNA, 120 bp, synthetic construct; identical to SEQ ID NO: 35064
  source 1..120: mol_type = other DNA

SEQ ID NO: 65019 - DNA, 120 bp, synthetic construct; identical to SEQ ID NO: 35065
  source 1..120: mol_type = other DNA

SEQ ID NO: 65020 - DNA, 120 bp, synthetic construct; identical to SEQ ID NO: 10222
  source 1..120: mol_type = other DNA

SEQ ID NO: 65021 - DNA, 120 bp, synthetic construct; identical to SEQ ID NO: 35067
  source 1..120: mol_type = other DNA

SEQ ID NO: 65022 - DNA, 120 bp, synthetic construct; identical to SEQ ID NO: 10223
  source 1..120: mol_type = other DNA

SEQ ID NO: 65023 - DNA, 120 bp, synthetic construct; identical to SEQ ID NO: 3038
  source 1..120: mol_type = other DNA

SEQ ID NO: 65024 - DNA, 120 bp, synthetic construct; identical to SEQ ID NO: 35070
  source 1..120: mol_type = other DNA

SEQ ID NO: 65025 - DNA, 120 bp, synthetic construct; identical to SEQ ID NO: 35071
  source 1..120: mol_type = other DNA

SEQ ID NO: 65026 - DNA, 120 bp, synthetic construct; identical to SEQ ID NO: 35072
  source 1..120: mol_type = other DNA

SEQ ID NO: 65027 - DNA, 120 bp, synthetic construct; identical to SEQ ID NO: 10224
  source 1..120: mol_type = other DNA

SEQ ID NO: 65028 - DNA, 120 bp, synthetic construct; identical to SEQ ID NO: 35074
  source 1..120: mol_type = other DNA

SEQ ID NO: 65029 - DNA, 120 bp, synthetic construct; identical to SEQ ID NO: 35075
  source 1..120: mol_type = other DNA

SEQ ID NO: 65030 - DNA, 120 bp, synthetic construct; identical to SEQ ID NO: 10225
  source 1..120: mol_type = other DNA

SEQ ID NO: 65031 - DNA, 120 bp, synthetic construct; identical to SEQ ID NO: 35077
  source 1..120: mol_type = other DNA

SEQ ID NO: 65032 - DNA, 120 bp, synthetic construct; identical to SEQ ID NO: 35078
  source 1..120: mol_type = other DNA

SEQ ID NO: 65033 - DNA, 120 bp, synthetic construct; identical to SEQ ID NO: 35079
  source 1..120: mol_type = other DNA

SEQ ID NO: 65034 - DNA, 120 bp, synthetic construct; identical to SEQ ID NO: 35080
  source 1..120: mol_type = other DNA

SEQ ID NO: 65035 - DNA, 120 bp, synthetic construct; identical to SEQ ID NO: 10226
  source 1..120: mol_type = other DNA

SEQ ID NO: 65036 - DNA, 120 bp, synthetic construct; identical to SEQ ID NO: 35082
  source 1..120: mol_type = other DNA

SEQ ID NO: 65037 - DNA, 120 bp, synthetic construct; identical to SEQ ID NO: 35083
  source 1..120: mol_type = other DNA

SEQ ID NO: 65038 - DNA, 120 bp, synthetic construct; identical to SEQ ID NO: 10227
  source 1..120: mol_type = other DNA

SEQ ID NO: 65039 - DNA, 120 bp, synthetic construct; identical to SEQ ID NO: 35085
  source 1..120: mol_type = other DNA

SEQ ID NO: 65040 - DNA, 120 bp, synthetic construct; identical to SEQ ID NO: 35086
  source 1..120: mol_type = other DNA

SEQ ID NO: 65041 - DNA, 120 bp, synthetic construct; identical to SEQ ID NO: 35087
  source 1..120: mol_type = other DNA

SEQ ID NO: 65042 - DNA, 120 bp, synthetic construct; identical to SEQ ID NO: 10228
  source 1..120: mol_type = other DNA

SEQ ID NO: 65043 - DNA, 120 bp, synthetic construct; identical to SEQ ID NO: 35089
  source 1..120: mol_type = other DNA

SEQ ID NO: 65044 - DNA, 120 bp, synthetic construct; identical to SEQ ID NO: 35090
  source 1..120: mol_type = other DNA

SEQ ID NO: 65045 - DNA, 120 bp, synthetic construct; identical to SEQ ID NO: 35091
  source 1..120: mol_type = other DNA

SEQ ID NO: 65046 - DNA, 120 bp, synthetic construct; identical to SEQ ID NO: 10229
  source 1..120: mol_type = other DNA

SEQ ID NO: 65047 - DNA, 120 bp, synthetic construct; identical to SEQ ID NO: 35093
  source 1..120: mol_type = other DNA

SEQ ID NO: 65048 - DNA, 120 bp, synthetic construct; identical to SEQ ID NO: 35094
  source 1..120: mol_type = other DNA

SEQ ID NO: 65049 - DNA, 120 bp, synthetic construct; identical to SEQ ID NO: 35095
  source 1..120: mol_type = other DNA

SEQ ID NO: 65050 - DNA, 120 bp, synthetic construct; identical to SEQ ID NO: 10230
  source 1..120: mol_type = other DNA

SEQ ID NO: 65051 - DNA, 120 bp, synthetic construct; identical to SEQ ID NO: 35097
  source 1..120: mol_type = other DNA

SEQ ID NO: 65052 - DNA, 120 bp, synthetic construct; identical to SEQ ID NO: 35098
  source 1..120: mol_type = other DNA

SEQ ID NO: 65053 - DNA, 120 bp, synthetic construct; identical to SEQ ID NO: 10231
  source 1..120: mol_type = other DNA

SEQ ID NO: 65054 - DNA, 120 bp, synthetic construct; identical to SEQ ID NO: 35100
  source 1..120: mol_type = other DNA

SEQ ID NO: 65055 - DNA, 120 bp, synthetic construct; identical to SEQ ID NO: 35101
  source 1..120: mol_type = other DNA

SEQ ID NO: 65056 - DNA, 120 bp, synthetic construct; identical to SEQ ID NO: 35102
  source 1..120: mol_type = other DNA

SEQ ID NO: 65057 - DNA, 120 bp, synthetic construct; identical to SEQ ID NO: 35103
  source 1..120: mol_type = other DNA

SEQ ID NO: 65058 - DNA, 120 bp, synthetic construct; identical to SEQ ID NO: 10232
  source 1..120: mol_type = other DNA

SEQ ID NO: 65059 - DNA, 120 bp, synthetic construct; identical to SEQ ID NO: 35105
  source 1..120: mol_type = other DNA

SEQ ID NO: 65060 - DNA, 120 bp, synthetic construct; identical to SEQ ID NO: 35106
  source 1..120: mol_type = other DNA

SEQ ID NO: 65061 - DNA, 120 bp, synthetic construct; identical to SEQ ID NO: 35107
  source 1..120: mol_type = other DNA

SEQ ID NO: 65062 - DNA, 120 bp, synthetic construct; identical to SEQ ID NO: 35108
  source 1..120: mol_type = other DNA

SEQ ID NO: 65063 - DNA, 120 bp, synthetic construct; identical to SEQ ID NO: 10233
  source 1..120: mol_type = other DNA

SEQ ID NO: 65064 - DNA, 120 bp, synthetic construct; identical to SEQ ID NO: 35110
  source 1..120: mol_type = other DNA

SEQ ID NO: 65065 - DNA, 120 bp, synthetic construct; identical to SEQ ID NO: 35111
  source 1..120: mol_type = other DNA

SEQ ID NO: 65066 - DNA, 120 bp, synthetic construct; identical to SEQ ID NO: 10234
  source 1..120: mol_type = other DNA

SEQ ID NO: 65067 - DNA, 120 bp, synthetic construct; identical to SEQ ID NO: 35113
  source 1..120: mol_type = other DNA

SEQ ID NO: 65068 - DNA, 120 bp, synthetic construct; identical to SEQ ID NO: 35114
  source 1..120: mol_type = other DNA

SEQ ID NO: 65069 - DNA, 120 bp, synthetic construct; identical to SEQ ID NO: 35115
  source 1..120: mol_type = other DNA

SEQ ID NO: 65070 - DNA, 120 bp, synthetic construct; identical to SEQ ID NO: 10235
  source 1..120: mol_type = other DNA

SEQ ID NO: 65071 - DNA, 120 bp, synthetic construct; identical to SEQ ID NO: 35117
  source 1..120: mol_type = other DNA

SEQ ID NO: 65072 - DNA, 120 bp, synthetic construct; identical to SEQ ID NO: 35118
  source 1..120: mol_type = other DNA

SEQ ID NO: 65073 - DNA, 120 bp, synthetic construct; identical to SEQ ID NO: 35119
  source 1..120: mol_type = other DNA

SEQ ID NO: 65074 - DNA, 120 bp, synthetic construct; identical to SEQ ID NO: 35120
  source 1..120: mol_type = other DNA

SEQ ID NO: 65075 - DNA, 120 bp, synthetic construct; identical to SEQ ID NO: 10236
  source 1..120: mol_type = other DNA

SEQ ID NO: 65076 - DNA, 120 bp, synthetic construct; identical to SEQ ID NO: 35122
  source 1..120: mol_type = other DNA

SEQ ID NO: 65077 - DNA, 120 bp, synthetic construct; identical to SEQ ID NO: 35123
  source 1..120: mol_type = other DNA

SEQ ID NO: 65078 - DNA, 120 bp, synthetic construct; identical to SEQ ID NO: 35124
  source 1..120: mol_type = other DNA

SEQ ID NO: 65079 - DNA, 120 bp, synthetic construct; identical to SEQ ID NO: 10237
  source 1..120: mol_type = other DNA

SEQ ID NO: 65080 - DNA, 120 bp, synthetic construct; identical to SEQ ID NO: 35126
  source 1..120: mol_type = other DNA

SEQ ID NO: 65081 - DNA, 120 bp, synthetic construct; identical to SEQ ID NO: 35127
  source 1..120: mol_type = other DNA

SEQ ID NO: 65082 - DNA, 120 bp, synthetic construct; identical to SEQ ID NO: 35128
  source 1..120: mol_type = other DNA

SEQ ID NO: 65083 - DNA, 120 bp, synthetic construct; identical to SEQ ID NO: 10238
  source 1..120: mol_type = other DNA

SEQ ID NO: 65084 - DNA, 120 bp, synthetic construct; identical to SEQ ID NO: 35130
  source 1..120: mol_type = other DNA

SEQ ID NO: 65085 - DNA, 120 bp, synthetic construct; identical to SEQ ID NO: 35131
  source 1..120: mol_type = other DNA

SEQ ID NO: 65086 - DNA, 120 bp, synthetic construct; identical to SEQ ID NO: 10239
  source 1..120: mol_type = other DNA

SEQ ID NO: 65087 - DNA, 120 bp, synthetic construct; identical to SEQ ID NO: 35133
  source 1..120: mol_type = other DNA

SEQ ID NO: 65088 - DNA, 120 bp, synthetic construct; identical to SEQ ID NO: 35134
  source 1..120: mol_type = other DNA

SEQ ID NO: 65089 - DNA, 120 bp, synthetic construct; identical to SEQ ID NO: 35135
  source 1..120: mol_type = other DNA

SEQ ID NO: 65090 - DNA, 120 bp, synthetic construct; identical to SEQ ID NO: 10240
  source 1..120: mol_type = other DNA

SEQ ID NO: 65091 - DNA, 120 bp, synthetic construct; identical to SEQ ID NO: 35137
  source 1..120: mol_type = other DNA

SEQ ID NO: 65092 - DNA, 120 bp, synthetic construct; identical to SEQ ID NO: 35138
  source 1..120: mol_type = other DNA

SEQ ID NO: 65093 - DNA, 120 bp, synthetic construct; identical to SEQ ID NO: 35139
  source 1..120: mol_type = other DNA

SEQ ID NO: 65094 - DNA, 120 bp, synthetic construct; identical to SEQ ID NO: 35140
  source 1..120: mol_type = other DNA

SEQ ID NO: 65095 - DNA, 120 bp, synthetic construct; identical to SEQ ID NO: 10241
  source 1..120: mol_type = other DNA

SEQ ID NO: 65096 - DNA, 120 bp, synthetic construct; identical to SEQ ID NO: 35142
  source 1..120: mol_type = other DNA

SEQ ID NO: 65097 - DNA, 120 bp, synthetic construct; identical to SEQ ID NO: 35143
  source 1..120: mol_type = other DNA

SEQ ID NO: 65098 - DNA, 120 bp, synthetic construct; identical to SEQ ID NO: 35144
  source 1..120: mol_type = other DNA

SEQ ID NO: 65099 - DNA, 120 bp, synthetic construct; identical to SEQ ID NO: 10242
  source 1..120: mol_type = other DNA

SEQ ID NO: 65100 - DNA, 120 bp, synthetic construct; identical to SEQ ID NO: 35146
  source 1..120: mol_type = other DNA

SEQ ID NO: 65101 - DNA, 120 bp, synthetic construct; identical to SEQ ID NO: 35147
  source 1..120: mol_type = other DNA

SEQ ID NO: 65102 - DNA, 120 bp, synthetic construct; identical to SEQ ID NO: 35148
  source 1..120: mol_type = other DNA

SEQ ID NO: 65103 - DNA, 120 bp, synthetic construct; identical to SEQ ID NO: 10243
  source 1..120: mol_type = other DNA

SEQ ID NO: 65104 - DNA, 120 bp, synthetic construct; identical to SEQ ID NO: 35150
  source 1..120: mol_type = other DNA

SEQ ID NO: 65105 - DNA, 120 bp, synthetic construct; identical to SEQ ID NO: 35151
  source 1..120: mol_type = other DNA

SEQ ID NO: 65106 - DNA, 120 bp, synthetic construct; identical to SEQ ID NO: 35152
  source 1..120: mol_type = other DNA

SEQ ID NO: 65107 - DNA, 120 bp, synthetic construct; identical to SEQ ID NO: 10244
  source 1..120: mol_type = other DNA

SEQ ID NO: 65108 - DNA, 120 bp, synthetic construct; identical to SEQ ID NO: 35154
  source 1..120: mol_type = other DNA

SEQ ID NO: 65109 - DNA, 120 bp, synthetic construct; identical to SEQ ID NO: 35155
  source 1..120: mol_type = other DNA

SEQ ID NO: 65110 - DNA, 120 bp, synthetic construct; identical to SEQ ID NO: 10245
  source 1..120: mol_type = other DNA

SEQ ID NO: 65111 - DNA, 120 bp, synthetic construct; identical to SEQ ID NO: 35157
  source 1..120: mol_type = other DNA

SEQ ID NO: 65112 - DNA, 120 bp, synthetic construct; identical to SEQ ID NO: 35158
  source 1..120: mol_type = other DNA

SEQ ID NO: 65113 - DNA, 120 bp, synthetic construct; identical to SEQ ID NO: 35159
  source 1..120: mol_type = other DNA

SEQ ID NO: 65114 - DNA, 120 bp, synthetic construct; identical to SEQ ID NO: 35160
  source 1..120: mol_type = other DNA

SEQ ID NO: 65115 - DNA, 120 bp, synthetic construct; identical to SEQ ID NO: 10246
  source 1..120: mol_type = other DNA

SEQ ID NO: 65116 - DNA, 120 bp, synthetic construct; identical to SEQ ID NO: 35162
  source 1..120: mol_type = other DNA

SEQ ID NO: 65117 - DNA, 120 bp, synthetic construct; identical to SEQ ID NO: 35163
  source 1..120: mol_type = other DNA

SEQ ID NO: 65118 - DNA, 120 bp, synthetic construct; identical to SEQ ID NO: 35164
  source 1..120: mol_type = other DNA

SEQ ID NO: 65119 - DNA, 120 bp, synthetic construct; identical to SEQ ID NO: 10247
  source 1..120: mol_type = other DNA

SEQ ID NO: 65120 - DNA, 120 bp, synthetic construct; identical to SEQ ID NO: 35166
  source 1..120: mol_type = other DNA

SEQ ID NO: 65121 - DNA, 120 bp, synthetic construct; identical to SEQ ID NO: 35167
  source 1..120: mol_type = other DNA

SEQ ID NO: 65122 - DNA, 120 bp, synthetic construct; identical to SEQ ID NO: 35168
  source 1..120: mol_type = other DNA

SEQ ID NO: 65123 - DNA, 120 bp, synthetic construct; identical to SEQ ID NO: 10248
  source 1..120: mol_type = other DNA

SEQ ID NO: 65124 - DNA, 120 bp, synthetic construct; identical to SEQ ID NO: 35170
  source 1..120: mol_type = other DNA

SEQ ID NO: 65125 - DNA, 120 bp, synthetic construct; identical to SEQ ID NO: 35171
  source 1..120: mol_type = other DNA

SEQ ID NO: 65126 - DNA, 120 bp, synthetic construct; identical to SEQ ID NO: 35172
  source 1..120: mol_type = other DNA

SEQ ID NO: 65127 - DNA, 120 bp, synthetic construct; identical to SEQ ID NO: 10249
  source 1..120: mol_type = other DNA

SEQ ID NO: 65128 - DNA, 120 bp, synthetic construct; identical to SEQ ID NO: 35174
  source 1..120: mol_type = other DNA

SEQ ID NO: 65129 - DNA, 120 bp, synthetic construct; identical to SEQ ID NO: 35175
  source 1..120: mol_type = other DNA

SEQ ID NO: 65130 - DNA, 120 bp, synthetic construct; identical to SEQ ID NO: 10250
  source 1..120: mol_type = other DNA

SEQ ID NO: 65131 - DNA, 120 bp, synthetic construct; identical to SEQ ID NO: 35177
  source 1..120: mol_type = other DNA

SEQ ID NO: 65132 - DNA, 120 bp, synthetic construct; identical to SEQ ID NO: 35178
  source 1..120: mol_type = other DNA

SEQ ID NO: 65133 - DNA, 120 bp, synthetic construct; identical to SEQ ID NO: 35179
  source 1..120: mol_type = other DNA

SEQ ID NO: 65134 - DNA, 120 bp, synthetic construct; identical to SEQ ID NO: 35180
  source 1..120: mol_type = other DNA

SEQ ID NO: 65135 - DNA, 120 bp, synthetic construct; identical to SEQ ID NO: 10251
  source 1..120: mol_type = other DNA

SEQ ID NO: 65136 - DNA, 120 bp, synthetic construct; identical to SEQ ID NO: 35182
  source 1..120: mol_type = other DNA

SEQ ID NO: 65137 - DNA, 120 bp, synthetic construct; identical to SEQ ID NO: 35183
  source 1..120: mol_type = other DNA

SEQ ID NO: 65138 - DNA, 120 bp, synthetic construct; identical to SEQ ID NO: 10252
  source 1..120: mol_type = other DNA

SEQ ID NO: 65139 - DNA, 120 bp, synthetic construct; identical to SEQ ID NO: 35185
  source 1..120: mol_type = other DNA

SEQ ID NO: 65140 - DNA, 120 bp, synthetic construct; identical to SEQ ID NO: 35186
  source 1..120: mol_type = other DNA

SEQ ID NO: 65141 - DNA, 120 bp, synthetic construct; identical to SEQ ID NO: 35187
  source 1..120: mol_type = other DNA

SEQ ID NO: 65142 - DNA, 120 bp, synthetic construct; identical to SEQ ID NO: 10253
  source 1..120: mol_type = other DNA

SEQ ID NO: 65143 - DNA, 120 bp, synthetic construct; identical to SEQ ID NO: 35189
  source 1..120: mol_type = other DNA

SEQ ID NO: 65144 - DNA, 120 bp, synthetic construct; identical to SEQ ID NO: 35190
  source 1..120: mol_type = other DNA

SEQ ID NO: 65145 - DNA, 120 bp, synthetic construct; identical to SEQ ID NO: 35191
  source 1..120: mol_type = other DNA

SEQ ID NO: 65146 - DNA, 120 bp, synthetic construct; identical to SEQ ID NO: 10254
  source 1..120: mol_type = other DNA

SEQ ID NO: 65147 - DNA, 120 bp, synthetic construct; identical to SEQ ID NO: 35193
  source 1..120: mol_type = other DNA

SEQ ID NO: 65148 - DNA, 120 bp, synthetic construct; identical to SEQ ID NO: 35194
  source 1..120: mol_type = other DNA

SEQ ID NO: 65149 - DNA, 120 bp, synthetic construct; identical to SEQ ID NO: 35195
  source 1..120: mol_type = other DNA

SEQ ID NO: 65150 - DNA, 120 bp, synthetic construct; identical to SEQ ID NO: 10255
  source 1..120: mol_type = other DNA

SEQ ID NO: 65151 - DNA, 120 bp, synthetic construct; identical to SEQ ID NO: 35197
  source 1..120: mol_type = other DNA

SEQ ID NO: 65152 - DNA, 120 bp, synthetic construct; identical to SEQ ID NO: 35198
  source 1..120: mol_type = other DNA

SEQ ID NO: 65153 - DNA, 120 bp, synthetic construct; identical to SEQ ID NO: 35199
  source 1..120: mol_type = other DNA

SEQ ID NO: 65154 - DNA, 120 bp, synthetic construct; identical to SEQ ID NO: 35200
  source 1..120: mol_type = other DNA

SEQ ID NO: 65155 - DNA, 120 bp, synthetic construct; identical to SEQ ID NO: 10256
  source 1..120: mol_type = other DNA

SEQ ID NO: 65156 - DNA, 120 bp, synthetic construct; identical to SEQ ID NO: 35202
  source 1..120: mol_type = other DNA

SEQ ID NO: 65157 - DNA, 120 bp, synthetic construct; identical to SEQ ID NO: 35203
  source 1..120: mol_type = other DNA

SEQ ID NO: 65158 - DNA, 120 bp, synthetic construct; identical to SEQ ID NO: 10257
  source 1..120: mol_type = other DNA

SEQ ID NO: 65159 - DNA, 120 bp, synthetic construct; identical to SEQ ID NO: 35205
  source 1..120: mol_type = other DNA

SEQ ID NO: 65160 - DNA, 120 bp, synthetic construct; identical to SEQ ID NO: 35206
  source 1..120: mol_type = other DNA

SEQ ID NO: 65161 - DNA, 120 bp, synthetic construct; identical to SEQ ID NO: 35207
  source 1..120: mol_type = other DNA

SEQ ID NO: 65162 - DNA, 120 bp, synthetic construct; identical to SEQ ID NO: 35208
  source 1..120: mol_type = other DNA

SEQ ID NO: 65163 - DNA, 120 bp, synthetic construct; identical to SEQ ID NO: 10258
  source 1..120: mol_type = other DNA

SEQ ID NO: 65164 - DNA, 120 bp, synthetic construct; identical to SEQ ID NO: 35210
  source 1..120: mol_type = other DNA

SEQ ID NO: 65165 - DNA, 120 bp, synthetic construct; identical to SEQ ID NO: 35211
  source 1..120: mol_type = other DNA

SEQ ID NO: 65166 - DNA, 120 bp, synthetic construct; identical to SEQ ID NO: 10259
  source 1..120: mol_type = other DNA

SEQ ID NO: 65167 - DNA, 120 bp, synthetic construct; identical to SEQ ID NO: 35213
  source 1..120: mol_type = other DNA

SEQ ID NO: 65168 - DNA, 120 bp, synthetic construct; identical to SEQ ID NO: 35214
  source 1..120: mol_type = other DNA

SEQ ID NO: 65169 - DNA, 120 bp, synthetic construct; identical to SEQ ID NO: 35215
  source 1..120: mol_type = other DNA

SEQ ID NO: 65170 - DNA, 120 bp, synthetic construct; identical to SEQ ID NO: 35216
  source 1..120: mol_type = other DNA

SEQ ID NO: 65171 - DNA, 120 bp, synthetic construct; identical to SEQ ID NO: 10260
  source 1..120: mol_type = other DNA

SEQ ID NO: 65172 - DNA, 120 bp, synthetic construct; identical to SEQ ID NO: 35218
  source 1..120: mol_type = other DNA

SEQ ID NO: 65173 - DNA, 120 bp, synthetic construct; identical to SEQ ID NO: 35219
  source 1..120: mol_type = other DNA

SEQ ID NO: 65174 - DNA, 120 bp, synthetic construct; identical to SEQ ID NO: 35220
  source 1..120: mol_type = other DNA

SEQ ID NO: 65175 - DNA, 120 bp, synthetic construct; identical to SEQ ID NO: 10261
  source 1..120: mol_type = other DNA

SEQ ID NO: 65176 - DNA, 120 bp, synthetic construct; identical to SEQ ID NO: 35222
  source 1..120: mol_type = other DNA

SEQ ID NO: 65177 - DNA, 120 bp, synthetic construct; identical to SEQ ID NO: 35223
  source 1..120: mol_type = other DNA

SEQ ID NO: 65178 - DNA, 120 bp, synthetic construct; identical to SEQ ID NO: 35224
  source 1..120: mol_type = other DNA

SEQ ID NO: 65179 - DNA, 120 bp, synthetic construct; identical to SEQ ID NO: 10262
  source 1..120: mol_type = other DNA

SEQ ID NO: 65180 - DNA, 120 bp, synthetic construct; identical to SEQ ID NO: 35226
  source 1..120: mol_type = other DNA

SEQ ID NO: 65181 - DNA, 120 bp, synthetic construct; identical to SEQ ID NO: 35227
  source 1..120: mol_type = other DNA

SEQ ID NO: 65182 - DNA, 120 bp, synthetic construct; identical to SEQ ID NO: 10263
  source 1..120: mol_type = other DNA

SEQ ID NO: 65183 - DNA, 120 bp, synthetic construct; identical to SEQ ID NO: 35229
  source 1..120: mol_type = other DNA

SEQ ID NO: 65184 - DNA, 120 bp, synthetic construct; identical to SEQ ID NO: 35230
  source 1..120: mol_type = other DNA

SEQ ID NO: 65185 - DNA, 120 bp, synthetic construct; identical to SEQ ID NO: 35231
  source 1..120: mol_type = other DNA

SEQ ID NO: 65186 - DNA, 120 bp, synthetic construct; identical to SEQ ID NO: 10264
  source 1..120: mol_type = other DNA

SEQ ID NO: 65187 - DNA, 120 bp, synthetic construct; identical to SEQ ID NO: 35233
  source 1..120: mol_type = other DNA

SEQ ID NO: 65188 - DNA, 120 bp, synthetic construct; identical to SEQ ID NO: 35234
  source 1..120: mol_type = other DNA

SEQ ID NO: 65189 - DNA, 120 bp, synthetic construct; identical to SEQ ID NO: 35235
  source 1..120: mol_type = other DNA

SEQ ID NO: 65190 - DNA, 120 bp, synthetic construct; identical to SEQ ID NO: 35236
  source 1..120: mol_type = other DNA

SEQ ID NO: 65191 - DNA, 120 bp, synthetic construct; identical to SEQ ID NO: 10265
  source 1..120: mol_type = other DNA

SEQ ID NO: 65192 - DNA, 120 bp, synthetic construct; identical to SEQ ID NO: 35238
  source 1..120: mol_type = other DNA

SEQ ID NO: 65193 - DNA, 120 bp, synthetic construct; identical to SEQ ID NO: 35239
  source 1..120: mol_type = other DNA

SEQ ID NO: 65194 - DNA, 120 bp, synthetic construct; identical to SEQ ID NO: 35240
  source 1..120: mol_type = other DNA

SEQ ID NO: 65195 - DNA, 120 bp, synthetic construct; identical to SEQ ID NO: 10266
  source 1..120: mol_type = other DNA

SEQ ID NO: 65196 - DNA, 120 bp, synthetic construct; identical to SEQ ID NO: 35242
  source 1..120: mol_type = other DNA

SEQ ID NO: 65197 - DNA, 120 bp, synthetic construct; identical to SEQ ID NO: 35243
  source 1..120: mol_type = other DNA

SEQ ID NO: 65198 - DNA, 120 bp, synthetic construct; identical to SEQ ID NO: 35244
  source 1..120: mol_type = other DNA

SEQ ID NO: 65199 - DNA, 120 bp, synthetic construct; identical to SEQ ID NO: 10267
  source 1..120: mol_type = other DNA

SEQ ID NO: 65200 - DNA, 120 bp, synthetic construct; identical to SEQ ID NO: 35246
  source 1..120: mol_type = other DNA

SEQ ID NO: 65201 - DNA, 120 bp, synthetic construct; identical to SEQ ID NO: 35247
  source 1..120: mol_type = other DNA

SEQ ID NO: 65202 - DNA, 120 bp, synthetic construct; identical to SEQ ID NO: 35248
  source 1..120: mol_type = other DNA

SEQ ID NO: 65203 - DNA, 120 bp, synthetic construct; identical to SEQ ID NO: 10268
  source 1..120: mol_type = other DNA

SEQ ID NO: 65204 - DNA, 120 bp, synthetic construct; identical to SEQ ID NO: 35250
  source 1..120: mol_type = other DNA

SEQ ID NO: 65205 - DNA, 120 bp, synthetic construct; identical to SEQ ID NO: 35251
  source 1..120: mol_type = other DNA

SEQ ID NO: 65206 - DNA, 120 bp, synthetic construct; identical to SEQ ID NO: 35252
  source 1..120: mol_type = other DNA

SEQ ID NO: 65207 - DNA, 120 bp, synthetic construct; identical to SEQ ID NO: 10269
  source 1..120: mol_type = other DNA

SEQ ID NO: 65208 - DNA, 120 bp, synthetic construct; identical to SEQ ID NO: 35254
  source 1..120: mol_type = other DNA

SEQ ID NO: 65209 - DNA, 120 bp, synthetic construct; identical to SEQ ID NO: 35255
  source 1..120: mol_type = other DNA

SEQ ID NO: 65210 - DNA, 120 bp, synthetic construct; identical to SEQ ID NO: 35256
  source 1..120: mol_type = other DNA

SEQ ID NO: 65211 - DNA, 120 bp, synthetic construct; identical to SEQ ID NO: 10270
  source 1..120: mol_type = other DNA

SEQ ID NO: 65212 - DNA, 120 bp, synthetic construct; identical to SEQ ID NO: 35258
  source 1..120: mol_type = other DNA

SEQ ID NO: 65213 - DNA, 120 bp, synthetic construct; identical to SEQ ID NO: 35259
  source 1..120: mol_type = other DNA

SEQ ID NO: 65214 - DNA, 120 bp, synthetic construct; identical to SEQ ID NO: 35260
  source 1..120: mol_type = other DNA

SEQ ID NO: 65215 - DNA, 120 bp, synthetic construct; identical to SEQ ID NO: 10271
  source 1..120: mol_type = other DNA

SEQ ID NO: 65216 - DNA, 120 bp, synthetic construct; identical to SEQ ID NO: 35262
  source 1..120: mol_type = other DNA

SEQ ID NO: 65217 - DNA, 120 bp, synthetic construct; identical to SEQ ID NO: 35263
  source 1..120: mol_type = other DNA

SEQ ID NO: 65218 - DNA, 120 bp, synthetic construct; identical to SEQ ID NO: 35264
  source 1..120: mol_type = other DNA

SEQ ID NO: 65219 - DNA, 120 bp, synthetic construct; identical to SEQ ID NO: 35265
  source 1..120: mol_type = other DNA

SEQ ID NO: 65220 - DNA, 120 bp, synthetic construct; identical to SEQ ID NO: 10272
  source 1..120: mol_type = other DNA

SEQ ID NO: 65221 - DNA, 120 bp, synthetic construct; identical to SEQ ID NO: 35267
  source 1..120: mol_type = other DNA

SEQ ID NO: 65222 - DNA, 120 bp, synthetic construct; identical to SEQ ID NO: 35268
  source 1..120: mol_type = other DNA

SEQ ID NO: 65223 - DNA, 120 bp, synthetic construct; identical to SEQ ID NO: 35269
  source 1..120: mol_type = other DNA

SEQ ID NO: 65224 - DNA, 120 bp, synthetic construct; identical to SEQ ID NO: 10273
  source 1..120: mol_type = other DNA

SEQ ID NO: 65225 - DNA, 120 bp, synthetic construct; identical to SEQ ID NO: 35271
  source 1..120: mol_type = other DNA

SEQ ID NO: 65226 - DNA, 120 bp, synthetic construct; identical to SEQ ID NO: 35272
  source 1..120: mol_type = other DNA

SEQ ID NO: 65227 - DNA, 120 bp, synthetic construct; identical to SEQ ID NO: 10274
  source 1..120: mol_type = other DNA

SEQ ID NO: 65228 - DNA, 120 bp, synthetic construct; identical to SEQ ID NO: 35274
  source 1..120: mol_type = other DNA

SEQ ID NO: 65229 - DNA, 120 bp, synthetic construct; identical to SEQ ID NO: 35275
  source 1..120: mol_type = other DNA

SEQ ID NO: 65230 - DNA, 120 bp, synthetic construct; identical to SEQ ID NO: 35276
  source 1..120: mol_type = other DNA

SEQ ID NO: 65231 - DNA, 120 bp, synthetic construct; identical to SEQ ID NO: 10275
  source 1..120: mol_type = other DNA

SEQ ID NO: 65232 - DNA, 120 bp, synthetic construct; identical to SEQ ID NO: 35278
  source 1..120: mol_type = other DNA

SEQ ID NO: 65233 - DNA, 120 bp, synthetic construct; identical to SEQ ID NO: 35279
  source 1..120: mol_type = other DNA

SEQ ID NO: 65234 - DNA, 120 bp, synthetic construct; identical to SEQ ID NO: 35280
  source 1..120: mol_type = other DNA

SEQ ID NO: 65235 - DNA, 120 bp, synthetic construct; identical to SEQ ID NO: 10276
  source 1..120: mol_type = other DNA

SEQ ID NO: 65236 - DNA, 120 bp, synthetic construct; identical to SEQ ID NO: 35282
  source 1..120: mol_type = other DNA

SEQ ID NO: 65237 - DNA, 120 bp, synthetic construct; identical to SEQ ID NO: 35283
  source 1..120: mol_type = other DNA

SEQ ID NO: 65238 - DNA, 120 bp, synthetic construct; identical to SEQ ID NO: 35284
  source 1..120: mol_type = other DNA

SEQ ID NO: 65239 - DNA, 120 bp, synthetic construct; identical to SEQ ID NO: 10277
  source 1..120: mol_type = other DNA

SEQ ID NO: 65240 - DNA, 120 bp, synthetic construct; identical to SEQ ID NO: 35286
  source 1..120: mol_type = other DNA

SEQ ID NO: 65241 - DNA, 120 bp, synthetic construct; identical to SEQ ID NO: 35287
  source 1..120: mol_type = other DNA

SEQ ID NO: 65242 - DNA, 120 bp, synthetic construct; identical to SEQ ID NO: 35288
  source 1..120: mol_type = other DNA

SEQ ID NO: 65243 - DNA, 120 bp, synthetic construct; identical to SEQ ID NO: 35289
  source 1..120: mol_type = other DNA

SEQ ID NO: 65244 - DNA, 120 bp, synthetic construct; identical to SEQ ID NO: 10278
  source 1..120: mol_type = other DNA

SEQ ID NO: 65245 - DNA, 120 bp, synthetic construct; identical to SEQ ID NO: 35291
  source 1..120: mol_type = other DNA

SEQ ID NO: 65246 - DNA, 120 bp, synthetic construct; identical to SEQ ID NO: 35292
  source 1..120: mol_type = other DNA

SEQ ID NO: 65247 - DNA, 120 bp, synthetic construct; identical to SEQ ID NO: 10279
  source 1..120: mol_type = other DNA

SEQ ID NO: 65248 - DNA, 120 bp, synthetic construct; identical to SEQ ID NO: 35294
  source 1..120: mol_type = other DNA

SEQ ID NO: 65249 - DNA, 120 bp, synthetic construct; identical to SEQ ID NO: 35295
  source 1..120: mol_type = other DNA

SEQ ID NO: 65250 - DNA, 120 bp, synthetic construct; identical to SEQ ID NO: 35296
  source 1..120: mol_type = other DNA

SEQ ID NO: 65251 - DNA, 120 bp, synthetic construct; identical to SEQ ID NO: 35297
  source 1..120: mol_type = other DNA

SEQ ID NO: 65252 - DNA, 120 bp, synthetic construct; identical to SEQ ID NO: 10280
  source 1..120: mol_type = other DNA

SEQ ID NO: 65253 - DNA, 120 bp, synthetic construct; identical to SEQ ID NO: 35299
  source 1..120: mol_type = other DNA

SEQ ID NO: 65254 - DNA, 120 bp, synthetic construct; identical to SEQ ID NO: 35300
  source 1..120: mol_type = other DNA

SEQ ID NO: 65255 - DNA, 120 bp, synthetic construct; identical to SEQ ID NO: 35301
  source 1..120: mol_type = other DNA

SEQ ID NO: 65256 - DNA, 120 bp, synthetic construct; identical to SEQ ID NO: 10281
  source 1..120: mol_type = other DNA

SEQ ID NO: 65257 - DNA, 120 bp, synthetic construct; identical to SEQ ID NO: 35303
  source 1..120: mol_type = other DNA

SEQ ID NO: 65258 - DNA, 120 bp, synthetic construct; identical to SEQ ID NO: 35304
  source 1..120: mol_type = other DNA

SEQ ID NO: 65259 - DNA, 120 bp, synthetic construct; identical to SEQ ID NO: 35305
  source 1..120: mol_type = other DNA

SEQ ID NO: 65260 - DNA, 120 bp, synthetic construct; identical to SEQ ID NO: 10282
  source 1..120: mol_type = other DNA

SEQ ID NO: 65261 - DNA, 120 bp, synthetic construct; identical to SEQ ID NO: 35307
  source 1..120: mol_type = other DNA

SEQ ID NO: 65262 - DNA, 120 bp, synthetic construct; identical to SEQ ID NO: 35308
  source 1..120: mol_type = other DNA

SEQ ID NO: 65263 - DNA, 120 bp, synthetic construct; identical to SEQ ID NO: 10283
  source 1..120: mol_type = other DNA

SEQ ID NO: 65264 - DNA, 120 bp, synthetic construct; identical to SEQ ID NO: 35310
  source 1..120: mol_type = other DNA

SEQ ID NO: 65265 - DNA, 120 bp, synthetic construct; identical to SEQ ID NO: 35311
  source 1..120: mol_type = other DNA

SEQ ID NO: 65266 - DNA, 120 bp, synthetic construct; identical to SEQ ID NO: 35312
  source 1..120: mol_type = other DNA

SEQ ID NO: 65267 - DNA, 120 bp, synthetic construct; identical to SEQ ID NO: 10284
  source 1..120: mol_type = other DNA

SEQ ID NO: 65268 - DNA, 120 bp, synthetic construct; identical to SEQ ID NO: 35314
  source 1..120: mol_type = other DNA

SEQ ID NO: 65269 - DNA, 120 bp, synthetic construct; identical to SEQ ID NO: 35315
  source 1..120: mol_type = other DNA

SEQ ID NO: 65270 - DNA, 120 bp, synthetic construct; identical to SEQ ID NO: 35316
  source 1..120: mol_type = other DNA

SEQ ID NO: 65271 - DNA, 120 bp, synthetic construct; identical to SEQ ID NO: 10285
  source 1..120: mol_type = other DNA

SEQ ID NO: 65272 - DNA, 120 bp, synthetic construct; identical to SEQ ID NO: 35318
  source 1..120: mol_type = other DNA

SEQ ID NO: 65273 - DNA, 120 bp, synthetic construct; identical to SEQ ID NO: 35319
  source 1..120: mol_type = other DNA

SEQ ID NO: 65274 - DNA, 120 bp, synthetic construct; identical to SEQ ID NO: 35320
  source 1..120: mol_type = other DNA

SEQ ID NO: 65275 - DNA, 120 bp, synthetic construct; identical to SEQ ID NO: 10286
  source 1..120: mol_type = other DNA

SEQ ID NO: 65276 - DNA, 120 bp, synthetic construct; identical to SEQ ID NO: 35322
  source 1..120: mol_type = other DNA

SEQ ID NO: 65277 - DNA, 120 bp, synthetic construct; identical to SEQ ID NO: 35323
  source 1..120: mol_type = other DNA

SEQ ID NO: 65278 - DNA, 120 bp, synthetic construct; identical to SEQ ID NO: 35324
  source 1..120: mol_type = other DNA

SEQ ID NO: 65279 - DNA, 120 bp, synthetic construct; identical to SEQ ID NO: 35325
  source 1..120: mol_type = other DNA

SEQ ID NO: 65280 - DNA, 120 bp, synthetic construct; identical to SEQ ID NO: 10287
  source 1..120: mol_type = other DNA

SEQ ID NO: 65281 - DNA, 120 bp, synthetic construct; identical to SEQ ID NO: 35327
  source 1..120: mol_type = other DNA

SEQ ID NO: 65282 - DNA, 120 bp, synthetic construct; identical to SEQ ID NO: 35328
  source 1..120: mol_type = other DNA

SEQ ID NO: 65283 - DNA, 120 bp, synthetic construct; identical to SEQ ID NO: 10288
  source 1..120: mol_type = other DNA

SEQ ID NO: 65284 - DNA, 120 bp, synthetic construct; identical to SEQ ID NO: 35330
  source 1..120: mol_type = other DNA

SEQ ID NO: 65285 - DNA, 120 bp, synthetic construct; identical to SEQ ID NO: 35331
  source 1..120: mol_type = other DNA

SEQ ID NO: 65286 - DNA, 120 bp, synthetic construct; identical to SEQ ID NO: 35332
  source 1..120: mol_type = other DNA

SEQ ID NO: 65287 - DNA, 120 bp, synthetic construct; identical to SEQ ID NO: 10289
  source 1..120: mol_type = other DNA

SEQ ID NO: 65288 - DNA, 120 bp, synthetic construct; identical to SEQ ID NO: 35334
  source 1..120: mol_type = other DNA

SEQ ID NO: 65289 - DNA, 120 bp, synthetic construct; identical to SEQ ID NO: 35335
  source 1..120: mol_type = other DNA

SEQ ID NO: 65290 - DNA, 120 bp, synthetic construct; identical to SEQ ID NO: 35336
  source 1..120: mol_type = other DNA

SEQ ID NO: 65291 - DNA, 120 bp, synthetic construct; identical to SEQ ID NO: 10290
  source 1..120: mol_type = other DNA

SEQ ID NO: 65292 - DNA, 120 bp, synthetic construct; identical to SEQ ID NO: 35338
  source 1..120: mol_type = other DNA

SEQ ID NO: 65293 - DNA, 120 bp, synthetic construct; identical to SEQ ID NO: 35339
  source 1..120: mol_type = other DNA

SEQ ID NO: 65294 - DNA, 120 bp, synthetic construct; identical to SEQ ID NO: 35340
  source 1..120: mol_type = other DNA

SEQ ID NO: 65295 - DNA, 120 bp, synthetic construct; identical to SEQ ID NO: 10291
  source 1..120: mol_type = other DNA

SEQ ID NO: 65296 - DNA, 120 bp, synthetic construct; identical to SEQ ID NO: 35342
  source 1..120: mol_type = other DNA

SEQ ID NO: 65297 - DNA, 120 bp, synthetic construct; identical to SEQ ID NO: 35343
  source 1..120: mol_type = other DNA

SEQ ID NO: 65298 - DNA, 120 bp, synthetic construct; identical to SEQ ID NO: 35344
  source 1..120: mol_type = other DNA

SEQ ID NO: 65299 - DNA, 120 bp, synthetic construct; identical to SEQ ID NO: 10292
  source 1..120: mol_type = other DNA

SEQ ID NO: 65300 - DNA, 120 bp, synthetic construct; identical to SEQ ID NO: 35346
  source 1..120: mol_type = other DNA

SEQ ID NO: 65301 - DNA, 120 bp, synthetic construct; identical to SEQ ID NO: 35347
  source 1..120: mol_type = other DNA

SEQ ID NO: 65302 - DNA, 120 bp, synthetic construct; identical to SEQ ID NO: 35348
  source 1..120: mol_type = other DNA

SEQ ID NO: 65303 - DNA, 120 bp, synthetic construct; identical to SEQ ID NO: 10293
  source 1..120: mol_type = other DNA

SEQ ID NO: 65304 - DNA, 120 bp, synthetic construct; identical to SEQ ID NO: 35350
  source 1..120: mol_type = other DNA

SEQ ID NO: 65305 - DNA, 120 bp, synthetic construct; identical to SEQ ID NO: 35351
  source 1..120: mol_type = other DNA

SEQ ID NO: 65306 - DNA, 120 bp, synthetic construct; identical to SEQ ID NO: 35352
  source 1..120: mol_type = other DNA

SEQ ID NO: 65307 - DNA, 120 bp, synthetic construct; identical to SEQ ID NO: 10294
  source 1..120: mol_type = other DNA

SEQ ID NO: 65308 - DNA, 120 bp, synthetic construct; identical to SEQ ID NO: 35354
  source 1..120: mol_type = other DNA

SEQ ID NO: 65309 - DNA, 120 bp, synthetic construct; identical to SEQ ID NO: 35355
  source 1..120: mol_type = other DNA

SEQ ID NO: 65310 - DNA, 120 bp, synthetic construct; identical to SEQ ID NO: 35356
  source 1..120: mol_type = other DNA

SEQ ID NO: 65311 - DNA, 120 bp, synthetic construct; identical to SEQ ID NO: 10295
  source 1..120: mol_type = other DNA

SEQ ID NO: 65312 - DNA, 120 bp, synthetic construct; identical to SEQ ID NO: 35358
  source 1..120: mol_type = other DNA

SEQ ID NO: 65313 - DNA, 120 bp, synthetic construct; identical to SEQ ID NO: 35359
  source 1..120: mol_type = other DNA

SEQ ID NO: 65314 - DNA, 120 bp, synthetic construct; identical to SEQ ID NO: 35360
  source 1..120: mol_type = other DNA

SEQ ID NO: 65315 - DNA, 120 bp, synthetic construct; identical to SEQ ID NO: 35361
  source 1..120: mol_type = other DNA

SEQ ID NO: 65316 - DNA, 120 bp, synthetic construct; identical to SEQ ID NO: 10296
  source 1..120: mol_type = other DNA

SEQ ID NO: 65317 - DNA, 120 bp, synthetic construct; identical to SEQ ID NO: 35363
  source 1..120: mol_type = other DNA

SEQ ID NO: 65318 - DNA, 120 bp, synthetic construct; identical to SEQ ID NO: 35364
  source 1..120: mol_type = other DNA

SEQ ID NO: 65319 - DNA, 120 bp, synthetic construct; identical to SEQ ID NO: 10297
  source 1..120: mol_type = other DNA

SEQ ID NO: 65320 - DNA, 120 bp, synthetic construct; identical to SEQ ID NO: 10298
  source 1..120: mol_type = other DNA

SEQ ID NO: 65321 - DNA, 120 bp, synthetic construct; identical to SEQ ID NO: 35367
  source 1..120: mol_type = other DNA

SEQ ID NO: 65322 - DNA, 120 bp, synthetic construct; identical to SEQ ID NO: 35368
  source 1..120: mol_type = other DNA

SEQ ID NO: 65323 - DNA, 120 bp, synthetic construct; identical to SEQ ID NO: 35369
  source 1..120: mol_type = other DNA

SEQ ID NO: 65324 - DNA, 120 bp, synthetic construct; identical to SEQ ID NO: 10299
  source 1..120: mol_type = other DNA

SEQ ID NO: 65325 - DNA, 120 bp, synthetic construct; identical to SEQ ID NO: 35371
  source 1..120: mol_type = other DNA

SEQ ID NO: 65326 - DNA, 120 bp, synthetic construct; identical to SEQ ID NO: 35372
  source 1..120: mol_type = other DNA

SEQ ID NO: 65327 - DNA, 120 bp, synthetic construct; identical to SEQ ID NO: 35373
  source 1..120: mol_type = other DNA

SEQ ID NO: 65328 - DNA, 120 bp, synthetic construct; identical to SEQ ID NO: 10300
  source 1..120: mol_type = other DNA

SEQ ID NO: 65329 - DNA, 120 bp, synthetic construct; identical to SEQ ID NO: 35375
  source 1..120: mol_type = other DNA

SEQ ID NO: 65330 - DNA, 120 bp, synthetic construct; identical to SEQ ID NO: 35376
  source 1..120: mol_type = other DNA

SEQ ID NO: 65331 - DNA, 120 bp, synthetic construct; identical to SEQ ID NO: 10301
  source 1..120: mol_type = other DNA

SEQ ID NO: 65332 - DNA, 120 bp, synthetic construct; identical to SEQ ID NO: 35378
  source 1..120: mol_type = other DNA

SEQ ID NO: 65333 - DNA, 120 bp, synthetic construct; identical to SEQ ID NO: 35379
  source 1..120: mol_type = other DNA

SEQ ID NO: 65334 - DNA, 120 bp, synthetic construct; identical to SEQ ID NO: 10302
  source 1..120: mol_type = other DNA

SEQ ID NO: 65335 - DNA, 120 bp, synthetic construct; identical to SEQ ID NO: 35381
  source 1..120: mol_type = other DNA

SEQ ID NO: 65336 - DNA, 120 bp, synthetic construct; identical to SEQ ID NO: 35382
  source 1..120: mol_type = other DNA

SEQ ID NO: 65337 - DNA, 120 bp, synthetic construct; identical to SEQ ID NO: 35383
  source 1..120: mol_type = other DNA

SEQ ID NO: 65338 - DNA, 120 bp, synthetic construct; identical to SEQ ID NO: 35384
  source 1..120: mol_type = other DNA

SEQ ID NO: 65339 - DNA, 120 bp, synthetic construct; identical to SEQ ID NO: 10303
  source 1..120: mol_type = other DNA

SEQ ID NO: 65340 - DNA, 120 bp, synthetic construct; identical to SEQ ID NO: 35386
  source 1..120: mol_type = other DNA

SEQ ID NO: 65341 - DNA, 120 bp, synthetic construct; identical to SEQ ID NO: 35387
  source 1..120: mol_type = other DNA

SEQ ID NO: 65342 - DNA, 120 bp, synthetic construct; identical to SEQ ID NO: 35388
  source 1..120: mol_type = other DNA

SEQ ID NO: 65343 - DNA, 120 bp, synthetic construct; identical to SEQ ID NO: 10304
  source 1..120: mol_type = other DNA

SEQ ID NO: 65344 - DNA, 120 bp, synthetic construct; identical to SEQ ID NO: 35390
  source 1..120: mol_type = other DNA

SEQ ID NO: 65345 - DNA, 120 bp, synthetic construct; identical to SEQ ID NO: 35391
  source 1..120: mol_type = other DNA

SEQ ID NO: 65346 - DNA, 120 bp, synthetic construct; identical to SEQ ID NO: 10305
  source 1..120: mol_type = other DNA

SEQ ID NO: 65347 - DNA, 120 bp, synthetic construct; identical to SEQ ID NO: 35393
  source 1..120: mol_type = other DNA

SEQ ID NO: 65348 - DNA, 120 bp, synthetic construct; identical to SEQ ID NO: 35394
  source 1..120: mol_type = other DNA

SEQ ID NO: 65349 - DNA, 120 bp, synthetic construct; identical to SEQ ID NO: 35395
  source 1..120: mol_type = other DNA

SEQ ID NO: 65350 - DNA, 120 bp, synthetic construct; identical to SEQ ID NO: 10306
  source 1..120: mol_type = other DNA

SEQ ID NO: 65351 - DNA, 120 bp, synthetic construct; identical to SEQ ID NO: 35397
  source 1..120: mol_type = other DNA

SEQ ID NO: 65352 - DNA, 120 bp, synthetic construct; identical to SEQ ID NO: 35398
  source 1..120: mol_type = other DNA

SEQ ID NO: 65353 - DNA, 120 bp, synthetic construct; identical to SEQ ID NO: 35399
  source 1..120: mol_type = other DNA

SEQ ID NO: 65354 - DNA, 120 bp, synthetic construct; identical to SEQ ID NO: 10307
  source 1..120: mol_type = other DNA

SEQ ID NO: 65355 - DNA, 120 bp, synthetic construct; identical to SEQ ID NO: 35401
  source 1..120: mol_type = other DNA

SEQ ID NO: 65356 - DNA, 120 bp, synthetic construct; identical to SEQ ID NO: 35402
  source 1..120: mol_type = other DNA

SEQ ID NO: 65357 - DNA, 120 bp, synthetic construct; identical to SEQ ID NO: 35403
  source 1..120: mol_type = other DNA

SEQ ID NO: 65358 - DNA, 120 bp, synthetic construct; identical to SEQ ID NO: 10308
  source 1..120: mol_type = other DNA

SEQ ID NO: 65359 - DNA, 120 bp, synthetic construct; identical to SEQ ID NO: 35405
  source 1..120: mol_type = other DNA

SEQ ID NO: 65360 - DNA, 120 bp, synthetic construct; identical to SEQ ID NO: 35406
  source 1..120: mol_type = other DNA

SEQ ID NO: 65361 - DNA, 120 bp, synthetic construct; identical to SEQ ID NO: 35407
  source 1..120: mol_type = other DNA

SEQ ID NO: 65362 - DNA, 120 bp, synthetic construct; identical to SEQ ID NO: 35408
  source 1..120: mol_type = other DNA

SEQ ID NO: 65363 - DNA, 120 bp, synthetic construct; identical to SEQ ID NO: 10309
  source 1..120: mol_type = other DNA

SEQ ID NO: 65364 - DNA, 120 bp, synthetic construct; identical to SEQ ID NO: 35410
  source 1..120: mol_type = other DNA

SEQ ID NO: 65365 - DNA, 120 bp, synthetic construct; identical to SEQ ID NO: 35411
  source 1..120: mol_type = other DNA

SEQ ID NO: 65366 - DNA, 120 bp, synthetic construct; identical to SEQ ID NO: 35412
  source 1..120: mol_type = other DNA

SEQ ID NO: 65367 - DNA, 120 bp, synthetic construct; identical to SEQ ID NO: 35413
  source 1..120: mol_type = other DNA

SEQ ID NO: 65368 - DNA, 120 bp, synthetic construct; identical to SEQ ID NO: 10310
  source 1..120: mol_type = other DNA

SEQ ID NO: 65369 - DNA, 120 bp, synthetic construct; identical to SEQ ID NO: 35415
  source 1..120: mol_type = other DNA

SEQ ID NO: 65370 - DNA, 120 bp, synthetic construct; identical to SEQ ID NO: 35416
  source 1..120: mol_type = other DNA

SEQ ID NO: 65371 - DNA, 120 bp, synthetic construct; identical to SEQ ID NO: 35417
  source 1..120: mol_type = other DNA

SEQ ID NO: 65372 - DNA, 120 bp, synthetic construct; identical to SEQ ID NO: 10311
  source 1..120: mol_type = other DNA

SEQ ID NO: 65373 - DNA, 120 bp, synthetic construct; identical to SEQ ID NO: 35419
  source 1..120: mol_type = other DNA

SEQ ID NO: 65374 - DNA, 120 bp, synthetic construct; identical to SEQ ID NO: 35420
  source 1..120: mol_type = other DNA

SEQ ID NO: 65375 - DNA, 120 bp, synthetic construct; identical to SEQ ID NO: 35421
  source 1..120: mol_type = other DNA

SEQ ID NO: 65376 - DNA, 120 bp, synthetic construct; identical to SEQ ID NO: 10312
  source 1..120: mol_type = other DNA

SEQ ID NO: 65377 - DNA, 120 bp, synthetic construct; identical to SEQ ID NO: 35423
  source 1..120: mol_type = other DNA

SEQ ID NO: 65378 - DNA, 120 bp, synthetic construct; identical to SEQ ID NO: 35424
  source 1..120: mol_type = other DNA

SEQ ID NO: 65379 - DNA, 120 bp, synthetic construct; identical to SEQ ID NO: 35425
  source 1..120: mol_type = other DNA

SEQ ID NO: 65380 - DNA, 120 bp, synthetic construct; identical to SEQ ID NO: 10313
  source 1..120: mol_type = other DNA

SEQ ID NO: 65381 - DNA, 120 bp, synthetic construct; identical to SEQ ID NO: 35427
  source 1..120: mol_type = other DNA

SEQ ID NO: 65382 - DNA, 120 bp, synthetic construct; identical to SEQ ID NO: 35428
  source 1..120: mol_type = other DNA

SEQ ID NO: 65383 - DNA, 120 bp, synthetic construct; identical to SEQ ID NO: 10314
  source 1..120: mol_type = other DNA

SEQ ID NO: 65384 - DNA, 120 bp, synthetic construct; identical to SEQ ID NO: 35430
  source 1..120: mol_type = other DNA

SEQ ID NO: 65385 - DNA, 120 bp, synthetic construct; identical to SEQ ID NO: 35431
  source 1..120: mol_type = other DNA

SEQ ID NO: 65386 - DNA, 120 bp, synthetic construct; identical to SEQ ID NO: 35432
  source 1..120: mol_type = other DNA

SEQ ID NO: 65387 - DNA, 120 bp, synthetic construct; identical to SEQ ID NO: 35433
  source 1..120: mol_type = other DNA

SEQ ID NO: 65388 - DNA, 120 bp, synthetic construct; identical to SEQ ID NO: 10315
  source 1..120: mol_type = other DNA

SEQ ID NO: 65389 - DNA, 120 bp, synthetic construct; identical to SEQ ID NO: 35435
  source 1..120: mol_type = other DNA

SEQ ID NO: 65390 - DNA, 120 bp, synthetic construct; identical to SEQ ID NO: 35436
  source 1..120: mol_type = other DNA

SEQ ID NO: 65391 - DNA, 120 bp, synthetic construct; identical to SEQ ID NO: 10316
  source 1..120: mol_type = other DNA

SEQ ID NO: 65392 - DNA, 120 bp, synthetic construct; identical to SEQ ID NO: 35438
  source 1..120: mol_type = other DNA

SEQ ID NO: 65393 - DNA, 120 bp, synthetic construct; identical to SEQ ID NO: 35439
  source 1..120: mol_type = other DNA

SEQ ID NO: 65394 - DNA, 120 bp, synthetic construct; identical to SEQ ID NO: 35440
  source 1..120: mol_type = other DNA

SEQ ID NO: 65395 - DNA, 120 bp, synthetic construct; identical to SEQ ID NO: 35441
  source 1..120: mol_type = other DNA

SEQ ID NO: 65396 - DNA, 120 bp, synthetic construct; identical to SEQ ID NO: 10317
  source 1..120: mol_type = other DNA

SEQ ID NO: 65397 - DNA, 120 bp, synthetic construct; identical to SEQ ID NO: 35443
  source 1..120: mol_type = other DNA

SEQ ID NO: 65398 - DNA, 120 bp, synthetic construct; identical to SEQ ID NO: 35444
  source 1..120: mol_type = other DNA

SEQ ID NO: 65399 - DNA, 120 bp, synthetic construct; identical to SEQ ID NO: 35445
  source 1..120: mol_type = other DNA

SEQ ID NO: 65400 - DNA, 120 bp, synthetic construct; identical to SEQ ID NO: 10318
  source 1..120: mol_type = other DNA

SEQ ID NO: 65401 - DNA, 120 bp, synthetic construct; identical to SEQ ID NO: 35447
  source 1..120: mol_type = other DNA

SEQ ID NO: 65402 - DNA, 120 bp, synthetic construct; identical to SEQ ID NO: 35448
  source 1..120: mol_type = other DNA

SEQ ID NO: 65403 - DNA, 120 bp, synthetic construct; identical to SEQ ID NO: 35449
  source 1..120: mol_type = other DNA

SEQ ID NO: 65404 - DNA, 120 bp, synthetic construct; identical to SEQ ID NO: 10319
  source 1..120: mol_type = other DNA

SEQ ID NO: 65405 - DNA, 120 bp, synthetic construct; identical to SEQ ID NO: 35451
  source 1..120: mol_type = other DNA

SEQ ID NO: 65406 - DNA, 120 bp, synthetic construct; identical to SEQ ID NO: 35452
  source 1..120: mol_type = other DNA

SEQ ID NO: 65407 - DNA, 120 bp, synthetic construct; identical to SEQ ID NO: 35453
  source 1..120: mol_type = other DNA

SEQ ID NO: 65408 - DNA, 120 bp, synthetic construct; identical to SEQ ID NO: 10320
  source 1..120: mol_type = other DNA

SEQ ID NO: 65409 - DNA, 120 bp, synthetic construct; identical to SEQ ID NO: 35455
  source 1..120: mol_type = other DNA

SEQ ID NO: 65410 - DNA, 120 bp, synthetic construct; identical to SEQ ID NO: 35456
  source 1..120: mol_type = other DNA

SEQ ID NO: 65411 - DNA, 120 bp, synthetic construct; identical to SEQ ID NO: 10321
  source 1..120: mol_type = other DNA

SEQ ID NO: 65412 - DNA, 120 bp, synthetic construct; identical to SEQ ID NO: 35458
  source 1..120: mol_type = other DNA

SEQ ID NO: 65413 - DNA, 120 bp, synthetic construct; identical to SEQ ID NO: 35459
  source 1..120: mol_type = other DNA

SEQ ID NO: 65414 - DNA, 120 bp, synthetic construct; identical to SEQ ID NO: 35460
  source 1..120: mol_type = other DNA

SEQ ID NO: 65415 - DNA, 120 bp, synthetic construct; identical to SEQ ID NO: 35461
  source 1..120: mol_type = other DNA

SEQ ID NO: 65416 - DNA, 120 bp, synthetic construct; identical to SEQ ID NO: 10322
  source 1..120: mol_type = other DNA

SEQ ID NO: 65417 - DNA, 120 bp, synthetic construct; identical to SEQ ID NO: 35463
  source 1..120: mol_type = other DNA

SEQ ID NO: 65418 - DNA, 120 bp, synthetic construct; identical to SEQ ID NO: 35464
  source 1..120: mol_type = other DNA

SEQ ID NO: 65419 - DNA, 120 bp, synthetic construct; identical to SEQ ID NO: 35465
  source 1..120: mol_type = other DNA

SEQ ID NO: 65420 - DNA, 120 bp, synthetic construct; identical to SEQ ID NO: 10323
  source 1..120: mol_type = other DNA

SEQ ID NO: 65421 - DNA, 120 bp, synthetic construct; identical to SEQ ID NO: 35467
  source 1..120: mol_type = other DNA

SEQ ID NO: 65422 - DNA, 120 bp, synthetic construct; identical to SEQ ID NO: 35468
  source 1..120: mol_type = other DNA

SEQ ID NO: 65423 - DNA, 120 bp, synthetic construct; identical to SEQ ID NO: 10324
  source 1..120: mol_type = other DNA

SEQ ID NO: 65424 - DNA, 120 bp, synthetic construct; identical to SEQ ID NO: 35470
  source 1..120: mol_type = other DNA

SEQ ID NO: 65425 - DNA, 120 bp, synthetic construct; identical to SEQ ID NO: 35471
  source 1..120: mol_type = other DNA

SEQ ID NO: 65426 - DNA, 120 bp, synthetic construct; identical to SEQ ID NO: 35472
  source 1..120: mol_type = other DNA

SEQ ID NO: 65427 - DNA, 120 bp, synthetic construct; identical to SEQ ID NO: 35473
  source 1..120: mol_type = other DNA

SEQ ID NO: 65428 - DNA, 120 bp, synthetic construct; identical to SEQ ID NO: 10325
  source 1..120: mol_type = other DNA

SEQ ID NO: 65429 - DNA, 120 bp, synthetic construct; identical to SEQ ID NO: 35475
  source 1..120: mol_type = other DNA

SEQ ID NO: 65430 - DNA, 120 bp, synthetic construct; identical to SEQ ID NO: 35476
  source 1..120: mol_type = other DNA

SEQ ID NO: 65431 - DNA, 120 bp, synthetic construct; identical to SEQ ID NO: 35477
  source 1..120: mol_type = other DNA

SEQ ID NO: 65432 - DNA, 120 bp, synthetic construct; identical to SEQ ID NO: 10326
  source 1..120: mol_type = other DNA

SEQ ID NO: 65433 - DNA, 120 bp, synthetic construct; identical to SEQ ID NO: 35479
  source 1..120: mol_type = other DNA

SEQ ID NO: 65434 - DNA, 120 bp, synthetic construct; identical to SEQ ID NO: 35480
  source 1..120: mol_type = other DNA

SEQ ID NO: 65435 - DNA, 120 bp, synthetic construct; identical to SEQ ID NO: 35481
  source 1..120: mol_type = other DNA

SEQ ID NO: 65436 - DNA, 120 bp, synthetic construct; identical to SEQ ID NO: 10327
  source 1..120: mol_type = other DNA

SEQ ID NO: 65437 - DNA, 120 bp, synthetic construct; identical to SEQ ID NO: 35483
  source 1..120: mol_type = other DNA

SEQ ID NO: 65438 - DNA, 120 bp, synthetic construct; identical to SEQ ID NO: 35484
  source 1..120: mol_type = other DNA

SEQ ID NO: 65439 - DNA, 120 bp, synthetic construct; identical to SEQ ID NO: 10328
  source 1..120: mol_type = other DNA

SEQ ID NO: 65440 - DNA, 120 bp, synthetic construct; identical to SEQ ID NO: 35486
  source 1..120: mol_type = other DNA

SEQ ID NO: 65441 - DNA, 120 bp, synthetic construct; identical to SEQ ID NO: 35487
  source 1..120: mol_type = other DNA

SEQ ID NO: 65442 - DNA, 120 bp, synthetic construct; identical to SEQ ID NO: 35488
  source 1..120: mol_type = other DNA

SEQ ID NO: 65443 - DNA, 120 bp, synthetic construct; identical to SEQ ID NO: 10329
  source 1..120: mol_type = other DNA

SEQ ID NO: 65444 - DNA, 120 bp, synthetic construct; identical to SEQ ID NO: 35490
  source 1..120: mol_type = other DNA

SEQ ID NO: 65445 - DNA, 120 bp, synthetic construct; identical to SEQ ID NO: 35491
  source 1..120: mol_type = other DNA

SEQ ID NO: 65446 - DNA, 120 bp, synthetic construct; identical to SEQ ID NO: 35492
  source 1..120: mol_type = other DNA

SEQ ID NO: 65447 - DNA, 120 bp, synthetic construct; identical to SEQ ID NO: 10330
  source 1..120: mol_type = other DNA

SEQ ID NO: 65448 - DNA, 120 bp, synthetic construct; identical to SEQ ID NO: 35494
  source 1..120: mol_type = other DNA

SEQ ID NO: 65449 - DNA, 120 bp, synthetic construct; identical to SEQ ID NO: 35495
  source 1..120: mol_type = other DNA

SEQ ID NO: 65450 - DNA, 120 bp, synthetic construct; identical to SEQ ID NO: 35496
  source 1..120: mol_type = other DNA

SEQ ID NO: 65451 - DNA, 120 bp, synthetic construct; identical to SEQ ID NO: 35497
  source 1..120: mol_type = other DNA

SEQ ID NO: 65452 - DNA, 120 bp, synthetic construct; identical to SEQ ID NO: 10331
  source 1..120: mol_type = other DNA

SEQ ID NO: 65453 - DNA, 120 bp, synthetic construct; identical to SEQ ID NO: 35499
  source 1..120: mol_type = other DNA

SEQ ID NO: 65454 - DNA, 120 bp, synthetic construct; identical to SEQ ID NO: 35500
  source 1..120: mol_type = other DNA

SEQ ID NO: 65455 - DNA, 120 bp, synthetic construct; identical to SEQ ID NO: 10332
  source 1..120: mol_type = other DNA

SEQ ID NO: 65456 - DNA, 120 bp, synthetic construct; identical to SEQ ID NO: 35502
  source 1..120: mol_type = other DNA

SEQ ID NO: 65457 - DNA, 120 bp, synthetic construct; identical to SEQ ID NO: 35503
  source 1..120: mol_type = other DNA

SEQ ID NO: 65458 - DNA, 120 bp, synthetic construct; identical to SEQ ID NO: 35504
  source 1..120: mol_type = other DNA

SEQ ID NO: 65459 - DNA, 120 bp, synthetic construct; identical to SEQ ID NO: 10333
  source 1..120: mol_type = other DNA

SEQ ID NO: 65460 - DNA, 120 bp, synthetic construct; identical to SEQ ID NO: 35506
  source 1..120: mol_type = other DNA

SEQ ID NO: 65461 - DNA, 120 bp, synthetic construct; identical to SEQ ID NO: 35507
  source 1..120: mol_type = other DNA

SEQ ID NO: 65462 - DNA, 120 bp, synthetic construct; identical to SEQ ID NO: 35508
  source 1..120: mol_type = other DNA

SEQ ID NO: 65463 - DNA, 120 bp, synthetic construct; identical to SEQ ID NO: 10334
  source 1..120: mol_type = other DNA

SEQ ID NO: 65464 - DNA, 120 bp, synthetic construct; identical to SEQ ID NO: 35510
  source 1..120: mol_type = other DNA

SEQ ID NO: 65465 - DNA, 120 bp, synthetic construct; identical to SEQ ID NO: 35511
  source 1..120: mol_type = other DNA

SEQ ID NO: 65466 - DNA, 120 bp, synthetic construct; identical to SEQ ID NO: 35512
  source 1..120: mol_type = other DNA

SEQ ID NO: 65467 - DNA, 120 bp, synthetic construct; identical to SEQ ID NO: 10335
  source 1..120: mol_type = other DNA

SEQ ID NO: 65468 - DNA, 120 bp, synthetic construct; identical to SEQ ID NO: 35514
  source 1..120: mol_type = other DNA

SEQ ID NO: 65469 - DNA, 120 bp, synthetic construct; identical to SEQ ID NO: 35515
  source 1..120: mol_type = other DNA

SEQ ID NO: 65470 - DNA, 120 bp, synthetic construct; identical to SEQ ID NO: 35516
  source 1..120: mol_type = other DNA

SEQ ID NO: 65471 - DNA, 120 bp, synthetic construct; identical to SEQ ID NO: 10336
  source 1..120: mol_type = other DNA

SEQ ID NO: 65472 - DNA, 120 bp, synthetic construct; identical to SEQ ID NO: 35518
  source 1..120: mol_type = other DNA

SEQ ID NO: 65473 - DNA, 120 bp, synthetic construct; identical to SEQ ID NO: 35519
  source 1..120: mol_type = other DNA

SEQ ID NO: 65474 - DNA, 120 bp, synthetic construct; identical to SEQ ID NO: 35520
  source 1..120: mol_type = other DNA

SEQ ID NO: 65475 - DNA, 120 bp, synthetic construct; identical to SEQ ID NO: 35521
  source 1..120: mol_type = other DNA

SEQ ID NO: 65476 - DNA, 120 bp, synthetic construct; identical to SEQ ID NO: 10337
  source 1..120: mol_type = other DNA

SEQ ID NO: 65477 - DNA, 120 bp, synthetic construct; identical to SEQ ID NO: 35523
  source 1..120: mol_type = other DNA

SEQ ID NO: 65478 - DNA, 120 bp, synthetic construct; identical to SEQ ID NO: 35524
  source 1..120: mol_type = other DNA

SEQ ID NO: 65479 - DNA, 120 bp, synthetic construct; identical to SEQ ID NO: 35525
  source 1..120: mol_type = other DNA

SEQ ID NO: 65480 - DNA, 120 bp, synthetic construct; identical to SEQ ID NO: 10338
  source 1..120: mol_type = other DNA

SEQ ID NO: 65481 - DNA, 120 bp, synthetic construct; identical to SEQ ID NO: 35527
  source 1..120: mol_type = other DNA

SEQ ID NO: 65482 - DNA, 120 bp, synthetic construct; identical to SEQ ID NO: 35528
  source 1..120: mol_type = other DNA

SEQ ID NO: 65483 - DNA, 120 bp, synthetic construct; identical to SEQ ID NO: 35529
  source 1..120: mol_type = other DNA

SEQ ID NO: 65484 - DNA, 120 bp, synthetic construct; identical to SEQ ID NO: 10339
  source 1..120: mol_type = other DNA

SEQ ID NO: 65485 - DNA, 120 bp, synthetic construct; identical to SEQ ID NO: 10340
  source 1..120: mol_type = other DNA

SEQ ID NO: 65486 - DNA, 120 bp, synthetic construct; identical to SEQ ID NO: 35532
  source 1..120: mol_type = other DNA

SEQ ID NO: 65487 - DNA, 120 bp, synthetic construct; identical to SEQ ID NO: 35533
  source 1..120: mol_type = other DNA

SEQ ID NO: 65488 - DNA, 120 bp, synthetic construct; identical to SEQ ID NO: 35534
  source 1..120: mol_type = other DNA

SEQ ID NO: 65489 - DNA, 120 bp, synthetic construct; identical to SEQ ID NO: 10341
  source 1..120: mol_type = other DNA

SEQ ID NO: 65490 - DNA, 120 bp, synthetic construct; identical to SEQ ID NO: 35536
  source 1..120: mol_type = other DNA

SEQ ID NO: 65491 - DNA, 120 bp, synthetic construct; identical to SEQ ID NO: 35537
  source 1..120: mol_type = other DNA

SEQ ID NO: 65492 - DNA, 120 bp, synthetic construct; identical to SEQ ID NO: 10342
  source 1..120: mol_type = other DNA

SEQ ID NO: 65493 - DNA, 120 bp, synthetic construct; identical to SEQ ID NO: 35539
  source 1..120: mol_type = other DNA

SEQ ID NO: 65494 - DNA, 120 bp, synthetic construct; identical to SEQ ID NO: 35540
  source 1..120: mol_type = other DNA

SEQ ID NO: 65495 - DNA, 120 bp, synthetic construct; identical to SEQ ID NO: 10343
  source 1..120: mol_type = other DNA

SEQ ID NO: 65496 - DNA, 120 bp, synthetic construct; identical to SEQ ID NO: 35542
  source 1..120: mol_type = other DNA

SEQ ID NO: 65497 - DNA, 120 bp, synthetic construct; identical to SEQ ID NO: 35543
  source 1..120: mol_type = other DNA

SEQ ID NO: 65498 - DNA, 120 bp, synthetic construct; identical to SEQ ID NO: 10344
  source 1..120: mol_type = other DNA

SEQ ID NO: 65499 - DNA, 120 bp, synthetic construct; identical to SEQ ID NO: 35545
  source 1..120: mol_type = other DNA

SEQ ID NO: 65500 - DNA, 120 bp, synthetic construct; identical to SEQ ID NO: 35546
  source 1..120: mol_type = other DNA

SEQ ID NO: 65501 - DNA, 120 bp, synthetic construct; identical to SEQ ID NO: 35547
  source 1..120: mol_type = other DNA

SEQ ID NO: 65502 - DNA, 120 bp, synthetic construct; identical to SEQ ID NO: 35548
  source 1..120: mol_type = other DNA

SEQ ID NO: 65503 - DNA, 120 bp, synthetic construct; identical to SEQ ID NO: 10345
  source 1..120: mol_type = other DNA

SEQ ID NO: 65504 - DNA, 120 bp, synthetic construct; identical to SEQ ID NO: 35550
  source 1..120: mol_type = other DNA

SEQ ID NO: 65505 - DNA, 120 bp, synthetic construct; identical to SEQ ID NO: 35551
  source 1..120: mol_type = other DNA

SEQ ID NO: 65506 - DNA, 120 bp, synthetic construct; identical to SEQ ID NO: 10346
  source 1..120: mol_type = other DNA

SEQ ID NO: 65507 - DNA, 120 bp, synthetic construct; identical to SEQ ID NO: 35553
  source 1..120: mol_type = other DNA

SEQ ID NO: 65508 - DNA, 120 bp, synthetic construct; identical to SEQ ID NO: 35554
  source 1..120: mol_type = other DNA

SEQ ID NO: 65509 - DNA, 120 bp, synthetic construct; identical to SEQ ID NO: 35555
  source 1..120: mol_type = other DNA

SEQ ID NO: 65510 - DNA, 120 bp, synthetic construct; identical to SEQ ID NO: 35556
  source 1..120: mol_type = other DNA

SEQ ID NO: 65511 - DNA, 120 bp, synthetic construct; identical to SEQ ID NO: 10347
  source 1..120: mol_type = other DNA

SEQ ID NO: 65512 - DNA, 120 bp, synthetic construct; identical to SEQ ID NO: 35558
  source 1..120: mol_type = other DNA

SEQ ID NO: 65513 - DNA, 120 bp, synthetic construct; identical to SEQ ID NO: 35559
  source 1..120: mol_type = other DNA

SEQ ID NO: 65514 - DNA, 120 bp, synthetic construct; identical to SEQ ID NO: 10348
  source 1..120: mol_type = other DNA

SEQ ID NO: 65515 - DNA, 120 bp, synthetic construct; identical to SEQ ID NO: 35561
  source 1..120: mol_type = other DNA

SEQ ID NO: 65516 - DNA, 120 bp, synthetic construct; identical to SEQ ID NO: 35562
  source 1..120: mol_type = other DNA

SEQ ID NO: 65517 - DNA, 120 bp, synthetic construct; identical to SEQ ID NO: 35563
  source 1..120: mol_type = other DNA

SEQ ID NO: 65518 - DNA, 120 bp, synthetic construct; identical to SEQ ID NO: 35564
  source 1..120: mol_type = other DNA

SEQ ID NO: 65519 - DNA, 120 bp, synthetic construct; identical to SEQ ID NO: 10349
  source 1..120: mol_type = other DNA

SEQ ID NO: 65520 - DNA, 120 bp, synthetic construct; identical to SEQ ID NO: 35566
  source 1..120: mol_type = other DNA

SEQ ID NO: 65521 - DNA, 120 bp, synthetic construct; identical to SEQ ID NO: 35567
  source 1..120: mol_type = other DNA

SEQ ID NO: 65522 - DNA, 120 bp, synthetic construct; identical to SEQ ID NO: 35568
  source 1..120: mol_type = other DNA

SEQ ID NO: 65523 - DNA, 120 bp, synthetic construct; identical to SEQ ID NO: 10350
  source 1..120: mol_type = other DNA

SEQ ID NO: 65524 - DNA, 120 bp, synthetic construct; identical to SEQ ID NO: 35570
  source 1..120: mol_type = other DNA

SEQ ID NO: 65525 - DNA, 120 bp, synthetic construct; identical to SEQ ID NO: 35571
  source 1..120: mol_type = other DNA

SEQ ID NO: 65526 - DNA, 120 bp, synthetic construct; identical to SEQ ID NO: 10351
  source 1..120: mol_type = other DNA

SEQ ID NO: 65527 - DNA, 120 bp, synthetic construct; identical to SEQ ID NO: 35573
  source 1..120: mol_type = other DNA

SEQ ID NO: 65528 - DNA, 120 bp, synthetic construct; identical to SEQ ID NO: 35574
  source 1..120: mol_type = other DNA

SEQ ID NO: 65529 - DNA, 120 bp, synthetic construct; identical to SEQ ID NO: 35575
  source 1..120: mol_type = other DNA

SEQ ID NO: 65530 - DNA, 120 bp, synthetic construct; identical to SEQ ID NO: 10352
  source 1..120: mol_type = other DNA

SEQ ID NO: 65531 - DNA, 120 bp, synthetic construct; identical to SEQ ID NO: 35577
  source 1..120: mol_type = other DNA

SEQ ID NO: 65532 - DNA, 120 bp, synthetic construct; identical to SEQ ID NO: 35578
  source 1..120: mol_type = other DNA

SEQ ID NO: 65533 - DNA, 120 bp, synthetic construct; identical to SEQ ID NO: 35579
  source 1..120: mol_type = other DNA

SEQ ID NO: 65534 - DNA, 120 bp, synthetic construct; identical to SEQ ID NO: 10353
  source 1..120: mol_type = other DNA

SEQ ID NO: 65535 - DNA, 120 bp, synthetic construct; identical to SEQ ID NO: 35581
  source 1..120: mol_type = other DNA

SEQ ID NO: 65536 - DNA, 120 bp, synthetic construct; identical to SEQ ID NO: 35582
  source 1..120: mol_type = other DNA

SEQ ID NO: 65537 - DNA, 120 bp, synthetic construct; identical to SEQ ID NO: 35583
  source 1..120: mol_type = other DNA

SEQ ID NO: 65538 - DNA, 120 bp, synthetic construct; identical to SEQ ID NO: 35584
  source 1..120: mol_type = other DNA

SEQ ID NO: 65539 - DNA, 120 bp, synthetic construct; identical to SEQ ID NO: 10354
  source 1..120: mol_type = other DNA

SEQ ID NO: 65540 - DNA, 120 bp, synthetic construct; identical to SEQ ID NO: 35586
  source 1..120: mol_type = other DNA

SEQ ID NO: 65541 - DNA, 120 bp, synthetic construct; identical to SEQ ID NO: 35587
  source 1..120: mol_type = other DNA

SEQ ID NO: 65542 - DNA, 120 bp, synthetic construct; identical to SEQ ID NO: 35588
  source 1..120: mol_type = other DNA

SEQ ID NO: 65543 - DNA, 120 bp, synthetic construct; identical to SEQ ID NO: 10355
  source 1..120: mol_type = other DNA

SEQ ID NO: 65544 - DNA, 120 bp, synthetic construct; identical to SEQ ID NO: 35590
  source 1..120: mol_type = other DNA

SEQ ID NO: 65545 - DNA, 120 bp, synthetic construct; identical to SEQ ID NO: 35591
  source 1..120: mol_type = other DNA

SEQ ID NO: 65546 - DNA, 120 bp, synthetic construct; identical to SEQ ID NO: 35592
  source 1..120: mol_type = other DNA

SEQ ID NO: 65547 - DNA, 120 bp, synthetic construct; identical to SEQ ID NO: 10356
  source 1..120: mol_type = other DNA

SEQ ID NO: 65548 - DNA, 120 bp, synthetic construct; identical to SEQ ID NO: 35594
  source 1..120: mol_type = other DNA

SEQ ID NO: 65549 - DNA, 120 bp, synthetic construct; identical to SEQ ID NO: 35595
  source 1..120: mol_type = other DNA

SEQ ID NO: 65550 - DNA, 120 bp, synthetic construct; identical to SEQ ID NO: 10357
  source 1..120: mol_type = other DNA

SEQ ID NO: 65551 - DNA, 120 bp, synthetic construct; identical to SEQ ID NO: 35597
  source 1..120: mol_type = other DNA

SEQ ID NO: 65552 - DNA, 120 bp, synthetic construct; identical to SEQ ID NO: 35598
  source 1..120: mol_type = other DNA

SEQ ID NO: 65553 - DNA, 120 bp, synthetic construct; identical to SEQ ID NO: 35599
  source 1..120: mol_type = other DNA

SEQ ID NO: 65554 - DNA, 120 bp, synthetic construct; identical to SEQ ID NO: 10358
  source 1..120: mol_type = other DNA

SEQ ID NO: 65555 - DNA, 120 bp, synthetic construct; identical to SEQ ID NO: 35601
  source 1..120: mol_type = other DNA

SEQ ID NO: 65556 - DNA, 120 bp, synthetic construct; identical to SEQ ID NO: 35602
  source 1..120: mol_type = other DNA

SEQ ID NO: 65557 - DNA, 120 bp, synthetic construct; identical to SEQ ID NO: 35603
  source 1..120: mol_type = other DNA

SEQ ID NO: 65558 - DNA, 120 bp, synthetic construct; identical to SEQ ID NO: 10359
  source 1..120: mol_type = other DNA

SEQ ID NO: 65559 - DNA, 120 bp, synthetic construct; identical to SEQ ID NO: 35605
  source 1..120: mol_type = other DNA

SEQ ID NO: 65560 - DNA, 120 bp, synthetic construct; identical to SEQ ID NO: 35606
  source 1..120: mol_type = other DNA

SEQ ID NO: 65561 - DNA, 120 bp, synthetic construct; identical to SEQ ID NO: 35607
  source 1..120: mol_type = other DNA

SEQ ID NO: 65562 - DNA, 120 bp, synthetic construct; identical to SEQ ID NO: 35608
  source 1..120: mol_type = other DNA

SEQ ID NO: 65563 - DNA, 120 bp, synthetic construct; identical to SEQ ID NO: 10360
  source 1..120: mol_type = other DNA

SEQ ID NO: 65564 - DNA, 120 bp, synthetic construct; identical to SEQ ID NO: 35610
  source 1..120: mol_type = other DNA

SEQ ID NO: 65565 - DNA, 120 bp, synthetic construct; identical to SEQ ID NO: 35611
  source 1..120: mol_type = other DNA

SEQ ID NO: 65566 - DNA, 120 bp, synthetic construct; identical to SEQ ID NO: 35612
  source 1..120: mol_type = other DNA

SEQ ID NO: 65567 - DNA, 120 bp, synthetic construct; identical to SEQ ID NO: 10361
  source 1..120: mol_type = other DNA

SEQ ID NO: 65568 - DNA, 120 bp, synthetic construct; identical to SEQ ID NO: 35614
  source 1..120: mol_type = other DNA

SEQ ID NO: 65569 - DNA, 120 bp, synthetic construct; identical to SEQ ID NO: 35615
  source 1..120: mol_type = other DNA

SEQ ID NO: 65570 - DNA, 120 bp, synthetic construct; identical to SEQ ID NO: 10362
  source 1..120: mol_type = other DNA

SEQ ID NO: 65571 - DNA, 120 bp, synthetic construct; identical to SEQ ID NO: 35617
  source 1..120: mol_type = other DNA

SEQ ID NO: 65572 - DNA, 120 bp, synthetic construct; identical to SEQ ID NO: 35618
  source 1..120: mol_type = other DNA

SEQ ID NO: 65573 - DNA, 120 bp, synthetic construct; identical to SEQ ID NO: 35619
  source 1..120: mol_type = other DNA

SEQ ID NO: 65574 - DNA, 120 bp, synthetic construct; identical to SEQ ID NO: 35620
  source 1..120: mol_type = other DNA

SEQ ID NO: 65575 - DNA, 120 bp, synthetic construct; identical to SEQ ID NO: 10363
  source 1..120: mol_type = other DNA

SEQ ID NO: 65576 - DNA, 120 bp, synthetic construct; identical to SEQ ID NO: 35622
  source 1..120: mol_type = other DNA

SEQ ID NO: 65577 - DNA, 120 bp, synthetic construct; identical to SEQ ID NO: 35623
  source 1..120: mol_type = other DNA

SEQ ID NO: 65578 - DNA, 120 bp, synthetic construct; identical to SEQ ID NO: 10364
  source 1..120: mol_type = other DNA

SEQ ID NO: 65579 - DNA, 120 bp, synthetic construct; identical to SEQ ID NO: 35625
  source 1..120: mol_type = other DNA

SEQ ID NO: 65580 - DNA, 120 bp, synthetic construct; identical to SEQ ID NO: 35626
  source 1..120: mol_type = other DNA

SEQ ID NO: 65581 - DNA, 120 bp, synthetic construct; identical to SEQ ID NO: 35627
  source 1..120: mol_type = other DNA

SEQ ID NO: 65582 - DNA, 120 bp, synthetic construct; identical to SEQ ID NO: 35628
  source 1..120: mol_type = other DNA

SEQ ID NO: 65583 - DNA, 120 bp, synthetic construct; identical to SEQ ID NO: 10365
  source 1..120: mol_type = other DNA

SEQ ID NO: 65584 - DNA, 120 bp, synthetic construct; identical to SEQ ID NO: 35630
  source 1..120: mol_type = other DNA

SEQ ID NO: 65585 - DNA, 120 bp, synthetic construct; identical to SEQ ID NO: 35631
  source 1..120: mol_type = other DNA

SEQ ID NO: 65586 - DNA, 120 bp, synthetic construct; identical to SEQ ID NO: 35632
  source 1..120: mol_type = other DNA

SEQ ID NO: 65587 - DNA, 120 bp, synthetic construct; identical to SEQ ID NO: 10366
  source 1..120: mol_type = other DNA

SEQ ID NO: 65588 - DNA, 120 bp, synthetic construct; identical to SEQ ID NO: 35634
  source 1..120: mol_type = other DNA

SEQ ID NO: 65589 - DNA, 120 bp, synthetic construct; identical to SEQ ID NO: 35635
  source 1..120: mol_type = other DNA

SEQ ID NO: 65590 - DNA, 120 bp, synthetic construct; identical to SEQ ID NO: 35636
  source 1..120: mol_type = other DNA

SEQ ID NO: 65591 - DNA, 120 bp, synthetic construct; identical to SEQ ID NO: 35637
  source 1..120: mol_type = other DNA

SEQ ID NO: 65592 - DNA, 120 bp, synthetic construct; identical to SEQ ID NO: 10367
  source 1..120: mol_type = other DNA

SEQ ID NO: 65593 - DNA, 120 bp, synthetic construct; identical to SEQ ID NO: 35639
  source 1..120: mol_type = other DNA

SEQ ID NO: 65594 - DNA, 120 bp, synthetic construct; identical to SEQ ID NO: 35640
  source 1..120: mol_type = other DNA

SEQ ID NO: 65595 - DNA, 120 bp, synthetic construct; identical to SEQ ID NO: 10368
  source 1..120: mol_type = other DNA

SEQ ID NO: 65596 - DNA, 120 bp, synthetic construct; identical to SEQ ID NO: 35642
  source 1..120: mol_type = other DNA

SEQ ID NO: 65597 - DNA, 120 bp, synthetic construct; identical to SEQ ID NO: 35643
  source 1..120: mol_type = other DNA

SEQ ID NO: 65598 - DNA, 120 bp, synthetic construct; identical to SEQ ID NO: 10369
  source 1..120: mol_type = other DNA

SEQ ID NO: 65599 - DNA, 120 bp, synthetic construct; identical to SEQ ID NO: 35645
  source 1..120: mol_type = other DNA

SEQ ID NO: 65600 - DNA, 120 bp, synthetic construct; identical to SEQ ID NO: 35646
  source 1..120: mol_type = other DNA

SEQ ID NO: 65601 - DNA, 120 bp, synthetic construct; identical to SEQ ID NO: 10370
  source 1..120: mol_type = other DNA

SEQ ID NO: 65602 - DNA, 120 bp, synthetic construct; identical to SEQ ID NO: 35648
  source 1..120: mol_type = other DNA

SEQ ID NO: 65603 - DNA, 120 bp, synthetic construct; identical to SEQ ID NO: 35649
  source 1..120: mol_type = other DNA

SEQ ID NO: 65604 - DNA, 120 bp, synthetic construct; identical to SEQ ID NO: 35650
  source 1..120: mol_type = other DNA

SEQ ID NO: 65605 - DNA, 120 bp, synthetic construct; identical to SEQ ID NO: 10371
  source 1..120: mol_type = other DNA

SEQ ID NO: 65606 - DNA, 120 bp, synthetic construct; identical to SEQ ID NO: 35652
  source 1..120: mol_type = other DNA

SEQ ID NO: 65607 - DNA, 120 bp, synthetic construct; identical to SEQ ID NO: 35653
  source 1..120: mol_type = other DNA

SEQ ID NO: 65608 - DNA, 120 bp, synthetic construct; identical to SEQ ID NO: 35654
  source 1..120: mol_type = other DNA

SEQ ID NO: 65609 - DNA, 120 bp, synthetic construct; identical to SEQ ID NO: 3175
  source 1..120: mol_type = other DNA

SEQ ID NO: 65610 - DNA, 120 bp, synthetic construct; identical to SEQ ID NO: 35656
  source 1..120: mol_type = other DNA

SEQ ID NO: 65611 - DNA, 120 bp, synthetic construct; identical to SEQ ID NO: 35657
  source 1..120: mol_type = other DNA

SEQ ID NO: 65612 - DNA, 120 bp, synthetic construct; identical to SEQ ID NO: 35658
  source 1..120: mol_type = other DNA

SEQ ID NO: 65613 - DNA, 120 bp, synthetic construct; identical to SEQ ID NO: 10373
  source 1..120: mol_type = other DNA

SEQ ID NO: 65614 - DNA, 120 bp, synthetic construct; identical to SEQ ID NO: 35660
  source 1..120: mol_type = other DNA

SEQ ID NO: 65615 - DNA, 120 bp, synthetic construct; identical to SEQ ID NO: 35661
  source 1..120: mol_type = other DNA

SEQ ID NO: 65616 - DNA, 120 bp, synthetic construct; identical to SEQ ID NO: 35662
  source 1..120: mol_type = other DNA

SEQ ID NO: 65617 - DNA, 120 bp, synthetic construct; identical to SEQ ID NO: 10374
  source 1..120: mol_type = other DNA

SEQ ID NO: 65618 - DNA, 120 bp, synthetic construct; identical to SEQ ID NO: 35664
  source 1..120: mol_type = other DNA

SEQ ID NO: 65619 - DNA, 120 bp, synthetic construct; identical to SEQ ID NO: 35665
  source 1..120: mol_type = other DNA

SEQ ID NO: 65620 - DNA, 120 bp, synthetic construct; identical to SEQ ID NO: 35666
  source 1..120: mol_type = other DNA

SEQ ID NO: 65621 - DNA, 120 bp, synthetic construct; identical to SEQ ID NO: 35667
  source 1..120: mol_type = other DNA

SEQ ID NO: 65622 - DNA, 120 bp, synthetic construct; identical to SEQ ID NO: 10375
  source 1..120: mol_type = other DNA

SEQ ID NO: 65623 - DNA, 120 bp, synthetic construct; identical to SEQ ID NO: 35669
  source 1..120: mol_type = other DNA

SEQ ID NO: 65624 - DNA, 120 bp, synthetic construct; identical to SEQ ID NO: 35670
  source 1..120: mol_type = other DNA

SEQ ID NO: 65625 - DNA, 120 bp, synthetic construct; identical to SEQ ID NO: 35671
  source 1..120: mol_type = other DNA

SEQ ID NO: 65626 - DNA, 120 bp, synthetic construct; identical to SEQ ID NO: 10376
  source 1..120: mol_type = other DNA

SEQ ID NO: 65627 - DNA, 120 bp, synthetic construct; identical to SEQ ID NO: 35673
  source 1..120: mol_type = other DNA

SEQ ID NO: 65628 - DNA, 120 bp, synthetic construct; identical to SEQ ID NO: 35674
  source 1..120: mol_type = other DNA

SEQ ID NO: 65629 - DNA, 120 bp, synthetic construct; identical to SEQ ID NO: 10377
  source 1..120: mol_type = other DNA

SEQ ID NO: 65630 - DNA, 120 bp, synthetic construct; identical to SEQ ID NO: 35676
  source 1..120: mol_type = other DNA

SEQ ID NO: 65631 - DNA, 120 bp, synthetic construct; identical to SEQ ID NO: 35677
  source 1..120: mol_type = other DNA

SEQ ID NO: 65632 - DNA, 120 bp, synthetic construct; identical to SEQ ID NO: 35678
  source 1..120: mol_type = other DNA

SEQ ID NO: 65633 - DNA, 120 bp, synthetic construct; identical to SEQ ID NO: 10378
  source 1..120: mol_type = other DNA

SEQ ID NO: 65634 - DNA, 120 bp, synthetic construct; identical to SEQ ID NO: 35680
  source 1..120: mol_type = other DNA

SEQ ID NO: 65635 - DNA, 120 bp, synthetic construct; identical to SEQ ID NO: 35681
  source 1..120: mol_type = other DNA

SEQ ID NO: 65636 - DNA, 120 bp, synthetic construct; identical to SEQ ID NO: 35682
  source 1..120: mol_type = other DNA

SEQ ID NO: 65637 - DNA, 120 bp, synthetic construct; identical to SEQ ID NO: 10379
  source 1..120: mol_type = other DNA

SEQ ID NO: 65638 - DNA, 120 bp, synthetic construct; identical to SEQ ID NO: 35684
  source 1..120: mol_type = other DNA

SEQ ID NO: 65639 - DNA, 120 bp, synthetic construct; identical to SEQ ID NO: 35685
  source 1..120: mol_type = other DNA

SEQ ID NO: 65640 - DNA, 120 bp, synthetic construct; identical to SEQ ID NO: 35686
  source 1..120: mol_type = other DNA

SEQ ID NO: 65641 - DNA, 120 bp, synthetic construct; identical to SEQ ID NO: 10380
  source 1..120: mol_type = other DNA

SEQ ID NO: 65642 - DNA, 120 bp, synthetic construct; identical to SEQ ID NO: 35688
  source 1..120: mol_type = other DNA

SEQ ID NO: 65643 - DNA, 120 bp, synthetic construct; identical to SEQ ID NO: 35689
  source 1..120: mol_type = other DNA

SEQ ID NO: 65644 - DNA, 120 bp, synthetic construct; identical to SEQ ID NO: 35690
  source 1..120: mol_type = other DNA

SEQ ID NO: 65645 - DNA, 120 bp, synthetic construct; identical to SEQ ID NO: 10381
  source 1..120: mol_type = other DNA

SEQ ID NO: 65646 - DNA, 120 bp, synthetic construct; identical to SEQ ID NO: 35692
  source 1..120: mol_type = other DNA

SEQ ID NO: 65647 - DNA, 120 bp, synthetic construct; identical to SEQ ID NO: 35693
  source 1..120: mol_type = other DNA

SEQ ID NO: 65648 - DNA, 120 bp, synthetic construct; identical to SEQ ID NO: 3184
  source 1..120: mol_type = other DNA

SEQ ID NO: 65649 - DNA, 120 bp, synthetic construct; identical to SEQ ID NO: 35695
  source 1..120: mol_type = other DNA

SEQ ID NO: 65650 - DNA, 120 bp, synthetic construct; identical to SEQ ID NO: 10382
  source 1..120: mol_type = other DNA

SEQ ID NO: 65651 - DNA, 120 bp, synthetic construct; identical to SEQ ID NO: 35697
  source 1..120: mol_type = other DNA

SEQ ID NO: 65652 - DNA, 120 bp, synthetic construct; identical to SEQ ID NO: 10383
  source 1..120: mol_type = other DNA

SEQ ID NO: 65653 - DNA, 120 bp, synthetic construct; identical to SEQ ID NO: 35699
  source 1..120: mol_type = other DNA

SEQ ID NO: 65654 - DNA, 120 bp, synthetic construct; identical to SEQ ID NO: 35700
  source 1..120: mol_type = other DNA

SEQ ID NO: 65655 - DNA, 120 bp, synthetic construct; identical to SEQ ID NO: 35701
  source 1..120: mol_type = other DNA

SEQ ID NO: 65656 - DNA, 120 bp, synthetic construct; identical to SEQ ID NO: 10384
  source 1..120: mol_type = other DNA

SEQ ID NO: 65657 - DNA, 120 bp, synthetic construct; identical to SEQ ID NO: 35703
  source 1..120: mol_type = other DNA

SEQ ID NO: 65658 - DNA, 120 bp, synthetic construct; identical to SEQ ID NO: 35704
  source 1..120: mol_type = other DNA

SEQ ID NO: 65659 - DNA, 120 bp, synthetic construct; identical to SEQ ID NO: 35705
  source 1..120: mol_type = other DNA

SEQ ID NO: 65660 - DNA, 120 bp, synthetic construct; identical to SEQ ID NO: 35706
  source 1..120: mol_type = other DNA

SEQ ID NO: 65661 - DNA, 120 bp, synthetic construct; identical to SEQ ID NO: 10385
  source 1..120: mol_type = other DNA

SEQ ID NO: 65662 - DNA, 120 bp, synthetic construct; identical to SEQ ID NO: 35708
  source 1..120: mol_type = other DNA

SEQ ID NO: 65663 - DNA, 120 bp, synthetic construct; identical to SEQ ID NO: 35709
  source 1..120: mol_type = other DNA

SEQ ID NO: 65664 - DNA, 120 bp, synthetic construct; identical to SEQ ID NO: 35710
  source 1..120: mol_type = other DNA

SEQ ID NO: 65665 - DNA, 120 bp, synthetic construct; identical to SEQ ID NO: 10386
  source 1..120: mol_type = other DNA

SEQ ID NO: 65666 - DNA, 120 bp, synthetic construct; identical to SEQ ID NO: 35712
  source 1..120: mol_type = other DNA

SEQ ID NO: 65667 - DNA, 120 bp, synthetic construct; identical to SEQ ID NO: 35713
  source 1..120: mol_type = other DNA

SEQ ID NO: 65668 - DNA, 120 bp, synthetic construct; identical to SEQ ID NO: 10387
  source 1..120: mol_type = other DNA

SEQ ID NO: 65669 - DNA, 120 bp, synthetic construct; identical to SEQ ID NO: 35715
  source 1..120: mol_type = other DNA

SEQ ID NO: 65670 - DNA, 120 bp, synthetic construct; identical to SEQ ID NO: 35716
  source 1..120: mol_type = other DNA

SEQ ID NO: 65671 - DNA, 120 bp, synthetic construct; identical to SEQ ID NO: 35717
  source 1..120: mol_type = other DNA

SEQ ID NO: 65672 - DNA, 120 bp, synthetic construct; identical to SEQ ID NO: 10388
  source 1..120: mol_type = other DNA

SEQ ID NO: 65673 - DNA, 120 bp, synthetic construct; identical to SEQ ID NO: 35719
  source 1..120: mol_type = other DNA

SEQ ID NO: 65674 - DNA, 120 bp, synthetic construct; identical to SEQ ID NO: 35720
  source 1..120: mol_type = other DNA

SEQ ID NO: 65675 - DNA, 120 bp, synthetic construct; identical to SEQ ID NO: 35721
  source 1..120: mol_type = other DNA

SEQ ID NO: 65676 - DNA, 120 bp, synthetic construct; identical to SEQ ID NO: 35722
  source 1..120: mol_type = other DNA

SEQ ID NO: 65677 - DNA, 120 bp, synthetic construct; identical to SEQ ID NO: 10389
  source 1..120: mol_type = other DNA

SEQ ID NO: 65678 - DNA, 120 bp, synthetic construct; identical to SEQ ID NO: 35724
  source 1..120: mol_type = other DNA

SEQ ID NO: 65679 - DNA, 120 bp, synthetic construct; identical to SEQ ID NO: 35725
  source 1..120: mol_type = other DNA

SEQ ID NO: 65680 - DNA, 120 bp, synthetic construct; identical to SEQ ID NO: 35726
  source 1..120: mol_type = other DNA

SEQ ID NO: 65681 - DNA, 120 bp, synthetic construct; identical to SEQ ID NO: 3192
  source 1..120: mol_type = other DNA

SEQ ID NO: 65682 - DNA, 120 bp, synthetic construct; identical to SEQ ID NO: 35728
  source 1..120: mol_type = other DNA

SEQ ID NO: 65683 - DNA, 120 bp, synthetic construct; identical to SEQ ID NO: 35729
  source 1..120: mol_type = other DNA

SEQ ID NO: 65684 - DNA, 120 bp, synthetic construct; identical to SEQ ID NO: 35730
  source 1..120: mol_type = other DNA

SEQ ID NO: 65685 - DNA, 120 bp, synthetic construct; identical to SEQ ID NO: 10391
  source 1..120: mol_type = other DNA

SEQ ID NO: 65686 - DNA, 120 bp, synthetic construct; identical to SEQ ID NO: 35732
  source 1..120: mol_type = other DNA

SEQ ID NO: 65687 - DNA, 120 bp, synthetic construct; identical to SEQ ID NO: 35733
  source 1..120: mol_type = other DNA

SEQ ID NO: 65688 - DNA, 120 bp, synthetic construct; identical to SEQ ID NO: 35734
  source 1..120: mol_type = other DNA

SEQ ID NO: 65689 - DNA, 120 bp, synthetic construct; identical to SEQ ID NO: 10392
  source 1..120: mol_type = other DNA

SEQ ID NO: 65690 - DNA, 120 bp, synthetic construct; identical to SEQ ID NO: 35736
  source 1..120: mol_type = other DNA

SEQ ID NO: 65691 - DNA, 120 bp, synthetic construct; identical to SEQ ID NO: 35737
  source 1..120: mol_type = other DNA

SEQ ID NO: 65692 - DNA, 120 bp, synthetic construct; identical to SEQ ID NO: 35738
  source 1..120: mol_type = other DNA

SEQ ID NO: 65693 - DNA, 120 bp, synthetic construct; identical to SEQ ID NO: 10393
  source 1..120: mol_type = other DNA

SEQ ID NO: 65694 - DNA, 120 bp, synthetic construct; identical to SEQ ID NO: 3195
  source 1..120: mol_type = other DNA

SEQ ID NO: 65695 - DNA, 120 bp, synthetic construct; identical to SEQ ID NO: 35741
  source 1..120: mol_type = other DNA

SEQ ID NO: 65696 - DNA, 120 bp, synthetic construct; identical to SEQ ID NO: 35742
  source 1..120: mol_type = other DNA

SEQ ID NO: 65697 - DNA, 120 bp, synthetic construct; identical to SEQ ID NO: 10394
  source 1..120: mol_type = other DNA

SEQ ID NO: 65698 - DNA, 120 bp, synthetic construct; identical to SEQ ID NO: 35744
  source 1..120: mol_type = other DNA

SEQ ID NO: 65699 - DNA, 120 bp, synthetic construct; identical to SEQ ID NO: 35745
  source 1..120: mol_type = other DNA

SEQ ID NO: 65700 - DNA, 120 bp, synthetic construct; identical to SEQ ID NO: 35746
  source 1..120: mol_type = other DNA

SEQ ID NO: 65701 - DNA, 120 bp, synthetic construct; identical to SEQ ID NO: 10395
  source 1..120: mol_type = other DNA

SEQ ID NO: 65702 - DNA, 120 bp, synthetic construct; identical to SEQ ID NO: 35748
  source 1..120: mol_type = other DNA

SEQ ID NO: 65703 - DNA, 120 bp, synthetic construct; identical to SEQ ID NO: 35749
  source 1..120: mol_type = other DNA

SEQ ID NO: 65704 - DNA, 120 bp, synthetic construct; identical to SEQ ID NO: 35750
  source 1..120: mol_type = other DNA

SEQ ID NO: 65705 - DNA, 120 bp, synthetic construct; identical to SEQ ID NO: 10396
  source 1..120: mol_type = other DNA

SEQ ID NO: 65706 - DNA, 120 bp, synthetic construct; identical to SEQ ID NO: 35752
  source 1..120: mol_type = other DNA

SEQ ID NO: 65707 - DNA, 120 bp, synthetic construct; identical to SEQ ID NO: 35753
  source 1..120: mol_type = other DNA

SEQ ID NO: 65708 - DNA, 120 bp, synthetic construct; identical to SEQ ID NO: 35754
  source 1..120: mol_type = other DNA

SEQ ID NO: 65709 - DNA, 120 bp, synthetic construct; identical to SEQ ID NO: 10397
  source 1..120: mol_type = other DNA

SEQ ID NO: 65710 - DNA, 120 bp, synthetic construct; identical to SEQ ID NO: 35756
  source 1..120: mol_type = other DNA

SEQ ID NO: 65711 - DNA, 120 bp, synthetic construct; identical to SEQ ID NO: 35757
  source 1..120: mol_type = other DNA

SEQ ID NO: 65712 - DNA, 120 bp, synthetic construct; identical to SEQ ID NO: 35758
  source 1..120: mol_type = other DNA

SEQ ID NO: 65713 - DNA, 120 bp, synthetic construct; identical to SEQ ID NO: 10398
  source 1..120: mol_type = other DNA

SEQ ID NO: 65714 - DNA, 120 bp, synthetic construct; identical to SEQ ID NO: 35760
  source 1..120: mol_type = other DNA

SEQ ID NO: 65715 - DNA, 120 bp, synthetic construct; identical to SEQ ID NO: 3200
  source 1..120: mol_type = other DNA

SEQ ID NO: 65716 - DNA, 120 bp, synthetic construct; identical to SEQ ID NO: 35762
  source 1..120: mol_type = other DNA

SEQ ID NO: 65717 - DNA, 120 bp, synthetic construct; identical to SEQ ID NO: 35763
  source 1..120: mol_type = other DNA

SEQ ID NO: 65718 - DNA, 120 bp, synthetic construct; identical to SEQ ID NO: 10399
  source 1..120: mol_type = other DNA

SEQ ID NO: 65719 - DNA, 120 bp, synthetic construct; identical to SEQ ID NO: 35765
  source 1..120: mol_type = other DNA

SEQ ID NO: 65720 - DNA, 120 bp, synthetic construct; identical to SEQ ID NO: 35766
  source 1..120: mol_type = other DNA

SEQ ID NO: 65721 - DNA, 120 bp, synthetic construct; identical to SEQ ID NO: 10400
  source 1..120: mol_type = other DNA

SEQ ID NO: 65722 - DNA, 120 bp, synthetic construct; identical to SEQ ID NO: 35768
  source 1..120: mol_type = other DNA

SEQ ID NO: 65723 - DNA, 120 bp, synthetic construct; identical to SEQ ID NO: 35769
  source 1..120: mol_type = other DNA

SEQ ID NO: 65724 - DNA, 120 bp, synthetic construct; identical to SEQ ID NO: 35770
  source 1..120: mol_type = other DNA

SEQ ID NO: 65725 - DNA, 120 bp, synthetic construct; identical to SEQ ID NO: 10401
  source 1..120: mol_type = other DNA

SEQ ID NO: 65726 - DNA, 120 bp, synthetic construct; identical to SEQ ID NO: 35772
  source 1..120: mol_type = other DNA

SEQ ID NO: 65727 - DNA, 120 bp, synthetic construct; identical to SEQ ID NO: 35773
  source 1..120: mol_type = other DNA

SEQ ID NO: 65728 - DNA, 120 bp, synthetic construct; identical to SEQ ID NO: 35774
  source 1..120: mol_type = other DNA

SEQ ID NO: 65729 - DNA, 120 bp, synthetic construct; identical to SEQ ID NO: 10402
  source 1..120: mol_type = other DNA

SEQ ID NO: 65730 - DNA, 120 bp, synthetic construct; identical to SEQ ID NO: 35776
  source 1..120: mol_type = other DNA

SEQ ID NO: 65731 - DNA, 120 bp, synthetic construct; identical to SEQ ID NO: 35777
  source 1..120: mol_type = other DNA

SEQ ID NO: 65732 - DNA, 120 bp, synthetic construct; identical to SEQ ID NO: 35778
  source 1..120: mol_type = other DNA

SEQ ID NO: 65733 - DNA, 120 bp, synthetic construct; identical to SEQ ID NO: 10403
  source 1..120: mol_type = other DNA

SEQ ID NO: 65734 - DNA, 120 bp, synthetic construct; identical to SEQ ID NO: 35780
  source 1..120: mol_type = other DNA

SEQ ID NO: 65735 - DNA, 120 bp, synthetic construct; identical to SEQ ID NO: 35781
  source 1..120: mol_type = other DNA

SEQ ID NO: 65736 - DNA, 120 bp, synthetic construct; identical to SEQ ID NO: 35782
  source 1..120: mol_type = other DNA

SEQ ID NO: 65737 - DNA, 120 bp, synthetic construct; identical to SEQ ID NO: 10404
  source 1..120: mol_type = other DNA

SEQ ID NO: 65738 - DNA, 120 bp, synthetic construct; identical to SEQ ID NO: 35784
  source 1..120: mol_type = other DNA

SEQ ID NO: 65739 - DNA, 120 bp, synthetic construct; identical to SEQ ID NO: 35785
  source 1..120: mol_type = other DNA

SEQ ID NO: 65740 - DNA, 120 bp, synthetic construct; identical to SEQ ID NO: 35786
  source 1..120: mol_type = other DNA

SEQ ID NO: 65741 - DNA, 120 bp, synthetic construct; identical to SEQ ID NO: 10405
  source 1..120: mol_type = other DNA

SEQ ID NO: 65742 - DNA, 120 bp, synthetic construct; identical to SEQ ID NO: 35788
  source 1..120: mol_type = other DNA

SEQ ID NO: 65743 - DNA, 120 bp, synthetic construct; identical to SEQ ID NO: 35789
  source 1..120: mol_type = other DNA

SEQ ID NO: 65744 - DNA, 120 bp, synthetic construct; identical to SEQ ID NO: 35790
  source 1..120: mol_type = other DNA

SEQ ID NO: 65745 - DNA, 120 bp, synthetic construct; identical to SEQ ID NO: 35791
  source 1..120: mol_type = other DNA

SEQ ID NO: 65746 - DNA, 120 bp, synthetic construct; identical to SEQ ID NO: 10406
  source 1..120: mol_type = other DNA

SEQ ID NO: 65747 - DNA, 120 bp, synthetic construct; identical to SEQ ID NO: 35793
  source 1..120: mol_type = other DNA

SEQ ID NO: 65748 - DNA, 120 bp, synthetic construct; identical to SEQ ID NO: 35794
  source 1..120: mol_type = other DNA

SEQ ID NO: 65749 - DNA, 120 bp, synthetic construct; identical to SEQ ID NO: 35795
  source 1..120: mol_type = other DNA

SEQ ID NO: 65750 - DNA, 120 bp, synthetic construct; identical to SEQ ID NO: 10407
  source 1..120: mol_type = other DNA

SEQ ID NO: 65751 - DNA, 120 bp, synthetic construct; identical to SEQ ID NO: 35797
  source 1..120: mol_type = other DNA

SEQ ID NO: 65752 - DNA, 120 bp, synthetic construct; identical to SEQ ID NO: 35798
  source 1..120: mol_type = other DNA

SEQ ID NO: 65753 - DNA, 120 bp, synthetic construct; identical to SEQ ID NO: 10408
  source 1..120: mol_type = other DNA

SEQ ID NO: 65754 - DNA, 120 bp, synthetic construct; identical to SEQ ID NO: 35800
  source 1..120: mol_type = other DNA

SEQ ID NO: 65755 - DNA, 120 bp, synthetic construct; identical to SEQ ID NO: 35801
  source 1..120: mol_type = other DNA

SEQ ID NO: 65756 - DNA, 120 bp, synthetic construct; identical to SEQ ID NO: 35802
  source 1..120: mol_type = other DNA

SEQ ID NO: 65757 - DNA, 120 bp, synthetic construct; identical to SEQ ID NO: 35803
  source 1..120: mol_type = other DNA

SEQ ID NO: 65758 - DNA, 120 bp, synthetic construct; identical to SEQ ID NO: 10409
  source 1..120: mol_type = other DNA

SEQ ID NO: 65759 - DNA, 120 bp, synthetic construct; identical to SEQ ID NO: 35805
  source 1..120: mol_type = other DNA

SEQ ID NO: 65760 - DNA, 120 bp, synthetic construct; identical to SEQ ID NO: 35806
  source 1..120: mol_type = other DNA

SEQ ID NO: 65761 - DNA, 120 bp, synthetic construct; identical to SEQ ID NO: 10410
  source 1..120: mol_type = other DNA

SEQ ID NO: 65762 - DNA, 120 bp, synthetic construct; identical to SEQ ID NO: 35808
  source 1..120: mol_type = other DNA

SEQ ID NO: 65763 - DNA, 120 bp, synthetic construct; identical to SEQ ID NO: 35809
  source 1..120: mol_type = other DNA

SEQ ID NO: 65764 - DNA, 120 bp, synthetic construct; identical to SEQ ID NO: 35810
  source 1..120: mol_type = other DNA

SEQ ID NO: 65765 - DNA, 120 bp, synthetic construct; identical to SEQ ID NO: 35811
  source 1..120: mol_type = other DNA

SEQ ID NO: 65766 - DNA, 120 bp, synthetic construct; identical to SEQ ID NO: 10411
  source 1..120: mol_type = other DNA

SEQ ID NO: 65767 - DNA, 120 bp, synthetic construct; identical to SEQ ID NO: 35813
  source 1..120: mol_type = other DNA

SEQ ID NO: 65768 - DNA, 120 bp, synthetic construct; identical to SEQ ID NO: 35814
  source 1..120: mol_type = other DNA

SEQ ID NO: 65769 - DNA, 120 bp, synthetic construct; identical to SEQ ID NO: 35815
  source 1..120: mol_type = other DNA

SEQ ID NO: 65770 - DNA, 120 bp, synthetic construct; identical to SEQ ID NO: 10412
  source 1..120: mol_type = other DNA

SEQ ID NO: 65771 - DNA, 120 bp, synthetic construct; identical to SEQ ID NO: 35817
  source 1..120: mol_type = other DNA

SEQ ID NO: 65772 - DNA, 120 bp, synthetic construct; identical to SEQ ID NO: 35818
  source 1..120: mol_type = other DNA

SEQ ID NO: 65773 - DNA, 120 bp, synthetic construct; identical to SEQ ID NO: 35819
  source 1..120: mol_type = other DNA

SEQ ID NO: 65774 - DNA, 120 bp, synthetic construct; identical to SEQ ID NO: 10413
  source 1..120: mol_type = other DNA

SEQ ID NO: 65775 - DNA, 120 bp, synthetic construct; identical to SEQ ID NO: 35821
  source 1..120: mol_type = other DNA

SEQ ID NO: 65776 - DNA, 120 bp, synthetic construct; identical to SEQ ID NO: 35822
  source 1..120: mol_type = other DNA

SEQ ID NO: 65777 - DNA, 120 bp, synthetic construct; identical to SEQ ID NO: 3214
  source 1..120: mol_type = other DNA

SEQ ID NO: 65778 - DNA, 120 bp, synthetic construct; identical to SEQ ID NO: 35824
  source 1..120: mol_type = other DNA

SEQ ID NO: 65779 - DNA, 120 bp, synthetic construct; identical to SEQ ID NO: 35825
  source 1..120: mol_type = other DNA

SEQ ID NO: 65780 - DNA, 120 bp, synthetic construct; identical to SEQ ID NO: 35826
  source 1..120: mol_type = other DNA

SEQ ID NO: 65781 - DNA, 120 bp, synthetic construct; identical to SEQ ID NO: 10415
  source 1..120: mol_type = other DNA

SEQ ID NO: 65782 - DNA, 120 bp, synthetic construct; identical to SEQ ID NO: 35828
  source 1..120: mol_type = other DNA

SEQ ID NO: 65783 - DNA, 120 bp, synthetic construct; identical to SEQ ID NO: 35829
  source 1..120: mol_type = other DNA

SEQ ID NO: 65784 - DNA, 120 bp, synthetic construct; identical to SEQ ID NO: 35830
  source 1..120: mol_type = other DNA

SEQ ID NO: 65785 - DNA, 120 bp, synthetic construct; identical to SEQ ID NO: 10416
  source 1..120: mol_type = other DNA

SEQ ID NO: 65786 - DNA, 120 bp, synthetic construct; identical to SEQ ID NO: 35832
  source 1..120: mol_type = other DNA

SEQ ID NO: 65787 - DNA, 120 bp, synthetic construct; identical to SEQ ID NO: 35833
  source 1..120: mol_type = other DNA

SEQ ID NO: 65788 - DNA, 120 bp, synthetic construct; identical to SEQ ID NO: 35834
  source 1..120: mol_type = other DNA

SEQ ID NO: 65789 - DNA, 120 bp, synthetic construct; identical to SEQ ID NO: 35835
  source 1..120: mol_type = other DNA

SEQ ID NO: 65790 - DNA, 120 bp, synthetic construct; identical to SEQ ID NO: 10417
  source 1..120: mol_type = other DNA

SEQ ID NO: 65791 - DNA, 120 bp, synthetic construct; identical to SEQ ID NO: 35837
  source 1..120: mol_type = other DNA

SEQ ID NO: 65792 - DNA, 120 bp, synthetic construct; identical to SEQ ID NO: 35838
  source 1..120: mol_type = other DNA

SEQ ID NO: 65793 - DNA, 120 bp, synthetic construct; identical to SEQ ID NO: 10418
  source 1..120: mol_type = other DNA

SEQ ID NO: 65794 - DNA, 120 bp, synthetic construct; identical to SEQ ID NO: 35840
  source 1..120: mol_type = other DNA

SEQ ID NO: 65795 - DNA, 120 bp, synthetic construct; identical to SEQ ID NO: 35841
  source 1..120: mol_type = other DNA

SEQ ID NO: 65796 - DNA, 120 bp, synthetic construct; identical to SEQ ID NO: 35842
  source 1..120: mol_type = other DNA

SEQ ID NO: 65797 - DNA, 120 bp, synthetic construct; identical to SEQ ID NO: 10419
  source 1..120: mol_type = other DNA

SEQ ID NO: 65798 - DNA, 120 bp, synthetic construct; identical to SEQ ID NO: 35844
  source 1..120: mol_type = other DNA

SEQ ID NO: 65799 - DNA, 120 bp, synthetic construct; identical to SEQ ID NO: 35845
  source 1..120: mol_type = other DNA

SEQ ID NO: 65800 - DNA, 120 bp, synthetic construct; identical to SEQ ID NO: 35846
  source 1..120: mol_type = other DNA

SEQ ID NO: 65801 - DNA, 120 bp, synthetic construct; identical to SEQ ID NO: 10420
  source 1..120: mol_type = other DNA

SEQ ID NO: 65802 - DNA, 120 bp, synthetic construct; identical to SEQ ID NO: 35848
  source 1..120: mol_type = other DNA

SEQ ID NO: 65803 - DNA, 120 bp, synthetic construct; identical to SEQ ID NO: 35849
  source 1..120: mol_type = other DNA

SEQ ID NO: 65804 - DNA, 120 bp, synthetic construct; identical to SEQ ID NO: 10421
  source 1..120: mol_type = other DNA

SEQ ID NO: 65805 - DNA, 120 bp, synthetic construct; identical to SEQ ID NO: 35851
  source 1..120: mol_type = other DNA

SEQ ID NO: 65806 - DNA, 120 bp, synthetic construct; identical to SEQ ID NO: 35852
  source 1..120: mol_type = other DNA

SEQ ID NO: 65807 - DNA, 120 bp, synthetic construct; identical to SEQ ID NO: 35853
  source 1..120: mol_type = other DNA

SEQ ID NO: 65808 - DNA, 120 bp, synthetic construct; identical to SEQ ID NO: 35854
  source 1..120: mol_type = other DNA

SEQ ID NO: 65809 - DNA, 120 bp, synthetic construct; identical to SEQ ID NO: 10422
  source 1..120: mol_type = other DNA

SEQ ID NO: 65810 - DNA, 120 bp, synthetic construct; identical to SEQ ID NO: 35856
  source 1..120: mol_type = other DNA

SEQ ID NO: 65811 - DNA, 120 bp, synthetic construct; identical to SEQ ID NO: 35857
  source 1..120: mol_type = other DNA

SEQ ID NO: 65812 - DNA, 120 bp, synthetic construct; identical to SEQ ID NO: 3222
  source 1..120: mol_type = other DNA

SEQ ID NO: 65813 - DNA, 120 bp, synthetic construct; identical to SEQ ID NO: 35859
  source 1..120: mol_type = other DNA

SEQ ID NO: 65814 - DNA, 120 bp, synthetic construct; identical to SEQ ID NO: 35860
  source 1..120: mol_type = other DNA

SEQ ID NO: 65815 - DNA, 120 bp, synthetic construct; identical to SEQ ID NO: 35861
  source 1..120: mol_type = other DNA

SEQ ID NO: 65816 - DNA, 120 bp, synthetic construct; identical to SEQ ID NO: 10424
  source 1..120: mol_type = other DNA

SEQ ID NO: 65817 - DNA, 120 bp, synthetic construct; identical to SEQ ID NO: 35863
  source 1..120: mol_type = other DNA

SEQ ID NO: 65818 - DNA, 120 bp, synthetic construct; identical to SEQ ID NO: 35864
  source 1..120: mol_type = other DNA

SEQ ID NO: 65819 - DNA, 120 bp, synthetic construct; identical to SEQ ID NO: 10425
  source 1..120: mol_type = other DNA

SEQ ID NO: 65820 - DNA, 120 bp, synthetic construct; identical to SEQ ID NO: 35866
  source 1..120: mol_type = other DNA

SEQ ID NO: 65821 - DNA, 120 bp, synthetic construct; identical to SEQ ID NO: 35867
  source 1..120: mol_type = other DNA

SEQ ID NO: 65822 - DNA, 120 bp, synthetic construct; identical to SEQ ID NO: 35868
  source 1..120: mol_type = other DNA

SEQ ID NO: 65823 - DNA, 120 bp, synthetic construct; identical to SEQ ID NO: 35869
  source 1..120: mol_type = other DNA

SEQ ID NO: 65824 - DNA, 120 bp, synthetic construct; identical to SEQ ID NO: 10426
  source 1..120: mol_type = other DNA

SEQ ID NO: 65825 - DNA, 120 bp, synthetic construct; identical to SEQ ID NO: 35871
  source 1..120: mol_type = other DNA

SEQ ID NO: 65826 - DNA, 120 bp, synthetic construct; identical to SEQ ID NO: 35872
  source 1..120: mol_type = other DNA

SEQ ID NO: 65827 - DNA, 120 bp, synthetic construct; identical to SEQ ID NO: 35873
  source 1..120: mol_type = other DNA

SEQ ID NO: 65828 - DNA, 120 bp, synthetic construct; identical to SEQ ID NO: 10427
  source 1..120: mol_type = other DNA

SEQ ID NO: 65829 - DNA, 120 bp, synthetic construct; identical to SEQ ID NO: 35875
  source 1..120: mol_type = other DNA

SEQ ID NO: 65830 - DNA, 120 bp, synthetic construct; identical to SEQ ID NO: 35876
  source 1..120: mol_type = other DNA

SEQ ID NO: 65831 - DNA, 120 bp, synthetic construct; identical to SEQ ID NO: 35877
  source 1..120: mol_type = other DNA

SEQ ID NO: 65832 - DNA, 120 bp, synthetic construct; identical to SEQ ID NO: 3227
  source 1..120: mol_type = other DNA

SEQ ID NO: 65833 - DNA, 120 bp, synthetic construct; identical to SEQ ID NO: 35879
  source 1..120: mol_type = other DNA

SEQ ID NO: 65834 - DNA, 120 bp, synthetic construct; identical to SEQ ID NO: 35880
  source 1..120: mol_type = other DNA

SEQ ID NO: 65835 - DNA, 120 bp, synthetic construct; identical to SEQ ID NO: 35881
  source 1..120: mol_type = other DNA

SEQ ID NO: 65836 - DNA, 120 bp, synthetic construct; identical to SEQ ID NO: 35882
  source 1..120: mol_type = other DNA

SEQ ID NO: 65837 - DNA, 120 bp, synthetic construct; identical to SEQ ID NO: 10429
  source 1..120: mol_type = other DNA

SEQ ID NO: 65838 - DNA, 120 bp, synthetic construct; identical to SEQ ID NO: 35884
  source 1..120: mol_type = other DNA

SEQ ID NO: 65839 - DNA, 120 bp, synthetic construct; identical to SEQ ID NO: 35885
  source 1..120: mol_type = other DNA

SEQ ID NO: 65840 - DNA, 120 bp, synthetic construct; identical to SEQ ID NO: 10430
  source 1..120: mol_type = other DNA

SEQ ID NO: 65841 - DNA, 120 bp, synthetic construct; identical to SEQ ID NO: 3229
  source 1..120: mol_type = other DNA

SEQ ID NO: 65842 - DNA, 120 bp, synthetic construct; identical to SEQ ID NO: 35888
  source 1..120: mol_type = other DNA

SEQ ID NO: 65843 - DNA, 120 bp, synthetic construct; identical to SEQ ID NO: 35889
  source 1..120: mol_type = other DNA

SEQ ID NO: 65844 - DNA, 120 bp, synthetic construct; identical to SEQ ID NO: 35890
  source 1..120: mol_type = other DNA

SEQ ID NO: 65845 - DNA, 120 bp, synthetic construct; identical to SEQ ID NO: 10431
  source 1..120: mol_type = other DNA

SEQ ID NO: 65846 - DNA, 120 bp, synthetic construct; identical to SEQ ID NO: 35892
  source 1..120: mol_type = other DNA

SEQ ID NO: 65847 - DNA, 120 bp, synthetic construct; identical to SEQ ID NO: 35893
  source 1..120: mol_type = other DNA

SEQ ID NO: 65848 - DNA, 120 bp, synthetic construct; identical to SEQ ID NO: 35894
  source 1..120: mol_type = other DNA

SEQ ID NO: 65849 - DNA, 120 bp, synthetic construct; identical to SEQ ID NO: 10432
  source 1..120: mol_type = other DNA

SEQ ID NO: 65850 - DNA, 120 bp, synthetic construct; identical to SEQ ID NO: 35896
  source 1..120: mol_type = other DNA

SEQ ID NO: 65851 - DNA, 120 bp, synthetic construct; identical to SEQ ID NO: 35897
  source 1..120: mol_type = other DNA

SEQ ID NO: 65852 - DNA, 120 bp, synthetic construct; identical to SEQ ID NO: 10433
  source 1..120: mol_type = other DNA

SEQ ID NO: 65853 - DNA, 120 bp, synthetic construct; identical to SEQ ID NO: 35899
  source 1..120: mol_type = other DNA

SEQ ID NO: 65854 - DNA, 120 bp, synthetic construct; identical to SEQ ID NO: 35900
  source 1..120: mol_type = other DNA

SEQ ID NO: 65855 - DNA, 120 bp, synthetic construct; identical to SEQ ID NO: 35901
  source 1..120: mol_type = other DNA

SEQ ID NO: 65856 - DNA, 120 bp, synthetic construct; identical to SEQ ID NO: 10434
  source 1..120: mol_type = other DNA

SEQ ID NO: 65857 - DNA, 120 bp, synthetic construct; identical to SEQ ID NO: 35903
  source 1..120: mol_type = other DNA

SEQ ID NO: 65858 - DNA, 120 bp, synthetic construct; identical to SEQ ID NO: 35904
  source 1..120: mol_type = other DNA

SEQ ID NO: 65859 - DNA, 120 bp, synthetic construct; identical to SEQ ID NO: 35905
  source 1..120: mol_type = other DNA

SEQ ID NO: 65860 - DNA, 120 bp, synthetic construct; identical to SEQ ID NO: 10435
  source 1..120: mol_type = other DNA

SEQ ID NO: 65861 - DNA, 120 bp, synthetic construct; identical to SEQ ID NO: 35907
  source 1..120: mol_type = other DNA

SEQ ID NO: 65862 - DNA, 120 bp, synthetic construct; identical to SEQ ID NO: 35908
  source 1..120: mol_type = other DNA

SEQ ID NO: 65863 - DNA, 120 bp, synthetic construct; identical to SEQ ID NO: 35909
  source 1..120: mol_type = other DNA

SEQ ID NO: 65864 - DNA, 120 bp, synthetic construct; identical to SEQ ID NO: 35910
  source 1..120: mol_type = other DNA

SEQ ID NO: 65865 - DNA, 120 bp, synthetic construct; identical to SEQ ID NO: 10436
  source 1..120: mol_type = other DNA

SEQ ID NO: 65866 - DNA, 120 bp, synthetic construct; identical to SEQ ID NO: 35912
  source 1..120: mol_type = other DNA

SEQ ID NO: 65867 - DNA, 120 bp, synthetic construct; identical to SEQ ID NO: 35913
  source 1..120: mol_type = other DNA

SEQ ID NO: 65868 - DNA, 120 bp, synthetic construct; identical to SEQ ID NO: 10437
  source 1..120: mol_type = other DNA

SEQ ID NO: 65869 - DNA, 120 bp, synthetic construct; identical to SEQ ID NO: 35915
  source 1..120: mol_type = other DNA

SEQ ID NO: 65870 - DNA, 120 bp, synthetic construct; identical to SEQ ID NO: 35916
  source 1..120: mol_type = other DNA

SEQ ID NO: 65871 - DNA, 120 bp, synthetic construct; identical to SEQ ID NO: 35917
  source 1..120: mol_type = other DNA

SEQ ID NO: 65872 - DNA, 120 bp, synthetic construct; identical to SEQ ID NO: 35918
  source 1..120: mol_type = other DNA

SEQ ID NO: 65873 - DNA, 120 bp, synthetic construct; identical to SEQ ID NO: 10438
  source 1..120: mol_type = other DNA

SEQ ID NO: 65874 - DNA, 120 bp, synthetic construct; identical to SEQ ID NO: 35920
  source 1..120: mol_type = other DNA

SEQ ID NO: 65875 - DNA, 120 bp, synthetic construct; identical to SEQ ID NO: 35921
  source 1..120: mol_type = other DNA

SEQ ID NO: 65876 - DNA, 120 bp, synthetic construct; identical to SEQ ID NO: 35922
  source 1..120: mol_type = other DNA

SEQ ID NO: 65877 - DNA, 120 bp, synthetic construct; identical to SEQ ID NO: 10439
  source 1..120: mol_type = other DNA

SEQ ID NO: 65878 - DNA, 120 bp, synthetic construct; identical to SEQ ID NO: 35924
  source 1..120: mol_type = other DNA

SEQ ID NO: 65879 - DNA, 120 bp, synthetic construct; identical to SEQ ID NO: 35925
  source 1..120: mol_type = other DNA

SEQ ID NO: 65880 - DNA, 120 bp, synthetic construct; identical to SEQ ID NO: 35926
  source 1..120: mol_type = other DNA

SEQ ID NO: 65881 - DNA, 120 bp, synthetic construct; identical to SEQ ID NO: 10440
  source 1..120: mol_type = other DNA

SEQ ID NO: 65882 - DNA, 120 bp, synthetic construct; identical to SEQ ID NO: 35928
  source 1..120: mol_type = other DNA

SEQ ID NO: 65883 - DNA, 120 bp, synthetic construct; identical to SEQ ID NO: 35929
  source 1..120: mol_type = other DNA

SEQ ID NO: 65884 - DNA, 120 bp, synthetic construct; identical to SEQ ID NO: 35930
  source 1..120: mol_type = other DNA

SEQ ID NO: 65885 - DNA, 120 bp, synthetic construct; identical to SEQ ID NO: 10441
  source 1..120: mol_type = other DNA

SEQ ID NO: 65886 - DNA, 120 bp, synthetic construct; identical to SEQ ID NO: 35932
  source 1..120: mol_type = other DNA

SEQ ID NO: 65887 - DNA, 120 bp, synthetic construct; identical to SEQ ID NO: 35933
  source 1..120: mol_type = other DNA

SEQ ID NO: 65888 - DNA, 120 bp, synthetic construct; identical to SEQ ID NO: 35934
  source 1..120: mol_type = other DNA

SEQ ID NO: 65889 - DNA, 120 bp, synthetic construct; identical to SEQ ID NO: 10442
  source 1..120: mol_type = other DNA

SEQ ID NO: 65890 - DNA, 120 bp, synthetic construct; identical to SEQ ID NO: 35936
  source 1..120: mol_type = other DNA

SEQ ID NO: 65891 - DNA, 120 bp, synthetic construct; identical to SEQ ID NO: 35937
  source 1..120: mol_type = other DNA

SEQ ID NO: 65892 - DNA, 120 bp, synthetic construct; identical to SEQ ID NO: 10443
  source 1..120: mol_type = other DNA

SEQ ID NO: 65893 - DNA, 120 bp, synthetic construct; identical to SEQ ID NO: 35939
  source 1..120: mol_type = other DNA

SEQ ID NO: 65894 - DNA, 120 bp, synthetic construct; identical to SEQ ID NO: 35940
  source 1..120: mol_type = other DNA

SEQ ID NO: 65895 - DNA, 120 bp, synthetic construct; identical to SEQ ID NO: 35941
  source 1..120: mol_type = other DNA

SEQ ID NO: 65896 - DNA, 120 bp, synthetic construct; identical to SEQ ID NO: 10444
  source 1..120: mol_type = other DNA

SEQ ID NO: 65897 - DNA, 120 bp, synthetic construct; identical to SEQ ID NO: 35943
  source 1..120: mol_type = other DNA

SEQ ID NO: 65898 - DNA, 120 bp, synthetic construct; identical to SEQ ID NO: 35944
  source 1..120: mol_type = other DNA

SEQ ID NO: 65899 - DNA, 120 bp, synthetic construct; identical to SEQ ID NO: 35945
  source 1..120: mol_type = other DNA

SEQ ID NO: 65900 - DNA, 120 bp, synthetic construct; identical to SEQ ID NO: 35946
  source 1..120: mol_type = other DNA

SEQ ID NO: 65901 - DNA, 120 bp, synthetic construct; identical to SEQ ID NO: 10445
  source 1..120: mol_type = other DNA

SEQ ID NO: 65902 - DNA, 120 bp, synthetic construct; identical to SEQ ID NO: 35948
  source 1..120: mol_type = other DNA

SEQ ID NO: 65903 - DNA, 120 bp, synthetic construct; identical to SEQ ID NO: 35949
  source 1..120: mol_type = other DNA

SEQ ID NO: 65904 - DNA, 120 bp, synthetic construct; identical to SEQ ID NO: 35950
  source 1..120: mol_type = other DNA

SEQ ID NO: 65905 - DNA, 120 bp, synthetic construct; identical to SEQ ID NO: 10446
  source 1..120: mol_type = other DNA

SEQ ID NO: 65906 - DNA, 120 bp, synthetic construct; identical to SEQ ID NO: 35952
  source 1..120: mol_type = other DNA

SEQ ID NO: 65907 - DNA, 120 bp, synthetic construct; identical to SEQ ID NO: 35953
  source 1..120: mol_type = other DNA

SEQ ID NO: 65908 - DNA, 120 bp, synthetic construct; identical to SEQ ID NO: 35954
  source 1..120: mol_type = other DNA

SEQ ID NO: 65909 - DNA, 120 bp, synthetic construct; identical to SEQ ID NO: 10447
  source 1..120: mol_type = other DNA

SEQ ID NO: 65910 - DNA, 120 bp, synthetic construct; identical to SEQ ID NO: 35956
  source 1..120: mol_type = other DNA

SEQ ID NO: 65911 - DNA, 120 bp, synthetic construct; identical to SEQ ID NO: 35957
  source 1..120: mol_type = other DNA

SEQ ID NO: 65912 - DNA, 120 bp, synthetic construct; identical to SEQ ID NO: 35958
  source 1..120: mol_type = other DNA

SEQ ID NO: 65913 - DNA, 120 bp, synthetic construct; identical to SEQ ID NO: 10448
  source 1..120: mol_type = other DNA

SEQ ID NO: 65914 - DNA, 120 bp, synthetic construct; identical to SEQ ID NO: 35960
  source 1..120: mol_type = other DNA

SEQ ID NO: 65915 - DNA, 120 bp, synthetic construct; identical to SEQ ID NO: 35961
  source 1..120: mol_type = other DNA

SEQ ID NO: 65916 - DNA, 120 bp, synthetic construct; identical to SEQ ID NO: 35962
  source 1..120: mol_type = other DNA

SEQ ID NO: 65917 - DNA, 120 bp, synthetic construct; identical to SEQ ID NO: 10449
  source 1..120: mol_type = other DNA

SEQ ID NO: 65918 - DNA, 120 bp, synthetic construct; identical to SEQ ID NO: 35964
  source 1..120: mol_type = other DNA

SEQ ID NO: 65919 - DNA, 120 bp, synthetic construct; identical to SEQ ID NO: 35965
  source 1..120: mol_type = other DNA

SEQ ID NO: 65920 - DNA, 120 bp, synthetic construct; identical to SEQ ID NO: 35966
  source 1..120: mol_type = other DNA

SEQ ID NO: 65921 - DNA, 120 bp, synthetic construct; identical to SEQ ID NO: 10450
  source 1..120: mol_type = other DNA

SEQ ID NO: 65922 - DNA, 120 bp, synthetic construct; identical to SEQ ID NO: 35968
  source 1..120: mol_type = other DNA

SEQ ID NO: 65923 - DNA, 120 bp, synthetic construct; identical to SEQ ID NO: 35969
  source 1..120: mol_type = other DNA

SEQ ID NO: 65924 - DNA, 120 bp, synthetic construct; identical to SEQ ID NO: 35970
  source 1..120: mol_type = other DNA

SEQ ID NO: 65925 - DNA, 120 bp, synthetic construct; identical to SEQ ID NO: 10451
  source 1..120: mol_type = other DNA

SEQ ID NO: 65926 - DNA, 120 bp, synthetic construct; identical to SEQ ID NO: 35972
  source 1..120: mol_type = other DNA

SEQ ID NO: 65927 - DNA, 120 bp, synthetic construct; identical to SEQ ID NO: 35973
  source 1..120: mol_type = other DNA

SEQ ID NO: 65928 - DNA, 120 bp, synthetic construct; identical to SEQ ID NO: 10452
  source 1..120: mol_type = other DNA

SEQ ID NO: 65929 - DNA, 120 bp, synthetic construct; identical to SEQ ID NO: 35975
  source 1..120: mol_type = other DNA

SEQ ID NO: 65930 - DNA, 120 bp, synthetic construct; identical to SEQ ID NO: 35976
  source 1..120: mol_type = other DNA

SEQ ID NO: 65931 - DNA, 120 bp, synthetic construct; identical to SEQ ID NO: 35977
  source 1..120: mol_type = other DNA

SEQ ID NO: 65932 - DNA, 120 bp, synthetic construct; identical to SEQ ID NO: 35978
  source 1..120: mol_type = other DNA

SEQ ID NO: 65933 - DNA, 120 bp, synthetic construct; identical to SEQ ID NO: 10453
  source 1..120: mol_type = other DNA

SEQ ID NO: 65934 - DNA, 120 bp, synthetic construct; identical to SEQ ID NO: 35980
  source 1..120: mol_type = other DNA

SEQ ID NO: 65935 - DNA, 120 bp, synthetic construct; identical to SEQ ID NO: 35981
  source 1..120: mol_type = other DNA

SEQ ID NO: 65936 - DNA, 120 bp, synthetic construct; identical to SEQ ID NO: 35982
  source 1..120: mol_type = other DNA

SEQ ID NO: 65937 - DNA, 120 bp, synthetic construct; identical to SEQ ID NO: 10454
  source 1..120: mol_type = other DNA

SEQ ID NO: 65938 - DNA, 120 bp, synthetic construct; identical to SEQ ID NO: 35984
  source 1..120: mol_type = other DNA

SEQ ID NO: 65939 - DNA, 120 bp, synthetic construct; identical to SEQ ID NO: 35985
  source 1..120: mol_type = other DNA

SEQ ID NO: 65940 - DNA, 120 bp, synthetic construct; identical to SEQ ID NO: 35986
  source 1..120: mol_type = other DNA

SEQ ID NO: 65941 - DNA, 120 bp, synthetic construct; identical to SEQ ID NO: 10455
  source 1..120: mol_type = other DNA

SEQ ID NO: 65942 - DNA, 120 bp, synthetic construct; identical to SEQ ID NO: 35988
  source 1..120: mol_type = other DNA

SEQ ID NO: 65943 - DNA, 120 bp, synthetic construct; identical to SEQ ID NO: 35989
  source 1..120: mol_type = other DNA

SEQ ID NO: 65944 - DNA, 120 bp, synthetic construct; identical to SEQ ID NO: 35990
  source 1..120: mol_type = other DNA

SEQ ID NO: 65945 - DNA, 120 bp, synthetic construct; identical to SEQ ID NO: 10456
  source 1..120: mol_type = other DNA

SEQ ID NO: 65946 - DNA, 120 bp, synthetic construct; identical to SEQ ID NO: 3254
  source 1..120: mol_type = other DNA

SEQ ID NO: 65947 - DNA, 120 bp, synthetic construct; identical to SEQ ID NO: 35993
  source 1..120: mol_type = other DNA

SEQ ID NO: 65948 - DNA, 120 bp, synthetic construct; identical to SEQ ID NO: 10457
  source 1..120: mol_type = other DNA

SEQ ID NO: 65949 - DNA, 120 bp, synthetic construct; identical to SEQ ID NO: 35995
  source 1..120: mol_type = other DNA

SEQ ID NO: 65950 - DNA, 120 bp, synthetic construct; identical to SEQ ID NO: 35996
  source 1..120: mol_type = other DNA

SEQ ID NO: 65951 - DNA, 120 bp, synthetic construct; identical to SEQ ID NO: 3255
  source 1..120: mol_type = other DNA

SEQ ID NO: 65952 - DNA, 120 bp, synthetic construct; identical to SEQ ID NO: 35998
  source 1..120: mol_type = other DNA

SEQ ID NO: 65953 - DNA, 120 bp, synthetic construct; identical to SEQ ID NO: 35999
  source 1..120: mol_type = other DNA

SEQ ID NO: 65954 - DNA, 120 bp, synthetic construct; identical to SEQ ID NO: 36000
  source 1..120: mol_type = other DNA

SEQ ID NO: 65955 - DNA, 120 bp, synthetic construct; identical to SEQ ID NO: 36001
  source 1..120: mol_type = other DNA

SEQ ID NO: 65956 - DNA, 120 bp, synthetic construct; identical to SEQ ID NO: 10459
  source 1..120: mol_type = other DNA

SEQ ID NO: 65957 - DNA, 120 bp, synthetic construct; identical to SEQ ID NO: 36003
  source 1..120: mol_type = other DNA

SEQ ID NO: 65958 - DNA, 120 bp, synthetic construct; identical to SEQ ID NO: 36004
  source 1..120: mol_type = other DNA

SEQ ID NO: 65959 - DNA, 120 bp, synthetic construct; identical to SEQ ID NO: 36005
  source 1..120: mol_type = other DNA

SEQ ID NO: 65960 - DNA, 120 bp, synthetic construct; identical to SEQ ID NO: 36006
  source 1..120: mol_type = other DNA

SEQ ID NO: 65961 - DNA, 120 bp, synthetic construct; identical to SEQ ID NO: 10460
  source 1..120: mol_type = other DNA

SEQ ID NO: 65962 - DNA, 120 bp, synthetic construct; identical to SEQ ID NO: 36008
  source 1..120: mol_type = other DNA

SEQ ID NO: 65963 - DNA, 120 bp, synthetic construct; identical to SEQ ID NO: 36009
  source 1..120: mol_type = other DNA

SEQ ID NO: 65964 - DNA, 120 bp, synthetic construct; identical to SEQ ID NO: 10461
  source 1..120: mol_type = other DNA

SEQ ID NO: 65965 - DNA, 120 bp, synthetic construct; identical to SEQ ID NO: 36011
  source 1..120: mol_type = other DNA

SEQ ID NO: 65966 - DNA, 120 bp, synthetic construct; identical to SEQ ID NO: 36012
  source 1..120: mol_type = other DNA

SEQ ID NO: 65967 - DNA, 120 bp, synthetic construct; identical to SEQ ID NO: 36013
  source 1..120: mol_type = other DNA

SEQ ID NO: 65968 - DNA, 120 bp, synthetic construct; identical to SEQ ID NO: 36014
  source 1..120: mol_type = other DNA

SEQ ID NO: 65969 - DNA, 120 bp, synthetic construct; identical to SEQ ID NO: 10462
  source 1..120: mol_type = other DNA

SEQ ID NO: 65970 - DNA, 120 bp, synthetic construct; identical to SEQ ID NO: 3259
  source 1..120: mol_type = other DNA

SEQ ID NO: 65971 - DNA, 120 bp, synthetic construct; identical to SEQ ID NO: 36017
  source 1..120: mol_type = other DNA

SEQ ID NO: 65972 - DNA, 120 bp, synthetic construct; identical to SEQ ID NO: 36018
  source 1..120: mol_type = other DNA

SEQ ID NO: 65973 - DNA, 120 bp, synthetic construct; identical to SEQ ID NO: 10463
  source 1..120: mol_type = other DNA

SEQ ID NO: 65974 - DNA, 120 bp, synthetic construct; identical to SEQ ID NO: 36020
  source 1..120: mol_type = other DNA

SEQ ID NO: 65975 - DNA, 120 bp, synthetic construct; identical to SEQ ID NO: 36021
  source 1..120: mol_type = other DNA

SEQ ID NO: 65976 - DNA, 120 bp, synthetic construct; identical to SEQ ID NO: 36022
  source 1..120: mol_type = other DNA

SEQ ID NO: 65977 - DNA, 120 bp, synthetic construct; identical to SEQ ID NO: 10464
  source 1..120: mol_type = other DNA

SEQ ID NO: 65978 - DNA, 120 bp, synthetic construct; identical to SEQ ID NO: 36024
  source 1..120: mol_type = other DNA

SEQ ID NO: 65979 - DNA, 120 bp, synthetic construct; identical to SEQ ID NO: 36025
  source 1..120: mol_type = other DNA

SEQ ID NO: 65980 - DNA, 120 bp, synthetic construct; identical to SEQ ID NO: 36026
  source 1..120: mol_type = other DNA

SEQ ID NO: 65981 - DNA, 120 bp, synthetic construct; identical to SEQ ID NO: 10465
  source 1..120: mol_type = other DNA

SEQ ID NO: 65982 - DNA, 120 bp, synthetic construct; identical to SEQ ID NO: 36028
  source 1..120: mol_type = other DNA

SEQ ID NO: 65983 - DNA, 120 bp, synthetic construct; identical to SEQ ID NO: 36029
  source 1..120: mol_type = other DNA

SEQ ID NO: 65984 - DNA, 120 bp, synthetic construct; identical to SEQ ID NO: 10466
  source 1..120: mol_type = other DNA

SEQ ID NO: 65985 - DNA, 120 bp, synthetic construct; identical to SEQ ID NO: 36031
  source 1..120: mol_type = other DNA

SEQ ID NO: 65986 - DNA, 120 bp, synthetic construct; identical to SEQ ID NO: 36032
  source 1..120: mol_type = other DNA

SEQ ID NO: 65987 - DNA, 120 bp, synthetic construct; identical to SEQ ID NO: 36033
  source 1..120: mol_type = other DNA

SEQ ID NO: 65988 - DNA, 120 bp, synthetic construct; identical to SEQ ID NO: 10467
  source 1..120: mol_type = other DNA

SEQ ID NO: 65989 - DNA, 120 bp, synthetic construct; identical to SEQ ID NO: 36035
  source 1..120: mol_type = other DNA

SEQ ID NO: 65990 - DNA, 120 bp, synthetic construct; identical to SEQ ID NO: 36036
  source 1..120: mol_type = other DNA

SEQ ID NO: 65991 - DNA, 120 bp, synthetic construct; identical to SEQ ID NO: 36037
  source 1..120: mol_type = other DNA

SEQ ID NO: 65992 - DNA, 120 bp, synthetic construct; identical to SEQ ID NO: 10468
  source 1..120: mol_type = other DNA

SEQ ID NO: 65993 - DNA, 120 bp, synthetic construct; identical to SEQ ID NO: 36039
  source 1..120: mol_type = other DNA

SEQ ID NO: 65994 - DNA, 120 bp, synthetic construct; identical to SEQ ID NO: 36040
  source 1..120: mol_type = other DNA

SEQ ID NO: 65995 - DNA, 120 bp, synthetic construct; identical to SEQ ID NO: 36041
  source 1..120: mol_type = other DNA

SEQ ID NO: 65996 - DNA, 120 bp, synthetic construct; identical to SEQ ID NO: 36042
  source 1..120: mol_type = other DNA

SEQ ID NO: 65997 - DNA, 120 bp, synthetic construct; identical to SEQ ID NO: 10469
  source 1..120: mol_type = other DNA

SEQ ID NO: 65998 - DNA, 120 bp, synthetic construct; identical to SEQ ID NO: 36044
  source 1..120: mol_type = other DNA

SEQ ID NO: 65999 - DNA, 120 bp, synthetic construct; identical to SEQ ID NO: 36045
  source 1..120: mol_type = other DNA

SEQ ID NO: 66000 - DNA, 120 bp, synthetic construct; identical to SEQ ID NO: 10470
  source 1..120: mol_type = other DNA

SEQ ID NO: 66001 - DNA, 120 bp, synthetic construct; identical to SEQ ID NO: 36047
  source 1..120: mol_type = other DNA

SEQ ID NO: 66002 - DNA, 120 bp, synthetic construct; identical to SEQ ID NO: 36048
  source 1..120: mol_type = other DNA

SEQ ID NO: 66003 - DNA, 120 bp, synthetic construct; identical to SEQ ID NO: 36049
  source 1..120: mol_type = other DNA

SEQ ID NO: 66004 - DNA, 120 bp, synthetic construct; identical to SEQ ID NO: 10471
  source 1..120: mol_type = other DNA

SEQ ID NO: 66005 - DNA, 120 bp, synthetic construct; identical to SEQ ID NO: 36051
  source 1..120: mol_type = other DNA

SEQ ID NO: 66006 - DNA, 120 bp, synthetic construct; identical to SEQ ID NO: 36052
  source 1..120: mol_type = other DNA

SEQ ID NO: 66007 - DNA, 120 bp, synthetic construct; identical to SEQ ID NO: 36053
  source 1..120: mol_type = other DNA

SEQ ID NO: 66008 - DNA, 120 bp, synthetic construct; identical to SEQ ID NO: 36054
  source 1..120: mol_type = other DNA

SEQ ID NO: 66009 - DNA, 120 bp, synthetic construct; identical to SEQ ID NO: 10472
  source 1..120: mol_type = other DNA

SEQ ID NO: 66010 - DNA, 120 bp, synthetic construct; identical to SEQ ID NO: 36056
  source 1..120: mol_type = other DNA

SEQ ID NO: 66011 - DNA, 120 bp, synthetic construct; identical to SEQ ID NO: 36057
  source 1..120: mol_type = other DNA

SEQ ID NO: 66012 - DNA, 120 bp, synthetic construct; identical to SEQ ID NO: 10473
  source 1..120: mol_type = other DNA

SEQ ID NO: 66013 - DNA, 120 bp, synthetic construct; identical to SEQ ID NO: 36059
  source 1..120: mol_type = other DNA

SEQ ID NO: 66014 - DNA, 120 bp, synthetic construct; identical to SEQ ID NO: 36060
  source 1..120: mol_type = other DNA

SEQ ID NO: 66015 - DNA, 120 bp, synthetic construct; identical to SEQ ID NO: 36061
  source 1..120: mol_type = other DNA

SEQ ID NO: 66016 - DNA, 120 bp, synthetic construct; identical to SEQ ID NO: 36062
  source 1..120: mol_type = other DNA

SEQ ID NO: 66017 - DNA, 120 bp, synthetic construct; identical to SEQ ID NO: 10474
  source 1..120: mol_type = other DNA

SEQ ID NO: 66018 - DNA, 120 bp, synthetic construct; identical to SEQ ID NO: 36064
  source 1..120: mol_type = other DNA

SEQ ID NO: 66019 - DNA, 120 bp, synthetic construct; identical to SEQ ID NO: 36065
  source 1..120: mol_type = other DNA

SEQ ID NO: 66020 - DNA, 120 bp, synthetic construct; identical to SEQ ID NO: 36066
  source 1..120: mol_type = other DNA

SEQ ID NO: 66021 - DNA, 120 bp, synthetic construct; identical to SEQ ID NO: 10475
  source 1..120: mol_type = other DNA

SEQ ID NO: 66022 - DNA, 120 bp, synthetic construct; identical to SEQ ID NO: 36068
  source 1..120: mol_type = other DNA

SEQ ID NO: 66023 - DNA, 120 bp, synthetic construct; identical to SEQ ID NO: 3271
  source 1..120: mol_type = other DNA

SEQ ID NO: 66024 - DNA, 120 bp, synthetic construct; identical to SEQ ID NO: 36070
  source 1..120: mol_type = other DNA

SEQ ID NO: 66025 - DNA, 120 bp, synthetic construct; identical to SEQ ID NO: 10476
  source 1..120: mol_type = other DNA

SEQ ID NO: 66026 - DNA, 120 bp, synthetic construct; identical to SEQ ID NO: 36072
  source 1..120: mol_type = other DNA

SEQ ID NO: 66027 - DNA, 120 bp, synthetic construct; identical to SEQ ID NO: 36073
  source 1..120: mol_type = other DNA

SEQ ID NO: 66028 - DNA, 120 bp, synthetic construct; identical to SEQ ID NO: 10477
  source 1..120: mol_type = other DNA

SEQ ID NO: 66029 - DNA, 120 bp, synthetic construct; identical to SEQ ID NO: 36075
  source 1..120: mol_type = other DNA

SEQ ID NO: 66030 - DNA, 120 bp, synthetic construct; identical to SEQ ID NO: 36076
  source 1..120: mol_type = other DNA

SEQ ID NO: 66031 - DNA, 120 bp, synthetic construct; identical to SEQ ID NO: 36077
  source 1..120: mol_type = other DNA

SEQ ID NO: 66032 - DNA, 120 bp, synthetic construct; identical to SEQ ID NO: 36078
  source 1..120: mol_type = other DNA

SEQ ID NO: 66033 - DNA, 120 bp, synthetic construct; identical to SEQ ID NO: 10478
  source 1..120: mol_type = other DNA

SEQ ID NO: 66034 - DNA, 120 bp, synthetic construct; identical to SEQ ID NO: 36080
  source 1..120: mol_type = other DNA

SEQ ID NO: 66035 - DNA, 120 bp, synthetic construct; identical to SEQ ID NO: 36081
  source 1..120: mol_type = other DNA

SEQ ID NO: 66036 - DNA, 120 bp, synthetic construct; identical to SEQ ID NO: 10479
  source 1..120: mol_type = other DNA

SEQ ID NO: 66037 - DNA, 120 bp, synthetic construct; identical to SEQ ID NO: 36083
  source 1..120: mol_type = other DNA

SEQ ID NO: 66038 - DNA, 120 bp, synthetic construct; identical to SEQ ID NO: 36084
  source 1..120: mol_type = other DNA

SEQ ID NO: 66039 - DNA, 120 bp, synthetic construct; identical to SEQ ID NO: 36085
  source 1..120: mol_type = other DNA

SEQ ID NO: 66040 - DNA, 120 bp, synthetic construct; identical to SEQ ID NO: 10480
  source 1..120: mol_type = other DNA

SEQ ID NO: 66041 - DNA, 120 bp, synthetic construct; identical to SEQ ID NO: 36087
  source 1..120: mol_type = other DNA

SEQ ID NO: 66042 - DNA, 120 bp, synthetic construct; identical to SEQ ID NO: 36088
  source 1..120: mol_type = other DNA

SEQ ID NO: 66043 - DNA, 120 bp, synthetic construct; identical to SEQ ID NO: 36089
  source 1..120: mol_type = other DNA

SEQ ID NO: 66044 - DNA, 120 bp, synthetic construct; identical to SEQ ID NO: 36090
  source 1..120: mol_type = other DNA

SEQ ID NO: 66045 - DNA, 120 bp, synthetic construct; identical to SEQ ID NO: 10481
  source 1..120: mol_type = other DNA

SEQ ID NO: 66046 - DNA, 120 bp, synthetic construct; identical to SEQ ID NO: 36092
  source 1..120: mol_type = other DNA

SEQ ID NO: 66047 - DNA, 120 bp, synthetic construct; identical to SEQ ID NO: 36093
  source 1..120: mol_type = other DNA

SEQ ID NO: 66048 - DNA, 120 bp, synthetic construct; identical to SEQ ID NO: 36094
  source 1..120: mol_type = other DNA

SEQ ID NO: 66049 - DNA, 120 bp, synthetic construct; identical to SEQ ID NO: 10482
  source 1..120: mol_type = other DNA

SEQ ID NO: 66050 - DNA, 120 bp, synthetic construct; identical to SEQ ID NO: 36096
  source 1..120: mol_type = other DNA

SEQ ID NO: 66051 - DNA, 120 bp, synthetic construct; identical to SEQ ID NO: 36097
  source 1..120: mol_type = other DNA

SEQ ID NO: 66052 - DNA, 120 bp, synthetic construct; identical to SEQ ID NO: 36098
  source 1..120: mol_type = other DNA

SEQ ID NO: 66053 - DNA, 120 bp, synthetic construct; identical to SEQ ID NO: 10483
  source 1..120: mol_type = other DNA

SEQ ID NO: 66054 - DNA, 120 bp, synthetic construct; identical to SEQ ID NO: 36100
  source 1..120: mol_type = other DNA

SEQ ID NO: 66055 - DNA, 120 bp, synthetic construct; identical to SEQ ID NO: 36101
  source 1..120: mol_type = other DNA

SEQ ID NO: 66056 - DNA, 120 bp, synthetic construct; identical to SEQ ID NO: 10484
  source 1..120: mol_type = other DNA

SEQ ID NO: 66057 - DNA, 120 bp, synthetic construct; identical to SEQ ID NO: 36103
  source 1..120: mol_type = other DNA

SEQ ID NO: 66058 - DNA, 120 bp, synthetic construct; identical to SEQ ID NO: 36104
  source 1..120: mol_type = other DNA

SEQ ID NO: 66059 - DNA, 120 bp, synthetic construct; identical to SEQ ID NO: 36105
  source 1..120: mol_type = other DNA

SEQ ID NO: 66060 - DNA, 120 bp, synthetic construct; identical to SEQ ID NO: 36106
  source 1..120: mol_type = other DNA

SEQ ID NO: 66061 - DNA, 120 bp, synthetic construct; identical to SEQ ID NO: 10485
  source 1..120: mol_type = other DNA

SEQ ID NO: 66062 - DNA, 120 bp, synthetic construct; identical to SEQ ID NO: 36108
  source 1..120: mol_type = other DNA

SEQ ID NO: 66063 - DNA, 120 bp, synthetic construct; identical to SEQ ID NO: 36109
  source 1..120: mol_type = other DNA

SEQ ID NO: 66064 - DNA, 120 bp, synthetic construct; identical to SEQ ID NO: 36110
  source 1..120: mol_type = other DNA

SEQ ID NO: 66065 - DNA, 120 bp, synthetic construct; identical to SEQ ID NO: 36111
  source 1..120: mol_type = other DNA

SEQ ID NO: 66066 - DNA, 120 bp, synthetic construct; identical to SEQ ID NO: 10486
  source 1..120: mol_type = other DNA

SEQ ID NO: 66067 - DNA, 120 bp, synthetic construct; identical to SEQ ID NO: 36113
  source 1..120: mol_type = other DNA

SEQ ID NO: 66068 - DNA, 120 bp, synthetic construct; identical to SEQ ID NO: 36114
  source 1..120: mol_type = other DNA

SEQ ID NO: 66069 - DNA, 120 bp, synthetic construct; identical to SEQ ID NO: 36115
  source 1..120: mol_type = other DNA

SEQ ID NO: 66070 - DNA, 120 bp, synthetic construct; identical to SEQ ID NO: 10487
  source 1..120: mol_type = other DNA

SEQ ID NO: 66071 - DNA, 120 bp, synthetic construct; identical to SEQ ID NO: 36117
  source 1..120: mol_type = other DNA

SEQ ID NO: 66072 - DNA, 120 bp, synthetic construct; identical to SEQ ID NO: 36118
  source 1..120: mol_type = other DNA

SEQ ID NO: 66073 - DNA, 120 bp, synthetic construct; identical to SEQ ID NO: 36119
  source 1..120: mol_type = other DNA

SEQ ID NO: 66074 - DNA, 120 bp, synthetic construct; identical to SEQ ID NO: 10488
  source 1..120: mol_type = other DNA

SEQ ID NO: 66075 - DNA, 120 bp, synthetic construct; identical to SEQ ID NO: 36121
  source 1..120: mol_type = other DNA

SEQ ID NO: 66076 - DNA, 120 bp, synthetic construct; identical to SEQ ID NO: 36122
  source 1..120: mol_type = other DNA

SEQ ID NO: 66077 - DNA, 120 bp, synthetic construct; identical to SEQ ID NO: 10489
  source 1..120: mol_type = other DNA

SEQ ID NO: 66078 - DNA, 120 bp, synthetic construct; identical to SEQ ID NO: 36124
  source 1..120: mol_type = other DNA

SEQ ID NO: 66079 - DNA, 120 bp, synthetic construct; identical to SEQ ID NO: 36125
  source 1..120: mol_type = other DNA

SEQ ID NO: 66080 - DNA, 120 bp, synthetic construct; identical to SEQ ID NO: 36126
  source 1..120: mol_type = other DNA

SEQ ID NO: 66081 - DNA, 120 bp, synthetic construct; identical to SEQ ID NO: 10490
  source 1..120: mol_type = other DNA

SEQ ID NO: 66082 - DNA, 120 bp, synthetic construct; identical to SEQ ID NO: 36128
  source 1..120: mol_type = other DNA

SEQ ID NO: 66083 - DNA, 120 bp, synthetic construct; identical to SEQ ID NO: 36129
  source 1..120: mol_type = other DNA

SEQ ID NO: 66084 - DNA, 120 bp, synthetic construct; identical to SEQ ID NO: 36130
  source 1..120: mol_type = other DNA

SEQ ID NO: 66085 - DNA, 120 bp, synthetic construct; identical to SEQ ID NO: 10491
  source 1..120: mol_type = other DNA

SEQ ID NO: 66086 - DNA, 120 bp, synthetic construct; identical to SEQ ID NO: 36132
  source 1..120: mol_type = other DNA

SEQ ID NO: 66087 - DNA, 120 bp, synthetic construct; identical to SEQ ID NO: 36133
  source 1..120: mol_type = other DNA

SEQ ID NO: 66088 - DNA, 120 bp, synthetic construct; identical to SEQ ID NO: 36134
  source 1..120: mol_type = other DNA

SEQ ID NO: 66089 - DNA, 120 bp, synthetic construct; identical to SEQ ID NO: 10492
  source 1..120: mol_type = other DNA

SEQ ID NO: 66090 - DNA, 120 bp, synthetic construct; identical to SEQ ID NO: 36136
  source 1..120: mol_type = other DNA

SEQ ID NO: 66091 - DNA, 120 bp, synthetic construct; identical to SEQ ID NO: 36137
  source 1..120: mol_type = other DNA

SEQ ID NO: 66092 - DNA, 120 bp, synthetic construct; identical to SEQ ID NO: 36138
  source 1..120: mol_type = other DNA

SEQ ID NO: 66093 - DNA, 120 bp, synthetic construct; identical to SEQ ID NO: 10493
  source 1..120: mol_type = other DNA

SEQ ID NO: 66094 - DNA, 120 bp, synthetic construct; identical to SEQ ID NO: 36140
  source 1..120: mol_type = other DNA

SEQ ID NO: 66095 - DNA, 120 bp, synthetic construct; identical to SEQ ID NO: 36141
  source 1..120: mol_type = other DNA

SEQ ID NO: 66096 - DNA, 120 bp, synthetic construct; identical to SEQ ID NO: 36142
  source 1..120: mol_type = other DNA

SEQ ID NO: 66097 - DNA, 120 bp, synthetic construct; identical to SEQ ID NO: 10494
  source 1..120: mol_type = other DNA

SEQ ID NO: 66098 - DNA, 120 bp, synthetic construct; identical to SEQ ID NO: 36144
  source 1..120: mol_type = other DNA

SEQ ID NO: 66099 - DNA, 120 bp, synthetic construct; identical to SEQ ID NO: 36145
  source 1..120: mol_type = other DNA

SEQ ID NO: 66100 - DNA, 120 bp, synthetic construct; identical to SEQ ID NO: 36146
  source 1..120: mol_type = other DNA

SEQ ID NO: 66101 - DNA, 120 bp, synthetic construct; identical to SEQ ID NO: 3289
  source 1..120: mol_type = other DNA

SEQ ID NO: 66102 - DNA, 120 bp, synthetic construct; identical to SEQ ID NO: 36148
  source 1..120: mol_type = other DNA

SEQ ID NO: 66103 - DNA, 120 bp, synthetic construct; identical to SEQ ID NO: 10495
  source 1..120: mol_type = other DNA

SEQ ID NO: 66104 - DNA, 120 bp, synthetic construct; identical to SEQ ID NO: 36150
  source 1..120: mol_type = other DNA

SEQ ID NO: 66105 - DNA, 120 bp, synthetic construct; identical to SEQ ID NO: 36151
  source 1..120: mol_type = other DNA

SEQ ID NO: 66106 - DNA, 120 bp, synthetic construct; identical to SEQ ID NO: 36152
  source 1..120: mol_type = other DNA

SEQ ID NO: 66107 - DNA, 120 bp, synthetic construct; identical to SEQ ID NO: 10496
  source 1..120: mol_type = other DNA

SEQ ID NO: 66108 - DNA, 120 bp, synthetic construct; identical to SEQ ID NO: 36154
  source 1..120: mol_type = other DNA

SEQ ID NO: 66109 - DNA, 120 bp, synthetic construct; identical to SEQ ID NO: 36155
  source 1..120: mol_type = other DNA

SEQ ID NO: 66110 - DNA, 120 bp, synthetic construct; identical to SEQ ID NO: 36156
  source 1..120: mol_type = other DNA

SEQ ID NO: 66111 - DNA, 120 bp, synthetic construct; identical to SEQ ID NO: 10497
  source 1..120: mol_type = other DNA

SEQ ID NO: 66112 - DNA, 120 bp, synthetic construct; identical to SEQ ID NO: 36158
  source 1..120: mol_type = other DNA

SEQ ID NO: 66113 - DNA, 120 bp, synthetic construct; identical to SEQ ID NO: 36159
  source 1..120: mol_type = other DNA

SEQ ID NO: 66114 - DNA, 120 bp, synthetic construct; identical to SEQ ID NO: 36160
  source 1..120: mol_type = other DNA

SEQ ID NO: 66115 - DNA, 120 bp, synthetic construct; identical to SEQ ID NO: 10498
  source 1..120: mol_type = other DNA

SEQ ID NO: 66116 - DNA, 120 bp, synthetic construct; identical to SEQ ID NO: 36162
  source 1..120: mol_type = other DNA

SEQ ID NO: 66117 - DNA, 120 bp, synthetic construct; identical to SEQ ID NO: 36163
  source 1..120: mol_type = other DNA

SEQ ID NO: 66118 - DNA, 120 bp, synthetic construct; identical to SEQ ID NO: 36164
  source 1..120: mol_type = other DNA

SEQ ID NO: 66119 - DNA, 120 bp, synthetic construct; identical to SEQ ID NO: 10499
  source 1..120: mol_type = other DNA

SEQ ID NO: 66120 - DNA, 120 bp, synthetic construct; identical to SEQ ID NO: 36166
  source 1..120: mol_type = other DNA

SEQ ID NO: 66121 - DNA, 120 bp, synthetic construct; identical to SEQ ID NO: 36167
  source 1..120: mol_type = other DNA

SEQ ID NO: 66122 - DNA, 120 bp, synthetic construct; identical to SEQ ID NO: 36168
  source 1..120: mol_type = other DNA

SEQ ID NO: 66123 - DNA, 120 bp, synthetic construct; identical to SEQ ID NO: 10500
  source 1..120: mol_type = other DNA

SEQ ID NO: 66124 - DNA, 120 bp, synthetic construct; identical to SEQ ID NO: 36170
  source 1..120: mol_type = other DNA

SEQ ID NO: 66125 - DNA, 120 bp, synthetic construct; identical to SEQ ID NO: 36171
  source 1..120: mol_type = other DNA

SEQ ID NO: 66126 - DNA, 120 bp, synthetic construct; identical to SEQ ID NO: 10501
  source 1..120: mol_type = other DNA

SEQ ID NO: 66127 - DNA, 120 bp, synthetic construct; identical to SEQ ID NO: 36173
  source 1..120: mol_type = other DNA

SEQ ID NO: 66128 - DNA, 120 bp, synthetic construct; identical to SEQ ID NO: 36174
  source 1..120: mol_type = other DNA

SEQ ID NO: 66129 - DNA, 120 bp, synthetic construct; identical to SEQ ID NO: 36175
  source 1..120: mol_type = other DNA

SEQ ID NO: 66130 - DNA, 120 bp, synthetic construct; identical to SEQ ID NO: 10502
  source 1..120: mol_type = other DNA

SEQ ID NO: 66131 - DNA, 120 bp, synthetic construct; identical to SEQ ID NO: 36177
  source 1..120: mol_type = other DNA

SEQ ID NO: 66132 - DNA, 120 bp, synthetic construct; identical to SEQ ID NO: 36178
  source 1..120: mol_type = other DNA

SEQ ID NO: 66133 - DNA, 120 bp, synthetic construct; identical to SEQ ID NO: 36179
  source 1..120: mol_type = other DNA

SEQ ID NO: 66134 - DNA, 120 bp, synthetic construct; identical to SEQ ID NO: 10503
  source 1..120: mol_type = other DNA

SEQ ID NO: 66135 - DNA, 120 bp, synthetic construct; identical to SEQ ID NO: 36181
  source 1..120: mol_type = other DNA

SEQ ID NO: 66136 - DNA, 120 bp, synthetic construct; identical to SEQ ID NO: 36182
  source 1..120: mol_type = other DNA

SEQ ID NO: 66137 - DNA, 120 bp, synthetic construct; identical to SEQ ID NO: 36183
  source 1..120: mol_type = other DNA

SEQ ID NO: 66138 - DNA, 120 bp, synthetic construct; identical to SEQ ID NO: 10504
  source 1..120: mol_type = other DNA

SEQ ID NO: 66139 - DNA, 120 bp, synthetic construct; identical to SEQ ID NO: 36185
  source 1..120: mol_type = other DNA

SEQ ID NO: 66140 - DNA, 120 bp, synthetic construct; identical to SEQ ID NO: 36186
  source 1..120: mol_type = other DNA

SEQ ID NO: 66141 - DNA, 120 bp, synthetic construct; identical to SEQ ID NO: 36187
  source 1..120: mol_type = other DNA

SEQ ID NO: 66142 - DNA, 120 bp, synthetic construct; identical to SEQ ID NO: 10505
  source 1..120: mol_type = other DNA

SEQ ID NO: 66143 - DNA, 120 bp, synthetic construct; identical to SEQ ID NO: 36189
  source 1..120: mol_type = other DNA

SEQ ID NO: 66144 - DNA, 120 bp, synthetic construct; identical to SEQ ID NO: 36190
  source 1..120: mol_type = other DNA

SEQ ID NO: 66145 - DNA, 120 bp, synthetic construct; identical to SEQ ID NO: 36191
  source 1..120: mol_type = other DNA

SEQ ID NO: 66146 - DNA, 120 bp, synthetic construct; identical to SEQ ID NO: 10506
  source 1..120: mol_type = other DNA

SEQ ID NO: 66147 - DNA, 120 bp, synthetic construct; identical to SEQ ID NO: 36193
  source 1..120: mol_type = other DNA

SEQ ID NO: 66148 - DNA, 120 bp, synthetic construct; identical to SEQ ID NO: 36194
  source 1..120: mol_type = other DNA

SEQ ID NO: 66149 - DNA, 120 bp, synthetic construct; identical to SEQ ID NO: 36195
  source 1..120: mol_type = other DNA

SEQ ID NO: 66150 - DNA, 120 bp, synthetic construct; identical to SEQ ID NO: 36196
  source 1..120: mol_type = other DNA

SEQ ID NO: 66151 - DNA, 120 bp, synthetic construct; identical to SEQ ID NO: 10507
  source 1..120: mol_type = other DNA

SEQ ID NO: 66152 - DNA, 120 bp, synthetic construct; identical to SEQ ID NO: 36198
  source 1..120: mol_type = other DNA

SEQ ID NO: 66153 - DNA, 120 bp, synthetic construct; identical to SEQ ID NO: 36199
  source 1..120: mol_type = other DNA

SEQ ID NO: 66154 - DNA, 120 bp, synthetic construct; identical to SEQ ID NO: 10508
  source 1..120: mol_type = other DNA

SEQ ID NO: 66155 - DNA, 120 bp, synthetic construct; identical to SEQ ID NO: 36201
  source 1..120: mol_type = other DNA

SEQ ID NO: 66156 - DNA, 120 bp, synthetic construct; identical to SEQ ID NO: 36202
  source 1..120: mol_type = other DNA

SEQ ID NO: 66157 - DNA, 120 bp, synthetic construct; identical to SEQ ID NO: 36203
  source 1..120: mol_type = other DNA

SEQ ID NO: 66158 - DNA, 120 bp, synthetic construct; identical to SEQ ID NO: 36204
  source 1..120: mol_type = other DNA

SEQ ID NO: 66159 - DNA, 120 bp, synthetic construct; identical to SEQ ID NO: 10509
  source 1..120: mol_type = other DNA

SEQ ID NO: 66160 - DNA, 120 bp, synthetic construct; identical to SEQ ID NO: 36206
  source 1..120: mol_type = other DNA

SEQ ID NO: 66161 - DNA, 120 bp, synthetic construct; identical to SEQ ID NO: 36207
  source 1..120: mol_type = other DNA

SEQ ID NO: 66162 - DNA, 120 bp, synthetic construct; identical to SEQ ID NO: 36208
  source 1..120: mol_type = other DNA

SEQ ID NO: 66163 - DNA, 120 bp, synthetic construct; identical to SEQ ID NO: 10510
  source 1..120: mol_type = other DNA

SEQ ID NO: 66164 - DNA, 120 bp, synthetic construct; identical to SEQ ID NO: 36210
  source 1..120: mol_type = other DNA

SEQ ID NO: 66165 - DNA, 120 bp, synthetic construct; identical to SEQ ID NO: 36211
  source 1..120: mol_type = other DNA

SEQ ID NO: 66166 - DNA, 120 bp, synthetic construct; identical to SEQ ID NO: 10511
  source 1..120: mol_type = other DNA

SEQ ID NO: 66167 - DNA, 120 bp, synthetic construct; identical to SEQ ID NO: 36213
  source 1..120: mol_type = other DNA

SEQ ID NO: 66168 - DNA, 120 bp, synthetic construct; identical to SEQ ID NO: 36214
  source 1..120: mol_type = other DNA

SEQ ID NO: 66169 - DNA, 120 bp, synthetic construct; identical to SEQ ID NO: 36215
  source 1..120: mol_type = other DNA

SEQ ID NO: 66170 - DNA, 120 bp, synthetic construct; identical to SEQ ID NO: 36216
  source 1..120: mol_type = other DNA

SEQ ID NO: 66171 - DNA, 120 bp, synthetic construct; identical to SEQ ID NO: 10512
  source 1..120: mol_type = other DNA

SEQ ID NO: 66172 - DNA, 120 bp, synthetic construct; identical to SEQ ID NO: 36218
  source 1..120: mol_type = other DNA

SEQ ID NO: 66173 - DNA, 120 bp, synthetic construct; identical to SEQ ID NO: 36219
  source 1..120: mol_type = other DNA

SEQ ID NO: 66174 - DNA, 120 bp, synthetic construct; identical to SEQ ID NO: 10513
  source 1..120: mol_type = other DNA

SEQ ID NO: 66175 - DNA, 120 bp, synthetic construct; identical to SEQ ID NO: 36221
  source 1..120: mol_type = other DNA

SEQ ID NO: 66176 - DNA, 120 bp, synthetic construct; identical to SEQ ID NO: 36222
  source 1..120: mol_type = other DNA

SEQ ID NO: 66177 - DNA, 120 bp, synthetic construct; identical to SEQ ID NO: 36223
  source 1..120: mol_type = other DNA

SEQ ID NO: 66178 - DNA, 120 bp, synthetic construct; identical to SEQ ID NO: 10514
  source 1..120: mol_type = other DNA

SEQ ID NO: 66179 - DNA, 120 bp, synthetic construct; identical to SEQ ID NO: 36225
  source 1..120: mol_type = other DNA

SEQ ID NO: 66180 - DNA, 120 bp, synthetic construct; identical to SEQ ID NO: 36226
  source 1..120: mol_type = other DNA

SEQ ID NO: 66181 - DNA, 120 bp, synthetic construct; identical to SEQ ID NO: 36227
  source 1..120: mol_type = other DNA

SEQ ID NO: 66182 - DNA, 120 bp, synthetic construct; identical to SEQ ID NO: 10515
  source 1..120: mol_type = other DNA

SEQ ID NO: 66183 - DNA, 120 bp, synthetic construct; identical to SEQ ID NO: 36229
  source 1..120: mol_type = other DNA

SEQ ID NO: 66184 - DNA, 120 bp, synthetic construct; identical to SEQ ID NO: 36230
  source 1..120: mol_type = other DNA

SEQ ID NO: 66185 - DNA, 120 bp, synthetic construct; identical to SEQ ID NO: 36231
  source 1..120: mol_type = other DNA

SEQ ID NO: 66186 - DNA, 120 bp, synthetic construct; identical to SEQ ID NO: 36232
  source 1..120: mol_type = other DNA

SEQ ID NO: 66187 - DNA, 120 bp, synthetic construct; identical to SEQ ID NO: 10516
  source 1..120: mol_type = other DNA

SEQ ID NO: 66188 - DNA, 120 bp, synthetic construct; identical to SEQ ID NO: 36234
  source 1..120: mol_type = other DNA

SEQ ID NO: 66189 - DNA, 120 bp, synthetic construct; identical to SEQ ID NO: 36235
  source 1..120: mol_type = other DNA

SEQ ID NO: 66190 - DNA, 120 bp, synthetic construct; identical to SEQ ID NO: 36236
  source 1..120: mol_type = other DNA

SEQ ID NO: 66191 - DNA, 120 bp, synthetic construct; identical to SEQ ID NO: 10517
  source 1..120: mol_type = other DNA

SEQ ID NO: 66192 - DNA, 120 bp, synthetic construct; identical to SEQ ID NO: 36238
  source 1..120: mol_type = other DNA

SEQ ID NO: 66193 - DNA, 120 bp, synthetic construct; identical to SEQ ID NO: 36239
  source 1..120: mol_type = other DNA

SEQ ID NO: 66194 - DNA, 120 bp, synthetic construct; identical to SEQ ID NO: 36240
  source 1..120: mol_type = other DNA

SEQ ID NO: 66195 - DNA, 120 bp, synthetic construct; identical to SEQ ID NO: 10518
  source 1..120: mol_type = other DNA

SEQ ID NO: 66196 - DNA, 120 bp, synthetic construct; identical to SEQ ID NO: 36242
  source 1..120: mol_type = other DNA

SEQ ID NO: 66197 - DNA, 120 bp, synthetic construct; identical to SEQ ID NO: 36243
  source 1..120: mol_type = other DNA

SEQ ID NO: 66198 - DNA, 120 bp, synthetic construct; identical to SEQ ID NO: 36244
  source 1..120: mol_type = other DNA

SEQ ID NO: 66199 - DNA, 120 bp, synthetic construct; identical to SEQ ID NO: 10519
  source 1..120: mol_type = other DNA

SEQ ID NO: 66200 - DNA, 120 bp, synthetic construct; identical to SEQ ID NO: 36246
  source 1..120: mol_type = other DNA

SEQ ID NO: 66201 - DNA, 120 bp, synthetic construct; identical to SEQ ID NO: 36247
  source 1..120: mol_type = other DNA

SEQ ID NO: 66202 - DNA, 120 bp, synthetic construct; identical to SEQ ID NO: 10520
  source 1..120: mol_type = other DNA

SEQ ID NO: 66203 - DNA, 120 bp, synthetic construct; identical to SEQ ID NO: 36249
  source 1..120: mol_type = other DNA

SEQ ID NO: 66204 - DNA, 120 bp, synthetic construct; identical to SEQ ID NO: 36250
  source 1..120: mol_type = other DNA

SEQ ID NO: 66205 - DNA, 120 bp, synthetic construct; identical to SEQ ID NO: 36251
  source 1..120: mol_type = other DNA

SEQ ID NO: 66206 - DNA, 120 bp, synthetic construct; identical to SEQ ID NO: 10521
  source 1..120: mol_type = other DNA

SEQ ID NO: 66207 - DNA, 120 bp, synthetic construct; identical to SEQ ID NO: 36253
  source 1..120: mol_type = other DNA

SEQ ID NO: 66208 - DNA, 120 bp, synthetic construct; identical to SEQ ID NO: 36254
  source 1..120: mol_type = other DNA

SEQ ID NO: 66209 - DNA, 120 bp, synthetic construct; identical to SEQ ID NO: 36255
  source 1..120: mol_type = other DNA

SEQ ID NO: 66210 - DNA, 120 bp, synthetic construct; identical to SEQ ID NO: 10522
  source 1..120: mol_type = other DNA

SEQ ID NO: 66211 - DNA, 120 bp, synthetic construct; identical to SEQ ID NO: 36257
  source 1..120: mol_type = other DNA

SEQ ID NO: 66212 - DNA, 120 bp, synthetic construct; identical to SEQ ID NO: 36258
  source 1..120: mol_type = other DNA

SEQ ID NO: 66213 - DNA, 120 bp, synthetic construct; identical to SEQ ID NO: 36259
  source 1..120: mol_type = other DNA

SEQ ID NO: 66214 - DNA, 120 bp, synthetic construct; identical to SEQ ID NO: 10523
  source 1..120: mol_type = other DNA

SEQ ID NO: 66215 - DNA, 120 bp, synthetic construct; identical to SEQ ID NO: 36261
  source 1..120: mol_type = other DNA

SEQ ID NO: 66216 - DNA, 120 bp, synthetic construct; identical to SEQ ID NO: 36262
  source 1..120: mol_type = other DNA

SEQ ID NO: 66217 - DNA, 120 bp, synthetic construct; identical to SEQ ID NO: 36263
  source 1..120: mol_type = other DNA

SEQ ID NO: 66218 - DNA, 120 bp, synthetic construct; identical to SEQ ID NO: 10524
  source 1..120: mol_type = other DNA

SEQ ID NO: 66219 - DNA, 120 bp, synthetic construct; identical to SEQ ID NO: 36265
  source 1..120: mol_type = other DNA

SEQ ID NO: 66220 - DNA, 120 bp, synthetic construct; identical to SEQ ID NO: 36266
  source 1..120: mol_type = other DNA

SEQ ID NO: 66221 - DNA, 120 bp, synthetic construct; identical to SEQ ID NO: 36267
  source 1..120: mol_type = other DNA

SEQ ID NO: 66222 - DNA, 120 bp, synthetic construct; identical to SEQ ID NO: 36268
  source 1..120: mol_type = other DNA

SEQ ID NO: 66223 - DNA, 120 bp, synthetic construct; identical to SEQ ID NO: 10525
  source 1..120: mol_type = other DNA

SEQ ID NO: 66224 - DNA, 120 bp, synthetic construct; identical to SEQ ID NO: 36270
  source 1..120: mol_type = other DNA

SEQ ID NO: 66225 - DNA, 120 bp, synthetic construct; identical to SEQ ID NO: 36271
  source 1..120: mol_type = other DNA

SEQ ID NO: 66226 - DNA, 120 bp, synthetic construct; identical to SEQ ID NO: 36272
  source 1..120: mol_type = other DNA

SEQ ID NO: 66227 - DNA, 120 bp, synthetic construct; identical to SEQ ID NO: 10526
  source 1..120: mol_type = other DNA

SEQ ID NO: 66228 - DNA, 120 bp, synthetic construct; identical to SEQ ID NO: 36274
  source 1..120: mol_type = other DNA

SEQ ID NO: 66229 - DNA, 120 bp, synthetic construct; identical to SEQ ID NO: 36275
  source 1..120: mol_type = other DNA

SEQ ID NO: 66230 - DNA, 120 bp, synthetic construct; identical to SEQ ID NO: 36276
  source 1..120: mol_type = other DNA

SEQ ID NO: 66231 - DNA, 120 bp, synthetic construct; identical to SEQ ID NO: 10527
  source 1..120: mol_type = other DNA

SEQ ID NO: 66232 - DNA, 120 bp, synthetic construct; identical to SEQ ID NO: 36278
  source 1..120: mol_type = other DNA

SEQ ID NO: 66233 - DNA, 120 bp, synthetic construct; identical to SEQ ID NO: 36279
  source 1..120: mol_type = other DNA

SEQ ID NO: 66234 - DNA, 120 bp, synthetic construct; identical to SEQ ID NO: 36280
  source 1..120: mol_type = other DNA

SEQ ID NO: 66235 - DNA, 120 bp, synthetic construct; identical to SEQ ID NO: 10528
  source 1..120: mol_type = other DNA

SEQ ID NO: 66236 - DNA, 120 bp, synthetic construct; identical to SEQ ID NO: 36282
  source 1..120: mol_type = other DNA

SEQ ID NO: 66237 - DNA, 120 bp, synthetic construct; identical to SEQ ID NO: 36283
  source 1..120: mol_type = other DNA

SEQ ID NO: 66238 - DNA, 120 bp, synthetic construct; identical to SEQ ID NO: 36284
  source 1..120: mol_type = other DNA

SEQ ID NO: 66239 - DNA, 120 bp, synthetic construct; identical to SEQ ID NO: 36285
  source 1..120: mol_type = other DNA

SEQ ID NO: 66240 - DNA, 120 bp, synthetic construct; identical to SEQ ID NO: 10529
  source 1..120: mol_type = other DNA

SEQ ID NO: 66241 - DNA, 120 bp, synthetic construct; identical to SEQ ID NO: 36287
  source 1..120: mol_type = other DNA

SEQ ID NO: 66242 - DNA, 120 bp, synthetic construct; identical to SEQ ID NO: 36288
  source 1..120: mol_type = other DNA

SEQ ID NO: 66243 - DNA, 120 bp, synthetic construct; identical to SEQ ID NO: 36289
  source 1..120: mol_type = other DNA

SEQ ID NO: 66244 - DNA, 120 bp, synthetic construct; identical to SEQ ID NO: 10530
  source 1..120: mol_type = other DNA

SEQ ID NO: 66245 - DNA, 120 bp, synthetic construct; identical to SEQ ID NO: 36291
  source 1..120: mol_type = other DNA

SEQ ID NO: 66246 - DNA, 120 bp, synthetic construct; identical to SEQ ID NO: 36292
  source 1..120: mol_type = other DNA

SEQ ID NO: 66247 - DNA, 120 bp, synthetic construct; identical to SEQ ID NO: 36293
  source 1..120: mol_type = other DNA

SEQ ID NO: 66248 - DNA, 120 bp, synthetic construct; identical to SEQ ID NO: 10531
  source 1..120: mol_type = other DNA

SEQ ID NO: 66249 - DNA, 120 bp, synthetic construct; identical to SEQ ID NO: 36295
  source 1..120: mol_type = other DNA

SEQ ID NO: 66250 - DNA, 120 bp, synthetic construct; identical to SEQ ID NO: 36296
  source 1..120: mol_type = other DNA

SEQ ID NO: 66251 - DNA, 120 bp, synthetic construct; identical to SEQ ID NO: 36297
  source 1..120: mol_type = other DNA

SEQ ID NO: 66252 - DNA, 120 bp, synthetic construct; identical to SEQ ID NO: 10532
  source 1..120: mol_type = other DNA

SEQ ID NO: 66253 - DNA, 120 bp, synthetic construct; identical to SEQ ID NO: 36299
  source 1..120: mol_type = other DNA

SEQ ID NO: 66254 - DNA, 120 bp, synthetic construct; identical to SEQ ID NO: 36300
  source 1..120: mol_type = other DNA

SEQ ID NO: 66255 - DNA, 120 bp, synthetic construct; identical to SEQ ID NO: 36301
  source 1..120: mol_type = other DNA

SEQ ID NO: 66256 - DNA, 120 bp, synthetic construct; identical to SEQ ID NO: 10533
  source 1..120: mol_type = other DNA

SEQ ID NO: 66257 - DNA, 120 bp, synthetic construct; identical to SEQ ID NO: 36303
  source 1..120: mol_type = other DNA

SEQ ID NO: 66258 - DNA, 120 bp, synthetic construct; identical to SEQ ID NO: 36304
  source 1..120: mol_type = other DNA

SEQ ID NO: 66259 - DNA, 120 bp, synthetic construct; identical to SEQ ID NO: 36305
  source 1..120: mol_type = other DNA

SEQ ID NO: 66260 - DNA, 120 bp, synthetic construct; identical to SEQ ID NO: 10534
  source 1..120: mol_type = other DNA

SEQ ID NO: 66261 - DNA, 120 bp, synthetic construct; identical to SEQ ID NO: 36307
  source 1..120: mol_type = other DNA

SEQ ID NO: 66262 - DNA, 120 bp, synthetic construct; identical to SEQ ID NO: 36308
  source 1..120: mol_type = other DNA

SEQ ID NO: 66263 - DNA, 120 bp, synthetic construct; identical to SEQ ID NO: 36309
  source 1..120: mol_type = other DNA

SEQ ID NO: 66264 - DNA, 120 bp, synthetic construct; identical to SEQ ID NO: 10535
  source 1..120: mol_type = other DNA

SEQ ID NO: 66265 - DNA, 120 bp, synthetic construct; identical to SEQ ID NO: 36311
  source 1..120: mol_type = other DNA

SEQ ID NO: 66266 - DNA, 120 bp, synthetic construct; identical to SEQ ID NO: 36312
  source 1..120: mol_type = other DNA

SEQ ID NO: 66267 - DNA, 120 bp, synthetic construct; identical to SEQ ID NO: 36313
  source 1..120: mol_type = other DNA

SEQ ID NO: 66268 - DNA, 120 bp, synthetic construct; identical to SEQ ID NO: 10536
  source 1..120: mol_type = other DNA

SEQ ID NO: 66269 - DNA, 120 bp, synthetic construct; identical to SEQ ID NO: 36315
  source 1..120: mol_type = other DNA

SEQ ID NO: 66270 - DNA, 120 bp, synthetic construct; identical to SEQ ID NO: 36316
  source 1..120: mol_type = other DNA

SEQ ID NO: 66271 - DNA, 120 bp, synthetic construct; identical to SEQ ID NO: 10537
  source 1..120: mol_type = other DNA

SEQ ID NO: 66272 - DNA, 120 bp, synthetic construct; identical to SEQ ID NO: 36318
  source 1..120: mol_type = other DNA

SEQ ID NO: 66273 - DNA, 120 bp, synthetic construct; identical to SEQ ID NO: 36319
  source 1..120: mol_type = other DNA

SEQ ID NO: 66274 - DNA, 120 bp, synthetic construct; identical to SEQ ID NO: 36320
  source 1..120: mol_type = other DNA

SEQ ID NO: 66275 - DNA, 120 bp, synthetic construct; identical to SEQ ID NO: 10538
  source 1..120: mol_type = other DNA

SEQ ID NO: 66276 - DNA, 120 bp, synthetic construct; identical to SEQ ID NO: 36322
  source 1..120: mol_type = other DNA

SEQ ID NO: 66277 - DNA, 120 bp, synthetic construct; identical to SEQ ID NO: 36323
  source 1..120: mol_type = other DNA

SEQ ID NO: 66278 - DNA, 120 bp, synthetic construct; identical to SEQ ID NO: 36324
  source 1..120: mol_type = other DNA

SEQ ID NO: 66279 - DNA, 120 bp, synthetic construct; identical to SEQ ID NO: 36325
  source 1..120: mol_type = other DNA

SEQ ID NO: 66280 - DNA, 120 bp, synthetic construct; identical to SEQ ID NO: 10539
  source 1..120: mol_type = other DNA

SEQ ID NO: 66281 - DNA, 120 bp, synthetic construct; identical to SEQ ID NO: 36327
  source 1..120: mol_type = other DNA

SEQ ID NO: 66282 - DNA, 120 bp, synthetic construct; identical to SEQ ID NO: 36328
  source 1..120: mol_type = other DNA

SEQ ID NO: 66283 - DNA, 120 bp, synthetic construct; identical to SEQ ID NO: 36329
  source 1..120: mol_type = other DNA

SEQ ID NO: 66284 - DNA, 120 bp, synthetic construct; identical to SEQ ID NO: 10540
  source 1..120: mol_type = other DNA

SEQ ID NO: 66285 - DNA, 120 bp, synthetic construct; identical to SEQ ID NO: 36331
  source 1..120: mol_type = other DNA

SEQ ID NO: 66286 - DNA, 120 bp, synthetic construct; identical to SEQ ID NO: 36332
  source 1..120: mol_type = other DNA

SEQ ID NO: 66287 - DNA, 120 bp, synthetic construct; identical to SEQ ID NO: 10541
  source 1..120: mol_type = other DNA

SEQ ID NO: 66288 - DNA, 120 bp, synthetic construct; identical to SEQ ID NO: 36334
  source 1..120: mol_type = other DNA

SEQ ID NO: 66289 - DNA, 120 bp, synthetic construct; identical to SEQ ID NO: 36335
  source 1..120: mol_type = other DNA

SEQ ID NO: 66290 - DNA, 120 bp, synthetic construct; identical to SEQ ID NO: 36336
  source 1..120: mol_type = other DNA

SEQ ID NO: 66291 - DNA, 120 bp, synthetic construct; identical to SEQ ID NO: 36337
  source 1..120: mol_type = other DNA

SEQ ID NO: 66292 - DNA, 120 bp, synthetic construct; identical to SEQ ID NO: 10542
  source 1..120: mol_type = other DNA

SEQ ID NO: 66293 - DNA, 120 bp, synthetic construct; identical to SEQ ID NO: 36339
  source 1..120: mol_type = other DNA

SEQ ID NO: 66294 - DNA, 120 bp, synthetic construct; identical to SEQ ID NO: 36340
  source 1..120: mol_type = other DNA

SEQ ID NO: 66295 - DNA, 120 bp, synthetic construct; identical to SEQ ID NO: 36341
  source 1..120: mol_type = other DNA

SEQ ID NO: 66296 - DNA, 120 bp, synthetic construct; identical to SEQ ID NO: 10543
  source 1..120: mol_type = other DNA

SEQ ID NO: 66297 - DNA, 120 bp, synthetic construct; identical to SEQ ID NO: 36343
  source 1..120: mol_type = other DNA

SEQ ID NO: 66298 - DNA, 120 bp, synthetic construct; identical to SEQ ID NO: 36344
  source 1..120: mol_type = other DNA

SEQ ID NO: 66299 - DNA, 120 bp, synthetic construct; identical to SEQ ID NO: 10544
  source 1..120: mol_type = other DNA

SEQ ID NO: 66300 - DNA, 120 bp, synthetic construct; identical to SEQ ID NO: 36346
  source 1..120: mol_type = other DNA

SEQ ID NO: 66301 - DNA, 120 bp, synthetic construct; identical to SEQ ID NO: 36347
  source 1..120: mol_type = other DNA

SEQ ID NO: 66302 - DNA, 120 bp, synthetic construct; identical to SEQ ID NO: 36348
  source 1..120: mol_type = other DNA

SEQ ID NO: 66303 - DNA, 120 bp, synthetic construct; identical to SEQ ID NO: 36349
  source 1..120: mol_type = other DNA

SEQ ID NO: 66304 - DNA, 120 bp, synthetic construct; identical to SEQ ID NO: 10545
  source 1..120: mol_type = other DNA

SEQ ID NO: 66305 - DNA, 120 bp, synthetic construct; identical to SEQ ID NO: 36351
  source 1..120: mol_type = other DNA

SEQ ID NO: 66306 - DNA, 120 bp, synthetic construct; identical to SEQ ID NO: 36352
  source 1..120: mol_type = other DNA

SEQ ID NO: 66307 - DNA, 120 bp, synthetic construct; identical to SEQ ID NO: 10546
  source 1..120: mol_type = other DNA

SEQ ID NO: 66308 - DNA, 120 bp, synthetic construct; identical to SEQ ID NO: 36354
  source 1..120: mol_type = other DNA

SEQ ID NO: 66309 - DNA, 120 bp, synthetic construct; identical to SEQ ID NO: 36355
  source 1..120: mol_type = other DNA

SEQ ID NO: 66310 - DNA, 120 bp, synthetic construct; identical to SEQ ID NO: 36356
  source 1..120: mol_type = other DNA

SEQ ID NO: 66311 - DNA, 120 bp, synthetic construct; identical to SEQ ID NO: 36357
  source 1..120: mol_type = other DNA

SEQ ID NO: 66312 - DNA, 120 bp, synthetic construct; identical to SEQ ID NO: 10547
  source 1..120: mol_type = other DNA

SEQ ID NO: 66313 - DNA, 120 bp, synthetic construct; identical to SEQ ID NO: 36359
  source 1..120: mol_type = other DNA

SEQ ID NO: 66314 - DNA, 120 bp, synthetic construct; identical to SEQ ID NO: 36360
  source 1..120: mol_type = other DNA

SEQ ID NO: 66315 - DNA, 120 bp, synthetic construct; identical to SEQ ID NO: 10548
  source 1..120: mol_type = other DNA

SEQ ID NO: 66316 - DNA, 120 bp, synthetic construct; identical to SEQ ID NO: 36362
  source 1..120: mol_type = other DNA

SEQ ID NO: 66317 - DNA, 120 bp, synthetic construct; identical to SEQ ID NO: 36363
  source 1..120: mol_type = other DNA

SEQ ID NO: 66318 - DNA, 120 bp, synthetic construct; identical to SEQ ID NO: 36364
  source 1..120: mol_type = other DNA

SEQ ID NO: 66319 - DNA, 120 bp, synthetic construct; identical to SEQ ID NO: 36365
  source 1..120: mol_type = other DNA

SEQ ID NO: 66320 - DNA, 120 bp, synthetic construct; identical to SEQ ID NO: 10549
  source 1..120: mol_type = other DNA

SEQ ID NO: 66321 - DNA, 120 bp, synthetic construct; identical to SEQ ID NO: 36367
  source 1..120: mol_type = other DNA

SEQ ID NO: 66322 - DNA, 120 bp, synthetic construct; identical to SEQ ID NO: 36368
  source 1..120: mol_type = other DNA

SEQ ID NO: 66323 - DNA, 120 bp, synthetic construct; identical to SEQ ID NO: 36369
  source 1..120: mol_type = other DNA

SEQ ID NO: 66324 - DNA, 120 bp, synthetic construct; identical to SEQ ID NO: 10550
  source 1..120: mol_type = other DNA

SEQ ID NO: 66325 - DNA, 120 bp, synthetic construct; identical to SEQ ID NO: 36371
  source 1..120: mol_type = other DNA

SEQ ID NO: 66326 - DNA, 120 bp, synthetic construct; identical to SEQ ID NO: 36372
  source 1..120: mol_type = other DNA

SEQ ID NO: 66327 - DNA, 120 bp, synthetic construct; identical to SEQ ID NO: 10551
  source 1..120: mol_type = other DNA

SEQ ID NO: 66328 - DNA, 120 bp, synthetic construct; identical to SEQ ID NO: 36374
  source 1..120: mol_type = other DNA

SEQ ID NO: 66329 - DNA, 120 bp, synthetic construct; identical to SEQ ID NO: 36375
  source 1..120: mol_type = other DNA

SEQ ID NO: 66330 - DNA, 120 bp, synthetic construct; identical to SEQ ID NO: 36376
  source 1..120: mol_type = other DNA

SEQ ID NO: 66331 - DNA, 120 bp, synthetic construct; identical to SEQ ID NO: 10552
  source 1..120: mol_type = other DNA

SEQ ID NO: 66332 - DNA, 120 bp, synthetic construct; identical to SEQ ID NO: 36378
  source 1..120: mol_type = other DNA

SEQ ID NO: 66333 - DNA, 120 bp, synthetic construct; identical to SEQ ID NO: 36379
  source 1..120: mol_type = other DNA

SEQ ID NO: 66334 - DNA, 120 bp, synthetic construct; identical to SEQ ID NO: 36380
  source 1..120: mol_type = other DNA

SEQ ID NO: 66335 - DNA, 120 bp, synthetic construct; identical to SEQ ID NO: 36381
  source 1..120: mol_type = other DNA

SEQ ID NO: 66336 - DNA, 120 bp, synthetic construct; identical to SEQ ID NO: 10553
  source 1..120: mol_type = other DNA

SEQ ID NO: 66337 - DNA, 120 bp, synthetic construct; identical to SEQ ID NO: 36383
  source 1..120: mol_type = other DNA

SEQ ID NO: 66338 - DNA, 120 bp, synthetic construct; identical to SEQ ID NO: 36384
  source 1..120: mol_type = other DNA

SEQ ID NO: 66339 - DNA, 120 bp, synthetic construct; identical to SEQ ID NO: 36385
  source 1..120: mol_type = other DNA

SEQ ID NO: 66340 - DNA, 120 bp, synthetic construct; identical to SEQ ID NO: 10554
  source 1..120: mol_type = other DNA

SEQ ID NO: 66341 - DNA, 120 bp, synthetic construct; identical to SEQ ID NO: 36387
  source 1..120: mol_type = other DNA

SEQ ID NO: 66342 - DNA, 120 bp, synthetic construct; identical to SEQ ID NO: 36388
  source 1..120: mol_type = other DNA

SEQ ID NO: 66343 - DNA, 120 bp, synthetic construct; identical to SEQ ID NO: 10555
  source 1..120: mol_type = other DNA

SEQ ID NO: 66344 - DNA, 120 bp, synthetic construct; identical to SEQ ID NO: 36390
  source 1..120: mol_type = other DNA

SEQ ID NO: 66345 - DNA, 120 bp, synthetic construct; identical to SEQ ID NO: 36391
  source 1..120: mol_type = other DNA

SEQ ID NO: 66346 - DNA, 120 bp, synthetic construct; identical to SEQ ID NO: 36392
  source 1..120: mol_type = other DNA

SEQ ID NO: 66347 - DNA, 120 bp, synthetic construct; identical to SEQ ID NO: 36393
  source 1..120: mol_type = other DNA

SEQ ID NO: 66348 - DNA, 120 bp, synthetic construct; identical to SEQ ID NO: 10556
  source 1..120: mol_type = other DNA

SEQ ID NO: 66349 - DNA, 120 bp, synthetic construct; identical to SEQ ID NO: 36395
  source 1..120: mol_type = other DNA

SEQ ID NO: 66350 - DNA, 120 bp, synthetic construct; identical to SEQ ID NO: 36396
  source 1..120: mol_type = other DNA

SEQ ID NO: 66351 - DNA, 120 bp, synthetic construct; identical to SEQ ID NO: 10557
  source 1..120: mol_type = other DNA

SEQ ID NO: 66352 - DNA, 120 bp, synthetic construct; identical to SEQ ID NO: 36398
  source 1..120: mol_type = other DNA

SEQ ID NO: 66353 - DNA, 120 bp, synthetic construct; identical to SEQ ID NO: 36399
  source 1..120: mol_type = other DNA

SEQ ID NO: 66354 - DNA, 120 bp, synthetic construct; identical to SEQ ID NO: 36400
  source 1..120: mol_type = other DNA

SEQ ID NO: 66355 - DNA, 120 bp, synthetic construct; identical to SEQ ID NO: 3348
  source 1..120: mol_type = other DNA

SEQ ID NO: 66356 - DNA, 120 bp, synthetic construct; identical to SEQ ID NO: 36402
  source 1..120: mol_type = other DNA

SEQ ID NO: 66357 - DNA, 120 bp, synthetic construct; identical to SEQ ID NO: 36403
  source 1..120: mol_type = other DNA

SEQ ID NO: 66358 - DNA, 120 bp, synthetic construct; identical to SEQ ID NO: 36404
  source 1..120: mol_type = other DNA

SEQ ID NO: 66359 - DNA, 120 bp, synthetic construct; identical to SEQ ID NO: 10559
  source 1..120: mol_type = other DNA

SEQ ID NO: 66360 - DNA, 120 bp, synthetic construct; identical to SEQ ID NO: 36406
  source 1..120: mol_type = other DNA

SEQ ID NO: 66361 - DNA, 120 bp, synthetic construct; identical to SEQ ID NO: 36407
  source 1..120: mol_type = other DNA

SEQ ID NO: 66362 - DNA, 120 bp, synthetic construct; identical to SEQ ID NO: 36408
  source 1..120: mol_type = other DNA

SEQ ID NO: 66363 - DNA, 120 bp, synthetic construct; identical to SEQ ID NO: 10560
  source 1..120: mol_type = other DNA

SEQ ID NO: 66364 - DNA, 120 bp, synthetic construct; identical to SEQ ID NO: 36410
  source 1..120: mol_type = other DNA

SEQ ID NO: 66365 - DNA, 120 bp, synthetic construct; identical to SEQ ID NO: 36411
  source 1..120: mol_type = other DNA

SEQ ID NO: 66366 - DNA, 120 bp, synthetic construct; identical to SEQ ID NO: 36412
  source 1..120: mol_type = other DNA

SEQ ID NO: 66367 - DNA, 120 bp, synthetic construct; identical to SEQ ID NO: 36413
  source 1..120: mol_type = other DNA

SEQ ID NO: 66368 - DNA, 120 bp, synthetic construct; identical to SEQ ID NO: 10561
  source 1..120: mol_type = other DNA

SEQ ID NO: 66369 - DNA, 120 bp, synthetic construct; identical to SEQ ID NO: 36415
  source 1..120: mol_type = other DNA

SEQ ID NO: 66370 - DNA, 120 bp, synthetic construct; identical to SEQ ID NO: 36416
  source 1..120: mol_type = other DNA

SEQ ID NO: 66371 - DNA, 120 bp, synthetic construct; identical to SEQ ID NO: 10562
  source 1..120: mol_type = other DNA

SEQ ID NO: 66372 - DNA, 120 bp, synthetic construct; identical to SEQ ID NO: 36418
  source 1..120: mol_type = other DNA

SEQ ID NO: 66373 - DNA, 120 bp, synthetic construct; identical to SEQ ID NO: 36419
  source 1..120: mol_type = other DNA

SEQ ID NO: 66374 - DNA, 120 bp, synthetic construct; identical to SEQ ID NO: 36420
  source 1..120: mol_type = other DNA

SEQ ID NO: 66375 - DNA, 120 bp, synthetic construct; identical to SEQ ID NO: 10563
  source 1..120: mol_type = other DNA

SEQ ID NO: 66376 - DNA, 120 bp, synthetic construct; identical to SEQ ID NO: 36422
  source 1..120: mol_type = other DNA

SEQ ID NO: 66377 - DNA, 120 bp, synthetic construct; identical to SEQ ID NO: 36423
  source 1..120: mol_type = other DNA

SEQ ID NO: 66378 - DNA, 120 bp, synthetic construct; identical to SEQ ID NO: 36424
  source 1..120: mol_type = other DNA

SEQ ID NO: 66379 - DNA, 120 bp, synthetic construct; identical to SEQ ID NO: 36425
  source 1..120: mol_type = other DNA

SEQ ID NO: 66380 - DNA, 120 bp, synthetic construct; identical to SEQ ID NO: 10564
  source 1..120: mol_type = other DNA

SEQ ID NO: 66381 - DNA, 120 bp, synthetic construct; identical to SEQ ID NO: 36427
  source 1..120: mol_type = other DNA

SEQ ID NO: 66382 - DNA, 120 bp, synthetic construct; identical to SEQ ID NO: 36428
  source 1..120: mol_type = other DNA

SEQ ID NO: 66383 - DNA, 120 bp, synthetic construct; identical to SEQ ID NO: 10565
  source 1..120: mol_type = other DNA

SEQ ID NO: 66384 - DNA, 120 bp, synthetic construct; identical to SEQ ID NO: 36430
  source 1..120: mol_type = other DNA

SEQ ID NO: 66385 - DNA, 120 bp, synthetic construct; identical to SEQ ID NO: 36431
  source 1..120: mol_type = other DNA

SEQ ID NO: 66386 - DNA, 120 bp, synthetic construct; identical to SEQ ID NO: 36432
  source 1..120: mol_type = other DNA

SEQ ID NO: 66387 - DNA, 120 bp, synthetic construct; identical to SEQ ID NO: 36433
  source 1..120: mol_type = other DNA

SEQ ID NO: 66388 - DNA, 120 bp, synthetic construct; identical to SEQ ID NO: 10566
  source 1..120: mol_type = other DNA

SEQ ID NO: 66389 - DNA, 120 bp, synthetic construct; identical to SEQ ID NO: 36435
  source 1..120: mol_type = other DNA

SEQ ID NO: 66390 - DNA, 120 bp, synthetic construct; identical to SEQ ID NO: 36436
  source 1..120: mol_type = other DNA

SEQ ID NO: 66391 - DNA, 120 bp, synthetic construct; identical to SEQ ID NO: 36437
  source 1..120: mol_type = other DNA

SEQ ID NO: 66392 - DNA, 120 bp, synthetic construct; identical to SEQ ID NO: 10567
  source 1..120: mol_type = other DNA

SEQ ID NO: 66393 - DNA, 120 bp, synthetic construct; identical to SEQ ID NO: 36439
  source 1..120: mol_type = other DNA

SEQ ID NO: 66394 - DNA, 120 bp, synthetic construct; identical to SEQ ID NO: 36440
  source 1..120: mol_type = other DNA

SEQ ID NO: 66395 - DNA, 120 bp, synthetic construct; identical to SEQ ID NO: 10568
  source 1..120: mol_type = other DNA

SEQ ID NO: 66396 - DNA, 120 bp, synthetic construct; identical to SEQ ID NO: 36442
  source 1..120: mol_type = other DNA

SEQ ID NO: 66397 - DNA, 120 bp, synthetic construct; identical to SEQ ID NO: 36443
  source 1..120: mol_type = other DNA

SEQ ID NO: 66398 - DNA, 120 bp, synthetic construct; identical to SEQ ID NO: 36444
  source 1..120: mol_type = other DNA

SEQ ID NO: 66399 - DNA, 120 bp, synthetic construct; identical to SEQ ID NO: 36445
  source 1..120: mol_type = other DNA

SEQ ID NO: 66400 - DNA, 120 bp, synthetic construct; identical to SEQ ID NO: 10569
  source 1..120: mol_type = other DNA

SEQ ID NO: 66401 - DNA, 120 bp, synthetic construct; identical to SEQ ID NO: 36447
  source 1..120: mol_type = other DNA

SEQ ID NO: 66402 - DNA, 120 bp, synthetic construct; identical to SEQ ID NO: 36448
  source 1..120: mol_type = other DNA

SEQ ID NO: 66403 - DNA, 120 bp, synthetic construct; identical to SEQ ID NO: 36449
  source 1..120: mol_type = other DNA

SEQ ID NO: 66404 - DNA, 120 bp, synthetic construct; identical to SEQ ID NO: 10570
  source 1..120: mol_type = other DNA

SEQ ID NO: 66405 - DNA, 120 bp, synthetic construct; identical to SEQ ID NO: 36451
  source 1..120: mol_type = other DNA

SEQ ID NO: 66406 - DNA, 120 bp, synthetic construct; identical to SEQ ID NO: 36452
  source 1..120: mol_type = other DNA

SEQ ID NO: 66407 - DNA, 120 bp, synthetic construct; identical to SEQ ID NO: 10571
  source 1..120: mol_type = other DNA

SEQ ID NO: 66408 - DNA, 120 bp, synthetic construct; identical to SEQ ID NO: 36454
  source 1..120: mol_type = other DNA

SEQ ID NO: 66409 - DNA, 120 bp, synthetic construct; identical to SEQ ID NO: 36455
  source 1..120: mol_type = other DNA

SEQ ID NO: 66410 - DNA, 120 bp, synthetic construct; identical to SEQ ID NO: 36456
  source 1..120: mol_type = other DNA

SEQ ID NO: 66411 - DNA, 120 bp, synthetic construct; identical to SEQ ID NO: 10572
  source 1..120: mol_type = other DNA

SEQ ID NO: 66412 - DNA, 120 bp, synthetic construct; identical to SEQ ID NO: 36458
  source 1..120: mol_type = other DNA

SEQ ID NO: 66413 - DNA, 120 bp, synthetic construct; identical to SEQ ID NO: 36459
  source 1..120: mol_type = other DNA

SEQ ID NO: 66414 - DNA, 120 bp, synthetic construct; identical to SEQ ID NO: 36460
  source 1..120: mol_type = other DNA

SEQ ID NO: 66415 - DNA, 120 bp, synthetic construct; identical to SEQ ID NO: 36461
  source 1..120: mol_type = other DNA

SEQ ID NO: 66416 - DNA, 120 bp, synthetic construct; identical to SEQ ID NO: 10573
  source 1..120: mol_type = other DNA

SEQ ID NO: 66417 - DNA, 120 bp, synthetic construct; identical to SEQ ID NO: 36463
  source 1..120: mol_type = other DNA

SEQ ID NO: 66418 - DNA, 120 bp, synthetic construct; identical to SEQ ID NO: 36464
  source 1..120: mol_type = other DNA

SEQ ID NO: 66419 - DNA, 120 bp, synthetic construct; identical to SEQ ID NO: 10574
  source 1..120: mol_type = other DNA

SEQ ID NO: 66420 - DNA, 120 bp, synthetic construct; identical to SEQ ID NO: 36466
  source 1..120: mol_type = other DNA

SEQ ID NO: 66421 - DNA, 120 bp, synthetic construct; identical to SEQ ID NO: 36467
  source 1..120: mol_type = other DNA

SEQ ID NO: 66422 - DNA, 120 bp, synthetic construct; identical to SEQ ID NO: 36468
  source 1..120: mol_type = other DNA

SEQ ID NO: 66423 - DNA, 120 bp, synthetic construct; identical to SEQ ID NO: 36469
  source 1..120: mol_type = other DNA

SEQ ID NO: 66424 - DNA, 120 bp, synthetic construct; identical to SEQ ID NO: 10575
  source 1..120: mol_type = other DNA

SEQ ID NO: 66425 - DNA, 120 bp, synthetic construct; identical to SEQ ID NO: 36471
  source 1..120: mol_type = other DNA

SEQ ID NO: 66426 - DNA, 120 bp, synthetic construct; identical to SEQ ID NO: 36472
  source 1..120: mol_type = other DNA

SEQ ID NO: 66427 - DNA, 120 bp, synthetic construct; identical to SEQ ID NO: 36473
  source 1..120: mol_type = other DNA

SEQ ID NO: 66428 - DNA, 120 bp, synthetic construct; identical to SEQ ID NO: 36474
  source 1..120: mol_type = other DNA

SEQ ID NO: 66429 - DNA, 120 bp, synthetic construct; identical to SEQ ID NO: 10576
  source 1..120: mol_type = other DNA

SEQ ID NO: 66430 - DNA, 120 bp, synthetic construct; identical to SEQ ID NO: 36476
  source 1..120: mol_type = other DNA

SEQ ID NO: 66431 - DNA, 120 bp, synthetic construct; identical to SEQ ID NO: 36477
  source 1..120: mol_type = other DNA

SEQ ID NO: 66432 - DNA, 120 bp, synthetic construct; identical to SEQ ID NO: 36478
  source 1..120: mol_type = other DNA

SEQ ID NO: 66433 - DNA, 120 bp, synthetic construct; identical to SEQ ID NO: 10577
  source 1..120: mol_type = other DNA

SEQ ID NO: 66434 - DNA, 120 bp, synthetic construct; identical to SEQ ID NO: 36480
  source 1..120: mol_type = other DNA

SEQ ID NO: 66435 - DNA, 120 bp, synthetic construct; identical to SEQ ID NO: 36481
  source 1..120: mol_type = other DNA

SEQ ID NO: 66436 - DNA, 120 bp, synthetic construct; identical to SEQ ID NO: 10578
  source 1..120: mol_type = other DNA

SEQ ID NO: 66437 - DNA, 120 bp, synthetic construct; identical to SEQ ID NO: 36483
  source 1..120: mol_type = other DNA

SEQ ID NO: 66438 - DNA, 120 bp, synthetic construct; identical to SEQ ID NO: 36484
  source 1..120: mol_type = other DNA

SEQ ID NO: 66439 - DNA, 120 bp, synthetic construct; identical to SEQ ID NO: 36485
  source 1..120: mol_type = other DNA

SEQ ID NO: 66440 - DNA, 120 bp, synthetic construct; identical to SEQ ID NO: 10579
  source 1..120: mol_type = other DNA

SEQ ID NO: 66441 - DNA, 120 bp, synthetic construct; identical to SEQ ID NO: 36487
  source 1..120: mol_type = other DNA

SEQ ID NO: 66442 - DNA, 120 bp, synthetic construct; identical to SEQ ID NO: 36488
  source 1..120: mol_type = other DNA

SEQ ID NO: 66443 - DNA, 120 bp, synthetic construct; identical to SEQ ID NO: 36489
  source 1..120: mol_type = other DNA

SEQ ID NO: 66444 - DNA, 120 bp, synthetic construct; identical to SEQ ID NO: 36490
  source 1..120: mol_type = other DNA

SEQ ID NO: 66445 - DNA, 120 bp, synthetic construct; identical to SEQ ID NO: 10580
  source 1..120: mol_type = other DNA

SEQ ID NO: 66446 - DNA, 120 bp, synthetic construct; identical to SEQ ID NO: 36492
  source 1..120: mol_type = other DNA

SEQ ID NO: 66447 - DNA, 120 bp, synthetic construct; identical to SEQ ID NO: 36493
  source 1..120: mol_type = other DNA

SEQ ID NO: 66448 - DNA, 120 bp, synthetic construct; identical to SEQ ID NO: 36494
  source 1..120: mol_type = other DNA

SEQ ID NO: 66449 - DNA, 120 bp, synthetic construct; identical to SEQ ID NO: 10581
  source 1..120: mol_type = other DNA

SEQ ID NO: 66450 - DNA, 120 bp, synthetic construct; identical to SEQ ID NO: 36496
  source 1..120: mol_type = other DNA

SEQ ID NO: 66451 - DNA, 120 bp, synthetic construct; identical to SEQ ID NO: 36497
  source 1..120: mol_type = other DNA

SEQ ID NO: 66452 - DNA, 120 bp, synthetic construct; identical to SEQ ID NO: 36498
  source 1..120: mol_type = other DNA

SEQ ID NO: 66453 - DNA, 120 bp, synthetic construct; identical to SEQ ID NO: 10582
  source 1..120: mol_type = other DNA

SEQ ID NO: 66454 - DNA, 120 bp, synthetic construct; identical to SEQ ID NO: 36500
  source 1..120: mol_type = other DNA

SEQ ID NO: 66455 - DNA, 120 bp, synthetic construct; identical to SEQ ID NO: 36501
  source 1..120: mol_type = other DNA

SEQ ID NO: 66456 - DNA, 120 bp, synthetic construct; identical to SEQ ID NO: 36502
  source 1..120: mol_type = other DNA

SEQ ID NO: 66457 - DNA, 120 bp, synthetic construct; identical to SEQ ID NO: 10583
  source 1..120: mol_type = other DNA

SEQ ID NO: 66458 - DNA, 120 bp, synthetic construct; identical to SEQ ID NO: 36504
  source 1..120: mol_type = other DNA

SEQ ID NO: 66459 - DNA, 120 bp, synthetic construct; identical to SEQ ID NO: 36505
  source 1..120: mol_type = other DNA

SEQ ID NO: 66460 - DNA, 120 bp, synthetic construct; identical to SEQ ID NO: 36506
  source 1..120: mol_type = other DNA

SEQ ID NO: 66461 - DNA, 120 bp, synthetic construct; identical to SEQ ID NO: 10584
  source 1..120: mol_type = other DNA

SEQ ID NO: 66462 - DNA, 120 bp, synthetic construct; identical to SEQ ID NO: 3373
  source 1..120: mol_type = other DNA

SEQ ID NO: 66463 - DNA, 120 bp, synthetic construct; identical to SEQ ID NO: 36509
  source 1..120: mol_type = other DNA

SEQ ID NO: 66464 - DNA, 120 bp, synthetic construct; identical to SEQ ID NO: 36510
  source 1..120: mol_type = other DNA

SEQ ID NO: 66465 - DNA, 120 bp, synthetic construct; identical to SEQ ID NO: 10585
  source 1..120: mol_type = other DNA

SEQ ID NO: 66466 - DNA, 120 bp, synthetic construct; identical to SEQ ID NO: 36512
  source 1..120: mol_type = other DNA

SEQ ID NO: 66467 - DNA, 120 bp, synthetic construct; identical to SEQ ID NO: 36513
  source 1..120: mol_type = other DNA

SEQ ID NO: 66468 - DNA, 120 bp, synthetic construct; identical to SEQ ID NO: 10586
  source 1..120: mol_type = other DNA

SEQ ID NO: 66469 - DNA, 120 bp, synthetic construct; identical to SEQ ID NO: 36515
  source 1..120: mol_type = other DNA

SEQ ID NO: 66470 - DNA, 120 bp, synthetic construct; identical to SEQ ID NO: 36516
  source 1..120: mol_type = other DNA

SEQ ID NO: 66471 - DNA, 120 bp, synthetic construct; identical to SEQ ID NO: 36517
  source 1..120: mol_type = other DNA

SEQ ID NO: 66472 - DNA, 120 bp, synthetic construct; identical to SEQ ID NO: 36518
  source 1..120: mol_type = other DNA

SEQ ID NO: 66473 - DNA, 120 bp, synthetic construct; identical to SEQ ID NO: 10587
  source 1..120: mol_type = other DNA

SEQ ID NO: 66474 - DNA, 120 bp, synthetic construct; identical to SEQ ID NO: 36520
  source 1..120: mol_type = other DNA

SEQ ID NO: 66475 - DNA, 120 bp, synthetic construct; identical to SEQ ID NO: 36521
  source 1..120: mol_type = other DNA

SEQ ID NO: 66476 - DNA, 120 bp, synthetic construct; identical to SEQ ID NO: 10588
  source 1..120: mol_type = other DNA

SEQ ID NO: 66477 - DNA, 120 bp, synthetic construct; identical to SEQ ID NO: 36523
  source 1..120: mol_type = other DNA

SEQ ID NO: 66478 - DNA, 120 bp, synthetic construct; identical to SEQ ID NO: 36524
  source 1..120: mol_type = other DNA

SEQ ID NO: 66479 - DNA, 120 bp, synthetic construct; identical to SEQ ID NO: 36525
  source 1..120: mol_type = other DNA

SEQ ID NO: 66480 - DNA, 120 bp, synthetic construct; identical to SEQ ID NO: 36526
  source 1..120: mol_type = other DNA

SEQ ID NO: 66481 - DNA, 120 bp, synthetic construct; identical to SEQ ID NO: 10589
  source 1..120: mol_type = other DNA

SEQ ID NO: 66482 - DNA, 120 bp, synthetic construct; identical to SEQ ID NO: 36528
  source 1..120: mol_type = other DNA

SEQ ID NO: 66483 - DNA, 120 bp, synthetic construct; identical to SEQ ID NO: 36529
  source 1..120: mol_type = other DNA

SEQ ID NO: 66484 - DNA, 120 bp, synthetic construct; identical to SEQ ID NO: 36530
  source 1..120: mol_type = other DNA

SEQ ID NO: 66485 - DNA, 120 bp, synthetic construct; identical to SEQ ID NO: 10590
  source 1..120: mol_type = other DNA

SEQ ID NO: 66486 - DNA, 120 bp, synthetic construct; identical to SEQ ID NO: 36532
  source 1..120: mol_type = other DNA

SEQ ID NO: 66487 - DNA, 120 bp, synthetic construct; identical to SEQ ID NO: 36533
  source 1..120: mol_type = other DNA

SEQ ID NO: 66488 - DNA, 120 bp, synthetic construct; identical to SEQ ID NO: 10591
  source 1..120: mol_type = other DNA

SEQ ID NO: 66489 - DNA, 120 bp, synthetic construct; identical to SEQ ID NO: 36535
  source 1..120: mol_type = other DNA

SEQ ID NO: 66490 - DNA, 120 bp, synthetic construct; identical to SEQ ID NO: 36536
  source 1..120: mol_type = other DNA

SEQ ID NO: 66491 - DNA, 120 bp, synthetic construct; identical to SEQ ID NO: 36537
  source 1..120: mol_type = other DNA

SEQ ID NO: 66492 - DNA, 120 bp, synthetic construct; identical to SEQ ID NO: 10592
  source 1..120: mol_type = other DNA

SEQ ID NO: 66493 - DNA, 120 bp, synthetic construct; identical to SEQ ID NO: 36539
  source 1..120: mol_type = other DNA

SEQ ID NO: 66494 - DNA, 120 bp, synthetic construct; identical to SEQ ID NO: 36540
  source 1..120: mol_type = other DNA

SEQ ID NO: 66495 - DNA, 120 bp, synthetic construct; identical to SEQ ID NO: 36541
  source 1..120: mol_type = other DNA

SEQ ID NO: 66496 - DNA, 120 bp, synthetic construct; identical to SEQ ID NO: 10593
  source 1..120: mol_type = other DNA

SEQ ID NO: 66497 - DNA, 120 bp, synthetic construct; identical to SEQ ID NO: 36543
  source 1..120: mol_type = other DNA

SEQ ID NO: 66498 - DNA, 120 bp, synthetic construct; identical to SEQ ID NO: 36544
  source 1..120: mol_type = other DNA

SEQ ID NO: 66499 - DNA, 120 bp, synthetic construct; identical to SEQ ID NO: 36545
  source 1..120: mol_type = other DNA

SEQ ID NO: 66500 - DNA, 120 bp, synthetic construct; identical to SEQ ID NO: 10594
  source 1..120: mol_type = other DNA

SEQ ID NO: 66501 - DNA, 120 bp, synthetic construct; identical to SEQ ID NO: 36547
  source 1..120: mol_type = other DNA

SEQ ID NO: 66502 - DNA, 120 bp, synthetic construct; identical to SEQ ID NO: 36548
  source 1..120: mol_type = other DNA

SEQ ID NO: 66503 - DNA, 120 bp, synthetic construct; identical to SEQ ID NO: 36549
  source 1..120: mol_type = other DNA

SEQ ID NO: 66504 - DNA, 120 bp, synthetic construct; identical to SEQ ID NO: 36550
  source 1..120: mol_type = other DNA

SEQ ID NO: 66505 - DNA, 120 bp, synthetic construct; identical to SEQ ID NO: 10595
  source 1..120: mol_type = other DNA

SEQ ID NO: 66506 - DNA, 120 bp, synthetic construct; identical to SEQ ID NO: 36552
  source 1..120: mol_type = other DNA

SEQ ID NO: 66507 - DNA, 120 bp, synthetic construct; identical to SEQ ID NO: 36553
  source 1..120: mol_type = other DNA

SEQ ID NO: 66508 - DNA, 120 bp, synthetic construct; identical to SEQ ID NO: 36554
  source 1..120: mol_type = other DNA

SEQ ID NO: 66509 - DNA, 120 bp, synthetic construct; identical to SEQ ID NO: 10596
  source 1..120: mol_type = other DNA

SEQ ID NO: 66510 - DNA, 120 bp, synthetic construct; identical to SEQ ID NO: 36556
  source 1..120: mol_type = other DNA

SEQ ID NO: 66511 - DNA, 120 bp, synthetic construct; identical to SEQ ID NO: 36557
  source 1..120: mol_type = other DNA

SEQ ID NO: 66512 - DNA, 120 bp, synthetic construct; identical to SEQ ID NO: 10597
  source 1..120: mol_type = other DNA

SEQ ID NO: 66513 - DNA, 120 bp, synthetic construct; identical to SEQ ID NO: 36559
  source 1..120: mol_type = other DNA

SEQ ID NO: 66514 - DNA, 120 bp, synthetic construct; identical to SEQ ID NO: 36560
  source 1..120: mol_type = other DNA

SEQ ID NO: 66515 - DNA, 120 bp, synthetic construct; identical to SEQ ID NO: 36561
  source 1..120: mol_type = other DNA

SEQ ID NO: 66516 - DNA, 120 bp, synthetic construct; identical to SEQ ID NO: 36562
  source 1..120: mol_type = other DNA

SEQ ID NO: 66517 - DNA, 120 bp, synthetic construct; identical to SEQ ID NO: 10598
  source 1..120: mol_type = other DNA

SEQ ID NO: 66518 - DNA, 120 bp, synthetic construct; identical to SEQ ID NO: 36564
  source 1..120: mol_type = other DNA

SEQ ID NO: 66519 - DNA, 120 bp, synthetic construct; identical to SEQ ID NO: 36565
  source 1..120: mol_type = other DNA

SEQ ID NO: 66520 - DNA, 120 bp, synthetic construct; identical to SEQ ID NO: 10599
  source 1..120: mol_type = other DNA

SEQ ID NO: 66521 - DNA, 120 bp, synthetic construct; identical to SEQ ID NO: 36567
  source 1..120: mol_type = other DNA

SEQ ID NO: 66522 - DNA, 120 bp, synthetic construct; identical to SEQ ID NO: 36568
  source 1..120: mol_type = other DNA

SEQ ID NO: 66523 - DNA, 120 bp, synthetic construct; identical to SEQ ID NO: 36569
  source 1..120: mol_type = other DNA

SEQ ID NO: 66524 - DNA, 120 bp, synthetic construct; identical to SEQ ID NO: 36570
  source 1..120: mol_type = other DNA

SEQ ID NO: 66525 - DNA, 120 bp, synthetic construct; identical to SEQ ID NO: 10600
  source 1..120: mol_type = other DNA

SEQ ID NO: 66526 - DNA, 120 bp, synthetic construct; identical to SEQ ID NO: 36572
  source 1..120: mol_type = other DNA

SEQ ID NO: 66527 - DNA, 120 bp, synthetic construct; identical to SEQ ID NO: 36573
  source 1..120: mol_type = other DNA

SEQ ID NO: 66528 - DNA, 120 bp, synthetic construct; identical to SEQ ID NO: 10601
  source 1..120: mol_type = other DNA

SEQ ID NO: 66529 - DNA, 120 bp, synthetic construct; identical to SEQ ID NO: 36575
  source 1..120: mol_type = other DNA

SEQ ID NO: 66530 - DNA, 120 bp, synthetic construct; identical to SEQ ID NO: 36576
  source 1..120: mol_type = other DNA

SEQ ID NO: 66531 - DNA, 120 bp, synthetic construct; identical to SEQ ID NO: 36577
  source 1..120: mol_type = other DNA

SEQ ID NO: 66532 - DNA, 120 bp, synthetic construct; identical to SEQ ID NO: 36578
  source 1..120: mol_type = other DNA

SEQ ID NO: 66533 - DNA, 120 bp, synthetic construct; identical to SEQ ID NO: 10602
  source 1..120: mol_type = other DNA

SEQ ID NO: 66534 - DNA, 120 bp, synthetic construct; identical to SEQ ID NO: 36580
  source 1..120: mol_type = other DNA

SEQ ID NO: 66535 - DNA, 120 bp, synthetic construct; identical to SEQ ID NO: 36581
  source 1..120: mol_type = other DNA

SEQ ID NO: 66536 - DNA, 120 bp, synthetic construct; identical to SEQ ID NO: 10603
  source 1..120: mol_type = other DNA

SEQ ID NO: 66537 - DNA, 120 bp, synthetic construct; identical to SEQ ID NO: 36583
  source 1..120: mol_type = other DNA

SEQ ID NO: 66538 - DNA, 120 bp, synthetic construct; identical to SEQ ID NO: 36584
  source 1..120: mol_type = other DNA

SEQ ID NO: 66539 - DNA, 120 bp, synthetic construct; identical to SEQ ID NO: 36585
  source 1..120: mol_type = other DNA

SEQ ID NO: 66540 - DNA, 120 bp, synthetic construct; identical to SEQ ID NO: 36586
  source 1..120: mol_type = other DNA

SEQ ID NO: 66541 - DNA, 120 bp, synthetic construct; identical to SEQ ID NO: 10604
  source 1..120: mol_type = other DNA

SEQ ID NO: 66542 - DNA, 120 bp, synthetic construct; identical to SEQ ID NO: 36588
  source 1..120: mol_type = other DNA

SEQ ID NO: 66543 - DNA, 120 bp, synthetic construct; identical to SEQ ID NO: 36589
  source 1..120: mol_type = other DNA

SEQ ID NO: 66544 - DNA, 120 bp, synthetic construct; identical to SEQ ID NO: 10605
  source 1..120: mol_type = other DNA

SEQ ID NO: 66545 - DNA, 120 bp, synthetic construct; identical to SEQ ID NO: 36591
  source 1..120: mol_type = other DNA

SEQ ID NO: 66546 - DNA, 120 bp, synthetic construct; identical to SEQ ID NO: 36592
  source 1..120: mol_type = other DNA

SEQ ID NO: 66547 - DNA, 120 bp, synthetic construct; identical to SEQ ID NO: 36593
  source 1..120: mol_type = other DNA

SEQ ID NO: 66548 - DNA, 120 bp, synthetic construct; identical to SEQ ID NO: 36594
  source 1..120: mol_type = other DNA

SEQ ID NO: 66549 - DNA, 120 bp, synthetic construct; identical to SEQ ID NO: 10606
  source 1..120: mol_type = other DNA

SEQ ID NO: 66550 - DNA, 120 bp, synthetic construct; identical to SEQ ID NO: 36596
  source 1..120: mol_type = other DNA

SEQ ID NO: 66551 - DNA, 120 bp, synthetic construct; identical to SEQ ID NO: 36597
  source 1..120: mol_type = other DNA

SEQ ID NO: 66552 - DNA, 120 bp, synthetic construct; identical to SEQ ID NO: 10607
  source 1..120: mol_type = other DNA

SEQ ID NO: 66553 - DNA, 120 bp, synthetic construct; identical to SEQ ID NO: 36599
  source 1..120: mol_type = other DNA

SEQ ID NO: 66554 - DNA, 120 bp, synthetic construct; identical to SEQ ID NO: 36600
  source 1..120: mol_type = other DNA

SEQ ID NO: 66555 - DNA, 120 bp, synthetic construct; identical to SEQ ID NO: 36601
  source 1..120: mol_type = other DNA

SEQ ID NO: 66556 - DNA, 120 bp, synthetic construct; identical to SEQ ID NO: 10608
  source 1..120: mol_type = other DNA

SEQ ID NO: 66557 - DNA, 120 bp, synthetic construct; identical to SEQ ID NO: 36603
  source 1..120: mol_type = other DNA

SEQ ID NO: 66558 - DNA, 120 bp, synthetic construct; identical to SEQ ID NO: 36604
  source 1..120: mol_type = other DNA

SEQ ID NO: 66559 - DNA, 120 bp, synthetic construct; identical to SEQ ID NO: 36605
  source 1..120: mol_type = other DNA

SEQ ID NO: 66560 - DNA, 120 bp, synthetic construct; identical to SEQ ID NO: 36606
  source 1..120: mol_type = other DNA

SEQ ID NO: 66561 - DNA, 120 bp, synthetic construct; identical to SEQ ID NO: 10609
  source 1..120: mol_type = other DNA

SEQ ID NO: 66562 - DNA, 120 bp, synthetic construct; identical to SEQ ID NO: 36608
  source 1..120: mol_type = other DNA

SEQ ID NO: 66563 - DNA, 120 bp, synthetic construct; identical to SEQ ID NO: 36609
  source 1..120: mol_type = other DNA

SEQ ID NO: 66564 - DNA, 120 bp, synthetic construct; identical to SEQ ID NO: 36610
  source 1..120: mol_type = other DNA

SEQ ID NO: 66565 - DNA, 120 bp, synthetic construct; identical to SEQ ID NO: 10610
  source 1..120: mol_type = other DNA

SEQ ID NO: 66566 - DNA, 120 bp, synthetic construct; identical to SEQ ID NO: 36612
  source 1..120: mol_type = other DNA

SEQ ID NO: 66567 - DNA, 120 bp, synthetic construct; identical to SEQ ID NO: 36613
  source 1..120: mol_type = other DNA

SEQ ID NO: 66568 - DNA, 120 bp, synthetic construct; identical to SEQ ID NO: 36614
  source 1..120: mol_type = other DNA

SEQ ID NO: 66569 - DNA, 120 bp, synthetic construct; identical to SEQ ID NO: 10611
  source 1..120: mol_type = other DNA

SEQ ID NO: 66570 - DNA, 120 bp, synthetic construct; identical to SEQ ID NO: 36616
  source 1..120: mol_type = other DNA

SEQ ID NO: 66571 - DNA, 120 bp, synthetic construct; identical to SEQ ID NO: 36617
  source 1..120: mol_type = other DNA

SEQ ID NO: 66572 - DNA, 120 bp, synthetic construct; identical to SEQ ID NO: 36618
  source 1..120: mol_type = other DNA

SEQ ID NO: 66573 - DNA, 120 bp, synthetic construct; identical to SEQ ID NO: 10612
  source 1..120: mol_type = other DNA

SEQ ID NO: 66574 - DNA, 120 bp, synthetic construct; identical to SEQ ID NO: 36620
  source 1..120: mol_type = other DNA

SEQ ID NO: 66575 - DNA, 120 bp, synthetic construct; identical to SEQ ID NO: 36621
  source 1..120: mol_type = other DNA

SEQ ID NO: 66576 - DNA, 120 bp, synthetic construct; identical to SEQ ID NO: 10613
  source 1..120: mol_type = other DNA

SEQ ID NO: 66577 - DNA, 120 bp, synthetic construct; identical to SEQ ID NO: 36623
  source 1..120: mol_type = other DNA

SEQ ID NO: 66578 - DNA, 120 bp, synthetic construct; identical to SEQ ID NO: 36624
  source 1..120: mol_type = other DNA

SEQ ID NO: 66579 - DNA, 120 bp, synthetic construct; identical to SEQ ID NO: 36625
  source 1..120: mol_type = other DNA

SEQ ID NO: 66580 - DNA, 120 bp, synthetic construct; identical to SEQ ID NO: 10614
  source 1..120: mol_type = other DNA

SEQ ID NO: 66581 - DNA, 120 bp, synthetic construct; identical to SEQ ID NO: 36627
  source 1..120: mol_type = other DNA

SEQ ID NO: 66582 - DNA, 120 bp, synthetic construct; identical to SEQ ID NO: 36628
  source 1..120: mol_type = other DNA

SEQ ID NO: 66583 - DNA, 120 bp, synthetic construct; identical to SEQ ID NO: 36629
  source 1..120: mol_type = other DNA

SEQ ID NO: 66584 - DNA, 120 bp, synthetic construct; identical to SEQ ID NO: 36630
  source 1..120: mol_type = other DNA

SEQ ID NO: 66585 - DNA, 120 bp, synthetic construct; identical to SEQ ID NO: 10615
  source 1..120: mol_type = other DNA

SEQ ID NO: 66586 - DNA, 120 bp, synthetic construct; identical to SEQ ID NO: 36632
  source 1..120: mol_type = other DNA

SEQ ID NO: 66587 - DNA, 120 bp, synthetic construct; identical to SEQ ID NO: 36633
  source 1..120: mol_type = other DNA

SEQ ID NO: 66588 - DNA, 120 bp, synthetic construct; identical to SEQ ID NO: 10616
  source 1..120: mol_type = other DNA

SEQ ID NO: 66589 - DNA, 120 bp, synthetic construct; identical to SEQ ID NO: 36635
  source 1..120: mol_type = other DNA

SEQ ID NO: 66590 - DNA, 120 bp, synthetic construct; identical to SEQ ID NO: 36636
  source 1..120: mol_type = other DNA

SEQ ID NO: 66591 - DNA, 120 bp, synthetic construct; identical to SEQ ID NO: 36637
  source 1..120: mol_type = other DNA

SEQ ID NO: 66592 - DNA, 120 bp, synthetic construct; identical to SEQ ID NO: 36638
  source 1..120: mol_type = other DNA

SEQ ID NO: 66593 - DNA, 120 bp, synthetic construct; identical to SEQ ID NO: 10617
  source 1..120: mol_type = other DNA

SEQ ID NO: 66594 - DNA, 120 bp, synthetic construct; identical to SEQ ID NO: 36640
  source 1..120: mol_type = other DNA

SEQ ID NO: 66595 - DNA, 120 bp, synthetic construct; identical to SEQ ID NO: 36641
  source 1..120: mol_type = other DNA

SEQ ID NO: 66596 - DNA, 120 bp, synthetic construct; identical to SEQ ID NO: 36642
  source 1..120: mol_type = other DNA

SEQ ID NO: 66597 - DNA, 120 bp, synthetic construct; identical to SEQ ID NO: 10618
  source 1..120: mol_type = other DNA

SEQ ID NO: 66598 - DNA, 120 bp, synthetic construct; identical to SEQ ID NO: 36644
  source 1..120: mol_type = other DNA

SEQ ID NO: 66599 - DNA, 120 bp, synthetic construct; identical to SEQ ID NO: 36645
  source 1..120: mol_type = other DNA

SEQ ID NO: 66600 - DNA, 120 bp, synthetic construct; identical to SEQ ID NO: 10619
  source 1..120: mol_type = other DNA

SEQ ID NO: 66601 - DNA, 120 bp, synthetic construct; identical to SEQ ID NO: 36647
  source 1..120: mol_type = other DNA

SEQ ID NO: 66602 - DNA, 120 bp, synthetic construct; identical to SEQ ID NO: 36648
  source 1..120: mol_type = other DNA

SEQ ID NO: 66603 - DNA, 120 bp, synthetic construct; identical to SEQ ID NO: 36649
  source 1..120: mol_type = other DNA

SEQ ID NO: 66604 - DNA, 120 bp, synthetic construct; identical to SEQ ID NO: 36650
  source 1..120: mol_type = other DNA

SEQ ID NO: 66605 - DNA, 120 bp, synthetic construct; identical to SEQ ID NO: 10620
  source 1..120: mol_type = other DNA

SEQ ID NO: 66606 - DNA, 120 bp, synthetic construct; identical to SEQ ID NO: 36652
  source 1..120: mol_type = other DNA

SEQ ID NO: 66607 - DNA, 120 bp, synthetic construct; identical to SEQ ID NO: 36653
  source 1..120: mol_type = other DNA

SEQ ID NO: 66608 - DNA, 120 bp, synthetic construct; identical to SEQ ID NO: 36654
  source 1..120: mol_type = other DNA

SEQ ID NO: 66609 - DNA, 120 bp, synthetic construct; identical to SEQ ID NO: 10621
  source 1..120: mol_type = other DNA

SEQ ID NO: 66610 - DNA, 120 bp, synthetic construct; identical to SEQ ID NO: 36656
  source 1..120: mol_type = other DNA

SEQ ID NO: 66611 - DNA, 120 bp, synthetic construct; identical to SEQ ID NO: 36657
  source 1..120: mol_type = other DNA

SEQ ID NO: 66612 - DNA, 120 bp, synthetic construct; identical to SEQ ID NO: 36658
  source 1..120: mol_type = other DNA

SEQ ID NO: 66613 - DNA, 120 bp, synthetic construct; identical to SEQ ID NO: 36659
  source 1..120: mol_type = other DNA

SEQ ID NO: 66614 - DNA, 120 bp, synthetic construct; identical to SEQ ID NO: 10622
  source 1..120: mol_type = other DNA

SEQ ID NO: 66615 - DNA, 120 bp, synthetic construct; identical to SEQ ID NO: 36661
  source 1..120: mol_type = other DNA

SEQ ID NO: 66616 - DNA, 120 bp, synthetic construct; identical to SEQ ID NO: 36662
  source 1..120: mol_type = other DNA

SEQ ID NO: 66617 - DNA, 120 bp, synthetic construct; identical to SEQ ID NO: 10623
  source 1..120: mol_type = other DNA

SEQ ID NO: 66618 - DNA, 120 bp, synthetic construct; identical to SEQ ID NO: 36664
  source 1..120: mol_type = other DNA

SEQ ID NO: 66619 - DNA, 120 bp, synthetic construct; identical to SEQ ID NO: 36665
  source 1..120: mol_type = other DNA

SEQ ID NO: 66620 - DNA, 120 bp, synthetic construct; identical to SEQ ID NO: 36666
  source 1..120: mol_type = other DNA

SEQ ID NO: 66621 - DNA, 120 bp, synthetic construct; identical to SEQ ID NO: 10624
  source 1..120: mol_type = other DNA

SEQ ID NO: 66622 - DNA, 120 bp, synthetic construct; identical to SEQ ID NO: 36668
  source 1..120: mol_type = other DNA

SEQ ID NO: 66623 - DNA, 120 bp, synthetic construct; identical to SEQ ID NO: 36669
  source 1..120: mol_type = other DNA

SEQ ID NO: 66624 - DNA, 120 bp, synthetic construct; identical to SEQ ID NO: 36670
  source 1..120: mol_type = other DNA

SEQ ID NO: 66625 - DNA, 120 bp, synthetic construct; identical to SEQ ID NO: 10625
  source 1..120: mol_type = other DNA

SEQ ID NO: 66626 - DNA, 120 bp, synthetic construct; identical to SEQ ID NO: 36672
  source 1..120: mol_type = other DNA

SEQ ID NO: 66627 - DNA, 120 bp, synthetic construct; identical to SEQ ID NO: 36673
  source 1..120: mol_type = other DNA

SEQ ID NO: 66628 - DNA, 120 bp, synthetic construct; identical to SEQ ID NO: 36674
  source 1..120: mol_type = other DNA

SEQ ID NO: 66629 - DNA, 120 bp, synthetic construct; identical to SEQ ID NO: 10626
  source 1..120: mol_type = other DNA

SEQ ID NO: 66630 - DNA, 120 bp, synthetic construct; identical to SEQ ID NO: 36676
  source 1..120: mol_type = other DNA

SEQ ID NO: 66631 - DNA, 120 bp, synthetic construct; identical to SEQ ID NO: 36677
  source 1..120: mol_type = other DNA

SEQ ID NO: 66632 - DNA, 120 bp, synthetic construct; identical to SEQ ID NO: 36678
  source 1..120: mol_type = other DNA

SEQ ID NO: 66633 - DNA, 120 bp, synthetic construct; identical to SEQ ID NO: 36679
  source 1..120: mol_type = other DNA

SEQ ID NO: 66634 - DNA, 120 bp, synthetic construct; identical to SEQ ID NO: 10627
  source 1..120: mol_type = other DNA

SEQ ID NO: 66635 - DNA, 120 bp, synthetic construct; identical to SEQ ID NO: 36681
  source 1..120: mol_type = other DNA

SEQ ID NO: 66636 - DNA, 120 bp, synthetic construct; identical to SEQ ID NO: 36682
  source 1..120: mol_type = other DNA

SEQ ID NO: 66637 - DNA, 120 bp, synthetic construct; identical to SEQ ID NO: 10628
  source 1..120: mol_type = other DNA

SEQ ID NO: 66638 - DNA, 120 bp, synthetic construct; identical to SEQ ID NO: 36684
  source 1..120: mol_type = other DNA

SEQ ID NO: 66639 - DNA, 120 bp, synthetic construct; identical to SEQ ID NO: 36685
  source 1..120: mol_type = other DNA

SEQ ID NO: 66640 - DNA, 120 bp, synthetic construct; identical to SEQ ID NO: 36686
  source 1..120: mol_type = other DNA

SEQ ID NO: 66641 - DNA, 120 bp, synthetic construct; identical to SEQ ID NO: 36687
  source 1..120: mol_type = other DNA

SEQ ID NO: 66642 - DNA, 120 bp, synthetic construct; identical to SEQ ID NO: 10629
  source 1..120: mol_type = other DNA

SEQ ID NO: 66643 - DNA, 120 bp, synthetic construct; identical to SEQ ID NO: 36689
  source 1..120: mol_type = other DNA

SEQ ID NO: 66644 - DNA, 120 bp, synthetic construct; identical to SEQ ID NO: 36690
  source 1..120: mol_type = other DNA

SEQ ID NO: 66645 - DNA, 120 bp, synthetic construct; identical to SEQ ID NO: 36691
  source 1..120: mol_type = other DNA

SEQ ID NO: 66646 - DNA, 120 bp, synthetic construct; identical to SEQ ID NO: 10630
  source 1..120: mol_type = other DNA

SEQ ID NO: 66647 - DNA, 120 bp, synthetic construct; identical to SEQ ID NO: 36693
  source 1..120: mol_type = other DNA

SEQ ID NO: 66648 - DNA, 120 bp, synthetic construct; identical to SEQ ID NO: 36694
  source 1..120: mol_type = other DNA

SEQ ID NO: 66649 - DNA, 120 bp, synthetic construct; identical to SEQ ID NO: 10631
  source 1..120: mol_type = other DNA

SEQ ID NO: 66650 - DNA, 120 bp, synthetic construct; identical to SEQ ID NO: 36696
  source 1..120: mol_type = other DNA

SEQ ID NO: 66651 - DNA, 120 bp, synthetic construct; identical to SEQ ID NO: 36697
  source 1..120: mol_type = other DNA

SEQ ID NO: 66652 - DNA, 120 bp, synthetic construct; identical to SEQ ID NO: 36698
  source 1..120: mol_type = other DNA

SEQ ID NO: 66653 - DNA, 120 bp, synthetic construct; identical to SEQ ID NO: 10632
  source 1..120: mol_type = other DNA

SEQ ID NO: 66654 - DNA, 120 bp, synthetic construct; identical to SEQ ID NO: 36700
  source 1..120: mol_type = other DNA

SEQ ID NO: 66655 - DNA, 120 bp, synthetic construct; identical to SEQ ID NO: 36701
  source 1..120: mol_type = other DNA

SEQ ID NO: 66656 - DNA, 120 bp, synthetic construct; identical to SEQ ID NO: 36702
  source 1..120: mol_type = other DNA

SEQ ID NO: 66657 - DNA, 120 bp, synthetic construct; identical to SEQ ID NO: 10633
  source 1..120: mol_type = other DNA

SEQ ID NO: 66658 - DNA, 120 bp, synthetic construct; identical to SEQ ID NO: 36704
  source 1..120: mol_type = other DNA

SEQ ID NO: 66659 - DNA, 120 bp, synthetic construct; identical to SEQ ID NO: 36705
  source 1..120: mol_type = other DNA

SEQ ID NO: 66660 - DNA, 120 bp, synthetic construct; identical to SEQ ID NO: 36706
  source 1..120: mol_type = other DNA

SEQ ID NO: 66661 - DNA, 120 bp, synthetic construct; identical to SEQ ID NO: 10634
  source 1..120: mol_type = other DNA

SEQ ID NO: 66662 - DNA, 120 bp, synthetic construct; identical to SEQ ID NO: 36708
  source 1..120: mol_type = other DNA

SEQ ID NO: 66663 - DNA, 120 bp, synthetic construct; identical to SEQ ID NO: 36709
  source 1..120: mol_type = other DNA

SEQ ID NO: 66664 - DNA, 120 bp, synthetic construct; identical to SEQ ID NO: 36710
  source 1..120: mol_type = other DNA

SEQ ID NO: 66665 - DNA, 120 bp, synthetic construct; identical to SEQ ID NO: 10635
  source 1..120: mol_type = other DNA

SEQ ID NO: 66666 - DNA, 120 bp, synthetic construct; identical to SEQ ID NO: 36712
  source 1..120: mol_type = other DNA

SEQ ID NO: 66667 - DNA, 120 bp, synthetic construct; identical to SEQ ID NO: 36713
  source 1..120: mol_type = other DNA

SEQ ID NO: 66668 - DNA, 120 bp, synthetic construct; identical to SEQ ID NO: 36714
  source 1..120: mol_type = other DNA

SEQ ID NO: 66669 - DNA, 120 bp, synthetic construct; identical to SEQ ID NO: 10636
  source 1..120: mol_type = other DNA

SEQ ID NO: 66670 - DNA, 120 bp, synthetic construct; identical to SEQ ID NO: 36716
  source 1..120: mol_type = other DNA

SEQ ID NO: 66671 - DNA, 120 bp, synthetic construct; identical to SEQ ID NO: 36717
  source 1..120: mol_type = other DNA

SEQ ID NO: 66672 - DNA, 120 bp, synthetic construct; identical to SEQ ID NO: 36718
  source 1..120: mol_type = other DNA

SEQ ID NO: 66673 - DNA, 120 bp, synthetic construct; identical to SEQ ID NO: 10637
  source 1..120: mol_type = other DNA

SEQ ID NO: 66674 - DNA, 120 bp, synthetic construct; identical to SEQ ID NO: 36720
  source 1..120: mol_type = other DNA

SEQ ID NO: 66675 - DNA, 120 bp, synthetic construct; identical to SEQ ID NO: 36721
  source 1..120: mol_type = other DNA

SEQ ID NO: 66676 - DNA, 120 bp, synthetic construct; identical to SEQ ID NO: 36722
  source 1..120: mol_type = other DNA

SEQ ID NO: 66677 - DNA, 120 bp, synthetic construct; identical to SEQ ID NO: 10638
  source 1..120: mol_type = other DNA

SEQ ID NO: 66678 - DNA, 120 bp, synthetic construct; identical to SEQ ID NO: 36724
  source 1..120: mol_type = other DNA

SEQ ID NO: 66679 - DNA, 120 bp, synthetic construct; identical to SEQ ID NO: 36725
  source 1..120: mol_type = other DNA

SEQ ID NO: 66680 - DNA, 120 bp, synthetic construct; identical to SEQ ID NO: 36726
  source 1..120: mol_type = other DNA

SEQ ID NO: 66681 - DNA, 120 bp, synthetic construct; identical to SEQ ID NO: 36727
  source 1..120: mol_type = other DNA

SEQ ID NO: 66682 - DNA, 120 bp, synthetic construct; identical to SEQ ID NO: 10639
  source 1..120: mol_type = other DNA

SEQ ID NO: 66683 - DNA, 120 bp, synthetic construct; identical to SEQ ID NO: 36729
  source 1..120: mol_type = other DNA

SEQ ID NO: 66684 - DNA, 120 bp, synthetic construct; identical to SEQ ID NO: 36730
  source 1..120: mol_type = other DNA

SEQ ID NO: 66685 - DNA, 120 bp, synthetic construct; identical to SEQ ID NO: 36731
  source 1..120: mol_type = other DNA

SEQ ID NO: 66686 - DNA, 120 bp, synthetic construct; identical to SEQ ID NO: 10640
  source 1..120: mol_type = other DNA

SEQ ID NO: 66687 - DNA, 120 bp, synthetic construct; identical to SEQ ID NO: 36733
  source 1..120: mol_type = other DNA

SEQ ID NO: 66688 - DNA, 120 bp, synthetic construct; identical to SEQ ID NO: 36734
  source 1..120: mol_type = other DNA

SEQ ID NO: 66689 - DNA, 120 bp, synthetic construct; identical to SEQ ID NO: 36735
  source 1..120: mol_type = other DNA

SEQ ID NO: 66690 - DNA, 120 bp, synthetic construct; identical to SEQ ID NO: 10641
  source 1..120: mol_type = other DNA

SEQ ID NO: 66691 - DNA, 120 bp, synthetic construct; identical to SEQ ID NO: 36737
  source 1..120: mol_type = other DNA

SEQ ID NO: 66692 - DNA, 120 bp, synthetic construct; identical to SEQ ID NO: 36738
  source 1..120: mol_type = other DNA

SEQ ID NO: 66693 - DNA, 120 bp, synthetic construct; identical to SEQ ID NO: 36739
  source 1..120: mol_type = other DNA

SEQ ID NO: 66694 - DNA, 120 bp, synthetic construct; identical to SEQ ID NO: 36740
  source 1..120: mol_type = other DNA

SEQ ID NO: 66695 - DNA, 120 bp, synthetic construct; identical to SEQ ID NO: 10642
  source 1..120: mol_type = other DNA

SEQ ID NO: 66696 - DNA, 120 bp, synthetic construct; identical to SEQ ID NO: 36742
  source 1..120: mol_type = other DNA

SEQ ID NO: 66697 - DNA, 120 bp, synthetic construct; identical to SEQ ID NO: 36743
  source 1..120: mol_type = other DNA

SEQ ID NO: 66698 - DNA, 120 bp, synthetic construct; identical to SEQ ID NO: 36744
  source 1..120: mol_type = other DNA

SEQ ID NO: 66699 - DNA, 120 bp, synthetic construct; identical to SEQ ID NO: 10643
  source 1..120: mol_type = other DNA

SEQ ID NO: 66700 - DNA, 120 bp, synthetic construct; identical to SEQ ID NO: 36746
  source 1..120: mol_type = other DNA

SEQ ID NO: 66701 - DNA, 120 bp, synthetic construct; identical to SEQ ID NO: 36747
  source 1..120: mol_type = other DNA

SEQ ID NO: 66702 - DNA, 120 bp, synthetic construct; identical to SEQ ID NO: 10644
  source 1..120: mol_type = other DNA

SEQ ID NO: 66703 - DNA, 120 bp, synthetic construct; identical to SEQ ID NO: 36749
  source 1..120: mol_type = other DNA

SEQ ID NO: 66704 - DNA, 120 bp, synthetic construct; identical to SEQ ID NO: 36750
  source 1..120: mol_type = other DNA

SEQ ID NO: 66705 - DNA, 120 bp, synthetic construct; identical to SEQ ID NO: 36751
  source 1..120: mol_type = other DNA

SEQ ID NO: 66706 - DNA, 120 bp, synthetic construct; identical to SEQ ID NO: 10645
  source 1..120: mol_type = other DNA

SEQ ID NO: 66707 - DNA, 120 bp, synthetic construct; identical to SEQ ID NO: 36753
  source 1..120: mol_type = other DNA

SEQ ID NO: 66708 - DNA, 120 bp, synthetic construct; identical to SEQ ID NO: 36754
  source 1..120: mol_type = other DNA

SEQ ID NO: 66709 - DNA, 120 bp, synthetic construct; identical to SEQ ID NO: 36755
  source 1..120: mol_type = other DNA

SEQ ID NO: 66710 - DNA, 120 bp, synthetic construct; identical to SEQ ID NO: 10646
  source 1..120: mol_type = other DNA

SEQ ID NO: 66711 - DNA, 120 bp, synthetic construct; identical to SEQ ID NO: 36757
  source 1..120: mol_type = other DNA

SEQ ID NO: 66712 - DNA, 120 bp, synthetic construct; identical to SEQ ID NO: 36758
  source 1..120: mol_type = other DNA

SEQ ID NO: 66713 - DNA, 120 bp, synthetic construct; identical to SEQ ID NO: 36759
  source 1..120: mol_type = other DNA

SEQ ID NO: 66714 - DNA, 120 bp, synthetic construct; identical to SEQ ID NO: 10647
  source 1..120: mol_type = other DNA

SEQ ID NO: 66715 - DNA, 120 bp, synthetic construct; identical to SEQ ID NO: 36761
  source 1..120: mol_type = other DNA

SEQ ID NO: 66716 - DNA, 120 bp, synthetic construct; identical to SEQ ID NO: 36762
  source 1..120: mol_type = other DNA

SEQ ID NO: 66717 - DNA, 120 bp, synthetic construct; identical to SEQ ID NO: 36763
  source 1..120: mol_type = other DNA

SEQ ID NO: 66718 - DNA, 120 bp, synthetic construct; identical to SEQ ID NO: 36764
  source 1..120: mol_type = other DNA

SEQ ID NO: 66719 - DNA, 120 bp, synthetic construct; identical to SEQ ID NO: 10648
  source 1..120: mol_type = other DNA

SEQ ID NO: 66720 - DNA, 120 bp, synthetic construct; identical to SEQ ID NO: 36766
  source 1..120: mol_type = other DNA

SEQ ID NO: 66721 - DNA, 120 bp, synthetic construct; identical to SEQ ID NO: 36767
  source 1..120: mol_type = other DNA

SEQ ID NO: 66722 - DNA, 120 bp, synthetic construct; identical to SEQ ID NO: 36768
  source 1..120: mol_type = other DNA

SEQ ID NO: 66723 - DNA, 120 bp, synthetic construct; identical to SEQ ID NO: 10649
  source 1..120: mol_type = other DNA

SEQ ID NO: 66724 - DNA, 120 bp, synthetic construct; identical to SEQ ID NO: 36770
  source 1..120: mol_type = other DNA

SEQ ID NO: 66725 - DNA, 120 bp, synthetic construct; identical to SEQ ID NO: 36771
  source 1..120: mol_type = other DNA

SEQ ID NO: 66726 - DNA, 120 bp, synthetic construct; identical to SEQ ID NO: 36772
  source 1..120: mol_type = other DNA

SEQ ID NO: 66727 - DNA, 120 bp, synthetic construct; identical to SEQ ID NO: 10650
  source 1..120: mol_type = other DNA

SEQ ID NO: 66728 - DNA, 120 bp, synthetic construct; identical to SEQ ID NO: 36774
  source 1..120: mol_type = other DNA

SEQ ID NO: 66729 - DNA, 120 bp, synthetic construct; identical to SEQ ID NO: 36775
  source 1..120: mol_type = other DNA

SEQ ID NO: 66730 - DNA, 120 bp, synthetic construct; identical to SEQ ID NO: 36776
  source 1..120: mol_type = other DNA

SEQ ID NO: 66731 - DNA, 120 bp, synthetic construct; identical to SEQ ID NO: 10651
  source 1..120: mol_type = other DNA

SEQ ID NO: 66732 - DNA, 120 bp, synthetic construct; identical to SEQ ID NO: 36778
  source 1..120: mol_type = other DNA

SEQ ID NO: 66733 - DNA, 120 bp, synthetic construct; identical to SEQ ID NO: 36779
  source 1..120: mol_type = other DNA

SEQ ID NO: 66734 - DNA, 120 bp, synthetic construct; identical to SEQ ID NO: 10652
  source 1..120: mol_type = other DNA

SEQ ID NO: 66735 - DNA, 120 bp, synthetic construct; identical to SEQ ID NO: 36781
  source 1..120: mol_type = other DNA

SEQ ID NO: 66736 - DNA, 120 bp, synthetic construct; identical to SEQ ID NO: 36782
  source 1..120: mol_type = other DNA

SEQ ID NO: 66737 - DNA, 120 bp, synthetic construct; identical to SEQ ID NO: 36783
  source 1..120: mol_type = other DNA

SEQ ID NO: 66738 - DNA, 120 bp, synthetic construct; identical to SEQ ID NO: 10653
  source 1..120: mol_type = other DNA

SEQ ID NO: 66739 - DNA, 120 bp, synthetic construct; identical to SEQ ID NO: 36785
  source 1..120: mol_type = other DNA

SEQ ID NO: 66740 - DNA, 120 bp, synthetic construct; identical to SEQ ID NO: 36786
  source 1..120: mol_type = other DNA

SEQ ID NO: 66741 - DNA, 120 bp, synthetic construct; identical to SEQ ID NO: 36787
  source 1..120: mol_type = other DNA

SEQ ID NO: 66742 - DNA, 120 bp, synthetic construct; identical to SEQ ID NO: 10654
  source 1..120: mol_type = other DNA

SEQ ID NO: 66743 - DNA, 120 bp, synthetic construct; identical to SEQ ID NO: 36789
  source 1..120: mol_type = other DNA

SEQ ID NO: 66744 - DNA, 120 bp, synthetic construct; identical to SEQ ID NO: 36790
  source 1..120: mol_type = other DNA

SEQ ID NO: 66745 - DNA, 120 bp, synthetic construct; identical to SEQ ID NO: 36791
  source 1..120: mol_type = other DNA

SEQ ID NO: 66746 - DNA, 120 bp, synthetic construct; identical to SEQ ID NO: 36792
  source 1..120: mol_type = other DNA

SEQ ID NO: 66747 - DNA, 120 bp, synthetic construct; identical to SEQ ID NO: 10655
  source 1..120: mol_type = other DNA

SEQ ID NO: 66748 - DNA, 120 bp, synthetic construct; identical to SEQ ID NO: 36794
  source 1..120: mol_type = other DNA

SEQ ID NO: 66749 - DNA, 120 bp, synthetic construct; identical to SEQ ID NO: 36795
  source 1..120: mol_type = other DNA

SEQ ID NO: 66750 - DNA, 120 bp, synthetic construct; identical to SEQ ID NO: 36796
  source 1..120: mol_type = other DNA

SEQ ID NO: 66751 - DNA, 120 bp, synthetic construct; identical to SEQ ID NO: 10656
  source 1..120: mol_type = other DNA

SEQ ID NO: 66752 - DNA, 120 bp, synthetic construct; identical to SEQ ID NO: 36798
  source 1..120: mol_type = other DNA

SEQ ID NO: 66753 - DNA, 120 bp, synthetic construct; identical to SEQ ID NO: 36799
  source 1..120: mol_type = other DNA

SEQ ID NO: 66754 - DNA, 120 bp, synthetic construct; identical to SEQ ID NO: 36800
  source 1..120: mol_type = other DNA

SEQ ID NO: 66755 - DNA, 120 bp, synthetic construct; identical to SEQ ID NO: 10657
  source 1..120: mol_type = other DNA

SEQ ID NO: 66756 - DNA, 120 bp, synthetic construct; identical to SEQ ID NO: 36802
  source 1..120: mol_type = other DNA

SEQ ID NO: 66757 - DNA, 120 bp, synthetic construct; identical to SEQ ID NO: 36803
  source 1..120: mol_type = other DNA

SEQ ID NO: 66758 - DNA, 120 bp, synthetic construct; identical to SEQ ID NO: 36804
  source 1..120: mol_type = other DNA

SEQ ID NO: 66759 - DNA, 120 bp, synthetic construct; identical to SEQ ID NO: 36805
  source 1..120: mol_type = other DNA

SEQ ID NO: 66760 - DNA, 120 bp, synthetic construct; identical to SEQ ID NO: 10658
  source 1..120: mol_type = other DNA

SEQ ID NO: 66761 - DNA, 120 bp, synthetic construct; identical to SEQ ID NO: 36807
  source 1..120: mol_type = other DNA

SEQ ID NO: 66762 - DNA, 120 bp, synthetic construct; identical to SEQ ID NO: 36808
  source 1..120: mol_type = other DNA

SEQ ID NO: 66763 - DNA, 120 bp, synthetic construct; identical to SEQ ID NO: 10659
  source 1..120: mol_type = other DNA

SEQ ID NO: 66764 - DNA, 120 bp, synthetic construct; identical to SEQ ID NO: 36810
  source 1..120: mol_type = other DNA

SEQ ID NO: 66765 - DNA, 120 bp, synthetic construct; identical to SEQ ID NO: 36811
  source 1..120: mol_type = other DNA

SEQ ID NO: 66766 - DNA, 120 bp, synthetic construct; identical to SEQ ID NO: 36812
  source 1..120: mol_type = other DNA

SEQ ID NO: 66767 - DNA, 120 bp, synthetic construct; identical to SEQ ID NO: 36813
  source 1..120: mol_type = other DNA

SEQ ID NO: 66768 - DNA, 120 bp, synthetic construct; identical to SEQ ID NO: 10660
  source 1..120: mol_type = other DNA

SEQ ID NO: 66769 - DNA, 120 bp, synthetic construct; identical to SEQ ID NO: 36815
  source 1..120: mol_type = other DNA

SEQ ID NO: 66770 - DNA, 120 bp, synthetic construct; identical to SEQ ID NO: 36816
  source 1..120: mol_type = other DNA

SEQ ID NO: 66771 - DNA, 120 bp, synthetic construct; identical to SEQ ID NO: 36817
  source 1..120: mol_type = other DNA

SEQ ID NO: 66772 - DNA, 120 bp, synthetic construct; identical to SEQ ID NO: 10661
  source 1..120: mol_type = other DNA

SEQ ID NO: 66773 - DNA, 120 bp, synthetic construct; identical to SEQ ID NO: 36819
  source 1..120: mol_type = other DNA

SEQ ID NO: 66774 - DNA, 120 bp, synthetic construct; identical to SEQ ID NO: 36820
  source 1..120: mol_type = other DNA

SEQ ID NO: 66775 - DNA, 120 bp, synthetic construct; identical to SEQ ID NO: 36821
  source 1..120: mol_type = other DNA

SEQ ID NO: 66776 - DNA, 120 bp, synthetic construct; identical to SEQ ID NO: 10662
  source 1..120: mol_type = other DNA

SEQ ID NO: 66777 - DNA, 120 bp, synthetic construct; identical to SEQ ID NO: 36823
  source 1..120: mol_type = other DNA

SEQ ID NO: 66778 - DNA, 120 bp, synthetic construct; identical to SEQ ID NO: 36824
  source 1..120: mol_type = other DNA

SEQ ID NO: 66779 - DNA, 120 bp, synthetic construct; identical to SEQ ID NO: 36825
  source 1..120: mol_type = other DNA

SEQ ID NO: 66780 - DNA, 120 bp, synthetic construct; identical to SEQ ID NO: 10663
  source 1..120: mol_type = other DNA

SEQ ID NO: 66781 - DNA, 120 bp, synthetic construct; identical to SEQ ID NO: 36827
  source 1..120: mol_type = other DNA

SEQ ID NO: 66782 - DNA, 120 bp, synthetic construct; identical to SEQ ID NO: 36828
  source 1..120: mol_type = other DNA

SEQ ID NO: 66783 - DNA, 120 bp, synthetic construct; identical to SEQ ID NO: 10664
  source 1..120: mol_type = other DNA

SEQ ID NO: 66784 - DNA, 120 bp, synthetic construct; identical to SEQ ID NO: 36830
  source 1..120: mol_type = other DNA

SEQ ID NO: 66785 - DNA, 120 bp, synthetic construct; identical to SEQ ID NO: 36831
  source 1..120: mol_type = other DNA

SEQ ID NO: 66786 - DNA, 120 bp, synthetic construct; identical to SEQ ID NO: 36832
  source 1..120: mol_type = other DNA

SEQ ID NO: 66787 - DNA, 120 bp, synthetic construct; identical to SEQ ID NO: 36833
  source 1..120: mol_type = other DNA

SEQ ID NO: 66788 - DNA, 120 bp, synthetic construct; identical to SEQ ID NO: 10665
  source 1..120: mol_type = other DNA

SEQ ID NO: 66789 - DNA, 120 bp, synthetic construct; identical to SEQ ID NO: 36835
  source 1..120: mol_type = other DNA

SEQ ID NO: 66790 - DNA, 120 bp, synthetic construct; identical to SEQ ID NO: 36836
  source 1..120: mol_type = other DNA

SEQ ID NO: 66791 - DNA, 120 bp, synthetic construct; identical to SEQ ID NO: 36837
  source 1..120: mol_type = other DNA

SEQ ID NO: 66792 - DNA, 120 bp, synthetic construct; identical to SEQ ID NO: 10666
  source 1..120: mol_type = other DNA

SEQ ID NO: 66793 - DNA, 120 bp, synthetic construct; identical to SEQ ID NO: 36839
  source 1..120: mol_type = other DNA

SEQ ID NO: 66794 - DNA, 120 bp, synthetic construct; identical to SEQ ID NO: 36840
  source 1..120: mol_type = other DNA

SEQ ID NO: 66795 - DNA, 120 bp, synthetic construct; identical to SEQ ID NO: 36841
  source 1..120: mol_type = other DNA

SEQ ID NO: 66796 - DNA, 120 bp, synthetic construct; identical to SEQ ID NO: 10667
  source 1..120: mol_type = other DNA

SEQ ID NO: 66797 - DNA, 120 bp, synthetic construct; identical to SEQ ID NO: 36843
  source 1..120: mol_type = other DNA

SEQ ID NO: 66798 - DNA, 120 bp, synthetic construct; identical to SEQ ID NO: 36844
  source 1..120: mol_type = other DNA

SEQ ID NO: 66799 - DNA, 120 bp, synthetic construct; identical to SEQ ID NO: 10668
  source 1..120: mol_type = other DNA

SEQ ID NO: 66800 - DNA, 120 bp, synthetic construct; identical to SEQ ID NO: 36846
  source 1..120: mol_type = other DNA

SEQ ID NO: 66801 - DNA, 120 bp, synthetic construct; identical to SEQ ID NO: 36847
  source 1..120: mol_type = other DNA

SEQ ID NO: 66802 - DNA, 120 bp, synthetic construct; identical to SEQ ID NO: 36848
  source 1..120: mol_type = other DNA

SEQ ID NO: 66803 - DNA, 120 bp, synthetic construct; identical to SEQ ID NO: 36849
  source 1..120: mol_type = other DNA

SEQ ID NO: 66804 - DNA, 120 bp, synthetic construct; identical to SEQ ID NO: 10669
  source 1..120: mol_type = other DNA

SEQ ID NO: 66805 - DNA, 120 bp, synthetic construct; identical to SEQ ID NO: 36851
  source 1..120: mol_type = other DNA

SEQ ID NO: 66806 - DNA, 120 bp, synthetic construct; identical to SEQ ID NO: 36852
  source 1..120: mol_type = other DNA

SEQ ID NO: 66807 - DNA, 120 bp, synthetic construct; identical to SEQ ID NO: 10670
  source 1..120: mol_type = other DNA

SEQ ID NO: 66808 - DNA, 120 bp, synthetic construct; identical to SEQ ID NO: 36854
  source 1..120: mol_type = other DNA

SEQ ID NO: 66809 - DNA, 120 bp, synthetic construct; identical to SEQ ID NO: 36855
  source 1..120: mol_type = other DNA

SEQ ID NO: 66810 - DNA, 120 bp, synthetic construct; identical to SEQ ID NO: 36856
  source 1..120: mol_type = other DNA

SEQ ID NO: 66811 - DNA, 120 bp, synthetic construct; identical to SEQ ID NO: 10671
  source 1..120: mol_type = other DNA

SEQ ID NO: 66812 - DNA, 120 bp, synthetic construct; identical to SEQ ID NO: 36858
  source 1..120: mol_type = other DNA

SEQ ID NO: 66813 - DNA, 120 bp, synthetic construct; identical to SEQ ID NO: 36859
  source 1..120: mol_type = other DNA

SEQ ID NO: 66814 - DNA, 120 bp, synthetic construct; identical to SEQ ID NO: 36860
  source 1..120: mol_type = other DNA

SEQ ID NO: 66815 - DNA, 120 bp, synthetic construct; identical to SEQ ID NO: 10672
  source 1..120: mol_type = other DNA

SEQ ID NO: 66816 - DNA, 120 bp, synthetic construct; identical to SEQ ID NO: 36862
  source 1..120: mol_type = other DNA

SEQ ID NO: 66817 - DNA, 120 bp, synthetic construct; identical to SEQ ID NO: 36863
  source 1..120: mol_type = other DNA

SEQ ID NO: 66818 - DNA, 120 bp, synthetic construct; identical to SEQ ID NO: 36864
  source 1..120: mol_type = other DNA

SEQ ID NO: 66819 - DNA, 120 bp, synthetic construct; identical to SEQ ID NO: 10673
  source 1..120: mol_type = other DNA

SEQ ID NO: 66820 - DNA, 120 bp, synthetic construct; identical to SEQ ID NO: 36866
  source 1..120: mol_type = other DNA

SEQ ID NO: 66821 - DNA, 120 bp, synthetic construct; identical to SEQ ID NO: 36867
  source 1..120: mol_type = other DNA

SEQ ID NO: 66822 - DNA, 120 bp, synthetic construct; identical to SEQ ID NO: 36868
  source 1..120: mol_type = other DNA

SEQ ID NO: 66823 - DNA, 120 bp, synthetic construct; identical to SEQ ID NO: 10674
  source 1..120: mol_type = other DNA

SEQ ID NO: 66824 - DNA, 120 bp, synthetic construct; identical to SEQ ID NO: 36870
  source 1..120: mol_type = other DNA

SEQ ID NO: 66825 - DNA, 120 bp, synthetic construct; identical to SEQ ID NO: 36871
  source 1..120: mol_type = other DNA

SEQ ID NO: 66826 - DNA, 120 bp, synthetic construct; identical to SEQ ID NO: 36872
  source 1..120: mol_type = other DNA

SEQ ID NO: 66827 - DNA, 120 bp, synthetic construct; identical to SEQ ID NO: 10675
  source 1..120: mol_type = other DNA

SEQ ID NO: 66828 - DNA, 120 bp, synthetic construct; identical to SEQ ID NO: 36874
  source 1..120: mol_type = other DNA

SEQ ID NO: 66829 - DNA, 120 bp, synthetic construct; identical to SEQ ID NO: 36875
  source 1..120: mol_type = other DNA

SEQ ID NO: 66830 - DNA, 120 bp, synthetic construct; identical to SEQ ID NO: 36876
  source 1..120: mol_type = other DNA

SEQ ID NO: 66831 - DNA, 120 bp, synthetic construct; identical to SEQ ID NO: 10676
  source 1..120: mol_type = other DNA

SEQ ID NO: 66832 - DNA, 120 bp, synthetic construct; identical to SEQ ID NO: 36878
  source 1..120: mol_type = other DNA

SEQ ID NO: 66833 - DNA, 120 bp, synthetic construct; identical to SEQ ID NO: 36879
  source 1..120: mol_type = other DNA

SEQ ID NO: 66834 - DNA, 120 bp, synthetic construct; identical to SEQ ID NO: 36880
  source 1..120: mol_type = other DNA

SEQ ID NO: 66835 - DNA, 120 bp, synthetic construct; identical to SEQ ID NO: 36881
  source 1..120: mol_type = other DNA

SEQ ID NO: 66836 - DNA, 120 bp, synthetic construct; identical to SEQ ID NO: 10677
  source 1..120: mol_type = other DNA

SEQ ID NO: 66837 - DNA, 120 bp, synthetic construct; identical to SEQ ID NO: 36883
  source 1..120: mol_type = other DNA

SEQ ID NO: 66838 - DNA, 120 bp, synthetic construct; identical to SEQ ID NO: 36884
  source 1..120: mol_type = other DNA

SEQ ID NO: 66839 - DNA, 120 bp, synthetic construct; identical to SEQ ID NO: 10678
  source 1..120: mol_type = other DNA

SEQ ID NO: 66840 - DNA, 120 bp, synthetic construct; identical to SEQ ID NO: 36886
  source 1..120: mol_type = other DNA

SEQ ID NO: 66841 - DNA, 120 bp, synthetic construct; identical to SEQ ID NO: 36887
  source 1..120: mol_type = other DNA

SEQ ID NO: 66842 - DNA, 120 bp, synthetic construct; identical to SEQ ID NO: 36888
  source 1..120: mol_type = other DNA

SEQ ID NO: 66843 - DNA, 120 bp, synthetic construct; identical to SEQ ID NO: 36889
  source 1..120: mol_type = other DNA

SEQ ID NO: 66844 - DNA, 120 bp, synthetic construct; identical to SEQ ID NO: 10679
  source 1..120: mol_type = other DNA

SEQ ID NO: 66845 - DNA, 120 bp, synthetic construct; identical to SEQ ID NO: 36891
  source 1..120: mol_type = other DNA

SEQ ID NO: 66846 - DNA, 120 bp, synthetic construct; identical to SEQ ID NO: 36892
  source 1..120: mol_type = other DNA

SEQ ID NO: 66847 - DNA, 120 bp, synthetic construct; identical to SEQ ID NO: 36893
  source 1..120: mol_type = other DNA

SEQ ID NO: 66848 - DNA, 120 bp, synthetic construct; identical to SEQ ID NO: 10680
  source 1..120: mol_type = other DNA

SEQ ID NO: 66849 - DNA, 120 bp, synthetic construct; identical to SEQ ID NO: 36895
  source 1..120: mol_type = other DNA

SEQ ID NO: 66850 - DNA, 120 bp, synthetic construct; identical to SEQ ID NO: 36896
  source 1..120: mol_type = other DNA

SEQ ID NO: 66851 - DNA, 120 bp, synthetic construct; identical to SEQ ID NO: 36897
  source 1..120: mol_type = other DNA

SEQ ID NO: 66852 - DNA, 120 bp, synthetic construct; identical to SEQ ID NO: 10681
  source 1..120: mol_type = other DNA

SEQ ID NO: 66853 - DNA, 120 bp, synthetic construct; identical to SEQ ID NO: 36899
  source 1..120: mol_type = other DNA

SEQ ID NO: 66854 - DNA, 120 bp, synthetic construct; identical to SEQ ID NO: 36900
  source 1..120: mol_type = other DNA

SEQ ID NO: 66855 - DNA, 120 bp, synthetic construct; identical to SEQ ID NO: 36901
  source 1..120: mol_type = other DNA

SEQ ID NO: 66856 - DNA, 120 bp, synthetic construct; identical to SEQ ID NO: 10682
  source 1..120: mol_type = other DNA

SEQ ID NO: 66857 - DNA, 120 bp, synthetic construct; identical to SEQ ID NO: 36903
  source 1..120: mol_type = other DNA

SEQ ID NO: 66858 - DNA, 120 bp, synthetic construct; identical to SEQ ID NO: 36904
  source 1..120: mol_type = other DNA

SEQ ID NO: 66859 - DNA, 120 bp, synthetic construct; identical to SEQ ID NO: 10683
  source 1..120: mol_type = other DNA

SEQ ID NO: 66860 - DNA, 120 bp, synthetic construct; identical to SEQ ID NO: 36906
  source 1..120: mol_type = other DNA

SEQ ID NO: 66861 - DNA, 120 bp, synthetic construct; identical to SEQ ID NO: 36907
  source 1..120: mol_type = other DNA

SEQ ID NO: 66862 - DNA, 120 bp, synthetic construct; identical to SEQ ID NO: 36908
  source 1..120: mol_type = other DNA

SEQ ID NO: 66863 - DNA, 120 bp, synthetic construct; identical to SEQ ID NO: 36909
  source 1..120: mol_type = other DNA

SEQ ID NO: 66864 - DNA, 120 bp, synthetic construct; identical to SEQ ID NO: 10684
  source 1..120: mol_type = other DNA

SEQ ID NO: 66865 - DNA, 120 bp, synthetic construct; identical to SEQ ID NO: 36911
  source 1..120: mol_type = other DNA

SEQ ID NO: 66866 - DNA, 120 bp, synthetic construct; identical to SEQ ID NO: 36912
  source 1..120: mol_type = other DNA

SEQ ID NO: 66867 - DNA, 120 bp, synthetic construct; identical to SEQ ID NO: 36913
  source 1..120: mol_type = other DNA

SEQ ID NO: 66868 - DNA, 120 bp, synthetic construct; identical to SEQ ID NO: 10685
  source 1..120: mol_type = other DNA

SEQ ID NO: 66869 - DNA, 120 bp, synthetic construct; identical to SEQ ID NO: 36915
  source 1..120: mol_type = other DNA

SEQ ID NO: 66870 - DNA, 120 bp, synthetic construct; identical to SEQ ID NO: 36916
  source 1..120: mol_type = other DNA

SEQ ID NO: 66871 - DNA, 120 bp, synthetic construct; identical to SEQ ID NO: 10686
  source 1..120: mol_type = other DNA

SEQ ID NO: 66872 - DNA, 120 bp, synthetic construct; identical to SEQ ID NO: 36918
  source 1..120: mol_type = other DNA

SEQ ID NO: 66873 - DNA, 120 bp, synthetic construct; identical to SEQ ID NO: 36919
  source 1..120: mol_type = other DNA

SEQ ID NO: 66874 - DNA, 120 bp, synthetic construct; identical to SEQ ID NO: 36920
  source 1..120: mol_type = other DNA

SEQ ID NO: 66875 - DNA, 120 bp, synthetic construct; identical to SEQ ID NO: 10687
  source 1..120: mol_type = other DNA

SEQ ID NO: 66876 - DNA, 120 bp, synthetic construct; identical to SEQ ID NO: 36922
  source 1..120: mol_type = other DNA

SEQ ID NO: 66877 - DNA, 120 bp, synthetic construct; identical to SEQ ID NO: 36923
  source 1..120: mol_type = other DNA

SEQ ID NO: 66878 - DNA, 120 bp, synthetic construct; identical to SEQ ID NO: 36924
  source 1..120: mol_type = other DNA

SEQ ID NO: 66879 - DNA, 120 bp, synthetic construct; identical to SEQ ID NO: 36925
  source 1..120: mol_type = other DNA

SEQ ID NO: 66880 - DNA, 120 bp, synthetic construct; identical to SEQ ID NO: 10688
  source 1..120: mol_type = other DNA

SEQ ID NO: 66881 - DNA, 120 bp, synthetic construct; identical to SEQ ID NO: 36927
  source 1..120: mol_type = other DNA

SEQ ID NO: 66882 - DNA, 120 bp, synthetic construct; identical to SEQ ID NO: 36928
  source 1..120: mol_type = other DNA

SEQ ID NO: 66883 - DNA, 120 bp, synthetic construct; identical to SEQ ID NO: 10689
  source 1..120: mol_type = other DNA

SEQ ID NO: 66884 - DNA, 120 bp, synthetic construct; identical to SEQ ID NO: 36930
  source 1..120: mol_type = other DNA

SEQ ID NO: 66885 - DNA, 120 bp, synthetic construct; identical to SEQ ID NO: 36931
  source 1..120: mol_type = other DNA

SEQ ID NO: 66886 - DNA, 120 bp, synthetic construct; identical to SEQ ID NO: 36932
  source 1..120: mol_type = other DNA

SEQ ID NO: 66887 - DNA, 120 bp, synthetic construct; identical to SEQ ID NO: 36933
  source 1..120: mol_type = other DNA

SEQ ID NO: 66888 - DNA, 120 bp, synthetic construct; identical to SEQ ID NO: 10690
  source 1..120: mol_type = other DNA

SEQ ID NO: 66889 - DNA, 120 bp, synthetic construct; identical to SEQ ID NO: 36935
  source 1..120: mol_type = other DNA

SEQ ID NO: 66890 - DNA, 120 bp, synthetic construct; identical to SEQ ID NO: 36936
  source 1..120: mol_type = other DNA

SEQ ID NO: 66891 - DNA, 120 bp, synthetic construct; identical to SEQ ID NO: 10691
  source 1..120: mol_type = other DNA

SEQ ID NO: 66892 - DNA, 120 bp, synthetic construct; identical to SEQ ID NO: 36938
  source 1..120: mol_type = other DNA

SEQ ID NO: 66893 - DNA, 120 bp, synthetic construct; identical to SEQ ID NO: 36939
  source 1..120: mol_type = other DNA

SEQ ID NO: 66894 - DNA, 120 bp, synthetic construct; identical to SEQ ID NO: 36940
  source 1..120: mol_type = other DNA

SEQ ID NO: 66895 - DNA, 120 bp, synthetic construct; identical to SEQ ID NO: 10692
  source 1..120: mol_type = other DNA

SEQ ID NO: 66896 - DNA, 120 bp, synthetic construct; identical to SEQ ID NO: 36942
  source 1..120: mol_type = other DNA

SEQ ID NO: 66897 - DNA, 120 bp, synthetic construct; identical to SEQ ID NO: 36943
  source 1..120: mol_type = other DNA

SEQ ID NO: 66898 - DNA, 120 bp, synthetic construct; identical to SEQ ID NO: 36944
  source 1..120: mol_type = other DNA

SEQ ID NO: 66899 - DNA, 120 bp, synthetic construct; identical to SEQ ID NO: 10693
  source 1..120: mol_type = other DNA

SEQ ID NO: 66900 - DNA, 120 bp, synthetic construct; identical to SEQ ID NO: 36946
  source 1..120: mol_type = other DNA

SEQ ID NO: 66901 - DNA, 120 bp, synthetic construct; identical to SEQ ID NO: 36947
  source 1..120: mol_type = other DNA

SEQ ID NO: 66902 - DNA, 120 bp, synthetic construct; identical to SEQ ID NO: 36948
  source 1..120: mol_type = other DNA

SEQ ID NO: 66903 - DNA, 120 bp, synthetic construct; identical to SEQ ID NO: 36949
  source 1..120: mol_type = other DNA

SEQ ID NO: 66904 - DNA, 120 bp, synthetic construct; identical to SEQ ID NO: 10694
  source 1..120: mol_type = other DNA

SEQ ID NO: 66905 - DNA, 120 bp, synthetic construct; identical to SEQ ID NO: 36951
  source 1..120: mol_type = other DNA

SEQ ID NO: 66906 - DNA, 120 bp, synthetic construct; identical to SEQ ID NO: 36952
  source 1..120: mol_type = other DNA

SEQ ID NO: 66907 - DNA, 120 bp, synthetic construct; identical to SEQ ID NO: 10695
  source 1..120: mol_type = other DNA

SEQ ID NO: 66908 - DNA, 120 bp, synthetic construct; identical to SEQ ID NO: 36954
  source 1..120: mol_type = other DNA

SEQ ID NO: 66909 - DNA, 120 bp, synthetic construct; identical to SEQ ID NO: 36955
  source 1..120: mol_type = other DNA

SEQ ID NO: 66910 - DNA, 120 bp, synthetic construct; identical to SEQ ID NO: 36956
  source 1..120: mol_type = other DNA

SEQ ID NO: 66911 - DNA, 120 bp, synthetic construct; identical to SEQ ID NO: 36957
  source 1..120: mol_type = other DNA

SEQ ID NO: 66912 - DNA, 120 bp, synthetic construct; identical to SEQ ID NO: 10696
  source 1..120: mol_type = other DNA

SEQ ID NO: 66913 - DNA, 120 bp, synthetic construct; identical to SEQ ID NO: 36959
  source 1..120: mol_type = other DNA

SEQ ID NO: 66914 - DNA, 120 bp, synthetic construct; identical to SEQ ID NO: 36960
  source 1..120: mol_type = other DNA

SEQ ID NO: 66915 - DNA, 120 bp, synthetic construct; identical to SEQ ID NO: 10697
  source 1..120: mol_type = other DNA

SEQ ID NO: 66916 - DNA, 120 bp, synthetic construct; identical to SEQ ID NO: 36962
  source 1..120: mol_type = other DNA

SEQ ID NO: 66917 - DNA, 120 bp, synthetic construct; identical to SEQ ID NO: 36963
  source 1..120: mol_type = other DNA

SEQ ID NO: 66918 - DNA, 120 bp, synthetic construct; identical to SEQ ID NO: 36964
  source 1..120: mol_type = other DNA

SEQ ID NO: 66919 - DNA, 120 bp, synthetic construct; identical to SEQ ID NO: 10698
  source 1..120: mol_type = other DNA

SEQ ID NO: 66920 - DNA, 120 bp, synthetic construct; identical to SEQ ID NO: 36966
  source 1..120: mol_type = other DNA

SEQ ID NO: 66921 - DNA, 120 bp, synthetic construct; identical to SEQ ID NO: 36967
  source 1..120: mol_type = other DNA

SEQ ID NO: 66922 - DNA, 120 bp, synthetic construct; identical to SEQ ID NO: 36968
  source 1..120: mol_type = other DNA

SEQ ID NO: 66923 - DNA, 120 bp, synthetic construct; identical to SEQ ID NO: 36969
  source 1..120: mol_type = other DNA

SEQ ID NO: 66924 - DNA, 120 bp, synthetic construct; identical to SEQ ID NO: 10699
  source 1..120: mol_type = other DNA

SEQ ID NO: 66925 - DNA, 120 bp, synthetic construct; identical to SEQ ID NO: 36971
  source 1..120: mol_type = other DNA

SEQ ID NO: 66926 - DNA, 120 bp, synthetic construct; identical to SEQ ID NO: 36972
  source 1..120: mol_type = other DNA

SEQ ID NO: 66927 - DNA, 120 bp, synthetic construct; identical to SEQ ID NO: 36973
  source 1..120: mol_type = other DNA

SEQ ID NO: 66928 - DNA, 120 bp, synthetic construct; identical to SEQ ID NO: 10700
  source 1..120: mol_type = other DNA

SEQ ID NO: 66929 - DNA, 120 bp, synthetic construct; identical to SEQ ID NO: 36975
  source 1..120: mol_type = other DNA

SEQ ID NO: 66930 - DNA, 120 bp, synthetic construct; identical to SEQ ID NO: 36976
  source 1..120: mol_type = other DNA

SEQ ID NO: 66931 - DNA, 120 bp, synthetic construct; identical to SEQ ID NO: 36977
  source 1..120: mol_type = other DNA

SEQ ID NO: 66932 - DNA, 120 bp, synthetic construct; identical to SEQ ID NO: 10701
  source 1..120: mol_type = other DNA

SEQ ID NO: 66933 - DNA, 120 bp, synthetic construct; identical to SEQ ID NO: 36979
  source 1..120: mol_type = other DNA

SEQ ID NO: 66934 - DNA, 120 bp, synthetic construct; identical to SEQ ID NO: 36980
  source 1..120: mol_type = other DNA

SEQ ID NO: 66935 - DNA, 120 bp, synthetic construct; identical to SEQ ID NO: 36981
  source 1..120: mol_type = other DNA

SEQ ID NO: 66936 - DNA, 120 bp, synthetic construct; identical to SEQ ID NO: 10702
  source 1..120: mol_type = other DNA

SEQ ID NO: 66937 - DNA, 120 bp, synthetic construct; identical to SEQ ID NO: 36983
  source 1..120: mol_type = other DNA

SEQ ID NO: 66938 - DNA, 120 bp, synthetic construct; identical to SEQ ID NO: 36984
  source 1..120: mol_type = other DNA

SEQ ID NO: 66939 - DNA, 120 bp, synthetic construct; identical to SEQ ID NO: 10703
  source 1..120: mol_type = other DNA

SEQ ID NO: 66940 - DNA, 120 bp, synthetic construct; identical to SEQ ID NO: 36986
  source 1..120: mol_type = other DNA

SEQ ID NO: 66941 - DNA, 120 bp, synthetic construct; identical to SEQ ID NO: 36987
  source 1..120: mol_type = other DNA

SEQ ID NO: 66942 - DNA, 120 bp, synthetic construct; identical to SEQ ID NO: 36988
  source 1..120: mol_type = other DNA

SEQ ID NO: 66943 - DNA, 120 bp, synthetic construct; identical to SEQ ID NO: 10704
  source 1..120: mol_type = other DNA

SEQ ID NO: 66944 - DNA, 120 bp, synthetic construct; identical to SEQ ID NO: 36990
  source 1..120: mol_type = other DNA

SEQ ID NO: 66945 - DNA, 120 bp, synthetic construct; identical to SEQ ID NO: 36991
  source 1..120: mol_type = other DNA

SEQ ID NO: 66946 - DNA, 120 bp, synthetic construct; identical to SEQ ID NO: 36992
  source 1..120: mol_type = other DNA

SEQ ID NO: 66947 - DNA, 120 bp, synthetic construct; identical to SEQ ID NO: 36993
  source 1..120: mol_type = other DNA

SEQ ID NO: 66948 - DNA, 120 bp, synthetic construct; identical to SEQ ID NO: 10705
  source 1..120: mol_type = other DNA

SEQ ID NO: 66949 - DNA, 120 bp, synthetic construct; identical to SEQ ID NO: 36995
  source 1..120: mol_type = other DNA

SEQ ID NO: 66950 - DNA, 120 bp, synthetic construct; identical to SEQ ID NO: 36996
  source 1..120: mol_type = other DNA

SEQ ID NO: 66951 - DNA, 120 bp, synthetic construct; identical to SEQ ID NO: 10706
  source 1..120: mol_type = other DNA

SEQ ID NO: 66952 - DNA, 120 bp, synthetic construct; identical to SEQ ID NO: 36998
  source 1..120: mol_type = other DNA

SEQ ID NO: 66953 - DNA, 120 bp, synthetic construct; identical to SEQ ID NO: 36999
  source 1..120: mol_type = other DNA

SEQ ID NO: 66954 - DNA, 120 bp, synthetic construct; identical to SEQ ID NO: 37000
  source 1..120: mol_type = other DNA

SEQ ID NO: 66955 - DNA, 120 bp, synthetic construct; identical to SEQ ID NO: 37001
  source 1..120: mol_type = other DNA

SEQ ID NO: 66956 - DNA, 120 bp, synthetic construct; identical to SEQ ID NO: 10707
  source 1..120: mol_type = other DNA

SEQ ID NO: 66957 - DNA, 120 bp, synthetic construct; identical to SEQ ID NO: 37003
  source 1..120: mol_type = other DNA

SEQ ID NO: 66958 - DNA, 120 bp, synthetic construct; identical to SEQ ID NO: 37004
  source 1..120: mol_type = other DNA

SEQ ID NO: 66959 - DNA, 120 bp, synthetic construct; identical to SEQ ID NO: 10708
  source 1..120: mol_type = other DNA

SEQ ID NO: 66960 - DNA, 120 bp, synthetic construct; identical to SEQ ID NO: 37006
  source 1..120: mol_type = other DNA

SEQ ID NO: 66961 - DNA, 120 bp, synthetic construct; identical to SEQ ID NO: 37007
  source 1..120: mol_type = other DNA

SEQ ID NO: 66962 - DNA, 120 bp, synthetic construct; identical to SEQ ID NO: 37008
  source 1..120: mol_type = other DNA

SEQ ID NO: 66963 - DNA, 120 bp, synthetic construct; identical to SEQ ID NO: 10709
  source 1..120: mol_type = other DNA

SEQ ID NO: 66964 - DNA, 120 bp, synthetic construct; identical to SEQ ID NO: 37010
  source 1..120: mol_type = other DNA

SEQ ID NO: 66965 - DNA, 120 bp, synthetic construct; identical to SEQ ID NO: 37011
  source 1..120: mol_type = other DNA

SEQ ID NO: 66966 - DNA, 120 bp, synthetic construct; identical to SEQ ID NO: 37012
  source 1..120: mol_type = other DNA

SEQ ID NO: 66967 - DNA, 120 bp, synthetic construct; identical to SEQ ID NO: 10710
  source 1..120: mol_type = other DNA

SEQ ID NO: 66968 - DNA, 120 bp, synthetic construct; identical to SEQ ID NO: 37014
  source 1..120: mol_type = other DNA

SEQ ID NO: 66969 - DNA, 120 bp, synthetic construct; identical to SEQ ID NO: 37015
  source 1..120: mol_type = other DNA

SEQ ID NO: 66970 - DNA, 120 bp, synthetic construct; identical to SEQ ID NO: 37016
  source 1..120: mol_type = other DNA

SEQ ID NO: 66971 - DNA, 120 bp, synthetic construct; identical to SEQ ID NO: 37017
  source 1..120: mol_type = other DNA

SEQ ID NO: 66972 - DNA, 120 bp, synthetic construct; identical to SEQ ID NO: 10711
  source 1..120: mol_type = other DNA

SEQ ID NO: 66973 - DNA, 120 bp, synthetic construct; identical to SEQ ID NO: 37019
  source 1..120: mol_type = other DNA

SEQ ID NO: 66974 - DNA, 120 bp, synthetic construct; identical to SEQ ID NO: 37020
  source 1..120: mol_type = other DNA

SEQ ID NO: 66975 - DNA, 120 bp, synthetic construct; identical to SEQ ID NO: 37021
  source 1..120: mol_type = other DNA

SEQ ID NO: 66976 - DNA, 120 bp, synthetic construct; identical to SEQ ID NO: 10712
  source 1..120: mol_type = other DNA

SEQ ID NO: 66977 - DNA, 120 bp, synthetic construct; identical to SEQ ID NO: 37023
  source 1..120: mol_type = other DNA

SEQ ID NO: 66978 - DNA, 120 bp, synthetic construct; identical to SEQ ID NO: 37024
  source 1..120: mol_type = other DNA

SEQ ID NO: 66979 - DNA, 120 bp, synthetic construct; identical to SEQ ID NO: 10713
  source 1..120: mol_type = other DNA

SEQ ID NO: 66980 - DNA, 120 bp, synthetic construct; identical to SEQ ID NO: 37026
  source 1..120: mol_type = other DNA

SEQ ID NO: 66981 - DNA, 120 bp, synthetic construct; identical to SEQ ID NO: 37027
  source 1..120: mol_type = other DNA

SEQ ID NO: 66982 - DNA, 120 bp, synthetic construct; identical to SEQ ID NO: 37028
  source 1..120: mol_type = other DNA

SEQ ID NO: 66983 - DNA, 120 bp, synthetic construct; identical to SEQ ID NO: 37029
  source 1..120: mol_type = other DNA

SEQ ID NO: 66984 - DNA, 120 bp, synthetic construct; identical to SEQ ID NO: 10714
  source 1..120: mol_type = other DNA

SEQ ID NO: 66985 - DNA, 120 bp, synthetic construct; identical to SEQ ID NO: 37031
  source 1..120: mol_type = other DNA

SEQ ID NO: 66986 - DNA, 120 bp, synthetic construct; identical to SEQ ID NO: 37032
  source 1..120: mol_type = other DNA

SEQ ID NO: 66987 - DNA, 120 bp, synthetic construct; identical to SEQ ID NO: 10715
  source 1..120: mol_type = other DNA

SEQ ID NO: 66988 - DNA, 120 bp, synthetic construct; identical to SEQ ID NO: 37034
  source 1..120: mol_type = other DNA

SEQ ID NO: 66989 - DNA, 120 bp, synthetic construct; identical to SEQ ID NO: 37035
  source 1..120: mol_type = other DNA

SEQ ID NO: 66990 - DNA, 120 bp, synthetic construct; identical to SEQ ID NO: 37036
  source 1..120: mol_type = other DNA

SEQ ID NO: 66991 - DNA, 120 bp, synthetic construct; identical to SEQ ID NO: 37037
  source 1..120: mol_type = other DNA

SEQ ID NO: 66992 - DNA, 120 bp, synthetic construct; identical to SEQ ID NO: 10716
  source 1..120: mol_type = other DNA

SEQ ID NO: 66993 - DNA, 120 bp, synthetic construct; identical to SEQ ID NO: 37039
  source 1..120: mol_type = other DNA

SEQ ID NO: 66994 - DNA, 120 bp, synthetic construct; identical to SEQ ID NO: 37040
  source 1..120: mol_type = other DNA

SEQ ID NO: 66995 - DNA, 120 bp, synthetic construct; identical to SEQ ID NO: 10717
  source 1..120: mol_type = other DNA

SEQ ID NO: 66996 - DNA, 120 bp, synthetic construct; identical to SEQ ID NO: 37042
  source 1..120: mol_type = other DNA

SEQ ID NO: 66997 - DNA, 120 bp, synthetic construct; identical to SEQ ID NO: 37043
  source 1..120: mol_type = other DNA

SEQ ID NO: 66998 - DNA, 120 bp, synthetic construct; identical to SEQ ID NO: 37044
  source 1..120: mol_type = other DNA

SEQ ID NO: 66999 - DNA, 120 bp, synthetic construct; identical to SEQ ID NO: 10718
  source 1..120: mol_type = other DNA

SEQ ID NO: 67000 - DNA, 120 bp, synthetic construct; identical to SEQ ID NO: 37046
  source 1..120: mol_type = other DNA

SEQ ID NO: 67001 - DNA, 120 bp, synthetic construct; identical to SEQ ID NO: 37047
  source 1..120: mol_type = other DNA

SEQ ID NO: 67002 - DNA, 120 bp, synthetic construct; identical to SEQ ID NO: 37048
  source 1..120: mol_type = other DNA

SEQ ID NO: 67003 - DNA, 120 bp, synthetic construct; identical to SEQ ID NO: 37049
  source 1..120: mol_type = other DNA

SEQ ID NO: 67004 - DNA, 120 bp, synthetic construct; identical to SEQ ID NO: 10719
  source 1..120: mol_type = other DNA

SEQ ID NO: 67005 - DNA, 120 bp, synthetic construct; identical to SEQ ID NO: 37051
  source 1..120: mol_type = other DNA

SEQ ID NO: 67006 - DNA, 120 bp, synthetic construct; identical to SEQ ID NO: 37052
  source 1..120: mol_type = other DNA

SEQ ID NO: 67007 - DNA, 120 bp, synthetic construct; identical to SEQ ID NO: 37053
  source 1..120: mol_type = other DNA

SEQ ID NO: 67008 - DNA, 120 bp, synthetic construct; identical to SEQ ID NO: 10720
  source 1..120: mol_type = other DNA

SEQ ID NO: 67009 - DNA, 120 bp, synthetic construct; identical to SEQ ID NO: 37055
  source 1..120: mol_type = other DNA

SEQ ID NO: 67010 - DNA, 120 bp, synthetic construct; identical to SEQ ID NO: 37056
  source 1..120: mol_type = other DNA

SEQ ID NO: 67011 - DNA, 120 bp, synthetic construct; identical to SEQ ID NO: 37057
  source 1..120: mol_type = other DNA

SEQ ID NO: 67012 - DNA, 120 bp, synthetic construct; identical to SEQ ID NO: 10721
  source 1..120: mol_type = other DNA

SEQ ID NO: 67013 - DNA, 120 bp, synthetic construct; identical to SEQ ID NO: 37059
  source 1..120: mol_type = other DNA

SEQ ID NO: 67014 - DNA, 120 bp, synthetic construct; identical to SEQ ID NO: 37060
  source 1..120: mol_type = other DNA

SEQ ID NO: 67015 - DNA, 120 bp, synthetic construct; identical to SEQ ID NO: 10722
  source 1..120: mol_type = other DNA

SEQ ID NO: 67016 - DNA, 120 bp, synthetic construct; identical to SEQ ID NO: 37062
  source 1..120: mol_type = other DNA

SEQ ID NO: 67017 - DNA, 120 bp, synthetic construct; identical to SEQ ID NO: 37063
  source 1..120: mol_type = other DNA

SEQ ID NO: 67018 - DNA, 120 bp, synthetic construct; identical to SEQ ID NO: 37064
  source 1..120: mol_type = other DNA

SEQ ID NO: 67019 - DNA, 120 bp, synthetic construct; identical to SEQ ID NO: 10723
  source 1..120: mol_type = other DNA

SEQ ID NO: 67020 - DNA, 120 bp, synthetic construct; identical to SEQ ID NO: 37066
  source 1..120: mol_type = other DNA

SEQ ID NO: 67021 - DNA, 120 bp, synthetic construct; identical to SEQ ID NO: 37067
  source 1..120: mol_type = other DNA

SEQ ID NO: 67022 - DNA, 120 bp, synthetic construct; identical to SEQ ID NO: 37068
  source 1..120: mol_type = other DNA

SEQ ID NO: 67023 - DNA, 120 bp, synthetic construct; identical to SEQ ID NO: 10724
  source 1..120: mol_type = other DNA

SEQ ID NO: 67024 - DNA, 120 bp, synthetic construct; identical to SEQ ID NO: 37070
  source 1..120: mol_type = other DNA

SEQ ID NO: 67025 - DNA, 120 bp, synthetic construct; identical to SEQ ID NO: 37071
  source 1..120: mol_type = other DNA

SEQ ID NO: 67026 - DNA, 120 bp, synthetic construct; identical to SEQ ID NO: 37072
  source 1..120: mol_type = other DNA

SEQ ID NO: 67027 - DNA, 120 bp, synthetic construct; identical to SEQ ID NO: 37073
  source 1..120: mol_type = other DNA

SEQ ID NO: 67028 - DNA, 120 bp, synthetic construct; identical to SEQ ID NO: 10725
  source 1..120: mol_type = other DNA

SEQ ID NO: 67029 - DNA, 120 bp, synthetic construct; identical to SEQ ID NO: 37075
  source 1..120: mol_type = other DNA

SEQ ID NO: 67030 - DNA, 120 bp, synthetic construct; identical to SEQ ID NO: 37076
  source 1..120: mol_type = other DNA

SEQ ID NO: 67031 - DNA, 120 bp, synthetic construct; identical to SEQ ID NO: 37077
  source 1..120: mol_type = other DNA

SEQ ID NO: 67032 - DNA, 120 bp, synthetic construct; identical to SEQ ID NO: 10726
  source 1..120: mol_type = other DNA

SEQ ID NO: 67033 - DNA, 120 bp, synthetic construct; identical to SEQ ID NO: 37079
  source 1..120: mol_type = other DNA

SEQ ID NO: 67034 - DNA, 120 bp, synthetic construct; identical to SEQ ID NO: 37080
  source 1..120: mol_type = other DNA

SEQ ID NO: 67035 - DNA, 120 bp, synthetic construct; identical to SEQ ID NO: 37081
  source 1..120: mol_type = other DNA

SEQ ID NO: 67036 - DNA, 120 bp, synthetic construct; identical to SEQ ID NO: 10727
  source 1..120: mol_type = other DNA

SEQ ID NO: 67037 - DNA, 120 bp, synthetic construct; identical to SEQ ID NO: 37083
  source 1..120: mol_type = other DNA

SEQ ID NO: 67038 - DNA, 120 bp, synthetic construct; identical to SEQ ID NO: 37084
  source 1..120: mol_type = other DNA

SEQ ID NO: 67039 - DNA, 120 bp, synthetic construct; identical to SEQ ID NO: 37085
  source 1..120: mol_type = other DNA

SEQ ID NO: 67040 - DNA, 120 bp, synthetic construct; identical to SEQ ID NO: 10728
  source 1..120: mol_type = other DNA

SEQ ID NO: 67041 - DNA, 120 bp, synthetic construct; identical to SEQ ID NO: 37087
  source 1..120: mol_type = other DNA

SEQ ID NO: 67042 - DNA, 120 bp, synthetic construct; identical to SEQ ID NO: 37088
  source 1..120: mol_type = other DNA

SEQ ID NO: 67043 - DNA, 120 bp, synthetic construct; identical to SEQ ID NO: 10729
  source 1..120: mol_type = other DNA

SEQ ID NO: 67044 - DNA, 120 bp, synthetic construct; identical to SEQ ID NO: 37090
  source 1..120: mol_type = other DNA

SEQ ID NO: 67045 - DNA, 120 bp, synthetic construct; identical to SEQ ID NO: 37091
  source 1..120: mol_type = other DNA

SEQ ID NO: 67046 - DNA, 120 bp, synthetic construct; identical to SEQ ID NO: 37092
  source 1..120: mol_type = other DNA

SEQ ID NO: 67047 - DNA, 120 bp, synthetic construct; identical to SEQ ID NO: 10730
  source 1..120: mol_type = other DNA

SEQ ID NO: 67048 - DNA, 120 bp, synthetic construct; identical to SEQ ID NO: 37094
  source 1..120: mol_type = other DNA

SEQ ID NO: 67049 - DNA, 120 bp, synthetic construct; identical to SEQ ID NO: 37095
  source 1..120: mol_type = other DNA

SEQ ID NO: 67050 - DNA, 120 bp, synthetic construct; identical to SEQ ID NO: 37096
  source 1..120: mol_type = other DNA

SEQ ID NO: 67051 - DNA, 120 bp, synthetic construct; identical to SEQ ID NO: 10731
  source 1..120: mol_type = other DNA

SEQ ID NO: 67052 - DNA, 120 bp, synthetic construct; identical to SEQ ID NO: 37098
  source 1..120: mol_type = other DNA

SEQ ID NO: 67053 - DNA, 120 bp, synthetic construct; identical to SEQ ID NO: 37099
  source 1..120: mol_type = other DNA

SEQ ID NO: 67054 - DNA, 120 bp, synthetic construct; identical to SEQ ID NO: 37100
  source 1..120: mol_type = other DNA

SEQ ID NO: 67055 - DNA, 120 bp, synthetic construct; identical to SEQ ID NO: 10732
  source 1..120: mol_type = other DNA

SEQ ID NO: 67056 - DNA, 120 bp, synthetic construct; identical to SEQ ID NO: 37102
  source 1..120: mol_type = other DNA

SEQ ID NO: 67057 - DNA, 120 bp, synthetic construct; identical to SEQ ID NO: 37103
  source 1..120: mol_type = other DNA

SEQ ID NO: 67058 - DNA, 120 bp, synthetic construct; identical to SEQ ID NO: 37104
  source 1..120: mol_type = other DNA

SEQ ID NO: 67059 - DNA, 120 bp, synthetic construct; identical to SEQ ID NO: 10733
  source 1..120: mol_type = other DNA

SEQ ID NO: 67060 - DNA, 120 bp, synthetic construct; identical to SEQ ID NO: 37106
  source 1..120: mol_type = other DNA

SEQ ID NO: 67061 - DNA, 120 bp, synthetic construct; identical to SEQ ID NO: 37107
  source 1..120: mol_type = other DNA

SEQ ID NO: 67062 - DNA, 120 bp, synthetic construct; identical to SEQ ID NO: 37108
  source 1..120: mol_type = other DNA

SEQ ID NO: 67063 - DNA, 120 bp, synthetic construct; identical to SEQ ID NO: 10734
  source 1..120: mol_type = other DNA

SEQ ID NO: 67064 - DNA, 120 bp, synthetic construct; identical to SEQ ID NO: 37110
  source 1..120: mol_type = other DNA

SEQ ID NO: 67065 - DNA, 120 bp, synthetic construct; identical to SEQ ID NO: 37111
  source 1..120: mol_type = other DNA

SEQ ID NO: 67066 - DNA, 120 bp, synthetic construct; identical to SEQ ID NO: 37112
  source 1..120: mol_type = other DNA

SEQ ID NO: 67067 - DNA, 120 bp, synthetic construct; identical to SEQ ID NO: 10735
  source 1..120: mol_type = other DNA

SEQ ID NO: 67068 - DNA, 120 bp, synthetic construct; identical to SEQ ID NO: 37114
  source 1..120: mol_type = other DNA

SEQ ID NO: 67069 - DNA, 120 bp, synthetic construct; identical to SEQ ID NO: 37115
  source 1..120: mol_type = other DNA

SEQ ID NO: 67070 - DNA, 120 bp, synthetic construct; identical to SEQ ID NO: 37116
  source 1..120: mol_type = other DNA

SEQ ID NO: 67071 - DNA, 120 bp, synthetic construct; identical to SEQ ID NO: 10736
  source 1..120: mol_type = other DNA

SEQ ID NO: 67072 - DNA, 120 bp, synthetic construct; identical to SEQ ID NO: 37118
  source 1..120: mol_type = other DNA

SEQ ID NO: 67073 - DNA, 120 bp, synthetic construct; identical to SEQ ID NO: 37119
  source 1..120: mol_type = other DNA

SEQ ID NO: 67074 - DNA, 120 bp, synthetic construct; identical to SEQ ID NO: 37120
  source 1..120: mol_type = other DNA

SEQ ID NO: 67075 - DNA, 120 bp, synthetic construct; identical to SEQ ID NO: 37121
  source 1..120: mol_type = other DNA

SEQ ID NO: 67076 - DNA, 120 bp, synthetic construct; identical to SEQ ID NO: 10737
  source 1..120: mol_type = other DNA

SEQ ID NO: 67077 - DNA, 120 bp, synthetic construct; identical to SEQ ID NO: 37123
  source 1..120: mol_type = other DNA

SEQ ID NO: 67078 - DNA, 120 bp, synthetic construct; identical to SEQ ID NO: 37124
  source 1..120: mol_type = other DNA

SEQ ID NO: 67079 - DNA, 120 bp, synthetic construct; identical to SEQ ID NO: 10738
  source 1..120: mol_type = other DNA

SEQ ID NO: 67080 - DNA, 120 bp, synthetic construct; identical to SEQ ID NO: 37126
  source 1..120: mol_type = other DNA

SEQ ID NO: 67081 - DNA, 120 bp, synthetic construct; identical to SEQ ID NO: 37127
  source 1..120: mol_type = other DNA

SEQ ID NO: 67082 - DNA, 120 bp, synthetic construct; identical to SEQ ID NO: 37128
  source 1..120: mol_type = other DNA

SEQ ID NO: 67083 - DNA, 120 bp, synthetic construct; identical to SEQ ID NO: 10739
  source 1..120: mol_type = other DNA

SEQ ID NO: 67084 - DNA, 120 bp, synthetic construct; identical to SEQ ID NO: 37130
  source 1..120: mol_type = other DNA

SEQ ID NO: 67085 - DNA, 120 bp, synthetic construct; identical to SEQ ID NO: 37131
  source 1..120: mol_type = other DNA

SEQ ID NO: 67086 - DNA, 120 bp, synthetic construct; identical to SEQ ID NO: 37132
  source 1..120: mol_type = other DNA

SEQ ID NO: 67087 - DNA, 120 bp, synthetic construct; identical to SEQ ID NO: 37133
  source 1..120: mol_type = other DNA

SEQ ID NO: 67088 - DNA, 120 bp, synthetic construct; identical to SEQ ID NO: 10740
  source 1..120: mol_type = other DNA

SEQ ID NO: 67089 - DNA, 120 bp, synthetic construct; identical to SEQ ID NO: 37135
  source 1..120: mol_type = other DNA

SEQ ID NO: 67090 - DNA, 120 bp, synthetic construct; identical to SEQ ID NO: 37136
  source 1..120: mol_type = other DNA

SEQ ID NO: 67091 - DNA, 120 bp, synthetic construct; identical to SEQ ID NO: 10741
  source 1..120: mol_type = other DNA

SEQ ID NO: 67092 - DNA, 120 bp, synthetic construct; identical to SEQ ID NO: 37138
  source 1..120: mol_type = other DNA

SEQ ID NO: 67093 - DNA, 120 bp, synthetic construct; identical to SEQ ID NO: 37139
  source 1..120: mol_type = other DNA

SEQ ID NO: 67094 - DNA, 120 bp, synthetic construct; identical to SEQ ID NO: 37140
  source 1..120: mol_type = other DNA

SEQ ID NO: 67095 - DNA, 120 bp, synthetic construct; identical to SEQ ID NO: 37141
  source 1..120: mol_type = other DNA

SEQ ID NO: 67096 - DNA, 120 bp, synthetic construct; identical to SEQ ID NO: 10742
  source 1..120: mol_type = other DNA

SEQ ID NO: 67097 - DNA, 120 bp, synthetic construct; identical to SEQ ID NO: 37143
  source 1..120: mol_type = other DNA

SEQ ID NO: 67098 - DNA, 120 bp, synthetic construct; identical to SEQ ID NO: 37144
  source 1..120: mol_type = other DNA

SEQ ID NO: 67099 - DNA, 120 bp, synthetic construct; identical to SEQ ID NO: 37145
  source 1..120: mol_type = other DNA

SEQ ID NO: 67100 - DNA, 120 bp, synthetic construct; identical to SEQ ID NO: 10743
  source 1..120: mol_type = other DNA

SEQ ID NO: 67101 - DNA, 120 bp, synthetic construct; identical to SEQ ID NO: 37147
  source 1..120: mol_type = other DNA

SEQ ID NO: 67102 - DNA, 120 bp, synthetic construct; identical to SEQ ID NO: 37148
  source 1..120: mol_type = other DNA

SEQ ID NO: 67103 - DNA, 120 bp, synthetic construct; identical to SEQ ID NO: 37149
  source 1..120: mol_type = other DNA

SEQ ID NO: 67104 - DNA, 120 bp, synthetic construct; identical to SEQ ID NO: 10744
  source 1..120: mol_type = other DNA

SEQ ID NO: 67105 - DNA, 120 bp, synthetic construct; identical to SEQ ID NO: 37151
  source 1..120: mol_type = other DNA

SEQ ID NO: 67106 - DNA, 120 bp, synthetic construct; identical to SEQ ID NO: 37152
  source 1..120: mol_type = other DNA

SEQ ID NO: 67107 - DNA, 120 bp, synthetic construct; identical to SEQ ID NO: 37153
  source 1..120: mol_type = other DNA

SEQ ID NO: 67108 - DNA, 120 bp, synthetic construct; identical to SEQ ID NO: 10745
  source 1..120: mol_type = other DNA

SEQ ID NO: 67109 - DNA, 120 bp, synthetic construct; identical to SEQ ID NO: 37155
  source 1..120: mol_type = other DNA

SEQ ID NO: 67110 - DNA, 120 bp, synthetic construct; identical to SEQ ID NO: 37156
  source 1..120: mol_type = other DNA

SEQ ID NO: 67111 - DNA, 120 bp, synthetic construct; identical to SEQ ID NO: 37157
  source 1..120: mol_type = other DNA

SEQ ID NO: 67112 - DNA, 120 bp, synthetic construct; identical to SEQ ID NO: 37158
  source 1..120: mol_type = other DNA

SEQ ID NO: 67113 - DNA, 120 bp, synthetic construct; identical to SEQ ID NO: 10746
  source 1..120: mol_type = other DNA

SEQ ID NO: 67114 - DNA, 120 bp, synthetic construct; identical to SEQ ID NO: 37160
  source 1..120: mol_type = other DNA

SEQ ID NO: 67115 - DNA, 120 bp, synthetic construct; identical to SEQ ID NO: 37161
  source 1..120: mol_type = other DNA

SEQ ID NO: 67116 - DNA, 120 bp, synthetic construct; identical to SEQ ID NO: 10747
  source 1..120: mol_type = other DNA

SEQ ID NO: 67117 - DNA, 120 bp, synthetic construct; identical to SEQ ID NO: 37163
  source 1..120: mol_type = other DNA

SEQ ID NO: 67118 - DNA, 120 bp, synthetic construct; identical to SEQ ID NO: 37164
  source 1..120: mol_type = other DNA

SEQ ID NO: 67119 - DNA, 120 bp, synthetic construct; identical to SEQ ID NO: 37165
  source 1..120: mol_type = other DNA

SEQ ID NO: 67120 - DNA, 120 bp, synthetic construct; identical to SEQ ID NO: 37166
  source 1..120: mol_type = other DNA

SEQ ID NO: 67121 - DNA, 120 bp, synthetic construct; identical to SEQ ID NO: 10748
  source 1..120: mol_type = other DNA

SEQ ID NO: 67122 - DNA, 120 bp, synthetic construct; identical to SEQ ID NO: 37168
  source 1..120: mol_type = other DNA

SEQ ID NO: 67123 - DNA, 120 bp, synthetic construct; identical to SEQ ID NO: 37169
  source 1..120: mol_type = other DNA

SEQ ID NO: 67124 - DNA, 120 bp, synthetic construct; identical to SEQ ID NO: 10749
  source 1..120: mol_type = other DNA

SEQ ID NO: 67125 - DNA, 120 bp, synthetic construct; identical to SEQ ID NO: 37171
  source 1..120: mol_type = other DNA

SEQ ID NO: 67126 - DNA, 120 bp, synthetic construct; identical to SEQ ID NO: 37172
  source 1..120: mol_type = other DNA

SEQ ID NO: 67127 - DNA, 120 bp, synthetic construct; identical to SEQ ID NO: 37173
  source 1..120: mol_type = other DNA

SEQ ID NO: 67128 - DNA, 120 bp, synthetic construct; identical to SEQ ID NO: 10750
  source 1..120: mol_type = other DNA

SEQ ID NO: 67129 - DNA, 120 bp, synthetic construct; identical to SEQ ID NO: 37175
  source 1..120: mol_type = other DNA

SEQ ID NO: 67130 - DNA, 120 bp, synthetic construct; identical to SEQ ID NO: 37176
  source 1..120: mol_type = other DNA

SEQ ID NO: 67131 - DNA, 120 bp, synthetic construct; identical to SEQ ID NO: 37177
  source 1..120: mol_type = other DNA

SEQ ID NO: 67132 - DNA, 120 bp, synthetic construct; identical to SEQ ID NO: 37178
  source 1..120: mol_type = other DNA

SEQ ID NO: 67133 - DNA, 120 bp, synthetic construct; identical to SEQ ID NO: 10751
  source 1..120: mol_type = other DNA

SEQ ID NO: 67134 - DNA, 120 bp, synthetic construct; identical to SEQ ID NO: 37180
  source 1..120: mol_type = other DNA

SEQ ID NO: 67135 - DNA, 120 bp, synthetic construct; identical to SEQ ID NO: 37181
  source 1..120: mol_type = other DNA

SEQ ID NO: 67136 - DNA, 120 bp, synthetic construct; identical to SEQ ID NO: 10752
  source 1..120: mol_type = other DNA

SEQ ID NO: 67137 - DNA, 120 bp, synthetic construct; identical to SEQ ID NO: 37183
  source 1..120: mol_type = other DNA

SEQ ID NO: 67138 - DNA, 120 bp, synthetic construct; identical to SEQ ID NO: 37184
  source 1..120: mol_type = other DNA

SEQ ID NO: 67139 - DNA, 120 bp, synthetic construct; identical to SEQ ID NO: 37185
  source 1..120: mol_type = other DNA

SEQ ID NO: 67140 - DNA, 120 bp, synthetic construct; identical to SEQ ID NO: 10753
  source 1..120: mol_type = other DNA

SEQ ID NO: 67141 - DNA, 120 bp, synthetic construct; identical to SEQ ID NO: 37187
  source 1..120: mol_type = other DNA

SEQ ID NO: 67142 - DNA, 120 bp, synthetic construct; identical to SEQ ID NO: 37188
  source 1..120: mol_type = other DNA

SEQ ID NO: 67143 - DNA, 120 bp, synthetic construct; identical to SEQ ID NO: 37189
  source 1..120: mol_type = other DNA

SEQ ID NO: 67144 - DNA, 120 bp, synthetic construct; identical to SEQ ID NO: 37190
  source 1..120: mol_type = other DNA

SEQ ID NO: 67145 - DNA, 120 bp, synthetic construct; identical to SEQ ID NO: 10754
  source 1..120: mol_type = other DNA

SEQ ID NO: 67146 - DNA, 120 bp, synthetic construct; identical to SEQ ID NO: 37192
  source 1..120: mol_type = other DNA

SEQ ID NO: 67147 - DNA, 120 bp, synthetic construct; identical to SEQ ID NO: 37193
  source 1..120: mol_type = other DNA

SEQ ID NO: 67148 - DNA, 120 bp, synthetic construct; identical to SEQ ID NO: 37194
  source 1..120: mol_type = other DNA

SEQ ID NO: 67149 - DNA, 120 bp, synthetic construct; identical to SEQ ID NO: 10755
  source 1..120: mol_type = other DNA

SEQ ID NO: 67150 - DNA, 120 bp, synthetic construct; identical to SEQ ID NO: 37196
  source 1..120: mol_type = other DNA

SEQ ID NO: 67151 - DNA, 120 bp, synthetic construct; identical to SEQ ID NO: 37197
  source 1..120: mol_type = other DNA

SEQ ID NO: 67152 - DNA, 120 bp, synthetic construct; identical to SEQ ID NO: 37198
  source 1..120: mol_type = other DNA

SEQ ID NO: 67153 - DNA, 120 bp, synthetic construct; identical to SEQ ID NO: 10756
  source 1..120: mol_type = other DNA

SEQ ID NO: 67154 - DNA, 120 bp, synthetic construct; identical to SEQ ID NO: 37200
  source 1..120: mol_type = other DNA

SEQ ID NO: 67155 - DNA, 120 bp, synthetic construct; identical to SEQ ID NO: 37201
  source 1..120: mol_type = other DNA

SEQ ID NO: 67156 - DNA, 120 bp, synthetic construct; identical to SEQ ID NO: 37202
  source 1..120: mol_type = other DNA

SEQ ID NO: 67157 - DNA, 120 bp, synthetic construct; identical to SEQ ID NO: 10757
  source 1..120: mol_type = other DNA

SEQ ID NO: 67158 - DNA, 120 bp, synthetic construct; identical to SEQ ID NO: 37204
  source 1..120: mol_type = other DNA

SEQ ID NO: 67159 - DNA, 120 bp, synthetic construct; identical to SEQ ID NO: 37205
  source 1..120: mol_type = other DNA

SEQ ID NO: 67160 - DNA, 120 bp, synthetic construct; identical to SEQ ID NO: 10758
  source 1..120: mol_type = other DNA

SEQ ID NO: 67161 - DNA, 120 bp, synthetic construct; identical to SEQ ID NO: 37207
  source 1..120: mol_type = other DNA

SEQ ID NO: 67162 - DNA, 120 bp, synthetic construct; identical to SEQ ID NO: 37208
  source 1..120: mol_type = other DNA

SEQ ID NO: 67163 - DNA, 120 bp, synthetic construct; identical to SEQ ID NO: 37209
  source 1..120: mol_type = other DNA

SEQ ID NO: 67164 - DNA, 120 bp, synthetic construct; identical to SEQ ID NO: 10759
  source 1..120: mol_type = other DNA

SEQ ID NO: 67165 - DNA, 120 bp, synthetic construct; identical to SEQ ID NO: 37211
  source 1..120: mol_type = other DNA

SEQ ID NO: 67166 - DNA, 120 bp, synthetic construct; identical to SEQ ID NO: 37212
  source 1..120: mol_type = other DNA

SEQ ID NO: 67167 - DNA, 120 bp, synthetic construct; identical to SEQ ID NO: 37213
  source 1..120: mol_type = other DNA

SEQ ID NO: 67168 - DNA, 120 bp, synthetic construct; identical to SEQ ID NO: 10760
  source 1..120: mol_type = other DNA

SEQ ID NO: 67169 - DNA, 120 bp, synthetic construct; identical to SEQ ID NO: 37215
  source 1..120: mol_type = other DNA

SEQ ID NO: 67170 - DNA, 120 bp, synthetic construct; identical to SEQ ID NO: 37216
  source 1..120: mol_type = other DNA

SEQ ID NO: 67171 - DNA, 120 bp, synthetic construct; identical to SEQ ID NO: 37217
  source 1..120: mol_type = other DNA

SEQ ID NO: 67172 - DNA, 120 bp, synthetic construct; identical to SEQ ID NO: 10761
  source 1..120: mol_type = other DNA

SEQ ID NO: 67173 - DNA, 120 bp, synthetic construct; identical to SEQ ID NO: 37219
  source 1..120: mol_type = other DNA

SEQ ID NO: 67174 - DNA, 120 bp, synthetic construct; identical to SEQ ID NO: 37220
  source 1..120: mol_type = other DNA

SEQ ID NO: 67175 - DNA, 120 bp, synthetic construct; identical to SEQ ID NO: 37221
  source 1..120: mol_type = other DNA

SEQ ID NO: 67176 - DNA, 120 bp, synthetic construct; identical to SEQ ID NO: 37222
  source 1..120: mol_type = other DNA

SEQ ID NO: 67177 - DNA, 120 bp, synthetic construct; identical to SEQ ID NO: 3538
  source 1..120: mol_type = other DNA

SEQ ID NO: 67178 - DNA, 120 bp, synthetic construct; identical to SEQ ID NO: 37224
  source 1..120: mol_type = other DNA

SEQ ID NO: 67179 - DNA, 120 bp, synthetic construct; identical to SEQ ID NO: 37225
  source 1..120: mol_type = other DNA

SEQ ID NO: 67180 - DNA, 120 bp, synthetic construct; identical to SEQ ID NO: 37226
  source 1..120: mol_type = other DNA

SEQ ID NO: 67181 - DNA, 120 bp, synthetic construct; identical to SEQ ID NO: 10763
  source 1..120: mol_type = other DNA

SEQ ID NO: 67182 - DNA, 120 bp, synthetic construct; identical to SEQ ID NO: 37228
  source 1..120: mol_type = other DNA

SEQ ID NO: 67183 - DNA, 120 bp, synthetic construct; identical to SEQ ID NO: 37229
  source 1..120: mol_type = other DNA

SEQ ID NO: 67184 - DNA, 120 bp, synthetic construct; identical to SEQ ID NO: 37230
  source 1..120: mol_type = other DNA

SEQ ID NO: 67185 - DNA, 120 bp, synthetic construct; identical to SEQ ID NO: 10764
  source 1..120: mol_type = other DNA

SEQ ID NO: 67186 - DNA, 120 bp, synthetic construct; identical to SEQ ID NO: 37232
  source 1..120: mol_type = other DNA

SEQ ID NO: 67187 - DNA, 120 bp, synthetic construct; identical to SEQ ID NO: 37233
  source 1..120: mol_type = other DNA

SEQ ID NO: 67188 - DNA, 120 bp, synthetic construct; identical to SEQ ID NO: 37234
  source 1..120: mol_type = other DNA

SEQ ID NO: 67189 - DNA, 120 bp, synthetic construct; identical to SEQ ID NO: 10765
  source 1..120: mol_type = other DNA

SEQ ID NO: 67190 - DNA, 120 bp, synthetic construct; identical to SEQ ID NO: 37236
  source 1..120: mol_type = other DNA

SEQ ID NO: 67191 - DNA, 120 bp, synthetic construct; identical to SEQ ID NO: 37237
  source 1..120: mol_type = other DNA

SEQ ID NO: 67192 - DNA, 120 bp, synthetic construct; identical to SEQ ID NO: 37238
  source 1..120: mol_type = other DNA

SEQ ID NO: 67193 - DNA, 120 bp, synthetic construct; identical to SEQ ID NO: 10766
  source 1..120: mol_type = other DNA

SEQ ID NO: 67194 - DNA, 120 bp, synthetic construct; identical to SEQ ID NO: 37240
  source 1..120: mol_type = other DNA

SEQ ID NO: 67195 - DNA, 120 bp, synthetic construct; identical to SEQ ID NO: 37241
  source 1..120: mol_type = other DNA

SEQ ID NO: 67196 - DNA, 120 bp, synthetic construct; identical to SEQ ID NO: 10767
  source 1..120: mol_type = other DNA

SEQ ID NO: 67197 - DNA, 120 bp, synthetic construct; identical to SEQ ID NO: 37243
  source 1..120: mol_type = other DNA

SEQ ID NO: 67198 - DNA, 120 bp, synthetic construct; identical to SEQ ID NO: 37244
  source 1..120: mol_type = other DNA

SEQ ID NO: 67199 - DNA, 120 bp, synthetic construct; identical to SEQ ID NO: 37245
  source 1..120: mol_type = other DNA

SEQ ID NO: 67200 - DNA, 120 bp, synthetic construct; identical to SEQ ID NO: 10768
  source 1..120: mol_type = other DNA

SEQ ID NO: 67201 - DNA, 120 bp, synthetic construct; identical to SEQ ID NO: 37247
  source 1..120: mol_type = other DNA

SEQ ID NO: 67202 - DNA, 120 bp, synthetic construct; identical to SEQ ID NO: 37248
  source 1..120: mol_type = other DNA

SEQ ID NO: 67203 - DNA, 120 bp, synthetic construct; identical to SEQ ID NO: 37249
  source 1..120: mol_type = other DNA

SEQ ID NO: 67204 - DNA, 120 bp, synthetic construct; identical to SEQ ID NO: 10769
  source 1..120: mol_type = other DNA

SEQ ID NO: 67205 - DNA, 120 bp, synthetic construct; identical to SEQ ID NO: 37251
  source 1..120: mol_type = other DNA

SEQ ID NO: 67206 - DNA, 120 bp, synthetic construct; identical to SEQ ID NO: 37252
  source 1..120: mol_type = other DNA

SEQ ID NO: 67207 - DNA, 120 bp, synthetic construct; identical to SEQ ID NO: 37253
  source 1..120: mol_type = other DNA

SEQ ID NO: 67208 - DNA, 120 bp, synthetic construct; identical to SEQ ID NO: 10770
  source 1..120: mol_type = other DNA

SEQ ID NO: 67209 - DNA, 120 bp, synthetic construct; identical to SEQ ID NO: 37255
  source 1..120: mol_type = other DNA

SEQ ID NO: 67210 - DNA, 120 bp, synthetic construct; identical to SEQ ID NO: 37256
  source 1..120: mol_type = other DNA

SEQ ID NO: 67211 - DNA, 120 bp, synthetic construct; identical to SEQ ID NO: 37257
  source 1..120: mol_type = other DNA

SEQ ID NO: 67212 - DNA, 120 bp, synthetic construct; identical to SEQ ID NO: 37258
  source 1..120: mol_type = other DNA

SEQ ID NO: 67213 - DNA, 120 bp, synthetic construct; identical to SEQ ID NO: 10771
  source 1..120: mol_type = other DNA

SEQ ID NO: 67214 - DNA, 120 bp, synthetic construct; identical to SEQ ID NO: 37260
  source 1..120: mol_type = other DNA

SEQ ID NO: 67215 - DNA, 120 bp, synthetic construct; identical to SEQ ID NO: 37261
  source 1..120: mol_type = other DNA

SEQ ID NO: 67216 - DNA, 120 bp, synthetic construct; identical to SEQ ID NO: 10772
  source 1..120: mol_type = other DNA

SEQ ID NO: 67217 - DNA, 120 bp, synthetic construct; identical to SEQ ID NO: 37263
  source 1..120: mol_type = other DNA

SEQ ID NO: 67218 - DNA, 120 bp, synthetic construct; identical to SEQ ID NO: 37264
  source 1..120: mol_type = other DNA

SEQ ID NO: 67219 - DNA, 120 bp, synthetic construct; identical to SEQ ID NO: 37265
  source 1..120: mol_type = other DNA

SEQ ID NO: 67220 - DNA, 120 bp, synthetic construct; identical to SEQ ID NO: 37266
  source 1..120: mol_type = other DNA

SEQ ID NO: 67221 - DNA, 120 bp, synthetic construct; identical to SEQ ID NO: 10773
  source 1..120: mol_type = other DNA

SEQ ID NO: 67222 - DNA, 120 bp, synthetic construct; identical to SEQ ID NO: 37268
  source 1..120: mol_type = other DNA

SEQ ID NO: 67223 - DNA, 120 bp, synthetic construct; identical to SEQ ID NO: 37269
  source 1..120: mol_type = other DNA

SEQ ID NO: 67224 - DNA, 120 bp, synthetic construct; identical to SEQ ID NO: 37270
  source 1..120: mol_type = other DNA

SEQ ID NO: 67225 - DNA, 120 bp, synthetic construct; identical to SEQ ID NO: 10774
  source 1..120: mol_type = other DNA

SEQ ID NO: 67226 - DNA, 120 bp, synthetic construct; identical to SEQ ID NO: 37272
  source 1..120: mol_type = other DNA

SEQ ID NO: 67227 - DNA, 120 bp, synthetic construct; identical to SEQ ID NO: 37273
  source 1..120: mol_type = other DNA

SEQ ID NO: 67228 - DNA, 120 bp, synthetic construct; identical to SEQ ID NO: 37274
  source 1..120: mol_type = other DNA

SEQ ID NO: 67229 - DNA, 120 bp, synthetic construct; identical to SEQ ID NO: 10775
  source 1..120: mol_type = other DNA

SEQ ID NO: 67230 - DNA, 120 bp, synthetic construct; identical to SEQ ID NO: 37276
  source 1..120: mol_type = other DNA

SEQ ID NO: 67231 - DNA, 120 bp, synthetic construct; identical to SEQ ID NO: 37277
  source 1..120: mol_type = other DNA

SEQ ID NO: 67232 - DNA, 120 bp, synthetic construct; identical to SEQ ID NO: 10776
  source 1..120: mol_type = other DNA

SEQ ID NO: 67233 - DNA, 120 bp, synthetic construct; identical to SEQ ID NO: 37279
  source 1..120: mol_type = other DNA

SEQ ID NO: 67234 - DNA, 120 bp, synthetic construct; identical to SEQ ID NO: 37280
  source 1..120: mol_type = other DNA

SEQ ID NO: 67235 - DNA, 120 bp, synthetic construct; identical to SEQ ID NO: 37281
  source 1..120: mol_type = other DNA

SEQ ID NO: 67236 - DNA, 120 bp, synthetic construct; identical to SEQ ID NO: 10777
  source 1..120: mol_type = other DNA

SEQ ID NO: 67237 - DNA, 120 bp, synthetic construct; identical to SEQ ID NO: 37283
  source 1..120: mol_type = other DNA

SEQ ID NO: 67238 - DNA, 120 bp, synthetic construct; identical to SEQ ID NO: 37284
  source 1..120: mol_type = other DNA

SEQ ID NO: 67239 - DNA, 120 bp, synthetic construct; identical to SEQ ID NO: 37285
  source 1..120: mol_type = other DNA

SEQ ID NO: 67240 - DNA, 120 bp, synthetic construct; identical to SEQ ID NO: 10778
  source 1..120: mol_type = other DNA

SEQ ID NO: 67241 - DNA, 120 bp, synthetic construct; identical to SEQ ID NO: 37287
  source 1..120: mol_type = other DNA

SEQ ID NO: 67242 - DNA, 120 bp, synthetic construct; identical to SEQ ID NO: 37288
  source 1..120: mol_type = other DNA

SEQ ID NO: 67243 - DNA, 120 bp, synthetic construct; identical to SEQ ID NO: 37289
  source 1..120: mol_type = other DNA

SEQ ID NO: 67244 - DNA, 120 bp, synthetic construct; identical to SEQ ID NO: 10779
  source 1..120: mol_type = other DNA

SEQ ID NO: 67245 - DNA, 120 bp, synthetic construct; identical to SEQ ID NO: 37291
  source 1..120: mol_type = other DNA

SEQ ID NO: 67246 - DNA, 120 bp, synthetic construct; identical to SEQ ID NO: 37292
  source 1..120: mol_type = other DNA

SEQ ID NO: 67247 - DNA, 120 bp, synthetic construct; identical to SEQ ID NO: 37293
  source 1..120: mol_type = other DNA

SEQ ID NO: 67248 - DNA, 120 bp, synthetic construct; identical to SEQ ID NO: 10780
  source 1..120: mol_type = other DNA

SEQ ID NO: 67249 - DNA, 120 bp, synthetic construct; identical to SEQ ID NO: 37295
  source 1..120: mol_type = other DNA

SEQ ID NO: 67250 - DNA, 120 bp, synthetic construct; identical to SEQ ID NO: 37296
  source 1..120: mol_type = other DNA

SEQ ID NO: 67251 - DNA, 120 bp, synthetic construct; identical to SEQ ID NO: 37297
  source 1..120: mol_type = other DNA

SEQ ID NO: 67252 - DNA, 120 bp, synthetic construct; identical to SEQ ID NO: 37298
  source 1..120: mol_type = other DNA

SEQ ID NO: 67253 - DNA, 120 bp, synthetic construct; identical to SEQ ID NO: 10781
  source 1..120: mol_type = other DNA

SEQ ID NO: 67254 - DNA, 120 bp, synthetic construct; identical to SEQ ID NO: 37300
  source 1..120: mol_type = other DNA

SEQ ID NO: 67255 - DNA, 120 bp, synthetic construct; identical to SEQ ID NO: 37301
  source 1..120: mol_type = other DNA

SEQ ID NO: 67256 - DNA, 120 bp, synthetic construct; identical to SEQ ID NO: 10782
  source 1..120: mol_type = other DNA

SEQ ID NO: 67257 - DNA, 120 bp, synthetic construct; identical to SEQ ID NO: 37303
  source 1..120: mol_type = other DNA

SEQ ID NO: 67258 - DNA, 120 bp, synthetic construct; identical to SEQ ID NO: 37304
  source 1..120: mol_type = other DNA

SEQ ID NO: 67259 - DNA, 120 bp, synthetic construct; identical to SEQ ID NO: 37305
  source 1..120: mol_type = other DNA

SEQ ID NO: 67260 - DNA, 120 bp, synthetic construct; identical to SEQ ID NO: 10783
  source 1..120: mol_type = other DNA

SEQ ID NO: 67261 - DNA, 120 bp, synthetic construct; identical to SEQ ID NO: 37307
  source 1..120: mol_type = other DNA

SEQ ID NO: 67262 - DNA, 120 bp, synthetic construct; identical to SEQ ID NO: 37308
  source 1..120: mol_type = other DNA

SEQ ID NO: 67263 - DNA, 120 bp, synthetic construct; identical to SEQ ID NO: 37309
  source 1..120: mol_type = other DNA

SEQ ID NO: 67264 - DNA, 120 bp, synthetic construct; identical to SEQ ID NO: 10784
  source 1..120: mol_type = other DNA

SEQ ID NO: 67265 - DNA, 120 bp, synthetic construct; identical to SEQ ID NO: 37311
  source 1..120: mol_type = other DNA

SEQ ID NO: 67266 - DNA, 120 bp, synthetic construct; identical to SEQ ID NO: 37312
  source 1..120: mol_type = other DNA

SEQ ID NO: 67267 - DNA, 120 bp, synthetic construct; identical to SEQ ID NO: 37313
  source 1..120: mol_type = other DNA

SEQ ID NO: 67268 - DNA, 120 bp, synthetic construct; identical to SEQ ID NO: 37314
  source 1..120: mol_type = other DNA

SEQ ID NO: 67269 - DNA, 120 bp, synthetic construct; identical to SEQ ID NO: 10785
  source 1..120: mol_type = other DNA

SEQ ID NO: 67270 - DNA, 120 bp, synthetic construct; identical to SEQ ID NO: 37316
  source 1..120: mol_type = other DNA

SEQ ID NO: 67271 - DNA, 120 bp, synthetic construct; identical to SEQ ID NO: 37317
  source 1..120: mol_type = other DNA

SEQ ID NO: 67272 - DNA, 120 bp, synthetic construct; identical to SEQ ID NO: 10786
  source 1..120: mol_type = other DNA

SEQ ID NO: 67273 - DNA, 120 bp, synthetic construct; identical to SEQ ID NO: 37319
  source 1..120: mol_type = other DNA

SEQ ID NO: 67274 - DNA, 120 bp, synthetic construct; identical to SEQ ID NO: 37320
  source 1..120: mol_type = other DNA

SEQ ID NO: 67275 - DNA, 120 bp, synthetic construct; identical to SEQ ID NO: 37321
  source 1..120: mol_type = other DNA

SEQ ID NO: 67276 - DNA, 120 bp, synthetic construct; identical to SEQ ID NO: 37322
  source 1..120: mol_type = other DNA

SEQ ID NO: 67277 - DNA, 120 bp, synthetic construct; identical to SEQ ID NO: 10787
  source 1..120: mol_type = other DNA

SEQ ID NO: 67278 - DNA, 120 bp, synthetic construct; identical to SEQ ID NO: 37324
  source 1..120: mol_type = other DNA

SEQ ID NO: 67279 - DNA, 120 bp, synthetic construct; identical to SEQ ID NO: 37325
  source 1..120: mol_type = other DNA

SEQ ID NO: 67280 - DNA, 120 bp, synthetic construct; identical to SEQ ID NO: 10788
  source 1..120: mol_type = other DNA

SEQ ID NO: 67281 - DNA, 120 bp, synthetic construct; identical to SEQ ID NO: 37327
  source 1..120: mol_type = other DNA

SEQ ID NO: 67282 - DNA, 120 bp, synthetic construct; identical to SEQ ID NO: 37328
  source 1..120: mol_type = other DNA

SEQ ID NO: 67283 - DNA, 120 bp, synthetic construct; identical to SEQ ID NO: 37329
  source 1..120: mol_type = other DNA

SEQ ID NO: 67284 - DNA, 120 bp, synthetic construct; identical to SEQ ID NO: 37330
  source 1..120: mol_type = other DNA

SEQ ID NO: 67285 - DNA, 120 bp, synthetic construct; identical to SEQ ID NO: 10789
  source 1..120: mol_type = other DNA

SEQ ID NO: 67286 - DNA, 120 bp, synthetic construct; identical to SEQ ID NO: 37332
  source 1..120: mol_type = other DNA

SEQ ID NO: 67287 - DNA, 120 bp, synthetic construct; identical to SEQ ID NO: 37333
  source 1..120: mol_type = other DNA

SEQ ID NO: 67288 - DNA, 120 bp, synthetic construct; identical to SEQ ID NO: 10790
  source 1..120: mol_type = other DNA

SEQ ID NO: 67289 - DNA, 120 bp, synthetic construct; identical to SEQ ID NO: 37335
  source 1..120: mol_type = other DNA

SEQ ID NO: 67290 - DNA, 120 bp, synthetic construct; identical to SEQ ID NO: 37336
  source 1..120: mol_type = other DNA

SEQ ID NO: 67291 - DNA, 120 bp, synthetic construct; identical to SEQ ID NO: 37337
  source 1..120: mol_type = other DNA

SEQ ID NO: 67292 - DNA, 120 bp, synthetic construct; identical to SEQ ID NO: 10791
  source 1..120: mol_type = other DNA

SEQ ID NO: 67293 - DNA, 120 bp, synthetic construct; identical to SEQ ID NO: 37339
  source 1..120: mol_type = other DNA

SEQ ID NO: 67294 - DNA, 120 bp, synthetic construct; identical to SEQ ID NO: 37340
  source 1..120: mol_type = other DNA

SEQ ID NO: 67295 - DNA, 120 bp, synthetic construct; identical to SEQ ID NO: 37341
  source 1..120: mol_type = other DNA

SEQ ID NO: 67296 - DNA, 120 bp, synthetic construct; identical to SEQ ID NO: 37342
  source 1..120: mol_type = other DNA

SEQ ID NO: 67297 - DNA, 120 bp, synthetic construct; identical to SEQ ID NO: 10792
  source 1..120: mol_type = other DNA

SEQ ID NO: 67298 - DNA, 120 bp, synthetic construct; identical to SEQ ID NO: 37344
  source 1..120: mol_type = other DNA

SEQ ID NO: 67299 - DNA, 120 bp, synthetic construct; identical to SEQ ID NO: 37345
  source 1..120: mol_type = other DNA

SEQ ID NO: 67300 - DNA, 120 bp, synthetic construct; identical to SEQ ID NO: 10793
  source 1..120: mol_type = other DNA

SEQ ID NO: 67301 - DNA, 120 bp, synthetic construct; identical to SEQ ID NO: 37347
  source 1..120: mol_type = other DNA

SEQ ID NO: 67302 - DNA, 120 bp, synthetic construct; identical to SEQ ID NO: 37348
  source 1..120: mol_type = other DNA

SEQ ID NO: 67303 - DNA, 120 bp, synthetic construct; identical to SEQ ID NO: 37349
  source 1..120: mol_type = other DNA

SEQ ID NO: 67304 - DNA, 120 bp, synthetic construct; identical to SEQ ID NO: 37350
  source 1..120: mol_type = other DNA

SEQ ID NO: 67305 - DNA, 120 bp, synthetic construct; identical to SEQ ID NO: 10794
  source 1..120: mol_type = other DNA

SEQ ID NO: 67306 - DNA, 120 bp, synthetic construct; identical to SEQ ID NO: 37352
  source 1..120: mol_type = other DNA

SEQ ID NO: 67307 - DNA, 120 bp, synthetic construct; identical to SEQ ID NO: 37353
  source 1..120: mol_type = other DNA

SEQ ID NO: 67308 - DNA, 120 bp, synthetic construct; identical to SEQ ID NO: 10795
  source 1..120: mol_type = other DNA

SEQ ID NO: 67309 - DNA, 120 bp, synthetic construct; identical to SEQ ID NO: 37355
  source 1..120: mol_type = other DNA

SEQ ID NO: 67310 - DNA, 120 bp, synthetic construct; identical to SEQ ID NO: 37356
  source 1..120: mol_type = other DNA

SEQ ID NO: 67311 - DNA, 120 bp, synthetic construct; identical to SEQ ID NO: 37357
  source 1..120: mol_type = other DNA

SEQ ID NO: 67312 - DNA, 120 bp, synthetic construct; identical to SEQ ID NO: 10796
  source 1..120: mol_type = other DNA

SEQ ID NO: 67313 - DNA, 120 bp, synthetic construct; identical to SEQ ID NO: 37359
  source 1..120: mol_type = other DNA

SEQ ID NO: 67314 - DNA, 120 bp, synthetic construct; identical to SEQ ID NO: 37360
  source 1..120: mol_type = other DNA

SEQ ID NO: 67315 - DNA, 120 bp, synthetic construct; identical to SEQ ID NO: 37361
  source 1..120: mol_type = other DNA

SEQ ID NO: 67316 - DNA, 120 bp, synthetic construct; identical to SEQ ID NO: 10797
  source 1..120: mol_type = other DNA

SEQ ID NO: 67317 - DNA, 120 bp, synthetic construct; identical to SEQ ID NO: 37363
  source 1..120: mol_type = other DNA

SEQ ID NO: 67318 - DNA, 120 bp, synthetic construct; identical to SEQ ID NO: 37364
  source 1..120: mol_type = other DNA

SEQ ID NO: 67319 - DNA, 120 bp, synthetic construct; identical to SEQ ID NO: 37365
  source 1..120: mol_type = other DNA

SEQ ID NO: 67320 - DNA, 120 bp, synthetic construct; identical to SEQ ID NO: 10798
  source 1..120: mol_type = other DNA

SEQ ID NO: 67321 - DNA, 120 bp, synthetic construct; identical to SEQ ID NO: 37367
  source 1..120: mol_type = other DNA

SEQ ID NO: 67322 - DNA, 120 bp, synthetic construct; identical to SEQ ID NO: 37368
  source 1..120: mol_type = other DNA

SEQ ID NO: 67323 - DNA, 120 bp, synthetic construct; identical to SEQ ID NO: 37369
  source 1..120: mol_type = other DNA

SEQ ID NO: 67324 - DNA, 120 bp, synthetic construct; identical to SEQ ID NO: 37370
  source 1..120: mol_type = other DNA

SEQ ID NO: 67325 - DNA, 120 bp, synthetic construct; identical to SEQ ID NO: 10799
  source 1..120: mol_type = other DNA

SEQ ID NO: 67326 - DNA, 120 bp, synthetic construct; identical to SEQ ID NO: 37372
  source 1..120: mol_type = other DNA

SEQ ID NO: 67327 - DNA, 120 bp, synthetic construct; identical to SEQ ID NO: 37373
  source 1..120: mol_type = other DNA

SEQ ID NO: 67328 - DNA, 120 bp, synthetic construct; identical to SEQ ID NO: 37374
  source 1..120: mol_type = other DNA

SEQ ID NO: 67329 - DNA, 120 bp, synthetic construct; identical to SEQ ID NO: 10800
  source 1..120: mol_type = other DNA

SEQ ID NO: 67330 - DNA, 120 bp, synthetic construct; identical to SEQ ID NO: 37376
  source 1..120: mol_type = other DNA

SEQ ID NO: 67331 - DNA, 120 bp, synthetic construct; identical to SEQ ID NO: 37377
  source 1..120: mol_type = other DNA

SEQ ID NO: 67332 - DNA, 120 bp, synthetic construct; identical to SEQ ID NO: 10801
  source 1..120: mol_type = other DNA

SEQ ID NO: 67333 - DNA, 120 bp, synthetic construct; identical to SEQ ID NO: 37379
  source 1..120: mol_type = other DNA

SEQ ID NO: 67334 - DNA, 120 bp, synthetic construct; identical to SEQ ID NO: 37380
  source 1..120: mol_type = other DNA

SEQ ID NO: 67335 - DNA, 120 bp, synthetic construct; identical to SEQ ID NO: 37381
  source 1..120: mol_type = other DNA

SEQ ID NO: 67336 - DNA, 120 bp, synthetic construct; identical to SEQ ID NO: 10802
  source 1..120: mol_type = other DNA

SEQ ID NO: 67337 - DNA, 120 bp, synthetic construct; identical to SEQ ID NO: 37383
  source 1..120: mol_type = other DNA

SEQ ID NO: 67338 - DNA, 120 bp, synthetic construct; identical to SEQ ID NO: 37384
  source 1..120: mol_type = other DNA

SEQ ID NO: 67339 - DNA, 120 bp, synthetic construct; identical to SEQ ID NO: 37385
  source 1..120: mol_type = other DNA

SEQ ID NO: 67340 - DNA, 120 bp, synthetic construct; identical to SEQ ID NO: 37386
  source 1..120: mol_type = other DNA

SEQ ID NO: 67341 - DNA, 120 bp, synthetic construct; identical to SEQ ID NO: 10803
  source 1..120: mol_type = other DNA

SEQ ID NO: 67342 - DNA, 120 bp, synthetic construct; identical to SEQ ID NO: 37388
  source 1..120: mol_type = other DNA

SEQ ID NO: 67343 - DNA, 120 bp, synthetic construct; identical to SEQ ID NO: 37389
  source 1..120: mol_type = other DNA

SEQ ID NO: 67344 - DNA, 120 bp, synthetic construct; identical to SEQ ID NO: 10804
  source 1..120: mol_type = other DNA

SEQ ID NO: 67345 - DNA, 120 bp, synthetic construct; identical to SEQ ID NO: 37391
  source 1..120: mol_type = other DNA

SEQ ID NO: 67346 - DNA, 120 bp, synthetic construct; identical to SEQ ID NO: 37392
  source 1..120: mol_type = other DNA

SEQ ID NO: 67347 - DNA, 120 bp, synthetic construct; identical to SEQ ID NO: 37393
  source 1..120: mol_type = other DNA

SEQ ID NO: 67348 - DNA, 120 bp, synthetic construct; identical to SEQ ID NO: 10805
  source 1..120: mol_type = other DNA

SEQ ID NO: 67349 - DNA, 120 bp, synthetic construct; identical to SEQ ID NO: 37395
  source 1..120: mol_type = other DNA

SEQ ID NO: 67350 - DNA, 120 bp, synthetic construct; identical to SEQ ID NO: 37396
  source 1..120: mol_type = other DNA

SEQ ID NO: 67351 - DNA, 120 bp, synthetic construct; identical to SEQ ID NO: 37397
  source 1..120: mol_type = other DNA

SEQ ID NO: 67352 - DNA, 120 bp, synthetic construct; identical to SEQ ID NO: 37398
  source 1..120: mol_type = other DNA

SEQ ID NO: 67353 - DNA, 120 bp, synthetic construct; identical to SEQ ID NO: 10806
  source 1..120: mol_type = other DNA

SEQ ID NO: 67354 - DNA, 120 bp, synthetic construct; identical to SEQ ID NO: 37400
  source 1..120: mol_type = other DNA

SEQ ID NO: 67355 - DNA, 120 bp, synthetic construct; identical to SEQ ID NO: 37401
  source 1..120: mol_type = other DNA

SEQ ID NO: 67356 - DNA, 120 bp, synthetic construct; identical to SEQ ID NO: 37402
  source 1..120: mol_type = other DNA

SEQ ID NO: 67357 - DNA, 120 bp, synthetic construct; identical to SEQ ID NO: 10807
  source 1..120: mol_type = other DNA

SEQ ID NO: 67358 - DNA, 120 bp, synthetic construct; identical to SEQ ID NO: 37404
  source 1..120: mol_type = other DNA

SEQ ID NO: 67359 - DNA, 120 bp, synthetic construct; identical to SEQ ID NO: 37405
  source 1..120: mol_type = other DNA

SEQ ID NO: 67360 - DNA, 120 bp, synthetic construct; identical to SEQ ID NO: 10808
  source 1..120: mol_type = other DNA

SEQ ID NO: 67361 - DNA, 120 bp, synthetic construct; identical to SEQ ID NO: 37407
  source 1..120: mol_type = other DNA

SEQ ID NO: 67362 - DNA, 120 bp, synthetic construct; identical to SEQ ID NO: 37408
  source 1..120: mol_type = other DNA

SEQ ID NO: 67363 - DNA, 120 bp, synthetic construct; identical to SEQ ID NO: 37409
  source 1..120: mol_type = other DNA

SEQ ID NO: 67364 - DNA, 120 bp, synthetic construct; identical to SEQ ID NO: 10809
  source 1..120: mol_type = other DNA

SEQ ID NO: 67365 - DNA, 120 bp, synthetic construct; identical to SEQ ID NO: 37411
  source 1..120: mol_type = other DNA

SEQ ID NO: 67366 - DNA, 120 bp, synthetic construct; identical to SEQ ID NO: 37412
  source 1..120: mol_type = other DNA

SEQ ID NO: 67367 - DNA, 120 bp, synthetic construct; identical to SEQ ID NO: 37413
  source 1..120: mol_type = other DNA

SEQ ID NO: 67368 - DNA, 120 bp, synthetic construct; identical to SEQ ID NO: 37414
  source 1..120: mol_type = other DNA

SEQ ID NO: 67369 - DNA, 120 bp, synthetic construct; identical to SEQ ID NO: 10810
  source 1..120: mol_type = other DNA

SEQ ID NO: 67370 - DNA, 120 bp, synthetic construct; identical to SEQ ID NO: 37416
  source 1..120: mol_type = other DNA

SEQ ID NO: 67371 - DNA, 120 bp, synthetic construct; identical to SEQ ID NO: 37417
  source 1..120: mol_type = other DNA

SEQ ID NO: 67372 - DNA, 120 bp, synthetic construct; identical to SEQ ID NO: 10811
  source 1..120: mol_type = other DNA

SEQ ID NO: 67373 - DNA, 120 bp, synthetic construct; identical to SEQ ID NO: 37419
  source 1..120: mol_type = other DNA

SEQ ID NO: 67374 - DNA, 120 bp, synthetic construct; identical to SEQ ID NO: 37420
  source 1..120: mol_type = other DNA

SEQ ID NO: 67375 - DNA, 120 bp, synthetic construct; identical to SEQ ID NO: 37421
  source 1..120: mol_type = other DNA

SEQ ID NO: 67376 - DNA, 120 bp, synthetic construct; identical to SEQ ID NO: 37422
  source 1..120: mol_type = other DNA

SEQ ID NO: 67377 - DNA, 120 bp, synthetic construct; identical to SEQ ID NO: 10812
  source 1..120: mol_type = other DNA

SEQ ID NO: 67378 - DNA, 120 bp, synthetic construct; identical to SEQ ID NO: 37424
  source 1..120: mol_type = other DNA

SEQ ID NO: 67379 - DNA, 120 bp, synthetic construct; identical to SEQ ID NO: 37425
  source 1..120: mol_type = other DNA

SEQ ID NO: 67380 - DNA, 120 bp, synthetic construct; identical to SEQ ID NO: 37426
  source 1..120: mol_type = other DNA

SEQ ID NO: 67381 - DNA, 120 bp, synthetic construct; identical to SEQ ID NO: 10813
  source 1..120: mol_type = other DNA

SEQ ID NO: 67382 - DNA, 120 bp, synthetic construct; identical to SEQ ID NO: 37428
  source 1..120: mol_type = other DNA

SEQ ID NO: 67383 - DNA, 120 bp, synthetic construct; identical to SEQ ID NO: 37429
  source 1..120: mol_type = other DNA

SEQ ID NO: 67384 - DNA, 120 bp, synthetic construct; identical to SEQ ID NO: 37430
  source 1..120: mol_type = other DNA

SEQ ID NO: 67385 - DNA, 120 bp, synthetic construct; identical to SEQ ID NO: 10814
  source 1..120: mol_type = other DNA

SEQ ID NO: 67386 - DNA, 120 bp, synthetic construct; identical to SEQ ID NO: 37432
  source 1..120: mol_type = other DNA

SEQ ID NO: 67387 - DNA, 120 bp, synthetic construct; identical to SEQ ID NO: 37433
  source 1..120: mol_type = other DNA

SEQ ID NO: 67388 - DNA, 120 bp, synthetic construct; identical to SEQ ID NO: 10815
  source 1..120: mol_type = other DNA

SEQ ID NO: 67389 - DNA, 120 bp, synthetic construct; identical to SEQ ID NO: 37435
  source 1..120: mol_type = other DNA

SEQ ID NO: 67390 - DNA, 120 bp, synthetic construct; identical to SEQ ID NO: 37436
  source 1..120: mol_type = other DNA

SEQ ID NO: 67391 - DNA, 120 bp, synthetic construct; identical to SEQ ID NO: 37437
  source 1..120: mol_type = other DNA

SEQ ID NO: 67392 - DNA, 120 bp, synthetic construct; identical to SEQ ID NO: 10816
  source 1..120: mol_type = other DNA

SEQ ID NO: 67393 - DNA, 120 bp, synthetic construct; identical to SEQ ID NO: 3588
  source 1..120: mol_type = other DNA

SEQ ID NO: 67394 - DNA, 120 bp, synthetic construct; identical to SEQ ID NO: 37440
  source 1..120: mol_type = other DNA

SEQ ID NO: 67395 - DNA, 120 bp, synthetic construct; identical to SEQ ID NO: 37441
  source 1..120: mol_type = other DNA

SEQ ID NO: 67396 - DNA, 120 bp, synthetic construct; identical to SEQ ID NO: 10817
  source 1..120: mol_type = other DNA

SEQ ID NO: 67397 - DNA, 120 bp, synthetic construct; identical to SEQ ID NO: 37443
  source 1..120: mol_type = other DNA

SEQ ID NO: 67398 - DNA, 120 bp, synthetic construct; identical to SEQ ID NO: 37444
  source 1..120: mol_type = other DNA

SEQ ID NO: 67399 - DNA, 120 bp, synthetic construct; identical to SEQ ID NO: 37445
  source 1..120: mol_type = other DNA

SEQ ID NO: 67400 - DNA, 120 bp, synthetic construct; identical to SEQ ID NO: 10818
  source 1..120: mol_type = other DNA

SEQ ID NO: 67401 - DNA, 120 bp, synthetic construct; identical to SEQ ID NO: 37447
  source 1..120: mol_type = other DNA

SEQ ID NO: 67402 - DNA, 120 bp, synthetic construct; identical to SEQ ID NO: 37448
  source 1..120: mol_type = other DNA

SEQ ID NO: 67403 - DNA, 120 bp, synthetic construct; identical to SEQ ID NO: 37449
  source 1..120: mol_type = other DNA

SEQ ID NO: 67404 - DNA, 120 bp, synthetic construct; identical to SEQ ID NO: 10819
  source 1..120: mol_type = other DNA

SEQ ID NO: 67405 - DNA, 120 bp, synthetic construct; identical to SEQ ID NO: 37451
  source 1..120: mol_type = other DNA

SEQ ID NO: 67406 - DNA, 120 bp, synthetic construct; identical to SEQ ID NO: 37452
  source 1..120: mol_type = other DNA

SEQ ID NO: 67407 - DNA, 120 bp, synthetic construct; identical to SEQ ID NO: 37453
  source 1..120: mol_type = other DNA

SEQ ID NO: 67408 - DNA, 120 bp, synthetic construct; identical to SEQ ID NO: 37454
  source 1..120: mol_type = other DNA

SEQ ID NO: 67409 - DNA, 120 bp, synthetic construct; identical to SEQ ID NO: 10820
  source 1..120: mol_type = other DNA

SEQ ID NO: 67410 - DNA, 120 bp, synthetic construct; identical to SEQ ID NO: 37456
  source 1..120: mol_type = other DNA

SEQ ID NO: 67411 - DNA, 120 bp, synthetic construct; identical to SEQ ID NO: 37457
  source 1..120: mol_type = other DNA

SEQ ID NO: 67412 - DNA, 120 bp, synthetic construct; identical to SEQ ID NO: 37458
  source 1..120: mol_type = other DNA

SEQ ID NO: 67413 - DNA, 120 bp, synthetic construct; identical to SEQ ID NO: 10821
  source 1..120: mol_type = other DNA

SEQ ID NO: 67414 - DNA, 120 bp, synthetic construct; identical to SEQ ID NO: 37460
  source 1..120: mol_type = other DNA

SEQ ID NO: 67415 - DNA, 120 bp, synthetic construct; identical to SEQ ID NO: 37461
  source 1..120: mol_type = other DNA

SEQ ID NO: 67416 - DNA, 120 bp, synthetic construct; identical to SEQ ID NO: 37462
  source 1..120: mol_type = other DNA

SEQ ID NO: 67417 - DNA, 120 bp, synthetic construct; identical to SEQ ID NO: 10822
  source 1..120: mol_type = other DNA

SEQ ID NO: 67418 - DNA, 120 bp, synthetic construct; identical to SEQ ID NO: 37464
  source 1..120: mol_type = other DNA

SEQ ID NO: 67419 - DNA, 120 bp, synthetic construct; identical to SEQ ID NO: 37465
  source 1..120: mol_type = other DNA

SEQ ID NO: 67420 - DNA, 120 bp, synthetic construct; identical to SEQ ID NO: 10823
  source 1..120: mol_type = other DNA

SEQ ID NO: 67421 - DNA, 120 bp, synthetic construct; identical to SEQ ID NO: 37467
  source 1..120: mol_type = other DNA

SEQ ID NO: 67422 - DNA, 120 bp, synthetic construct; identical to SEQ ID NO: 37468
  source 1..120: mol_type = other DNA

SEQ ID NO: 67423 - DNA, 120 bp, synthetic construct; identical to SEQ ID NO: 37469
  source 1..120: mol_type = other DNA

SEQ ID NO: 67424 - DNA, 120 bp, synthetic construct; identical to SEQ ID NO: 37470
  source 1..120: mol_type = other DNA

SEQ ID NO: 67425 - DNA, 120 bp, synthetic construct; identical to SEQ ID NO: 10824
  source 1..120: mol_type = other DNA

SEQ ID NO: 67426 - DNA, 120 bp, synthetic construct; identical to SEQ ID NO: 37472
  source 1..120: mol_type = other DNA

SEQ ID NO: 67427 - DNA, 120 bp, synthetic construct; identical to SEQ ID NO: 37473
  source 1..120: mol_type = other DNA

SEQ ID NO: 67428 - DNA, 120 bp, synthetic construct; identical to SEQ ID NO: 37474
  source 1..120: mol_type = other DNA

SEQ ID NO: 67429 - DNA, 120 bp, synthetic construct; identical to SEQ ID NO: 10825
  source 1..120: mol_type = other DNA

SEQ ID NO: 67430 - DNA, 120 bp, synthetic construct; identical to SEQ ID NO: 37476
  source 1..120: mol_type = other DNA

SEQ ID NO: 67431 - DNA, 120 bp, synthetic construct; identical to SEQ ID NO: 37477
  source 1..120: mol_type = other DNA

SEQ ID NO: 67432 - DNA, 120 bp, synthetic construct; identical to SEQ ID NO: 10826
  source 1..120: mol_type = other DNA

SEQ ID NO: 67433 - DNA, 120 bp, synthetic construct; identical to SEQ ID NO: 37479
  source 1..120: mol_type = other DNA

SEQ ID NO: 67434 - DNA, 120 bp, synthetic construct; identical to SEQ ID NO: 37480
  source 1..120: mol_type = other DNA

SEQ ID NO: 67435 - DNA, 120 bp, synthetic construct; identical to SEQ ID NO: 37481
  source 1..120: mol_type = other DNA

SEQ ID NO: 67436 - DNA, 120 bp, synthetic construct; identical to SEQ ID NO: 37482
  source 1..120: mol_type = other DNA

SEQ ID NO: 67437 - DNA, 120 bp, synthetic construct; identical to SEQ ID NO: 10827
  source 1..120: mol_type = other DNA

SEQ ID NO: 67438 - DNA, 120 bp, synthetic construct; identical to SEQ ID NO: 37484
  source 1..120: mol_type = other DNA

SEQ ID NO: 67439 - DNA, 120 bp, synthetic construct; identical to SEQ ID NO: 37485
  source 1..120: mol_type = other DNA

SEQ ID NO: 67440 - DNA, 120 bp, synthetic construct; identical to SEQ ID NO: 37486
  source 1..120: mol_type = other DNA

SEQ ID NO: 67441 - DNA, 120 bp, synthetic construct; identical to SEQ ID NO: 10828
  source 1..120: mol_type = other DNA

SEQ ID NO: 67442 - DNA, 120 bp, synthetic construct; identical to SEQ ID NO: 37488
  source 1..120: mol_type = other DNA

SEQ ID NO: 67443 - DNA, 120 bp, synthetic construct; identical to SEQ ID NO: 37489
  source 1..120: mol_type = other DNA

SEQ ID NO: 67444 - DNA, 120 bp, synthetic construct; identical to SEQ ID NO: 37490
  source 1..120: mol_type = other DNA

SEQ ID NO: 67445 - DNA, 120 bp, synthetic construct; identical to SEQ ID NO: 10829
  source 1..120: mol_type = other DNA

SEQ ID NO: 67446 - DNA, 120 bp, synthetic construct; identical to SEQ ID NO: 37492
  source 1..120: mol_type = other DNA

SEQ ID NO: 67447 - DNA, 120 bp, synthetic construct; identical to SEQ ID NO: 37493
  source 1..120: mol_type = other DNA

SEQ ID NO: 67448 - DNA, 120 bp, synthetic construct; identical to SEQ ID NO: 37494
  source 1..120: mol_type = other DNA

SEQ ID NO: 67449 - DNA, 120 bp, synthetic construct; identical to SEQ ID NO: 10830
  source 1..120: mol_type = other DNA

SEQ ID NO: 67450 - DNA, 120 bp, synthetic construct; identical to SEQ ID NO: 37496
  source 1..120: mol_type = other DNA

SEQ ID NO: 67451 - DNA, 120 bp, synthetic construct; identical to SEQ ID NO: 37497
  source 1..120: mol_type = other DNA

SEQ ID NO: 67452 - DNA, 120 bp, synthetic construct; identical to SEQ ID NO: 37498
  source 1..120: mol_type = other DNA

SEQ ID NO: 67453 - DNA, 120 bp, synthetic construct; identical to SEQ ID NO: 10831
  source 1..120: mol_type = other DNA

SEQ ID NO: 67454 - DNA, 120 bp, synthetic construct; identical to SEQ ID NO: 37500
  source 1..120: mol_type = other DNA

SEQ ID NO: 67455 - DNA, 120 bp, synthetic construct; identical to SEQ ID NO: 37501
  source 1..120: mol_type = other DNA

SEQ ID NO: 67456 - DNA, 120 bp, synthetic construct; identical to SEQ ID NO: 10832
  source 1..120: mol_type = other DNA

SEQ ID NO: 67457 - DNA, 120 bp, synthetic construct; identical to SEQ ID NO: 37503
  source 1..120: mol_type = other DNA

SEQ ID NO: 67458 - DNA, 120 bp, synthetic construct; identical to SEQ ID NO: 37504
  source 1..120: mol_type = other DNA

SEQ ID NO: 67459 - DNA, 120 bp, synthetic construct; identical to SEQ ID NO: 37505
  source 1..120: mol_type = other DNA

SEQ ID NO: 67460 - DNA, 120 bp, synthetic construct; identical to SEQ ID NO: 37506
  source 1..120: mol_type = other DNA

SEQ ID NO: 67461 - DNA, 120 bp, synthetic construct; identical to SEQ ID NO: 10833
  source 1..120: mol_type = other DNA

SEQ ID NO: 67462 - DNA, 120 bp, synthetic construct; identical to SEQ ID NO: 37508
  source 1..120: mol_type = other DNA

SEQ ID NO: 67463 - DNA, 120 bp, synthetic construct; identical to SEQ ID NO: 37509
  source 1..120: mol_type = other DNA

SEQ ID NO: 67464 - DNA, 120 bp, synthetic construct; identical to SEQ ID NO: 37510
  source 1..120: mol_type = other DNA

SEQ ID NO: 67465 - DNA, 120 bp, synthetic construct; identical to SEQ ID NO: 10834
  source 1..120: mol_type = other DNA

SEQ ID NO: 67466 - DNA, 120 bp, synthetic construct; identical to SEQ ID NO: 37512
  source 1..120: mol_type = other DNA

SEQ ID NO: 67467 - DNA, 120 bp, synthetic construct; identical to SEQ ID NO: 37513
  source 1..120: mol_type = other DNA

SEQ ID NO: 67468 - DNA, 120 bp, synthetic construct; identical to SEQ ID NO: 37514
  source 1..120: mol_type = other DNA

SEQ ID NO: 67469 - DNA, 120 bp, synthetic construct; identical to SEQ ID NO: 10835
  source 1..120: mol_type = other DNA

SEQ ID NO: 67470 - DNA, 120 bp, synthetic construct; identical to SEQ ID NO: 37516
  source 1..120: mol_type = other DNA

SEQ ID NO: 67471 - DNA, 120 bp, synthetic construct; identical to SEQ ID NO: 37517
  source 1..120: mol_type = other DNA

SEQ ID NO: 67472 - DNA, 120 bp, synthetic construct; identical to SEQ ID NO: 10836
  source 1..120: mol_type = other DNA

SEQ ID NO: 67473 - DNA, 120 bp, synthetic construct; identical to SEQ ID NO: 37519
  source 1..120: mol_type = other DNA

SEQ ID NO: 67474 - DNA, 120 bp, synthetic construct; identical to SEQ ID NO: 37520
  source 1..120: mol_type = other DNA

SEQ ID NO: 67475 - DNA, 120 bp, synthetic construct; identical to SEQ ID NO: 37521
  source 1..120: mol_type = other DNA

SEQ ID NO: 67476 - DNA, 120 bp, synthetic construct; identical to SEQ ID NO: 10837
  source 1..120: mol_type = other DNA

SEQ ID NO: 67477 - DNA, 120 bp, synthetic construct; identical to SEQ ID NO: 37523
  source 1..120: mol_type = other DNA

SEQ ID NO: 67478 - DNA, 120 bp, synthetic construct; identical to SEQ ID NO: 37524
  source 1..120: mol_type = other DNA

SEQ ID NO: 67479 - DNA, 120 bp, synthetic construct; identical to SEQ ID NO: 37525
  source 1..120: mol_type = other DNA

SEQ ID NO: 67480 - DNA, 120 bp, synthetic construct; identical to SEQ ID NO: 37526
  source 1..120: mol_type = other DNA

SEQ ID NO: 67481 - DNA, 120 bp, synthetic construct; identical to SEQ ID NO: 10838
  source 1..120: mol_type = other DNA

SEQ ID NO: 67482 - DNA, 120 bp, synthetic construct; identical to SEQ ID NO: 37528
  source 1..120: mol_type = other DNA

SEQ ID NO: 67483 - DNA, 120 bp, synthetic construct; identical to SEQ ID NO: 37529
  source 1..120: mol_type = other DNA

SEQ ID NO: 67484 - DNA, 120 bp, synthetic construct; identical to SEQ ID NO: 10839
  source 1..120: mol_type = other DNA

SEQ ID NO: 67485 - DNA, 120 bp, synthetic construct; identical to SEQ ID NO: 37531
  source 1..120: mol_type = other DNA

SEQ ID NO: 67486 - DNA, 120 bp, synthetic construct; identical to SEQ ID NO: 37532
  source 1..120: mol_type = other DNA

SEQ ID NO: 67487 - DNA, 120 bp, synthetic construct; identical to SEQ ID NO: 37533
  source 1..120: mol_type = other DNA

SEQ ID NO: 67488 - DNA, 120 bp, synthetic construct; identical to SEQ ID NO: 10840
  source 1..120: mol_type = other DNA

SEQ ID NO: 67489 - DNA, 120 bp, synthetic construct; identical to SEQ ID NO: 37535
  source 1..120: mol_type = other DNA

SEQ ID NO: 67490 - DNA, 120 bp, synthetic construct; identical to SEQ ID NO: 37536
  source 1..120: mol_type = other DNA

SEQ ID NO: 67491 - DNA, 120 bp, synthetic construct; identical to SEQ ID NO: 37537
  source 1..120: mol_type = other DNA

SEQ ID NO: 67492 - DNA, 120 bp, synthetic construct; identical to SEQ ID NO: 10841
  source 1..120: mol_type = other DNA

SEQ ID NO: 67493 - DNA, 120 bp, synthetic construct; identical to SEQ ID NO: 37539
  source 1..120: mol_type = other DNA

SEQ ID NO: 67494 - DNA, 120 bp, synthetic construct; identical to SEQ ID NO: 37540
  source 1..120: mol_type = other DNA

SEQ ID NO: 67495 - DNA, 120 bp, synthetic construct; identical to SEQ ID NO: 37541
  source 1..120: mol_type = other DNA

SEQ ID NO: 67496 - DNA, 120 bp, synthetic construct; identical to SEQ ID NO: 10842
  source 1..120: mol_type = other DNA

SEQ ID NO: 67497 - DNA, 120 bp, synthetic construct; identical to SEQ ID NO: 37543
  source 1..120: mol_type = other DNA

SEQ ID NO: 67498 - DNA, 120 bp, synthetic construct; identical to SEQ ID NO: 37544
  source 1..120: mol_type = other DNA

SEQ ID NO: 67499 - DNA, 120 bp, synthetic construct; identical to SEQ ID NO: 37545
  source 1..120: mol_type = other DNA

SEQ ID NO: 67500 - DNA, 120 bp, synthetic construct; identical to SEQ ID NO: 10843
  source 1..120: mol_type = other DNA

SEQ ID NO: 67501 - DNA, 120 bp, synthetic construct; identical to SEQ ID NO: 37547
  source 1..120: mol_type = other DNA

SEQ ID NO: 67502 - DNA, 120 bp, synthetic construct; identical to SEQ ID NO: 37548
  source 1..120: mol_type = other DNA

SEQ ID NO: 67503 - DNA, 120 bp, synthetic construct; identical to SEQ ID NO: 37549
  source 1..120: mol_type = other DNA

SEQ ID NO: 67504 - DNA, 120 bp, synthetic construct; identical to SEQ ID NO: 10844
  source 1..120: mol_type = other DNA

SEQ ID NO: 67505 - DNA, 120 bp, synthetic construct; identical to SEQ ID NO: 37551
  source 1..120: mol_type = other DNA

SEQ ID NO: 67506 - DNA, 120 bp, synthetic construct; identical to SEQ ID NO: 37552
  source 1..120: mol_type = other DNA

SEQ ID NO: 67507 - DNA, 120 bp, synthetic construct; identical to SEQ ID NO: 37553
  source 1..120: mol_type = other DNA

SEQ ID NO: 67508 - DNA, 120 bp, synthetic construct; identical to SEQ ID NO: 37554
  source 1..120: mol_type = other DNA

SEQ ID NO: 67509 - DNA, 120 bp, synthetic construct; identical to SEQ ID NO: 10845
  source 1..120: mol_type = other DNA

SEQ ID NO: 67510 - DNA, 120 bp, synthetic construct; identical to SEQ ID NO: 37556
  source 1..120: mol_type = other DNA

SEQ ID NO: 67511 - DNA, 120 bp, synthetic construct; identical to SEQ ID NO: 37557
  source 1..120: mol_type = other DNA

SEQ ID NO: 67512 - DNA, 120 bp, synthetic construct; identical to SEQ ID NO: 10846
  source 1..120: mol_type = other DNA

SEQ ID NO: 67513 - DNA, 120 bp, synthetic construct; identical to SEQ ID NO: 37559
  source 1..120: mol_type = other DNA

SEQ ID NO: 67514 - DNA, 120 bp, synthetic construct; identical to SEQ ID NO: 37560
  source 1..120: mol_type = other DNA

SEQ ID NO: 67515 - DNA, 120 bp, synthetic construct; identical to SEQ ID NO: 37561
  source 1..120: mol_type = other DNA

SEQ ID NO: 67516 - DNA, 120 bp, synthetic construct; identical to SEQ ID NO: 10847
  source 1..120: mol_type = other DNA

SEQ ID NO: 67517 - DNA, 120 bp, synthetic construct; identical to SEQ ID NO: 37563
  source 1..120: mol_type = other DNA

SEQ ID NO: 67518 - DNA, 120 bp, synthetic construct; identical to SEQ ID NO: 37564
  source 1..120: mol_type = other DNA

SEQ ID NO: 67519 - DNA, 120 bp, synthetic construct; identical to SEQ ID NO: 37565
  source 1..120: mol_type = other DNA

SEQ ID NO: 67520 - DNA, 120 bp, synthetic construct; identical to SEQ ID NO: 10848
  source 1..120: mol_type = other DNA

SEQ ID NO: 67521 - DNA, 120 bp, synthetic construct; identical to SEQ ID NO: 37567
  source 1..120: mol_type = other DNA

SEQ ID NO: 67522 - DNA, 120 bp, synthetic construct; identical to SEQ ID NO: 37568
  source 1..120: mol_type = other DNA

SEQ ID NO: 67523 - DNA, 120 bp, synthetic construct; identical to SEQ ID NO: 37569
  source 1..120: mol_type = other DNA

SEQ ID NO: 67524 - DNA, 120 bp, synthetic construct; identical to SEQ ID NO: 10849
  source 1..120: mol_type = other DNA

SEQ ID NO: 67525 - DNA, 120 bp, synthetic construct; identical to SEQ ID NO: 37571
  source 1..120: mol_type = other DNA

SEQ ID NO: 67526 - DNA, 120 bp, synthetic construct; identical to SEQ ID NO: 37572
  source 1..120: mol_type = other DNA

SEQ ID NO: 67527 - DNA, 120 bp, synthetic construct; identical to SEQ ID NO: 37573
  source 1..120: mol_type = other DNA

SEQ ID NO: 67528 - DNA, 120 bp, synthetic construct; identical to SEQ ID NO: 10850
  source 1..120: mol_type = other DNA

SEQ ID NO: 67529 - DNA, 120 bp, synthetic construct; identical to SEQ ID NO: 37575
  source 1..120: mol_type = other DNA

SEQ ID NO: 67530 - DNA, 120 bp, synthetic construct; identical to SEQ ID NO: 37576
  source 1..120: mol_type = other DNA

SEQ ID NO: 67531 - DNA, 120 bp, synthetic construct; identical to SEQ ID NO: 37577
  source 1..120: mol_type = other DNA

SEQ ID NO: 67532 - DNA, 120 bp, synthetic construct; identical to SEQ ID NO: 10851
  source 1..120: mol_type = other DNA

SEQ ID NO: 67533 - DNA, 120 bp, synthetic construct; identical to SEQ ID NO: 37579
  source 1..120: mol_type = other DNA

SEQ ID NO: 67534 - DNA, 120 bp, synthetic construct; identical to SEQ ID NO: 37580
  source 1..120: mol_type = other DNA

SEQ ID NO: 67535 - DNA, 120 bp, synthetic construct; identical to SEQ ID NO: 37581
  source 1..120: mol_type = other DNA

SEQ ID NO: 67536 - DNA, 120 bp, synthetic construct; identical to SEQ ID NO: 37582
  source 1..120: mol_type = other DNA

SEQ ID NO: 67537 - DNA, 120 bp, synthetic construct; identical to SEQ ID NO: 10852
  source 1..120: mol_type = other DNA

SEQ ID NO: 67538 - DNA, 120 bp, synthetic construct; identical to SEQ ID NO: 37584
  source 1..120: mol_type = other DNA

SEQ ID NO: 67539 - DNA, 120 bp, synthetic construct; identical to SEQ ID NO: 37585
  source 1..120: mol_type = other DNA

SEQ ID NO: 67540 - DNA, 120 bp, synthetic construct; identical to SEQ ID NO: 10853
  source 1..120: mol_type = other DNA

SEQ ID NO: 67541 - DNA, 120 bp, synthetic construct; identical to SEQ ID NO: 37587
  source 1..120: mol_type = other DNA

SEQ ID NO: 67542 - DNA, 120 bp, synthetic construct; identical to SEQ ID NO: 37588
  source 1..120: mol_type = other DNA

SEQ ID NO: 67543 - DNA, 120 bp, synthetic construct; identical to SEQ ID NO: 37589
  source 1..120: mol_type = other DNA

SEQ ID NO: 67544 - DNA, 120 bp, synthetic construct; identical to SEQ ID NO: 10854
  source 1..120: mol_type = other DNA

SEQ ID NO: 67545 - DNA, 120 bp, synthetic construct; identical to SEQ ID NO: 37591
  source 1..120: mol_type = other DNA

SEQ ID NO: 67546 - DNA, 120 bp, synthetic construct; identical to SEQ ID NO: 37592
  source 1..120: mol_type = other DNA

SEQ ID NO: 67547 - DNA, 120 bp, synthetic construct; identical to SEQ ID NO: 37593
  source 1..120: mol_type = other DNA

SEQ ID NO: 67548 - DNA, 120 bp, synthetic construct; identical to SEQ ID NO: 10855
  source 1..120: mol_type = other DNA

SEQ ID NO: 67549 - DNA, 120 bp, synthetic construct; identical to SEQ ID NO: 37595
  source 1..120: mol_type = other DNA

SEQ ID NO: 67550 - DNA, 120 bp, synthetic construct; identical to SEQ ID NO: 37596
  source 1..120: mol_type = other DNA

SEQ ID NO: 67551 - DNA, 120 bp, synthetic construct; identical to SEQ ID NO: 37597
  source 1..120: mol_type = other DNA

SEQ ID NO: 67552 - DNA, 120 bp, synthetic construct; identical to SEQ ID NO: 37598
  source 1..120: mol_type = other DNA

SEQ ID NO: 67553 - DNA, 120 bp, synthetic construct; identical to SEQ ID NO: 10856
  source 1..120: mol_type = other DNA

SEQ ID NO: 67554 - DNA, 120 bp, synthetic construct; identical to SEQ ID NO: 37600
  source 1..120: mol_type = other DNA

SEQ ID NO: 67555 - DNA, 120 bp, synthetic construct; identical to SEQ ID NO: 37601
  source 1..120: mol_type = other DNA

SEQ ID NO: 67556 - DNA, 120 bp, synthetic construct; identical to SEQ ID NO: 37602
  source 1..120: mol_type = other DNA

SEQ ID NO: 67557 - DNA, 120 bp, synthetic construct; identical to SEQ ID NO: 10857
  source 1..120: mol_type = other DNA

SEQ ID NO: 67558 - DNA, 120 bp, synthetic construct; identical to SEQ ID NO: 37604
  source 1..120: mol_type = other DNA

SEQ ID NO: 67559 - DNA, 120 bp, synthetic construct; identical to SEQ ID NO: 37605
  source 1..120: mol_type = other DNA

SEQ ID NO: 67560 - DNA, 120 bp, synthetic construct; identical to SEQ ID NO: 37606
  source 1..120: mol_type = other DNA

SEQ ID NO: 67561 - DNA, 120 bp, synthetic construct; identical to SEQ ID NO: 10858
  source 1..120: mol_type = other DNA

SEQ ID NO: 67562 - DNA, 120 bp, synthetic construct; identical to SEQ ID NO: 37608
  source 1..120: mol_type = other DNA

SEQ ID NO: 67563 - DNA, 120 bp, synthetic construct; identical to SEQ ID NO: 37609
  source 1..120: mol_type = other DNA

SEQ ID NO: 67564 - DNA, 120 bp, synthetic construct; identical to SEQ ID NO: 37610
  source 1..120: mol_type = other DNA

SEQ ID NO: 67565 - DNA, 120 bp, synthetic construct; identical to SEQ ID NO: 10859
  source 1..120: mol_type = other DNA

SEQ ID NO: 67566 - DNA, 120 bp, synthetic construct; identical to SEQ ID NO: 37612
  source 1..120: mol_type = other DNA

SEQ ID NO: 67567 - DNA, 120 bp, synthetic construct; identical to SEQ ID NO: 37613
  source 1..120: mol_type = other DNA

SEQ ID NO: 67568 - DNA, 120 bp, synthetic construct; identical to SEQ ID NO: 10860
  source 1..120: mol_type = other DNA

SEQ ID NO: 67569 - DNA, 120 bp, synthetic construct; identical to SEQ ID NO: 37615
  source 1..120: mol_type = other DNA

SEQ ID NO: 67570 - DNA, 120 bp, synthetic construct; identical to SEQ ID NO: 37616
  source 1..120: mol_type = other DNA

SEQ ID NO: 67571 - DNA, 120 bp, synthetic construct; identical to SEQ ID NO: 37617
  source 1..120: mol_type = other DNA

SEQ ID NO: 67572 - DNA, 120 bp, synthetic construct; identical to SEQ ID NO: 37618
  source 1..120: mol_type = other DNA

SEQ ID NO: 67573 - DNA, 120 bp, synthetic construct; identical to SEQ ID NO: 10861
  source 1..120: mol_type = other DNA

SEQ ID NO: 67574 - DNA, 120 bp, synthetic construct; identical to SEQ ID NO: 37620
  source 1..120: mol_type = other DNA

SEQ ID NO: 67575 - DNA, 120 bp, synthetic construct; identical to SEQ ID NO: 37621
  source 1..120: mol_type = other DNA

SEQ ID NO: 67576 - DNA, 120 bp, synthetic construct; identical to SEQ ID NO: 37622
  source 1..120: mol_type = other DNA

SEQ ID NO: 67577 - DNA, 120 bp, synthetic construct; identical to SEQ ID NO: 10862
  source 1..120: mol_type = other DNA

SEQ ID NO: 67578 - DNA, 120 bp, synthetic construct; identical to SEQ ID NO: 37624
  source 1..120: mol_type = other DNA

SEQ ID NO: 67579 - DNA, 120 bp, synthetic construct; identical to SEQ ID NO: 37625
  source 1..120: mol_type = other DNA

SEQ ID NO: 67580 - DNA, 120 bp, synthetic construct; identical to SEQ ID NO: 37626
  source 1..120: mol_type = other DNA

SEQ ID NO: 67581 - DNA, 120 bp, synthetic construct; identical to SEQ ID NO: 10863
  source 1..120: mol_type = other DNA

SEQ ID NO: 67582 - DNA, 120 bp, synthetic construct; identical to SEQ ID NO: 37628
  source 1..120: mol_type = other DNA

SEQ ID NO: 67583 - DNA, 120 bp, synthetic construct; identical to SEQ ID NO: 37629
  source 1..120: mol_type = other DNA

SEQ ID NO: 67584 - DNA, 120 bp, synthetic construct; identical to SEQ ID NO: 37630
  source 1..120: mol_type = other DNA

SEQ ID NO: 67585 - DNA, 120 bp, synthetic construct; identical to SEQ ID NO: 10864
  source 1..120: mol_type = other DNA

SEQ ID NO: 67586 - DNA, 120 bp, synthetic construct; identical to SEQ ID NO: 37632
  source 1..120: mol_type = other DNA

SEQ ID NO: 67587 - DNA, 120 bp, synthetic construct; identical to SEQ ID NO: 37633
  source 1..120: mol_type = other DNA

SEQ ID NO: 67588 - DNA, 120 bp, synthetic construct; identical to SEQ ID NO: 37634
  source 1..120: mol_type = other DNA

SEQ ID NO: 67589 - DNA, 120 bp, synthetic construct; identical to SEQ ID NO: 10865
  source 1..120: mol_type = other DNA

SEQ ID NO: 67590 - DNA, 120 bp, synthetic construct; identical to SEQ ID NO: 37636
  source 1..120: mol_type = other DNA

SEQ ID NO: 67591 - DNA, 120 bp, synthetic construct; identical to SEQ ID NO: 37637
  source 1..120: mol_type = other DNA

SEQ ID NO: 67592 - DNA, 120 bp, synthetic construct; identical to SEQ ID NO: 10866
  source 1..120: mol_type = other DNA

SEQ ID NO: 67593 - DNA, 120 bp, synthetic construct; identical to SEQ ID NO: 37639
  source 1..120: mol_type = other DNA

SEQ ID NO: 67594 - DNA, 120 bp, synthetic construct; identical to SEQ ID NO: 37640
  source 1..120: mol_type = other DNA

SEQ ID NO: 67595 - DNA, 120 bp, synthetic construct; identical to SEQ ID NO: 37641
  source 1..120: mol_type = other DNA

SEQ ID NO: 67596 - DNA, 120 bp, synthetic construct; identical to SEQ ID NO: 10867
  source 1..120: mol_type = other DNA

SEQ ID NO: 67597 - DNA, 120 bp, synthetic construct; identical to SEQ ID NO: 37643
  source 1..120: mol_type = other DNA

SEQ ID NO: 67598 - DNA, 120 bp, synthetic construct; identical to SEQ ID NO: 37644
  source 1..120: mol_type = other DNA

SEQ ID NO: 67599 - DNA, 120 bp, synthetic construct; identical to SEQ ID NO: 37645
  source 1..120: mol_type = other DNA

SEQ ID NO: 67600 - DNA, 120 bp, synthetic construct; identical to SEQ ID NO: 10868
  source 1..120: mol_type = other DNA

SEQ ID NO: 67601 - DNA, 120 bp, synthetic construct; identical to SEQ ID NO: 37647
  source 1..120: mol_type = other DNA

SEQ ID NO: 67602 - DNA, 120 bp, synthetic construct; identical to SEQ ID NO: 37648
  source 1..120: mol_type = other DNA

SEQ ID NO: 67603 - DNA, 120 bp, synthetic construct; identical to SEQ ID NO: 37649
  source 1..120: mol_type = other DNA

SEQ ID NO: 67604 - DNA, 120 bp, synthetic construct; identical to SEQ ID NO: 37650
  source 1..120: mol_type = other DNA

SEQ ID NO: 67605 - DNA, 120 bp, synthetic construct; identical to SEQ ID NO: 10869
  source 1..120: mol_type = other DNA

SEQ ID NO: 67606 - DNA, 120 bp, synthetic construct; identical to SEQ ID NO: 37652
  source 1..120: mol_type = other DNA

SEQ ID NO: 67607 - DNA, 120 bp, synthetic construct; identical to SEQ ID NO: 37653
  source 1..120: mol_type = other DNA

SEQ ID NO: 67608 - DNA, 120 bp, synthetic construct; identical to SEQ ID NO: 37654
  source 1..120: mol_type = other DNA

SEQ ID NO: 67609 - DNA, 120 bp, synthetic construct; identical to SEQ ID NO: 37655
  source 1..120: mol_type = other DNA

SEQ ID NO: 67610 - DNA, 120 bp, synthetic construct; identical to SEQ ID NO: 10870
  source 1..120: mol_type = other DNA

SEQ ID NO: 67611 - DNA, 120 bp, synthetic construct; identical to SEQ ID NO: 37657
  source 1..120: mol_type = other DNA

SEQ ID NO: 67612 - DNA, 120 bp, synthetic construct; identical to SEQ ID NO: 37658
  source 1..120: mol_type = other DNA

SEQ ID NO: 67613 - DNA, 120 bp, synthetic construct; identical to SEQ ID NO: 37659
  source 1..120: mol_type = other DNA

SEQ ID NO: 67614 - DNA, 120 bp, synthetic construct; identical to SEQ ID NO: 10871
  source 1..120: mol_type = other DNA

SEQ ID NO: 67615 - DNA, 120 bp, synthetic construct; identical to SEQ ID NO: 37661
  source 1..120: mol_type = other DNA

SEQ ID NO: 67616 - DNA, 120 bp, synthetic construct; identical to SEQ ID NO: 37662
  source 1..120: mol_type = other DNA

SEQ ID NO: 67617 - DNA, 120 bp, synthetic construct; identical to SEQ ID NO: 37663
  source 1..120: mol_type = other DNA

SEQ ID NO: 67618 - DNA, 120 bp, synthetic construct; identical to SEQ ID NO: 3640
  source 1..120: mol_type = other DNA

SEQ ID NO: 67619 - DNA, 120 bp, synthetic construct; identical to SEQ ID NO: 37665
  source 1..120: mol_type = other DNA

SEQ ID NO: 67620 - DNA, 120 bp, synthetic construct; identical to SEQ ID NO: 37666
  source 1..120: mol_type = other DNA

SEQ ID NO: 67621 - DNA, 120 bp, synthetic construct; identical to SEQ ID NO: 10873
  source 1..120: mol_type = other DNA

SEQ ID NO: 67622 - DNA, 120 bp, synthetic construct; identical to SEQ ID NO: 37668
  source 1..120: mol_type = other DNA

SEQ ID NO: 67623 - DNA, 120 bp, synthetic construct; identical to SEQ ID NO: 37669
  source 1..120: mol_type = other DNA

SEQ ID NO: 67624 - DNA, 120 bp, synthetic construct; identical to SEQ ID NO: 37670
  source 1..120: mol_type = other DNA

SEQ ID NO: 67625 - DNA, 120 bp, synthetic construct; identical to SEQ ID NO: 37671
  source 1..120: mol_type = other DNA

SEQ ID NO: 67626 - DNA, 120 bp, synthetic construct; identical to SEQ ID NO: 10874
  source 1..120: mol_type = other DNA

SEQ ID NO: 67627 - DNA, 120 bp, synthetic construct; identical to SEQ ID NO: 37673
  source 1..120: mol_type = other DNA

SEQ ID NO: 67628 - DNA, 120 bp, synthetic construct; identical to SEQ ID NO: 37674
  source 1..120: mol_type = other DNA

SEQ ID NO: 67629 - DNA, 120 bp, synthetic construct; identical to SEQ ID NO: 37675
  source 1..120: mol_type = other DNA

SEQ ID NO: 67630 - DNA, 120 bp, synthetic construct; identical to SEQ ID NO: 37676
  source 1..120: mol_type = other DNA

SEQ ID NO: 67631 - DNA, 120 bp, synthetic construct; identical to SEQ ID NO: 10875
  source 1..120: mol_type = other DNA

SEQ ID NO: 67632 - DNA, 120 bp, synthetic construct; identical to SEQ ID NO: 37678
  source 1..120: mol_type = other DNA

SEQ ID NO: 67633 - DNA, 120 bp, synthetic construct; identical to SEQ ID NO: 37679
  source 1..120: mol_type = other DNA

SEQ ID NO: 67634 - DNA, 120 bp, synthetic construct; identical to SEQ ID NO: 10876
  source 1..120: mol_type = other DNA

SEQ ID NO: 67635 - DNA, 120 bp, synthetic construct; identical to SEQ ID NO: 37681
  source 1..120: mol_type = other DNA

SEQ ID NO: 67636 - DNA, 120 bp, synthetic construct; identical to SEQ ID NO: 37682
  source 1..120: mol_type = other DNA

SEQ ID NO: 67637 - DNA, 120 bp, synthetic construct; identical to SEQ ID NO: 37683
  source 1..120: mol_type = other DNA

SEQ ID NO: 67638 - DNA, 120 bp, synthetic construct; identical to SEQ ID NO: 10877
  source 1..120: mol_type = other DNA

SEQ ID NO: 67639 - DNA, 120 bp, synthetic construct; identical to SEQ ID NO: 37685
  source 1..120: mol_type = other DNA

SEQ ID NO: 67640 - DNA, 120 bp, synthetic construct; identical to SEQ ID NO: 37686
  source 1..120: mol_type = other DNA

SEQ ID NO: 67641 - DNA, 120 bp, synthetic construct; identical to SEQ ID NO: 37687
  source 1..120: mol_type = other DNA

SEQ ID NO: 67642 - DNA, 120 bp, synthetic construct; identical to SEQ ID NO: 10878
  source 1..120: mol_type = other DNA

SEQ ID NO: 67643 - DNA, 120 bp, synthetic construct; identical to SEQ ID NO: 37689
  source 1..120: mol_type = other DNA

SEQ ID NO: 67644 - DNA, 120 bp, synthetic construct; identical to SEQ ID NO: 37690
  source 1..120: mol_type = other DNA

SEQ ID NO: 67645 - DNA, 120 bp, synthetic construct; identical to SEQ ID NO: 37691
  source 1..120: mol_type = other DNA

SEQ ID NO: 67646 - DNA, 120 bp, synthetic construct; identical to SEQ ID NO: 10879
  source 1..120: mol_type = other DNA

SEQ ID NO: 67647 - DNA, 120 bp, synthetic construct; identical to SEQ ID NO: 37693
  source 1..120: mol_type = other DNA

SEQ ID NO: 67648 - DNA, 120 bp, synthetic construct; identical to SEQ ID NO: 37694
  source 1..120: mol_type = other DNA

SEQ ID NO: 67649 - DNA, 120 bp, synthetic construct; identical to SEQ ID NO: 37695
  source 1..120: mol_type = other DNA

SEQ ID NO: 67650 - DNA, 120 bp, synthetic construct; identical to SEQ ID NO: 10880
  source 1..120: mol_type = other DNA

SEQ ID NO: 67651 - DNA, 120 bp, synthetic construct; identical to SEQ ID NO: 37697
  source 1..120: mol_type = other DNA

SEQ ID NO: 67652 - DNA, 120 bp, synthetic construct; identical to SEQ ID NO: 37698
  source 1..120: mol_type = other DNA

SEQ ID NO: 67653 - DNA, 120 bp, synthetic construct; identical to SEQ ID NO: 37699
  source 1..120: mol_type = other DNA

SEQ ID NO: 67654 - DNA, 120 bp, synthetic construct; identical to SEQ ID NO: 10881
  source 1..120: mol_type = other DNA

SEQ ID NO: 67655 - DNA, 120 bp, synthetic construct; identical to SEQ ID NO: 37701
  source 1..120: mol_type = other DNA

SEQ ID NO: 67656 - DNA, 120 bp, synthetic construct; identical to SEQ ID NO: 37702
  source 1..120: mol_type = other DNA

SEQ ID NO: 67657 - DNA, 120 bp, synthetic construct; identical to SEQ ID NO: 37703
  source 1..120: mol_type = other DNA

SEQ ID NO: 67658 - DNA, 120 bp, synthetic construct; identical to SEQ ID NO: 37704
  source 1..120: mol_type = other DNA

SEQ ID NO: 67659 - DNA, 120 bp, synthetic construct; identical to SEQ ID NO: 10882
  source 1..120: mol_type = other DNA

SEQ ID NO: 67660 - DNA, 120 bp, synthetic construct; identical to SEQ ID NO: 37706
  source 1..120: mol_type = other DNA

SEQ ID NO: 67661 - DNA, 120 bp, synthetic construct; identical to SEQ ID NO: 37707
  source 1..120: mol_type = other DNA

SEQ ID NO: 67662 - DNA, 120 bp, synthetic construct; identical to SEQ ID NO: 3650
  source 1..120: mol_type = other DNA

SEQ ID NO: 67663 - DNA, 120 bp, synthetic construct; identical to SEQ ID NO: 37709
  source 1..120: mol_type = other DNA

SEQ ID NO: 67664 - DNA, 120 bp, synthetic construct; identical to SEQ ID NO: 37710
  source 1..120: mol_type = other DNA

SEQ ID NO: 67665 - DNA, 120 bp, synthetic construct; identical to SEQ ID NO: 37711
  source 1..120: mol_type = other DNA

SEQ ID NO: 67666 - DNA, 120 bp, synthetic construct; identical to SEQ ID NO: 10884
  source 1..120: mol_type = other DNA

SEQ ID NO: 67667 - DNA, 120 bp, synthetic construct; identical to SEQ ID NO: 37713
  source 1..120: mol_type = other DNA

SEQ ID NO: 67668 - DNA, 120 bp, synthetic construct; identical to SEQ ID NO: 37714
  source 1..120: mol_type = other DNA

SEQ ID NO: 67669 - DNA, 120 bp, synthetic construct; identical to SEQ ID NO: 37715
  source 1..120: mol_type = other DNA

SEQ ID NO: 67670 - DNA, 120 bp, synthetic construct; identical to SEQ ID NO: 37716
  source 1..120: mol_type = other DNA

SEQ ID NO: 67671 - DNA, 120 bp, synthetic construct; identical to SEQ ID NO: 10885
  source 1..120: mol_type = other DNA

SEQ ID NO: 67672 - DNA, 120 bp, synthetic construct; identical to SEQ ID NO: 37718
  source 1..120: mol_type = other DNA

SEQ ID NO: 67673 - DNA, 120 bp, synthetic construct; identical to SEQ ID NO: 37719
  source 1..120: mol_type = other DNA

SEQ ID NO: 67674 - DNA, 120 bp, synthetic construct; identical to SEQ ID NO: 37720
  source 1..120: mol_type = other DNA

SEQ ID NO: 67675 - DNA, 120 bp, synthetic construct; identical to SEQ ID NO: 10886
  source 1..120: mol_type = other DNA

SEQ ID NO: 67676 - DNA, 120 bp, synthetic construct; identical to SEQ ID NO: 37722
  source 1..120: mol_type = other DNA

SEQ ID NO: 67677 - DNA, 120 bp, synthetic construct; identical to SEQ ID NO: 37723
  source 1..120: mol_type = other DNA

SEQ ID NO: 67678 - DNA, 120 bp, synthetic construct; identical to SEQ ID NO: 37724
  source 1..120: mol_type = other DNA

SEQ ID NO: 67679 - DNA, 120 bp, synthetic construct; identical to SEQ ID NO: 37725
  source 1..120: mol_type = other DNA

SEQ ID NO: 67680 - DNA, 120 bp, synthetic construct; identical to SEQ ID NO: 10887
  source 1..120: mol_type = other DNA

SEQ ID NO: 67681 - DNA, 120 bp, synthetic construct; identical to SEQ ID NO: 37727
  source 1..120: mol_type = other DNA

SEQ ID NO: 67682 - DNA, 120 bp, synthetic construct; identical to SEQ ID NO: 37728
  source 1..120: mol_type = other DNA

SEQ ID NO: 67683 - DNA, 120 bp, synthetic construct; identical to SEQ ID NO: 37729
  source 1..120: mol_type = other DNA

SEQ ID NO: 67684 - DNA, 120 bp, synthetic construct; identical to SEQ ID NO: 10888
  source 1..120: mol_type = other DNA

SEQ ID NO: 67685 - DNA, 120 bp, synthetic construct; identical to SEQ ID NO: 37731
  source 1..120: mol_type = other DNA

SEQ ID NO: 67686 - DNA, 120 bp, synthetic construct; identical to SEQ ID NO: 37732
  source 1..120: mol_type = other DNA

SEQ ID NO: 67687 - DNA, 120 bp, synthetic construct; identical to SEQ ID NO: 37733
  source 1..120: mol_type = other DNA

SEQ ID NO: 67688 - DNA, 120 bp, synthetic construct; identical to SEQ ID NO: 10889
  source 1..120: mol_type = other DNA

SEQ ID NO: 67689 - DNA, 120 bp, synthetic construct; identical to SEQ ID NO: 37735
  source 1..120: mol_type = other DNA

SEQ ID NO: 67690 - DNA, 120 bp, synthetic construct; identical to SEQ ID NO: 37736
  source 1..120: mol_type = other DNA

SEQ ID NO: 67691 - DNA, 120 bp, synthetic construct; identical to SEQ ID NO: 37737
  source 1..120: mol_type = other DNA

SEQ ID NO: 67692 - DNA, 120 bp, synthetic construct; identical to SEQ ID NO: 37738
  source 1..120: mol_type = other DNA

SEQ ID NO: 67693 - DNA, 120 bp, synthetic construct; identical to SEQ ID NO: 10890
  source 1..120: mol_type = other DNA

SEQ ID NO: 67694 - DNA, 120 bp, synthetic construct; identical to SEQ ID NO: 37740
  source 1..120: mol_type = other DNA

SEQ ID NO: 67695 - DNA, 120 bp, synthetic construct; identical to SEQ ID NO: 37741
  source 1..120: mol_type = other DNA

SEQ ID NO: 67696 - DNA, 120 bp, synthetic construct; identical to SEQ ID NO: 37742
  source 1..120: mol_type = other DNA

SEQ ID NO: 67697 - DNA, 120 bp, synthetic construct; identical to SEQ ID NO: 10891
  source 1..120: mol_type = other DNA

SEQ ID NO: 67698 - DNA, 120 bp, synthetic construct; identical to SEQ ID NO: 37744
  source 1..120: mol_type = other DNA

SEQ ID NO: 67699 - DNA, 120 bp, synthetic construct; identical to SEQ ID NO: 37745
  source 1..120: mol_type = other DNA

SEQ ID NO: 67700 - DNA, 120 bp, synthetic construct; identical to SEQ ID NO: 37746
  source 1..120: mol_type = other DNA

SEQ ID NO: 67701 - DNA, 120 bp, synthetic construct; identical to SEQ ID NO: 10892
  source 1..120: mol_type = other DNA

SEQ ID NO: 67702 - DNA, 120 bp, synthetic construct; identical to SEQ ID NO: 37748
  source 1..120: mol_type = other DNA

SEQ ID NO: 67703 - DNA, 120 bp, synthetic construct; identical to SEQ ID NO: 37749
  source 1..120: mol_type = other DNA

SEQ ID NO: 67704 - DNA, 120 bp, synthetic construct; identical to SEQ ID NO: 37750
  source 1..120: mol_type = other DNA

SEQ ID NO: 67705 - DNA, 120 bp, synthetic construct; identical to SEQ ID NO: 3660
  source 1..120: mol_type = other DNA

SEQ ID NO: 67706 - DNA, 120 bp, synthetic construct; identical to SEQ ID NO: 37752
  source 1..120: mol_type = other DNA

SEQ ID NO: 67707 - DNA, 120 bp, synthetic construct; identical to SEQ ID NO: 37753
  source 1..120: mol_type = other DNA

SEQ ID NO: 67708 - DNA, 120 bp, synthetic construct; identical to SEQ ID NO: 37754
  source 1..120: mol_type = other DNA

SEQ ID NO: 67709 - DNA, 120 bp, synthetic construct; identical to SEQ ID NO: 10894
  source 1..120: mol_type = other DNA

SEQ ID NO: 67710 - DNA, 120 bp, synthetic construct; identical to SEQ ID NO: 37756
  source 1..120: mol_type = other DNA

SEQ ID NO: 67711 - DNA, 120 bp, synthetic construct; identical to SEQ ID NO: 37757
  source 1..120: mol_type = other DNA

SEQ ID NO: 67712 - DNA, 120 bp, synthetic construct; identical to SEQ ID NO: 37758
  source 1..120: mol_type = other DNA

SEQ ID NO: 67713 - DNA, 120 bp, synthetic construct; identical to SEQ ID NO: 10895
  source 1..120: mol_type = other DNA

SEQ ID NO: 67714 - DNA, 120 bp, synthetic construct; identical to SEQ ID NO: 37760
  source 1..120: mol_type = other DNA

SEQ ID NO: 67715 - DNA, 120 bp, synthetic construct; identical to SEQ ID NO: 37761
  source 1..120: mol_type = other DNA

SEQ ID NO: 67716 - DNA, 120 bp, synthetic construct; identical to SEQ ID NO: 37762
  source 1..120: mol_type = other DNA

SEQ ID NO: 67717 - DNA, 120 bp, synthetic construct; identical to SEQ ID NO: 37763
  source 1..120: mol_type = other DNA

SEQ ID NO: 67718 - DNA, 120 bp, synthetic construct; identical to SEQ ID NO: 10896
  source 1..120: mol_type = other DNA

SEQ ID NO: 67719 - DNA, 120 bp, synthetic construct; identical to SEQ ID NO: 37765
  source 1..120: mol_type = other DNA

SEQ ID NO: 67720 - DNA, 120 bp, synthetic construct; identical to SEQ ID NO: 37766
  source 1..120: mol_type = other DNA

SEQ ID NO: 67721 - DNA, 120 bp, synthetic construct; identical to SEQ ID NO: 10897
  source 1..120: mol_type = other DNA

SEQ ID NO: 67722 - DNA, 120 bp, synthetic construct; identical to SEQ ID NO: 37768
  source 1..120: mol_type = other DNA

SEQ ID NO: 67723 - DNA, 120 bp, synthetic construct; identical to SEQ ID NO: 37769
  source 1..120: mol_type = other DNA

SEQ ID NO: 67724 - DNA, 120 bp, synthetic construct; identical to SEQ ID NO: 37770
  source 1..120: mol_type = other DNA

SEQ ID NO: 67725 - DNA, 120 bp, synthetic construct; identical to SEQ ID NO: 37771
  source 1..120: mol_type = other DNA

SEQ ID NO: 67726 - DNA, 120 bp, synthetic construct; identical to SEQ ID NO: 10898
  source 1..120: mol_type = other DNA

SEQ ID NO: 67727 - DNA, 120 bp, synthetic construct; identical to SEQ ID NO: 37773
  source 1..120: mol_type = other DNA

SEQ ID NO: 67728 - DNA, 120 bp, synthetic construct; identical to SEQ ID NO: 37774
  source 1..120: mol_type = other DNA

SEQ ID NO: 67729 - DNA, 120 bp, synthetic construct; identical to SEQ ID NO: 37775
  source 1..120: mol_type = other DNA

SEQ ID NO: 67730 - DNA, 120 bp, synthetic construct; identical to SEQ ID NO: 10899
  source 1..120: mol_type = other DNA

SEQ ID NO: 67731 - DNA, 120 bp, synthetic construct; identical to SEQ ID NO: 37777
  source 1..120: mol_type = other DNA

SEQ ID NO: 67732 - DNA, 120 bp, synthetic construct; identical to SEQ ID NO: 37778
  source 1..120: mol_type = other DNA

SEQ ID NO: 67733 - DNA, 120 bp, synthetic construct; identical to SEQ ID NO: 10900
  source 1..120: mol_type = other DNA

SEQ ID NO: 67734 - DNA, 120 bp, synthetic construct; identical to SEQ ID NO: 37780
  source 1..120: mol_type = other DNA

SEQ ID NO: 67735 - DNA, 120 bp, synthetic construct; identical to SEQ ID NO: 37781
  source 1..120: mol_type = other DNA

SEQ ID NO: 67736 - DNA, 120 bp, synthetic construct; identical to SEQ ID NO: 37782
  source 1..120: mol_type = other DNA

SEQ ID NO: 67737 - DNA, 120 bp, synthetic construct; identical to SEQ ID NO: 10901
  source 1..120: mol_type = other DNA

SEQ ID NO: 67738 - DNA, 120 bp, synthetic construct; identical to SEQ ID NO: 37784
  source 1..120: mol_type = other DNA

SEQ ID NO: 67739 - DNA, 120 bp, synthetic construct; identical to SEQ ID NO: 37785
  source 1..120: mol_type = other DNA

SEQ ID NO: 67740 - DNA, 120 bp, synthetic construct; identical to SEQ ID NO: 37786
  source 1..120: mol_type = other DNA

SEQ ID NO: 67741 - DNA, 120 bp, synthetic construct; identical to SEQ ID NO: 10902
  source 1..120: mol_type = other DNA

SEQ ID NO: 67742 - DNA, 120 bp, synthetic construct; identical to SEQ ID NO: 37788
  source 1..120: mol_type = other DNA

SEQ ID NO: 67743 - DNA, 120 bp, synthetic construct; identical to SEQ ID NO: 37789
  source 1..120: mol_type = other DNA

SEQ ID NO: 67744 - DNA, 120 bp, synthetic construct; identical to SEQ ID NO: 37790
  source 1..120: mol_type = other DNA

SEQ ID NO: 67745 - DNA, 120 bp, synthetic construct; identical to SEQ ID NO: 10903
  source 1..120: mol_type = other DNA

SEQ ID NO: 67746 - DNA, 120 bp, synthetic construct; identical to SEQ ID NO: 37792
  source 1..120: mol_type = other DNA

SEQ ID NO: 67747 - DNA, 120 bp, synthetic construct; identical to SEQ ID NO: 37793
  source 1..120: mol_type = other DNA

SEQ ID NO: 67748 - DNA, 120 bp, synthetic construct; identical to SEQ ID NO: 37794
  source 1..120: mol_type = other DNA

SEQ ID NO: 67749 - DNA, 120 bp, synthetic construct; identical to SEQ ID NO: 10904
  source 1..120: mol_type = other DNA

SEQ ID NO: 67750 - DNA, 120 bp, synthetic construct; identical to SEQ ID NO: 37796
  source 1..120: mol_type = other DNA

SEQ ID NO: 67751 - DNA, 120 bp, synthetic construct; identical to SEQ ID NO: 37797
  source 1..120: mol_type = other DNA

SEQ ID NO: 67752 - DNA, 120 bp, synthetic construct; identical to SEQ ID NO: 37798
  source 1..120: mol_type = other DNA

SEQ ID NO: 67753 - DNA, 120 bp, synthetic construct; identical to SEQ ID NO: 10905
  source 1..120: mol_type = other DNA

SEQ ID NO: 67754 - DNA, 120 bp, synthetic construct; identical to SEQ ID NO: 37800
  source 1..120: mol_type = other DNA

SEQ ID NO: 67755 - DNA, 120 bp, synthetic construct; identical to SEQ ID NO: 37801
  source 1..120: mol_type = other DNA

SEQ ID NO: 67756 - DNA, 120 bp, synthetic construct; identical to SEQ ID NO: 37802
  source 1..120: mol_type = other DNA

SEQ ID NO: 67757 - DNA, 120 bp, synthetic construct; identical to SEQ ID NO: 10906
  source 1..120: mol_type = other DNA

SEQ ID NO: 67758 - DNA, 120 bp, synthetic construct; identical to SEQ ID NO: 37804
  source 1..120: mol_type = other DNA

SEQ ID NO: 67759 - DNA, 120 bp, synthetic construct; identical to SEQ ID NO: 37805
  source 1..120: mol_type = other DNA

SEQ ID NO: 67760 - DNA, 120 bp, synthetic construct; identical to SEQ ID NO: 37806
  source 1..120: mol_type = other DNA

SEQ ID NO: 67761 - DNA, 120 bp, synthetic construct; identical to SEQ ID NO: 37807
  source 1..120: mol_type = other DNA

SEQ ID NO: 67762 - DNA, 120 bp, synthetic construct; identical to SEQ ID NO: 10907
  source 1..120: mol_type = other DNA

SEQ ID NO: 67763 - DNA, 120 bp, synthetic construct; identical to SEQ ID NO: 37809
  source 1..120: mol_type = other DNA

SEQ ID NO: 67764 - DNA, 120 bp, synthetic construct; identical to SEQ ID NO: 37810
  source 1..120: mol_type = other DNA

SEQ ID NO: 67765 - DNA, 120 bp, synthetic construct; identical to SEQ ID NO: 10908
  source 1..120: mol_type = other DNA

SEQ ID NO: 67766 - DNA, 120 bp, synthetic construct; identical to SEQ ID NO: 37812
  source 1..120: mol_type = other DNA

SEQ ID NO: 67767 - DNA, 120 bp, synthetic construct; identical to SEQ ID NO: 37813
  source 1..120: mol_type = other DNA

SEQ ID NO: 67768 - DNA, 120 bp, synthetic construct; identical to SEQ ID NO: 37814
  source 1..120: mol_type = other DNA

SEQ ID NO: 67769 - DNA, 120 bp, synthetic construct; identical to SEQ ID NO: 37815
  source 1..120: mol_type = other DNA

SEQ ID NO: 67770 - DNA, 120 bp, synthetic construct; identical to SEQ ID NO: 10909
  source 1..120: mol_type = other DNA

SEQ ID NO: 67771 - DNA, 120 bp, synthetic construct; identical to SEQ ID NO: 37817
  source 1..120: mol_type = other DNA

SEQ ID NO: 67772 - DNA, 120 bp, synthetic construct; identical to SEQ ID NO: 37818
  source 1..120: mol_type = other DNA

SEQ ID NO: 67773 - DNA, 120 bp, synthetic construct; identical to SEQ ID NO: 37819
  source 1..120: mol_type = other DNA

SEQ ID NO: 67774 - DNA, 120 bp, synthetic construct; identical to SEQ ID NO: 10910
  source 1..120: mol_type = other DNA

SEQ ID NO: 67775 - DNA, 120 bp, synthetic construct; identical to SEQ ID NO: 37821
  source 1..120: mol_type = other DNA

SEQ ID NO: 67776 - DNA, 120 bp, synthetic construct; identical to SEQ ID NO: 37822
  source 1..120: mol_type = other DNA

SEQ ID NO: 67777 - DNA, 120 bp, synthetic construct; identical to SEQ ID NO: 10911
  source 1..120: mol_type = other DNA

SEQ ID NO: 67778 - DNA, 120 bp, synthetic construct; identical to SEQ ID NO: 37824
  source 1..120: mol_type = other DNA

SEQ ID NO: 67779 - DNA, 120 bp, synthetic construct; identical to SEQ ID NO: 37825
  source 1..120: mol_type = other DNA

SEQ ID NO: 67780 - DNA, 120 bp, synthetic construct; identical to SEQ ID NO: 10912
  source 1..120: mol_type = other DNA

SEQ ID NO: 67781 - DNA, 120 bp, synthetic construct; identical to SEQ ID NO: 37827
  source 1..120: mol_type = other DNA

SEQ ID NO: 67782 - DNA, 120 bp, synthetic construct; identical to SEQ ID NO: 37828
  source 1..120: mol_type = other DNA

SEQ ID NO: 67783 - DNA, 120 bp, synthetic construct; identical to SEQ ID NO: 10913
  source 1..120: mol_type = other DNA

SEQ ID NO: 67784 - DNA, 120 bp, synthetic construct; identical to SEQ ID NO: 37830
  source 1..120: mol_type = other DNA

SEQ ID NO: 67785 - DNA, 120 bp, synthetic construct; identical to SEQ ID NO: 10914
  source 1..120: mol_type = other DNA

SEQ ID NO: 67786 - DNA, 120 bp, synthetic construct; identical to SEQ ID NO: 37832
  source 1..120: mol_type = other DNA

SEQ ID NO: 67787 - DNA, 120 bp, synthetic construct; identical to SEQ ID NO: 10915
  source 1..120: mol_type = other DNA

SEQ ID NO: 67788 - DNA, 120 bp, synthetic construct; identical to SEQ ID NO: 37834
  source 1..120: mol_type = other DNA

SEQ ID NO: 67789 - DNA, 120 bp, synthetic construct; identical to SEQ ID NO: 37835
  source 1..120: mol_type = other DNA

SEQ ID NO: 67790 - DNA, 120 bp, synthetic construct; identical to SEQ ID NO: 37836
  source 1..120: mol_type = other DNA

SEQ ID NO: 67791 - DNA, 120 bp, synthetic construct; identical to SEQ ID NO: 10916
  source 1..120: mol_type = other DNA

SEQ ID NO: 67792 - DNA, 120 bp, synthetic construct; identical to SEQ ID NO: 37838
  source 1..120: mol_type = other DNA

SEQ ID NO: 67793 - DNA, 120 bp, synthetic construct; identical to SEQ ID NO: 37839
  source 1..120: mol_type = other DNA

SEQ ID NO: 67794 - DNA, 120 bp, synthetic construct; identical to SEQ ID NO: 37840
  source 1..120: mol_type = other DNA

SEQ ID NO: 67795 - DNA, 120 bp, synthetic construct; identical to SEQ ID NO: 10917
  source 1..120: mol_type = other DNA

SEQ ID NO: 67796 - DNA, 120 bp, synthetic construct; identical to SEQ ID NO: 37842
  source 1..120: mol_type = other DNA

SEQ ID NO: 67797 - DNA, 120 bp, synthetic construct; identical to SEQ ID NO: 37843
  source 1..120: mol_type = other DNA

SEQ ID NO: 67798 - DNA, 120 bp, synthetic construct; identical to SEQ ID NO: 10918
  source 1..120: mol_type = other DNA

SEQ ID NO: 67799 - DNA, 120 bp, synthetic construct; identical to SEQ ID NO: 37845
  source 1..120: mol_type = other DNA

SEQ ID NO: 67800 - DNA, 120 bp, synthetic construct; identical to SEQ ID NO: 37846
  source 1..120: mol_type = other DNA

SEQ ID NO: 67801 - DNA, 120 bp, synthetic construct; identical to SEQ ID NO: 10919
  source 1..120: mol_type = other DNA

SEQ ID NO: 67802 - DNA, 120 bp, synthetic construct; identical to SEQ ID NO: 37848
  source 1..120: mol_type = other DNA

SEQ ID NO: 67803 - DNA, 120 bp, synthetic construct; identical to SEQ ID NO: 37849
  source 1..120: mol_type = other DNA

SEQ ID NO: 67804 - DNA, 120 bp, synthetic construct; identical to SEQ ID NO: 37850
  source 1..120: mol_type = other DNA

SEQ ID NO: 67805 - DNA, 120 bp, synthetic construct; identical to SEQ ID NO: 37851
  source 1..120: mol_type = other DNA

SEQ ID NO: 67806 - DNA, 120 bp, synthetic construct; identical to SEQ ID NO: 10920
  source 1..120: mol_type = other DNA

SEQ ID NO: 67807 - DNA, 120 bp, synthetic construct; identical to SEQ ID NO: 37853
  source 1..120: mol_type = other DNA

SEQ ID NO: 67808 - DNA, 120 bp, synthetic construct; identical to SEQ ID NO: 37854
  source 1..120: mol_type = other DNA

SEQ ID NO: 67809 - DNA, 120 bp, synthetic construct; identical to SEQ ID NO: 37855
  source 1..120: mol_type = other DNA

SEQ ID NO: 67810 - DNA, 120 bp, synthetic construct; identical to SEQ ID NO: 10921
  source 1..120: mol_type = other DNA

SEQ ID NO: 67811 - DNA, 120 bp, synthetic construct; identical to SEQ ID NO: 37857
  source 1..120: mol_type = other DNA

SEQ ID NO: 67812 - DNA, 120 bp, synthetic construct; identical to SEQ ID NO: 37858
  source 1..120: mol_type = other DNA

SEQ ID NO: 67813 - DNA, 120 bp, synthetic construct; identical to SEQ ID NO: 10922
  source 1..120: mol_type = other DNA

SEQ ID NO: 67814 - DNA, 120 bp, synthetic construct; identical to SEQ ID NO: 37860
  source 1..120: mol_type = other DNA

SEQ ID NO: 67815 - DNA, 120 bp, synthetic construct; identical to SEQ ID NO: 37861
  source 1..120: mol_type = other DNA

SEQ ID NO: 67816 - DNA, 120 bp, synthetic construct; identical to SEQ ID NO: 37862
  source 1..120: mol_type = other DNA

SEQ ID NO: 67817 - DNA, 120 bp, synthetic construct; identical to SEQ ID NO: 37863
  source 1..120: mol_type = other DNA

SEQ ID NO: 67818 - DNA, 120 bp, synthetic construct; identical to SEQ ID NO: 10923
  source 1..120: mol_type = other DNA

SEQ ID NO: 67819 - DNA, 120 bp, synthetic construct; identical to SEQ ID NO: 37865
  source 1..120: mol_type = other DNA

SEQ ID NO: 67820 - DNA, 120 bp, synthetic construct; identical to SEQ ID NO: 37866
  source 1..120: mol_type = other DNA

SEQ ID NO: 67821 - DNA, 120 bp, synthetic construct; identical to SEQ ID NO: 10924
  source 1..120: mol_type = other DNA

SEQ ID NO: 67822 - DNA, 120 bp, synthetic construct; identical to SEQ ID NO: 37868
  source 1..120: mol_type = other DNA

SEQ ID NO: 67823 - DNA, 120 bp, synthetic construct; identical to SEQ ID NO: 37869
  source 1..120: mol_type = other DNA

SEQ ID NO: 67824 - DNA, 120 bp, synthetic construct; identical to SEQ ID NO: 37870
  source 1..120: mol_type = other DNA

SEQ ID NO: 67825 - DNA, 120 bp, synthetic construct; identical to SEQ ID NO: 37871
  source 1..120: mol_type = other DNA

SEQ ID NO: 67826 - DNA, 120 bp, synthetic construct; identical to SEQ ID NO: 10925
  source 1..120: mol_type = other DNA

SEQ ID NO: 67827 - DNA, 120 bp, synthetic construct; identical to SEQ ID NO: 37873
  source 1..120: mol_type = other DNA

SEQ ID NO: 67828 - DNA, 120 bp, synthetic construct; identical to SEQ ID NO: 37874
  source 1..120: mol_type = other DNA

SEQ ID NO: 67829 - DNA, 120 bp, synthetic construct; identical to SEQ ID NO: 10926
  source 1..120: mol_type = other DNA

SEQ ID NO: 67830 - DNA, 120 bp, synthetic construct; identical to SEQ ID NO: 37876
  source 1..120: mol_type = other DNA

SEQ ID NO: 67831 - DNA, 120 bp, synthetic construct; identical to SEQ ID NO: 37877
  source 1..120: mol_type = other DNA

SEQ ID NO: 67832 - DNA, 120 bp, synthetic construct; identical to SEQ ID NO: 37878
  source 1..120: mol_type = other DNA

SEQ ID NO: 67833 - DNA, 120 bp, synthetic construct; identical to SEQ ID NO: 37879
  source 1..120: mol_type = other DNA

SEQ ID NO: 67834 - DNA, 120 bp, synthetic construct; identical to SEQ ID NO: 10927
  source 1..120: mol_type = other DNA

SEQ ID NO: 67835 - DNA, 120 bp, synthetic construct; identical to SEQ ID NO: 37881
  source 1..120: mol_type = other DNA

SEQ ID NO: 67836 - DNA, 120 bp, synthetic construct; identical to SEQ ID NO: 37882
  source 1..120: mol_type = other DNA

SEQ ID NO: 67837 - DNA, 120 bp, synthetic construct; identical to SEQ ID NO: 37883
  source 1..120: mol_type = other DNA

SEQ ID NO: 67838 - DNA, 120 bp, synthetic construct; identical to SEQ ID NO: 10928
  source 1..120: mol_type = other DNA

SEQ ID NO: 67839 - DNA, 120 bp, synthetic construct; identical to SEQ ID NO: 37885
  source 1..120: mol_type = other DNA

SEQ ID NO: 67840 - DNA, 120 bp, synthetic construct; identical to SEQ ID NO: 37886
  source 1..120: mol_type = other DNA

SEQ ID NO: 67841 - DNA, 120 bp, synthetic construct; identical to SEQ ID NO: 10929
  source 1..120: mol_type = other DNA

SEQ ID NO: 67842 - DNA, 120 bp, synthetic construct; identical to SEQ ID NO: 37888
  source 1..120: mol_type = other DNA

SEQ ID NO: 67843 - DNA, 120 bp, synthetic construct; identical to SEQ ID NO: 37889
  source 1..120: mol_type = other DNA

SEQ ID NO: 67844 - DNA, 120 bp, synthetic construct; identical to SEQ ID NO: 37890
  source 1..120: mol_type = other DNA

SEQ ID NO: 67845 - DNA, 120 bp, synthetic construct; identical to SEQ ID NO: 10930
  source 1..120: mol_type = other DNA

SEQ ID NO: 67846 - DNA, 120 bp, synthetic construct; identical to SEQ ID NO: 37892
  source 1..120: mol_type = other DNA

SEQ ID NO: 67847 - DNA, 120 bp, synthetic construct; identical to SEQ ID NO: 37893
  source 1..120: mol_type = other DNA

SEQ ID NO: 67848 - DNA, 120 bp, synthetic construct; identical to SEQ ID NO: 37894
  source 1..120: mol_type = other DNA

SEQ ID NO: 67849 - DNA, 120 bp, synthetic construct; identical to SEQ ID NO: 10931
  source 1..120: mol_type = other DNA

SEQ ID NO: 67850 - DNA, 120 bp, synthetic construct; identical to SEQ ID NO: 37896
  source 1..120: mol_type = other DNA

SEQ ID NO: 67851 - DNA, 120 bp, synthetic construct; identical to SEQ ID NO: 37897
  source 1..120: mol_type = other DNA

SEQ ID NO: 67852 - DNA, 120 bp, synthetic construct; identical to SEQ ID NO: 37898
  source 1..120: mol_type = other DNA

SEQ ID NO: 67853 - DNA, 120 bp, synthetic construct; identical to SEQ ID NO: 37899
  source 1..120: mol_type = other DNA

SEQ ID NO: 67854 - DNA, 120 bp, synthetic construct; identical to SEQ ID NO: 10932
  source 1..120: mol_type = other DNA

SEQ ID NO: 67855 - DNA, 120 bp, synthetic construct; identical to SEQ ID NO: 37901
  source 1..120: mol_type = other DNA

SEQ ID NO: 67856 - DNA, 120 bp, synthetic construct; identical to SEQ ID NO: 37902
  source 1..120: mol_type = other DNA

SEQ ID NO: 67857 - DNA, 120 bp, synthetic construct; identical to SEQ ID NO: 10933
  source 1..120: mol_type = other DNA

SEQ ID NO: 67858 - DNA, 120 bp, synthetic construct; identical to SEQ ID NO: 37904
  source 1..120: mol_type = other DNA

SEQ ID NO: 67859 - DNA, 120 bp, synthetic construct; identical to SEQ ID NO: 37905
  source 1..120: mol_type = other DNA

SEQ ID NO: 67860 - DNA, 120 bp, synthetic construct; identical to SEQ ID NO: 37906
  source 1..120: mol_type = other DNA

SEQ ID NO: 67861 - DNA, 120 bp, synthetic construct; identical to SEQ ID NO: 37907
  source 1..120: mol_type = other DNA

SEQ ID NO: 67862 - DNA, 120 bp, synthetic construct; identical to SEQ ID NO: 10934
  source 1..120: mol_type = other DNA

SEQ ID NO: 67863 - DNA, 120 bp, synthetic construct; identical to SEQ ID NO: 37909
  source 1..120: mol_type = other DNA

SEQ ID NO: 67864 - DNA, 120 bp, synthetic construct; identical to SEQ ID NO: 10935
  source 1..120: mol_type = other DNA

SEQ ID NO: 67865 - DNA, 120 bp, synthetic construct; identical to SEQ ID NO: 37911
  source 1..120: mol_type = other DNA

SEQ ID NO: 67866 - DNA, 120 bp, synthetic construct; identical to SEQ ID NO: 37912
  source 1..120: mol_type = other DNA

SEQ ID NO: 67867 - DNA, 120 bp, synthetic construct; identical to SEQ ID NO: 37913
  source 1..120: mol_type = other DNA

SEQ ID NO: 67868 - DNA, 120 bp, synthetic construct; identical to SEQ ID NO: 10936
  source 1..120: mol_type = other DNA

SEQ ID NO: 67869 - DNA, 120 bp, synthetic construct; identical to SEQ ID NO: 37915
  source 1..120: mol_type = other DNA

SEQ ID NO: 67870 - DNA, 120 bp, synthetic construct; identical to SEQ ID NO: 37916
  source 1..120: mol_type = other DNA

SEQ ID NO: 67871 - DNA, 120 bp, synthetic construct; identical to SEQ ID NO: 37917
  source 1..120: mol_type = other DNA

SEQ ID NO: 67872 - DNA, 120 bp, synthetic construct; identical to SEQ ID NO: 37918
  source 1..120: mol_type = other DNA

SEQ ID NO: 67873 - DNA, 120 bp, synthetic construct; identical to SEQ ID NO: 10937
  source 1..120: mol_type = other DNA

SEQ ID NO: 67874 - DNA, 120 bp, synthetic construct; identical to SEQ ID NO: 37920
  source 1..120: mol_type = other DNA

SEQ ID NO: 67875 - DNA, 120 bp, synthetic construct; identical to SEQ ID NO: 37921
  source 1..120: mol_type = other DNA

SEQ ID NO: 67876 - DNA, 120 bp, synthetic construct; identical to SEQ ID NO: 10938
  source 1..120: mol_type = other DNA

SEQ ID NO: 67877 - DNA, 120 bp, synthetic construct; identical to SEQ ID NO: 3700
  source 1..120: mol_type = other DNA

SEQ ID NO: 67878 - DNA, 120 bp, synthetic construct; identical to SEQ ID NO: 37924
  source 1..120: mol_type = other DNA

SEQ ID NO: 67879 - DNA, 120 bp, synthetic construct; identical to SEQ ID NO: 37925
  source 1..120: mol_type = other DNA

SEQ ID NO: 67880 - DNA, 120 bp, synthetic construct; identical to SEQ ID NO: 37926
  source 1..120: mol_type = other DNA

SEQ ID NO: 67881 - DNA, 120 bp, synthetic construct; identical to SEQ ID NO: 10939
  source 1..120: mol_type = other DNA

SEQ ID NO: 67882 - DNA, 120 bp, synthetic construct; identical to SEQ ID NO: 37928
  source 1..120: mol_type = other DNA

SEQ ID NO: 67883 - DNA, 120 bp, synthetic construct; identical to SEQ ID NO: 37929
  source 1..120: mol_type = other DNA

SEQ ID NO: 67884 - DNA, 120 bp, synthetic construct; identical to SEQ ID NO: 10940
  source 1..120: mol_type = other DNA

SEQ ID NO: 67885 - DNA, 120 bp, synthetic construct; identical to SEQ ID NO: 37931
  source 1..120: mol_type = other DNA

SEQ ID NO: 67886 - DNA, 120 bp, synthetic construct; identical to SEQ ID NO: 37932
  source 1..120: mol_type = other DNA

SEQ ID NO: 67887 - DNA, 120 bp, synthetic construct; identical to SEQ ID NO: 37933
  source 1..120: mol_type = other DNA

SEQ ID NO: 67888 - DNA, 120 bp, synthetic construct; identical to SEQ ID NO: 10941
  source 1..120: mol_type = other DNA

SEQ ID NO: 67889 - DNA, 120 bp, synthetic construct; identical to SEQ ID NO: 37935
  source 1..120: mol_type = other DNA

SEQ ID NO: 67890 - DNA, 120 bp, synthetic construct; identical to SEQ ID NO: 37936
  source 1..120: mol_type = other DNA

SEQ ID NO: 67891 - DNA, 120 bp, synthetic construct; identical to SEQ ID NO: 37937
  source 1..120: mol_type = other DNA

SEQ ID NO: 67892 - DNA, 120 bp, synthetic construct; identical to SEQ ID NO: 10942
  source 1..120: mol_type = other DNA

SEQ ID NO: 67893 - DNA, 120 bp, synthetic construct; identical to SEQ ID NO: 37939
  source 1..120: mol_type = other DNA

SEQ ID NO: 67894 - DNA, 120 bp, synthetic construct; identical to SEQ ID NO: 37940
  source 1..120: mol_type = other DNA

SEQ ID NO: 67895 - DNA, 120 bp, synthetic construct; identical to SEQ ID NO: 37941
  source 1..120: mol_type = other DNA

SEQ ID NO: 67896 - DNA, 120 bp, synthetic construct; identical to SEQ ID NO: 37942
  source 1..120: mol_type = other DNA

SEQ ID NO: 67897 - DNA, 120 bp, synthetic construct; identical to SEQ ID NO: 10943
  source 1..120: mol_type = other DNA

SEQ ID NO: 67898 - DNA, 120 bp, synthetic construct; identical to SEQ ID NO: 37944
  source 1..120: mol_type = other DNA

SEQ ID NO: 67899 - DNA, 120 bp, synthetic construct; identical to SEQ ID NO: 37945
  source 1..120: mol_type = other DNA

SEQ ID NO: 67900 - DNA, 120 bp, synthetic construct; identical to SEQ ID NO: 10944
  source 1..120: mol_type = other DNA

SEQ ID NO: 67901 - DNA, 120 bp, synthetic construct; identical to SEQ ID NO: 37947
  source 1..120: mol_type = other DNA

SEQ ID NO: 67902 - DNA, 120 bp, synthetic construct; identical to SEQ ID NO: 37948
  source 1..120: mol_type = other DNA

SEQ ID NO: 67903 - DNA, 120 bp, synthetic construct; identical to SEQ ID NO: 37949
  source 1..120: mol_type = other DNA

SEQ ID NO: 67904 - DNA, 120 bp, synthetic construct; identical to SEQ ID NO: 37950
  source 1..120: mol_type = other DNA

SEQ ID NO: 67905 - DNA, 120 bp, synthetic construct; identical to SEQ ID NO: 10945
  source 1..120: mol_type = other DNA

SEQ ID NO: 67906 - DNA, 120 bp, synthetic construct; identical to SEQ ID NO: 37952
  source 1..120: mol_type = other DNA

SEQ ID NO: 67907 - DNA, 120 bp, synthetic construct; identical to SEQ ID NO: 37953
  source 1..120: mol_type = other DNA

SEQ ID NO: 67908 - DNA, 120 bp, synthetic construct; identical to SEQ ID NO: 10946
  source 1..120: mol_type = other DNA

SEQ ID NO: 67909 - DNA, 120 bp, synthetic construct; identical to SEQ ID NO: 37955
  source 1..120: mol_type = other DNA

SEQ ID NO: 67910 - DNA, 120 bp, synthetic construct; identical to SEQ ID NO: 37956
  source 1..120: mol_type = other DNA

SEQ ID NO: 67911 - DNA, 120 bp, synthetic construct; identical to SEQ ID NO: 37957
  source 1..120: mol_type = other DNA

SEQ ID NO: 67912 - DNA, 120 bp, synthetic construct; identical to SEQ ID NO: 10947
  source 1..120: mol_type = other DNA

SEQ ID NO: 67913 - DNA, 120 bp, synthetic construct; identical to SEQ ID NO: 37959
  source 1..120: mol_type = other DNA

SEQ ID NO: 67914 - DNA, 120 bp, synthetic construct; identical to SEQ ID NO: 37960
  source 1..120: mol_type = other DNA

SEQ ID NO: 67915 - DNA, 120 bp, synthetic construct; identical to SEQ ID NO: 37961
  source 1..120: mol_type = other DNA

SEQ ID NO: 67916 - DNA, 120 bp, synthetic construct; identical to SEQ ID NO: 37962
  source 1..120: mol_type = other DNA

SEQ ID NO: 67917 - DNA, 120 bp, synthetic construct; identical to SEQ ID NO: 10948
  source 1..120: mol_type = other DNA

SEQ ID NO: 67918 - DNA, 120 bp, synthetic construct; identical to SEQ ID NO: 37964
  source 1..120: mol_type = other DNA

SEQ ID NO: 67919 - DNA, 120 bp, synthetic construct; identical to SEQ ID NO: 37965
  source 1..120: mol_type = other DNA

SEQ ID NO: 67920 - DNA, 120 bp, synthetic construct; identical to SEQ ID NO: 37966
  source 1..120: mol_type = other DNA

SEQ ID NO: 67921 - DNA, 120 bp, synthetic construct; identical to SEQ ID NO: 10949
  source 1..120: mol_type = other DNA

SEQ ID NO: 67922 - DNA, 120 bp, synthetic construct; identical to SEQ ID NO: 37968
  source 1..120: mol_type = other DNA

SEQ ID NO: 67923 - DNA, 120 bp, synthetic construct; identical to SEQ ID NO: 37969
  source 1..120: mol_type = other DNA

SEQ ID NO: 67924 - DNA, 120 bp, synthetic construct; identical to SEQ ID NO: 10950
  source 1..120: mol_type = other DNA

SEQ ID NO: 67925 - DNA, 120 bp, synthetic construct; identical to SEQ ID NO: 37971
  source 1..120: mol_type = other DNA

SEQ ID NO: 67926 - DNA, 120 bp, synthetic construct; identical to SEQ ID NO: 37972
  source 1..120: mol_type = other DNA

SEQ ID NO: 67927 - DNA, 120 bp, synthetic construct; identical to SEQ ID NO: 37973
  source 1..120: mol_type = other DNA

SEQ ID NO: 67928 - DNA, 120 bp, synthetic construct; identical to SEQ ID NO: 37974
  source 1..120: mol_type = other DNA

SEQ ID NO: 67929 - DNA, 120 bp, synthetic construct; identical to SEQ ID NO: 10951
  source 1..120: mol_type = other DNA

SEQ ID NO: 67930 - DNA, 120 bp, synthetic construct; identical to SEQ ID NO: 37976
  source 1..120: mol_type = other DNA

SEQ ID NO: 67931 - DNA, 120 bp, synthetic construct; identical to SEQ ID NO: 37977
  source 1..120: mol_type = other DNA

SEQ ID NO: 67932 - DNA, 120 bp, synthetic construct; identical to SEQ ID NO: 10952
  source 1..120: mol_type = other DNA

SEQ ID NO: 67933 - DNA, 120 bp, synthetic construct; identical to SEQ ID NO: 37979
  source 1..120: mol_type = other DNA

SEQ ID NO: 67934 - DNA, 120 bp, synthetic construct; identical to SEQ ID NO: 37980
  source 1..120: mol_type = other DNA

SEQ ID NO: 67935 - DNA, 120 bp, synthetic construct; identical to SEQ ID NO: 37981
  source 1..120: mol_type = other DNA

SEQ ID NO: 67936 - DNA, 120 bp, synthetic construct; identical to SEQ ID NO: 10953
  source 1..120: mol_type = other DNA

SEQ ID NO: 67937 - DNA, 120 bp, synthetic construct; identical to SEQ ID NO: 37983
  source 1..120: mol_type = other DNA

SEQ ID NO: 67938 - DNA, 120 bp, synthetic construct; identical to SEQ ID NO: 37984
  source 1..120: mol_type = other DNA

SEQ ID NO: 67939 - DNA, 120 bp, synthetic construct; identical to SEQ ID NO: 37985
  source 1..120: mol_type = other DNA

SEQ ID NO: 67940 - DNA, 120 bp, synthetic construct; identical to SEQ ID NO: 10954
  source 1..120: mol_type = other DNA

SEQ ID NO: 67941 - DNA, 120 bp, synthetic construct; identical to SEQ ID NO: 37987
  source 1..120: mol_type = other DNA

SEQ ID NO: 67942 - DNA, 120 bp, synthetic construct; identical to SEQ ID NO: 37988
  source 1..120: mol_type = other DNA

SEQ ID NO: 67943 - DNA, 120 bp, synthetic construct; identical to SEQ ID NO: 37989
  source 1..120: mol_type = other DNA

SEQ ID NO: 67944 - DNA, 120 bp, synthetic construct; identical to SEQ ID NO: 10955
  source 1..120: mol_type = other DNA

SEQ ID NO: 67945 - DNA, 120 bp, synthetic construct; identical to SEQ ID NO: 37991
  source 1..120: mol_type = other DNA

SEQ ID NO: 67946 - DNA, 120 bp, synthetic construct; identical to SEQ ID NO: 37992
  source 1..120: mol_type = other DNA

SEQ ID NO: 67947 - DNA, 120 bp, synthetic construct; identical to SEQ ID NO: 37993
  source 1..120: mol_type = other DNA

SEQ ID NO: 67948 - DNA, 120 bp, synthetic construct; identical to SEQ ID NO: 37994
  source 1..120: mol_type = other DNA

SEQ ID NO: 67949 - DNA, 120 bp, synthetic construct; identical to SEQ ID NO: 10956
  source 1..120: mol_type = other DNA

SEQ ID NO: 67950 - DNA, 120 bp, synthetic construct; identical to SEQ ID NO: 37996
  source 1..120: mol_type = other DNA

SEQ ID NO: 67951 - DNA, 120 bp, synthetic construct; identical to SEQ ID NO: 37997
  source 1..120: mol_type = other DNA

SEQ ID NO: 67952 - DNA, 120 bp, synthetic construct; identical to SEQ ID NO: 10957
  source 1..120: mol_type = other DNA

SEQ ID NO: 67953 - DNA, 120 bp, synthetic construct; identical to SEQ ID NO: 37999
  source 1..120: mol_type = other DNA

SEQ ID NO: 67954 - DNA, 120 bp, synthetic construct; identical to SEQ ID NO: 38000
  source 1..120: mol_type = other DNA

SEQ ID NO: 67955 - DNA, 120 bp, synthetic construct; identical to SEQ ID NO: 38001
  source 1..120: mol_type = other DNA

SEQ ID NO: 67956 - DNA, 120 bp, synthetic construct; identical to SEQ ID NO: 38002
  source 1..120: mol_type = other DNA

SEQ ID NO: 67957 - DNA, 120 bp, synthetic construct; identical to SEQ ID NO: 10958
  source 1..120: mol_type = other DNA

SEQ ID NO: 67958 - DNA, 120 bp, synthetic construct; identical to SEQ ID NO: 38004
  source 1..120: mol_type = other DNA

SEQ ID NO: 67959 - DNA, 120 bp, synthetic construct; identical to SEQ ID NO: 38005
  source 1..120: mol_type = other DNA

SEQ ID NO: 67960 - DNA, 120 bp, synthetic construct; identical to SEQ ID NO: 10959
  source 1..120: mol_type = other DNA

SEQ ID NO: 67961 - DNA, 120 bp, synthetic construct; identical to SEQ ID NO: 38007
  source 1..120: mol_type = other DNA

SEQ ID NO: 67962 - DNA, 120 bp, synthetic construct; identical to SEQ ID NO: 38008
  source 1..120: mol_type = other DNA

SEQ ID NO: 67963 - DNA, 120 bp, synthetic construct; identical to SEQ ID NO: 38009
  source 1..120: mol_type = other DNA

SEQ ID NO: 67964 - DNA, 120 bp, synthetic construct; identical to SEQ ID NO: 10960
  source 1..120: mol_type = other DNA

SEQ ID NO: 67965 - DNA, 120 bp, synthetic construct; identical to SEQ ID NO: 38011
  source 1..120: mol_type = other DNA

SEQ ID NO: 67966 - DNA, 120 bp, synthetic construct; identical to SEQ ID NO: 38012
  source 1..120: mol_type = other DNA

SEQ ID NO: 67967 - DNA, 120 bp, synthetic construct; identical to SEQ ID NO: 38013
  source 1..120: mol_type = other DNA

SEQ ID NO: 67968 - DNA, 120 bp, synthetic construct; identical to SEQ ID NO: 38014
  source 1..120: mol_type = other DNA

SEQ ID NO: 67969 - DNA, 120 bp, synthetic construct; identical to SEQ ID NO: 10961
  source 1..120: mol_type = other DNA

SEQ ID NO: 67970 - DNA, 120 bp, synthetic construct; identical to SEQ ID NO: 38016
  source 1..120: mol_type = other DNA

SEQ ID NO: 67971 - DNA, 120 bp, synthetic construct; identical to SEQ ID NO: 38017
  source 1..120: mol_type = other DNA

SEQ ID NO: 67972 - DNA, 120 bp, synthetic construct; identical to SEQ ID NO: 38018
  source 1..120: mol_type = other DNA

SEQ ID NO: 67973 - DNA, 120 bp, synthetic construct; identical to SEQ ID NO: 10962
  source 1..120: mol_type = other DNA

SEQ ID NO: 67974 - DNA, 120 bp, synthetic construct; identical to SEQ ID NO: 38020
  source 1..120: mol_type = other DNA

SEQ ID NO: 67975 - DNA, 120 bp, synthetic construct; identical to SEQ ID NO: 38021
  source 1..120: mol_type = other DNA

SEQ ID NO: 67976 - DNA, 120 bp, synthetic construct; identical to SEQ ID NO: 10963
  source 1..120: mol_type = other DNA

SEQ ID NO: 67977 - DNA, 120 bp, synthetic construct; identical to SEQ ID NO: 38023
  source 1..120: mol_type = other DNA

SEQ ID NO: 67978 - DNA, 120 bp, synthetic construct; identical to SEQ ID NO: 38024
  source 1..120: mol_type = other DNA

SEQ ID NO: 67979 - DNA, 120 bp, synthetic construct; identical to SEQ ID NO: 38025
  source 1..120: mol_type = other DNA

SEQ ID NO: 67980 - DNA, 120 bp, synthetic construct; identical to SEQ ID NO: 38026
  source 1..120: mol_type = other DNA

SEQ ID NO: 67981 - DNA, 120 bp, synthetic construct; identical to SEQ ID NO: 10964
  source 1..120: mol_type = other DNA

SEQ ID NO: 67982 - DNA, 120 bp, synthetic construct; identical to SEQ ID NO: 38028
  source 1..120: mol_type = other DNA

SEQ ID NO: 67983 - DNA, 120 bp, synthetic construct; identical to SEQ ID NO: 38029
  source 1..120: mol_type = other DNA

SEQ ID NO: 67984 - DNA, 120 bp, synthetic construct; identical to SEQ ID NO: 38030
  source 1..120: mol_type = other DNA

SEQ ID NO: 67985 - DNA, 120 bp, synthetic construct; identical to SEQ ID NO: 10965
  source 1..120: mol_type = other DNA

SEQ ID NO: 67986 - DNA, 120 bp, synthetic construct; identical to SEQ ID NO: 38032
  source 1..120: mol_type = other DNA

SEQ ID NO: 67987 - DNA, 120 bp, synthetic construct; identical to SEQ ID NO: 38033
  source 1..120: mol_type = other DNA

SEQ ID NO: 67988 - DNA, 120 bp, synthetic construct; identical to SEQ ID NO: 10966
  source 1..120: mol_type = other DNA

SEQ ID NO: 67989 - DNA, 120 bp, synthetic construct; identical to SEQ ID NO: 38035
  source 1..120: mol_type = other DNA

SEQ ID NO: 67990 - DNA, 120 bp, synthetic construct; identical to SEQ ID NO: 38036
  source 1..120: mol_type = other DNA

SEQ ID NO: 67991 - DNA, 120 bp, synthetic construct; identical to SEQ ID NO: 38037
  source 1..120: mol_type = other DNA

SEQ ID NO: 67992 - DNA, 120 bp, synthetic construct; identical to SEQ ID NO: 10967
  source 1..120: mol_type = other DNA

SEQ ID NO: 67993 - DNA, 120 bp, synthetic construct; identical to SEQ ID NO: 38039
  source 1..120: mol_type = other DNA

SEQ ID NO: 67994 - DNA, 120 bp, synthetic construct; identical to SEQ ID NO: 38040
  source 1..120: mol_type = other DNA

SEQ ID NO: 67995 - DNA, 120 bp, synthetic construct; identical to SEQ ID NO: 38041
  source 1..120: mol_type = other DNA

SEQ ID NO: 67996 - DNA, 120 bp, synthetic construct; identical to SEQ ID NO: 38042
  source 1..120: mol_type = other DNA

SEQ ID NO: 67997 - DNA, 120 bp, synthetic construct; identical to SEQ ID NO: 10968
  source 1..120: mol_type = other DNA

SEQ ID NO: 67998 - DNA, 120 bp, synthetic construct; identical to SEQ ID NO: 38044
  source 1..120: mol_type = other DNA

SEQ ID NO: 67999 - DNA, 120 bp, synthetic construct; identical to SEQ ID NO: 38045
  source 1..120: mol_type = other DNA

SEQ ID NO: 68000 - DNA, 120 bp, synthetic construct; identical to SEQ ID NO: 10969
  source 1..120: mol_type = other DNA

SEQ ID NO: 68001 - DNA, 120 bp, synthetic construct; identical to SEQ ID NO: 38047
  source 1..120: mol_type = other DNA

SEQ ID NO: 68002 - DNA, 120 bp, synthetic construct; identical to SEQ ID NO: 38048
  source 1..120: mol_type = other DNA

SEQ ID NO: 68003 - DNA, 120 bp, synthetic construct; identical to SEQ ID NO: 38049
  source 1..120: mol_type = other DNA

SEQ ID NO: 68004 - DNA, 120 bp, synthetic construct; identical to SEQ ID NO: 10970
  source 1..120: mol_type = other DNA

SEQ ID NO: 68005 - DNA, 120 bp, synthetic construct; identical to SEQ ID NO: 38051
  source 1..120: mol_type = other DNA

SEQ ID NO: 68006 - DNA, 120 bp, synthetic construct; identical to SEQ ID NO: 38052
  source 1..120: mol_type = other DNA

SEQ ID NO: 68007 - DNA, 120 bp, synthetic construct; identical to SEQ ID NO: 38053
  source 1..120: mol_type = other DNA

SEQ ID NO: 68008 - DNA, 120 bp, synthetic construct; identical to SEQ ID NO: 38054
  source 1..120: mol_type = other DNA

SEQ ID NO: 68009 - DNA, 120 bp, synthetic construct; identical to SEQ ID NO: 10971
  source 1..120: mol_type = other DNA

SEQ ID NO: 68010 - DNA, 120 bp, synthetic construct; identical to SEQ ID NO: 38056
  source 1..120: mol_type = other DNA

SEQ ID NO: 68011 - DNA, 120 bp, synthetic construct; identical to SEQ ID NO: 38057
  source 1..120: mol_type = other DNA

SEQ ID NO: 68012 - DNA, 120 bp, synthetic construct; identical to SEQ ID NO: 10972
  source 1..120: mol_type = other DNA

SEQ ID NO: 68013 - DNA, 120 bp, synthetic construct; identical to SEQ ID NO: 38059
  source 1..120: mol_type = other DNA

SEQ ID NO: 68014 - DNA, 120 bp, synthetic construct; identical to SEQ ID NO: 38060
  source 1..120: mol_type = other DNA

SEQ ID NO: 68015 - DNA, 120 bp, synthetic construct; identical to SEQ ID NO: 38061
  source 1..120: mol_type = other DNA

SEQ ID NO: 68016 - DNA, 120 bp, synthetic construct; identical to SEQ ID NO: 10973
  source 1..120: mol_type = other DNA

SEQ ID NO: 68017 - DNA, 120 bp, synthetic construct; identical to SEQ ID NO: 38063
  source 1..120: mol_type = other DNA

SEQ ID NO: 68018 - DNA, 120 bp, synthetic construct; identical to SEQ ID NO: 38064
  source 1..120: mol_type = other DNA

SEQ ID NO: 68019 - DNA, 120 bp, synthetic construct; identical to SEQ ID NO: 38065
  source 1..120: mol_type = other DNA

SEQ ID NO: 68020 - DNA, 120 bp, synthetic construct; identical to SEQ ID NO: 10974
  source 1..120: mol_type = other DNA

SEQ ID NO: 68021 - DNA, 120 bp, synthetic construct; identical to SEQ ID NO: 38067
  source 1..120: mol_type = other DNA

SEQ ID NO: 68022 - DNA, 120 bp, synthetic construct; identical to SEQ ID NO: 38068
  source 1..120: mol_type = other DNA

SEQ ID NO: 68023 - DNA, 120 bp, synthetic construct; identical to SEQ ID NO: 38069
  source 1..120: mol_type = other DNA

SEQ ID NO: 68024 - DNA, 120 bp, synthetic construct; identical to SEQ ID NO: 10975
  source 1..120: mol_type = other DNA

SEQ ID NO: 68025 - DNA, 120 bp, synthetic construct; identical to SEQ ID NO: 38071
  source 1..120: mol_type = other DNA

SEQ ID NO: 68026 - DNA, 120 bp, synthetic construct; identical to SEQ ID NO: 38072
  source 1..120: mol_type = other DNA

SEQ ID NO: 68027 - DNA, 120 bp, synthetic construct; identical to SEQ ID NO: 38073
  source 1..120: mol_type = other DNA

SEQ ID NO: 68028 - DNA, 120 bp, synthetic construct; identical to SEQ ID NO: 10976
  source 1..120: mol_type = other DNA

SEQ ID NO: 68029 - DNA, 120 bp, synthetic construct; identical to SEQ ID NO: 38075
  source 1..120: mol_type = other DNA

SEQ ID NO: 68030 - DNA, 120 bp, synthetic construct; identical to SEQ ID NO: 38076
  source 1..120: mol_type = other DNA

SEQ ID NO: 68031 - DNA, 120 bp, synthetic construct; identical to SEQ ID NO: 38077
  source 1..120: mol_type = other DNA

SEQ ID NO: 68032 - DNA, 120 bp, synthetic construct; identical to SEQ ID NO: 10977
  source 1..120: mol_type = other DNA

SEQ ID NO: 68033 - DNA, 120 bp, synthetic construct; identical to SEQ ID NO: 38079
  source 1..120: mol_type = other DNA

SEQ ID NO: 68034 - DNA, 120 bp, synthetic construct; identical to SEQ ID NO: 38080
  source 1..120: mol_type = other DNA

SEQ ID NO: 68035 - DNA, 120 bp, synthetic construct; identical to SEQ ID NO: 38081
  source 1..120: mol_type = other DNA

SEQ ID NO: 68036 - DNA, 120 bp, synthetic construct; identical to SEQ ID NO: 38082
  source 1..120: mol_type = other DNA

SEQ ID NO: 68037 - DNA, 120 bp, synthetic construct; identical to SEQ ID NO: 10978
  source 1..120: mol_type = other DNA

SEQ ID NO: 68038 - DNA, 120 bp, synthetic construct; identical to SEQ ID NO: 38084
  source 1..120: mol_type = other DNA

SEQ ID NO: 68039 - DNA, 120 bp, synthetic construct; identical to SEQ ID NO: 38085
  source 1..120: mol_type = other DNA

SEQ ID NO: 68040 - DNA, 120 bp, synthetic construct; identical to SEQ ID NO: 10979
  source 1..120: mol_type = other DNA

SEQ ID NO: 68041 - DNA, 120 bp, synthetic construct; identical to SEQ ID NO: 38087
  source 1..120: mol_type = other DNA

SEQ ID NO: 68042 - DNA, 120 bp, synthetic construct; identical to SEQ ID NO: 38088
  source 1..120: mol_type = other DNA

SEQ ID NO: 68043 - DNA, 120 bp, synthetic construct; identical to SEQ ID NO: 38089
  source 1..120: mol_type = other DNA

SEQ ID NO: 68044 - DNA, 120 bp, synthetic construct; identical to SEQ ID NO: 10980
  source 1..120: mol_type = other DNA

SEQ ID NO: 68045 - DNA, 120 bp, synthetic construct; identical to SEQ ID NO: 38091
  source 1..120: mol_type = other DNA

SEQ ID NO: 68046 - DNA, 120 bp, synthetic construct; identical to SEQ ID NO: 38092
  source 1..120: mol_type = other DNA

SEQ ID NO: 68047 - DNA, 120 bp, synthetic construct; identical to SEQ ID NO: 38093
  source 1..120: mol_type = other DNA

SEQ ID NO: 68048 - DNA, 120 bp, synthetic construct; identical to SEQ ID NO: 10981
  source 1..120: mol_type = other DNA

SEQ ID NO: 68049 - DNA, 120 bp, synthetic construct; identical to SEQ ID NO: 38095
  source 1..120: mol_type = other DNA

SEQ ID NO: 68050 - DNA, 120 bp, synthetic construct; identical to SEQ ID NO: 38096
  source 1..120: mol_type = other DNA

SEQ ID NO: 68051 - DNA, 120 bp, synthetic construct; identical to SEQ ID NO: 38097
  source 1..120: mol_type = other DNA

SEQ ID NO: 68052 - DNA, 120 bp, synthetic construct; identical to SEQ ID NO: 38098
  source 1..120: mol_type = other DNA

SEQ ID NO: 68053 - DNA, 120 bp, synthetic construct; identical to SEQ ID NO: 10982
  source 1..120: mol_type = other DNA

SEQ ID NO: 68054 - DNA, 120 bp, synthetic construct; identical to SEQ ID NO: 38100
  source 1..120: mol_type = other DNA

SEQ ID NO: 68055 - DNA, 120 bp, synthetic construct; identical to SEQ ID NO: 38101
  source 1..120: mol_type = other DNA

SEQ ID NO: 68056 - DNA, 120 bp, synthetic construct; identical to SEQ ID NO: 38102
  source 1..120: mol_type = other DNA

SEQ ID NO: 68057 - DNA, 120 bp, synthetic construct; identical to SEQ ID NO: 38103
  source 1..120: mol_type = other DNA

SEQ ID NO: 68058 - DNA, 120 bp, synthetic construct; identical to SEQ ID NO: 10983
  source 1..120: mol_type = other DNA

SEQ ID NO: 68059 - DNA, 120 bp, synthetic construct; identical to SEQ ID NO: 38105
  source 1..120: mol_type = other DNA

SEQ ID NO: 68060 - DNA, 120 bp, synthetic construct; identical to SEQ ID NO: 38106
  source 1..120: mol_type = other DNA

SEQ ID NO: 68061 - DNA, 120 bp, synthetic construct; identical to SEQ ID NO: 10984
  source 1..120: mol_type = other DNA

SEQ ID NO: 68062 - DNA, 120 bp, synthetic construct; identical to SEQ ID NO: 38108
  source 1..120: mol_type = other DNA

SEQ ID NO: 68063 - DNA, 120 bp, synthetic construct; identical to SEQ ID NO: 38109
  source 1..120: mol_type = other DNA

SEQ ID NO: 68064 - DNA, 120 bp, synthetic construct; identical to SEQ ID NO: 38110
  source 1..120: mol_type = other DNA

SEQ ID NO: 68065 - DNA, 120 bp, synthetic construct; identical to SEQ ID NO: 38111
  source 1..120: mol_type = other DNA

SEQ ID NO: 68066 - DNA, 120 bp, synthetic construct; identical to SEQ ID NO: 10985
  source 1..120: mol_type = other DNA

SEQ ID NO: 68067 - DNA, 120 bp, synthetic construct; identical to SEQ ID NO: 38113
  source 1..120: mol_type = other DNA

SEQ ID NO: 68068 - DNA, 120 bp, synthetic construct; identical to SEQ ID NO: 38114
  source 1..120: mol_type = other DNA

SEQ ID NO: 68069 - DNA, 120 bp, synthetic construct; identical to SEQ ID NO: 10986
  source 1..120: mol_type = other DNA

SEQ ID NO: 68070 - DNA, 120 bp, synthetic construct; identical to SEQ ID NO: 38116
  source 1..120: mol_type = other DNA

SEQ ID NO: 68071 - DNA, 120 bp, synthetic construct; identical to SEQ ID NO: 38117
  source 1..120: mol_type = other DNA

SEQ ID NO: 68072 - DNA, 120 bp, synthetic construct; identical to SEQ ID NO: 38118
  source 1..120: mol_type = other DNA

SEQ ID NO: 68073 - DNA, 120 bp, synthetic construct; identical to SEQ ID NO: 38119
  source 1..120: mol_type = other DNA

SEQ ID NO: 68074 - DNA, 120 bp, synthetic construct; identical to SEQ ID NO: 10987
  source 1..120: mol_type = other DNA

SEQ ID NO: 68075 - DNA, 120 bp, synthetic construct; identical to SEQ ID NO: 38121
  source 1..120: mol_type = other DNA

SEQ ID NO: 68076 - DNA, 120 bp, synthetic construct; identical to SEQ ID NO: 38122
  source 1..120: mol_type = other DNA

SEQ ID NO: 68077 - DNA, 120 bp, synthetic construct; identical to SEQ ID NO: 38123
  source 1..120: mol_type = other DNA

SEQ ID NO: 68078 - DNA, 120 bp, synthetic construct; identical to SEQ ID NO: 10988
  source 1..120: mol_type = other DNA

SEQ ID NO: 68079 - DNA, 120 bp, synthetic construct; identical to SEQ ID NO: 38125
  source 1..120: mol_type = other DNA

SEQ ID NO: 68080 - DNA, 120 bp, synthetic construct; identical to SEQ ID NO: 38126
  source 1..120: mol_type = other DNA

SEQ ID NO: 68081 - DNA, 120 bp, synthetic construct; identical to SEQ ID NO: 10989
  source 1..120: mol_type = other DNA

SEQ ID NO: 68082 - DNA, 120 bp, synthetic construct; identical to SEQ ID NO: 38128
  source 1..120: mol_type = other DNA

SEQ ID NO: 68083 - DNA, 120 bp, synthetic construct; identical to SEQ ID NO: 38129
  source 1..120: mol_type = other DNA

SEQ ID NO: 68084 - DNA, 120 bp, synthetic construct; identical to SEQ ID NO: 38130
  source 1..120: mol_type = other DNA

SEQ ID NO: 68085 - DNA, 120 bp, synthetic construct; identical to SEQ ID NO: 10990
  source 1..120: mol_type = other DNA

SEQ ID NO: 68086 - DNA, 120 bp, synthetic construct; identical to SEQ ID NO: 38132
  source 1..120: mol_type = other DNA

SEQ ID NO: 68087 - DNA, 120 bp, synthetic construct; identical to SEQ ID NO: 38133
  source 1..120: mol_type = other DNA

SEQ ID NO: 68088 - DNA, 120 bp, synthetic construct; identical to SEQ ID NO: 38134
  source 1..120: mol_type = other DNA

SEQ ID NO: 68089 - DNA, 120 bp, synthetic construct; identical to SEQ ID NO: 10991
  source 1..120: mol_type = other DNA

SEQ ID NO: 68090 - DNA, 120 bp, synthetic construct; identical to SEQ ID NO: 38136
  source 1..120: mol_type = other DNA

SEQ ID NO: 68091 - DNA, 120 bp, synthetic construct; identical to SEQ ID NO: 38137
  source 1..120: mol_type = other DNA

SEQ ID NO: 68092 - DNA, 120 bp, synthetic construct; identical to SEQ ID NO: 10992
  source 1..120: mol_type = other DNA

SEQ ID NO: 68093 - DNA, 120 bp, synthetic construct; identical to SEQ ID NO: 38139
  source 1..120: mol_type = other DNA

SEQ ID NO: 68094 - DNA, 120 bp, synthetic construct; identical to SEQ ID NO: 38140
  source 1..120: mol_type = other DNA

SEQ ID NO: 68095 - DNA, 120 bp, synthetic construct; identical to SEQ ID NO: 38141
  source 1..120: mol_type = other DNA

SEQ ID NO: 68096 - DNA, 120 bp, synthetic construct; identical to SEQ ID NO: 10993
  source 1..120: mol_type = other DNA

SEQ ID NO: 68097 - DNA, 120 bp, synthetic construct; identical to SEQ ID NO: 38143
  source 1..120: mol_type = other DNA

SEQ ID NO: 68098 - DNA, 120 bp, synthetic construct; identical to SEQ ID NO: 38144
  source 1..120: mol_type = other DNA

SEQ ID NO: 68099 - DNA, 120 bp, synthetic construct; identical to SEQ ID NO: 10994
  source 1..120: mol_type = other DNA

SEQ ID NO: 68100 - DNA, 120 bp, synthetic construct; identical to SEQ ID NO: 38146
  source 1..120: mol_type = other DNA

SEQ ID NO: 68101 - DNA, 120 bp, synthetic construct; identical to SEQ ID NO: 38147
  source 1..120: mol_type = other DNA

SEQ ID NO: 68102 - DNA, 120 bp, synthetic construct; identical to SEQ ID NO: 38148
  source 1..120: mol_type = other DNA

SEQ ID NO: 68103 - DNA, 120 bp, synthetic construct; identical to SEQ ID NO: 38149
  source 1..120: mol_type = other DNA

SEQ ID NO: 68104 - DNA, 120 bp, synthetic construct; identical to SEQ ID NO: 10995
  source 1..120: mol_type = other DNA

SEQ ID NO: 68105 - DNA, 120 bp, synthetic construct; identical to SEQ ID NO: 38151
  source 1..120: mol_type = other DNA

SEQ ID NO: 68106 - DNA, 120 bp, synthetic construct; identical to SEQ ID NO: 38152
  source 1..120: mol_type = other DNA

SEQ ID NO: 68107 - DNA, 120 bp, synthetic construct; identical to SEQ ID NO: 38153
  source 1..120: mol_type = other DNA

SEQ ID NO: 68108 - DNA, 120 bp, synthetic construct; identical to SEQ ID NO: 10996
  source 1..120: mol_type = other DNA

SEQ ID NO: 68109 - DNA, 120 bp, synthetic construct; identical to SEQ ID NO: 38155
  source 1..120: mol_type = other DNA

SEQ ID NO: 68110 - DNA, 120 bp, synthetic construct; identical to SEQ ID NO: 38156
  source 1..120: mol_type = other DNA

SEQ ID NO: 68111 - DNA, 120 bp, synthetic construct; identical to SEQ ID NO: 38157
  source 1..120: mol_type = other DNA

SEQ ID NO: 68112 - DNA, 120 bp, synthetic construct; identical to SEQ ID NO: 10997
  source 1..120: mol_type = other DNA

SEQ ID NO: 68113 - DNA, 120 bp, synthetic construct; identical to SEQ ID NO: 38159
  source 1..120: mol_type = other DNA

SEQ ID NO: 68114 - DNA, 120 bp, synthetic construct; identical to SEQ ID NO: 38160
  source 1..120: mol_type = other DNA

SEQ ID NO: 68115 - DNA, 120 bp, synthetic construct; identical to SEQ ID NO: 10998
  source 1..120: mol_type = other DNA

SEQ ID NO: 68116 - DNA, 120 bp, synthetic construct; identical to SEQ ID NO: 38162
  source 1..120: mol_type = other DNA

SEQ ID NO: 68117 - DNA, 120 bp, synthetic construct; identical to SEQ ID NO: 38163
  source 1..120: mol_type = other DNA

SEQ ID NO: 68118 - DNA, 120 bp, synthetic construct; identical to SEQ ID NO: 38164
  source 1..120: mol_type = other DNA

SEQ ID NO: 68119 - DNA, 120 bp, synthetic construct; identical to SEQ ID NO: 10999
  source 1..120: mol_type = other DNA

SEQ ID NO: 68120 - DNA, 120 bp, synthetic construct; identical to SEQ ID NO: 38166
  source 1..120: mol_type = other DNA

SEQ ID NO: 68121 - DNA, 120 bp, synthetic construct; identical to SEQ ID NO: 38167
  source 1..120: mol_type = other DNA

SEQ ID NO: 68122 - DNA, 120 bp, synthetic construct; identical to SEQ ID NO: 38168
  source 1..120: mol_type = other DNA

SEQ ID NO: 68123 - DNA, 120 bp, synthetic construct; identical to SEQ ID NO: 38169
  source 1..120: mol_type = other DNA

SEQ ID NO: 68124 - DNA, 120 bp, synthetic construct; identical to SEQ ID NO: 11000
  source 1..120: mol_type = other DNA

SEQ ID NO: 68125 - DNA, 120 bp, synthetic construct; identical to SEQ ID NO: 38171
  source 1..120: mol_type = other DNA

SEQ ID NO: 68126 - DNA, 120 bp, synthetic construct; identical to SEQ ID NO: 38172
  source 1..120: mol_type = other DNA

SEQ ID NO: 68127 - DNA, 120 bp, synthetic construct; identical to SEQ ID NO: 38173
  source 1..120: mol_type = other DNA

SEQ ID NO: 68128 - DNA, 120 bp, synthetic construct; identical to SEQ ID NO: 11001
  source 1..120: mol_type = other DNA

SEQ ID NO: 68129 - DNA, 120 bp, synthetic construct; identical to SEQ ID NO: 38175
  source 1..120: mol_type = other DNA

SEQ ID NO: 68130 - DNA, 120 bp, synthetic construct; identical to SEQ ID NO: 38176
  source 1..120: mol_type = other DNA

SEQ ID NO: 68131 - DNA, 120 bp, synthetic construct; identical to SEQ ID NO: 38177
  source 1..120: mol_type = other DNA

SEQ ID NO: 68132 - DNA, 120 bp, synthetic construct; identical to SEQ ID NO: 11002
  source 1..120: mol_type = other DNA

SEQ ID NO: 68133 - DNA, 120 bp, synthetic construct; identical to SEQ ID NO: 38179
  source 1..120: mol_type = other DNA

SEQ ID NO: 68134 - DNA, 120 bp, synthetic construct; identical to SEQ ID NO: 38180
  source 1..120: mol_type = other DNA

SEQ ID NO: 68135 - DNA, 120 bp, synthetic construct; identical to SEQ ID NO: 38181
  source 1..120: mol_type = other DNA

SEQ ID NO: 68136 - DNA, 120 bp, synthetic construct; identical to SEQ ID NO: 38182
  source 1..120: mol_type = other DNA

SEQ ID NO: 68137 - DNA, 120 bp, synthetic construct; identical to SEQ ID NO: 11003
  source 1..120: mol_type = other DNA

SEQ ID NO: 68138 - DNA, 120 bp, synthetic construct; identical to SEQ ID NO: 38184
  source 1..120: mol_type = other DNA

SEQ ID NO: 68139 - DNA, 120 bp, synthetic construct; identical to SEQ ID NO: 38185
  source 1..120: mol_type = other DNA

SEQ ID NO: 68140 - DNA, 120 bp, synthetic construct; identical to SEQ ID NO: 38186
  source 1..120: mol_type = other DNA

SEQ ID NO: 68141 - DNA, 120 bp, synthetic construct; identical to SEQ ID NO: 11004
  source 1..120: mol_type = other DNA

SEQ ID NO: 68142 - DNA, 120 bp, synthetic construct; identical to SEQ ID NO: 38188
  source 1..120: mol_type = other DNA

SEQ ID NO: 68143 - DNA, 120 bp, synthetic construct; identical to SEQ ID NO: 38189
  source 1..120: mol_type = other DNA

SEQ ID NO: 68144 - DNA, 120 bp, synthetic construct; identical to SEQ ID NO: 11005
  source 1..120: mol_type = other DNA

SEQ ID NO: 68145 - DNA, 120 bp, synthetic construct; identical to SEQ ID NO: 38191
  source 1..120: mol_type = other DNA

SEQ ID NO: 68146 - DNA, 120 bp, synthetic construct; identical to SEQ ID NO: 38192
  source 1..120: mol_type = other DNA

SEQ ID NO: 68147 - DNA, 120 bp, synthetic construct; identical to SEQ ID NO: 38193
  source 1..120: mol_type = other DNA

SEQ ID NO: 68148 - DNA, 120 bp, synthetic construct; identical to SEQ ID NO: 11006
  source 1..120: mol_type = other DNA

SEQ ID NO: 68149 - DNA, 120 bp, synthetic construct; identical to SEQ ID NO: 38195
  source 1..120: mol_type = other DNA

SEQ ID NO: 68150 - DNA, 120 bp, synthetic construct; identical to SEQ ID NO: 38196
  source 1..120: mol_type = other DNA

SEQ ID NO: 68151 - DNA, 120 bp, synthetic construct; identical to SEQ ID NO: 38197
  source 1..120: mol_type = other DNA

SEQ ID NO: 68152 - DNA, 120 bp, synthetic construct; identical to SEQ ID NO: 11007
  source 1..120: mol_type = other DNA

SEQ ID NO: 68153 - DNA, 120 bp, synthetic construct; identical to SEQ ID NO: 38199
  source 1..120: mol_type = other DNA

SEQ ID NO: 68154 - DNA, 120 bp, synthetic construct; identical to SEQ ID NO: 38200
  source 1..120: mol_type = other DNA

SEQ ID NO: 68155 - DNA, 120 bp, synthetic construct; identical to SEQ ID NO: 38201
  source 1..120: mol_type = other DNA

SEQ ID NO: 68156 - DNA, 120 bp, synthetic construct; identical to SEQ ID NO: 38202
  source 1..120: mol_type = other DNA

SEQ ID NO: 68157 - DNA, 120 bp, synthetic construct; identical to SEQ ID NO: 11008
  source 1..120: mol_type = other DNA

SEQ ID NO: 68158 - DNA, 120 bp, synthetic construct; identical to SEQ ID NO: 38204
  source 1..120: mol_type = other DNA

SEQ ID NO: 68159 - DNA, 120 bp, synthetic construct; identical to SEQ ID NO: 38205
  source 1..120: mol_type = other DNA

SEQ ID NO: 68160 - DNA, 120 bp, synthetic construct; identical to SEQ ID NO: 38206
  source 1..120: mol_type = other DNA

SEQ ID NO: 68161 - DNA, 120 bp, synthetic construct; identical to SEQ ID NO: 11009
  source 1..120: mol_type = other DNA

SEQ ID NO: 68162 - DNA, 120 bp, synthetic construct; identical to SEQ ID NO: 38208
  source 1..120: mol_type = other DNA

SEQ ID NO: 68163 - DNA, 120 bp, synthetic construct; identical to SEQ ID NO: 38209
  source 1..120: mol_type = other DNA

SEQ ID NO: 68164 - DNA, 120 bp, synthetic construct; identical to SEQ ID NO: 11010
  source 1..120: mol_type = other DNA

SEQ ID NO: 68165 - DNA, 120 bp, synthetic construct; identical to SEQ ID NO: 38211
  source 1..120: mol_type = other DNA

SEQ ID NO: 68166 - DNA, 120 bp, synthetic construct; identical to SEQ ID NO: 38212
  source 1..120: mol_type = other DNA

SEQ ID NO: 68167 - DNA, 120 bp, synthetic construct; identical to SEQ ID NO: 38213
  source 1..120: mol_type = other DNA

SEQ ID NO: 68168 - DNA, 120 bp, synthetic construct; identical to SEQ ID NO: 11011
  source 1..120: mol_type = other DNA

SEQ ID NO: 68169 - DNA, 120 bp, synthetic construct; identical to SEQ ID NO: 38215
  source 1..120: mol_type = other DNA

SEQ ID NO: 68170 - DNA, 120 bp, synthetic construct; identical to SEQ ID NO: 38216
  source 1..120: mol_type = other DNA

SEQ ID NO: 68171 - DNA, 120 bp, synthetic construct; identical to SEQ ID NO: 38217
  source 1..120: mol_type = other DNA

SEQ ID NO: 68172 - DNA, 120 bp, synthetic construct; identical to SEQ ID NO: 38218
  source 1..120: mol_type = other DNA

SEQ ID NO: 68173 - DNA, 120 bp, synthetic construct; identical to SEQ ID NO: 11012
  source 1..120: mol_type = other DNA

SEQ ID NO: 68174 - DNA, 120 bp, synthetic construct; identical to SEQ ID NO: 38220
  source 1..120: mol_type = other DNA

SEQ ID NO: 68175 - DNA, 120 bp, synthetic construct; identical to SEQ ID NO: 38221
  source 1..120: mol_type = other DNA

SEQ ID NO: 68176 - DNA, 120 bp, synthetic construct; identical to SEQ ID NO: 11013
  source 1..120: mol_type = other DNA

SEQ ID NO: 68177 - DNA, 120 bp, synthetic construct; identical to SEQ ID NO: 38223
  source 1..120: mol_type = other DNA

SEQ ID NO: 68178 - DNA, 120 bp, synthetic construct; identical to SEQ ID NO: 38224
  source 1..120: mol_type = other DNA

SEQ ID NO: 68179 - DNA, 120 bp, synthetic construct; identical to SEQ ID NO: 38225
  source 1..120: mol_type = other DNA

SEQ ID NO: 68180 - DNA, 120 bp, synthetic construct; identical to SEQ ID NO: 38226
  source 1..120: mol_type = other DNA

SEQ ID NO: 68181 - DNA, 120 bp, synthetic construct; identical to SEQ ID NO: 11014
  source 1..120: mol_type = other DNA

SEQ ID NO: 68182 - DNA, 120 bp, synthetic construct; identical to SEQ ID NO: 38228
  source 1..120: mol_type = other DNA

SEQ ID NO: 68183 - DNA, 120 bp, synthetic construct; identical to SEQ ID NO: 38229
  source 1..120: mol_type = other DNA

SEQ ID NO: 68184 - DNA, 120 bp, synthetic construct; identical to SEQ ID NO: 11015
  source 1..120: mol_type = other DNA

SEQ ID NO: 68185 - DNA, 120 bp, synthetic construct; identical to SEQ ID NO: 38231
  source 1..120: mol_type = other DNA

SEQ ID NO: 68186 - DNA, 120 bp, synthetic construct; identical to SEQ ID NO: 38232
  source 1..120: mol_type = other DNA

SEQ ID NO: 68187 - DNA, 120 bp, synthetic construct; identical to SEQ ID NO: 38233
  source 1..120: mol_type = other DNA

SEQ ID NO: 68188 - DNA, 120 bp, synthetic construct; identical to SEQ ID NO: 11016
  source 1..120: mol_type = other DNA

SEQ ID NO: 68189 - DNA, 120 bp, synthetic construct; identical to SEQ ID NO: 38235
  source 1..120: mol_type = other DNA

SEQ ID NO: 68190 - DNA, 120 bp, synthetic construct; identical to SEQ ID NO: 38236
  source 1..120: mol_type = other DNA

SEQ ID NO: 68191 - DNA, 120 bp, synthetic construct; identical to SEQ ID NO: 38237
  source 1..120: mol_type = other DNA

SEQ ID NO: 68192 - DNA, 120 bp, synthetic construct; identical to SEQ ID NO: 38238
  source 1..120: mol_type = other DNA

SEQ ID NO: 68193 - DNA, 120 bp, synthetic construct; identical to SEQ ID NO: 11017
  source 1..120: mol_type = other DNA

SEQ ID NO: 68194 - DNA, 120 bp, synthetic construct; identical to SEQ ID NO: 38240
  source 1..120: mol_type = other DNA

SEQ ID NO: 68195 - DNA, 120 bp, synthetic construct; identical to SEQ ID NO: 38241
  source 1..120: mol_type = other DNA

SEQ ID NO: 68196 - DNA, 120 bp, synthetic construct; identical to SEQ ID NO: 38242
  source 1..120: mol_type = other DNA

SEQ ID NO: 68197 - DNA, 120 bp, synthetic construct; identical to SEQ ID NO: 11018
  source 1..120: mol_type = other DNA

SEQ ID NO: 68198 - DNA, 120 bp, synthetic construct; identical to SEQ ID NO: 38244
  source 1..120: mol_type = other DNA

SEQ ID NO: 68199 - DNA, 120 bp, synthetic construct; identical to SEQ ID NO: 38245
  source 1..120: mol_type = other DNA

SEQ ID NO: 68200 - DNA, 120 bp, synthetic construct; identical to SEQ ID NO: 11019
  source 1..120: mol_type = other DNA

SEQ ID NO: 68201 - DNA, 120 bp, synthetic construct; identical to SEQ ID NO: 38247
  source 1..120: mol_type = other DNA

SEQ ID NO: 68202 - DNA, 120 bp, synthetic construct; identical to SEQ ID NO: 38248
  source 1..120: mol_type = other DNA

SEQ ID NO: 68203 - DNA, 120 bp, synthetic construct; identical to SEQ ID NO: 38249
  source 1..120: mol_type = other DNA

SEQ ID NO: 68204 - DNA, 120 bp, synthetic construct; identical to SEQ ID NO: 11020
  source 1..120: mol_type = other DNA

SEQ ID NO: 68205 - DNA, 120 bp, synthetic construct; identical to SEQ ID NO: 38251
  source 1..120: mol_type = other DNA

SEQ ID NO: 68206 - DNA, 120 bp, synthetic construct; identical to SEQ ID NO: 38252
  source 1..120: mol_type = other DNA

SEQ ID NO: 68207 - DNA, 120 bp, synthetic construct; identical to SEQ ID NO: 38253
  source 1..120: mol_type = other DNA

SEQ ID NO: 68208 - DNA, 120 bp, synthetic construct; identical to SEQ ID NO: 38254
  source 1..120: mol_type = other DNA

SEQ ID NO: 68209 - DNA, 120 bp, synthetic construct; identical to SEQ ID NO: 11021
  source 1..120: mol_type = other DNA

SEQ ID NO: 68210 - DNA, 120 bp, synthetic construct; identical to SEQ ID NO: 38256
  source 1..120: mol_type = other DNA

SEQ ID NO: 68211 - DNA, 120 bp, synthetic construct; identical to SEQ ID NO: 38257
  source 1..120: mol_type = other DNA

SEQ ID NO: 68212 - DNA, 120 bp, synthetic construct; identical to SEQ ID NO: 11022
  source 1..120: mol_type = other DNA

SEQ ID NO: 68213 - DNA, 120 bp, synthetic construct; identical to SEQ ID NO: 38259
  source 1..120: mol_type = other DNA

SEQ ID NO: 68214 - DNA, 120 bp, synthetic construct; identical to SEQ ID NO: 38260
  source 1..120: mol_type = other DNA

SEQ ID NO: 68215 - DNA, 120 bp, synthetic construct; identical to SEQ ID NO: 38261
  source 1..120: mol_type = other DNA

SEQ ID NO: 68216 - DNA, 120 bp, synthetic construct; identical to SEQ ID NO: 38262
  source 1..120: mol_type = other DNA

SEQ ID NO: 68217 - DNA, 120 bp, synthetic construct; identical to SEQ ID NO: 11023
  source 1..120: mol_type = other DNA

SEQ ID NO: 68218 - DNA, 120 bp, synthetic construct; identical to SEQ ID NO: 38264
  source 1..120: mol_type = other DNA

SEQ ID NO: 68219 - DNA, 120 bp, synthetic construct; identical to SEQ ID NO: 38265
  source 1..120: mol_type = other DNA

SEQ ID NO: 68220 - DNA, 120 bp, synthetic construct; identical to SEQ ID NO: 38266
  source 1..120: mol_type = other DNA

SEQ ID NO: 68221 - DNA, 120 bp, synthetic construct; identical to SEQ ID NO: 11024
  source 1..120: mol_type = other DNA

SEQ ID NO: 68222 - DNA, 120 bp, synthetic construct; identical to SEQ ID NO: 38268
  source 1..120: mol_type = other DNA

SEQ ID NO: 68223 - DNA, 120 bp, synthetic construct; identical to SEQ ID NO: 38269
  source 1..120: mol_type = other DNA

SEQ ID NO: 68224 - DNA, 120 bp, synthetic construct; identical to SEQ ID NO: 11025
  source 1..120: mol_type = other DNA

SEQ ID NO: 68225 - DNA, 120 bp, synthetic construct; identical to SEQ ID NO: 38271
  source 1..120: mol_type = other DNA

SEQ ID NO: 68226 - DNA, 120 bp, synthetic construct; identical to SEQ ID NO: 38272
  source 1..120: mol_type = other DNA

SEQ ID NO: 68227 - DNA, 120 bp, synthetic construct; identical to SEQ ID NO: 38273
  source 1..120: mol_type = other DNA

SEQ ID NO: 68228 - DNA, 120 bp, synthetic construct; identical to SEQ ID NO: 38274
  source 1..120: mol_type = other DNA

SEQ ID NO: 68229 - DNA, 120 bp, synthetic construct; identical to SEQ ID NO: 11026
  source 1..120: mol_type = other DNA

SEQ ID NO: 68230 - DNA, 120 bp, synthetic construct; identical to SEQ ID NO: 38276
  source 1..120: mol_type = other DNA

SEQ ID NO: 68231 - DNA, 120 bp, synthetic construct; identical to SEQ ID NO: 38277
  source 1..120: mol_type = other DNA

SEQ ID NO: 68232 - DNA, 120 bp, synthetic construct; identical to SEQ ID NO: 11027
  source 1..120: mol_type = other DNA

SEQ ID NO: 68233 - DNA, 120 bp, synthetic construct; identical to SEQ ID NO: 38279
  source 1..120: mol_type = other DNA

SEQ ID NO: 68234 - DNA, 120 bp, synthetic construct; identical to SEQ ID NO: 38280
  source 1..120: mol_type = other DNA

SEQ ID NO: 68235 - DNA, 120 bp, synthetic construct; identical to SEQ ID NO: 38281
  source 1..120: mol_type = other DNA

SEQ ID NO: 68236 - DNA, 120 bp, synthetic construct; identical to SEQ ID NO: 38282
  source 1..120: mol_type = other DNA

SEQ ID NO: 68237 - DNA, 120 bp, synthetic construct; identical to SEQ ID NO: 11028
  source 1..120: mol_type = other DNA

SEQ ID NO: 68238 - DNA, 120 bp, synthetic construct; identical to SEQ ID NO: 38284
  source 1..120: mol_type = other DNA

SEQ ID NO: 68239 - DNA, 120 bp, synthetic construct; identical to SEQ ID NO: 38285
  source 1..120: mol_type = other DNA

SEQ ID NO: 68240 - DNA, 120 bp, synthetic construct; identical to SEQ ID NO: 11029
  source 1..120: mol_type = other DNA

SEQ ID NO: 68241 - DNA, 120 bp, synthetic construct; identical to SEQ ID NO: 38287
  source 1..120: mol_type = other DNA

SEQ ID NO: 68242 - DNA, 120 bp, synthetic construct; identical to SEQ ID NO: 11030
  source 1..120: mol_type = other DNA

SEQ ID NO: 68243 - DNA, 120 bp, synthetic construct; identical to SEQ ID NO: 38289
  source 1..120: mol_type = other DNA

SEQ ID NO: 68244 - DNA, 120 bp, synthetic construct; identical to SEQ ID NO: 38290
  source 1..120: mol_type = other DNA

SEQ ID NO: 68245 - DNA, 120 bp, synthetic construct; identical to SEQ ID NO: 38291
  source 1..120: mol_type = other DNA

SEQ ID NO: 68246 - DNA, 120 bp, synthetic construct; identical to SEQ ID NO: 11031
  source 1..120: mol_type = other DNA

SEQ ID NO: 68247 - DNA, 120 bp, synthetic construct; identical to SEQ ID NO: 38293
  source 1..120: mol_type = other DNA

SEQ ID NO: 68248 - DNA, 120 bp, synthetic construct; identical to SEQ ID NO: 38294
  source 1..120: mol_type = other DNA

SEQ ID NO: 68249 - DNA, 120 bp, synthetic construct; identical to SEQ ID NO: 11032
  source 1..120: mol_type = other DNA

SEQ ID NO: 68250 - DNA, 120 bp, synthetic construct; identical to SEQ ID NO: 38296
  source 1..120: mol_type = other DNA

SEQ ID NO: 68251 - DNA, 120 bp, synthetic construct; identical to SEQ ID NO: 38297
  source 1..120: mol_type = other DNA

SEQ ID NO: 68252 - DNA, 120 bp, synthetic construct; identical to SEQ ID NO: 38298
  source 1..120: mol_type = other DNA

SEQ ID NO: 68253 - DNA, 120 bp, synthetic construct; identical to SEQ ID NO: 11033
  source 1..120: mol_type = other DNA

SEQ ID NO: 68254 - DNA, 120 bp, synthetic construct; identical to SEQ ID NO: 38300
  source 1..120: mol_type = other DNA

SEQ ID NO: 68255 - DNA, 120 bp, synthetic construct; identical to SEQ ID NO: 38301
  source 1..120: mol_type = other DNA

SEQ ID NO: 68256 - DNA, 120 bp, synthetic construct; identical to SEQ ID NO: 38302
  source 1..120: mol_type = other DNA

SEQ ID NO: 68257 - DNA, 120 bp, synthetic construct; identical to SEQ ID NO: 38303
  source 1..120: mol_type = other DNA

SEQ ID NO: 68258 - DNA, 120 bp, synthetic construct; identical to SEQ ID NO: 11034
  source 1..120: mol_type = other DNA

SEQ ID NO: 68259 - DNA, 120 bp, synthetic construct; identical to SEQ ID NO: 38305
  source 1..120: mol_type = other DNA

SEQ ID NO: 68260 - DNA, 120 bp, synthetic construct; identical to SEQ ID NO: 38306
  source 1..120: mol_type = other DNA

SEQ ID NO: 68261 - DNA, 120 bp, synthetic construct; identical to SEQ ID NO: 11035
  source 1..120: mol_type = other DNA

SEQ ID NO: 68262 - DNA, 120 bp, synthetic construct; identical to SEQ ID NO: 38308
  source 1..120: mol_type = other DNA

SEQ ID NO: 68263 - DNA, 120 bp, synthetic construct; identical to SEQ ID NO: 38309
  source 1..120: mol_type = other DNA

SEQ ID NO: 68264 - DNA, 120 bp, synthetic construct; identical to SEQ ID NO: 38310
  source 1..120: mol_type = other DNA

SEQ ID NO: 68265 - DNA, 120 bp, synthetic construct; identical to SEQ ID NO: 38311
  source 1..120: mol_type = other DNA

SEQ ID NO: 68266 - DNA, 120 bp, synthetic construct; identical to SEQ ID NO: 11036
  source 1..120: mol_type = other DNA

SEQ ID NO: 68267 - DNA, 120 bp, synthetic construct; identical to SEQ ID NO: 38313
  source 1..120: mol_type = other DNA

SEQ ID NO: 68268 - DNA, 120 bp, synthetic construct; identical to SEQ ID NO: 38314
  source 1..120: mol_type = other DNA

SEQ ID NO: 68269 - DNA, 120 bp, synthetic construct; identical to SEQ ID NO: 11037
  source 1..120: mol_type = other DNA

SEQ ID NO: 68270 - DNA, 120 bp, synthetic construct; identical to SEQ ID NO: 38316
  source 1..120: mol_type = other DNA

SEQ ID NO: 68271 - DNA, 120 bp, synthetic construct; identical to SEQ ID NO: 38317
  source 1..120: mol_type = other DNA

SEQ ID NO: 68272 - DNA, 120 bp, synthetic construct; identical to SEQ ID NO: 38318
  source 1..120: mol_type = other DNA

SEQ ID NO: 68273 - DNA, 120 bp, synthetic construct; identical to SEQ ID NO: 38319
  source 1..120: mol_type = other DNA

SEQ ID NO: 68274 - DNA, 120 bp, synthetic construct; identical to SEQ ID NO: 11038
  source 1..120: mol_type = other DNA

SEQ ID NO: 68275 - DNA, 120 bp, synthetic construct; identical to SEQ ID NO: 38321
  source 1..120: mol_type = other DNA

SEQ ID NO: 68276 - DNA, 120 bp, synthetic construct; identical to SEQ ID NO: 38322
  source 1..120: mol_type = other DNA

SEQ ID NO: 68277 - DNA, 120 bp, synthetic construct; identical to SEQ ID NO: 38323
  source 1..120: mol_type = other DNA

SEQ ID NO: 68278 - DNA, 120 bp, synthetic construct; identical to SEQ ID NO: 11039
  source 1..120: mol_type = other DNA

SEQ ID NO: 68279 - DNA, 120 bp, synthetic construct; identical to SEQ ID NO: 38325
  source 1..120: mol_type = other DNA

SEQ ID NO: 68280 - DNA, 120 bp, synthetic construct; identical to SEQ ID NO: 38326
  source 1..120: mol_type = other DNA

SEQ ID NO: 68281 - DNA, 120 bp, synthetic construct; identical to SEQ ID NO: 11040
  source 1..120: mol_type = other DNA

SEQ ID NO: 68282 - DNA, 120 bp, synthetic construct; identical to SEQ ID NO: 38328
  source 1..120: mol_type = other DNA

SEQ ID NO: 68283 - DNA, 120 bp, synthetic construct; identical to SEQ ID NO: 38329
  source 1..120: mol_type = other DNA

SEQ ID NO: 68284 - DNA, 120 bp, synthetic construct; identical to SEQ ID NO: 38330
  source 1..120: mol_type = other DNA

SEQ ID NO: 68285 - DNA, 120 bp, synthetic construct; identical to SEQ ID NO: 11041
  source 1..120: mol_type = other DNA

SEQ ID NO: 68286 - DNA, 120 bp, synthetic construct; identical to SEQ ID NO: 38332
  source 1..120: mol_type = other DNA

SEQ ID NO: 68287 - DNA, 120 bp, synthetic construct; identical to SEQ ID NO: 38333
  source 1..120: mol_type = other DNA

SEQ ID NO: 68288 - DNA, 120 bp, synthetic construct; identical to SEQ ID NO: 38334
  source 1..120: mol_type = other DNA

SEQ ID NO: 68289 - DNA, 120 bp, synthetic construct; identical to SEQ ID NO: 11042
  source 1..120: mol_type = other DNA

SEQ ID NO: 68290 - DNA, 120 bp, synthetic construct; identical to SEQ ID NO: 38336
  source 1..120: mol_type = other DNA

SEQ ID NO: 68291 - DNA, 120 bp, synthetic construct; identical to SEQ ID NO: 38337
  source 1..120: mol_type = other DNA

SEQ ID NO: 68292 - DNA, 120 bp, synthetic construct; identical to SEQ ID NO: 38338
  source 1..120: mol_type = other DNA

SEQ ID NO: 68293 - DNA, 120 bp, synthetic construct; identical to SEQ ID NO: 38339
  source 1..120: mol_type = other DNA

SEQ ID NO: 68294 - DNA, 120 bp, synthetic construct; identical to SEQ ID NO: 11043
  source 1..120: mol_type = other DNA

SEQ ID NO: 68295 - DNA, 120 bp, synthetic construct; identical to SEQ ID NO: 38341
  source 1..120: mol_type = other DNA

SEQ ID NO: 68296 - DNA, 120 bp, synthetic construct; identical to SEQ ID NO: 38342
  source 1..120: mol_type = other DNA

SEQ ID NO: 68297 - DNA, 120 bp, synthetic construct; identical to SEQ ID NO: 11044
  source 1..120: mol_type = other DNA

SEQ ID NO: 68298 - DNA, 120 bp, synthetic construct; identical to SEQ ID NO: 38344
  source 1..120: mol_type = other DNA

SEQ ID NO: 68299 - DNA, 120 bp, synthetic construct; identical to SEQ ID NO: 38345
  source 1..120: mol_type = other DNA

SEQ ID NO: 68300 - DNA, 120 bp, synthetic construct; identical to SEQ ID NO: 38346
  source 1..120: mol_type = other DNA

SEQ ID NO: 68301 - DNA, 120 bp, synthetic construct; identical to SEQ ID NO: 38347
  source 1..120: mol_type = other DNA

SEQ ID NO: 68302 - DNA, 120 bp, synthetic construct; identical to SEQ ID NO: 11045
  source 1..120: mol_type = other DNA

SEQ ID NO: 68303 - DNA, 120 bp, synthetic construct; identical to SEQ ID NO: 38349
  source 1..120: mol_type = other DNA

SEQ ID NO: 68304 - DNA, 120 bp, synthetic construct; identical to SEQ ID NO: 38350
  source 1..120: mol_type = other DNA

SEQ ID NO: 68305 - DNA, 120 bp, synthetic construct; identical to SEQ ID NO: 11046
  source 1..120: mol_type = other DNA

SEQ ID NO: 68306 - DNA, 120 bp, synthetic construct; identical to SEQ ID NO: 38352
  source 1..120: mol_type = other DNA

SEQ ID NO: 68307 - DNA, 120 bp, synthetic construct; identical to SEQ ID NO: 38353
  source 1..120: mol_type = other DNA

SEQ ID NO: 68308 - DNA, 120 bp, synthetic construct; identical to SEQ ID NO: 38354
  source 1..120: mol_type = other DNA

SEQ ID NO: 68309 - DNA, 120 bp, synthetic construct; identical to SEQ ID NO: 11047
  source 1..120: mol_type = other DNA

SEQ ID NO: 68310 - DNA, 120 bp, synthetic construct; identical to SEQ ID NO: 38356
  source 1..120: mol_type = other DNA

SEQ ID NO: 68311 - DNA, 120 bp, synthetic construct; identical to SEQ ID NO: 38357
  source 1..120: mol_type = other DNA

SEQ ID NO: 68312 - DNA, 120 bp, synthetic construct; identical to SEQ ID NO: 38358
  source 1..120: mol_type = other DNA

SEQ ID NO: 68313 - DNA, 120 bp, synthetic construct; identical to SEQ ID NO: 38359
  source 1..120: mol_type = other DNA

SEQ ID NO: 68314 - DNA, 120 bp, synthetic construct; identical to SEQ ID NO: 11048
  source 1..120: mol_type = other DNA

SEQ ID NO: 68315 - DNA, 120 bp, synthetic construct; identical to SEQ ID NO: 38361
  source 1..120: mol_type = other DNA

SEQ ID NO: 68316 - DNA, 120 bp, synthetic construct; identical to SEQ ID NO: 38362
  source 1..120: mol_type = other DNA

SEQ ID NO: 68317 - DNA, 120 bp, synthetic construct; identical to SEQ ID NO: 11049
  source 1..120: mol_type = other DNA

SEQ ID NO: 68318 - DNA, 120 bp, synthetic construct; identical to SEQ ID NO: 38364
  source 1..120: mol_type = other DNA

SEQ ID NO: 68319 - DNA, 120 bp, synthetic construct; identical to SEQ ID NO: 38365
  source 1..120: mol_type = other DNA

SEQ ID NO: 68320 - DNA, 120 bp, synthetic construct; identical to SEQ ID NO: 38366
  source 1..120: mol_type = other DNA

SEQ ID NO: 68321 - DNA, 120 bp, synthetic construct; identical to SEQ ID NO: 11050
  source 1..120: mol_type = other DNA

SEQ ID NO: 68322 - DNA, 120 bp, synthetic construct; identical to SEQ ID NO: 38368
  source 1..120: mol_type = other DNA

SEQ ID NO: 68323 - DNA, 120 bp, synthetic construct; identical to SEQ ID NO: 38369
  source 1..120: mol_type = other DNA

SEQ ID NO: 68324 - DNA, 120 bp, synthetic construct; identical to SEQ ID NO: 38370
  source 1..120: mol_type = other DNA

SEQ ID NO: 68325 - DNA, 120 bp, synthetic construct; identical to SEQ ID NO: 11051
  source 1..120: mol_type = other DNA

SEQ ID NO: 68326 - DNA, 120 bp, synthetic construct; identical to SEQ ID NO: 38372
  source 1..120: mol_type = other DNA

SEQ ID NO: 68327 - DNA, 120 bp, synthetic construct; identical to SEQ ID NO: 38373
  source 1..120: mol_type = other DNA

SEQ ID NO: 68328 - DNA, 120 bp, synthetic construct; identical to SEQ ID NO: 38374
  source 1..120: mol_type = other DNA

SEQ ID NO: 68329 - DNA, 120 bp, synthetic construct; identical to SEQ ID NO: 38375
  source 1..120: mol_type = other DNA

SEQ ID NO: 68330 - DNA, 120 bp, synthetic construct; identical to SEQ ID NO: 11052
  source 1..120: mol_type = other DNA

SEQ ID NO: 68331 - DNA, 120 bp, synthetic construct; identical to SEQ ID NO: 38377
  source 1..120: mol_type = other DNA

SEQ ID NO: 68332 - DNA, 120 bp, synthetic construct; identical to SEQ ID NO: 38378
  source 1..120: mol_type = other DNA

SEQ ID NO: 68333 - DNA, 120 bp, synthetic construct; identical to SEQ ID NO: 11053
  source 1..120: mol_type = other DNA

SEQ ID NO: 68334 - DNA, 120 bp, synthetic construct; identical to SEQ ID NO: 38380
  source 1..120: mol_type = other DNA

SEQ ID NO: 68335 - DNA, 120 bp, synthetic construct; identical to SEQ ID NO: 38381
  source 1..120: mol_type = other DNA

SEQ ID NO: 68336 - DNA, 120 bp, synthetic construct; identical to SEQ ID NO: 38382
  source 1..120: mol_type = other DNA

SEQ ID NO: 68337 - DNA, 120 bp, synthetic construct; identical to SEQ ID NO: 11054
  source 1..120: mol_type = other DNA

SEQ ID NO: 68338 - DNA, 120 bp, synthetic construct; identical to SEQ ID NO: 38384
  source 1..120: mol_type = other DNA

SEQ ID NO: 68339 - DNA, 120 bp, synthetic construct; identical to SEQ ID NO: 38385
  source 1..120: mol_type = other DNA

SEQ ID NO: 68340 - DNA, 120 bp, synthetic construct; identical to SEQ ID NO: 38386
  source 1..120: mol_type = other DNA

SEQ ID NO: 68341 - DNA, 120 bp, synthetic construct; identical to SEQ ID NO: 11055
  source 1..120: mol_type = other DNA

SEQ ID NO: 68342 - DNA, 120 bp, synthetic construct; identical to SEQ ID NO: 38388
  source 1..120: mol_type = other DNA

SEQ ID NO: 68343 - DNA, 120 bp, synthetic construct; identical to SEQ ID NO: 38389
  source 1..120: mol_type = other DNA

SEQ ID NO: 68344 - DNA, 120 bp, synthetic construct; identical to SEQ ID NO: 38390
  source 1..120: mol_type = other DNA

SEQ ID NO: 68345 - DNA, 120 bp, synthetic construct; identical to SEQ ID NO: 38391
  source 1..120: mol_type = other DNA

SEQ ID NO: 68346 - DNA, 120 bp, synthetic construct; identical to SEQ ID NO: 11056
  source 1..120: mol_type = other DNA

SEQ ID NO: 68347 - DNA, 120 bp, synthetic construct; identical to SEQ ID NO: 38393
  source 1..120: mol_type = other DNA

SEQ ID NO: 68348 - DNA, 120 bp, synthetic construct; identical to SEQ ID NO: 38394
  source 1..120: mol_type = other DNA

SEQ ID NO: 68349 - DNA, 120 bp, synthetic construct; identical to SEQ ID NO: 38395
  source 1..120: mol_type = other DNA

SEQ ID NO: 68350 - DNA, 120 bp, synthetic construct; identical to SEQ ID NO: 11057
  source 1..120: mol_type = other DNA

SEQ ID NO: 68351 - DNA, 120 bp, synthetic construct; identical to SEQ ID NO: 38397
  source 1..120: mol_type = other DNA

SEQ ID NO: 68352 - DNA, 120 bp, synthetic construct; identical to SEQ ID NO: 38398
  source 1..120: mol_type = other DNA

SEQ ID NO: 68353 - DNA, 120 bp, synthetic construct; identical to SEQ ID NO: 38399
  source 1..120: mol_type = other DNA

SEQ ID NO: 68354 - DNA, 120 bp, synthetic construct; identical to SEQ ID NO: 38400
  source 1..120: mol_type = other DNA

SEQ ID NO: 68355 - DNA, 120 bp, synthetic construct; identical to SEQ ID NO: 11058
  source 1..120: mol_type = other DNA

SEQ ID NO: 68356 - DNA, 120 bp, synthetic construct; identical to SEQ ID NO: 38402
  source 1..120: mol_type = other DNA

SEQ ID NO: 68357 - DNA, 120 bp, synthetic construct; identical to SEQ ID NO: 38403
  source 1..120: mol_type = other DNA

SEQ ID NO: 68358 - DNA, 120 bp, synthetic construct; identical to SEQ ID NO: 38404
  source 1..120: mol_type = other DNA

SEQ ID NO: 68359 - DNA, 120 bp, synthetic construct; identical to SEQ ID NO: 11059
  source 1..120: mol_type = other DNA

SEQ ID NO: 68360 - DNA, 120 bp, synthetic construct; identical to SEQ ID NO: 38406
  source 1..120: mol_type = other DNA

SEQ ID NO: 68361 - DNA, 120 bp, synthetic construct; identical to SEQ ID NO: 38407
  source 1..120: mol_type = other DNA

SEQ ID NO: 68362 - DNA, 120 bp, synthetic construct; identical to SEQ ID NO: 38408
  source 1..120: mol_type = other DNA

SEQ ID NO: 68363 - DNA, 120 bp, synthetic construct; identical to SEQ ID NO: 11060
  source 1..120: mol_type = other DNA

SEQ ID NO: 68364 - DNA, 120 bp, synthetic construct; identical to SEQ ID NO: 38410
  source 1..120: mol_type = other DNA

SEQ ID NO: 68365 - DNA, 120 bp, synthetic construct; identical to SEQ ID NO: 38411
  source 1..120: mol_type = other DNA

SEQ ID NO: 68366 - DNA, 120 bp, synthetic construct; identical to SEQ ID NO: 38412
  source 1..120: mol_type = other DNA

SEQ ID NO: 68367 - DNA, 120 bp, synthetic construct; identical to SEQ ID NO: 11061
  source 1..120: mol_type = other DNA

SEQ ID NO: 68368 - DNA, 120 bp, synthetic construct; identical to SEQ ID NO: 38414
  source 1..120: mol_type = other DNA

SEQ ID NO: 68369 - DNA, 120 bp, synthetic construct; identical to SEQ ID NO: 38415
  source 1..120: mol_type = other DNA

SEQ ID NO: 68370 - DNA, 120 bp, synthetic construct; identical to SEQ ID NO: 38416
  source 1..120: mol_type = other DNA

SEQ ID NO: 68371 - DNA, 120 bp, synthetic construct; identical to SEQ ID NO: 11062
  source 1..120: mol_type = other DNA

SEQ ID NO: 68372 - DNA, 120 bp, synthetic construct; identical to SEQ ID NO: 38418
  source 1..120: mol_type = other DNA

SEQ ID NO: 68373 - DNA, 120 bp, synthetic construct; identical to SEQ ID NO: 38419
  source 1..120: mol_type = other DNA

SEQ ID NO: 68374 - DNA, 120 bp, synthetic construct; identical to SEQ ID NO: 38420
  source 1..120: mol_type = other DNA

SEQ ID NO: 68375 - DNA, 120 bp, synthetic construct; identical to SEQ ID NO: 38421
  source 1..120: mol_type = other DNA

SEQ ID NO: 68376 - DNA, 120 bp, synthetic construct; identical to SEQ ID NO: 11063
  source 1..120: mol_type = other DNA

SEQ ID NO: 68377 - DNA, 120 bp, synthetic construct; identical to SEQ ID NO: 38423
  source 1..120: mol_type = other DNA

SEQ ID NO: 68378 - DNA, 120 bp, synthetic construct; identical to SEQ ID NO: 38424
  source 1..120: mol_type = other DNA

SEQ ID NO: 68379 - DNA, 120 bp, synthetic construct; identical to SEQ ID NO: 11064
  source 1..120: mol_type = other DNA

SEQ ID NO: 68380 - DNA, 120 bp, synthetic construct; identical to SEQ ID NO: 38426
  source 1..120: mol_type = other DNA

SEQ ID NO: 68381 - DNA, 120 bp, synthetic construct; identical to SEQ ID NO: 38427
  source 1..120: mol_type = other DNA

SEQ ID NO: 68382 - DNA, 120 bp, synthetic construct; identical to SEQ ID NO: 38428
  source 1..120: mol_type = other DNA

SEQ ID NO: 68383 - DNA, 120 bp, synthetic construct; identical to SEQ ID NO: 11065
  source 1..120: mol_type = other DNA

SEQ ID NO: 68384 - DNA, 120 bp, synthetic construct; identical to SEQ ID NO: 38430
  source 1..120: mol_type = other DNA

SEQ ID NO: 68385 - DNA, 120 bp, synthetic construct; identical to SEQ ID NO: 38431
  source 1..120: mol_type = other DNA

SEQ ID NO: 68386 - DNA, 120 bp, synthetic construct; identical to SEQ ID NO: 38432
  source 1..120: mol_type = other DNA

SEQ ID NO: 68387 - DNA, 120 bp, synthetic construct; identical to SEQ ID NO: 38433
  source 1..120: mol_type = other DNA

SEQ ID NO: 68388 - DNA, 120 bp, synthetic construct; identical to SEQ ID NO: 11066
  source 1..120: mol_type = other DNA

SEQ ID NO: 68389 - DNA, 120 bp, synthetic construct; identical to SEQ ID NO: 38435
  source 1..120: mol_type = other DNA

SEQ ID NO: 68390 - DNA, 120 bp, synthetic construct; identical to SEQ ID NO: 38436
  source 1..120: mol_type = other DNA

SEQ ID NO: 68391 - DNA, 120 bp, synthetic construct; identical to SEQ ID NO: 11067
  source 1..120: mol_type = other DNA

SEQ ID NO: 68392 - DNA, 120 bp, synthetic construct; identical to SEQ ID NO: 38438
  source 1..120: mol_type = other DNA

SEQ ID NO: 68393 - DNA, 120 bp, synthetic construct; identical to SEQ ID NO: 38439
  source 1..120: mol_type = other DNA

SEQ ID NO: 68394 - DNA, 120 bp, synthetic construct; identical to SEQ ID NO: 38440
  source 1..120: mol_type = other DNA

SEQ ID NO: 68395 - DNA, 120 bp, synthetic construct; identical to SEQ ID NO: 11068
  source 1..120: mol_type = other DNA

SEQ ID NO: 68396 - DNA, 120 bp, synthetic construct; identical to SEQ ID NO: 38442
  source 1..120: mol_type = other DNA

SEQ ID NO: 68397 - DNA, 120 bp, synthetic construct; identical to SEQ ID NO: 38443
  source 1..120: mol_type = other DNA

SEQ ID NO: 68398 - DNA, 120 bp, synthetic construct; identical to SEQ ID NO: 38444
  source 1..120: mol_type = other DNA

SEQ ID NO: 68399 - DNA, 120 bp, synthetic construct; identical to SEQ ID NO: 38445
  source 1..120: mol_type = other DNA

SEQ ID NO: 68400 - DNA, 120 bp, synthetic construct; identical to SEQ ID NO: 11069
  source 1..120: mol_type = other DNA

SEQ ID NO: 68401 - DNA, 120 bp, synthetic construct; identical to SEQ ID NO: 38447
  source 1..120: mol_type = other DNA

SEQ ID NO: 68402 - DNA, 120 bp, synthetic construct; identical to SEQ ID NO: 38448
  source 1..120: mol_type = other DNA

SEQ ID NO: 68403 - DNA, 120 bp, synthetic construct; identical to SEQ ID NO: 11070
  source 1..120: mol_type = other DNA

SEQ ID NO: 68404 - DNA, 120 bp, synthetic construct; identical to SEQ ID NO: 38450
  source 1..120: mol_type = other DNA

SEQ ID NO: 68405 - DNA, 120 bp, synthetic construct; identical to SEQ ID NO: 38451
  source 1..120: mol_type = other DNA

SEQ ID NO: 68406 - DNA, 120 bp, synthetic construct; identical to SEQ ID NO: 38452
  source 1..120: mol_type = other DNA

SEQ ID NO: 68407 - DNA, 120 bp, synthetic construct; identical to SEQ ID NO: 11071
  source 1..120: mol_type = other DNA

SEQ ID NO: 68408 - DNA, 120 bp, synthetic construct; identical to SEQ ID NO: 38454
  source 1..120: mol_type = other DNA

SEQ ID NO: 68409 - DNA, 120 bp, synthetic construct; identical to SEQ ID NO: 38455
  source 1..120: mol_type = other DNA

SEQ ID NO: 68410 - DNA, 120 bp, synthetic construct; identical to SEQ ID NO: 38456
  source 1..120: mol_type = other DNA

SEQ ID NO: 68411 - DNA, 120 bp, synthetic construct; identical to SEQ ID NO: 11072
  source 1..120: mol_type = other DNA

SEQ ID NO: 68412 - DNA, 120 bp, synthetic construct; identical to SEQ ID NO: 38458
  source 1..120: mol_type = other DNA

SEQ ID NO: 68413 - DNA, 120 bp, synthetic construct; identical to SEQ ID NO: 38459
  source 1..120: mol_type = other DNA

SEQ ID NO: 68414 - DNA, 120 bp, synthetic construct; identical to SEQ ID NO: 38460
  source 1..120: mol_type = other DNA

SEQ ID NO: 68415 - DNA, 120 bp, synthetic construct; identical to SEQ ID NO: 11073
  source 1..120: mol_type = other DNA

SEQ ID NO: 68416 - DNA, 120 bp, synthetic construct; identical to SEQ ID NO: 38462
  source 1..120: mol_type = other DNA

SEQ ID NO: 68417 - DNA, 120 bp, synthetic construct; identical to SEQ ID NO: 38463
  source 1..120: mol_type = other DNA

SEQ ID NO: 68418 - DNA, 120 bp, synthetic construct; identical to SEQ ID NO: 38464
  source 1..120: mol_type = other DNA

SEQ ID NO: 68419 - DNA, 120 bp, synthetic construct; identical to SEQ ID NO: 11074
  source 1..120: mol_type = other DNA

SEQ ID NO: 68420 - DNA, 120 bp, synthetic construct; identical to SEQ ID NO: 38466
  source 1..120: mol_type = other DNA

SEQ ID NO: 68421 - DNA, 120 bp, synthetic construct; identical to SEQ ID NO: 38467
  source 1..120: mol_type = other DNA

SEQ ID NO: 68422 - DNA, 120 bp, synthetic construct; identical to SEQ ID NO: 38468
  source 1..120: mol_type = other DNA

SEQ ID NO: 68423 - DNA, 120 bp, synthetic construct; identical to SEQ ID NO: 11075
  source 1..120: mol_type = other DNA

SEQ ID NO: 68424 - DNA, 120 bp, synthetic construct; identical to SEQ ID NO: 38470
  source 1..120: mol_type = other DNA

SEQ ID NO: 68425 - DNA, 120 bp, synthetic construct; identical to SEQ ID NO: 38471
  source 1..120: mol_type = other DNA

SEQ ID NO: 68426 - DNA, 120 bp, synthetic construct; identical to SEQ ID NO: 38472
  source 1..120: mol_type = other DNA

SEQ ID NO: 68427 - DNA, 120 bp, synthetic construct; identical to SEQ ID NO: 38473
  source 1..120: mol_type = other DNA

SEQ ID NO: 68428 - DNA, 120 bp, synthetic construct; identical to SEQ ID NO: 11076
  source 1..120: mol_type = other DNA

SEQ ID NO: 68429 - DNA, 120 bp, synthetic construct; identical to SEQ ID NO: 38475
  source 1..120: mol_type = other DNA

SEQ ID NO: 68430 - DNA, 120 bp, synthetic construct; identical to SEQ ID NO: 38476
  source 1..120: mol_type = other DNA

SEQ ID NO: 68431 - DNA, 120 bp, synthetic construct; identical to SEQ ID NO: 11077
  source 1..120: mol_type = other DNA

SEQ ID NO: 68432 - DNA, 120 bp, synthetic construct; identical to SEQ ID NO: 38478
  source 1..120: mol_type = other DNA

SEQ ID NO: 68433 - DNA, 120 bp, synthetic construct; identical to SEQ ID NO: 38479
  source 1..120: mol_type = other DNA

SEQ ID NO: 68434 - DNA, 120 bp, synthetic construct; identical to SEQ ID NO: 38480
  source 1..120: mol_type = other DNA

SEQ ID NO: 68435 - DNA, 120 bp, synthetic construct; identical to SEQ ID NO: 38481
  source 1..120: mol_type = other DNA

SEQ ID NO: 68436 - DNA, 120 bp, synthetic construct; identical to SEQ ID NO: 11078
  source 1..120: mol_type = other DNA

SEQ ID NO: 68437 - DNA, 120 bp, synthetic construct; identical to SEQ ID NO: 38483
  source 1..120: mol_type = other DNA

SEQ ID NO: 68438 - DNA, 120 bp, synthetic construct; identical to SEQ ID NO: 38484
  source 1..120: mol_type = other DNA

SEQ ID NO: 68439 - DNA, 120 bp, synthetic construct; identical to SEQ ID NO: 38485
  source 1..120: mol_type = other DNA

SEQ ID NO: 68440 - DNA, 120 bp, synthetic construct; identical to SEQ ID NO: 11079
  source 1..120: mol_type = other DNA

SEQ ID NO: 68441 - DNA, 120 bp, synthetic construct; identical to SEQ ID NO: 38487
  source 1..120: mol_type = other DNA

SEQ ID NO: 68442 - DNA, 120 bp, synthetic construct; identical to SEQ ID NO: 38488
  source 1..120: mol_type = other DNA

SEQ ID NO: 68443 - DNA, 120 bp, synthetic construct; identical to SEQ ID NO: 38489
  source 1..120: mol_type = other DNA

SEQ ID NO: 68444 - DNA, 120 bp, synthetic construct; identical to SEQ ID NO: 11080
  source 1..120: mol_type = other DNA

SEQ ID NO: 68445 - DNA, 120 bp, synthetic construct; identical to SEQ ID NO: 38491
  source 1..120: mol_type = other DNA

SEQ ID NO: 68446 - DNA, 120 bp, synthetic construct; identical to SEQ ID NO: 38492
  source 1..120: mol_type = other DNA

SEQ ID NO: 68447 - DNA, 120 bp, synthetic construct; identical to SEQ ID NO: 38493
  source 1..120: mol_type = other DNA

SEQ ID NO: 68448 - DNA, 120 bp, synthetic construct; identical to SEQ ID NO: 11081
  source 1..120: mol_type = other DNA

SEQ ID NO: 68449 - DNA, 120 bp, synthetic construct; identical to SEQ ID NO: 38495
  source 1..120: mol_type = other DNA

SEQ ID NO: 68450 - DNA, 120 bp, synthetic construct; identical to SEQ ID NO: 38496
  source 1..120: mol_type = other DNA

SEQ ID NO: 68451 - DNA, 120 bp, synthetic construct; identical to SEQ ID NO: 11082
  source 1..120: mol_type = other DNA

SEQ ID NO: 68452 - DNA, 120 bp, synthetic construct; identical to SEQ ID NO: 38498
  source 1..120: mol_type = other DNA

SEQ ID NO: 68453 - DNA, 120 bp, synthetic construct; identical to SEQ ID NO: 38499
  source 1..120: mol_type = other DNA

SEQ ID NO: 68454 - DNA, 120 bp, synthetic construct; identical to SEQ ID NO: 38500
  source 1..120: mol_type = other DNA

SEQ ID NO: 68455 - DNA, 120 bp, synthetic construct; identical to SEQ ID NO: 38501
  source 1..120: mol_type = other DNA

SEQ ID NO: 68456 - DNA, 120 bp, synthetic construct; identical to SEQ ID NO: 11083
  source 1..120: mol_type = other DNA

SEQ ID NO: 68457 - DNA, 120 bp, synthetic construct; identical to SEQ ID NO: 38503
  source 1..120: mol_type = other DNA

SEQ ID NO: 68458 - DNA, 120 bp, synthetic construct; identical to SEQ ID NO: 38504
  source 1..120: mol_type = other DNA

SEQ ID NO: 68459 - DNA, 120 bp, synthetic construct; identical to SEQ ID NO: 38505
  source 1..120: mol_type = other DNA

SEQ ID NO: 68460 - DNA, 120 bp, synthetic construct; identical to SEQ ID NO: 11084
  source 1..120: mol_type = other DNA

SEQ ID NO: 68461 - DNA, 120 bp, synthetic construct; identical to SEQ ID NO: 38507
  source 1..120: mol_type = other DNA

SEQ ID NO: 68462 - DNA, 120 bp, synthetic construct; identical to SEQ ID NO: 38508
  source 1..120: mol_type = other DNA

SEQ ID NO: 68463 - DNA, 120 bp, synthetic construct; identical to SEQ ID NO: 11085
  source 1..120: mol_type = other DNA

SEQ ID NO: 68464 - DNA, 120 bp, synthetic construct; identical to SEQ ID NO: 38510
  source 1..120: mol_type = other DNA

SEQ ID NO: 68465 - DNA, 120 bp, synthetic construct; identical to SEQ ID NO: 38511
  source 1..120: mol_type = other DNA

SEQ ID NO: 68466 - DNA, 120 bp, synthetic construct; identical to SEQ ID NO: 38512
  source 1..120: mol_type = other DNA

SEQ ID NO: 68467 - DNA, 120 bp, synthetic construct; identical to SEQ ID NO: 11086
  source 1..120: mol_type = other DNA

SEQ ID NO: 68468 - DNA, 120 bp, synthetic construct; identical to SEQ ID NO: 38514
  source 1..120: mol_type = other DNA

SEQ ID NO: 68469 - DNA, 120 bp, synthetic construct; identical to SEQ ID NO: 38515
  source 1..120: mol_type = other DNA

SEQ ID NO: 68470 - DNA, 120 bp, synthetic construct; identical to SEQ ID NO: 38516
  source 1..120: mol_type = other DNA

SEQ ID NO: 68471 - DNA, 120 bp, synthetic construct; identical to SEQ ID NO: 38517
  source 1..120: mol_type = other DNA

SEQ ID NO: 68472 - DNA, 120 bp, synthetic construct; identical to SEQ ID NO: 11087
  source 1..120: mol_type = other DNA

SEQ ID NO: 68473 - DNA, 120 bp, synthetic construct; identical to SEQ ID NO: 38519
  source 1..120: mol_type = other DNA

SEQ ID NO: 68474 - DNA, 120 bp, synthetic construct; identical to SEQ ID NO: 38520
  source 1..120: mol_type = other DNA

SEQ ID NO: 68475 - DNA, 120 bp, synthetic construct; identical to SEQ ID NO: 38521
  source 1..120: mol_type = other DNA

SEQ ID NO: 68476 - DNA, 120 bp, synthetic construct; identical to SEQ ID NO: 11088
  source 1..120: mol_type = other DNA

SEQ ID NO: 68477 - DNA, 120 bp, synthetic construct; identical to SEQ ID NO: 38523
  source 1..120: mol_type = other DNA

SEQ ID NO: 68478 - DNA, 120 bp, synthetic construct; identical to SEQ ID NO: 38524
  source 1..120: mol_type = other DNA

SEQ ID NO: 68479 - DNA, 120 bp, synthetic construct; identical to SEQ ID NO: 11089
  source 1..120: mol_type = other DNA

SEQ ID NO: 68480 - DNA, 120 bp, synthetic construct; identical to SEQ ID NO: 38526
  source 1..120: mol_type = other DNA

SEQ ID NO: 68481 - DNA, 120 bp, synthetic construct; identical to SEQ ID NO: 38527
  source 1..120: mol_type = other DNA

SEQ ID NO: 68482 - DNA, 120 bp, synthetic construct; identical to SEQ ID NO: 38528
  source 1..120: mol_type = other DNA

SEQ ID NO: 68483 - DNA, 120 bp, synthetic construct; identical to SEQ ID NO: 11090
  source 1..120: mol_type = other DNA

SEQ ID NO: 68484 - DNA, 120 bp, synthetic construct; identical to SEQ ID NO: 38530
  source 1..120: mol_type = other DNA

SEQ ID NO: 68485 - DNA, 120 bp, synthetic construct; identical to SEQ ID NO: 38531
  source 1..120: mol_type = other DNA

SEQ ID NO: 68486 - DNA, 120 bp, synthetic construct; identical to SEQ ID NO: 11091
  source 1..120: mol_type = other DNA

SEQ ID NO: 68487 - DNA, 120 bp, synthetic construct; identical to SEQ ID NO: 38533
  source 1..120: mol_type = other DNA

SEQ ID NO: 68488 - DNA, 120 bp, synthetic construct; identical to SEQ ID NO: 38534
  source 1..120: mol_type = other DNA

SEQ ID NO: 68489 - DNA, 120 bp, synthetic construct; identical to SEQ ID NO: 11092
  source 1..120: mol_type = other DNA

SEQ ID NO: 68490 - DNA, 120 bp, synthetic construct; identical to SEQ ID NO: 38536
  source 1..120: mol_type = other DNA

SEQ ID NO: 68491 - DNA, 120 bp, synthetic construct; identical to SEQ ID NO: 38537
  source 1..120: mol_type = other DNA

SEQ ID NO: 68492 - DNA, 120 bp, synthetic construct; identical to SEQ ID NO: 11093
  source 1..120: mol_type = other DNA

SEQ ID NO: 68493 - DNA, 120 bp, synthetic construct; identical to SEQ ID NO: 38539
  source 1..120: mol_type = other DNA

SEQ ID NO: 68494 - DNA, 120 bp, synthetic construct; identical to SEQ ID NO: 38540
  source 1..120: mol_type = other DNA

SEQ ID NO: 68495 - DNA, 120 bp, synthetic construct; identical to SEQ ID NO: 38541
  source 1..120: mol_type = other DNA

SEQ ID NO: 68496 - DNA, 120 bp, synthetic construct; identical to SEQ ID NO: 38542
  source 1..120: mol_type = other DNA

SEQ ID NO: 68497 - DNA, 120 bp, synthetic construct; identical to SEQ ID NO: 11094
  source 1..120: mol_type = other DNA

SEQ ID NO: 68498 - DNA, 120 bp, synthetic construct; identical to SEQ ID NO: 38544
  source 1..120: mol_type = other DNA

SEQ ID NO: 68499 - DNA, 120 bp, synthetic construct; identical to SEQ ID NO: 38545
  source 1..120: mol_type = other DNA

SEQ ID NO: 68500 - DNA, 120 bp, synthetic construct; identical to SEQ ID NO: 11095
  source 1..120: mol_type = other DNA

SEQ ID NO: 68501 - DNA, 120 bp, synthetic construct; identical to SEQ ID NO: 38547
  source 1..120: mol_type = other DNA

SEQ ID NO: 68502 - DNA, 120 bp, synthetic construct; identical to SEQ ID NO: 38548
  source 1..120: mol_type = other DNA

SEQ ID NO: 68503 - DNA, 120 bp, synthetic construct; identical to SEQ ID NO: 38549
  source 1..120: mol_type = other DNA

SEQ ID NO: 68504 - DNA, 120 bp, synthetic construct; identical to SEQ ID NO: 38550
  source 1..120: mol_type = other DNA

SEQ ID NO: 68505 - DNA, 120 bp, synthetic construct; identical to SEQ ID NO: 11096
  source 1..120: mol_type = other DNA

SEQ ID NO: 68506 - DNA, 120 bp, synthetic construct; identical to SEQ ID NO: 38552
  source 1..120: mol_type = other DNA

SEQ ID NO: 68507 - DNA, 120 bp, synthetic construct; identical to SEQ ID NO: 38553
  source 1..120: mol_type = other DNA

SEQ ID NO: 68508 - DNA, 120 bp, synthetic construct; identical to SEQ ID NO: 38554
  source 1..120: mol_type = other DNA

SEQ ID NO: 68509 - DNA, 120 bp, synthetic construct; identical to SEQ ID NO: 11097
  source 1..120: mol_type = other DNA

SEQ ID NO: 68510 - DNA, 120 bp, synthetic construct; identical to SEQ ID NO: 38556
  source 1..120: mol_type = other DNA

SEQ ID NO: 68511 - DNA, 120 bp, synthetic construct; identical to SEQ ID NO: 38557
  source 1..120: mol_type = other DNA

SEQ ID NO: 68512 - DNA, 120 bp, synthetic construct; identical to SEQ ID NO: 11098
  source 1..120: mol_type = other DNA

SEQ ID NO: 68513 - DNA, 120 bp, synthetic construct; identical to SEQ ID NO: 38559
  source 1..120: mol_type = other DNA

SEQ ID NO: 68514 - DNA, 120 bp, synthetic construct; identical to SEQ ID NO: 38560
  source 1..120: mol_type = other DNA

SEQ ID NO: 68515 - DNA, 120 bp, synthetic construct; identical to SEQ ID NO: 38561
  source 1..120: mol_type = other DNA

SEQ ID NO: 68516 - DNA, 120 bp, synthetic construct; identical to SEQ ID NO: 11099
  source 1..120: mol_type = other DNA

SEQ ID NO: 68517 - DNA, 120 bp, synthetic construct; identical to SEQ ID NO: 38563
  source 1..120: mol_type = other DNA

SEQ ID NO: 68518 - DNA, 120 bp, synthetic construct; identical to SEQ ID NO: 38564
  source 1..120: mol_type = other DNA

SEQ ID NO: 68519 - DNA, 120 bp, synthetic construct; identical to SEQ ID NO: 38565
  source 1..120: mol_type = other DNA

SEQ ID NO: 68520 - DNA, 120 bp, synthetic construct; identical to SEQ ID NO: 11100
  source 1..120: mol_type = other DNA

SEQ ID NO: 68521 - DNA, 120 bp, synthetic construct; identical to SEQ ID NO: 38567
  source 1..120: mol_type = other DNA

SEQ ID NO: 68522 - DNA, 120 bp, synthetic construct; identical to SEQ ID NO: 38568
  source 1..120: mol_type = other DNA

SEQ ID NO: 68523 - DNA, 120 bp, synthetic construct; identical to SEQ ID NO: 38569
  source 1..120: mol_type = other DNA

SEQ ID NO: 68524 - DNA, 120 bp, synthetic construct; identical to SEQ ID NO: 38570
  source 1..120: mol_type = other DNA

SEQ ID NO: 68525 - DNA, 120 bp, synthetic construct; identical to SEQ ID NO: 11101
  source 1..120: mol_type = other DNA

SEQ ID NO: 68526 - DNA, 120 bp, synthetic construct; identical to SEQ ID NO: 38572
  source 1..120: mol_type = other DNA

SEQ ID NO: 68527 - DNA, 120 bp, synthetic construct; identical to SEQ ID NO: 38573
  source 1..120: mol_type = other DNA

SEQ ID NO: 68528 - DNA, 120 bp, synthetic construct; identical to SEQ ID NO: 38574
  source 1..120: mol_type = other DNA

SEQ ID NO: 68529 - DNA, 120 bp, synthetic construct; identical to SEQ ID NO: 11102
  source 1..120: mol_type = other DNA

SEQ ID NO: 68530 - DNA, 120 bp, synthetic construct; identical to SEQ ID NO: 38576
  source 1..120: mol_type = other DNA

SEQ ID NO: 68531 - DNA, 120 bp, synthetic construct; identical to SEQ ID NO: 38577
  source 1..120: mol_type = other DNA

SEQ ID NO: 68532 - DNA, 120 bp, synthetic construct; identical to SEQ ID NO: 38578
  source 1..120: mol_type = other DNA

SEQ ID NO: 68533 - DNA, 120 bp, synthetic construct; identical to SEQ ID NO: 11103
  source 1..120: mol_type = other DNA

SEQ ID NO: 68534 - DNA, 120 bp, synthetic construct; identical to SEQ ID NO: 38580
  source 1..120: mol_type = other DNA

SEQ ID NO: 68535 - DNA, 120 bp, synthetic construct; identical to SEQ ID NO: 38581
  source 1..120: mol_type = other DNA

SEQ ID NO: 68536 - DNA, 120 bp, synthetic construct; identical to SEQ ID NO: 38582
  source 1..120: mol_type = other DNA

SEQ ID NO: 68537 - DNA, 120 bp, synthetic construct; identical to SEQ ID NO: 11104
  source 1..120: mol_type = other DNA

SEQ ID NO: 68538 - DNA, 120 bp, synthetic construct; identical to SEQ ID NO: 38584
  source 1..120: mol_type = other DNA

SEQ ID NO: 68539 - DNA, 120 bp, synthetic construct; identical to SEQ ID NO: 38585
  source 1..120: mol_type = other DNA

SEQ ID NO: 68540 - DNA, 120 bp, synthetic construct; identical to SEQ ID NO: 38586
  source 1..120: mol_type = other DNA

SEQ ID NO: 68541 - DNA, 120 bp, synthetic construct; identical to SEQ ID NO: 11105
  source 1..120: mol_type = other DNA

SEQ ID NO: 68542 - DNA, 120 bp, synthetic construct; identical to SEQ ID NO: 38588
  source 1..120: mol_type = other DNA

SEQ ID NO: 68543 - DNA, 120 bp, synthetic construct; identical to SEQ ID NO: 38589
  source 1..120: mol_type = other DNA

SEQ ID NO: 68544 - DNA, 120 bp, synthetic construct; identical to SEQ ID NO: 38590
  source 1..120: mol_type = other DNA

SEQ ID NO: 68545 - DNA, 120 bp, synthetic construct; identical to SEQ ID NO: 38591
  source 1..120: mol_type = other DNA

SEQ ID NO: 68546 - DNA, 120 bp, synthetic construct; identical to SEQ ID NO: 11106
  source 1..120: mol_type = other DNA

SEQ ID NO: 68547 - DNA, 120 bp, synthetic construct; identical to SEQ ID NO: 38593
  source 1..120: mol_type = other DNA

SEQ ID NO: 68548 - DNA, 120 bp, synthetic construct; identical to SEQ ID NO: 38594
  source 1..120: mol_type = other DNA

SEQ ID NO: 68549 - DNA, 120 bp, synthetic construct; identical to SEQ ID NO: 38595
  source 1..120: mol_type = other DNA

SEQ ID NO: 68550 - DNA, 120 bp, synthetic construct; identical to SEQ ID NO: 11107
  source 1..120: mol_type = other DNA

SEQ ID NO: 68551 - DNA, 120 bp, synthetic construct; identical to SEQ ID NO: 38597
  source 1..120: mol_type = other DNA

SEQ ID NO: 68552 - DNA, 120 bp, synthetic construct; identical to SEQ ID NO: 38598
  source 1..120: mol_type = other DNA

SEQ ID NO: 68553 - DNA, 120 bp, synthetic construct; identical to SEQ ID NO: 38599
  source 1..120: mol_type = other DNA

SEQ ID NO: 68554 - DNA, 120 bp, synthetic construct; identical to SEQ ID NO: 38600
  source 1..120: mol_type = other DNA

SEQ ID NO: 68555 - DNA, 120 bp, synthetic construct; identical to SEQ ID NO: 11108
  source 1..120: mol_type = other DNA

SEQ ID NO: 68556 - DNA, 120 bp, synthetic construct; identical to SEQ ID NO: 38602
  source 1..120: mol_type = other DNA

SEQ ID NO: 68557 - DNA, 120 bp, synthetic construct; identical to SEQ ID NO: 38603
  source 1..120: mol_type = other DNA

SEQ ID NO: 68558 - DNA, 120 bp, synthetic construct; identical to SEQ ID NO: 38604
  source 1..120: mol_type = other DNA

SEQ ID NO: 68559 - DNA, 120 bp, synthetic construct; identical to SEQ ID NO: 11109
  source 1..120: mol_type = other DNA

SEQ ID NO: 68560 - DNA, 120 bp, synthetic construct; identical to SEQ ID NO: 38606
  source 1..120: mol_type = other DNA

SEQ ID NO: 68561 - DNA, 120 bp, synthetic construct; identical to SEQ ID NO: 38607
  source 1..120: mol_type = other DNA

SEQ ID NO: 68562 - DNA, 120 bp, synthetic construct; identical to SEQ ID NO: 11110
  source 1..120: mol_type = other DNA

SEQ ID NO: 68563 - DNA, 120 bp, synthetic construct; identical to SEQ ID NO: 38609
  source 1..120: mol_type = other DNA

SEQ ID NO: 68564 - DNA, 120 bp, synthetic construct; identical to SEQ ID NO: 38610
  source 1..120: mol_type = other DNA

SEQ ID NO: 68565 - DNA, 120 bp, synthetic construct; identical to SEQ ID NO: 38611
  source 1..120: mol_type = other DNA

SEQ ID NO: 68566 - DNA, 120 bp, synthetic construct; identical to SEQ ID NO: 38612
  source 1..120: mol_type = other DNA

SEQ ID NO: 68567 - DNA, 120 bp, synthetic construct; identical to SEQ ID NO: 11111
  source 1..120: mol_type = other DNA

SEQ ID NO: 68568 - DNA, 120 bp, synthetic construct; identical to SEQ ID NO: 38614
  source 1..120: mol_type = other DNA

SEQ ID NO: 68569 - DNA, 120 bp, synthetic construct; identical to SEQ ID NO: 38615
  source 1..120: mol_type = other DNA

SEQ ID NO: 68570 - DNA, 120 bp, synthetic construct; identical to SEQ ID NO: 11112
  source 1..120: mol_type = other DNA

SEQ ID NO: 68571 - DNA, 120 bp, synthetic construct; identical to SEQ ID NO: 38617
  source 1..120: mol_type = other DNA

SEQ ID NO: 68572 - DNA, 120 bp, synthetic construct; identical to SEQ ID NO: 38618
  source 1..120: mol_type = other DNA

SEQ ID NO: 68573 - DNA, 120 bp, synthetic construct; identical to SEQ ID NO: 38619
  source 1..120: mol_type = other DNA

SEQ ID NO: 68574 - DNA, 120 bp, synthetic construct; identical to SEQ ID NO: 11113
  source 1..120: mol_type = other DNA

SEQ ID NO: 68575 - DNA, 120 bp, synthetic construct; identical to SEQ ID NO: 38621
  source 1..120: mol_type = other DNA

SEQ ID NO: 68576 - DNA, 120 bp, synthetic construct; identical to SEQ ID NO: 38622
  source 1..120: mol_type = other DNA

SEQ ID NO: 68577 - DNA, 120 bp, synthetic construct; identical to SEQ ID NO: 38623
  source 1..120: mol_type = other DNA

SEQ ID NO: 68578 - DNA, 120 bp, synthetic construct; identical to SEQ ID NO: 11114
  source 1..120: mol_type = other DNA

SEQ ID NO: 68579 - DNA, 120 bp, synthetic construct; identical to SEQ ID NO: 38625
  source 1..120: mol_type = other DNA

SEQ ID NO: 68580 - DNA, 120 bp, synthetic construct; identical to SEQ ID NO: 38626
  source 1..120: mol_type = other DNA

SEQ ID NO: 68581 - DNA, 120 bp, synthetic construct; identical to SEQ ID NO: 38627
  source 1..120: mol_type = other DNA

SEQ ID NO: 68582 - DNA, 120 bp, synthetic construct; identical to SEQ ID NO: 11115
  source 1..120: mol_type = other DNA

SEQ ID NO: 68583 - DNA, 120 bp, synthetic construct; identical to SEQ ID NO: 38629
  source 1..120: mol_type = other DNA

SEQ ID NO: 68584 - DNA, 120 bp, synthetic construct; identical to SEQ ID NO: 38630
  source 1..120: mol_type = other DNA

SEQ ID NO: 68585 - DNA, 120 bp, synthetic construct; identical to SEQ ID NO: 11116
  source 1..120: mol_type = other DNA

SEQ ID NO: 68586 - DNA, 120 bp, synthetic construct; identical to SEQ ID NO: 38632
  source 1..120: mol_type = other DNA

SEQ ID NO: 68587 - DNA, 120 bp, synthetic construct; identical to SEQ ID NO: 38633
  source 1..120: mol_type = other DNA

SEQ ID NO: 68588 - DNA, 120 bp, synthetic construct; identical to SEQ ID NO: 38634
  source 1..120: mol_type = other DNA

SEQ ID NO: 68589 - DNA, 120 bp, synthetic construct; identical to SEQ ID NO: 11117
  source 1..120: mol_type = other DNA

SEQ ID NO: 68590 - DNA, 120 bp, synthetic construct; identical to SEQ ID NO: 38636
  source 1..120: mol_type = other DNA

SEQ ID NO: 68591 - DNA, 120 bp, synthetic construct; identical to SEQ ID NO: 38637
  source 1..120: mol_type = other DNA

SEQ ID NO: 68592 - DNA, 120 bp, synthetic construct; identical to SEQ ID NO: 11118
  source 1..120: mol_type = other DNA

SEQ ID NO: 68593 - DNA, 120 bp, synthetic construct; identical to SEQ ID NO: 38639
  source 1..120: mol_type = other DNA

SEQ ID NO: 68594 - DNA, 120 bp, synthetic construct; identical to SEQ ID NO: 38640
  source 1..120: mol_type = other DNA

SEQ ID NO: 68595 - DNA, 120 bp, synthetic construct; identical to SEQ ID NO: 38641
  source 1..120: mol_type = other DNA

SEQ ID NO: 68596 - DNA, 120 bp, synthetic construct; identical to SEQ ID NO: 11119
  source 1..120: mol_type = other DNA

SEQ ID NO: 68597 - DNA, 120 bp, synthetic construct; identical to SEQ ID NO: 38643
  source 1..120: mol_type = other DNA

SEQ ID NO: 68598 - DNA, 120 bp, synthetic construct; identical to SEQ ID NO: 38644
  source 1..120: mol_type = other DNA

SEQ ID NO: 68599 - DNA, 120 bp, synthetic construct; identical to SEQ ID NO: 11120
  source 1..120: mol_type = other DNA

SEQ ID NO: 68600 - DNA, 120 bp, synthetic construct; identical to SEQ ID NO: 38646
  source 1..120: mol_type = other DNA

SEQ ID NO: 68601 - DNA, 120 bp, synthetic construct; identical to SEQ ID NO: 38647
  source 1..120: mol_type = other DNA

SEQ ID NO: 68602 - DNA, 120 bp, synthetic construct; identical to SEQ ID NO: 38648
  source 1..120: mol_type = other DNA

SEQ ID NO: 68603 - DNA, 120 bp, synthetic construct; identical to SEQ ID NO: 11121
  source 1..120: mol_type = other DNA

SEQ ID NO: 68604 - DNA, 120 bp, synthetic construct; identical to SEQ ID NO: 38650
  source 1..120: mol_type = other DNA

SEQ ID NO: 68605 - DNA, 120 bp, synthetic construct; identical to SEQ ID NO: 38651
  source 1..120: mol_type = other DNA

SEQ ID NO: 68606 - DNA, 120 bp, synthetic construct; identical to SEQ ID NO: 38652
  source 1..120: mol_type = other DNA

SEQ ID NO: 68607 - DNA, 120 bp, synthetic construct; identical to SEQ ID NO: 11122
  source 1..120: mol_type = other DNA

SEQ ID NO: 68608 - DNA, 120 bp, synthetic construct; identical to SEQ ID NO: 38654
  source 1..120: mol_type = other DNA

SEQ ID NO: 68609 - DNA, 120 bp, synthetic construct; identical to SEQ ID NO: 38655
  source 1..120: mol_type = other DNA

SEQ ID NO: 68610 - DNA, 120 bp, synthetic construct; identical to SEQ ID NO: 11123
  source 1..120: mol_type = other DNA

SEQ ID NO: 68611 - DNA, 120 bp, synthetic construct; identical to SEQ ID NO: 38657
  source 1..120: mol_type = other DNA

SEQ ID NO: 68612 - DNA, 120 bp, synthetic construct; identical to SEQ ID NO: 38658
  source 1..120: mol_type = other DNA

SEQ ID NO: 68613 - DNA, 120 bp, synthetic construct; identical to SEQ ID NO: 3870
  source 1..120: mol_type = other DNA

SEQ ID NO: 68614 - DNA, 120 bp, synthetic construct; identical to SEQ ID NO: 38660
  source 1..120: mol_type = other DNA

SEQ ID NO: 68615 - DNA, 120 bp, synthetic construct; identical to SEQ ID NO: 11124
  source 1..120: mol_type = other DNA

SEQ ID NO: 68616 - DNA, 120 bp, synthetic construct; identical to SEQ ID NO: 38662
  source 1..120: mol_type = other DNA

SEQ ID NO: 68617 - DNA, 120 bp, synthetic construct; identical to SEQ ID NO: 38663
  source 1..120: mol_type = other DNA

SEQ ID NO: 68618 - DNA, 120 bp, synthetic construct; identical to SEQ ID NO: 11125
  source 1..120: mol_type = other DNA

SEQ ID NO: 68619 - DNA, 120 bp, synthetic construct; identical to SEQ ID NO: 38665
  source 1..120: mol_type = other DNA

SEQ ID NO: 68620 - DNA, 120 bp, synthetic construct; identical to SEQ ID NO: 38666
  source 1..120: mol_type = other DNA

SEQ ID NO: 68621 - DNA, 120 bp, synthetic construct; identical to SEQ ID NO: 38667
  source 1..120: mol_type = other DNA

SEQ ID NO: 68622 - DNA, 120 bp, synthetic construct; identical to SEQ ID NO: 11126
  source 1..120: mol_type = other DNA

SEQ ID NO: 68623 - DNA, 120 bp, synthetic construct; identical to SEQ ID NO: 38669
  source 1..120: mol_type = other DNA

SEQ ID NO: 68624 - DNA, 120 bp, synthetic construct; identical to SEQ ID NO: 38670
  source 1..120: mol_type = other DNA

SEQ ID NO: 68625 - DNA, 120 bp, synthetic construct; identical to SEQ ID NO: 38671
  source 1..120: mol_type = other DNA

SEQ ID NO: 68626 - DNA, 120 bp, synthetic construct; identical to SEQ ID NO: 11127
  source 1..120: mol_type = other DNA

SEQ ID NO: 68627 - DNA, 120 bp, synthetic construct; identical to SEQ ID NO: 38673
  source 1..120: mol_type = other DNA

SEQ ID NO: 68628 - DNA, 120 bp, synthetic construct; identical to SEQ ID NO: 38674
  source 1..120: mol_type = other DNA

SEQ ID NO: 68629 - DNA, 120 bp, synthetic construct; identical to SEQ ID NO: 38675
  source 1..120: mol_type = other DNA

SEQ ID NO: 68630 - DNA, 120 bp, synthetic construct; identical to SEQ ID NO: 11128
  source 1..120: mol_type = other DNA

SEQ ID NO: 68631 - DNA, 120 bp, synthetic construct; identical to SEQ ID NO: 38677
  source 1..120: mol_type = other DNA

SEQ ID NO: 68632 - DNA, 120 bp, synthetic construct; identical to SEQ ID NO: 38678
  source 1..120: mol_type = other DNA

SEQ ID NO: 68633 - DNA, 120 bp, synthetic construct; identical to SEQ ID NO: 38679
  source 1..120: mol_type = other DNA

SEQ ID NO: 68634 - DNA, 120 bp, synthetic construct; identical to SEQ ID NO: 38680
  source 1..120: mol_type = other DNA

SEQ ID NO: 68635 - DNA, 120 bp, synthetic construct; identical to SEQ ID NO: 11129
  source 1..120: mol_type = other DNA

SEQ ID NO: 68636 - DNA, 120 bp, synthetic construct; identical to SEQ ID NO: 38682
  source 1..120: mol_type = other DNA

SEQ ID NO: 68637 - DNA, 120 bp, synthetic construct; identical to SEQ ID NO: 38683
  source 1..120: mol_type = other DNA

SEQ ID NO: 68638 - DNA, 120 bp, synthetic construct; identical to SEQ ID NO: 38684
  source 1..120: mol_type = other DNA

SEQ ID NO: 68639 - DNA, 120 bp, synthetic construct; identical to SEQ ID NO: 11130
  source 1..120: mol_type = other DNA

SEQ ID NO: 68640 - DNA, 120 bp, synthetic construct; identical to SEQ ID NO: 38686
  source 1..120: mol_type = other DNA

SEQ ID NO: 68641 - DNA, 120 bp, synthetic construct; identical to SEQ ID NO: 38687
  source 1..120: mol_type = other DNA

SEQ ID NO: 68642 - DNA, 120 bp, synthetic construct; identical to SEQ ID NO: 38688
  source 1..120: mol_type = other DNA

SEQ ID NO: 68643 - DNA, 120 bp, synthetic construct; identical to SEQ ID NO: 11131
  source 1..120: mol_type = other DNA

SEQ ID NO: 68644 - DNA, 120 bp, synthetic construct; identical to SEQ ID NO: 38690
  source 1..120: mol_type = other DNA

SEQ ID NO: 68645 - DNA, 120 bp, synthetic construct; identical to SEQ ID NO: 38691
  source 1..120: mol_type = other DNA

SEQ ID NO: 68646 - DNA, 120 bp, synthetic construct; identical to SEQ ID NO: 11132
  source 1..120: mol_type = other DNA

SEQ ID NO: 68647 - DNA, 120 bp, synthetic construct; identical to SEQ ID NO: 38693
  source 1..120: mol_type = other DNA

SEQ ID NO: 68648 - DNA, 120 bp, synthetic construct; identical to SEQ ID NO: 38694
  source 1..120: mol_type = other DNA

SEQ ID NO: 68649 - DNA, 120 bp, synthetic construct; identical to SEQ ID NO: 38695
  source 1..120: mol_type = other DNA

SEQ ID NO: 68650 - DNA, 120 bp, synthetic construct; identical to SEQ ID NO: 11133
  source 1..120: mol_type = other DNA

SEQ ID NO: 68651 - DNA, 120 bp, synthetic construct; identical to SEQ ID NO: 38697
  source 1..120: mol_type = other DNA

SEQ ID NO: 68652 - DNA, 120 bp, synthetic construct; identical to SEQ ID NO: 38698
  source 1..120: mol_type = other DNA

SEQ ID NO: 68653 - DNA, 120 bp, synthetic construct; identical to SEQ ID NO: 38699
  source 1..120: mol_type = other DNA

SEQ ID NO: 68654 - DNA, 120 bp, synthetic construct; identical to SEQ ID NO: 11134
  source 1..120: mol_type = other DNA

SEQ ID NO: 68655 - DNA, 120 bp, synthetic construct; identical to SEQ ID NO: 38701
  source 1..120: mol_type = other DNA

SEQ ID NO: 68656 - DNA, 120 bp, synthetic construct; identical to SEQ ID NO: 38702
  source 1..120: mol_type = other DNA

SEQ ID NO: 68657 - DNA, 120 bp, synthetic construct; identical to SEQ ID NO: 38703
  source 1..120: mol_type = other DNA

SEQ ID NO: 68658 - DNA, 120 bp, synthetic construct; identical to SEQ ID NO: 11135
  source 1..120: mol_type = other DNA

SEQ ID NO: 68659 - DNA, 120 bp, synthetic construct; identical to SEQ ID NO: 38705
  source 1..120: mol_type = other DNA

SEQ ID NO: 68660 - DNA, 120 bp, synthetic construct; identical to SEQ ID NO: 38706
  source 1..120: mol_type = other DNA

SEQ ID NO: 68661 - DNA, 120 bp, synthetic construct; identical to SEQ ID NO: 38707
  source 1..120: mol_type = other DNA

SEQ ID NO: 68662 - DNA, 120 bp, synthetic construct; identical to SEQ ID NO: 11136
  source 1..120: mol_type = other DNA

SEQ ID NO: 68663 - DNA, 120 bp, synthetic construct; identical to SEQ ID NO: 38709
  source 1..120: mol_type = other DNA

SEQ ID NO: 68664 - DNA, 120 bp, synthetic construct; identical to SEQ ID NO: 38710
  source 1..120: mol_type = other DNA

SEQ ID NO: 68665 - DNA, 120 bp, synthetic construct; identical to SEQ ID NO: 38711
  source 1..120: mol_type = other DNA

SEQ ID NO: 68666 - DNA, 120 bp, synthetic construct; identical to SEQ ID NO: 11137
  source 1..120: mol_type = other DNA

SEQ ID NO: 68667 - DNA, 120 bp, synthetic construct; identical to SEQ ID NO: 38713
  source 1..120: mol_type = other DNA

SEQ ID NO: 68668 - DNA, 120 bp, synthetic construct; identical to SEQ ID NO: 38714
  source 1..120: mol_type = other DNA

SEQ ID NO: 68669 - DNA, 120 bp, synthetic construct; identical to SEQ ID NO: 38715
  source 1..120: mol_type = other DNA

SEQ ID NO: 68670 - DNA, 120 bp, synthetic construct; identical to SEQ ID NO: 38716
  source 1..120: mol_type = other DNA

SEQ ID NO: 68671 - DNA, 120 bp, synthetic construct; identical to SEQ ID NO: 11138
  source 1..120: mol_type = other DNA

SEQ ID NO: 68672 - DNA, 120 bp, synthetic construct; identical to SEQ ID NO: 38718
  source 1..120: mol_type = other DNA

SEQ ID NO: 68673 - DNA, 120 bp, synthetic construct; identical to SEQ ID NO: 38719
  source 1..120: mol_type = other DNA

SEQ ID NO: 68674 - DNA, 120 bp, synthetic construct; identical to SEQ ID NO: 11139
  source 1..120: mol_type = other DNA

SEQ ID NO: 68675 - DNA, 120 bp, synthetic construct; identical to SEQ ID NO: 38721
  source 1..120: mol_type = other DNA

SEQ ID NO: 68676 - DNA, 120 bp, synthetic construct; identical to SEQ ID NO: 38722
  source 1..120: mol_type = other DNA

SEQ ID NO: 68677 - DNA, 120 bp, synthetic construct; identical to SEQ ID NO: 38723
  source 1..120: mol_type = other DNA

SEQ ID NO: 68678 - DNA, 120 bp, synthetic construct; identical to SEQ ID NO: 11140
  source 1..120: mol_type = other DNA

SEQ ID NO: 68679 - DNA, 120 bp, synthetic construct; identical to SEQ ID NO: 38725
  source 1..120: mol_type = other DNA

SEQ ID NO: 68680 - DNA, 120 bp, synthetic construct; identical to SEQ ID NO: 38726
  source 1..120: mol_type = other DNA

SEQ ID NO: 68681 - DNA, 120 bp, synthetic construct; identical to SEQ ID NO: 38727
  source 1..120: mol_type = other DNA

SEQ ID NO: 68682 - DNA, 120 bp, synthetic construct; identical to SEQ ID NO: 38728
  source 1..120: mol_type = other DNA

SEQ ID NO: 68683 - DNA, 120 bp, synthetic construct; identical to SEQ ID NO: 11141
  source 1..120: mol_type = other DNA

SEQ ID NO: 68684 - DNA, 120 bp, synthetic construct; identical to SEQ ID NO: 38730
  source 1..120: mol_type = other DNA

SEQ ID NO: 68685 - DNA, 120 bp, synthetic construct; identical to SEQ ID NO: 38731
  source 1..120: mol_type = other DNA

SEQ ID NO: 68686 - DNA, 120 bp, synthetic construct; identical to SEQ ID NO: 38732
  source 1..120: mol_type = other DNA

SEQ ID NO: 68687 - DNA, 120 bp, synthetic construct; identical to SEQ ID NO: 11142
  source 1..120: mol_type = other DNA

SEQ ID NO: 68688 - DNA, 120 bp, synthetic construct; identical to SEQ ID NO: 38734
  source 1..120: mol_type = other DNA

SEQ ID NO: 68689 - DNA, 120 bp, synthetic construct; identical to SEQ ID NO: 38735
  source 1..120: mol_type = other DNA

SEQ ID NO: 68690 - DNA, 120 bp, synthetic construct; identical to SEQ ID NO: 11143
  source 1..120: mol_type = other DNA

SEQ ID NO: 68691 - DNA, 120 bp, synthetic construct; identical to SEQ ID NO: 38737
  source 1..120: mol_type = other DNA

SEQ ID NO: 68692 - DNA, 120 bp, synthetic construct; identical to SEQ ID NO: 38738
  source 1..120: mol_type = other DNA

SEQ ID NO: 68693 - DNA, 120 bp, synthetic construct; identical to SEQ ID NO: 38739
  source 1..120: mol_type = other DNA

SEQ ID NO: 68694 - DNA, 120 bp, synthetic construct; identical to SEQ ID NO: 38740
  source 1..120: mol_type = other DNA

SEQ ID NO: 68695 - DNA, 120 bp, synthetic construct; identical to SEQ ID NO: 11144
  source 1..120: mol_type = other DNA

SEQ ID NO: 68696 - DNA, 120 bp, synthetic construct; identical to SEQ ID NO: 38742
  source 1..120: mol_type = other DNA

SEQ ID NO: 68697 - DNA, 120 bp, synthetic construct; identical to SEQ ID NO: 38743
  source 1..120: mol_type = other DNA

SEQ ID NO: 68698 - DNA, 120 bp, synthetic construct; identical to SEQ ID NO: 38744
  source 1..120: mol_type = other DNA

SEQ ID NO: 68699 - DNA, 120 bp, synthetic construct; identical to SEQ ID NO: 11145
  source 1..120: mol_type = other DNA

SEQ ID NO: 68700 - DNA, 120 bp, synthetic construct; identical to SEQ ID NO: 38746
  source 1..120: mol_type = other DNA

SEQ ID NO: 68701 - DNA, 120 bp, synthetic construct; identical to SEQ ID NO: 38747
  source 1..120: mol_type = other DNA

SEQ ID NO: 68702 - DNA, 120 bp, synthetic construct; identical to SEQ ID NO: 38748
  source 1..120: mol_type = other DNA

SEQ ID NO: 68703 - DNA, 120 bp, synthetic construct; identical to SEQ ID NO: 38749
  source 1..120: mol_type = other DNA

SEQ ID NO: 68704 - DNA, 120 bp, synthetic construct; identical to SEQ ID NO: 11146
  source 1..120: mol_type = other DNA

SEQ ID NO: 68705 - DNA, 120 bp, synthetic construct; identical to SEQ ID NO: 38751
  source 1..120: mol_type = other DNA

SEQ ID NO: 68706 - DNA, 120 bp, synthetic construct; identical to SEQ ID NO: 38752
  source 1..120: mol_type = other DNA

SEQ ID NO: 68707 - DNA, 120 bp, synthetic construct; identical to SEQ ID NO: 11147
  source 1..120: mol_type = other DNA

SEQ ID NO: 68708 - DNA, 120 bp, synthetic construct; identical to SEQ ID NO: 38754
  source 1..120: mol_type = other DNA

SEQ ID NO: 68709 - DNA, 120 bp, synthetic construct; identical to SEQ ID NO: 38755
  source 1..120: mol_type = other DNA

SEQ ID NO: 68710 - DNA, 120 bp, synthetic construct; identical to SEQ ID NO: 38756
  source 1..120: mol_type = other DNA

SEQ ID NO: 68711 - DNA, 120 bp, synthetic construct; identical to SEQ ID NO: 11148
  source 1..120: mol_type = other DNA

SEQ ID NO: 68712 - DNA, 120 bp, synthetic construct; identical to SEQ ID NO: 38758
  source 1..120: mol_type = other DNA

SEQ ID NO: 68713 - DNA, 120 bp, synthetic construct; identical to SEQ ID NO: 38759
  source 1..120: mol_type = other DNA

SEQ ID NO: 68714 - DNA, 120 bp, synthetic construct; identical to SEQ ID NO: 38760
  source 1..120: mol_type = other DNA

SEQ ID NO: 68715 - DNA, 120 bp, synthetic construct; identical to SEQ ID NO: 38761
  source 1..120: mol_type = other DNA

SEQ ID NO: 68716 - DNA, 120 bp, synthetic construct; identical to SEQ ID NO: 11149
  source 1..120: mol_type = other DNA

SEQ ID NO: 68717 - DNA, 120 bp, synthetic construct; identical to SEQ ID NO: 38763
  source 1..120: mol_type = other DNA

SEQ ID NO: 68718 - DNA, 120 bp, synthetic construct; identical to SEQ ID NO: 38764
  source 1..120: mol_type = other DNA

SEQ ID NO: 68719 - DNA, 120 bp, synthetic construct; identical to SEQ ID NO: 11150
  source 1..120: mol_type = other DNA

SEQ ID NO: 68720 - DNA, 120 bp, synthetic construct; identical to SEQ ID NO: 38766
  source 1..120: mol_type = other DNA

SEQ ID NO: 68721 - DNA, 120 bp, synthetic construct; identical to SEQ ID NO: 38767
  source 1..120: mol_type = other DNA

SEQ ID NO: 68722 - DNA, 120 bp, synthetic construct; identical to SEQ ID NO: 38768
  source 1..120: mol_type = other DNA

SEQ ID NO: 68723 - DNA, 120 bp, synthetic construct; identical to SEQ ID NO: 11151
  source 1..120: mol_type = other DNA

SEQ ID NO: 68724 - DNA, 120 bp, synthetic construct; identical to SEQ ID NO: 38770
  source 1..120: mol_type = other DNA

SEQ ID NO: 68725 - DNA, 120 bp, synthetic construct; identical to SEQ ID NO: 38771
  source 1..120: mol_type = other DNA

SEQ ID NO: 68726 - DNA, 120 bp, synthetic construct; identical to SEQ ID NO: 11152
  source 1..120: mol_type = other DNA

SEQ ID NO: 68727 - DNA, 120 bp, synthetic construct; identical to SEQ ID NO: 38773
  source 1..120: mol_type = other DNA

SEQ ID NO: 68728 - DNA, 120 bp, synthetic construct; identical to SEQ ID NO: 38774
  source 1..120: mol_type = other DNA

SEQ ID NO: 68729 - DNA, 120 bp, synthetic construct; identical to SEQ ID NO: 11153
  source 1..120: mol_type = other DNA

SEQ ID NO: 68730 - DNA, 120 bp, synthetic construct; identical to SEQ ID NO: 38776
  source 1..120: mol_type = other DNA

SEQ ID NO: 68731 - DNA, 120 bp, synthetic construct; identical to SEQ ID NO: 38777
  source 1..120: mol_type = other DNA

SEQ ID NO: 68732 - DNA, 120 bp, synthetic construct; identical to SEQ ID NO: 11154
  source 1..120: mol_type = other DNA

SEQ ID NO: 68733 - DNA, 120 bp, synthetic construct; identical to SEQ ID NO: 38779
  source 1..120: mol_type = other DNA

SEQ ID NO: 68734 - DNA, 120 bp, synthetic construct; identical to SEQ ID NO: 38780
  source 1..120: mol_type = other DNA

SEQ ID NO: 68735 - DNA, 120 bp, synthetic construct; identical to SEQ ID NO: 38781
  source 1..120: mol_type = other DNA

SEQ ID NO: 68736 - DNA, 120 bp, synthetic construct; identical to SEQ ID NO: 11155
  source 1..120: mol_type = other DNA

SEQ ID NO: 68737 - DNA, 120 bp, synthetic construct; identical to SEQ ID NO: 38783
  source 1..120: mol_type = other DNA

SEQ ID NO: 68738 - DNA, 120 bp, synthetic construct; identical to SEQ ID NO: 38784
  source 1..120: mol_type = other DNA

SEQ ID NO: 68739 - DNA, 120 bp, synthetic construct; identical to SEQ ID NO: 38785
  source 1..120: mol_type = other DNA

SEQ ID NO: 68740 - DNA, 120 bp, synthetic construct; identical to SEQ ID NO: 11156
  source 1..120: mol_type = other DNA

SEQ ID NO: 68741 - DNA, 120 bp, synthetic construct; identical to SEQ ID NO: 38787
  source 1..120: mol_type = other DNA

SEQ ID NO: 68742 - DNA, 120 bp, synthetic construct; identical to SEQ ID NO: 38788
  source 1..120: mol_type = other DNA

SEQ ID NO: 68743 - DNA, 120 bp, synthetic construct; identical to SEQ ID NO: 38789
  source 1..120: mol_type = other DNA

SEQ ID NO: 68744 - DNA, 120 bp, synthetic construct; identical to SEQ ID NO: 11157
  source 1..120: mol_type = other DNA

SEQ ID NO: 68745 - DNA, 120 bp, synthetic construct; identical to SEQ ID NO: 38791
  source 1..120: mol_type = other DNA

SEQ ID NO: 68746 - DNA, 120 bp, synthetic construct; identical to SEQ ID NO: 38792
  source 1..120: mol_type = other DNA

SEQ ID NO: 68747 - DNA, 120 bp, synthetic construct; identical to SEQ ID NO: 38793
  source 1..120: mol_type = other DNA

SEQ ID NO: 68748 - DNA, 120 bp, synthetic construct; identical to SEQ ID NO: 11158
  source 1..120: mol_type = other DNA

SEQ ID NO: 68749 - DNA, 120 bp, synthetic construct; identical to SEQ ID NO: 38795
  source 1..120: mol_type = other DNA

SEQ ID NO: 68750 - DNA, 120 bp, synthetic construct; identical to SEQ ID NO: 38796
  source 1..120: mol_type = other DNA

SEQ ID NO: 68751 - DNA, 120 bp, synthetic construct; identical to SEQ ID NO: 38797
  source 1..120: mol_type = other DNA

SEQ ID NO: 68752 - DNA, 120 bp, synthetic construct; identical to SEQ ID NO: 11159
  source 1..120: mol_type = other DNA

SEQ ID NO: 68753 - DNA, 120 bp, synthetic construct; identical to SEQ ID NO: 38799
  source 1..120: mol_type = other DNA

SEQ ID NO: 68754 - DNA, 120 bp, synthetic construct; identical to SEQ ID NO: 38800
  source 1..120: mol_type = other DNA

SEQ ID NO: 68755 - DNA, 120 bp, synthetic construct; identical to SEQ ID NO: 38801
  source 1..120: mol_type = other DNA

SEQ ID NO: 68756 - DNA, 120 bp, synthetic construct; identical to SEQ ID NO: 11160
  source 1..120: mol_type = other DNA

SEQ ID NO: 68757 - DNA, 120 bp, synthetic construct; identical to SEQ ID NO: 38803
  source 1..120: mol_type = other DNA

SEQ ID NO: 68758 - DNA, 120 bp, synthetic construct; identical to SEQ ID NO: 38804
  source 1..120: mol_type = other DNA

SEQ ID NO: 68759 - DNA, 120 bp, synthetic construct; identical to SEQ ID NO: 38805
  source 1..120: mol_type = other DNA

SEQ ID NO: 68760 - DNA, 120 bp, synthetic construct; identical to SEQ ID NO: 11161
  source 1..120: mol_type = other DNA

SEQ ID NO: 68761 - DNA, 120 bp, synthetic construct; identical to SEQ ID NO: 38807
  source 1..120: mol_type = other DNA

SEQ ID NO: 68762 - DNA, 120 bp, synthetic construct; identical to SEQ ID NO: 38808
  source 1..120: mol_type = other DNA

SEQ ID NO: 68763 - DNA, 120 bp, synthetic construct; identical to SEQ ID NO: 38809
  source 1..120: mol_type = other DNA

SEQ ID NO: 68764 - DNA, 120 bp, synthetic construct; identical to SEQ ID NO: 3905
  source 1..120: mol_type = other DNA

SEQ ID NO: 68765 - DNA, 120 bp, synthetic construct; identical to SEQ ID NO: 38811
  source 1..120: mol_type = other DNA

SEQ ID NO: 68766 - DNA, 120 bp, synthetic construct; identical to SEQ ID NO: 38812
  source 1..120: mol_type = other DNA

SEQ ID NO: 68767 - DNA, 120 bp, synthetic construct; identical to SEQ ID NO: 38813
  source 1..120: mol_type = other DNA

SEQ ID NO: 68768 - DNA, 120 bp, synthetic construct; identical to SEQ ID NO: 11163
  source 1..120: mol_type = other DNA

SEQ ID NO: 68769 - DNA, 120 bp, synthetic construct; identical to SEQ ID NO: 38815
  source 1..120: mol_type = other DNA

SEQ ID NO: 68770 - DNA, 120 bp, synthetic construct; identical to SEQ ID NO: 38816
  source 1..120: mol_type = other DNA

SEQ ID NO: 68771 - DNA, 120 bp, synthetic construct; identical to SEQ ID NO: 38817
  source 1..120: mol_type = other DNA

SEQ ID NO: 68772 - DNA, 120 bp, synthetic construct; identical to SEQ ID NO: 38818
  source 1..120: mol_type = other DNA

SEQ ID NO: 68773 - DNA, 120 bp, synthetic construct; identical to SEQ ID NO: 11164
  source 1..120: mol_type = other DNA

SEQ ID NO: 68774 - DNA, 120 bp, synthetic construct; identical to SEQ ID NO: 38820
  source 1..120: mol_type = other DNA

SEQ ID NO: 68775 - DNA, 120 bp, synthetic construct; identical to SEQ ID NO: 38821
  source 1..120: mol_type = other DNA

SEQ ID NO: 68776 - DNA, 120 bp, synthetic construct; identical to SEQ ID NO: 11165
  source 1..120: mol_type = other DNA

SEQ ID NO: 68777 - DNA, 120 bp, synthetic construct; identical to SEQ ID NO: 38823
  source 1..120: mol_type = other DNA

SEQ ID NO: 68778 - DNA, 120 bp, synthetic construct; identical to SEQ ID NO: 38824
  source 1..120: mol_type = other DNA

SEQ ID NO: 68779 - DNA, 120 bp, synthetic construct; identical to SEQ ID NO: 38825
  source 1..120: mol_type = other DNA

SEQ ID NO: 68780 - DNA, 120 bp, synthetic construct; identical to SEQ ID NO: 11166
  source 1..120: mol_type = other DNA

SEQ ID NO: 68781 - DNA, 120 bp, synthetic construct; identical to SEQ ID NO: 38827
  source 1..120: mol_type = other DNA

SEQ ID NO: 68782 - DNA, 120 bp, synthetic construct; identical to SEQ ID NO: 38828
  source 1..120: mol_type = other DNA

SEQ ID NO: 68783 - DNA, 120 bp, synthetic construct; identical to SEQ ID NO: 38829
  source 1..120: mol_type = other DNA

SEQ ID NO: 68784 - DNA, 120 bp, synthetic construct; identical to SEQ ID NO: 11167
  source 1..120: mol_type = other DNA

SEQ ID NO: 68785 - DNA, 120 bp, synthetic construct; identical to SEQ ID NO: 38831
  source 1..120: mol_type = other DNA

SEQ ID NO: 68786 - DNA, 120 bp, synthetic construct; identical to SEQ ID NO: 38832
  source 1..120: mol_type = other DNA

SEQ ID NO: 68787 - DNA, 120 bp, synthetic construct; identical to SEQ ID NO: 38833
  source 1..120: mol_type = other DNA

SEQ ID NO: 68788 - DNA, 120 bp, synthetic construct; identical to SEQ ID NO: 11168
  source 1..120: mol_type = other DNA

SEQ ID NO: 68789 - DNA, 120 bp, synthetic construct; identical to SEQ ID NO: 38835
  source 1..120: mol_type = other DNA

SEQ ID NO: 68790 - DNA, 120 bp, synthetic construct; identical to SEQ ID NO: 38836
  source 1..120: mol_type = other DNA

SEQ ID NO: 68791 - DNA, 120 bp, synthetic construct; identical to SEQ ID NO: 11169
  source 1..120: mol_type = other DNA

SEQ ID NO: 68792 - DNA, 120 bp, synthetic construct; identical to SEQ ID NO: 38838
  source 1..120: mol_type = other DNA

SEQ ID NO: 68793 - DNA, 120 bp, synthetic construct; identical to SEQ ID NO: 38839
  source 1..120: mol_type = other DNA

SEQ ID NO: 68794 - DNA, 120 bp, synthetic construct; identical to SEQ ID NO: 11170
  source 1..120: mol_type = other DNA

SEQ ID NO: 68795 - DNA, 120 bp, synthetic construct; identical to SEQ ID NO: 38841
  source 1..120: mol_type = other DNA

SEQ ID NO: 68796 - DNA, 120 bp, synthetic construct; identical to SEQ ID NO: 38842
  source 1..120: mol_type = other DNA

SEQ ID NO: 68797 - DNA, 120 bp, synthetic construct; identical to SEQ ID NO: 38843
  source 1..120: mol_type = other DNA

SEQ ID NO: 68798 - DNA, 120 bp, synthetic construct; identical to SEQ ID NO: 11171
  source 1..120: mol_type = other DNA

SEQ ID NO: 68799 - DNA, 120 bp, synthetic construct; identical to SEQ ID NO: 38845
  source 1..120: mol_type = other DNA

SEQ ID NO: 68800 - DNA, 120 bp, synthetic construct; identical to SEQ ID NO: 38846
  source 1..120: mol_type = other DNA

SEQ ID NO: 68801 - DNA, 120 bp, synthetic construct; identical to SEQ ID NO: 38847
  source 1..120: mol_type = other DNA

SEQ ID NO: 68802 - DNA, 120 bp, synthetic construct; identical to SEQ ID NO: 11172
  source 1..120: mol_type = other DNA

SEQ ID NO: 68803 - DNA, 120 bp, synthetic construct; identical to SEQ ID NO: 38849
  source 1..120: mol_type = other DNA

SEQ ID NO: 68804 - DNA, 120 bp, synthetic construct; identical to SEQ ID NO: 38850
  source 1..120: mol_type = other DNA

SEQ ID NO: 68805 - DNA, 120 bp, synthetic construct; identical to SEQ ID NO: 38851
  source 1..120: mol_type = other DNA

SEQ ID NO: 68806 - DNA, 120 bp, synthetic construct; identical to SEQ ID NO: 38852
  source 1..120: mol_type = other DNA

SEQ ID NO: 68807 - DNA, 120 bp, synthetic construct; identical to SEQ ID NO: 11173
  source 1..120: mol_type = other DNA

SEQ ID NO: 68808 - DNA, 120 bp, synthetic construct; identical to SEQ ID NO: 38854
  source 1..120: mol_type = other DNA

SEQ ID NO: 68809 - DNA, 120 bp, synthetic construct; identical to SEQ ID NO: 38855
  source 1..120: mol_type = other DNA

SEQ ID NO: 68810 - DNA, 120 bp, synthetic construct; identical to SEQ ID NO: 38856
  source 1..120: mol_type = other DNA

SEQ ID NO: 68811 - DNA, 120 bp, synthetic construct; identical to SEQ ID NO: 38857
  source 1..120: mol_type = other DNA

SEQ ID NO: 68812 - DNA, 120 bp, synthetic construct; identical to SEQ ID NO: 11174
  source 1..120: mol_type = other DNA

SEQ ID NO: 68813 - DNA, 120 bp, synthetic construct; identical to SEQ ID NO: 38859
  source 1..120: mol_type = other DNA

SEQ ID NO: 68814 - DNA, 120 bp, synthetic construct; identical to SEQ ID NO: 38860
  source 1..120: mol_type = other DNA

SEQ ID NO: 68815 - DNA, 120 bp, synthetic construct; identical to SEQ ID NO: 38861
  source 1..120: mol_type = other DNA

SEQ ID NO: 68816 - DNA, 120 bp, synthetic construct; identical to SEQ ID NO: 38862
  source 1..120: mol_type = other DNA

SEQ ID NO: 68817 - DNA, 120 bp, synthetic construct; identical to SEQ ID NO: 11175
  source 1..120: mol_type = other DNA

SEQ ID NO: 68818 - DNA, 120 bp, synthetic construct; identical to SEQ ID NO: 38864
  source 1..120: mol_type = other DNA

SEQ ID NO: 68819 - DNA, 120 bp, synthetic construct; identical to SEQ ID NO: 38865
  source 1..120: mol_type = other DNA

SEQ ID NO: 68820 - DNA, 120 bp, synthetic construct; identical to SEQ ID NO: 38866
  source 1..120: mol_type = other DNA

SEQ ID NO: 68821 - DNA, 120 bp, synthetic construct; identical to SEQ ID NO: 11176
  source 1..120: mol_type = other DNA

SEQ ID NO: 68822 - DNA, 120 bp, synthetic construct; identical to SEQ ID NO: 38868
  source 1..120: mol_type = other DNA

SEQ ID NO: 68823 - DNA, 120 bp, synthetic construct; identical to SEQ ID NO: 38869
  source 1..120: mol_type = other DNA

SEQ ID NO: 68824 - DNA, 120 bp, synthetic construct; identical to SEQ ID NO: 11177
  source 1..120: mol_type = other DNA

SEQ ID NO: 68825 - DNA, 120 bp, synthetic construct; identical to SEQ ID NO: 38871
  source 1..120: mol_type = other DNA

SEQ ID NO: 68826 - DNA, 120 bp, synthetic construct; identical to SEQ ID NO: 38872
  source 1..120: mol_type = other DNA

SEQ ID NO: 68827 - DNA, 120 bp, synthetic construct; identical to SEQ ID NO: 38873
  source 1..120: mol_type = other DNA

SEQ ID NO: 68828 - DNA, 120 bp, synthetic construct; identical to SEQ ID NO: 38874
  source 1..120: mol_type = other DNA

SEQ ID NO: 68829 - DNA, 120 bp, synthetic construct; identical to SEQ ID NO: 11178
  source 1..120: mol_type = other DNA

SEQ ID NO: 68830 - DNA, 120 bp, synthetic construct; identical to SEQ ID NO: 38876
  source 1..120: mol_type = other DNA

SEQ ID NO: 68831 - DNA, 120 bp, synthetic construct; identical to SEQ ID NO: 38877
  source 1..120: mol_type = other DNA

SEQ ID NO: 68832 - DNA, 120 bp, synthetic construct; identical to SEQ ID NO: 11179
  source 1..120: mol_type = other DNA

SEQ ID NO: 68833 - DNA, 120 bp, synthetic construct; identical to SEQ ID NO: 38879
  source 1..120: mol_type = other DNA

SEQ ID NO: 68834 - DNA, 120 bp, synthetic construct; identical to SEQ ID NO: 38880
  source 1..120: mol_type = other DNA

SEQ ID NO: 68835 - DNA, 120 bp, synthetic construct; identical to SEQ ID NO: 38881
  source 1..120: mol_type = other DNA

SEQ ID NO: 68836 - DNA, 120 bp, synthetic construct; identical to SEQ ID NO: 11180
  source 1..120: mol_type = other DNA

SEQ ID NO: 68837 - DNA, 120 bp, synthetic construct; identical to SEQ ID NO: 38883
  source 1..120: mol_type = other DNA

SEQ ID NO: 68838 - DNA, 120 bp, synthetic construct; identical to SEQ ID NO: 38884
  source 1..120: mol_type = other DNA

SEQ ID NO: 68839 - DNA, 120 bp, synthetic construct; identical to SEQ ID NO: 38885
  source 1..120: mol_type = other DNA

SEQ ID NO: 68840 - DNA, 120 bp, synthetic construct; identical to SEQ ID NO: 38886
  source 1..120: mol_type = other DNA

SEQ ID NO: 68841 - DNA, 120 bp, synthetic construct; identical to SEQ ID NO: 11181
  source 1..120: mol_type = other DNA

SEQ ID NO: 68842 - DNA, 120 bp, synthetic construct; identical to SEQ ID NO: 38888
  source 1..120: mol_type = other DNA

SEQ ID NO: 68843 - DNA, 120 bp, synthetic construct; identical to SEQ ID NO: 38889
  source 1..120: mol_type = other DNA

SEQ ID NO: 68844 - DNA, 120 bp, synthetic construct; identical to SEQ ID NO: 11182
  source 1..120: mol_type = other DNA

SEQ ID NO: 68845 - DNA, 120 bp, synthetic construct; identical to SEQ ID NO: 38891
  source 1..120: mol_type = other DNA

SEQ ID NO: 68846 - DNA, 120 bp, synthetic construct; identical to SEQ ID NO: 38892
  source 1..120: mol_type = other DNA

SEQ ID NO: 68847 - DNA, 120 bp, synthetic construct; identical to SEQ ID NO: 38893
  source 1..120: mol_type = other DNA

SEQ ID NO: 68848 - DNA, 120 bp, synthetic construct; identical to SEQ ID NO: 11183
  source 1..120: mol_type = other DNA

SEQ ID NO: 68849 - DNA, 120 bp, synthetic construct; identical to SEQ ID NO: 38895
  source 1..120: mol_type = other DNA

SEQ ID NO: 68850 - DNA, 120 bp, synthetic construct; identical to SEQ ID NO: 38896
  source 1..120: mol_type = other DNA

SEQ ID NO: 68851 - DNA, 120 bp, synthetic construct; identical to SEQ ID NO: 38897
  source 1..120: mol_type = other DNA

SEQ ID NO: 68852 - DNA, 120 bp, synthetic construct; identical to SEQ ID NO: 11184
  source 1..120: mol_type = other DNA

SEQ ID NO: 68853 - DNA, 120 bp, synthetic construct; identical to SEQ ID NO: 38899
  source 1..120: mol_type = other DNA

SEQ ID NO: 68854 - DNA, 120 bp, synthetic construct; identical to SEQ ID NO: 38900
  source 1..120: mol_type = other DNA

SEQ ID NO: 68855 - DNA, 120 bp, synthetic construct; identical to SEQ ID NO: 38901
  source 1..120: mol_type = other DNA

SEQ ID NO: 68856 - DNA, 120 bp, synthetic construct; identical to SEQ ID NO: 11185
  source 1..120: mol_type = other DNA

SEQ ID NO: 68857 - DNA, 120 bp, synthetic construct; identical to SEQ ID NO: 38903
  source 1..120: mol_type = other DNA

SEQ ID NO: 68858 - DNA, 120 bp, synthetic construct; identical to SEQ ID NO: 38904
  source 1..120: mol_type = other DNA

SEQ ID NO: 68859 - DNA, 120 bp, synthetic construct; identical to SEQ ID NO: 38905
  source 1..120: mol_type = other DNA

SEQ ID NO: 68860 - DNA, 120 bp, synthetic construct; identical to SEQ ID NO: 11186
  source 1..120: mol_type = other DNA

SEQ ID NO: 68861 - DNA, 120 bp, synthetic construct; identical to SEQ ID NO: 38907
  source 1..120: mol_type = other DNA

SEQ ID NO: 68862 - DNA, 120 bp, synthetic construct; identical to SEQ ID NO: 38908
  source 1..120: mol_type = other DNA

SEQ ID NO: 68863 - DNA, 120 bp, synthetic construct; identical to SEQ ID NO: 38909
  source 1..120: mol_type = other DNA

SEQ ID NO: 68864 - DNA, 120 bp, synthetic construct; identical to SEQ ID NO: 38910
  source 1..120: mol_type = other DNA

SEQ ID NO: 68865 - DNA, 120 bp, synthetic construct; identical to SEQ ID NO: 11187
  source 1..120: mol_type = other DNA

SEQ ID NO: 68866 - DNA, 120 bp, synthetic construct; identical to SEQ ID NO: 38912
  source 1..120: mol_type = other DNA

SEQ ID NO: 68867 - DNA, 120 bp, synthetic construct; identical to SEQ ID NO: 38913
  source 1..120: mol_type = other DNA

SEQ ID NO: 68868 - DNA, 120 bp, synthetic construct; identical to SEQ ID NO: 11188
  source 1..120: mol_type = other DNA

SEQ ID NO: 68869 - DNA, 120 bp, synthetic construct; identical to SEQ ID NO: 38915
  source 1..120: mol_type = other DNA

SEQ ID NO: 68870 - DNA, 120 bp, synthetic construct; identical to SEQ ID NO: 38916
  source 1..120: mol_type = other DNA

SEQ ID NO: 68871 - DNA, 120 bp, synthetic construct; identical to SEQ ID NO: 38917
  source 1..120: mol_type = other DNA

SEQ ID NO: 68872 - DNA, 120 bp, synthetic construct; identical to SEQ ID NO: 38918
  source 1..120: mol_type = other DNA

SEQ ID NO: 68873 - DNA, 120 bp, synthetic construct; identical to SEQ ID NO: 11189
  source 1..120: mol_type = other DNA

SEQ ID NO: 68874 - DNA, 120 bp, synthetic construct; identical to SEQ ID NO: 38920
  source 1..120: mol_type = other DNA

SEQ ID NO: 68875 - DNA, 120 bp, synthetic construct; identical to SEQ ID NO: 38921
  source 1..120: mol_type = other DNA

SEQ ID NO: 68876 - DNA, 120 bp, synthetic construct; identical to SEQ ID NO: 11190
  source 1..120: mol_type = other DNA

SEQ ID NO: 68877 - DNA, 120 bp, synthetic construct; identical to SEQ ID NO: 38923
  source 1..120: mol_type = other DNA

SEQ ID NO: 68878 - DNA, 120 bp, synthetic construct; identical to SEQ ID NO: 38924
  source 1..120: mol_type = other DNA

SEQ ID NO: 68879 - DNA, 120 bp, synthetic construct; identical to SEQ ID NO: 38925
  source 1..120: mol_type = other DNA

SEQ ID NO: 68880 - DNA, 120 bp, synthetic construct; identical to SEQ ID NO: 11191
  source 1..120: mol_type = other DNA

SEQ ID NO: 68881 - DNA, 120 bp, synthetic construct; identical to SEQ ID NO: 38927
  source 1..120: mol_type = other DNA

SEQ ID NO: 68882 - DNA, 120 bp, synthetic construct; identical to SEQ ID NO: 38928
  source 1..120: mol_type = other DNA

SEQ ID NO: 68883 - DNA, 120 bp, synthetic construct; identical to SEQ ID NO: 38929
  source 1..120: mol_type = other DNA

SEQ ID NO: 68884 - DNA, 120 bp, synthetic construct; identical to SEQ ID NO: 11192
  source 1..120: mol_type = other DNA

SEQ ID NO: 68885 - DNA, 120 bp, synthetic construct; identical to SEQ ID NO: 38931
  source 1..120: mol_type = other DNA

SEQ ID NO: 68886 - DNA, 120 bp, synthetic construct; identical to SEQ ID NO: 38932
  source 1..120: mol_type = other DNA

SEQ ID NO: 68887 - DNA, 120 bp, synthetic construct; identical to SEQ ID NO: 38933
  source 1..120: mol_type = other DNA

SEQ ID NO: 68888 - DNA, 120 bp, synthetic construct; identical to SEQ ID NO: 11193
  source 1..120: mol_type = other DNA

SEQ ID NO: 68889 - DNA, 120 bp, synthetic construct; identical to SEQ ID NO: 38935
  source 1..120: mol_type = other DNA

SEQ ID NO: 68890 - DNA, 120 bp, synthetic construct; identical to SEQ ID NO: 38936
  source 1..120: mol_type = other DNA

SEQ ID NO: 68891 - DNA, 120 bp, synthetic construct; identical to SEQ ID NO: 38937
  source 1..120: mol_type = other DNA

SEQ ID NO: 68892 - DNA, 120 bp, synthetic construct; identical to SEQ ID NO: 11194
  source 1..120: mol_type = other DNA

SEQ ID NO: 68893 - DNA, 120 bp, synthetic construct; identical to SEQ ID NO: 38939
  source 1..120: mol_type = other DNA

SEQ ID NO: 68894 - DNA, 120 bp, synthetic construct; identical to SEQ ID NO: 38940
  source 1..120: mol_type = other DNA

SEQ ID NO: 68895 - DNA, 120 bp, synthetic construct; identical to SEQ ID NO: 38941
  source 1..120: mol_type = other DNA

SEQ ID NO: 68896 - DNA, 120 bp, synthetic construct; identical to SEQ ID NO: 38942
  source 1..120: mol_type = other DNA

SEQ ID NO: 68897 - DNA, 120 bp, synthetic construct; identical to SEQ ID NO: 11195
  source 1..120: mol_type = other DNA

SEQ ID NO: 68898 - DNA, 120 bp, synthetic construct; identical to SEQ ID NO: 38944
  source 1..120: mol_type = other DNA

SEQ ID NO: 68899 - DNA, 120 bp, synthetic construct; identical to SEQ ID NO: 38945
  source 1..120: mol_type = other DNA

SEQ ID NO: 68900 - DNA, 120 bp, synthetic construct; identical to SEQ ID NO: 38946
  source 1..120: mol_type = other DNA

SEQ ID NO: 68901 - DNA, 120 bp, synthetic construct; identical to SEQ ID NO: 11196
  source 1..120: mol_type = other DNA

SEQ ID NO: 68902 - DNA, 120 bp, synthetic construct; identical to SEQ ID NO: 38948
  source 1..120: mol_type = other DNA

SEQ ID NO: 68903 - DNA, 120 bp, synthetic construct; identical to SEQ ID NO: 38949
  source 1..120: mol_type = other DNA

SEQ ID NO: 68904 - DNA, 120 bp, synthetic construct; identical to SEQ ID NO: 38950
  source 1..120: mol_type = other DNA

SEQ ID NO: 68905 - DNA, 120 bp, synthetic construct; identical to SEQ ID NO: 11197
  source 1..120: mol_type = other DNA

SEQ ID NO: 68906 - DNA, 120 bp, synthetic construct; identical to SEQ ID NO: 38952
  source 1..120: mol_type = other DNA

SEQ ID NO: 68907 - DNA, 120 bp, synthetic construct; identical to SEQ ID NO: 38953
  source 1..120: mol_type = other DNA

SEQ ID NO: 68908 - DNA, 120 bp, synthetic construct; identical to SEQ ID NO: 11198
  source 1..120: mol_type = other DNA

SEQ ID NO: 68909 - DNA, 120 bp, synthetic construct; identical to SEQ ID NO: 38955
  source 1..120: mol_type = other DNA

SEQ ID NO: 68910 - DNA, 120 bp, synthetic construct; identical to SEQ ID NO: 38956
  source 1..120: mol_type = other DNA

SEQ ID NO: 68911 - DNA, 120 bp, synthetic construct; identical to SEQ ID NO: 38957
  source 1..120: mol_type = other DNA

SEQ ID NO: 68912 - DNA, 120 bp, synthetic construct; identical to SEQ ID NO: 38958
  source 1..120: mol_type = other DNA

SEQ ID NO: 68913 - DNA, 120 bp, synthetic construct; identical to SEQ ID NO: 11199
  source 1..120: mol_type = other DNA

SEQ ID NO: 68914 - DNA, 120 bp, synthetic construct; identical to SEQ ID NO: 3940
  source 1..120: mol_type = other DNA

SEQ ID NO: 68915 - DNA, 120 bp, synthetic construct; identical to SEQ ID NO: 38961
  source 1..120: mol_type = other DNA

SEQ ID NO: 68916 - DNA, 120 bp, synthetic construct; identical to SEQ ID NO: 38962
  source 1..120: mol_type = other DNA

SEQ ID NO: 68917 - DNA, 120 bp, synthetic construct; identical to SEQ ID NO: 11200
  source 1..120: mol_type = other DNA

SEQ ID NO: 68918 - DNA, 120 bp, synthetic construct; identical to SEQ ID NO: 38964
  source 1..120: mol_type = other DNA

SEQ ID NO: 68919 - DNA, 120 bp, synthetic construct; identical to SEQ ID NO: 38965
  source 1..120: mol_type = other DNA

SEQ ID NO: 68920 - DNA, 120 bp, synthetic construct; identical to SEQ ID NO: 11201
  source 1..120: mol_type = other DNA

SEQ ID NO: 68921 - DNA, 120 bp, synthetic construct; identical to SEQ ID NO: 38967
  source 1..120: mol_type = other DNA

SEQ ID NO: 68922 - DNA, 120 bp, synthetic construct; identical to SEQ ID NO: 38968
  source 1..120: mol_type = other DNA

SEQ ID NO: 68923 - DNA, 120 bp, synthetic construct; identical to SEQ ID NO: 38969
  source 1..120: mol_type = other DNA

SEQ ID NO: 68924 - DNA, 120 bp, synthetic construct; identical to SEQ ID NO: 38970
  source 1..120: mol_type = other DNA

SEQ ID NO: 68925 - DNA, 120 bp, synthetic construct; identical to SEQ ID NO: 11202
  source 1..120: mol_type = other DNA

SEQ ID NO: 68926 - DNA, 120 bp, synthetic construct; identical to SEQ ID NO: 38972
  source 1..120: mol_type = other DNA

SEQ ID NO: 68927 - DNA, 120 bp, synthetic construct; identical to SEQ ID NO: 38973
  source 1..120: mol_type = other DNA

SEQ ID NO: 68928 - DNA, 120 bp, synthetic construct; identical to SEQ ID NO: 38974
  source 1..120: mol_type = other DNA

SEQ ID NO: 68929 - DNA, 120 bp, synthetic construct; identical to SEQ ID NO: 11203
  source 1..120: mol_type = other DNA

SEQ ID NO: 68930 - DNA, 120 bp, synthetic construct; identical to SEQ ID NO: 38976
  source 1..120: mol_type = other DNA

SEQ ID NO: 68931 - DNA, 120 bp, synthetic construct; identical to SEQ ID NO: 38977
  source 1..120: mol_type = other DNA

SEQ ID NO: 68932 - DNA, 120 bp, synthetic construct; identical to SEQ ID NO: 38978
  source 1..120: mol_type = other DNA

SEQ ID NO: 68933 - DNA, 120 bp, synthetic construct; identical to SEQ ID NO: 11204
  source 1..120: mol_type = other DNA

SEQ ID NO: 68934 - DNA, 120 bp, synthetic construct; identical to SEQ ID NO: 38980
  source 1..120: mol_type = other DNA

SEQ ID NO: 68935 - DNA, 120 bp, synthetic construct; identical to SEQ ID NO: 38981
  source 1..120: mol_type = other DNA

SEQ ID NO: 68936 - DNA, 120 bp, synthetic construct; identical to SEQ ID NO: 38982
  source 1..120: mol_type = other DNA

SEQ ID NO: 68937 - DNA, 120 bp, synthetic construct; identical to SEQ ID NO: 11205
  source 1..120: mol_type = other DNA

SEQ ID NO: 68938 - DNA, 120 bp, synthetic construct; identical to SEQ ID NO: 38984
  source 1..120: mol_type = other DNA

SEQ ID NO: 68939 - DNA, 120 bp, synthetic construct; identical to SEQ ID NO: 38985
  source 1..120: mol_type = other DNA

SEQ ID NO: 68940 - DNA, 120 bp, synthetic construct; identical to SEQ ID NO: 38986
  source 1..120: mol_type = other DNA

SEQ ID NO: 68941 - DNA, 120 bp, synthetic construct; identical to SEQ ID NO: 38987
  source 1..120: mol_type = other DNA

SEQ ID NO: 68942 - DNA, 120 bp, synthetic construct; identical to SEQ ID NO: 11206
  source 1..120: mol_type = other DNA

SEQ ID NO: 68943 - DNA, 120 bp, synthetic construct; identical to SEQ ID NO: 38989
  source 1..120: mol_type = other DNA

SEQ ID NO: 68944 - DNA, 120 bp, synthetic construct; identical to SEQ ID NO: 38990
  source 1..120: mol_type = other DNA

SEQ ID NO: 68945 - DNA, 120 bp, synthetic construct; identical to SEQ ID NO: 11207
  source 1..120: mol_type = other DNA

SEQ ID NO: 68946 - DNA, 120 bp, synthetic construct; identical to SEQ ID NO: 38992
  source 1..120: mol_type = other DNA

SEQ ID NO: 68947 - DNA, 120 bp, synthetic construct; identical to SEQ ID NO: 38993
  source 1..120: mol_type = other DNA

SEQ ID NO: 68948 - DNA, 120 bp, synthetic construct; identical to SEQ ID NO: 38994
  source 1..120: mol_type = other DNA

SEQ ID NO: 68949 - DNA, 120 bp, synthetic construct; identical to SEQ ID NO: 38995
  source 1..120: mol_type = other DNA

SEQ ID NO: 68950 - DNA, 120 bp, synthetic construct; identical to SEQ ID NO: 11208
  source 1..120: mol_type = other DNA

SEQ ID NO: 68951 - DNA, 120 bp, synthetic construct; identical to SEQ ID NO: 38997
  source 1..120: mol_type = other DNA

SEQ ID NO: 68952 - DNA, 120 bp, synthetic construct; identical to SEQ ID NO: 38998
  source 1..120: mol_type = other DNA

SEQ ID NO: 68953 - DNA, 120 bp, synthetic construct; identical to SEQ ID NO: 11209
  source 1..120: mol_type = other DNA

SEQ ID NO: 68954 - DNA, 120 bp, synthetic construct; identical to SEQ ID NO: 39000
  source 1..120: mol_type = other DNA

SEQ ID NO: 68955 - DNA, 120 bp, synthetic construct; identical to SEQ ID NO: 39001
  source 1..120: mol_type = other DNA

SEQ ID NO: 68956 - DNA, 120 bp, synthetic construct; identical to SEQ ID NO: 11210
  source 1..120: mol_type = other DNA

SEQ ID NO: 68957 - DNA, 120 bp, synthetic construct; identical to SEQ ID NO: 39003
  source 1..120: mol_type = other DNA

SEQ ID NO: 68958 - DNA, 120 bp, synthetic construct; identical to SEQ ID NO: 39004
  source 1..120: mol_type = other DNA

SEQ ID NO: 68959 - DNA, 120 bp, synthetic construct; identical to SEQ ID NO: 39005
  source 1..120: mol_type = other DNA

SEQ ID NO: 68960 - DNA, 120 bp, synthetic construct; identical to SEQ ID NO: 39006
  source 1..120: mol_type = other DNA

SEQ ID NO: 68961 - DNA, 120 bp, synthetic construct; identical to SEQ ID NO: 11211
  source 1..120: mol_type = other DNA

SEQ ID NO: 68962 - DNA, 120 bp, synthetic construct; identical to SEQ ID NO: 39008
  source 1..120: mol_type = other DNA

SEQ ID NO: 68963 - DNA, 120 bp, synthetic construct; identical to SEQ ID NO: 39009
  source 1..120: mol_type = other DNA

SEQ ID NO: 68964 - DNA, 120 bp, synthetic construct; identical to SEQ ID NO: 39010
  source 1..120: mol_type = other DNA

SEQ ID NO: 68965 - DNA, 120 bp, synthetic construct; identical to SEQ ID NO: 11212
  source 1..120: mol_type = other DNA

SEQ ID NO: 68966 - DNA, 120 bp, synthetic construct; identical to SEQ ID NO: 39012
  source 1..120: mol_type = other DNA

SEQ ID NO: 68967 - DNA, 120 bp, synthetic construct; identical to SEQ ID NO: 39013
  source 1..120: mol_type = other DNA

SEQ ID NO: 68968 - DNA, 120 bp, synthetic construct; identical to SEQ ID NO: 11213
  source 1..120: mol_type = other DNA

SEQ ID NO: 68969 - DNA, 120 bp, synthetic construct; identical to SEQ ID NO: 39015
  source 1..120: mol_type = other DNA

SEQ ID NO: 68970 - DNA, 120 bp, synthetic construct; identical to SEQ ID NO: 39016
  source 1..120: mol_type = other DNA

SEQ ID NO: 68971 - DNA, 120 bp, synthetic construct; identical to SEQ ID NO: 39017
  source 1..120: mol_type = other DNA

SEQ ID NO: 68972 - DNA, 120 bp, synthetic construct; identical to SEQ ID NO: 11214
  source 1..120: mol_type = other DNA

SEQ ID NO: 68973 - DNA, 120 bp, synthetic construct; identical to SEQ ID NO: 39019
  source 1..120: mol_type = other DNA

SEQ ID NO: 68974 - DNA, 120 bp, synthetic construct; identical to SEQ ID NO: 39020
  source 1..120: mol_type = other DNA

SEQ ID NO: 68975 - DNA, 120 bp, synthetic construct; identical to SEQ ID NO: 39021
  source 1..120: mol_type = other DNA

SEQ ID NO: 68976 - DNA, 120 bp, synthetic construct; identical to SEQ ID NO: 39022
  source 1..120: mol_type = other DNA

SEQ ID NO: 68977 - DNA, 120 bp, synthetic construct; identical to SEQ ID NO: 11215
  source 1..120: mol_type = other DNA

SEQ ID NO: 68978 - DNA, 120 bp, synthetic construct; identical to SEQ ID NO: 39024
  source 1..120: mol_type = other DNA

SEQ ID NO: 68979 - DNA, 120 bp, synthetic construct; identical to SEQ ID NO: 39025
  source 1..120: mol_type = other DNA

SEQ ID NO: 68980 - DNA, 120 bp, synthetic construct; identical to SEQ ID NO: 11216
  source 1..120: mol_type = other DNA

SEQ ID NO: 68981 - DNA, 120 bp, synthetic construct; identical to SEQ ID NO: 39027
  source 1..120: mol_type = other DNA

SEQ ID NO: 68982 - DNA, 120 bp, synthetic construct; identical to SEQ ID NO: 39028
  source 1..120: mol_type = other DNA

SEQ ID NO: 68983 - DNA, 120 bp, synthetic construct; identical to SEQ ID NO: 39029
  source 1..120: mol_type = other DNA

SEQ ID NO: 68984 - DNA, 120 bp, synthetic construct; identical to SEQ ID NO: 39030
  source 1..120: mol_type = other DNA

SEQ ID NO: 68985 - DNA, 120 bp, synthetic construct; identical to SEQ ID NO: 11217
  source 1..120: mol_type = other DNA

SEQ ID NO: 68986 - DNA, 120 bp, synthetic construct; identical to SEQ ID NO: 39032
  source 1..120: mol_type = other DNA

SEQ ID NO: 68987 - DNA, 120 bp, synthetic construct; identical to SEQ ID NO: 39033
  source 1..120: mol_type = other DNA

SEQ ID NO: 68988 - DNA, 120 bp, synthetic construct; identical to SEQ ID NO: 11218
  source 1..120: mol_type = other DNA

SEQ ID NO: 68989 - DNA, 120 bp, synthetic construct; identical to SEQ ID NO: 39035
  source 1..120: mol_type = other DNA

SEQ ID NO: 68990 - DNA, 120 bp, synthetic construct; identical to SEQ ID NO: 39036
  source 1..120: mol_type = other DNA

SEQ ID NO: 68991 - DNA, 120 bp, synthetic construct; identical to SEQ ID NO: 39037
  source 1..120: mol_type = other DNA

SEQ ID NO: 68992 - DNA, 120 bp, synthetic construct; identical to SEQ ID NO: 39038
  source 1..120: mol_type = other DNA

SEQ ID NO: 68993 - DNA, 120 bp, synthetic construct; identical to SEQ ID NO: 11219
  source 1..120: mol_type = other DNA

SEQ ID NO: 68994 - DNA, 120 bp, synthetic construct; identical to SEQ ID NO: 39040
  source 1..120: mol_type = other DNA

SEQ ID NO: 68995 - DNA, 120 bp, synthetic construct; identical to SEQ ID NO: 39041
  source 1..120: mol_type = other DNA

SEQ ID NO: 68996 - DNA, 120 bp, synthetic construct; identical to SEQ ID NO: 39042
  source 1..120: mol_type = other DNA

SEQ ID NO: 68997 - DNA, 120 bp, synthetic construct; identical to SEQ ID NO: 11220
  source 1..120: mol_type = other DNA

SEQ ID NO: 68998 - DNA, 120 bp, synthetic construct; identical to SEQ ID NO: 39044
  source 1..120: mol_type = other DNA

SEQ ID NO: 68999 - DNA, 120 bp, synthetic construct; identical to SEQ ID NO: 39045
  source 1..120: mol_type = other DNA

SEQ ID NO: 69000 - DNA, 120 bp, synthetic construct; identical to SEQ ID NO: 39046
  source 1..120: mol_type = other DNA

SEQ ID NO: 69001 - DNA, 120 bp, synthetic construct; identical to SEQ ID NO: 11221
  source 1..120: mol_type = other DNA

SEQ ID NO: 69002 - DNA, 120 bp, synthetic construct; identical to SEQ ID NO: 39048
  source 1..120: mol_type = other DNA

SEQ ID NO: 69003 - DNA, 120 bp, synthetic construct; identical to SEQ ID NO: 3960
  source 1..120: mol_type = other DNA

SEQ ID NO: 69004 - DNA, 120 bp, synthetic construct; identical to SEQ ID NO: 39050
  source 1..120: mol_type = other DNA

SEQ ID NO: 69005 - DNA, 120 bp, synthetic construct; identical to SEQ ID NO: 39051
  source 1..120: mol_type = other DNA

SEQ ID NO: 69006 - DNA, 120 bp, synthetic construct; identical to SEQ ID NO: 11222
  source 1..120: mol_type = other DNA

SEQ ID NO: 69007 - DNA, 120 bp, synthetic construct; identical to SEQ ID NO: 39053
  source 1..120: mol_type = other DNA

SEQ ID NO: 69008 - DNA, 120 bp, synthetic construct; identical to SEQ ID NO: 39054
  source 1..120: mol_type = other DNA

SEQ ID NO: 69009 - DNA, 120 bp, synthetic construct; identical to SEQ ID NO: 11223
  source 1..120: mol_type = other DNA

SEQ ID NO: 69010 - DNA, 120 bp, synthetic construct; identical to SEQ ID NO: 39056
  source 1..120: mol_type = other DNA

SEQ ID NO: 69011 - DNA, 120 bp, synthetic construct; identical to SEQ ID NO: 39057
  source 1..120: mol_type = other DNA

SEQ ID NO: 69012 - DNA, 120 bp, synthetic construct; identical to SEQ ID NO: 39058
  source 1..120: mol_type = other DNA

SEQ ID NO: 69013 - DNA, 120 bp, synthetic construct; identical to SEQ ID NO: 11224
  source 1..120: mol_type = other DNA

SEQ ID NO: 69014 - DNA, 120 bp, synthetic construct; identical to SEQ ID NO: 39060
  source 1..120: mol_type = other DNA

SEQ ID NO: 69015 - DNA, 120 bp, synthetic construct; identical to SEQ ID NO: 39061
  source 1..120: mol_type = other DNA

SEQ ID NO: 69016 - DNA, 120 bp, synthetic construct; identical to SEQ ID NO: 39062
  source 1..120: mol_type = other DNA

SEQ ID NO: 69017 - DNA, 120 bp, synthetic construct; identical to SEQ ID NO: 11225
  source 1..120: mol_type = other DNA

SEQ ID NO: 69018 - DNA, 120 bp, synthetic construct; identical to SEQ ID NO: 39064
  source 1..120: mol_type = other DNA

SEQ ID NO: 69019 - DNA, 120 bp, synthetic construct; identical to SEQ ID NO: 39065
  source 1..120: mol_type = other DNA

SEQ ID NO: 69020 - DNA, 120 bp, synthetic construct; identical to SEQ ID NO: 39066
  source 1..120: mol_type = other DNA

SEQ ID NO: 69021 - DNA, 120 bp, synthetic construct; identical to SEQ ID NO: 39067
  source 1..120: mol_type = other DNA

SEQ ID NO: 69022 - DNA, 120 bp, synthetic construct; identical to SEQ ID NO: 11226
  source 1..120: mol_type = other DNA

SEQ ID NO: 69023 - DNA, 120 bp, synthetic construct; identical to SEQ ID NO: 39069
  source 1..120: mol_type = other DNA

SEQ ID NO: 69024 - DNA, 120 bp, synthetic construct; identical to SEQ ID NO: 39070
  source 1..120: mol_type = other DNA

SEQ ID NO: 69025 - DNA, 120 bp, synthetic construct; identical to SEQ ID NO: 11227
  source 1..120: mol_type = other DNA

SEQ ID NO: 69026 - DNA, 120 bp, synthetic construct; identical to SEQ ID NO: 39072
  source 1..120: mol_type = other DNA

SEQ ID NO: 69027 - DNA, 120 bp, synthetic construct; identical to SEQ ID NO: 39073
  source 1..120: mol_type = other DNA

SEQ ID NO: 69028 - DNA, 120 bp, synthetic construct; identical to SEQ ID NO: 39074
  source 1..120: mol_type = other DNA

SEQ ID NO: 69029 - DNA, 120 bp, synthetic construct; identical to SEQ ID NO: 39075
  source 1..120: mol_type = other DNA

SEQ ID NO: 69030 - DNA, 120 bp, synthetic construct; identical to SEQ ID NO: 11228
  source 1..120: mol_type = other DNA

SEQ ID NO: 69031 - DNA, 120 bp, synthetic construct; identical to SEQ ID NO: 39077
  source 1..120: mol_type = other DNA

SEQ ID NO: 69032 - DNA, 120 bp, synthetic construct; identical to SEQ ID NO: 39078
  source 1..120: mol_type = other DNA

SEQ ID NO: 69033 - DNA, 120 bp, synthetic construct; identical to SEQ ID NO: 11229
  source 1..120: mol_type = other DNA

SEQ ID NO: 69034 - DNA, 120 bp, synthetic construct; identical to SEQ ID NO: 39080
  source 1..120: mol_type = other DNA

SEQ ID NO: 69035 - DNA, 120 bp, synthetic construct; identical to SEQ ID NO: 39081
  source 1..120: mol_type = other DNA

SEQ ID NO: 69036 - DNA, 120 bp, synthetic construct; identical to SEQ ID NO: 39082
  source 1..120: mol_type = other DNA

SEQ ID NO: 69037 - DNA, 120 bp, synthetic construct; identical to SEQ ID NO: 39083
  source 1..120: mol_type = other DNA

SEQ ID NO: 69038 - DNA, 120 bp, synthetic construct; identical to SEQ ID NO: 11230
  source 1..120: mol_type = other DNA

SEQ ID NO: 69039 - DNA, 120 bp, synthetic construct; identical to SEQ ID NO: 39085
  source 1..120: mol_type = other DNA

SEQ ID NO: 69040 - DNA, 120 bp, synthetic construct; identical to SEQ ID NO: 39086
  source 1..120: mol_type = other DNA

SEQ ID NO: 69041 - DNA, 120 bp, synthetic construct; identical to SEQ ID NO: 39087
  source 1..120: mol_type = other DNA

SEQ ID NO: 69042 - DNA, 120 bp, synthetic construct; identical to SEQ ID NO: 11231
  source 1..120: mol_type = other DNA

SEQ ID NO: 69043 - DNA, 120 bp, synthetic construct; identical to SEQ ID NO: 39089
  source 1..120: mol_type = other DNA

SEQ ID NO: 69044 - DNA, 120 bp, synthetic construct; identical to SEQ ID NO: 39090
  source 1..120: mol_type = other DNA

SEQ ID NO: 69045 - DNA, 120 bp, synthetic construct; identical to SEQ ID NO: 39091
  source 1..120: mol_type = other DNA

SEQ ID NO: 69046 - DNA, 120 bp, synthetic construct; identical to SEQ ID NO: 39092
  source 1..120: mol_type = other DNA

SEQ ID NO: 69047 - DNA, 120 bp, synthetic construct; identical to SEQ ID NO: 11232
  source 1..120: mol_type = other DNA

SEQ ID NO: 69048 - DNA, 120 bp, synthetic construct; identical to SEQ ID NO: 39094
  source 1..120: mol_type = other DNA

SEQ ID NO: 69049 - DNA, 120 bp, synthetic construct; identical to SEQ ID NO: 39095
  source 1..120: mol_type = other DNA

SEQ ID NO: 69050 - DNA, 120 bp, synthetic construct; identical to SEQ ID NO: 39096
  source 1..120: mol_type = other DNA

SEQ ID NO: 69051 - DNA, 120 bp, synthetic construct; identical to SEQ ID NO: 11233
  source 1..120: mol_type = other DNA

SEQ ID NO: 69052 - DNA, 120 bp, synthetic construct; identical to SEQ ID NO: 39098
  source 1..120: mol_type = other DNA

SEQ ID NO: 69053 - DNA, 120 bp, synthetic construct; identical to SEQ ID NO: 39099
  source 1..120: mol_type = other DNA

SEQ ID NO: 69054 - DNA, 120 bp, synthetic construct; identical to SEQ ID NO: 39100
  source 1..120: mol_type = other DNA

SEQ ID NO: 69055 - DNA, 120 bp, synthetic construct; identical to SEQ ID NO: 11234
  source 1..120: mol_type = other DNA

SEQ ID NO: 69056 - DNA, 120 bp, synthetic construct; identical to SEQ ID NO: 39102
  source 1..120: mol_type = other DNA

SEQ ID NO: 69057 - DNA, 120 bp, synthetic construct; identical to SEQ ID NO: 39103
  source 1..120: mol_type = other DNA

SEQ ID NO: 69058 - DNA, 120 bp, synthetic construct; identical to SEQ ID NO: 39104
  source 1..120: mol_type = other DNA

SEQ ID NO: 69059 - DNA, 120 bp, synthetic construct; identical to SEQ ID NO: 11235
  source 1..120: mol_type = other DNA

SEQ ID NO: 69060 - DNA, 120 bp, synthetic construct; identical to SEQ ID NO: 39106
  source 1..120: mol_type = other DNA

SEQ ID NO: 69061 - DNA, 120 bp, synthetic construct; identical to SEQ ID NO: 39107
  source 1..120: mol_type = other DNA

SEQ ID NO: 69062 - DNA, 120 bp, synthetic construct; identical to SEQ ID NO: 39108
  source 1..120: mol_type = other DNA

SEQ ID NO: 69063 - DNA, 120 bp, synthetic construct; identical to SEQ ID NO: 11236
  source 1..120: mol_type = other DNA

SEQ ID NO: 69064 - DNA, 120 bp, synthetic construct; identical to SEQ ID NO: 39110
  source 1..120: mol_type = other DNA

SEQ ID NO: 69065 - DNA, 120 bp, synthetic construct; identical to SEQ ID NO: 39111
  source 1..120: mol_type = other DNA

SEQ ID NO: 69066 - DNA, 120 bp, synthetic construct; identical to SEQ ID NO: 39112
  source 1..120: mol_type = other DNA

SEQ ID NO: 69067 - DNA, 120 bp, synthetic construct; identical to SEQ ID NO: 39113
  source 1..120: mol_type = other DNA

SEQ ID NO: 69068 - DNA, 120 bp, synthetic construct; identical to SEQ ID NO: 11237
  source 1..120: mol_type = other DNA

SEQ ID NO: 69069 - DNA, 120 bp, synthetic construct; identical to SEQ ID NO: 39115
  source 1..120: mol_type = other DNA

SEQ ID NO: 69070 - DNA, 120 bp, synthetic construct; identical to SEQ ID NO: 39116
  source 1..120: mol_type = other DNA

SEQ ID NO: 69071 - DNA, 120 bp, synthetic construct; identical to SEQ ID NO: 39117
  source 1..120: mol_type = other DNA

SEQ ID NO: 69072 - DNA, 120 bp, synthetic construct; identical to SEQ ID NO: 11238
  source 1..120: mol_type = other DNA

SEQ ID NO: 69073 - DNA, 120 bp, synthetic construct; identical to SEQ ID NO: 39119
  source 1..120: mol_type = other DNA

SEQ ID NO: 69074 - DNA, 120 bp, synthetic construct; identical to SEQ ID NO: 39120
  source 1..120: mol_type = other DNA

SEQ ID NO: 69075 - DNA, 120 bp, synthetic construct; identical to SEQ ID NO: 11239
  source 1..120: mol_type = other DNA

SEQ ID NO: 69076 - DNA, 120 bp, synthetic construct; identical to SEQ ID NO: 39122
  source 1..120: mol_type = other DNA

SEQ ID NO: 69077 - DNA, 120 bp, synthetic construct; identical to SEQ ID NO: 39123
  source 1..120: mol_type = other DNA

SEQ ID NO: 69078 - DNA, 120 bp, synthetic construct; identical to SEQ ID NO: 39124
  source 1..120: mol_type = other DNA

SEQ ID NO: 69079 - DNA, 120 bp, synthetic construct; identical to SEQ ID NO: 39125
  source 1..120: mol_type = other DNA

SEQ ID NO: 69080 - DNA, 120 bp, synthetic construct; identical to SEQ ID NO: 11240
  source 1..120: mol_type = other DNA

SEQ ID NO: 69081 - DNA, 120 bp, synthetic construct; identical to SEQ ID NO: 39127
  source 1..120: mol_type = other DNA

SEQ ID NO: 69082 - DNA, 120 bp, synthetic construct; identical to SEQ ID NO: 39128
  source 1..120: mol_type = other DNA

SEQ ID NO: 69083 - DNA, 120 bp, synthetic construct; identical to SEQ ID NO: 39129
  source 1..120: mol_type = other DNA

SEQ ID NO: 69084 - DNA, 120 bp, synthetic construct; identical to SEQ ID NO: 11241
  source 1..120: mol_type = other DNA

SEQ ID NO: 69085 - DNA, 120 bp, synthetic construct; identical to SEQ ID NO: 39131
  source 1..120: mol_type = other DNA

SEQ ID NO: 69086 - DNA, 120 bp, synthetic construct; identical to SEQ ID NO: 39132
  source 1..120: mol_type = other DNA

SEQ ID NO: 69087 - DNA, 120 bp, synthetic construct; identical to SEQ ID NO: 39133
  source 1..120: mol_type = other DNA

SEQ ID NO: 69088 - DNA, 120 bp, synthetic construct; identical to SEQ ID NO: 11242
  source 1..120: mol_type = other DNA

SEQ ID NO: 69089 - DNA, 120 bp, synthetic construct; identical to SEQ ID NO: 39135
  source 1..120: mol_type = other DNA

SEQ ID NO: 69090 - DNA, 120 bp, synthetic construct; identical to SEQ ID NO: 39136
  source 1..120: mol_type = other DNA

SEQ ID NO: 69091 - DNA, 120 bp, synthetic construct; identical to SEQ ID NO: 39137
  source 1..120: mol_type = other DNA

SEQ ID NO: 69092 - DNA, 120 bp, synthetic construct; identical to SEQ ID NO: 11243
  source 1..120: mol_type = other DNA

SEQ ID NO: 69093 - DNA, 120 bp, synthetic construct; identical to SEQ ID NO: 39139
  source 1..120: mol_type = other DNA

SEQ ID NO: 69094 - DNA, 120 bp, synthetic construct; identical to SEQ ID NO: 39140
  source 1..120: mol_type = other DNA

SEQ ID NO: 69095 - DNA, 120 bp, synthetic construct; identical to SEQ ID NO: 39141
  source 1..120: mol_type = other DNA

SEQ ID NO: 69096 - DNA, 120 bp, synthetic construct; identical to SEQ ID NO: 11244
  source 1..120: mol_type = other DNA

SEQ ID NO: 69097 - DNA, 120 bp, synthetic construct; identical to SEQ ID NO: 39143
  source 1..120: mol_type = other DNA

SEQ ID NO: 69098 - DNA, 120 bp, synthetic construct; identical to SEQ ID NO: 39144
  source 1..120: mol_type = other DNA

SEQ ID NO: 69099 - DNA, 120 bp, synthetic construct; identical to SEQ ID NO: 11245
  source 1..120: mol_type = other DNA

SEQ ID NO: 69100 - DNA, 120 bp, synthetic construct; identical to SEQ ID NO: 39146
  source 1..120: mol_type = other DNA

SEQ ID NO: 69101 - DNA, 120 bp, synthetic construct; identical to SEQ ID NO: 39147
  source 1..120: mol_type = other DNA

SEQ ID NO: 69102 - DNA, 120 bp, synthetic construct; identical to SEQ ID NO: 39148
  source 1..120: mol_type = other DNA

SEQ ID NO: 69103 - DNA, 120 bp, synthetic construct; identical to SEQ ID NO: 11246
  source 1..120: mol_type = other DNA

SEQ ID NO: 69104 - DNA, 120 bp, synthetic construct; identical to SEQ ID NO: 39150
  source 1..120: mol_type = other DNA

SEQ ID NO: 69105 - DNA, 120 bp, synthetic construct; identical to SEQ ID NO: 39151
  source 1..120: mol_type = other DNA

SEQ ID NO: 69106 - DNA, 120 bp, synthetic construct; identical to SEQ ID NO: 39152
  source 1..120: mol_type = other DNA

SEQ ID NO: 69107 - DNA, 120 bp, synthetic construct; identical to SEQ ID NO: 11247
  source 1..120: mol_type = other DNA

SEQ ID NO: 69108 - DNA, 120 bp, synthetic construct; identical to SEQ ID NO: 39154
  source 1..120: mol_type = other DNA

SEQ ID NO: 69109 - DNA, 120 bp, synthetic construct; identical to SEQ ID NO: 39155
  source 1..120: mol_type = other DNA

SEQ ID NO: 69110 - DNA, 120 bp, synthetic construct; identical to SEQ ID NO: 39156
  source 1..120: mol_type = other DNA

SEQ ID NO: 69111 - DNA, 120 bp, synthetic construct; identical to SEQ ID NO: 11248
  source 1..120: mol_type = other DNA

SEQ ID NO: 69112 - DNA, 120 bp, synthetic construct; identical to SEQ ID NO: 39158
  source 1..120: mol_type = other DNA

SEQ ID NO: 69113 - DNA, 120 bp, synthetic construct; identical to SEQ ID NO: 39159
  source 1..120: mol_type = other DNA

SEQ ID NO: 69114 - DNA, 120 bp, synthetic construct; identical to SEQ ID NO: 39160
  source 1..120: mol_type = other DNA

SEQ ID NO: 69115 - DNA, 120 bp, synthetic construct; identical to SEQ ID NO: 11249
  source 1..120: mol_type = other DNA

SEQ ID NO: 69116 - DNA, 120 bp, synthetic construct; identical to SEQ ID NO: 39162
  source 1..120: mol_type = other DNA

SEQ ID NO: 69117 - DNA, 120 bp, synthetic construct; identical to SEQ ID NO: 39163
  source 1..120: mol_type = other DNA

SEQ ID NO: 69118 - DNA, 120 bp, synthetic construct; identical to SEQ ID NO: 39164
  source 1..120: mol_type = other DNA

SEQ ID NO: 69119 - DNA, 120 bp, synthetic construct; identical to SEQ ID NO: 39165
  source 1..120: mol_type = other DNA

SEQ ID NO: 69120 - DNA, 120 bp, synthetic construct; identical to SEQ ID NO: 11250
  source 1..120: mol_type = other DNA

SEQ ID NO: 69121 - DNA, 120 bp, synthetic construct; identical to SEQ ID NO: 39167
  source 1..120: mol_type = other DNA

SEQ ID NO: 69122 - DNA, 120 bp, synthetic construct; identical to SEQ ID NO: 39168
  source 1..120: mol_type = other DNA

SEQ ID NO: 69123 - DNA, 120 bp, synthetic construct; identical to SEQ ID NO: 39169
  source 1..120: mol_type = other DNA

SEQ ID NO: 69124 - DNA, 120 bp, synthetic construct; identical to SEQ ID NO: 11251
  source 1..120: mol_type = other DNA

SEQ ID NO: 69125 - DNA, 120 bp, synthetic construct; identical to SEQ ID NO: 39171
  source 1..120: mol_type = other DNA

SEQ ID NO: 69126 - DNA, 120 bp, synthetic construct; identical to SEQ ID NO: 39172
  source 1..120: mol_type = other DNA

SEQ ID NO: 69127 - DNA, 120 bp, synthetic construct; identical to SEQ ID NO: 39173
  source 1..120: mol_type = other DNA

SEQ ID NO: 69128 - DNA, 120 bp, synthetic construct; identical to SEQ ID NO: 11252
  source 1..120: mol_type = other DNA

SEQ ID NO: 69129 - DNA, 120 bp, synthetic construct; identical to SEQ ID NO: 39175
  source 1..120: mol_type = other DNA

SEQ ID NO: 69130 - DNA, 120 bp, synthetic construct; identical to SEQ ID NO: 39176
  source 1..120: mol_type = other DNA

SEQ ID NO: 69131 - DNA, 120 bp, synthetic construct; identical to SEQ ID NO: 39177
  source 1..120: mol_type = other DNA

SEQ ID NO: 69132 - DNA, 120 bp, synthetic construct; identical to SEQ ID NO: 11253
  source 1..120: mol_type = other DNA

SEQ ID NO: 69133 - DNA, 120 bp, synthetic construct; identical to SEQ ID NO: 39179
  source 1..120: mol_type = other DNA

SEQ ID NO: 69134 - DNA, 120 bp, synthetic construct; identical to SEQ ID NO: 39180
  source 1..120: mol_type = other DNA

SEQ ID NO: 69135 - DNA, 120 bp, synthetic construct; identical to SEQ ID NO: 3990
  source 1..120: mol_type = other DNA

SEQ ID NO: 69136 - DNA, 120 bp, synthetic construct; identical to SEQ ID NO: 11254
  source 1..120: mol_type = other DNA

SEQ ID NO: 69137 - DNA, 120 bp, synthetic construct; identical to SEQ ID NO: 39183
  source 1..120: mol_type = other DNA

SEQ ID NO: 69138 - DNA, 120 bp, synthetic construct; identical to SEQ ID NO: 39184
  source 1..120: mol_type = other DNA

SEQ ID NO: 69139 - DNA, 120 bp, synthetic construct; identical to SEQ ID NO: 39185
  source 1..120: mol_type = other DNA

SEQ ID NO: 69140 - DNA, 120 bp, synthetic construct; identical to SEQ ID NO: 11255
  source 1..120: mol_type = other DNA

SEQ ID NO: 69141 - DNA, 120 bp, synthetic construct; identical to SEQ ID NO: 39187
  source 1..120: mol_type = other DNA

SEQ ID NO: 69142 - DNA, 120 bp, synthetic construct; identical to SEQ ID NO: 39188
  source 1..120: mol_type = other DNA

SEQ ID NO: 69143 - DNA, 120 bp, synthetic construct; identical to SEQ ID NO: 39189
  source 1..120: mol_type = other DNA

SEQ ID NO: 69144 - DNA, 120 bp, synthetic construct; identical to SEQ ID NO: 39190
  source 1..120: mol_type = other DNA

SEQ ID NO: 69145 - DNA, 120 bp, synthetic construct; identical to SEQ ID NO: 11256
  source 1..120: mol_type = other DNA

SEQ ID NO: 69146 - DNA, 120 bp, synthetic construct; identical to SEQ ID NO: 39192
  source 1..120: mol_type = other DNA

SEQ ID NO: 69147 - DNA, 120 bp, synthetic construct; identical to SEQ ID NO: 39193
  source 1..120: mol_type = other DNA

SEQ ID NO: 69148 - DNA, 120 bp, synthetic construct; identical to SEQ ID NO: 11257
  source 1..120: mol_type = other DNA

SEQ ID NO: 69149 - DNA, 120 bp, synthetic construct; identical to SEQ ID NO: 39195
  source 1..120: mol_type = other DNA

SEQ ID NO: 69150 - DNA, 120 bp, synthetic construct; identical to SEQ ID NO: 39196
  source 1..120: mol_type = other DNA

SEQ ID NO: 69151 - DNA, 120 bp, synthetic construct; identical to SEQ ID NO: 39197
  source 1..120: mol_type = other DNA

SEQ ID NO: 69152 - DNA, 120 bp, synthetic construct; identical to SEQ ID NO: 11258
  source 1..120: mol_type = other DNA

SEQ ID NO: 69153 - DNA, 120 bp, synthetic construct; identical to SEQ ID NO: 39199
  source 1..120: mol_type = other DNA

SEQ ID NO: 69154 - DNA, 120 bp, synthetic construct; identical to SEQ ID NO: 39200
  source 1..120: mol_type = other DNA

SEQ ID NO: 69155 - DNA, 120 bp, synthetic construct; identical to SEQ ID NO: 39201
  source 1..120: mol_type = other DNA

SEQ ID NO: 69156 - DNA, 120 bp, synthetic construct; identical to SEQ ID NO: 11259
  source 1..120: mol_type = other DNA

SEQ ID NO: 69157 - DNA, 120 bp, synthetic construct; identical to SEQ ID NO: 39203
  source 1..120: mol_type = other DNA

SEQ ID NO: 69158 - DNA, 120 bp, synthetic construct; identical to SEQ ID NO: 39204
  source 1..120: mol_type = other DNA

SEQ ID NO: 69159 - DNA, 120 bp, synthetic construct; identical to SEQ ID NO: 39205
  source 1..120: mol_type = other DNA

SEQ ID NO: 69160 - DNA, 120 bp, synthetic construct; identical to SEQ ID NO: 39206
  source 1..120: mol_type = other DNA

SEQ ID NO: 69161 - DNA, 120 bp, synthetic construct; identical to SEQ ID NO: 11260
  source 1..120: mol_type = other DNA

SEQ ID NO: 69162 - DNA, 120 bp, synthetic construct; identical to SEQ ID NO: 39208
  source 1..120: mol_type = other DNA

SEQ ID NO: 69163 - DNA, 120 bp, synthetic construct; identical to SEQ ID NO: 39209
  source 1..120: mol_type = other DNA

SEQ ID NO: 69164 - DNA, 120 bp, synthetic construct; identical to SEQ ID NO: 11261
  source 1..120: mol_type = other DNA

SEQ ID NO: 69165 - DNA, 120 bp, synthetic construct; identical to SEQ ID NO: 39211
  source 1..120: mol_type = other DNA

SEQ ID NO: 69166 - DNA, 120 bp, synthetic construct; identical to SEQ ID NO: 39212
  source 1..120: mol_type = other DNA

SEQ ID NO: 69167 - DNA, 120 bp, synthetic construct; identical to SEQ ID NO: 39213
  source 1..120: mol_type = other DNA

SEQ ID NO: 69168 - DNA, 120 bp, synthetic construct; identical to SEQ ID NO: 39214
  source 1..120: mol_type = other DNA

SEQ ID NO: 69169 - DNA, 120 bp, synthetic construct; identical to SEQ ID NO: 11262
  source 1..120: mol_type = other DNA

SEQ ID NO: 69170 - DNA, 120 bp, synthetic construct; identical to SEQ ID NO: 39216
  source 1..120: mol_type = other DNA

SEQ ID NO: 69171 - DNA, 120 bp, synthetic construct; identical to SEQ ID NO: 39217
  source 1..120: mol_type = other DNA

SEQ ID NO: 69172 - DNA, 120 bp, synthetic construct; identical to SEQ ID NO: 11263
  source 1..120: mol_type = other DNA

SEQ ID NO: 69173 - DNA, 120 bp, synthetic construct; identical to SEQ ID NO: 39219
  source 1..120: mol_type = other DNA

SEQ ID NO: 69174 - DNA, 120 bp, synthetic construct; identical to SEQ ID NO: 39220
  source 1..120: mol_type = other DNA

SEQ ID NO: 69175 - DNA, 120 bp, synthetic construct; identical to SEQ ID NO: 39221
  source 1..120: mol_type = other DNA

SEQ ID NO: 69176 - DNA, 120 bp, synthetic construct; identical to SEQ ID NO: 11264
  source 1..120: mol_type = other DNA

SEQ ID NO: 69177 - DNA, 120 bp, synthetic construct; identical to SEQ ID NO: 39223
  source 1..120: mol_type = other DNA

SEQ ID NO: 69178 - DNA, 120 bp, synthetic construct; identical to SEQ ID NO: 39224
  source 1..120: mol_type = other DNA

SEQ ID NO: 69179 - DNA, 120 bp, synthetic construct; identical to SEQ ID NO: 39225
  source 1..120: mol_type = other DNA

SEQ ID NO: 69180 - DNA, 120 bp, synthetic construct; identical to SEQ ID NO: 39226
  source 1..120: mol_type = other DNA

SEQ ID NO: 69181 - DNA, 120 bp, synthetic construct; identical to SEQ ID NO: 11265
  source 1..120: mol_type = other DNA

SEQ ID NO: 69182 - DNA, 120 bp, synthetic construct; identical to SEQ ID NO: 39228
  source 1..120: mol_type = other DNA

SEQ ID NO: 69183 - DNA, 120 bp, synthetic construct; identical to SEQ ID NO: 39229
  source 1..120: mol_type = other DNA

SEQ ID NO: 69184 - DNA, 120 bp, synthetic construct; identical to SEQ ID NO: 11266
  source 1..120: mol_type = other DNA

SEQ ID NO: 69185 - DNA, 120 bp, synthetic construct; identical to SEQ ID NO: 39231
  source 1..120: mol_type = other DNA

SEQ ID NO: 69186 - DNA, 120 bp, synthetic construct; identical to SEQ ID NO: 39232
  source 1..120: mol_type = other DNA

SEQ ID NO: 69187 - DNA, 120 bp, synthetic construct; identical to SEQ ID NO: 39233
  source 1..120: mol_type = other DNA

SEQ ID NO: 69188 - DNA, 120 bp, synthetic construct; identical to SEQ ID NO: 11267
  source 1..120: mol_type = other DNA

SEQ ID NO: 69189 - DNA, 120 bp, synthetic construct; identical to SEQ ID NO: 39235
  source 1..120: mol_type = other DNA

SEQ ID NO: 69190 - DNA, 120 bp, synthetic construct; identical to SEQ ID NO: 39236
  source 1..120: mol_type = other DNA

SEQ ID NO: 69191 - DNA, 120 bp, synthetic construct; identical to SEQ ID NO: 39237
  source 1..120: mol_type = other DNA

SEQ ID NO: 69192 - DNA, 120 bp, synthetic construct; identical to SEQ ID NO: 39238
  source 1..120: mol_type = other DNA

SEQ ID NO: 69193 - DNA, 120 bp, synthetic construct; identical to SEQ ID NO: 11268
  source 1..120: mol_type = other DNA

SEQ ID NO: 69194 - DNA, 120 bp, synthetic construct; identical to SEQ ID NO: 39240
  source 1..120: mol_type = other DNA

SEQ ID NO: 69195 - DNA, 120 bp, synthetic construct; identical to SEQ ID NO: 39241
  source 1..120: mol_type = other DNA

SEQ ID NO: 69196 - DNA, 120 bp, synthetic construct; identical to SEQ ID NO: 39242
  source 1..120: mol_type = other DNA

SEQ ID NO: 69197 - DNA, 120 bp, synthetic construct; identical to SEQ ID NO: 11269
  source 1..120: mol_type = other DNA

SEQ ID NO: 69198 - DNA, 120 bp, synthetic construct; identical to SEQ ID NO: 39244
  source 1..120: mol_type = other DNA

SEQ ID NO: 69199 - DNA, 120 bp, synthetic construct; identical to SEQ ID NO: 39245
  source 1..120: mol_type = other DNA

SEQ ID NO: 69200 - DNA, 120 bp, synthetic construct; identical to SEQ ID NO: 39246
  source 1..120: mol_type = other DNA

SEQ ID NO: 69201 - DNA, 120 bp, synthetic construct; identical to SEQ ID NO: 11270
  source 1..120: mol_type = other DNA

SEQ ID NO: 69202 - DNA, 120 bp, synthetic construct; identical to SEQ ID NO: 39248
  source 1..120: mol_type = other DNA

SEQ ID NO: 69203 - DNA, 120 bp, synthetic construct; identical to SEQ ID NO: 39249
  source 1..120: mol_type = other DNA

SEQ ID NO: 69204 - DNA, 120 bp, synthetic construct; identical to SEQ ID NO: 11271
  source 1..120: mol_type = other DNA

SEQ ID NO: 69205 - DNA, 120 bp, synthetic construct; identical to SEQ ID NO: 39251
  source 1..120: mol_type = other DNA

SEQ ID NO: 69206 - DNA, 120 bp, synthetic construct; identical to SEQ ID NO: 39252
  source 1..120: mol_type = other DNA

SEQ ID NO: 69207 - DNA, 120 bp, synthetic construct; identical to SEQ ID NO: 39253
  source 1..120: mol_type = other DNA

SEQ ID NO: 69208 - DNA, 120 bp, synthetic construct; identical to SEQ ID NO: 39254
  source 1..120: mol_type = other DNA

SEQ ID NO: 69209 - DNA, 120 bp, synthetic construct; identical to SEQ ID NO: 11272
  source 1..120: mol_type = other DNA

SEQ ID NO: 69210 - DNA, 120 bp, synthetic construct; identical to SEQ ID NO: 39256
  source 1..120: mol_type = other DNA

SEQ ID NO: 69211 - DNA, 120 bp, synthetic construct; identical to SEQ ID NO: 39257
  source 1..120: mol_type = other DNA

SEQ ID NO: 69212 - DNA, 120 bp, synthetic construct; identical to SEQ ID NO: 11273
  source 1..120: mol_type = other DNA

SEQ ID NO: 69213 - DNA, 120 bp, synthetic construct; identical to SEQ ID NO: 39259
  source 1..120: mol_type = other DNA

SEQ ID NO: 69214 - DNA, 120 bp, synthetic construct; identical to SEQ ID NO: 39260
  source 1..120: mol_type = other DNA

SEQ ID NO: 69215 - DNA, 120 bp, synthetic construct; identical to SEQ ID NO: 39261
  source 1..120: mol_type = other DNA

SEQ ID NO: 69216 - DNA, 120 bp, synthetic construct; identical to SEQ ID NO: 11274
  source 1..120: mol_type = other DNA

SEQ ID NO: 69217 - DNA, 120 bp, synthetic construct; identical to SEQ ID NO: 39263
  source 1..120: mol_type = other DNA

SEQ ID NO: 69218 - DNA, 120 bp, synthetic construct; identical to SEQ ID NO: 39264
  source 1..120: mol_type = other DNA

SEQ ID NO: 69219 - DNA, 120 bp, synthetic construct; identical to SEQ ID NO: 39265
  source 1..120: mol_type = other DNA

SEQ ID NO: 69220 - DNA, 120 bp, synthetic construct; identical to SEQ ID NO: 39266
  source 1..120: mol_type = other DNA

SEQ ID NO: 69221 - DNA, 120 bp, synthetic construct; identical to SEQ ID NO: 11275
  source 1..120: mol_type = other DNA

SEQ ID NO: 69222 - DNA, 120 bp, synthetic construct; identical to SEQ ID NO: 39268
  source 1..120: mol_type = other DNA

SEQ ID NO: 69223 - DNA, 120 bp, synthetic construct; identical to SEQ ID NO: 39269
  source 1..120: mol_type = other DNA

SEQ ID NO: 69224 - DNA, 120 bp, synthetic construct; identical to SEQ ID NO: 11276
  source 1..120: mol_type = other DNA

SEQ ID NO: 69225 - DNA, 120 bp, synthetic construct; identical to SEQ ID NO: 39271
  source 1..120: mol_type = other DNA

SEQ ID NO: 69226 - DNA, 120 bp, synthetic construct; identical to SEQ ID NO: 39272
  source 1..120: mol_type = other DNA

SEQ ID NO: 69227 - DNA, 120 bp, synthetic construct; identical to SEQ ID NO: 39273
  source 1..120: mol_type = other DNA

SEQ ID NO: 69228 - DNA, 120 bp, synthetic construct; identical to SEQ ID NO: 11277
  source 1..120: mol_type = other DNA

SEQ ID NO: 69229 - DNA, 120 bp, synthetic construct; identical to SEQ ID NO: 39275
  source 1..120: mol_type = other DNA

SEQ ID NO: 69230 - DNA, 120 bp, synthetic construct; identical to SEQ ID NO: 39276
  source 1..120: mol_type = other DNA

SEQ ID NO: 69231 - DNA, 120 bp, synthetic construct; identical to SEQ ID NO: 39277
  source 1..120: mol_type = other DNA

SEQ ID NO: 69232 - DNA, 120 bp, synthetic construct; identical to SEQ ID NO: 11278
  source 1..120: mol_type = other DNA

SEQ ID NO: 69233 - DNA, 120 bp, synthetic construct; identical to SEQ ID NO: 39279
  source 1..120: mol_type = other DNA

SEQ ID NO: 69234 - DNA, 120 bp, synthetic construct; identical to SEQ ID NO: 39280
  source 1..120: mol_type = other DNA

SEQ ID NO: 69235 - DNA, 120 bp, synthetic construct; identical to SEQ ID NO: 39281
  source 1..120: mol_type = other DNA

SEQ ID NO: 69236 - DNA, 120 bp, synthetic construct; identical to SEQ ID NO: 11279
  source 1..120: mol_type = other DNA

SEQ ID NO: 69237 - DNA, 120 bp, synthetic construct; identical to SEQ ID NO: 39283
  source 1..120: mol_type = other DNA

SEQ ID NO: 69238 - DNA, 120 bp, synthetic construct; identical to SEQ ID NO: 39284
  source 1..120: mol_type = other DNA

SEQ ID NO: 69239 - DNA, 120 bp, synthetic construct; identical to SEQ ID NO: 39285
  source 1..120: mol_type = other DNA

SEQ ID NO: 69240 - DNA, 120 bp, synthetic construct; identical to SEQ ID NO: 39286
  source 1..120: mol_type = other DNA

SEQ ID NO: 69241 - DNA, 120 bp, synthetic construct; identical to SEQ ID NO: 11280
  source 1..120: mol_type = other DNA

SEQ ID NO: 69242 - DNA, 120 bp, synthetic construct; identical to SEQ ID NO: 39288
  source 1..120: mol_type = other DNA

SEQ ID NO: 69243 - DNA, 120 bp, synthetic construct; identical to SEQ ID NO: 39289
  source 1..120: mol_type = other DNA

SEQ ID NO: 69244 - DNA, 120 bp, synthetic construct; identical to SEQ ID NO: 11281
  source 1..120: mol_type = other DNA

SEQ ID NO: 69245 - DNA, 120 bp, synthetic construct; identical to SEQ ID NO: 39291
  source 1..120: mol_type = other DNA

SEQ ID NO: 69246 - DNA, 120 bp, synthetic construct; identical to SEQ ID NO: 39292
  source 1..120: mol_type = other DNA

SEQ ID NO: 69247 - DNA, 120 bp, synthetic construct; identical to SEQ ID NO: 11282
  source 1..120: mol_type = other DNA

SEQ ID NO: 69248 - DNA, 120 bp, synthetic construct; identical to SEQ ID NO: 39294
  source 1..120: mol_type = other DNA

SEQ ID NO: 69249 - DNA, 120 bp, synthetic construct; identical to SEQ ID NO: 39295
  source 1..120: mol_type = other DNA

SEQ ID NO: 69250 - DNA, 120 bp, synthetic construct; identical to SEQ ID NO: 39296
  source 1..120: mol_type = other DNA

SEQ ID NO: 69251 - DNA, 120 bp, synthetic construct; identical to SEQ ID NO: 11283
  source 1..120: mol_type = other DNA

SEQ ID NO: 69252 - DNA, 120 bp, synthetic construct; identical to SEQ ID NO: 39298
  source 1..120: mol_type = other DNA

SEQ ID NO: 69253 - DNA, 120 bp, synthetic construct; identical to SEQ ID NO: 39299
  source 1..120: mol_type = other DNA

SEQ ID NO: 69254 - DNA, 120 bp, synthetic construct; identical to SEQ ID NO: 39300
  source 1..120: mol_type = other DNA

SEQ ID NO: 69255 - DNA, 120 bp, synthetic construct; identical to SEQ ID NO: 11284
  source 1..120: mol_type = other DNA

SEQ ID NO: 69256 - DNA, 120 bp, synthetic construct; identical to SEQ ID NO: 39302
  source 1..120: mol_type = other DNA

SEQ ID NO: 69257 - DNA, 120 bp, synthetic construct; identical to SEQ ID NO: 39303
  source 1..120: mol_type = other DNA

SEQ ID NO: 69258 - DNA, 120 bp, synthetic construct; identical to SEQ ID NO: 39304
  source 1..120: mol_type = other DNA

SEQ ID NO: 69259 - DNA, 120 bp, synthetic construct; identical to SEQ ID NO: 11285
  source 1..120: mol_type = other DNA

SEQ ID NO: 69260 - DNA, 120 bp, synthetic construct; identical to SEQ ID NO: 39306
  source 1..120: mol_type = other DNA

SEQ ID NO: 69261 - DNA, 120 bp, synthetic construct; identical to SEQ ID NO: 39307
  source 1..120: mol_type = other DNA

SEQ ID NO: 69262 - DNA, 120 bp, synthetic construct; identical to SEQ ID NO: 39308
  source 1..120: mol_type = other DNA

SEQ ID NO: 69263 - DNA, 120 bp, synthetic construct; identical to SEQ ID NO: 11286
  source 1..120: mol_type = other DNA

SEQ ID NO: 69264 - DNA, 120 bp, synthetic construct; identical to SEQ ID NO: 39310
  source 1..120: mol_type = other DNA

SEQ ID NO: 69265 - DNA, 120 bp, synthetic construct; identical to SEQ ID NO: 39311
  source 1..120: mol_type = other DNA

SEQ ID NO: 69266 - DNA, 120 bp, synthetic construct; identical to SEQ ID NO: 39312
  source 1..120: mol_type = other DNA

SEQ ID NO: 69267 - DNA, 120 bp, synthetic construct; identical to SEQ ID NO: 39313
  source 1..120: mol_type = other DNA

SEQ ID NO: 69268 - DNA, 120 bp, synthetic construct; identical to SEQ ID NO: 11287
  source 1..120: mol_type = other DNA

SEQ ID NO: 69269 - DNA, 120 bp, synthetic construct; identical to SEQ ID NO: 39315
  source 1..120: mol_type = other DNA

SEQ ID NO: 69270 - DNA, 120 bp, synthetic construct; identical to SEQ ID NO: 39316
  source 1..120: mol_type = other DNA

SEQ ID NO: 69271 - DNA, 120 bp, synthetic construct; identical to SEQ ID NO: 11288
  source 1..120: mol_type = other DNA

SEQ ID NO: 69272 - DNA, 120 bp, synthetic construct; identical to SEQ ID NO: 39318
  source 1..120: mol_type = other DNA

SEQ ID NO: 69273 - DNA, 120 bp, synthetic construct; identical to SEQ ID NO: 39319
  source 1..120: mol_type = other DNA

SEQ ID NO: 69274 - DNA, 120 bp, synthetic construct; identical to SEQ ID NO: 11289
  source 1..120: mol_type = other DNA

SEQ ID NO: 69275 - DNA, 120 bp, synthetic construct; identical to SEQ ID NO: 39321
  source 1..120: mol_type = other DNA

SEQ ID NO: 69276 - DNA, 120 bp, synthetic construct; identical to SEQ ID NO: 39322
  source 1..120: mol_type = other DNA

SEQ ID NO: 69277 - DNA, 120 bp, synthetic construct; identical to SEQ ID NO: 11290
  source 1..120: mol_type = other DNA

SEQ ID NO: 69278 - DNA, 120 bp, synthetic construct; identical to SEQ ID NO: 39324
  source 1..120: mol_type = other DNA

SEQ ID NO: 69279 - DNA, 120 bp, synthetic construct; identical to SEQ ID NO: 39325
  source 1..120: mol_type = other DNA

SEQ ID NO: 69280 - DNA, 120 bp, synthetic construct; identical to SEQ ID NO: 39326
  source 1..120: mol_type = other DNA

SEQ ID NO: 69281 - DNA, 120 bp, synthetic construct; identical to SEQ ID NO: 11291
  source 1..120: mol_type = other DNA

SEQ ID NO: 69282 - DNA, 120 bp, synthetic construct; identical to SEQ ID NO: 39328
  source 1..120: mol_type = other DNA

SEQ ID NO: 69283 - DNA, 120 bp, synthetic construct; identical to SEQ ID NO: 39329
  source 1..120: mol_type = other DNA

SEQ ID NO: 69284 - DNA, 120 bp, synthetic construct; identical to SEQ ID NO: 39330
  source 1..120: mol_type = other DNA

SEQ ID NO: 69285 - DNA, 120 bp, synthetic construct; identical to SEQ ID NO: 11292
  source 1..120: mol_type = other DNA

SEQ ID NO: 69286 - DNA, 120 bp, synthetic construct; identical to SEQ ID NO: 39332
  source 1..120: mol_type = other DNA

SEQ ID NO: 69287 - DNA, 120 bp, synthetic construct; identical to SEQ ID NO: 39333
  source 1..120: mol_type = other DNA

SEQ ID NO: 69288 - DNA, 120 bp, synthetic construct; identical to SEQ ID NO: 4025
  source 1..120: mol_type = other DNA

SEQ ID NO: 69289 - DNA, 120 bp, synthetic construct; identical to SEQ ID NO: 39335
  source 1..120: mol_type = other DNA

SEQ ID NO: 69290 - DNA, 120 bp, synthetic construct; identical to SEQ ID NO: 39336
  source 1..120: mol_type = other DNA

SEQ ID NO: 69291 - DNA, 120 bp, synthetic construct; identical to SEQ ID NO: 39337
  source 1..120: mol_type = other DNA

SEQ ID NO: 69292 - DNA, 120 bp, synthetic construct; identical to SEQ ID NO: 39338
  source 1..120: mol_type = other DNA

SEQ ID NO: 69293 - DNA, 120 bp, synthetic construct; identical to SEQ ID NO: 11294
  source 1..120: mol_type = other DNA

SEQ ID NO: 69294 - DNA, 120 bp, synthetic construct; identical to SEQ ID NO: 39340
  source 1..120: mol_type = other DNA

SEQ ID NO: 69295 - DNA, 120 bp, synthetic construct; identical to SEQ ID NO: 39341
  source 1..120: mol_type = other DNA

SEQ ID NO: 69296 - DNA, 120 bp, synthetic construct; identical to SEQ ID NO: 11295
  source 1..120: mol_type = other DNA

SEQ ID NO: 69297 - DNA, 120 bp, synthetic construct; identical to SEQ ID NO: 39343
  source 1..120: mol_type = other DNA

SEQ ID NO: 69298 - DNA, 120 bp, synthetic construct; identical to SEQ ID NO: 39344
  source 1..120: mol_type = other DNA

SEQ ID NO: 69299 - DNA, 120 bp, synthetic construct; identical to SEQ ID NO: 39345
  source 1..120: mol_type = other DNA

SEQ ID NO: 69300 - DNA, 120 bp, synthetic construct; identical to SEQ ID NO: 39346
  source 1..120: mol_type = other DNA

SEQ ID NO: 69301 - DNA, 120 bp, synthetic construct; identical to SEQ ID NO: 11296
  source 1..120: mol_type = other DNA

SEQ ID NO: 69302 - DNA, 120 bp, synthetic construct; identical to SEQ ID NO: 39348
  source 1..120: mol_type = other DNA

SEQ ID NO: 69303 - DNA, 120 bp, synthetic construct; identical to SEQ ID NO: 39349
  source 1..120: mol_type = other DNA

SEQ ID NO: 69304 - DNA, 120 bp, synthetic construct; identical to SEQ ID NO: 11297
  source 1..120: mol_type = other DNA

SEQ ID NO: 69305 - DNA, 120 bp, synthetic construct; identical to SEQ ID NO: 39351
  source 1..120: mol_type = other DNA

SEQ ID NO: 69306 - DNA, 120 bp, synthetic construct; identical to SEQ ID NO: 39352
  source 1..120: mol_type = other DNA

SEQ ID NO: 69307 - DNA, 120 bp, synthetic construct; identical to SEQ ID NO: 39353
  source 1..120: mol_type = other DNA

SEQ ID NO: 69308 - DNA, 120 bp, synthetic construct; identical to SEQ ID NO: 11298
  source 1..120: mol_type = other DNA

SEQ ID NO: 69309 - DNA, 120 bp, synthetic construct; identical to SEQ ID NO: 39355
  source 1..120: mol_type = other DNA

SEQ ID NO: 69310 - DNA, 120 bp, synthetic construct; identical to SEQ ID NO: 39356
  source 1..120: mol_type = other DNA

SEQ ID NO: 69311 - DNA, 120 bp, synthetic construct; identical to SEQ ID NO: 39357
  source 1..120: mol_type = other DNA

SEQ ID NO: 69312 - DNA, 120 bp, synthetic construct; identical to SEQ ID NO: 39358
  source 1..120: mol_type = other DNA

SEQ ID NO: 69313 - DNA, 120 bp, synthetic construct; identical to SEQ ID NO: 11299
  source 1..120: mol_type = other DNA

SEQ ID NO: 69314 - DNA, 120 bp, synthetic construct; identical to SEQ ID NO: 39360
  source 1..120: mol_type = other DNA

SEQ ID NO: 69315 - DNA, 120 bp, synthetic construct; identical to SEQ ID NO: 39361
  source 1..120: mol_type = other DNA

SEQ ID NO: 69316 - DNA, 120 bp, synthetic construct; identical to SEQ ID NO: 39362
  source 1..120: mol_type = other DNA

SEQ ID NO: 69317 - DNA, 120 bp, synthetic construct; identical to SEQ ID NO: 11300
  source 1..120: mol_type = other DNA

SEQ ID NO: 69318 - DNA, 120 bp, synthetic construct; identical to SEQ ID NO: 39364
  source 1..120: mol_type = other DNA

SEQ ID NO: 69319 - DNA, 120 bp, synthetic construct; identical to SEQ ID NO: 39365
  source 1..120: mol_type = other DNA

SEQ ID NO: 69320 - DNA, 120 bp, synthetic construct; identical to SEQ ID NO: 39366
  source 1..120: mol_type = other DNA

SEQ ID NO: 69321 - DNA, 120 bp, synthetic construct; identical to SEQ ID NO: 11301
  source 1..120: mol_type = other DNA

SEQ ID NO: 69322 - DNA, 120 bp, synthetic construct; identical to SEQ ID NO: 39368
  source 1..120: mol_type = other DNA

SEQ ID NO: 69323 - DNA, 120 bp, synthetic construct; identical to SEQ ID NO: 39369
  source 1..120: mol_type = other DNA

SEQ ID NO: 69324 - DNA, 120 bp, synthetic construct; identical to SEQ ID NO: 11302
  source 1..120: mol_type = other DNA

SEQ ID NO: 69325 - DNA, 120 bp, synthetic construct; identical to SEQ ID NO: 39371
  source 1..120: mol_type = other DNA

SEQ ID NO: 69326 - DNA, 120 bp, synthetic construct; identical to SEQ ID NO: 39372
  source 1..120: mol_type = other DNA

SEQ ID NO: 69327 - DNA, 120 bp, synthetic construct; identical to SEQ ID NO: 39373
  source 1..120: mol_type = other DNA

SEQ ID NO: 69328 - DNA, 120 bp, synthetic construct; identical to SEQ ID NO: 39374
  source 1..120: mol_type = other DNA

SEQ ID NO: 69329 - DNA, 120 bp, synthetic construct; identical to SEQ ID NO: 11303
  source 1..120: mol_type = other DNA

SEQ ID NO: 69330 - DNA, 120 bp, synthetic construct; identical to SEQ ID NO: 39376
  source 1..120: mol_type = other DNA

SEQ ID NO: 69331 - DNA, 120 bp, synthetic construct; identical to SEQ ID NO: 39377
  source 1..120: mol_type = other DNA

SEQ ID NO: 69332 - DNA, 120 bp, synthetic construct; identical to SEQ ID NO: 11304
  source 1..120: mol_type = other DNA

SEQ ID NO: 69333 - DNA, 120 bp, synthetic construct; identical to SEQ ID NO: 39379
  source 1..120: mol_type = other DNA

SEQ ID NO: 69334 - DNA, 120 bp, synthetic construct; identical to SEQ ID NO: 39380
  source 1..120: mol_type = other DNA

SEQ ID NO: 69335 - DNA, 120 bp, synthetic construct; identical to SEQ ID NO: 39381
  source 1..120: mol_type = other DNA

SEQ ID NO: 69336 - DNA, 120 bp, synthetic construct; identical to SEQ ID NO: 11305
  source 1..120: mol_type = other DNA

SEQ ID NO: 69337 - DNA, 120 bp, synthetic construct; identical to SEQ ID NO: 39383
  source 1..120: mol_type = other DNA

SEQ ID NO: 69338 - DNA, 120 bp, synthetic construct; identical to SEQ ID NO: 39384
  source 1..120: mol_type = other DNA

SEQ ID NO: 69339 - DNA, 120 bp, synthetic construct; identical to SEQ ID NO: 39385
  source 1..120: mol_type = other DNA

SEQ ID NO: 69340 - DNA, 120 bp, synthetic construct; identical to SEQ ID NO: 39386
  source 1..120: mol_type = other DNA

SEQ ID NO: 69341 - DNA, 120 bp, synthetic construct; identical to SEQ ID NO: 11306
  source 1..120: mol_type = other DNA

SEQ ID NO: 69342 - DNA, 120 bp, synthetic construct; identical to SEQ ID NO: 39388
  source 1..120: mol_type = other DNA

SEQ ID NO: 69343 - DNA, 120 bp, synthetic construct; identical to SEQ ID NO: 39389
  source 1..120: mol_type = other DNA

SEQ ID NO: 69344 - DNA, 120 bp, synthetic construct; identical to SEQ ID NO: 39390
  source 1..120: mol_type = other DNA

SEQ ID NO: 69345 - DNA, 120 bp, synthetic construct; identical to SEQ ID NO: 11307
  source 1..120: mol_type = other DNA

SEQ ID NO: 69346 - DNA, 120 bp, synthetic construct; identical to SEQ ID NO: 39392
  source 1..120: mol_type = other DNA

SEQ ID NO: 69347 - DNA, 120 bp, synthetic construct; identical to SEQ ID NO: 39393
  source 1..120: mol_type = other DNA

SEQ ID NO: 69348 - DNA, 120 bp, synthetic construct; identical to SEQ ID NO: 11308
  source 1..120: mol_type = other DNA

SEQ ID NO: 69349 - DNA, 120 bp, synthetic construct; identical to SEQ ID NO: 39395
  source 1..120: mol_type = other DNA

SEQ ID NO: 69350 - DNA, 120 bp, synthetic construct; identical to SEQ ID NO: 39396
  source 1..120: mol_type = other DNA

SEQ ID NO: 69351 - DNA, 120 bp, synthetic construct; identical to SEQ ID NO: 39397
  source 1..120: mol_type = other DNA

SEQ ID NO: 69352 - DNA, 120 bp, synthetic construct; identical to SEQ ID NO: 39398
  source 1..120: mol_type = other DNA

SEQ ID NO: 69353 - DNA, 120 bp, synthetic construct; identical to SEQ ID NO: 11309
  source 1..120: mol_type = other DNA

SEQ ID NO: 69354 - DNA, 120 bp, synthetic construct; identical to SEQ ID NO: 39400
  source 1..120: mol_type = other DNA

SEQ ID NO: 69355 - DNA, 120 bp, synthetic construct; identical to SEQ ID NO: 39401
  source 1..120: mol_type = other DNA

SEQ ID NO: 69356 - DNA, 120 bp, synthetic construct; identical to SEQ ID NO: 39402
  source 1..120: mol_type = other DNA

SEQ ID NO: 69357 - DNA, 120 bp, synthetic construct; identical to SEQ ID NO: 11310
  source 1..120: mol_type = other DNA

SEQ ID NO: 69358 - DNA, 120 bp, synthetic construct; identical to SEQ ID NO: 39404
  source 1..120: mol_type = other DNA

SEQ ID NO: 69359 - DNA, 120 bp, synthetic construct; identical to SEQ ID NO: 11311
  source 1..120: mol_type = other DNA

SEQ ID NO: 69360 - DNA, 120 bp, synthetic construct; identical to SEQ ID NO: 39406
  source 1..120: mol_type = other DNA

SEQ ID NO: 69361 - DNA, 120 bp, synthetic construct; identical to SEQ ID NO: 39407
  source 1..120: mol_type = other DNA

SEQ ID NO: 69362 - DNA, 120 bp, synthetic construct; identical to SEQ ID NO: 39408
  source 1..120: mol_type = other DNA

SEQ ID NO: 69363 - DNA, 120 bp, synthetic construct; identical to SEQ ID NO: 11312
  source 1..120: mol_type = other DNA

SEQ ID NO: 69364 - DNA, 120 bp, synthetic construct; identical to SEQ ID NO: 39410
  source 1..120: mol_type = other DNA

SEQ ID NO: 69365 - DNA, 120 bp, synthetic construct; identical to SEQ ID NO: 39411
  source 1..120: mol_type = other DNA

SEQ ID NO: 69366 - DNA, 120 bp, synthetic construct; identical to SEQ ID NO: 39412
  source 1..120: mol_type = other DNA

SEQ ID NO: 69367 - DNA, 120 bp, synthetic construct; identical to SEQ ID NO: 39413
  source 1..120: mol_type = other DNA

SEQ ID NO: 69368 - DNA, 120 bp, synthetic construct; identical to SEQ ID NO: 11313
  source 1..120: mol_type = other DNA

SEQ ID NO: 69369 - DNA, 120 bp, synthetic construct; identical to SEQ ID NO: 39415
  source 1..120: mol_type = other DNA

SEQ ID NO: 69370 - DNA, 120 bp, synthetic construct; identical to SEQ ID NO: 39416
  source 1..120: mol_type = other DNA

SEQ ID NO: 69371 - DNA, 120 bp, synthetic construct; identical to SEQ ID NO: 11314
  source 1..120: mol_type = other DNA

SEQ ID NO: 69372 - DNA, 120 bp, synthetic construct; identical to SEQ ID NO: 39418
  source 1..120: mol_type = other DNA

SEQ ID NO: 69373 - DNA, 120 bp, synthetic construct; identical to SEQ ID NO: 39419
  source 1..120: mol_type = other DNA

SEQ ID NO: 69374 - DNA, 120 bp, synthetic construct; identical to SEQ ID NO: 39420
  source 1..120: mol_type = other DNA

SEQ ID NO: 69375 - DNA, 120 bp, synthetic construct; identical to SEQ ID NO: 39421
  source 1..120: mol_type = other DNA

SEQ ID NO: 69376 - DNA, 120 bp, synthetic construct; identical to SEQ ID NO: 11315
  source 1..120: mol_type = other DNA

SEQ ID NO: 69377 - DNA, 120 bp, synthetic construct; identical to SEQ ID NO: 11316
  source 1..120: mol_type = other DNA

SEQ ID NO: 69378 - DNA, 120 bp, synthetic construct; identical to SEQ ID NO: 39424
  source 1..120: mol_type = other DNA

SEQ ID NO: 69379 - DNA, 120 bp, synthetic construct; identical to SEQ ID NO: 39425
  source 1..120: mol_type = other DNA

SEQ ID NO: 69380 - DNA, 120 bp, synthetic construct; identical to SEQ ID NO: 39426
  source 1..120: mol_type = other DNA

SEQ ID NO: 69381 - DNA, 120 bp, synthetic construct; identical to SEQ ID NO: 11317
  source 1..120: mol_type = other DNA

SEQ ID NO: 69382 - DNA, 120 bp, synthetic construct; identical to SEQ ID NO: 39428
  source 1..120: mol_type = other DNA

SEQ ID NO: 69383 - DNA, 120 bp, synthetic construct; identical to SEQ ID NO: 39429
  source 1..120: mol_type = other DNA

SEQ ID NO: 69384 - DNA, 120 bp, synthetic construct; identical to SEQ ID NO: 11318
  source 1..120: mol_type = other DNA

SEQ ID NO: 69385 - DNA, 120 bp, synthetic construct; identical to SEQ ID NO: 39431
  source 1..120: mol_type = other DNA

SEQ ID NO: 69386 - DNA, 120 bp, synthetic construct; identical to SEQ ID NO: 39432
  source 1..120: mol_type = other DNA

SEQ ID NO: 69387 - DNA, 120 bp, synthetic construct; identical to SEQ ID NO: 39433
  source 1..120: mol_type = other DNA

SEQ ID NO: 69388 - DNA, 120 bp, synthetic construct; identical to SEQ ID NO: 11319
  source 1..120: mol_type = other DNA

SEQ ID NO: 69389 - DNA, 120 bp, synthetic construct; identical to SEQ ID NO: 39435
  source 1..120: mol_type = other DNA

SEQ ID NO: 69390 - DNA, 120 bp, synthetic construct; identical to SEQ ID NO: 39436
  source 1..120: mol_type = other DNA

SEQ ID NO: 69391 - DNA, 120 bp, synthetic construct; identical to SEQ ID NO: 39437
  source 1..120: mol_type = other DNA

SEQ ID NO: 69392 - DNA, 120 bp, synthetic construct; identical to SEQ ID NO: 11320
  source 1..120: mol_type = other DNA

SEQ ID NO: 69393 - DNA, 120 bp, synthetic construct; identical to SEQ ID NO: 39439
  source 1..120: mol_type = other DNA

SEQ ID NO: 69394 - DNA, 120 bp, synthetic construct; identical to SEQ ID NO: 39440
  source 1..120: mol_type = other DNA

SEQ ID NO: 69395 - DNA, 120 bp, synthetic construct; identical to SEQ ID NO: 39441
  source 1..120: mol_type = other DNA

SEQ ID NO: 69396 - DNA, 120 bp, synthetic construct; identical to SEQ ID NO: 39442
  source 1..120: mol_type = other DNA

SEQ ID NO: 69397 - DNA, 120 bp, synthetic construct; identical to SEQ ID NO: 11321
  source 1..120: mol_type = other DNA

SEQ ID NO: 69398 - DNA, 120 bp, synthetic construct; identical to SEQ ID NO: 39444
  source 1..120: mol_type = other DNA

SEQ ID NO: 69399 - DNA, 120 bp, synthetic construct; identical to SEQ ID NO: 39445
  source 1..120: mol_type = other DNA

SEQ ID NO: 69400 - DNA, 120 bp, synthetic construct; identical to SEQ ID NO: 39446
  source 1..120: mol_type = other DNA

SEQ ID NO: 69401 - DNA, 120 bp, synthetic construct; identical to SEQ ID NO: 11322
  source 1..120: mol_type = other DNA

SEQ ID NO: 69402 - DNA, 120 bp, synthetic construct; identical to SEQ ID NO: 39448
  source 1..120: mol_type = other DNA

SEQ ID NO: 69403 - DNA, 120 bp, synthetic construct; identical to SEQ ID NO: 39449
  source 1..120: mol_type = other DNA

SEQ ID NO: 69404 - DNA, 120 bp, synthetic construct; identical to SEQ ID NO: 11323
  source 1..120: mol_type = other DNA

SEQ ID NO: 69405 - DNA, 120 bp, synthetic construct; identical to SEQ ID NO: 39451
  source 1..120: mol_type = other DNA

SEQ ID NO: 69406 - DNA, 120 bp, synthetic construct; identical to SEQ ID NO: 39452
  source 1..120: mol_type = other DNA

SEQ ID NO: 69407 - DNA, 120 bp, synthetic construct; identical to SEQ ID NO: 39453
  source 1..120: mol_type = other DNA

SEQ ID NO: 69408 - DNA, 120 bp, synthetic construct; identical to SEQ ID NO: 39454
  source 1..120: mol_type = other DNA

SEQ ID NO: 69409 - DNA, 120 bp, synthetic construct; identical to SEQ ID NO: 11324
  source 1..120: mol_type = other DNA

SEQ ID NO: 69410 - DNA, 120 bp, synthetic construct; identical to SEQ ID NO: 39456
  source 1..120: mol_type = other DNA

SEQ ID NO: 69411 - DNA, 120 bp, synthetic construct; identical to SEQ ID NO: 39457
  source 1..120: mol_type = other DNA

SEQ ID NO: 69412 - DNA, 120 bp, synthetic construct; identical to SEQ ID NO: 39458
  source 1..120: mol_type = other DNA

SEQ ID NO: 69413 - DNA, 120 bp, synthetic construct; identical to SEQ ID NO: 11325
  source 1..120: mol_type = other DNA

SEQ ID NO: 69414 - DNA, 120 bp, synthetic construct; identical to SEQ ID NO: 39460
  source 1..120: mol_type = other DNA

SEQ ID NO: 69415 - DNA, 120 bp, synthetic construct; identical to SEQ ID NO: 39461
  source 1..120: mol_type = other DNA

SEQ ID NO: 69416 - DNA, 120 bp, synthetic construct; identical to SEQ ID NO: 39462
  source 1..120: mol_type = other DNA

SEQ ID NO: 69417 - DNA, 120 bp, synthetic construct; identical to SEQ ID NO: 11326
  source 1..120: mol_type = other DNA

SEQ ID NO: 69418 - DNA, 120 bp, synthetic construct; identical to SEQ ID NO: 39464
  source 1..120: mol_type = other DNA

SEQ ID NO: 69419 - DNA, 120 bp, synthetic construct; identical to SEQ ID NO: 39465
  source 1..120: mol_type = other DNA

SEQ ID NO: 69420 - DNA, 120 bp, synthetic construct; identical to SEQ ID NO: 39466
  source 1..120: mol_type = other DNA

SEQ ID NO: 69421 - DNA, 120 bp, synthetic construct; identical to SEQ ID NO: 11327
  source 1..120: mol_type = other DNA

SEQ ID NO: 69422 - DNA, 120 bp, synthetic construct; identical to SEQ ID NO: 39468
  source 1..120: mol_type = other DNA

SEQ ID NO: 69423 - DNA, 120 bp, synthetic construct; identical to SEQ ID NO: 39469
  source 1..120: mol_type = other DNA

SEQ ID NO: 69424 - DNA, 120 bp, synthetic construct; identical to SEQ ID NO: 39470
  source 1..120: mol_type = other DNA

SEQ ID NO: 69425 - DNA, 120 bp, synthetic construct; identical to SEQ ID NO: 11328
  source 1..120: mol_type = other DNA

SEQ ID NO: 69426 - DNA, 120 bp, synthetic construct; identical to SEQ ID NO: 39472
  source 1..120: mol_type = other DNA

SEQ ID NO: 69427 - DNA, 120 bp, synthetic construct; identical to SEQ ID NO: 39473
  source 1..120: mol_type = other DNA

SEQ ID NO: 69428 - DNA, 120 bp, synthetic construct; identical to SEQ ID NO: 39474
  source 1..120: mol_type = other DNA

SEQ ID NO: 69429 - DNA, 120 bp, synthetic construct; identical to SEQ ID NO: 39475
  source 1..120: mol_type = other DNA

SEQ ID NO: 69430 - DNA, 120 bp, synthetic construct; identical to SEQ ID NO: 11329
  source 1..120: mol_type = other DNA

SEQ ID NO: 69431 - DNA, 120 bp, synthetic construct; identical to SEQ ID NO: 39477
  source 1..120: mol_type = other DNA

SEQ ID NO: 69432 - DNA, 120 bp, synthetic construct; identical to SEQ ID NO: 39478
  source 1..120: mol_type = other DNA

SEQ ID NO: 69433 - DNA, 120 bp, synthetic construct; identical to SEQ ID NO: 39479
  source 1..120: mol_type = other DNA

SEQ ID NO: 69434 - DNA, 120 bp, synthetic construct; identical to SEQ ID NO: 11330
  source 1..120: mol_type = other DNA

SEQ ID NO: 69435 - DNA, 120 bp, synthetic construct; identical to SEQ ID NO: 39481
  source 1..120: mol_type = other DNA

SEQ ID NO: 69436 - DNA, 120 bp, synthetic construct; identical to SEQ ID NO: 39482
  source 1..120: mol_type = other DNA

SEQ ID NO: 69437 - DNA, 120 bp, synthetic construct; identical to SEQ ID NO: 11331
  source 1..120: mol_type = other DNA

SEQ ID NO: 69438 - DNA, 120 bp, synthetic construct; identical to SEQ ID NO: 39484
  source 1..120: mol_type = other DNA

SEQ ID NO: 69439 - DNA, 120 bp, synthetic construct; identical to SEQ ID NO: 39485
  source 1..120: mol_type = other DNA

SEQ ID NO: 69440 - DNA, 120 bp, synthetic construct; identical to SEQ ID NO: 39486
  source 1..120: mol_type = other DNA

SEQ ID NO: 69441 - DNA, 120 bp, synthetic construct; identical to SEQ ID NO: 39487
  source 1..120: mol_type = other DNA

SEQ ID NO: 69442 - DNA, 120 bp, synthetic construct; identical to SEQ ID NO: 11332
  source 1..120: mol_type = other DNA

SEQ ID NO: 69443 - DNA, 120 bp, synthetic construct; identical to SEQ ID NO: 39489
  source 1..120: mol_type = other DNA

SEQ ID NO: 69444 - DNA, 120 bp, synthetic construct; identical to SEQ ID NO: 39490
  source 1..120: mol_type = other DNA

SEQ ID NO: 69445 - DNA, 120 bp, synthetic construct; identical to SEQ ID NO: 11333
  source 1..120: mol_type = other DNA

SEQ ID NO: 69446 - DNA, 120 bp, synthetic construct; identical to SEQ ID NO: 39492
  source 1..120: mol_type = other DNA

SEQ ID NO: 69447 - DNA, 120 bp, synthetic construct; identical to SEQ ID NO: 39493
  source 1..120: mol_type = other DNA

SEQ ID NO: 69448 - DNA, 120 bp, synthetic construct; identical to SEQ ID NO: 39494
  source 1..120: mol_type = other DNA

SEQ ID NO: 69449 - DNA, 120 bp, synthetic construct; identical to SEQ ID NO: 11334
  source 1..120: mol_type = other DNA

SEQ ID NO: 69450 - DNA, 120 bp, synthetic construct; identical to SEQ ID NO: 39496
  source 1..120: mol_type = other DNA

SEQ ID NO: 69451 - DNA, 120 bp, synthetic construct; identical to SEQ ID NO: 39497
  source 1..120: mol_type = other DNA

SEQ ID NO: 69452 - DNA, 120 bp, synthetic construct; identical to SEQ ID NO: 39498
  source 1..120: mol_type = other DNA

SEQ ID NO: 69453 - DNA, 120 bp, synthetic construct; identical to SEQ ID NO: 39499
  source 1..120: mol_type = other DNA

SEQ ID NO: 69454 - DNA, 120 bp, synthetic construct; identical to SEQ ID NO: 11335
  source 1..120: mol_type = other DNA

SEQ ID NO: 69455 - DNA, 120 bp, synthetic construct; identical to SEQ ID NO: 39501
  source 1..120: mol_type = other DNA

SEQ ID NO: 69456 - DNA, 120 bp, synthetic construct; identical to SEQ ID NO: 39502
  source 1..120: mol_type = other DNA

SEQ ID NO: 69457 - DNA, 120 bp, synthetic construct; identical to SEQ ID NO: 39503
  source 1..120: mol_type = other DNA

SEQ ID NO: 69458 - DNA, 120 bp, synthetic construct; identical to SEQ ID NO: 11336
  source 1..120: mol_type = other DNA

SEQ ID NO: 69459 - DNA, 120 bp, synthetic construct; identical to SEQ ID NO: 39505
  source 1..120: mol_type = other DNA

SEQ ID NO: 69460 - DNA, 120 bp, synthetic construct; identical to SEQ ID NO: 39506
  source 1..120: mol_type = other DNA

SEQ ID NO: 69461 - DNA, 120 bp, synthetic construct; identical to SEQ ID NO: 39507
  source 1..120: mol_type = other DNA

SEQ ID NO: 69462 - DNA, 120 bp, synthetic construct; identical to SEQ ID NO: 11337
  source 1..120: mol_type = other DNA

SEQ ID NO: 69463 - DNA, 120 bp, synthetic construct; identical to SEQ ID NO: 39509
  source 1..120: mol_type = other DNA

SEQ ID NO: 69464 - DNA, 120 bp, synthetic construct; identical to SEQ ID NO: 39510
  source 1..120: mol_type = other DNA

SEQ ID NO: 69465 - DNA, 120 bp, synthetic construct; identical to SEQ ID NO: 39511
  source 1..120: mol_type = other DNA

SEQ ID NO: 69466 - DNA, 120 bp, synthetic construct; identical to SEQ ID NO: 11338
  source 1..120: mol_type = other DNA

SEQ ID NO: 69467 - DNA, 120 bp, synthetic construct; identical to SEQ ID NO: 39513
  source 1..120: mol_type = other DNA

SEQ ID NO: 69468 - DNA, 120 bp, synthetic construct; identical to SEQ ID NO: 39514
  source 1..120: mol_type = other DNA

SEQ ID NO: 69469 - DNA, 120 bp, synthetic construct; identical to SEQ ID NO: 11339
  source 1..120: mol_type = other DNA

SEQ ID NO: 69470 - DNA, 120 bp, synthetic construct; identical to SEQ ID NO: 39516
  source 1..120: mol_type = other DNA

SEQ ID NO: 69471 - DNA, 120 bp, synthetic construct; identical to SEQ ID NO: 39517
  source 1..120: mol_type = other DNA

SEQ ID NO: 69472 - DNA, 120 bp, synthetic construct; identical to SEQ ID NO: 39518
  source 1..120: mol_type = other DNA

SEQ ID NO: 69473 - DNA, 120 bp, synthetic construct; identical to SEQ ID NO: 11340
  source 1..120: mol_type = other DNA

SEQ ID NO: 69474 - DNA, 120 bp, synthetic construct; identical to SEQ ID NO: 39520
  source 1..120: mol_type = other DNA

SEQ ID NO: 69475 - DNA, 120 bp, synthetic construct; identical to SEQ ID NO: 39521
  source 1..120: mol_type = other DNA

SEQ ID NO: 69476 - DNA, 120 bp, synthetic construct; identical to SEQ ID NO: 39522
  source 1..120: mol_type = other DNA

SEQ ID NO: 69477 - DNA, 120 bp, synthetic construct; identical to SEQ ID NO: 39523
  source 1..120: mol_type = other DNA

SEQ ID NO: 69478 - DNA, 120 bp, synthetic construct; identical to SEQ ID NO: 11341
  source 1..120: mol_type = other DNA

SEQ ID NO: 69479 - DNA, 120 bp, synthetic construct; identical to SEQ ID NO: 39525
  source 1..120: mol_type = other DNA

SEQ ID NO: 69480 - DNA, 120 bp, synthetic construct; identical to SEQ ID NO: 39526
  source 1..120: mol_type = other DNA

SEQ ID NO: 69481 - DNA, 120 bp, synthetic construct; identical to SEQ ID NO: 11342
  source 1..120: mol_type = other DNA

SEQ ID NO: 69482 - DNA, 120 bp, synthetic construct; identical to SEQ ID NO: 39528
  source 1..120: mol_type = other DNA

SEQ ID NO: 69483 - DNA, 120 bp, synthetic construct; identical to SEQ ID NO: 39529
  source 1..120: mol_type = other DNA

SEQ ID NO: 69484 - DNA, 120 bp, synthetic construct; identical to SEQ ID NO: 39530
  source 1..120: mol_type = other DNA

SEQ ID NO: 69485 - DNA, 120 bp, synthetic construct; identical to SEQ ID NO: 39531
  source 1..120: mol_type = other DNA

SEQ ID NO: 69486 - DNA, 120 bp, synthetic construct; identical to SEQ ID NO: 11343
  source 1..120: mol_type = other DNA

SEQ ID NO: 69487 - DNA, 120 bp, synthetic construct; identical to SEQ ID NO: 39533
  source 1..120: mol_type = other DNA

SEQ ID NO: 69488 - DNA, 120 bp, synthetic construct; identical to SEQ ID NO: 39534
  source 1..120: mol_type = other DNA

SEQ ID NO: 69489 - DNA, 120 bp, synthetic construct; identical to SEQ ID NO: 11344
  source 1..120: mol_type = other DNA

SEQ ID NO: 69490 - DNA, 120 bp, synthetic construct; identical to SEQ ID NO: 39536
  source 1..120: mol_type = other DNA

SEQ ID NO: 69491 - DNA, 120 bp, synthetic construct; identical to SEQ ID NO: 39537
  source 1..120: mol_type = other DNA

SEQ ID NO: 69492 - DNA, 120 bp, synthetic construct; identical to SEQ ID NO: 39538
  source 1..120: mol_type = other DNA

SEQ ID NO: 69493 - DNA, 120 bp, synthetic construct; identical to SEQ ID NO: 11345
  source 1..120: mol_type = other DNA

SEQ ID NO: 69494 - DNA, 120 bp, synthetic construct; identical to SEQ ID NO: 39540
  source 1..120: mol_type = other DNA

SEQ ID NO: 69495 - DNA, 120 bp, synthetic construct; identical to SEQ ID NO: 39541
  source 1..120: mol_type = other DNA

SEQ ID NO: 69496 - DNA, 120 bp, synthetic construct; identical to SEQ ID NO: 39542
  source 1..120: mol_type = other DNA

SEQ ID NO: 69497 - DNA, 120 bp, synthetic construct; identical to SEQ ID NO: 11346
  source 1..120: mol_type = other DNA

SEQ ID NO: 69498 - DNA, 120 bp, synthetic construct; identical to SEQ ID NO: 39544
  source 1..120: mol_type = other DNA

SEQ ID NO: 69499 - DNA, 120 bp, synthetic construct; identical to SEQ ID NO: 39545
  source 1..120: mol_type = other DNA

SEQ ID NO: 69500 - DNA, 120 bp, synthetic construct; identical to SEQ ID NO: 39546
  source 1..120: mol_type = other DNA

SEQ ID NO: 69501 - DNA, 120 bp, synthetic construct; identical to SEQ ID NO: 39547
  source 1..120: mol_type = other DNA

SEQ ID NO: 69502 - DNA, 120 bp, synthetic construct; identical to SEQ ID NO: 11347
  source 1..120: mol_type = other DNA

SEQ ID NO: 69503 - DNA, 120 bp, synthetic construct; identical to SEQ ID NO: 39549
  source 1..120: mol_type = other DNA

SEQ ID NO: 69504 - DNA, 120 bp, synthetic construct; identical to SEQ ID NO: 39550
  source 1..120: mol_type = other DNA

SEQ ID NO: 69505 - DNA, 120 bp, synthetic construct; identical to SEQ ID NO: 39551
  source 1..120: mol_type = other DNA

SEQ ID NO: 69506 - DNA, 120 bp, synthetic construct; identical to SEQ ID NO: 11348
  source 1..120: mol_type = other DNA

SEQ ID NO: 69507 - DNA, 120 bp, synthetic construct; identical to SEQ ID NO: 39553
  source 1..120: mol_type = other DNA

SEQ ID NO: 69508 - DNA, 120 bp, synthetic construct; identical to SEQ ID NO: 39554
  source 1..120: mol_type = other DNA

SEQ ID NO: 69509 - DNA, 120 bp, synthetic construct; identical to SEQ ID NO: 39555
  source 1..120: mol_type = other DNA

SEQ ID NO: 69510 - DNA, 120 bp, synthetic construct; identical to SEQ ID NO: 11349
  source 1..120: mol_type = other DNA

SEQ ID NO: 69511 - DNA, 120 bp, synthetic construct; identical to SEQ ID NO: 39557
  source 1..120: mol_type = other DNA

SEQ ID NO: 69512 - DNA, 120 bp, synthetic construct; identical to SEQ ID NO: 39558
  source 1..120: mol_type = other DNA

SEQ ID NO: 69513 - DNA, 120 bp, synthetic construct; identical to SEQ ID NO: 39559
  source 1..120: mol_type = other DNA

SEQ ID NO: 69514 - DNA, 120 bp, synthetic construct; identical to SEQ ID NO: 4078
  source 1..120: mol_type = other DNA

SEQ ID NO: 69515 - DNA, 120 bp, synthetic construct; identical to SEQ ID NO: 39561
  source 1..120: mol_type = other DNA

SEQ ID NO: 69516 - DNA, 120 bp, synthetic construct; identical to SEQ ID NO: 39562
  source 1..120: mol_type = other DNA

SEQ ID NO: 69517 - DNA, 120 bp, synthetic construct; identical to SEQ ID NO: 39563
  source 1..120: mol_type = other DNA

SEQ ID NO: 69518 - DNA, 120 bp, synthetic construct; identical to SEQ ID NO: 11351
  source 1..120: mol_type = other DNA

SEQ ID NO: 69519 - DNA, 120 bp, synthetic construct; identical to SEQ ID NO: 39565
  source 1..120: mol_type = other DNA

SEQ ID NO: 69520 - DNA, 120 bp, synthetic construct; identical to SEQ ID NO: 39566
  source 1..120: mol_type = other DNA

SEQ ID NO: 69521 - DNA, 120 bp, synthetic construct; identical to SEQ ID NO: 11352
  source 1..120: mol_type = other DNA

SEQ ID NO: 69522 - DNA, 120 bp, synthetic construct; identical to SEQ ID NO: 39568
  source 1..120: mol_type = other DNA

SEQ ID NO: 69523 - DNA, 120 bp, synthetic construct; identical to SEQ ID NO: 39569
  source 1..120: mol_type = other DNA

SEQ ID NO: 69524 - DNA, 120 bp, synthetic construct; identical to SEQ ID NO: 39570
  source 1..120: mol_type = other DNA

SEQ ID NO: 69525 - DNA, 120 bp, synthetic construct; identical to SEQ ID NO: 39571
  source 1..120: mol_type = other DNA

SEQ ID NO: 69526 - DNA, 120 bp, synthetic construct; identical to SEQ ID NO: 11353
  source 1..120: mol_type = other DNA

SEQ ID NO: 69527 - DNA, 120 bp, synthetic construct; identical to SEQ ID NO: 39573
  source 1..120: mol_type = other DNA

SEQ ID NO: 69528 - DNA, 120 bp, synthetic construct; identical to SEQ ID NO: 39574
  source 1..120: mol_type = other DNA

SEQ ID NO: 69529 - DNA, 120 bp, synthetic construct; identical to SEQ ID NO: 39575
  source 1..120: mol_type = other DNA

SEQ ID NO: 69530 - DNA, 120 bp, synthetic construct; identical to SEQ ID NO: 11354
  source 1..120: mol_type = other DNA

SEQ ID NO: 69531 - DNA, 120 bp, synthetic construct; identical to SEQ ID NO: 39577
  source 1..120: mol_type = other DNA

SEQ ID NO: 69532 - DNA, 120 bp, synthetic construct; identical to SEQ ID NO: 39578
  source 1..120: mol_type = other DNA

SEQ ID NO: 69533 - DNA, 120 bp, synthetic construct; identical to SEQ ID NO: 39579
  source 1..120: mol_type = other DNA

SEQ ID NO: 69534 - DNA, 120 bp, synthetic construct; identical to SEQ ID NO: 11355
  source 1..120: mol_type = other DNA

SEQ ID NO: 69535 - DNA, 120 bp, synthetic construct; identical to SEQ ID NO: 39581
  source 1..120: mol_type = other DNA

SEQ ID NO: 69536 - DNA, 120 bp, synthetic construct; identical to SEQ ID NO: 39582
  source 1..120: mol_type = other DNA

SEQ ID NO: 69537 - DNA, 120 bp, synthetic construct; identical to SEQ ID NO: 11356
  source 1..120: mol_type = other DNA

SEQ ID NO: 69538 - DNA, 120 bp, synthetic construct; identical to SEQ ID NO: 39584
  source 1..120: mol_type = other DNA

SEQ ID NO: 69539 - DNA, 120 bp, synthetic construct; identical to SEQ ID NO: 39585
  source 1..120: mol_type = other DNA

SEQ ID NO: 69540 - DNA, 120 bp, synthetic construct; identical to SEQ ID NO: 39586
  source 1..120: mol_type = other DNA

SEQ ID NO: 69541 - DNA, 120 bp, synthetic construct; identical to SEQ ID NO: 11357
  source 1..120: mol_type = other DNA

SEQ ID NO: 69542 - DNA, 120 bp, synthetic construct; identical to SEQ ID NO: 39588
  source 1..120: mol_type = other DNA

SEQ ID NO: 69543 - DNA, 120 bp, synthetic construct; identical to SEQ ID NO: 39589
  source 1..120: mol_type = other DNA

SEQ ID NO: 69544 - DNA, 120 bp, synthetic construct; identical to SEQ ID NO: 39590
  source 1..120: mol_type = other DNA

SEQ ID NO: 69545 - DNA, 120 bp, synthetic construct; identical to SEQ ID NO: 11358
  source 1..120: mol_type = other DNA

SEQ ID NO: 69546 - DNA, 120 bp, synthetic construct; identical to SEQ ID NO: 39592
  source 1..120: mol_type = other DNA

SEQ ID NO: 69547 - DNA, 120 bp, synthetic construct; identical to SEQ ID NO: 39593
  source 1..120: mol_type = other DNA

SEQ ID NO: 69548 - DNA, 120 bp, synthetic construct; identical to SEQ ID NO: 39594
  source 1..120: mol_type = other DNA

SEQ ID NO: 69549 - DNA, 120 bp, synthetic construct; identical to SEQ ID NO: 39595
  source 1..120: mol_type = other DNA

SEQ ID NO: 69550 - DNA, 120 bp, synthetic construct; identical to SEQ ID NO: 11359
  source 1..120: mol_type = other DNA

SEQ ID NO: 69551 - DNA, 120 bp, synthetic construct; identical to SEQ ID NO: 39597
  source 1..120: mol_type = other DNA

SEQ ID NO: 69552 - DNA, 120 bp, synthetic construct; identical to SEQ ID NO: 39598
  source 1..120: mol_type = other DNA

SEQ ID NO: 69553 - DNA, 120 bp, synthetic construct; identical to SEQ ID NO: 11360
  source 1..120: mol_type = other DNA

SEQ ID NO: 69554 - DNA, 120 bp, synthetic construct; identical to SEQ ID NO: 39600
  source 1..120: mol_type = other DNA

SEQ ID NO: 69555 - DNA, 120 bp, synthetic construct; identical to SEQ ID NO: 39601
  source 1..120: mol_type = other DNA

SEQ ID NO: 69556 - DNA, 120 bp, synthetic construct; identical to SEQ ID NO: 39602
  source 1..120: mol_type = other DNA

SEQ ID NO: 69557 - DNA, 120 bp, synthetic construct; identical to SEQ ID NO: 11361
  source 1..120: mol_type = other DNA

SEQ ID NO: 69558 - DNA, 120 bp, synthetic construct; identical to SEQ ID NO: 39604
  source 1..120: mol_type = other DNA

SEQ ID NO: 69559 - DNA, 120 bp, synthetic construct; identical to SEQ ID NO: 39605
  source 1..120: mol_type = other DNA

SEQ ID NO: 69560 - DNA, 120 bp, synthetic construct; identical to SEQ ID NO: 39606
  source 1..120: mol_type = other DNA

SEQ ID NO: 69561 - DNA, 120 bp, synthetic construct; identical to SEQ ID NO: 39607
  source 1..120: mol_type = other DNA

SEQ ID NO: 69562 - DNA, 120 bp, synthetic construct; identical to SEQ ID NO: 11362
  source 1..120: mol_type = other DNA

SEQ ID NO: 69563 - DNA, 120 bp, synthetic construct; identical to SEQ ID NO: 39609
  source 1..120: mol_type = other DNA

SEQ ID NO: 69564 - DNA, 120 bp, synthetic construct; identical to SEQ ID NO: 39610
  source 1..120: mol_type = other DNA

SEQ ID NO: 69565 - DNA, 120 bp, synthetic construct; identical to SEQ ID NO: 11363
  source 1..120: mol_type = other DNA

SEQ ID NO: 69566 - DNA, 120 bp, synthetic construct; identical to SEQ ID NO: 39612
  source 1..120: mol_type = other DNA

SEQ ID NO: 69567 - DNA, 120 bp, synthetic construct; identical to SEQ ID NO: 39613
  source 1..120: mol_type = other DNA

SEQ ID NO: 69568 - DNA, 120 bp, synthetic construct; identical to SEQ ID NO: 39614
  source 1..120: mol_type = other DNA

SEQ ID NO: 69569 - DNA, 120 bp, synthetic construct; identical to SEQ ID NO: 11364
  source 1..120: mol_type = other DNA

SEQ ID NO: 69570 - DNA, 120 bp, synthetic construct; identical to SEQ ID NO: 39616
  source 1..120: mol_type = other DNA

SEQ ID NO: 69571 - DNA, 120 bp, synthetic construct; identical to SEQ ID NO: 39617
  source 1..120: mol_type = other DNA

SEQ ID NO: 69572 - DNA, 120 bp, synthetic construct; identical to SEQ ID NO: 39618
  source 1..120: mol_type = other DNA

SEQ ID NO: 69573 - DNA, 120 bp, synthetic construct; identical to SEQ ID NO: 39619
  source 1..120: mol_type = other DNA

SEQ ID NO: 69574 - DNA, 120 bp, synthetic construct; identical to SEQ ID NO: 11365
  source 1..120: mol_type = other DNA

SEQ ID NO: 69575 - DNA, 120 bp, synthetic construct; identical to SEQ ID NO: 39621
  source 1..120: mol_type = other DNA

SEQ ID NO: 69576 - DNA, 120 bp, synthetic construct; identical to SEQ ID NO: 39622
  source 1..120: mol_type = other DNA

SEQ ID NO: 69577 - DNA, 120 bp, synthetic construct; identical to SEQ ID NO: 39623
  source 1..120: mol_type = other DNA

SEQ ID NO: 69578 - DNA, 120 bp, synthetic construct; identical to SEQ ID NO: 11366
  source 1..120: mol_type = other DNA

SEQ ID NO: 69579 - DNA, 120 bp, synthetic construct; identical to SEQ ID NO: 39625
  source 1..120: mol_type = other DNA

SEQ ID NO: 69580 - DNA, 120 bp, synthetic construct; identical to SEQ ID NO: 39626
  source 1..120: mol_type = other DNA

SEQ ID NO: 69581 - DNA, 120 bp, synthetic construct; identical to SEQ ID NO: 11367
  source 1..120: mol_type = other DNA

SEQ ID NO: 69582 - DNA, 120 bp, synthetic construct; identical to SEQ ID NO: 39628
  source 1..120: mol_type = other DNA

SEQ ID NO: 69583 - DNA, 120 bp, synthetic construct; identical to SEQ ID NO: 4094
  source 1..120: mol_type = other DNA

SEQ ID NO: 69584 - DNA, 120 bp, synthetic construct; identical to SEQ ID NO: 39630
  source 1..120: mol_type = other DNA

SEQ ID NO: 69585 - DNA, 120 bp, synthetic construct; identical to SEQ ID NO: 39631
  source 1..120: mol_type = other DNA

SEQ ID NO: 69586 - DNA, 120 bp, synthetic construct; identical to SEQ ID NO: 11368
  source 1..120: mol_type = other DNA

SEQ ID NO: 69587 - DNA, 120 bp, synthetic construct; identical to SEQ ID NO: 39633
  source 1..120: mol_type = other DNA

SEQ ID NO: 69588 - DNA, 120 bp, synthetic construct; identical to SEQ ID NO: 39634
  source 1..120: mol_type = other DNA

SEQ ID NO: 69589 - DNA, 120 bp, synthetic construct; identical to SEQ ID NO: 39635
  source 1..120: mol_type = other DNA

SEQ ID NO: 69590 - DNA, 120 bp, synthetic construct; identical to SEQ ID NO: 11369
  source 1..120: mol_type = other DNA

SEQ ID NO: 69591 - DNA, 120 bp, synthetic construct; identical to SEQ ID NO: 39637
  source 1..120: mol_type = other DNA

SEQ ID NO: 69592 - DNA, 120 bp, synthetic construct; identical to SEQ ID NO: 39638
  source 1..120: mol_type = other DNA

SEQ ID NO: 69593 - DNA, 120 bp, synthetic construct; identical to SEQ ID NO: 11370
  source 1..120: mol_type = other DNA

SEQ ID NO: 69594 - DNA, 120 bp, synthetic construct; identical to SEQ ID NO: 39640
  source 1..120: mol_type = other DNA

SEQ ID NO: 69595 - DNA, 120 bp, synthetic construct; identical to SEQ ID NO: 39641
  source 1..120: mol_type = other DNA

SEQ ID NO: 69596 - DNA, 120 bp, synthetic construct; identical to SEQ ID NO: 39642
  source 1..120: mol_type = other DNA

SEQ ID NO: 69597 - DNA, 120 bp, synthetic construct; identical to SEQ ID NO: 11371
  source 1..120: mol_type = other DNA

SEQ ID NO: 69598 - DNA, 120 bp, synthetic construct; identical to SEQ ID NO: 39644
  source 1..120: mol_type = other DNA

SEQ ID NO: 69599 - DNA, 120 bp, synthetic construct; identical to SEQ ID NO: 39645
  source 1..120: mol_type = other DNA

SEQ ID NO: 69600 - DNA, 120 bp, synthetic construct; identical to SEQ ID NO: 39646
  source 1..120: mol_type = other DNA

SEQ ID NO: 69601 - DNA, 120 bp, synthetic construct; identical to SEQ ID NO: 11372
  source 1..120: mol_type = other DNA

SEQ ID NO: 69602 - DNA, 120 bp, synthetic construct; identical to SEQ ID NO: 39648
  source 1..120: mol_type = other DNA

SEQ ID NO: 69603 - DNA, 120 bp, synthetic construct; identical to SEQ ID NO: 39649
  source 1..120: mol_type = other DNA

SEQ ID NO: 69604 - DNA, 120 bp, synthetic construct; identical to SEQ ID NO: 39650
  source 1..120: mol_type = other DNA

SEQ ID NO: 69605 - DNA, 120 bp, synthetic construct; identical to SEQ ID NO: 39651
  source 1..120: mol_type = other DNA

SEQ ID NO: 69606 - DNA, 120 bp, synthetic construct; identical to SEQ ID NO: 11373
  source 1..120: mol_type = other DNA

SEQ ID NO: 69607 - DNA, 120 bp, synthetic construct; identical to SEQ ID NO: 39653
  source 1..120: mol_type = other DNA

SEQ ID NO: 69608 - DNA, 120 bp, synthetic construct; identical to SEQ ID NO: 39654
  source 1..120: mol_type = other DNA

SEQ ID NO: 69609 - DNA, 120 bp, synthetic construct; identical to SEQ ID NO: 39655
  source 1..120: mol_type = other DNA

SEQ ID NO: 69610 - DNA, 120 bp, synthetic construct; identical to SEQ ID NO: 11374
  source 1..120: mol_type = other DNA

SEQ ID NO: 69611 - DNA, 120 bp, synthetic construct; identical to SEQ ID NO: 39657
  source 1..120: mol_type = other DNA

SEQ ID NO: 69612 - DNA, 120 bp, synthetic construct; identical to SEQ ID NO: 39658
  source 1..120: mol_type = other DNA

SEQ ID NO: 69613 - DNA, 120 bp, synthetic construct; identical to SEQ ID NO: 39659
  source 1..120: mol_type = other DNA

SEQ ID NO: 69614 - DNA, 120 bp, synthetic construct; identical to SEQ ID NO: 11375
  source 1..120: mol_type = other DNA

SEQ ID NO: 69615 - DNA, 120 bp, synthetic construct; identical to SEQ ID NO: 39661
  source 1..120: mol_type = other DNA

SEQ ID NO: 69616 - DNA, 120 bp, synthetic construct; identical to SEQ ID NO: 39662
  source 1..120: mol_type = other DNA

SEQ ID NO: 69617 - DNA, 120 bp, synthetic construct; identical to SEQ ID NO: 11376
  source 1..120: mol_type = other DNA

SEQ ID NO: 69618 - DNA, 120 bp, synthetic construct; identical to SEQ ID NO: 39664
  source 1..120: mol_type = other DNA

SEQ ID NO: 69619 - DNA, 120 bp, synthetic construct; identical to SEQ ID NO: 39665
  source 1..120: mol_type = other DNA

SEQ ID NO: 69620 - DNA, 120 bp, synthetic construct; identical to SEQ ID NO: 39666
  source 1..120: mol_type = other DNA

SEQ ID NO: 69621 - DNA, 120 bp, synthetic construct; identical to SEQ ID NO: 39667
  source 1..120: mol_type = other DNA

SEQ ID NO: 69622 - DNA, 120 bp, synthetic construct; identical to SEQ ID NO: 11377
  source 1..120: mol_type = other DNA

SEQ ID NO: 69623 - DNA, 120 bp, synthetic construct; identical to SEQ ID NO: 39669
  source 1..120: mol_type = other DNA

SEQ ID NO: 69624 - DNA, 120 bp, synthetic construct; identical to SEQ ID NO: 39670
  source 1..120: mol_type = other DNA

SEQ ID NO: 69625 - DNA, 120 bp, synthetic construct; identical to SEQ ID NO: 11378
  source 1..120: mol_type = other DNA

SEQ ID NO: 69626 - DNA, 120 bp, synthetic construct; identical to SEQ ID NO: 39672
  source 1..120: mol_type = other DNA

SEQ ID NO: 69627 - DNA, 120 bp, synthetic construct; identical to SEQ ID NO: 39673
  source 1..120: mol_type = other DNA

SEQ ID NO: 69628 - DNA, 120 bp, synthetic construct; identical to SEQ ID NO: 39674
  source 1..120: mol_type = other DNA

SEQ ID NO: 69629 - DNA, 120 bp, synthetic construct; identical to SEQ ID NO: 39675
  source 1..120: mol_type = other DNA

SEQ ID NO: 69630 - DNA, 120 bp, synthetic construct; identical to SEQ ID NO: 11379
  source 1..120: mol_type = other DNA

SEQ ID NO: 69631 - DNA, 120 bp, synthetic construct; identical to SEQ ID NO: 39677
  source 1..120: mol_type = other DNA

SEQ ID NO: 69632 - DNA, 120 bp, synthetic construct; identical to SEQ ID NO: 39678
  source 1..120: mol_type = other DNA

SEQ ID NO: 69633 - DNA, 120 bp, synthetic construct; identical to SEQ ID NO: 11380
  source 1..120: mol_type = other DNA

SEQ ID NO: 69634 - DNA, 120 bp, synthetic construct; identical to SEQ ID NO: 39680
  source 1..120: mol_type = other DNA

SEQ ID NO: 69635 - DNA, 120 bp, synthetic construct; identical to SEQ ID NO: 39681
  source 1..120: mol_type = other DNA

SEQ ID NO: 69636 - DNA, 120 bp, synthetic construct; identical to SEQ ID NO: 39682
  source 1..120: mol_type = other DNA

SEQ ID NO: 69637 - DNA, 120 bp, synthetic construct; identical to SEQ ID NO: 11381
  source 1..120: mol_type = other DNA

SEQ ID NO: 69638 - DNA, 120 bp, synthetic construct; identical to SEQ ID NO: 39684
  source 1..120: mol_type = other DNA

SEQ ID NO: 69639 - DNA, 120 bp, synthetic construct; identical to SEQ ID NO: 39685
  source 1..120: mol_type = other DNA

SEQ ID NO: 69640 - DNA, 120 bp, synthetic construct; identical to SEQ ID NO: 39686
  source 1..120: mol_type = other DNA

SEQ ID NO: 69641 - DNA, 120 bp, synthetic construct; identical to SEQ ID NO: 39687
  source 1..120: mol_type = other DNA

SEQ ID NO: 69642 - DNA, 120 bp, synthetic construct; identical to SEQ ID NO: 11382
  source 1..120: mol_type = other DNA

SEQ ID NO: 69643 - DNA, 120 bp, synthetic construct; identical to SEQ ID NO: 39689
  source 1..120: mol_type = other DNA

SEQ ID NO: 69644 - DNA, 120 bp, synthetic construct; identical to SEQ ID NO: 39690
  source 1..120: mol_type = other DNA

SEQ ID NO: 69645 - DNA, 120 bp, synthetic construct; identical to SEQ ID NO: 11383
  source 1..120: mol_type = other DNA

SEQ ID NO: 69646 - DNA, 120 bp, synthetic construct; identical to SEQ ID NO: 39692
  source 1..120: mol_type = other DNA

SEQ ID NO: 69647 - DNA, 120 bp, synthetic construct; identical to SEQ ID NO: 39693
  source 1..120: mol_type = other DNA

SEQ ID NO: 69648 - DNA, 120 bp, synthetic construct; identical to SEQ ID NO: 39694
  source 1..120: mol_type = other DNA

SEQ ID NO: 69649 - DNA, 120 bp, synthetic construct; identical to SEQ ID NO: 11384
  source 1..120: mol_type = other DNA

SEQ ID NO: 69650 - DNA, 120 bp, synthetic construct; identical to SEQ ID NO: 39696
  source 1..120: mol_type = other DNA

SEQ ID NO: 69651 - DNA, 120 bp, synthetic construct; identical to SEQ ID NO: 39697
  source 1..120: mol_type = other DNA

SEQ ID NO: 69652 - DNA, 120 bp, synthetic construct; identical to SEQ ID NO: 39698
  source 1..120: mol_type = other DNA

SEQ ID NO: 69653 - DNA, 120 bp, synthetic construct; identical to SEQ ID NO: 11385
  source 1..120: mol_type = other DNA

SEQ ID NO: 69654 - DNA, 120 bp, synthetic construct; identical to SEQ ID NO: 39700
  source 1..120: mol_type = other DNA

SEQ ID NO: 69655 - DNA, 120 bp, synthetic construct; identical to SEQ ID NO: 39701
  source 1..120: mol_type = other DNA

SEQ ID NO: 69656 - DNA, 120 bp, synthetic construct; identical to SEQ ID NO: 39702
  source 1..120: mol_type = other DNA

SEQ ID NO: 69657 - DNA, 120 bp, synthetic construct; identical to SEQ ID NO: 39703
  source 1..120: mol_type = other DNA

SEQ ID NO: 69658 - DNA, 120 bp, synthetic construct; identical to SEQ ID NO: 11386
  source 1..120: mol_type = other DNA

SEQ ID NO: 69659 - DNA, 120 bp, synthetic construct; identical to SEQ ID NO: 39705
  source 1..120: mol_type = other DNA

SEQ ID NO: 69660 - DNA, 120 bp, synthetic construct; identical to SEQ ID NO: 39706
  source 1..120: mol_type = other DNA

SEQ ID NO: 69661 - DNA, 120 bp, synthetic construct; identical to SEQ ID NO: 11387
  source 1..120: mol_type = other DNA

SEQ ID NO: 69662 - DNA, 120 bp, synthetic construct; identical to SEQ ID NO: 39708
  source 1..120: mol_type = other DNA

SEQ ID NO: 69663 - DNA, 120 bp, synthetic construct; identical to SEQ ID NO: 39709
  source 1..120: mol_type = other DNA

SEQ ID NO: 69664 - DNA, 120 bp, synthetic construct; identical to SEQ ID NO: 39710
  source 1..120: mol_type = other DNA

SEQ ID NO: 69665 - DNA, 120 bp, synthetic construct; identical to SEQ ID NO: 11388
  source 1..120: mol_type = other DNA

SEQ ID NO: 69666 - DNA, 120 bp, synthetic construct; identical to SEQ ID NO: 39712
  source 1..120: mol_type = other DNA

SEQ ID NO: 69667 - DNA, 120 bp, synthetic construct; identical to SEQ ID NO: 39713
  source 1..120: mol_type = other DNA

SEQ ID NO: 69668 - DNA, 120 bp, synthetic construct; identical to SEQ ID NO: 39714
  source 1..120: mol_type = other DNA

SEQ ID NO: 69669 - DNA, 120 bp, synthetic construct; identical to SEQ ID NO: 4114
  source 1..120: mol_type = other DNA

SEQ ID NO: 69670 - DNA, 120 bp, synthetic construct; identical to SEQ ID NO: 39716
  source 1..120: mol_type = other DNA

SEQ ID NO: 69671 - DNA, 120 bp, synthetic construct; identical to SEQ ID NO: 39717
  source 1..120: mol_type = other DNA

SEQ ID NO: 69672 - DNA, 120 bp, synthetic construct; identical to SEQ ID NO: 39718
  source 1..120: mol_type = other DNA

SEQ ID NO: 69673 - DNA, 120 bp, synthetic construct; identical to SEQ ID NO: 11390
  source 1..120: mol_type = other DNA

SEQ ID NO: 69674 - DNA, 120 bp, synthetic construct; identical to SEQ ID NO: 39720
  source 1..120: mol_type = other DNA

SEQ ID NO: 69675 - DNA, 120 bp, synthetic construct; identical to SEQ ID NO: 39721
  source 1..120: mol_type = other DNA

SEQ ID NO: 69676 - DNA, 120 bp, synthetic construct; identical to SEQ ID NO: 39722
  source 1..120: mol_type = other DNA

SEQ ID NO: 69677 - DNA, 120 bp, synthetic construct; identical to SEQ ID NO: 11391
  source 1..120: mol_type = other DNA

SEQ ID NO: 69678 - DNA, 120 bp, synthetic construct; identical to SEQ ID NO: 39724
  source 1..120: mol_type = other DNA

SEQ ID NO: 69679 - DNA, 120 bp, synthetic construct; identical to SEQ ID NO: 39725
  source 1..120: mol_type = other DNA

SEQ ID NO: 69680 - DNA, 120 bp, synthetic construct; identical to SEQ ID NO: 39726
  source 1..120: mol_type = other DNA

SEQ ID NO: 69681 - DNA, 120 bp, synthetic construct; identical to SEQ ID NO: 39727
  source 1..120: mol_type = other DNA

SEQ ID NO: 69682 - DNA, 120 bp, synthetic construct; identical to SEQ ID NO: 11392
  source 1..120: mol_type = other DNA

SEQ ID NO: 69683 - DNA, 120 bp, synthetic construct; identical to SEQ ID NO: 39729
  source 1..120: mol_type = other DNA

SEQ ID NO: 69684 - DNA, 120 bp, synthetic construct; identical to SEQ ID NO: 39730
  source 1..120: mol_type = other DNA

SEQ ID NO: 69685 - DNA, 120 bp, synthetic construct; identical to SEQ ID NO: 11393
  source 1..120: mol_type = other DNA

SEQ ID NO: 69686 - DNA, 120 bp, synthetic construct; identical to SEQ ID NO: 39732
  source 1..120: mol_type = other DNA

SEQ ID NO: 69687 - DNA, 120 bp, synthetic construct; identical to SEQ ID NO: 39733
  source 1..120: mol_type = other DNA

SEQ ID NO: 69688 - DNA, 120 bp, synthetic construct; identical to SEQ ID NO: 39734
  source 1..120: mol_type = other DNA

SEQ ID NO: 69689 - DNA, 120 bp, synthetic construct; identical to SEQ ID NO: 39735
  source 1..120: mol_type = other DNA

SEQ ID NO: 69690 - DNA, 120 bp, synthetic construct; identical to SEQ ID NO: 11394
  source 1..120: mol_type = other DNA

SEQ ID NO: 69691 - DNA, 120 bp, synthetic construct; identical to SEQ ID NO: 39737
  source 1..120: mol_type = other DNA

SEQ ID NO: 69692 - DNA, 120 bp, synthetic construct; identical to SEQ ID NO: 39738
  source 1..120: mol_type = other DNA

SEQ ID NO: 69693 - DNA, 120 bp, synthetic construct; identical to SEQ ID NO: 39739
  source 1..120: mol_type = other DNA

SEQ ID NO: 69694 - DNA, 120 bp, synthetic construct; identical to SEQ ID NO: 11395
  source 1..120: mol_type = other DNA

SEQ ID NO: 69695 - DNA, 120 bp, synthetic construct; identical to SEQ ID NO: 39741
  source 1..120: mol_type = other DNA

SEQ ID NO: 69696 - DNA, 120 bp, synthetic construct; identical to SEQ ID NO: 39742
  source 1..120: mol_type = other DNA

SEQ ID NO: 69697 - DNA, 120 bp, synthetic construct; identical to SEQ ID NO: 39743
  source 1..120: mol_type = other DNA

SEQ ID NO: 69698 - DNA, 120 bp, synthetic construct; identical to SEQ ID NO: 11396
  source 1..120: mol_type = other DNA

SEQ ID NO: 69699 - DNA, 120 bp, synthetic construct; identical to SEQ ID NO: 39745
  source 1..120: mol_type = other DNA

SEQ ID NO: 69700 - DNA, 120 bp, synthetic construct; identical to SEQ ID NO: 39746
  source 1..120: mol_type = other DNA

SEQ ID NO: 69701 - DNA, 120 bp, synthetic construct; identical to SEQ ID NO: 39747
  source 1..120: mol_type = other DNA

SEQ ID NO: 69702 - DNA, 120 bp, synthetic construct; identical to SEQ ID NO: 11397
  source 1..120: mol_type = other DNA

SEQ ID NO: 69703 - DNA, 120 bp, synthetic construct; identical to SEQ ID NO: 39749
  source 1..120: mol_type = other DNA

SEQ ID NO: 69704 - DNA, 120 bp, synthetic construct; identical to SEQ ID NO: 11398
  source 1..120: mol_type = other DNA

SEQ ID NO: 69705 - DNA, 120 bp, synthetic construct; identical to SEQ ID NO: 39751
  source 1..120: mol_type = other DNA

SEQ ID NO: 69706 - DNA, 120 bp, synthetic construct; identical to SEQ ID NO: 39752
  source 1..120: mol_type = other DNA

SEQ ID NO: 69707 - DNA, 120 bp, synthetic construct; identical to SEQ ID NO: 39753
  source 1..120: mol_type = other DNA

SEQ ID NO: 69708 - DNA, 120 bp, synthetic construct; identical to SEQ ID NO: 11399
  source 1..120: mol_type = other DNA

SEQ ID NO: 69709 - DNA, 120 bp, synthetic construct; identical to SEQ ID NO: 39755
  source 1..120: mol_type = other DNA

SEQ ID NO: 69710 - DNA, 120 bp, synthetic construct; identical to SEQ ID NO: 39756
  source 1..120: mol_type = other DNA

SEQ ID NO: 69711 - DNA, 120 bp, synthetic construct; identical to SEQ ID NO: 39757
  source 1..120: mol_type = other DNA

SEQ ID NO: 69712 - DNA, 120 bp, synthetic construct; identical to SEQ ID NO: 39758
  source 1..120: mol_type = other DNA

SEQ ID NO: 69713 - DNA, 120 bp, synthetic construct; identical to SEQ ID NO: 11400
  source 1..120: mol_type = other DNA

SEQ ID NO: 69714 - DNA, 120 bp, synthetic construct; identical to SEQ ID NO: 39760
  source 1..120: mol_type = other DNA

SEQ ID NO: 69715 - DNA, 120 bp, synthetic construct; identical to SEQ ID NO: 39761
  source 1..120: mol_type = other DNA

SEQ ID NO: 69716 - DNA, 120 bp, synthetic construct; identical to SEQ ID NO: 39762
  source 1..120: mol_type = other DNA

SEQ ID NO: 69717 - DNA, 120 bp, synthetic construct; identical to SEQ ID NO: 11401
  source 1..120: mol_type = other DNA

SEQ ID NO: 69718 - DNA, 120 bp, synthetic construct; identical to SEQ ID NO: 39764
  source 1..120: mol_type = other DNA

SEQ ID NO: 69719 - DNA, 120 bp, synthetic construct; identical to SEQ ID NO: 39765
  source 1..120: mol_type = other DNA

SEQ ID NO: 69720 - DNA, 120 bp, synthetic construct; identical to SEQ ID NO: 39766
  source 1..120: mol_type = other DNA

SEQ ID NO: 69721 - DNA, 120 bp, synthetic construct; identical to SEQ ID NO: 11402
  source 1..120: mol_type = other DNA

SEQ ID NO: 69722 - DNA, 120 bp, synthetic construct; identical to SEQ ID NO: 39768
  source 1..120: mol_type = other DNA

SEQ ID NO: 69723 - DNA, 120 bp, synthetic construct; identical to SEQ ID NO: 39769
  source 1..120: mol_type = other DNA

SEQ ID NO: 69724 - DNA, 120 bp, synthetic construct; identical to SEQ ID NO: 39770
  source 1..120: mol_type = other DNA

SEQ ID NO: 69725 - DNA, 120 bp, synthetic construct; identical to SEQ ID NO: 11403
  source 1..120: mol_type = other DNA

SEQ ID NO: 69726 - DNA, 120 bp, synthetic construct; identical to SEQ ID NO: 39772
  source 1..120: mol_type = other DNA

SEQ ID NO: 69727 - DNA, 120 bp, synthetic construct; identical to SEQ ID NO: 39773
  source 1..120: mol_type = other DNA

SEQ ID NO: 69728 - DNA, 120 bp, synthetic construct; identical to SEQ ID NO: 11404
  source 1..120: mol_type = other DNA

SEQ ID NO: 69729 - DNA, 120 bp, synthetic construct; identical to SEQ ID NO: 39775
  source 1..120: mol_type = other DNA

SEQ ID NO: 69730 - DNA, 120 bp, synthetic construct; identical to SEQ ID NO: 39776
  source 1..120: mol_type = other DNA

SEQ ID NO: 69731 - DNA, 120 bp, synthetic construct; identical to SEQ ID NO: 39777
  source 1..120: mol_type = other DNA

SEQ ID NO: 69732 - DNA, 120 bp, synthetic construct; identical to SEQ ID NO: 11405
  source 1..120: mol_type = other DNA

SEQ ID NO: 69733 - DNA, 120 bp, synthetic construct; identical to SEQ ID NO: 39779
  source 1..120: mol_type = other DNA

SEQ ID NO: 69734 - DNA, 120 bp, synthetic construct; identical to SEQ ID NO: 39780
  source 1..120: mol_type = other DNA

SEQ ID NO: 69735 - DNA, 120 bp, synthetic construct; identical to SEQ ID NO: 39781
  source 1..120: mol_type = other DNA

SEQ ID NO: 69736 - DNA, 120 bp, synthetic construct; identical to SEQ ID NO: 11406
  source 1..120: mol_type = other DNA

SEQ ID NO: 69737 - DNA, 120 bp, synthetic construct; identical to SEQ ID NO: 39783
  source 1..120: mol_type = other DNA

SEQ ID NO: 69738 - DNA, 120 bp, synthetic construct; identical to SEQ ID NO: 39784
  source 1..120: mol_type = other DNA

SEQ ID NO: 69739 - DNA, 120 bp, synthetic construct; identical to SEQ ID NO: 39785
  source 1..120: mol_type = other DNA

SEQ ID NO: 69740 - DNA, 120 bp, synthetic construct; identical to SEQ ID NO: 11407
  source 1..120: mol_type = other DNA

SEQ ID NO: 69741 - DNA, 120 bp, synthetic construct; identical to SEQ ID NO: 39787
  source 1..120: mol_type = other DNA

SEQ ID NO: 69742 - DNA, 120 bp, synthetic construct; identical to SEQ ID NO: 39788
  source 1..120: mol_type = other DNA

SEQ ID NO: 69743 - DNA, 120 bp, synthetic construct; identical to SEQ ID NO: 39789
  source 1..120: mol_type = other DNA

SEQ ID NO: 69744 - DNA, 120 bp, synthetic construct; identical to SEQ ID NO: 11408
  source 1..120: mol_type = other DNA

SEQ ID NO: 69745 - DNA, 120 bp, synthetic construct; identical to SEQ ID NO: 39791
  source 1..120: mol_type = other DNA

SEQ ID NO: 69746 - DNA, 120 bp, synthetic construct; identical to SEQ ID NO: 39792
  source 1..120: mol_type = other DNA

SEQ ID NO: 69747 - DNA, 120 bp, synthetic construct; identical to SEQ ID NO: 39793
  source 1..120: mol_type = other DNA

SEQ ID NO: 69748 - DNA, 120 bp, synthetic construct; identical to SEQ ID NO: 11409
  source 1..120: mol_type = other DNA

SEQ ID NO: 69749 - DNA, 120 bp, synthetic construct; identical to SEQ ID NO: 39795
  source 1..120: mol_type = other DNA

SEQ ID NO: 69750 - DNA, 120 bp, synthetic construct; identical to SEQ ID NO: 39796
  source 1..120: mol_type = other DNA

SEQ ID NO: 69751 - DNA, 120 bp, synthetic construct; identical to SEQ ID NO: 39797
  source 1..120: mol_type = other DNA

SEQ ID NO: 69752 - DNA, 120 bp, synthetic construct; identical to SEQ ID NO: 11410
  source 1..120: mol_type = other DNA

SEQ ID NO: 69753 - DNA, 120 bp, synthetic construct; identical to SEQ ID NO: 39799
  source 1..120: mol_type = other DNA

SEQ ID NO: 69754 - DNA, 120 bp, synthetic construct; identical to SEQ ID NO: 39800
  source 1..120: mol_type = other DNA

SEQ ID NO: 69755 - DNA, 120 bp, synthetic construct; identical to SEQ ID NO: 39801
  source 1..120: mol_type = other DNA

SEQ ID NO: 69756 - DNA, 120 bp, synthetic construct; identical to SEQ ID NO: 39802
  source 1..120: mol_type = other DNA

SEQ ID NO: 69757 - DNA, 120 bp, synthetic construct; identical to SEQ ID NO: 11411
  source 1..120: mol_type = other DNA

SEQ ID NO: 69758 - DNA, 120 bp, synthetic construct; identical to SEQ ID NO: 39804
  source 1..120: mol_type = other DNA

SEQ ID NO: 69759 - DNA, 120 bp, synthetic construct; identical to SEQ ID NO: 39805
  source 1..120: mol_type = other DNA

SEQ ID NO: 69760 - DNA, 120 bp, synthetic construct; identical to SEQ ID NO: 11412
  source 1..120: mol_type = other DNA

SEQ ID NO: 69761 - DNA, 120 bp, synthetic construct; identical to SEQ ID NO: 39807
  source 1..120: mol_type = other DNA

SEQ ID NO: 69762 - DNA, 120 bp, synthetic construct; identical to SEQ ID NO: 39808
  source 1..120: mol_type = other DNA

SEQ ID NO: 69763 - DNA, 120 bp, synthetic construct; identical to SEQ ID NO: 39809
  source 1..120: mol_type = other DNA

SEQ ID NO: 69764 - DNA, 120 bp, synthetic construct; identical to SEQ ID NO: 39810
  source 1..120: mol_type = other DNA

SEQ ID NO: 69765 - DNA, 120 bp, synthetic construct; identical to SEQ ID NO: 11413
  source 1..120: mol_type = other DNA

SEQ ID NO: 69766 - DNA, 120 bp, synthetic construct; identical to SEQ ID NO: 39812
  source 1..120: mol_type = other DNA

SEQ ID NO: 69767 - DNA, 120 bp, synthetic construct; identical to SEQ ID NO: 39813
  source 1..120: mol_type = other DNA

SEQ ID NO: 69768 - DNA, 120 bp, synthetic construct; identical to SEQ ID NO: 11414
  source 1..120: mol_type = other DNA

SEQ ID NO: 69769 - DNA, 120 bp, synthetic construct; identical to SEQ ID NO: 39815
  source 1..120: mol_type = other DNA

SEQ ID NO: 69770 - DNA, 120 bp, synthetic construct; identical to SEQ ID NO: 39816
  source 1..120: mol_type = other DNA

SEQ ID NO: 69771 - DNA, 120 bp, synthetic construct; identical to SEQ ID NO: 39817
  source 1..120: mol_type = other DNA

SEQ ID NO: 69772 - DNA, 120 bp, synthetic construct; identical to SEQ ID NO: 39818
  source 1..120: mol_type = other DNA

SEQ ID NO: 69773 - DNA, 120 bp, synthetic construct; identical to SEQ ID NO: 11415
  source 1..120: mol_type = other DNA

SEQ ID NO: 69774 - DNA, 120 bp, synthetic construct; identical to SEQ ID NO: 39820
  source 1..120: mol_type = other DNA

SEQ ID NO: 69775 - DNA, 120 bp, synthetic construct; identical to SEQ ID NO: 39821
  source 1..120: mol_type = other DNA

SEQ ID NO: 69776 - DNA, 120 bp, synthetic construct; identical to SEQ ID NO: 11416
  source 1..120: mol_type = other DNA

SEQ ID NO: 69777 - DNA, 120 bp, synthetic construct; identical to SEQ ID NO: 39823
  source 1..120: mol_type = other DNA

SEQ ID NO: 69778 - DNA, 120 bp, synthetic construct; identical to SEQ ID NO: 39824
  source 1..120: mol_type = other DNA

SEQ ID NO: 69779 - DNA, 120 bp, synthetic construct; identical to SEQ ID NO: 39825
  source 1..120: mol_type = other DNA

SEQ ID NO: 69780 - DNA, 120 bp, synthetic construct; identical to SEQ ID NO: 39826
  source 1..120: mol_type = other DNA

SEQ ID NO: 69781 - DNA, 120 bp, synthetic construct; identical to SEQ ID NO: 11417
  source 1..120: mol_type = other DNA

SEQ ID NO: 69782 - DNA, 120 bp, synthetic construct; identical to SEQ ID NO: 39828
  source 1..120: mol_type = other DNA

SEQ ID NO: 69783 - DNA, 120 bp, synthetic construct; identical to SEQ ID NO: 39829
  source 1..120: mol_type = other DNA

SEQ ID NO: 69784 - DNA, 120 bp, synthetic construct; identical to SEQ ID NO: 11418
  source 1..120: mol_type = other DNA

SEQ ID NO: 69785 - DNA, 120 bp, synthetic construct; identical to SEQ ID NO: 39831
  source 1..120: mol_type = other DNA

SEQ ID NO: 69786 - DNA, 120 bp, synthetic construct; identical to SEQ ID NO: 39832
  source 1..120: mol_type = other DNA

SEQ ID NO: 69787 - DNA, 120 bp, synthetic construct; identical to SEQ ID NO: 39833
  source 1..120: mol_type = other DNA

SEQ ID NO: 69788 - DNA, 120 bp, synthetic construct; identical to SEQ ID NO: 11419
  source 1..120: mol_type = other DNA

SEQ ID NO: 69789 - DNA, 120 bp, synthetic construct; identical to SEQ ID NO: 39835
  source 1..120: mol_type = other DNA

SEQ ID NO: 69790 - DNA, 120 bp, synthetic construct; identical to SEQ ID NO: 39836
  source 1..120: mol_type = other DNA

SEQ ID NO: 69791 - DNA, 120 bp, synthetic construct; identical to SEQ ID NO: 39837
  source 1..120: mol_type = other DNA

SEQ ID NO: 69792 - DNA, 120 bp, synthetic construct; identical to SEQ ID NO: 39838
  source 1..120: mol_type = other DNA

SEQ ID NO: 69793 - DNA, 120 bp, synthetic construct; identical to SEQ ID NO: 11420
  source 1..120: mol_type = other DNA

SEQ ID NO: 69794 - DNA, 120 bp, synthetic construct; identical to SEQ ID NO: 39840
  source 1..120: mol_type = other DNA

SEQ ID NO: 69795 - DNA, 120 bp, synthetic construct; identical to SEQ ID NO: 39841
  source 1..120: mol_type = other DNA

SEQ ID NO: 69796 - DNA, 120 bp, synthetic construct; identical to SEQ ID NO: 11421
  source 1..120: mol_type = other DNA

SEQ ID NO: 69797 - DNA, 120 bp, synthetic construct; identical to SEQ ID NO: 39843
  source 1..120: mol_type = other DNA

SEQ ID NO: 69798 - DNA, 120 bp, synthetic construct; identical to SEQ ID NO: 39844
  source 1..120: mol_type = other DNA

SEQ ID NO: 69799 - DNA, 120 bp, synthetic construct; identical to SEQ ID NO: 39845
  source 1..120: mol_type = other DNA

SEQ ID NO: 69800 - DNA, 120 bp, synthetic construct; identical to SEQ ID NO: 11422
  source 1..120: mol_type = other DNA

SEQ ID NO: 69801 - DNA, 120 bp, synthetic construct; identical to SEQ ID NO: 39847
  source 1..120: mol_type = other DNA

SEQ ID NO: 69802 - DNA, 120 bp, synthetic construct; identical to SEQ ID NO: 39848
  source 1..120: mol_type = other DNA

SEQ ID NO: 69803 - DNA, 120 bp, synthetic construct; identical to SEQ ID NO: 39849
  source 1..120: mol_type = other DNA

SEQ ID NO: 69804 - DNA, 120 bp, synthetic construct; identical to SEQ ID NO: 39850
  source 1..120: mol_type = other DNA

SEQ ID NO: 69805 - DNA, 120 bp, synthetic construct; identical to SEQ ID NO: 11423
  source 1..120: mol_type = other DNA

SEQ ID NO: 69806 - DNA, 120 bp, synthetic construct; identical to SEQ ID NO: 39852
  source 1..120: mol_type = other DNA

SEQ ID NO: 69807 - DNA, 120 bp, synthetic construct; identical to SEQ ID NO: 39853
  source 1..120: mol_type = other DNA

SEQ ID NO: 69808 - DNA, 120 bp, synthetic construct; identical to SEQ ID NO: 39854
  source 1..120: mol_type = other DNA

SEQ ID NO: 69809 - DNA, 120 bp, synthetic construct; identical to SEQ ID NO: 11424
  source 1..120: mol_type = other DNA

SEQ ID NO: 69810 - DNA, 120 bp, synthetic construct; identical to SEQ ID NO: 39856
  source 1..120: mol_type = other DNA

SEQ ID NO: 69811 - DNA, 120 bp, synthetic construct; identical to SEQ ID NO: 39857
  source 1..120: mol_type = other DNA

SEQ ID NO: 69812 - DNA, 120 bp, synthetic construct; identical to SEQ ID NO: 39858
  source 1..120: mol_type = other DNA

SEQ ID NO: 69813 - DNA, 120 bp, synthetic construct; identical to SEQ ID NO: 39859
  source 1..120: mol_type = other DNA

SEQ ID NO: 69814 - DNA, 120 bp, synthetic construct; identical to SEQ ID NO: 11425
  source 1..120: mol_type = other DNA

SEQ ID NO: 69815 - DNA, 120 bp, synthetic construct; identical to SEQ ID NO: 39861
  source 1..120: mol_type = other DNA

SEQ ID NO: 69816 - DNA, 120 bp, synthetic construct; identical to SEQ ID NO: 39862
  source 1..120: mol_type = other DNA

SEQ ID NO: 69817 - DNA, 120 bp, synthetic construct; identical to SEQ ID NO: 39863
  source 1..120: mol_type = other DNA

SEQ ID NO: 69818 - DNA, 120 bp, synthetic construct; identical to SEQ ID NO: 11426
  source 1..120: mol_type = other DNA

SEQ ID NO: 69819 - DNA, 120 bp, synthetic construct; identical to SEQ ID NO: 39865
  source 1..120: mol_type = other DNA

SEQ ID NO: 69820 - DNA, 120 bp, synthetic construct; identical to SEQ ID NO: 39866
  source 1..120: mol_type = other DNA

SEQ ID NO: 69821 - DNA, 120 bp, synthetic construct; identical to SEQ ID NO: 11427
  source 1..120: mol_type = other DNA

SEQ ID NO: 69822 - DNA, 120 bp, synthetic construct; identical to SEQ ID NO: 39868
  source 1..120: mol_type = other DNA

SEQ ID NO: 69823 - DNA, 120 bp, synthetic construct; identical to SEQ ID NO: 39869
  source 1..120: mol_type = other DNA

SEQ ID NO: 69824 - DNA, 120 bp, synthetic construct; identical to SEQ ID NO: 39870
  source 1..120: mol_type = other DNA

SEQ ID NO: 69825 - DNA, 120 bp, synthetic construct; identical to SEQ ID NO: 11428
  source 1..120: mol_type = other DNA

SEQ ID NO: 69826 - DNA, 120 bp, synthetic construct; identical to SEQ ID NO: 39872
  source 1..120: mol_type = other DNA

SEQ ID NO: 69827 - DNA, 120 bp, synthetic construct; identical to SEQ ID NO: 39873
  source 1..120: mol_type = other DNA

SEQ ID NO: 69828 - DNA, 120 bp, synthetic construct; identical to SEQ ID NO: 39874
  source 1..120: mol_type = other DNA

SEQ ID NO: 69829 - DNA, 120 bp, synthetic construct; identical to SEQ ID NO: 11429
  source 1..120: mol_type = other DNA

SEQ ID NO: 69830 - DNA, 120 bp, synthetic construct; identical to SEQ ID NO: 39876
  source 1..120: mol_type = other DNA

SEQ ID NO: 69831 - DNA, 120 bp, synthetic construct; identical to SEQ ID NO: 39877
  source 1..120: mol_type = other DNA

SEQ ID NO: 69832 - DNA, 120 bp, synthetic construct; identical to SEQ ID NO: 39878
  source 1..120: mol_type = other DNA

SEQ ID NO: 69833 - DNA, 120 bp, synthetic construct; identical to SEQ ID NO: 39879
  source 1..120: mol_type = other DNA

SEQ ID NO: 69834 - DNA, 120 bp, synthetic construct; identical to SEQ ID NO: 4152
  source 1..120: mol_type = other DNA

SEQ ID NO: 69835 - DNA, 120 bp, synthetic construct; identical to SEQ ID NO: 39881
  source 1..120: mol_type = other DNA

SEQ ID NO: 69836 - DNA, 120 bp, synthetic construct; identical to SEQ ID NO: 39882
  source 1..120: mol_type = other DNA

SEQ ID NO: 69837 - DNA, 120 bp, synthetic construct; identical to SEQ ID NO: 39883
  source 1..120: mol_type = other DNA

SEQ ID NO: 69838 - DNA, 120 bp, synthetic construct; identical to SEQ ID NO: 11431
  source 1..120: mol_type = other DNA

SEQ ID NO: 69839 - DNA, 120 bp, synthetic construct; identical to SEQ ID NO: 39885
  source 1..120: mol_type = other DNA

SEQ ID NO: 69840 - DNA, 120 bp, synthetic construct; identical to SEQ ID NO: 39886
  source 1..120: mol_type = other DNA

SEQ ID NO: 69841 - DNA, 120 bp, synthetic construct; identical to SEQ ID NO: 39887
  source 1..120: mol_type = other DNA

SEQ ID NO: 69842 - DNA, 120 bp, synthetic construct; identical to SEQ ID NO: 11432
  source 1..120: mol_type = other DNA

SEQ ID NO: 69843 - DNA, 120 bp, synthetic construct; identical to SEQ ID NO: 39889
  source 1..120: mol_type = other DNA

SEQ ID NO: 69844 - DNA, 120 bp, synthetic construct; identical to SEQ ID NO: 39890
  source 1..120: mol_type = other DNA

SEQ ID NO: 69845 - DNA, 120 bp, synthetic construct; identical to SEQ ID NO: 11433
  source 1..120: mol_type = other DNA

SEQ ID NO: 69846 - DNA, 120 bp, synthetic construct; identical to SEQ ID NO: 39892
  source 1..120: mol_type = other DNA

SEQ ID NO: 69847 - DNA, 120 bp, synthetic construct; identical to SEQ ID NO: 39893
  source 1..120: mol_type = other DNA

SEQ ID NO: 69848 - DNA, 120 bp, synthetic construct; identical to SEQ ID NO: 39894
  source 1..120: mol_type = other DNA

SEQ ID NO: 69849 - DNA, 120 bp, synthetic construct; identical to SEQ ID NO: 39895
  source 1..120: mol_type = other DNA

SEQ ID NO: 69850 - DNA, 120 bp, synthetic construct; identical to SEQ ID NO: 11434
  source 1..120: mol_type = other DNA

SEQ ID NO: 69851 - DNA, 120 bp, synthetic construct; identical to SEQ ID NO: 39897
  source 1..120: mol_type = other DNA

SEQ ID NO: 69852 - DNA, 120 bp, synthetic construct; identical to SEQ ID NO: 39898
  source 1..120: mol_type = other DNA

SEQ ID NO: 69853 - DNA, 120 bp, synthetic construct; identical to SEQ ID NO: 11435
  source 1..120: mol_type = other DNA

SEQ ID NO: 69854 - DNA, 120 bp, synthetic construct; identical to SEQ ID NO: 39900
  source 1..120: mol_type = other DNA

SEQ ID NO: 69855 - DNA, 120 bp, synthetic construct; identical to SEQ ID NO: 39901
  source 1..120: mol_type = other DNA

SEQ ID NO: 69856 - DNA, 120 bp, synthetic construct; identical to SEQ ID NO: 39902
  source 1..120: mol_type = other DNA

SEQ ID NO: 69857 - DNA, 120 bp, synthetic construct; identical to SEQ ID NO: 39903
  source 1..120: mol_type = other DNA

SEQ ID NO: 69858 - DNA, 120 bp, synthetic construct; identical to SEQ ID NO: 11436
  source 1..120: mol_type = other DNA

SEQ ID NO: 69859 - DNA, 120 bp, synthetic construct; identical to SEQ ID NO: 39905
  source 1..120: mol_type = other DNA

SEQ ID NO: 69860 - DNA, 120 bp, synthetic construct; identical to SEQ ID NO: 39906
  source 1..120: mol_type = other DNA

SEQ ID NO: 69861 - DNA, 120 bp, synthetic construct; identical to SEQ ID NO: 11437
  source 1..120: mol_type = other DNA

SEQ ID NO: 69862 - DNA, 120 bp, synthetic construct; identical to SEQ ID NO: 39908
  source 1..120: mol_type = other DNA

SEQ ID NO: 69863 - DNA, 120 bp, synthetic construct; identical to SEQ ID NO: 39909
  source 1..120: mol_type = other DNA

SEQ ID NO: 69864 - DNA, 120 bp, synthetic construct; identical to SEQ ID NO: 39910
  source 1..120: mol_type = other DNA

SEQ ID NO: 69865 - DNA, 120 bp, synthetic construct; identical to SEQ ID NO: 39911
  source 1..120: mol_type = other DNA

SEQ ID NO: 69866 - DNA, 120 bp, synthetic construct; identical to SEQ ID NO: 11438
  source 1..120: mol_type = other DNA

SEQ ID NO: 69867 - DNA, 120 bp, synthetic construct; identical to SEQ ID NO: 39913
  source 1..120: mol_type = other DNA

SEQ ID NO: 69868 - DNA, 120 bp, synthetic construct; identical to SEQ ID NO: 39914
  source 1..120: mol_type = other DNA

SEQ ID NO: 69869 - DNA, 120 bp, synthetic construct; identical to SEQ ID NO: 39915
  source 1..120: mol_type = other DNA

SEQ ID NO: 69870 - DNA, 120 bp, synthetic construct; identical to SEQ ID NO: 11439
  source 1..120: mol_type = other DNA

SEQ ID NO: 69871 - DNA, 120 bp, synthetic construct; identical to SEQ ID NO: 39917
  source 1..120: mol_type = other DNA

SEQ ID NO: 69872 - DNA, 120 bp, synthetic construct; identical to SEQ ID NO: 39918
  source 1..120: mol_type = other DNA

SEQ ID NO: 69873 - DNA, 120 bp, synthetic construct; identical to SEQ ID NO: 11440
  source 1..120: mol_type = other DNA

SEQ ID NO: 69874 - DNA, 120 bp, synthetic construct; identical to SEQ ID NO: 39920
  source 1..120: mol_type = other DNA

SEQ ID NO: 69875 - DNA, 120 bp, synthetic construct; identical to SEQ ID NO: 39921
  source 1..120: mol_type = other DNA

SEQ ID NO: 69876 - DNA, 120 bp, synthetic construct; identical to SEQ ID NO: 39922
  source 1..120: mol_type = other DNA

SEQ ID NO: 69877 - DNA, 120 bp, synthetic construct; identical to SEQ ID NO: 11441
  source 1..120: mol_type = other DNA

SEQ ID NO: 69878 - DNA, 120 bp, synthetic construct; identical to SEQ ID NO: 39924
  source 1..120: mol_type = other DNA

SEQ ID NO: 69879 - DNA, 120 bp, synthetic construct; identical to SEQ ID NO: 39925
  source 1..120: mol_type = other DNA

SEQ ID NO: 69880 - DNA, 120 bp, synthetic construct; identical to SEQ ID NO: 39926
  source 1..120: mol_type = other DNA

SEQ ID NO: 69881 - DNA, 120 bp, synthetic construct; identical to SEQ ID NO: 39927
  source 1..120: mol_type = other DNA

SEQ ID NO: 69882 - DNA, 120 bp, synthetic construct; identical to SEQ ID NO: 11442
  source 1..120: mol_type = other DNA

SEQ ID NO: 69883 - DNA, 120 bp, synthetic construct; identical to SEQ ID NO: 39929
  source 1..120: mol_type = other DNA

SEQ ID NO: 69884 - DNA, 120 bp, synthetic construct; identical to SEQ ID NO: 39930
  source 1..120: mol_type = other DNA

SEQ ID NO: 69885 - DNA, 120 bp, synthetic construct; identical to SEQ ID NO: 39931
  source 1..120: mol_type = other DNA

SEQ ID NO: 69886 - DNA, 120 bp, synthetic construct; identical to SEQ ID NO: 11443
  source 1..120: mol_type = other DNA

SEQ ID NO: 69887 - DNA, 120 bp, synthetic construct; identical to SEQ ID NO: 39933
  source 1..120: mol_type = other DNA

SEQ ID NO: 69888 - DNA, 120 bp, synthetic construct; identical to SEQ ID NO: 39934
  source 1..120: mol_type = other DNA

SEQ ID NO: 69889 - DNA, 120 bp, synthetic construct; identical to SEQ ID NO: 39935
  source 1..120: mol_type = other DNA

SEQ ID NO: 69890 - DNA, 120 bp, synthetic construct; identical to SEQ ID NO: 11444
  source 1..120: mol_type = other DNA

SEQ ID NO: 69891 - DNA, 120 bp, synthetic construct; identical to SEQ ID NO: 39937
  source 1..120: mol_type = other DNA

SEQ ID NO: 69892 - DNA, 120 bp, synthetic construct; identical to SEQ ID NO: 39938
  source 1..120: mol_type = other DNA

SEQ ID NO: 69893 - DNA, 120 bp, synthetic construct; identical to SEQ ID NO: 11445
  source 1..120: mol_type = other DNA

SEQ ID NO: 69894 - DNA, 120 bp, synthetic construct; identical to SEQ ID NO: 39940
  source 1..120: mol_type = other DNA

SEQ ID NO: 69895 - DNA, 120 bp, synthetic construct; identical to SEQ ID NO: 39941
  source 1..120: mol_type = other DNA

SEQ ID NO: 69896 - DNA, 120 bp, synthetic construct; identical to SEQ ID NO: 39942
  source 1..120: mol_type = other DNA

SEQ ID NO: 69897 - DNA, 120 bp, synthetic construct; identical to SEQ ID NO: 11446
  source 1..120: mol_type = other DNA

SEQ ID NO: 69898 - DNA, 120 bp, synthetic construct; identical to SEQ ID NO: 39944
  source 1..120: mol_type = other DNA

SEQ ID NO: 69899 - DNA, 120 bp, synthetic construct; identical to SEQ ID NO: 39945
  source 1..120: mol_type = other DNA

SEQ ID NO: 69900 - DNA, 120 bp, synthetic construct; identical to SEQ ID NO: 39946
  source 1..120: mol_type = other DNA

SEQ ID NO: 69901 - DNA, 120 bp, synthetic construct; identical to SEQ ID NO: 11447
  source 1..120: mol_type = other DNA

SEQ ID NO: 69902 - DNA, 120 bp, synthetic construct; identical to SEQ ID NO: 39948
  source 1..120: mol_type = other DNA

SEQ ID NO: 69903 - DNA, 120 bp, synthetic construct; identical to SEQ ID NO: 39949
  source 1..120: mol_type = other DNA

SEQ ID NO: 69904 - DNA, 120 bp, synthetic construct; identical to SEQ ID NO: 39950
  source 1..120: mol_type = other DNA

SEQ ID NO: 69905 - DNA, 120 bp, synthetic construct; identical to SEQ ID NO: 11448
  source 1..120: mol_type = other DNA

SEQ ID NO: 69906 - DNA, 120 bp, synthetic construct; identical to SEQ ID NO: 39952
  source 1..120: mol_type = other DNA

SEQ ID NO: 69907 - DNA, 120 bp, synthetic construct; identical to SEQ ID NO: 39953
  source 1..120: mol_type = other DNA

SEQ ID NO: 69908 - DNA, 120 bp, synthetic construct; identical to SEQ ID NO: 11449
  source 1..120: mol_type = other DNA

SEQ ID NO: 69909 - DNA, 120 bp, synthetic construct; identical to SEQ ID NO: 39955
  source 1..120: mol_type = other DNA

SEQ ID NO: 69910 - DNA, 120 bp, synthetic construct; identical to SEQ ID NO: 39956
  source 1..120: mol_type = other DNA

SEQ ID NO: 69911 - DNA, 120 bp, synthetic construct; identical to SEQ ID NO: 39957
  source 1..120: mol_type = other DNA

SEQ ID NO: 69912 - DNA, 120 bp, synthetic construct; identical to SEQ ID NO: 11450
  source 1..120: mol_type = other DNA

SEQ ID NO: 69913 - DNA, 120 bp, synthetic construct; identical to SEQ ID NO: 39959
  source 1..120: mol_type = other DNA

SEQ ID NO: 69914 - DNA, 120 bp, synthetic construct; identical to SEQ ID NO: 39960
  source 1..120: mol_type = other DNA

SEQ ID NO: 69915 - DNA, 120 bp, synthetic construct; identical to SEQ ID NO: 11451
  source 1..120: mol_type = other DNA

SEQ ID NO: 69916 - DNA, 120 bp, synthetic construct; identical to SEQ ID NO: 39962
  source 1..120: mol_type = other DNA

SEQ ID NO: 69917 - DNA, 120 bp, synthetic construct; identical to SEQ ID NO: 39963
  source 1..120: mol_type = other DNA

SEQ ID NO: 69918 - DNA, 120 bp, synthetic construct; identical to SEQ ID NO: 11452
  source 1..120: mol_type = other DNA

SEQ ID NO: 69919 - DNA, 120 bp, synthetic construct; identical to SEQ ID NO: 39965
  source 1..120: mol_type = other DNA

SEQ ID NO: 69920 - DNA, 120 bp, synthetic construct; identical to SEQ ID NO: 39966
  source 1..120: mol_type = other DNA

SEQ ID NO: 69921 - DNA, 120 bp, synthetic construct; identical to SEQ ID NO: 39967
  source 1..120: mol_type = other DNA

SEQ ID NO: 69922 - DNA, 120 bp, synthetic construct; identical to SEQ ID NO: 39968
  source 1..120: mol_type = other DNA

SEQ ID NO: 69923 - DNA, 120 bp, synthetic construct; identical to SEQ ID NO: 11453
  source 1..120: mol_type = other DNA

SEQ ID NO: 69924 - DNA, 120 bp, synthetic construct; identical to SEQ ID NO: 39970
  source 1..120: mol_type = other DNA

SEQ ID NO: 69925 - DNA, 120 bp, synthetic construct; identical to SEQ ID NO: 39971
  source 1..120: mol_type = other DNA

SEQ ID NO: 69926 - DNA, 120 bp, synthetic construct; identical to SEQ ID NO: 39972
  source 1..120: mol_type = other DNA

SEQ ID NO: 69927 - DNA, 120 bp, synthetic construct; identical to SEQ ID NO: 11454
  source 1..120: mol_type = other DNA

SEQ ID NO: 69928 - DNA, 120 bp, synthetic construct; identical to SEQ ID NO: 39974
  source 1..120: mol_type = other DNA

SEQ ID NO: 69929 - DNA, 120 bp, synthetic construct; identical to SEQ ID NO: 39975
  source 1..120: mol_type = other DNA

SEQ ID NO: 69930 - DNA, 120 bp, synthetic construct; identical to SEQ ID NO: 39976
  source 1..120: mol_type = other DNA

SEQ ID NO: 69931 - DNA, 120 bp, synthetic construct; identical to SEQ ID NO: 11455
  source 1..120: mol_type = other DNA

SEQ ID NO: 69932 - DNA, 120 bp, synthetic construct; identical to SEQ ID NO: 39978
  source 1..120: mol_type = other DNA

SEQ ID NO: 69933 - DNA, 120 bp, synthetic construct; identical to SEQ ID NO: 39979
  source 1..120: mol_type = other DNA

SEQ ID NO: 69934 - DNA, 120 bp, synthetic construct; identical to SEQ ID NO: 39980
  source 1..120: mol_type = other DNA

SEQ ID NO: 69935 - DNA, 120 bp, synthetic construct; identical to SEQ ID NO: 11456
  source 1..120: mol_type = other DNA

SEQ ID NO: 69936 - DNA, 120 bp, synthetic construct; identical to SEQ ID NO: 39982
  source 1..120: mol_type = other DNA

SEQ ID NO: 69937 - DNA, 120 bp, synthetic construct; identical to SEQ ID NO: 39983
  source 1..120: mol_type = other DNA

SEQ ID NO: 69938 - DNA, 120 bp, synthetic construct; identical to SEQ ID NO: 39984
  source 1..120: mol_type = other DNA

SEQ ID NO: 69939 - DNA, 120 bp, synthetic construct; identical to SEQ ID NO: 11457
  source 1..120: mol_type = other DNA

SEQ ID NO: 69940 - DNA, 120 bp, synthetic construct; identical to SEQ ID NO: 39986
  source 1..120: mol_type = other DNA

SEQ ID NO: 69941 - DNA, 120 bp, synthetic construct; identical to SEQ ID NO: 39987
  source 1..120: mol_type = other DNA

SEQ ID NO: 69942 - DNA, 120 bp, synthetic construct; identical to SEQ ID NO: 11458
  source 1..120: mol_type = other DNA

SEQ ID NO: 69943 - DNA, 120 bp, synthetic construct; identical to SEQ ID NO: 39989
  source 1..120: mol_type = other DNA

SEQ ID NO: 69944 - DNA, 120 bp, synthetic construct; identical to SEQ ID NO: 39990
  source 1..120: mol_type = other DNA

SEQ ID NO: 69945 - DNA, 120 bp, synthetic construct; identical to SEQ ID NO: 39991
  source 1..120: mol_type = other DNA

SEQ ID NO: 69946 - DNA, 120 bp, synthetic construct; identical to SEQ ID NO: 39992
  source 1..120: mol_type = other DNA

SEQ ID NO: 69947 - DNA, 120 bp, synthetic construct; identical to SEQ ID NO: 4178
  source 1..120: mol_type = other DNA

SEQ ID NO: 69948 - DNA, 120 bp, synthetic construct; identical to SEQ ID NO: 39994
  source 1..120: mol_type = other DNA

SEQ ID NO: 69949 - DNA, 120 bp, synthetic construct; identical to SEQ ID NO: 39995
  source 1..120: mol_type = other DNA

SEQ ID NO: 69950 - DNA, 120 bp, synthetic construct; identical to SEQ ID NO: 39996
  source 1..120: mol_type = other DNA

SEQ ID NO: 69951 - DNA, 120 bp, synthetic construct; identical to SEQ ID NO: 11460
  source 1..120: mol_type = other DNA

SEQ ID NO: 69952 - DNA, 120 bp, synthetic construct; identical to SEQ ID NO: 39998
  source 1..120: mol_type = other DNA

SEQ ID NO: 69953 - DNA, 120 bp, synthetic construct; identical to SEQ ID NO: 39999
  source 1..120: mol_type = other DNA

SEQ ID NO: 69954 - DNA, 120 bp, synthetic construct; identical to SEQ ID NO: 40000
  source 1..120: mol_type = other DNA

SEQ ID NO: 69955 - DNA, 120 bp, synthetic construct; identical to SEQ ID NO: 11461
  source 1..120: mol_type = other DNA

SEQ ID NO: 69956 - DNA, 120 bp, synthetic construct; identical to SEQ ID NO: 40002
  source 1..120: mol_type = other DNA

SEQ ID NO: 69957 - DNA, 120 bp, synthetic construct; identical to SEQ ID NO: 40003
  source 1..120: mol_type = other DNA

SEQ ID NO: 69958 - DNA, 120 bp, synthetic construct; identical to SEQ ID NO: 40004
  source 1..120: mol_type = other DNA

SEQ ID NO: 69959 - DNA, 120 bp, synthetic construct; identical to SEQ ID NO: 11462
  source 1..120: mol_type = other DNA

SEQ ID NO: 69960 - DNA, 120 bp, synthetic construct; identical to SEQ ID NO: 40006
  source 1..120: mol_type = other DNA

SEQ ID NO: 69961 - DNA, 120 bp, synthetic construct; identical to SEQ ID NO: 40007
  source 1..120: mol_type = other DNA

SEQ ID NO: 69962 - DNA, 120 bp, synthetic construct; identical to SEQ ID NO: 40008
  source 1..120: mol_type = other DNA

SEQ ID NO: 69963 - DNA, 120 bp, synthetic construct; identical to SEQ ID NO: 11463
  source 1..120: mol_type = other DNA

SEQ ID NO: 69964 - DNA, 120 bp, synthetic construct; identical to SEQ ID NO: 40010
  source 1..120: mol_type = other DNA

SEQ ID NO: 69965 - DNA, 120 bp, synthetic construct; identical to SEQ ID NO: 40011
  source 1..120: mol_type = other DNA

SEQ ID NO: 69966 - DNA, 120 bp, synthetic construct; identical to SEQ ID NO: 40012
  source 1..120: mol_type = other DNA

SEQ ID NO: 69967 - DNA, 120 bp, synthetic construct; identical to SEQ ID NO: 11464
  source 1..120: mol_type = other DNA

SEQ ID NO: 69968 - DNA, 120 bp, synthetic construct; identical to SEQ ID NO: 40014
  source 1..120: mol_type = other DNA

SEQ ID NO: 69969 - DNA, 120 bp, synthetic construct; identical to SEQ ID NO: 40015
  source 1..120: mol_type = other DNA

SEQ ID NO: 69970 - DNA, 120 bp, synthetic construct; identical to SEQ ID NO: 40016
  source 1..120: mol_type = other DNA

SEQ ID NO: 69971 - DNA, 120 bp, synthetic construct; identical to SEQ ID NO: 11465
  source 1..120: mol_type = other DNA

SEQ ID NO: 69972 - DNA, 120 bp, synthetic construct; identical to SEQ ID NO: 40018
  source 1..120: mol_type = other DNA

SEQ ID NO: 69973 - DNA, 120 bp, synthetic construct; identical to SEQ ID NO: 40019
  source 1..120: mol_type = other DNA

SEQ ID NO: 69974 - DNA, 120 bp, synthetic construct; identical to SEQ ID NO: 11466
  source 1..120: mol_type = other DNA

SEQ ID NO: 69975 - DNA, 120 bp, synthetic construct; identical to SEQ ID NO: 40021
  source 1..120: mol_type = other DNA

SEQ ID NO: 69976 - DNA, 120 bp, synthetic construct; identical to SEQ ID NO: 40022
  source 1..120: mol_type = other DNA

SEQ ID NO: 69977 - DNA, 120 bp, synthetic construct; identical to SEQ ID NO: 40023
  source 1..120: mol_type = other DNA

SEQ ID NO: 69978 - DNA, 120 bp, synthetic construct; identical to SEQ ID NO: 11467
  source 1..120: mol_type = other DNA

SEQ ID NO: 69979 - DNA, 120 bp, synthetic construct; identical to SEQ ID NO: 40025
  source 1..120: mol_type = other DNA

SEQ ID NO: 69980 - DNA, 120 bp, synthetic construct; identical to SEQ ID NO: 40026
  source 1..120: mol_type = other DNA

SEQ ID NO: 69981 - DNA, 120 bp, synthetic construct; identical to SEQ ID NO: 40027
  source 1..120: mol_type = other DNA

SEQ ID NO: 69982 - DNA, 120 bp, synthetic construct; identical to SEQ ID NO: 40028
  source 1..120: mol_type = other DNA

SEQ ID NO: 69983 - DNA, 120 bp, synthetic construct; identical to SEQ ID NO: 11468
  source 1..120: mol_type = other DNA

SEQ ID NO: 69984 - DNA, 120 bp, synthetic construct; identical to SEQ ID NO: 40030
  source 1..120: mol_type = other DNA

SEQ ID NO: 69985 - DNA, 120 bp, synthetic construct; identical to SEQ ID NO: 40031
  source 1..120: mol_type = other DNA

SEQ ID NO: 69986 - DNA, 120 bp, synthetic construct; identical to SEQ ID NO: 11469
  source 1..120: mol_type = other DNA

SEQ ID NO: 69987 - DNA, 120 bp, synthetic construct; identical to SEQ ID NO: 40033
  source 1..120: mol_type = other DNA

SEQ ID NO: 69988 - DNA, 120 bp, synthetic construct; identical to SEQ ID NO: 40034
  source 1..120: mol_type = other DNA

SEQ ID NO: 69989 - DNA, 120 bp, synthetic construct; identical to SEQ ID NO: 40035
  source 1..120: mol_type = other DNA

SEQ ID NO: 69990 - DNA, 120 bp, synthetic construct; identical to SEQ ID NO: 40036
  source 1..120: mol_type = other DNA

SEQ ID NO: 69991 - DNA, 120 bp, synthetic construct; identical to SEQ ID NO: 11470
  source 1..120: mol_type = other DNA

SEQ ID NO: 69992 - DNA, 120 bp, synthetic construct; identical to SEQ ID NO: 40038
  source 1..120: mol_type = other DNA

SEQ ID NO: 69993 - DNA, 120 bp, synthetic construct; identical to SEQ ID NO: 40039
  source 1..120: mol_type = other DNA

SEQ ID NO: 69994 - DNA, 120 bp, synthetic construct; identical to SEQ ID NO: 11471
  source 1..120: mol_type = other DNA

SEQ ID NO: 69995 - DNA, 120 bp, synthetic construct; identical to SEQ ID NO: 40041
  source 1..120: mol_type = other DNA

SEQ ID NO: 69996 - DNA, 120 bp, synthetic construct; identical to SEQ ID NO: 40042
  source 1..120: mol_type = other DNA

SEQ ID NO: 69997 - DNA, 120 bp, synthetic construct; identical to SEQ ID NO: 40043
  source 1..120: mol_type = other DNA

SEQ ID NO: 69998 - DNA, 120 bp, synthetic construct; identical to SEQ ID NO: 40044
  source 1..120: mol_type = other DNA

SEQ ID NO: 69999 - DNA, 120 bp, synthetic construct; identical to SEQ ID NO: 11472
  source 1..120: mol_type = other DNA

SEQ ID NO: 70000 - DNA, 120 bp, synthetic construct; identical to SEQ ID NO: 40046
  source 1..120: mol_type = other DNA

SEQ ID NO: 70001 - DNA, 120 bp, synthetic construct; identical to SEQ ID NO: 40047
  source 1..120: mol_type = other DNA

SEQ ID NO: 70002 - DNA, 120 bp, synthetic construct; identical to SEQ ID NO: 40048
  source 1..120: mol_type = other DNA

SEQ ID NO: 70003 - DNA, 120 bp, synthetic construct; identical to SEQ ID NO: 11473
  source 1..120: mol_type = other DNA

SEQ ID NO: 70004 - DNA, 120 bp, synthetic construct; identical to SEQ ID NO: 40050
  source 1..120: mol_type = other DNA

SEQ ID NO: 70005 - DNA, 120 bp, synthetic construct; identical to SEQ ID NO: 40051
  source 1..120: mol_type = other DNA

SEQ ID NO: 70006 - DNA, 120 bp, synthetic construct; identical to SEQ ID NO: 11474
  source 1..120: mol_type = other DNA

SEQ ID NO: 70007 - DNA, 120 bp, synthetic construct; identical to SEQ ID NO: 40053
  source 1..120: mol_type = other DNA

SEQ ID NO: 70008 - DNA, 120 bp, synthetic construct; identical to SEQ ID NO: 40054
  source 1..120: mol_type = other DNA

SEQ ID NO: 70009 - DNA, 120 bp, synthetic construct; identical to SEQ ID NO: 40055
  source 1..120: mol_type = other DNA

SEQ ID NO: 70010 - DNA, 120 bp, synthetic construct; identical to SEQ ID NO: 11475
  source 1..120: mol_type = other DNA

SEQ ID NO: 70011 - DNA, 120 bp, synthetic construct; identical to SEQ ID NO: 40057
  source 1..120: mol_type = other DNA

SEQ ID NO: 70012 - DNA, 120 bp, synthetic construct; identical to SEQ ID NO: 40058
  source 1..120: mol_type = other DNA

SEQ ID NO: 70013 - DNA, 120 bp, synthetic construct; identical to SEQ ID NO: 40059
  source 1..120: mol_type = other DNA

SEQ ID NO: 70014 - DNA, 120 bp, synthetic construct; identical to SEQ ID NO: 40060
  source 1..120: mol_type = other DNA

SEQ ID NO: 70015 - DNA, 120 bp, synthetic construct; identical to SEQ ID NO: 11476
  source 1..120: mol_type = other DNA

SEQ ID NO: 70016 - DNA, 120 bp, synthetic construct; identical to SEQ ID NO: 40062
  source 1..120: mol_type = other DNA

SEQ ID NO: 70017 - DNA, 120 bp, synthetic construct; identical to SEQ ID NO: 40063
  source 1..120: mol_type = other DNA

SEQ ID NO: 70018 - DNA, 120 bp, synthetic construct; identical to SEQ ID NO: 40064
  source 1..120: mol_type = other DNA

SEQ ID NO: 70019 - DNA, 120 bp, synthetic construct; identical to SEQ ID NO: 11477
  source 1..120: mol_type = other DNA

SEQ ID NO: 70020 - DNA, 120 bp, synthetic construct; identical to SEQ ID NO: 40066
  source 1..120: mol_type = other DNA

SEQ ID NO: 70021 - DNA, 120 bp, synthetic construct; identical to SEQ ID NO: 40067
  source 1..120: mol_type = other DNA

SEQ ID NO: 70022 - DNA, 120 bp, synthetic construct; identical to SEQ ID NO: 40068
  source 1..120: mol_type = other DNA

SEQ ID NO: 70023 - DNA, 120 bp, synthetic construct; identical to SEQ ID NO: 11478
  source 1..120: mol_type = other DNA

SEQ ID NO: 70024 - DNA, 120 bp, synthetic construct; identical to SEQ ID NO: 40070
  source 1..120: mol_type = other DNA

SEQ ID NO: 70025 - DNA, 120 bp, synthetic construct; identical to SEQ ID NO: 40071
  source 1..120: mol_type = other DNA

SEQ ID NO: 70026 - DNA, 120 bp, synthetic construct; identical to SEQ ID NO: 11479
  source 1..120: mol_type = other DNA

SEQ ID NO: 70027 - DNA, 120 bp, synthetic construct; identical to SEQ ID NO: 40073
  source 1..120: mol_type = other DNA

SEQ ID NO: 70028 - DNA, 120 bp, synthetic construct; identical to SEQ ID NO: 40074
  source 1..120: mol_type = other DNA

SEQ ID NO: 70029 - DNA, 120 bp, synthetic construct; identical to SEQ ID NO: 40075
  source 1..120: mol_type = other DNA

SEQ ID NO: 70030 - DNA, 120 bp, synthetic construct; identical to SEQ ID NO: 40076
  source 1..120: mol_type = other DNA

SEQ ID NO: 70031 - DNA, 120 bp, synthetic construct; identical to SEQ ID NO: 11480
  source 1..120: mol_type = other DNA

SEQ ID NO: 70032 - DNA, 120 bp, synthetic construct; identical to SEQ ID NO: 40078
  source 1..120: mol_type = other DNA

SEQ ID NO: 70033 - DNA, 120 bp, synthetic construct; identical to SEQ ID NO: 40079
  source 1..120: mol_type = other DNA

SEQ ID NO: 70034 - DNA, 120 bp, synthetic construct; identical to SEQ ID NO: 40080
  source 1..120: mol_type = other DNA

SEQ ID NO: 70035 - DNA, 120 bp, synthetic construct; identical to SEQ ID NO: 11481
  source 1..120: mol_type = other DNA

SEQ ID NO: 70036 - DNA, 120 bp, synthetic construct; identical to SEQ ID NO: 40082
  source 1..120: mol_type = other DNA

SEQ ID NO: 70037 - DNA, 120 bp, synthetic construct; identical to SEQ ID NO: 40083
  source 1..120: mol_type = other DNA

SEQ ID NO: 70038 - DNA, 120 bp, synthetic construct; identical to SEQ ID NO: 40084
  source 1..120: mol_type = other DNA

SEQ ID NO: 70039 - DNA, 120 bp, synthetic construct; identical to SEQ ID NO: 11482
  source 1..120: mol_type = other DNA

SEQ ID NO: 70040 - DNA, 120 bp, synthetic construct; identical to SEQ ID NO: 40086
  source 1..120: mol_type = other DNA

SEQ ID NO: 70041 - DNA, 120 bp, synthetic construct; identical to SEQ ID NO: 40087
  source 1..120: mol_type = other DNA

SEQ ID NO: 70042 - DNA, 120 bp, synthetic construct; identical to SEQ ID NO: 4200
  source 1..120: mol_type = other DNA

SEQ ID NO: 70043 - DNA, 120 bp, synthetic construct; identical to SEQ ID NO: 40089
  source 1..120: mol_type = other DNA

SEQ ID NO: 70044 - DNA, 120 bp, synthetic construct; identical to SEQ ID NO: 40090
  source 1..120: mol_type = other DNA

SEQ ID NO: 70045 - DNA, 120 bp, synthetic construct; identical to SEQ ID NO: 11484
  source 1..120: mol_type = other DNA

SEQ ID NO: 70046 - DNA, 120 bp, synthetic construct; identical to SEQ ID NO: 40092
  source 1..120: mol_type = other DNA

SEQ ID NO: 70047 - DNA, 120 bp, synthetic construct; identical to SEQ ID NO: 40093
  source 1..120: mol_type = other DNA

SEQ ID NO: 70048 - DNA, 120 bp, synthetic construct; identical to SEQ ID NO: 40094
  source 1..120: mol_type = other DNA

SEQ ID NO: 70049 - DNA, 120 bp, synthetic construct; identical to SEQ ID NO: 40095
  source 1..120: mol_type = other DNA

SEQ ID NO: 70050 - DNA, 120 bp, synthetic construct; identical to SEQ ID NO: 11485
  source 1..120: mol_type = other DNA

SEQ ID NO: 70051 - DNA, 120 bp, synthetic construct; identical to SEQ ID NO: 40097
  source 1..120: mol_type = other DNA

SEQ ID NO: 70052 - DNA, 120 bp, synthetic construct; identical to SEQ ID NO: 40098
  source 1..120: mol_type = other DNA

SEQ ID NO: 70053 - DNA, 120 bp, synthetic construct; identical to SEQ ID NO: 11486
  source 1..120: mol_type = other DNA

SEQ ID NO: 70054 - DNA, 120 bp, synthetic construct; identical to SEQ ID NO: 40100
  source 1..120: mol_type = other DNA

SEQ ID NO: 70055 - DNA, 120 bp, synthetic construct; identical to SEQ ID NO: 40101
  source 1..120: mol_type = other DNA

SEQ ID NO: 70056 - DNA, 120 bp, synthetic construct; identical to SEQ ID NO: 40102
  source 1..120: mol_type = other DNA

SEQ ID NO: 70057 - DNA, 120 bp, synthetic construct; identical to SEQ ID NO: 40103
  source 1..120: mol_type = other DNA

SEQ ID NO: 70058 - DNA, 120 bp, synthetic construct; identical to SEQ ID NO: 11487
  source 1..120: mol_type = other DNA

SEQ ID NO: 70059 - DNA, 120 bp, synthetic construct; identical to SEQ ID NO: 4204
  source 1..120: mol_type = other DNA

SEQ ID NO: 70060 - DNA, 120 bp, synthetic construct; identical to SEQ ID NO: 40106
  source 1..120: mol_type = other DNA

SEQ ID NO: 70061 - DNA, 120 bp, synthetic construct; identical to SEQ ID NO: 40107
  source 1..120: mol_type = other DNA

SEQ ID NO: 70062 - DNA, 120 bp, synthetic construct; identical to SEQ ID NO: 11488
  source 1..120: mol_type = other DNA

SEQ ID NO: 70063 - DNA, 120 bp, synthetic construct; identical to SEQ ID NO: 40109
  source 1..120: mol_type = other DNA

SEQ ID NO: 70064 - DNA, 120 bp, synthetic construct; identical to SEQ ID NO: 40110
  source 1..120: mol_type = other DNA

SEQ ID NO: 70065 - DNA, 120 bp, synthetic construct; identical to SEQ ID NO: 40111
  source 1..120: mol_type = other DNA

SEQ ID NO: 70066 - DNA, 120 bp, synthetic construct; identical to SEQ ID NO: 11489
  source 1..120: mol_type = other DNA

SEQ ID NO: 70067 - DNA, 120 bp, synthetic construct; identical to SEQ ID NO: 4206
  source 1..120: mol_type = other DNA

SEQ ID NO: 70068 - DNA, 120 bp, synthetic construct; identical to SEQ ID NO: 40114
  source 1..120: mol_type = other DNA

SEQ ID NO: 70069 - DNA, 120 bp, synthetic construct; identical to SEQ ID NO: 40115
  source 1..120: mol_type = other DNA

SEQ ID NO: 70070 - DNA, 120 bp, synthetic construct; identical to SEQ ID NO: 11490
  source 1..120: mol_type = other DNA

SEQ ID NO: 70071 - DNA, 120 bp, synthetic construct; identical to SEQ ID NO: 40117
  source 1..120: mol_type = other DNA

SEQ ID NO: 70072 - DNA, 120 bp, synthetic construct; identical to SEQ ID NO: 40118
  source 1..120: mol_type = other DNA

SEQ ID NO: 70073 - DNA, 120 bp, synthetic construct; identical to SEQ ID NO: 11491
  source 1..120: mol_type = other DNA

SEQ ID NO: 70074 - DNA, 120 bp, synthetic construct; identical to SEQ ID NO: 40120
  source 1..120: mol_type = other DNA

SEQ ID NO: 70075 - DNA, 120 bp, synthetic construct; identical to SEQ ID NO: 40121
  source 1..120: mol_type = other DNA

SEQ ID NO: 70076 - DNA, 120 bp, synthetic construct; identical to SEQ ID NO: 40122
  source 1..120: mol_type = other DNA

SEQ ID NO: 70077 - DNA, 120 bp, synthetic construct; identical to SEQ ID NO: 40123
  source 1..120: mol_type = other DNA

SEQ ID NO: 70078 - DNA, 120 bp, synthetic construct; identical to SEQ ID NO: 11492
  source 1..120: mol_type = other DNA

SEQ ID NO: 70079 - DNA, 120 bp, synthetic construct; identical to SEQ ID NO: 40125
  source 1..120: mol_type = other DNA

SEQ ID NO: 70080 - DNA, 120 bp, synthetic construct; identical to SEQ ID NO: 40126
  source 1..120: mol_type = other DNA

SEQ ID NO: 70081 - DNA, 120 bp, synthetic construct; identical to SEQ ID NO: 11493
  source 1..120: mol_type = other DNA

SEQ ID NO: 70082 - DNA, 120 bp, synthetic construct; identical to SEQ ID NO: 40128
  source 1..120: mol_type = other DNA

SEQ ID NO: 70083 - DNA, 120 bp, synthetic construct; identical to SEQ ID NO: 40129
  source 1..120: mol_type = other DNA

SEQ ID NO: 70084 - DNA, 120 bp, synthetic construct; identical to SEQ ID NO: 40130
  source 1..120: mol_type = other DNA

SEQ ID NO: 70085 - DNA, 120 bp, synthetic construct; identical to SEQ ID NO: 40131
  source 1..120: mol_type = other DNA

SEQ ID NO: 70086 - DNA, 120 bp, synthetic construct; identical to SEQ ID NO: 11494
  source 1..120: mol_type = other DNA

SEQ ID NO: 70087 - DNA, 120 bp, synthetic construct; identical to SEQ ID NO: 40133
  source 1..120: mol_type = other DNA

SEQ ID NO: 70088 - DNA, 120 bp, synthetic construct; identical to SEQ ID NO: 40134
  source 1..120: mol_type = other DNA

SEQ ID NO: 70089 - DNA, 120 bp, synthetic construct; identical to SEQ ID NO: 11495
  source 1..120: mol_type = other DNA

SEQ ID NO: 70090 - DNA, 120 bp, synthetic construct; identical to SEQ ID NO: 40136
  source 1..120: mol_type = other DNA

SEQ ID NO: 70091 - DNA, 120 bp, synthetic construct; identical to SEQ ID NO: 40137
  source 1..120: mol_type = other DNA

SEQ ID NO: 70092 - DNA, 120 bp, synthetic construct; identical to SEQ ID NO: 40138
  source 1..120: mol_type = other DNA

SEQ ID NO: 70093 - DNA, 120 bp, synthetic construct; identical to SEQ ID NO: 11496
  source 1..120: mol_type = other DNA

SEQ ID NO: 70094 - DNA, 120 bp, synthetic construct; identical to SEQ ID NO: 40140
  source 1..120: mol_type = other DNA

SEQ ID NO: 70095 - DNA, 120 bp, synthetic construct; identical to SEQ ID NO: 40141
  source 1..120: mol_type = other DNA

SEQ ID NO: 70096 - DNA, 120 bp, synthetic construct; identical to SEQ ID NO: 40142
  source 1..120: mol_type = other DNA

SEQ ID NO: 70097 - DNA, 120 bp, synthetic construct; identical to SEQ ID NO: 11497
  source 1..120: mol_type = other DNA

SEQ ID NO: 70098 - DNA, 120 bp, synthetic construct; identical to SEQ ID NO: 40144
  source 1..120: mol_type = other DNA

SEQ ID NO: 70099 - DNA, 120 bp, synthetic construct; identical to SEQ ID NO: 40145
  source 1..120: mol_type = other DNA

SEQ ID NO: 70100 - DNA, 120 bp, synthetic construct; identical to SEQ ID NO: 40146
  source 1..120: mol_type = other DNA

SEQ ID NO: 70101 - DNA, 120 bp, synthetic construct; identical to SEQ ID NO: 11498
  source 1..120: mol_type = other DNA

SEQ ID NO: 70102 - DNA, 120 bp, synthetic construct; identical to SEQ ID NO: 40148
  source 1..120: mol_type = other DNA

SEQ ID NO: 70103 - DNA, 120 bp, synthetic construct; identical to SEQ ID NO: 40149
  source 1..120: mol_type = other DNA

SEQ ID NO: 70104 - DNA, 120 bp, synthetic construct; identical to SEQ ID NO: 40150
  source 1..120: mol_type = other DNA

SEQ ID NO: 70105 - DNA, 120 bp, synthetic construct; identical to SEQ ID NO: 40151
  source 1..120: mol_type = other DNA

SEQ ID NO: 70106 - DNA, 120 bp, synthetic construct; identical to SEQ ID NO: 11499
  source 1..120: mol_type = other DNA

SEQ ID NO: 70107 - DNA, 120 bp, synthetic construct; identical to SEQ ID NO: 40153
  source 1..120: mol_type = other DNA

SEQ ID NO: 70108 - DNA, 120 bp, synthetic construct; identical to SEQ ID NO: 40154
  source 1..120: mol_type = other DNA

SEQ ID NO: 70109 - DNA, 120 bp, synthetic construct; identical to SEQ ID NO: 11500
  source 1..120: mol_type = other DNA

SEQ ID NO: 70110 - DNA, 120 bp, synthetic construct; identical to SEQ ID NO: 40156
  source 1..120: mol_type = other DNA

SEQ ID NO: 70111 - DNA, 120 bp, synthetic construct; identical to SEQ ID NO: 40157
  source 1..120: mol_type = other DNA

SEQ ID NO: 70112 - DNA, 120 bp, synthetic construct; identical to SEQ ID NO: 40158
  source 1..120: mol_type = other DNA

SEQ ID NO: 70113 - DNA, 120 bp, synthetic construct; identical to SEQ ID NO: 40159
  source 1..120: mol_type = other DNA

SEQ ID NO: 70114 - DNA, 120 bp, synthetic construct; identical to SEQ ID NO: 11501
  source 1..120: mol_type = other DNA

SEQ ID NO: 70115 - DNA, 120 bp, synthetic construct; identical to SEQ ID NO: 40161
  source 1..120: mol_type = other DNA

SEQ ID NO: 70116 - DNA, 120 bp, synthetic construct; identical to SEQ ID NO: 40162
  source 1..120: mol_type = other DNA

SEQ ID NO: 70117 - DNA, 120 bp, synthetic construct; identical to SEQ ID NO: 40163
  source 1..120: mol_type = other DNA

SEQ ID NO: 70118 - DNA, 120 bp, synthetic construct; identical to SEQ ID NO: 11502
  source 1..120: mol_type = other DNA

SEQ ID NO: 70119 - DNA, 120 bp, synthetic construct; identical to SEQ ID NO: 40165
  source 1..120: mol_type = other DNA

SEQ ID NO: 70120 - DNA, 120 bp, synthetic construct; identical to SEQ ID NO: 40166
  source 1..120: mol_type = other DNA

SEQ ID NO: 70121 - DNA, 120 bp, synthetic construct; identical to SEQ ID NO: 11503
  source 1..120: mol_type = other DNA

SEQ ID NO: 70122 - DNA, 120 bp, synthetic construct; identical to SEQ ID NO: 40168
  source 1..120: mol_type = other DNA

SEQ ID NO: 70123 - DNA, 120 bp, synthetic construct; identical to SEQ ID NO: 40169
  source 1..120: mol_type = other DNA

SEQ ID NO: 70124 - DNA, 120 bp, synthetic construct; identical to SEQ ID NO: 40170
  source 1..120: mol_type = other DNA

SEQ ID NO: 70125 - DNA, 120 bp, synthetic construct; identical to SEQ ID NO: 11504
  source 1..120: mol_type = other DNA

SEQ ID NO: 70126 - DNA, 120 bp, synthetic construct; identical to SEQ ID NO: 40172
  source 1..120: mol_type = other DNA

SEQ ID NO: 70127 - DNA, 120 bp, synthetic construct; identical to SEQ ID NO: 40173
  source 1..120: mol_type = other DNA

SEQ ID NO: 70128 - DNA, 120 bp, synthetic construct; identical to SEQ ID NO: 40174
  source 1..120: mol_type = other DNA

SEQ ID NO: 70129 - DNA, 120 bp, synthetic construct; identical to SEQ ID NO: 11505
  source 1..120: mol_type = other DNA

SEQ ID NO: 70130 - DNA, 120 bp, synthetic construct; identical to SEQ ID NO: 40176
  source 1..120: mol_type = other DNA

SEQ ID NO: 70131 - DNA, 120 bp, synthetic construct; identical to SEQ ID NO: 40177
  source 1..120: mol_type = other DNA

SEQ ID NO: 70132 - DNA, 120 bp, synthetic construct; identical to SEQ ID NO: 40178
  source 1..120: mol_type = other DNA

SEQ ID NO: 70133 - DNA, 120 bp, synthetic construct; identical to SEQ ID NO: 40179
  source 1..120: mol_type = other DNA

SEQ ID NO: 70134 - DNA, 120 bp, synthetic construct; identical to SEQ ID NO: 11506
  source 1..120: mol_type = other DNA

SEQ ID NO: 70135 - DNA, 120 bp, synthetic construct; identical to SEQ ID NO: 40181
  source 1..120: mol_type = other DNA

SEQ ID NO: 70136 - DNA, 120 bp, synthetic construct; identical to SEQ ID NO: 40182
  source 1..120: mol_type = other DNA

SEQ ID NO: 70137 - DNA, 120 bp, synthetic construct; identical to SEQ ID NO: 11507
  source 1..120: mol_type = other DNA

SEQ ID NO: 70138 - DNA, 120 bp, synthetic construct; identical to SEQ ID NO: 40184
  source 1..120: mol_type = other DNA

SEQ ID NO: 70139 - DNA, 120 bp, synthetic construct; identical to SEQ ID NO: 40185
  source 1..120: mol_type = other DNA

SEQ ID NO: 70140 - DNA, 120 bp, synthetic construct; identical to SEQ ID NO: 40186
  source 1..120: mol_type = other DNA

SEQ ID NO: 70141 - DNA, 120 bp, synthetic construct; identical to SEQ ID NO: 40187
  source 1..120: mol_type = other DNA

SEQ ID NO: 70142 - DNA, 120 bp, synthetic construct; identical to SEQ ID NO: 11508
  source 1..120: mol_type = other DNA

SEQ ID NO: 70143 - DNA, 120 bp, synthetic construct; identical to SEQ ID NO: 40189
  source 1..120: mol_type = other DNA

SEQ ID NO: 70144 - DNA, 120 bp, synthetic construct; identical to SEQ ID NO: 40190
  source 1..120: mol_type = other DNA

SEQ ID NO: 70145 - DNA, 120 bp, synthetic construct; identical to SEQ ID NO: 11509
  source 1..120: mol_type = other DNA

SEQ ID NO: 70146 - DNA, 120 bp, synthetic construct; identical to SEQ ID NO: 40192
  source 1..120: mol_type = other DNA

SEQ ID NO: 70147 - DNA, 120 bp, synthetic construct; identical to SEQ ID NO: 40193
  source 1..120: mol_type = other DNA

SEQ ID NO: 70148 - DNA, 120 bp, synthetic construct; identical to SEQ ID NO: 40194
  source 1..120: mol_type = other DNA

SEQ ID NO: 70149 - DNA, 120 bp, synthetic construct; identical to SEQ ID NO: 11510
  source 1..120: mol_type = other DNA

SEQ ID NO: 70150 - DNA, 120 bp, synthetic construct; identical to SEQ ID NO: 40196
  source 1..120: mol_type = other DNA

SEQ ID NO: 70151 - DNA, 120 bp, synthetic construct; identical to SEQ ID NO: 40197
  source 1..120: mol_type = other DNA

SEQ ID NO: 70152 - DNA, 120 bp, synthetic construct; identical to SEQ ID NO: 40198
  source 1..120: mol_type = other DNA

SEQ ID NO: 70153 - DNA, 120 bp, synthetic construct; identical to SEQ ID NO: 40199
  source 1..120: mol_type = other DNA

SEQ ID NO: 70154 - DNA, 120 bp, synthetic construct; identical to SEQ ID NO: 11511
  source 1..120: mol_type = other DNA

SEQ ID NO: 70155 - DNA, 120 bp, synthetic construct; identical to SEQ ID NO: 40201
  source 1..120: mol_type = other DNA

SEQ ID NO: 70156 - DNA, 120 bp, synthetic construct; identical to SEQ ID NO: 40202
  source 1..120: mol_type = other DNA

SEQ ID NO: 70157 - DNA, 120 bp, synthetic construct; identical to SEQ ID NO: 11512
  source 1..120: mol_type = other DNA

SEQ ID NO: 70158 - DNA, 120 bp, synthetic construct; identical to SEQ ID NO: 40204
  source 1..120: mol_type = other DNA

SEQ ID NO: 70159 - DNA, 120 bp, synthetic construct; identical to SEQ ID NO: 40205
  source 1..120: mol_type = other DNA

SEQ ID NO: 70160 - DNA, 120 bp, synthetic construct; identical to SEQ ID NO: 40206
  source 1..120: mol_type = other DNA

SEQ ID NO: 70161 - DNA, 120 bp, synthetic construct; identical to SEQ ID NO: 40207
  source 1..120: mol_type = other DNA

SEQ ID NO: 70162 - DNA, 120 bp, synthetic construct; identical to SEQ ID NO: 11513
  source 1..120: mol_type = other DNA

SEQ ID NO: 70163 - DNA, 120 bp, synthetic construct; identical to SEQ ID NO: 40209
  source 1..120: mol_type = other DNA

SEQ ID NO: 70164 - DNA, 120 bp, synthetic construct; identical to SEQ ID NO: 40210
  source 1..120: mol_type = other DNA

SEQ ID NO: 70165 - DNA, 120 bp, synthetic construct; identical to SEQ ID NO: 40211
  source 1..120: mol_type = other DNA

SEQ ID NO: 70166 - DNA, 120 bp, synthetic construct; identical to SEQ ID NO: 11514
  source 1..120: mol_type = other DNA

SEQ ID NO: 70167 - DNA, 120 bp, synthetic construct; identical to SEQ ID NO: 40213
  source 1..120: mol_type = other DNA

SEQ ID NO: 70168 - DNA, 120 bp, synthetic construct; identical to SEQ ID NO: 40214
  source 1..120: mol_type = other DNA

SEQ ID NO: 70169 - DNA, 120 bp, synthetic construct; identical to SEQ ID NO: 40215
  source 1..120: mol_type = other DNA

SEQ ID NO: 70170 - DNA, 120 bp, synthetic construct; identical to SEQ ID NO: 11515
  source 1..120: mol_type = other DNA

SEQ ID NO: 70171 - DNA, 120 bp, synthetic construct; identical to SEQ ID NO: 40217
  source 1..120: mol_type = other DNA

SEQ ID NO: 70172 - DNA, 120 bp, synthetic construct; identical to SEQ ID NO: 40218
  source 1..120: mol_type = other DNA

SEQ ID NO: 70173 - DNA, 120 bp, synthetic construct; identical to SEQ ID NO: 11516
  source 1..120: mol_type = other DNA

SEQ ID NO: 70174 - DNA, 120 bp, synthetic construct; identical to SEQ ID NO: 40220
  source 1..120: mol_type = other DNA

SEQ ID NO: 70175 - DNA, 120 bp, synthetic construct; identical to SEQ ID NO: 40221
  source 1..120: mol_type = other DNA

SEQ ID NO: 70176 - DNA, 120 bp, synthetic construct; identical to SEQ ID NO: 40222
  source 1..120: mol_type = other DNA

SEQ ID NO: 70177 - DNA, 120 bp, synthetic construct; identical to SEQ ID NO: 40223
  source 1..120: mol_type = other DNA

SEQ ID NO: 70178 - DNA, 120 bp, synthetic construct; identical to SEQ ID NO: 11517
  source 1..120: mol_type = other DNA

SEQ ID NO: 70179 - DNA, 120 bp, synthetic construct; identical to SEQ ID NO: 40225
  source 1..120: mol_type = other DNA

SEQ ID NO: 70180 - DNA, 120 bp, synthetic construct; identical to SEQ ID NO: 40226
  source 1..120: mol_type = other DNA

SEQ ID NO: 70181 - DNA, 120 bp, synthetic construct; identical to SEQ ID NO: 40227
  source 1..120: mol_type = other DNA

SEQ ID NO: 70182 - DNA, 120 bp, synthetic construct; identical to SEQ ID NO: 11518
  source 1..120: mol_type = other DNA

SEQ ID NO: 70183 - DNA, 120 bp, synthetic construct; identical to SEQ ID NO: 40229
  source 1..120: mol_type = other DNA

SEQ ID NO: 70184 - DNA, 120 bp, synthetic construct; identical to SEQ ID NO: 40230
  source 1..120: mol_type = other DNA

SEQ ID NO: 70185 - DNA, 120 bp, synthetic construct; identical to SEQ ID NO: 11519
  source 1..120: mol_type = other DNA

SEQ ID NO: 70186 - DNA, 120 bp, synthetic construct; identical to SEQ ID NO: 40232
  source 1..120: mol_type = other DNA

SEQ ID NO: 70187 - DNA, 120 bp, synthetic construct; identical to SEQ ID NO: 40233
  source 1..120: mol_type = other DNA

SEQ ID NO: 70188 - DNA, 120 bp, synthetic construct; identical to SEQ ID NO: 40234
  source 1..120: mol_type = other DNA

SEQ ID NO: 70189 - DNA, 120 bp, synthetic construct; identical to SEQ ID NO: 40235
  source 1..120: mol_type = other DNA

SEQ ID NO: 70190 - DNA, 120 bp, synthetic construct; identical to SEQ ID NO: 11520
  source 1..120: mol_type = other DNA

SEQ ID NO: 70191 - DNA, 120 bp, synthetic construct; identical to SEQ ID NO: 4234
  source 1..120: mol_type = other DNA

SEQ ID NO: 70192 - DNA, 120 bp, synthetic construct; identical to SEQ ID NO: 40238
  source 1..120: mol_type = other DNA

SEQ ID NO: 70193 - DNA, 120 bp, synthetic construct; identical to SEQ ID NO: 11521
  source 1..120: mol_type = other DNA

SEQ ID NO: 70194 - DNA, 120 bp, synthetic construct; identical to SEQ ID NO: 40240
  source 1..120: mol_type = other DNA

SEQ ID NO: 70195 - DNA, 120 bp, synthetic construct; identical to SEQ ID NO: 40241
  source 1..120: mol_type = other DNA

SEQ ID NO: 70196 - DNA, 120 bp, synthetic construct; identical to SEQ ID NO: 40242
  source 1..120: mol_type = other DNA

SEQ ID NO: 70197 - DNA, 120 bp, synthetic construct; identical to SEQ ID NO: 11522
  source 1..120: mol_type = other DNA

SEQ ID NO: 70198 - DNA, 120 bp, synthetic construct; identical to SEQ ID NO: 40244
  source 1..120: mol_type = other DNA

SEQ ID NO: 70199 - DNA, 120 bp, synthetic construct; identical to SEQ ID NO: 40245
  source 1..120: mol_type = other DNA

SEQ ID NO: 70200 - DNA, 120 bp, synthetic construct; identical to SEQ ID NO: 40246
  source 1..120: mol_type = other DNA

SEQ ID NO: 70201 - DNA, 120 bp, synthetic construct; identical to SEQ ID NO: 11523
  source 1..120: mol_type = other DNA

SEQ ID NO: 70202 - DNA, 120 bp, synthetic construct; identical to SEQ ID NO: 40248
  source 1..120: mol_type = other DNA

SEQ ID NO: 70203 - DNA, 120 bp, synthetic construct; identical to SEQ ID NO: 40249
  source 1..120: mol_type = other DNA

SEQ ID NO: 70204 - DNA, 120 bp, synthetic construct; identical to SEQ ID NO: 40250
  source 1..120: mol_type = other DNA

SEQ ID NO: 70205 - DNA, 120 bp, synthetic construct; identical to SEQ ID NO: 11524
  source 1..120: mol_type = other DNA

SEQ ID NO: 70206 - DNA, 120 bp, synthetic construct; identical to SEQ ID NO: 40252
  source 1..120: mol_type = other DNA

SEQ ID NO: 70207 - DNA, 120 bp, synthetic construct; identical to SEQ ID NO: 40253
  source 1..120: mol_type = other DNA

SEQ ID NO: 70208 - DNA, 120 bp, synthetic construct; identical to SEQ ID NO: 40254
  source 1..120: mol_type = other DNA

SEQ ID NO: 70209 - DNA, 120 bp, synthetic construct; identical to SEQ ID NO: 40255
  source 1..120: mol_type = other DNA

SEQ ID NO: 70210 - DNA, 120 bp, synthetic construct; identical to SEQ ID NO: 11525
  source 1..120: mol_type = other DNA

SEQ ID NO: 70211 - DNA, 120 bp, synthetic construct; identical to SEQ ID NO: 40257
  source 1..120: mol_type = other DNA

SEQ ID NO: 70212 - DNA, 120 bp, synthetic construct; identical to SEQ ID NO: 40258
  source 1..120: mol_type = other DNA

SEQ ID NO: 70213 - DNA, 120 bp, synthetic construct; identical to SEQ ID NO: 11526
  source 1..120: mol_type = other DNA

SEQ ID NO: 70214 - DNA, 120 bp, synthetic construct; identical to SEQ ID NO: 40260
  source 1..120: mol_type = other DNA

SEQ ID NO: 70215 - DNA, 120 bp, synthetic construct; identical to SEQ ID NO: 40261
  source 1..120: mol_type = other DNA

SEQ ID NO: 70216 - DNA, 120 bp, synthetic construct; identical to SEQ ID NO: 40262
  source 1..120: mol_type = other DNA

SEQ ID NO: 70217 - DNA, 120 bp, synthetic construct; identical to SEQ ID NO: 40263
  source 1..120: mol_type = other DNA

SEQ ID NO: 70218 - DNA, 120 bp, synthetic construct; identical to SEQ ID NO: 11527
  source 1..120: mol_type = other DNA

SEQ ID NO: 70219 - DNA, 120 bp, synthetic construct; identical to SEQ ID NO: 40265
  source 1..120: mol_type = other DNA

SEQ ID NO: 70220 - DNA, 120 bp, synthetic construct; identical to SEQ ID NO: 40266
  source 1..120: mol_type = other DNA

SEQ ID NO: 70221 - DNA, 120 bp, synthetic construct; identical to SEQ ID NO: 11528
  source 1..120: mol_type = other DNA

SEQ ID NO: 70222 - DNA, 120 bp, synthetic construct; identical to SEQ ID NO: 40268
  source 1..120: mol_type = other DNA

SEQ ID NO: 70223 - DNA, 120 bp, synthetic construct; identical to SEQ ID NO: 40269
  source 1..120: mol_type = other DNA

SEQ ID NO: 70224 - DNA, 120 bp, synthetic construct; identical to SEQ ID NO: 40270
  source 1..120: mol_type = other DNA

SEQ ID NO: 70225 - DNA, 120 bp, synthetic construct; identical to SEQ ID NO: 11529
  source 1..120: mol_type = other DNA

SEQ ID NO: 70226 - DNA, 120 bp, synthetic construct; identical to SEQ ID NO: 40272
  source 1..120: mol_type = other DNA

SEQ ID NO: 70227 - DNA, 120 bp, synthetic construct; identical to SEQ ID NO: 40273
  source 1..120: mol_type = other DNA

SEQ ID NO: 70228 - DNA, 120 bp, synthetic construct; identical to SEQ ID NO: 11530
  source 1..120: mol_type = other DNA

SEQ ID NO: 70229 - DNA, 120 bp, synthetic construct; identical to SEQ ID NO: 40275
  source 1..120: mol_type = other DNA

SEQ ID NO: 70230 - DNA, 120 bp, synthetic construct; identical to SEQ ID NO: 40276
  source 1..120: mol_type = other DNA

SEQ ID NO: 70231 - DNA, 120 bp, synthetic construct; identical to SEQ ID NO: 40277
  source 1..120: mol_type = other DNA

SEQ ID NO: 70232 - DNA, 120 bp, synthetic construct; identical to SEQ ID NO: 40278
  source 1..120: mol_type = other DNA

SEQ ID NO: 70233 - DNA, 120 bp, synthetic construct; identical to SEQ ID NO: 11531
  source 1..120: mol_type = other DNA

SEQ ID NO: 70234 - DNA, 120 bp, synthetic construct; identical to SEQ ID NO: 40280
  source 1..120: mol_type = other DNA

SEQ ID NO: 70235 - DNA, 120 bp, synthetic construct; identical to SEQ ID NO: 40281
  source 1..120: mol_type = other DNA

SEQ ID NO: 70236 - DNA, 120 bp, synthetic construct; identical to SEQ ID NO: 11532
  source 1..120: mol_type = other DNA

SEQ ID NO: 70237 - DNA, 120 bp, synthetic construct; identical to SEQ ID NO: 40283
  source 1..120: mol_type = other DNA

SEQ ID NO: 70238 - DNA, 120 bp, synthetic construct; identical to SEQ ID NO: 40284
  source 1..120: mol_type = other DNA

SEQ ID NO: 70239 - DNA, 120 bp, synthetic construct; identical to SEQ ID NO: 40285
  source 1..120: mol_type = other DNA

SEQ ID NO: 70240 - DNA, 120 bp, synthetic construct; identical to SEQ ID NO: 40286
  source 1..120: mol_type = other DNA

SEQ ID NO: 70241 - DNA, 120 bp, synthetic construct; identical to SEQ ID NO: 11533
  source 1..120: mol_type = other DNA

SEQ ID NO: 70242 - DNA, 120 bp, synthetic construct; identical to SEQ ID NO: 40288
  source 1..120: mol_type = other DNA

SEQ ID NO: 70243 - DNA, 120 bp, synthetic construct; identical to SEQ ID NO: 40289
  source 1..120: mol_type = other DNA

SEQ ID NO: 70244 - DNA, 120 bp, synthetic construct; identical to SEQ ID NO: 11534
  source 1..120: mol_type = other DNA

SEQ ID NO: 70245 - DNA, 120 bp, synthetic construct; identical to SEQ ID NO: 40291
  source 1..120: mol_type = other DNA

SEQ ID NO: 70246 - DNA, 120 bp, synthetic construct; identical to SEQ ID NO: 40292
  source 1..120: mol_type = other DNA

SEQ ID NO: 70247 - DNA, 120 bp, synthetic construct; identical to SEQ ID NO: 40293
  source 1..120: mol_type = other DNA

SEQ ID NO: 70248 - DNA, 120 bp, synthetic construct; identical to SEQ ID NO: 40294
  source 1..120: mol_type = other DNA

SEQ ID NO: 70249 - DNA, 120 bp, synthetic construct; identical to SEQ ID NO: 4247
  source 1..120: mol_type = other DNA

SEQ ID NO: 70250 - DNA, 120 bp, synthetic construct; identical to SEQ ID NO: 40296
  source 1..120: mol_type = other DNA

SEQ ID NO: 70251 - DNA, 120 bp, synthetic construct; identical to SEQ ID NO: 40297
  source 1..120: mol_type = other DNA

SEQ ID NO: 70252 - DNA, 120 bp, synthetic construct; identical to SEQ ID NO: 11536
  source 1..120: mol_type = other DNA

SEQ ID NO: 70253 - DNA, 120 bp, synthetic construct; identical to SEQ ID NO: 40299
  source 1..120: mol_type = other DNA

SEQ ID NO: 70254 - DNA, 120 bp, synthetic construct; identical to SEQ ID NO: 40300
  source 1..120: mol_type = other DNA

SEQ ID NO: 70255 - DNA, 120 bp, synthetic construct; identical to SEQ ID NO: 40301
  source 1..120: mol_type = other DNA

SEQ ID NO: 70256 - DNA, 120 bp, synthetic construct; identical to SEQ ID NO: 11537
  source 1..120: mol_type = other DNA

SEQ ID NO: 70257 - DNA, 120 bp, synthetic construct; identical to SEQ ID NO: 40303
  source 1..120: mol_type = other DNA

SEQ ID NO: 70258 - DNA, 120 bp, synthetic construct; identical to SEQ ID NO: 40304
  source 1..120: mol_type = other DNA

SEQ ID NO: 70259 - DNA, 120 bp, synthetic construct; identical to SEQ ID NO: 40305
  source 1..120: mol_type = other DNA

SEQ ID NO: 70260 - DNA, 120 bp, synthetic construct; identical to SEQ ID NO: 11538
  source 1..120: mol_type = other DNA

SEQ ID NO: 70261 - DNA, 120 bp, synthetic construct; identical to SEQ ID NO: 40307
  source 1..120: mol_type = other DNA

SEQ ID NO: 70262 - DNA, 120 bp, synthetic construct; identical to SEQ ID NO: 40308
  source 1..120: mol_type = other DNA

SEQ ID NO: 70263 - DNA, 120 bp, synthetic construct; identical to SEQ ID NO: 40309
  source 1..120: mol_type = other DNA

SEQ ID NO: 70264 - DNA, 120 bp, synthetic construct; identical to SEQ ID NO: 40310
  source 1..120: mol_type = other DNA

SEQ ID NO: 70265 - DNA, 120 bp, synthetic construct; identical to SEQ ID NO: 11539
  source 1..120: mol_type = other DNA

SEQ ID NO: 70266 - DNA, 120 bp, synthetic construct; identical to SEQ ID NO: 40312
  source 1..120: mol_type = other DNA

SEQ ID NO: 70267 - DNA, 120 bp, synthetic construct; identical to SEQ ID NO: 40313
  source 1..120: mol_type = other DNA

SEQ ID NO: 70268 - DNA, 120 bp, synthetic construct; identical to SEQ ID NO: 11540
  source 1..120: mol_type = other DNA

SEQ ID NO: 70269 - DNA, 120 bp, synthetic construct; identical to SEQ ID NO: 40315
  source 1..120: mol_type = other DNA

SEQ ID NO: 70270 - DNA, 120 bp, synthetic construct; identical to SEQ ID NO: 40316
  source 1..120: mol_type = other DNA

SEQ ID NO: 70271 - DNA, 120 bp, synthetic construct; identical to SEQ ID NO: 40317
  source 1..120: mol_type = other DNA

SEQ ID NO: 70272 - DNA, 120 bp, synthetic construct; identical to SEQ ID NO: 11541
  source 1..120: mol_type = other DNA

SEQ ID NO: 70273 - DNA, 120 bp, synthetic construct; identical to SEQ ID NO: 40319
  source 1..120: mol_type = other DNA

SEQ ID NO: 70274 - DNA, 120 bp, synthetic construct; identical to SEQ ID NO: 40320
  source 1..120: mol_type = other DNA

SEQ ID NO: 70275 - DNA, 120 bp, synthetic construct; identical to SEQ ID NO: 40321
  source 1..120: mol_type = other DNA

SEQ ID NO: 70276 - DNA, 120 bp, synthetic construct; identical to SEQ ID NO: 40322
  source 1..120: mol_type = other DNA

SEQ ID NO: 70277 - DNA, 120 bp, synthetic construct; identical to SEQ ID NO: 11542
  source 1..120: mol_type = other DNA

SEQ ID NO: 70278 - DNA, 120 bp, synthetic construct; identical to SEQ ID NO: 40324
  source 1..120: mol_type = other DNA

SEQ ID NO: 70279 - DNA, 120 bp, synthetic construct; identical to SEQ ID NO: 40325
  source 1..120: mol_type = other DNA

SEQ ID NO: 70280 - DNA, 120 bp, synthetic construct; identical to SEQ ID NO: 11543
  source 1..120: mol_type = other DNA

SEQ ID NO: 70281 - DNA, 120 bp, synthetic construct; identical to SEQ ID NO: 40327
  source 1..120: mol_type = other DNA

SEQ ID NO: 70282 - DNA, 120 bp, synthetic construct; identical to SEQ ID NO: 40328
  source 1..120: mol_type = other DNA

SEQ ID NO: 70283 - DNA, 120 bp, synthetic construct; identical to SEQ ID NO: 40329
  source 1..120: mol_type = other DNA

SEQ ID NO: 70284 - DNA, 120 bp, synthetic construct; identical to SEQ ID NO: 40330
  source 1..120: mol_type = other DNA

SEQ ID NO: 70285 - DNA, 120 bp, synthetic construct; identical to SEQ ID NO: 11544
  source 1..120: mol_type = other DNA

SEQ ID NO: 70286 - DNA, 120 bp, synthetic construct; identical to SEQ ID NO: 40332
  source 1..120: mol_type = other DNA

SEQ ID NO: 70287 - DNA, 120 bp, synthetic construct; identical to SEQ ID NO: 40333
  source 1..120: mol_type = other DNA

SEQ ID NO: 70288 - DNA, 120 bp, synthetic construct; identical to SEQ ID NO: 11545
  source 1..120: mol_type = other DNA

SEQ ID NO: 70289 - DNA, 120 bp, synthetic construct; identical to SEQ ID NO: 40335
  source 1..120: mol_type = other DNA

SEQ ID NO: 70290 - DNA, 120 bp, synthetic construct; identical to SEQ ID NO: 40336
  source 1..120: mol_type = other DNA

SEQ ID NO: 70291 - DNA, 120 bp, synthetic construct; identical to SEQ ID NO: 4257
  source 1..120: mol_type = other DNA

SEQ ID NO: 70292 - DNA, 120 bp, synthetic construct; identical to SEQ ID NO: 40338
  source 1..120: mol_type = other DNA

SEQ ID NO: 70293 - DNA, 120 bp, synthetic construct; identical to SEQ ID NO: 40339
  source 1..120: mol_type = other DNA

SEQ ID NO: 70294 - DNA, 120 bp, synthetic construct; identical to SEQ ID NO: 40340
  source 1..120: mol_type = other DNA

SEQ ID NO: 70295 - DNA, 120 bp, synthetic construct; identical to SEQ ID NO: 40341
  source 1..120: mol_type = other DNA

SEQ ID NO: 70296 - DNA, 120 bp, synthetic construct; identical to SEQ ID NO: 11547
  source 1..120: mol_type = other DNA

SEQ ID NO: 70297 - DNA, 120 bp, synthetic construct; identical to SEQ ID NO: 40343
  source 1..120: mol_type = other DNA

SEQ ID NO: 70298 - DNA, 120 bp, synthetic construct; identical to SEQ ID NO: 40344
  source 1..120: mol_type = other DNA

SEQ ID NO: 70299 - DNA, 120 bp, synthetic construct; identical to SEQ ID NO: 40345
  source 1..120: mol_type = other DNA

SEQ ID NO: 70300 - DNA, 120 bp, synthetic construct; identical to SEQ ID NO: 11548
  source 1..120: mol_type = other DNA

SEQ ID NO: 70301 - DNA, 120 bp, synthetic construct; identical to SEQ ID NO: 40347
  source 1..120: mol_type = other DNA

SEQ ID NO: 70302 - DNA, 120 bp, synthetic construct; identical to SEQ ID NO: 40348
  source 1..120: mol_type = other DNA

SEQ ID NO: 70303 - DNA, 120 bp, synthetic construct; identical to SEQ ID NO: 40349
  source 1..120: mol_type = other DNA

SEQ ID NO: 70304 - DNA, 120 bp, synthetic construct; identical to SEQ ID NO: 40350
  source 1..120: mol_type = other DNA

SEQ ID NO: 70305 - DNA, 120 bp, synthetic construct; identical to SEQ ID NO: 11549
  source 1..120: mol_type = other DNA

SEQ ID NO: 70306 - DNA, 120 bp, synthetic construct; identical to SEQ ID NO: 40352
  source 1..120: mol_type = other DNA

SEQ ID NO: 70307 - DNA, 120 bp, synthetic construct; identical to SEQ ID NO: 40353
  source 1..120: mol_type = other DNA

SEQ ID NO: 70308 - DNA, 120 bp, synthetic construct; identical to SEQ ID NO: 40354
  source 1..120: mol_type = other DNA

SEQ ID NO: 70309 - DNA, 120 bp, synthetic construct; identical to SEQ ID NO: 11550
  source 1..120: mol_type = other DNA

SEQ ID NO: 70310 - DNA, 120 bp, synthetic construct; identical to SEQ ID NO: 40356
  source 1..120: mol_type = other DNA

SEQ ID NO: 70311 - DNA, 120 bp, synthetic construct; identical to SEQ ID NO: 40357
  source 1..120: mol_type = other DNA

SEQ ID NO: 70312 - DNA, 120 bp, synthetic construct; identical to SEQ ID NO: 40358
  source 1..120: mol_type = other DNA

SEQ ID NO: 70313 - DNA, 120 bp, synthetic construct; identical to SEQ ID NO: 11551
  source 1..120: mol_type = other DNA

SEQ ID NO: 70314 - DNA, 120 bp, synthetic construct; identical to SEQ ID NO: 40360
  source 1..120: mol_type = other DNA

SEQ ID NO: 70315 - DNA, 120 bp, synthetic construct; identical to SEQ ID NO: 40361
  source 1..120: mol_type = other DNA

SEQ ID NO: 70316 - DNA, 120 bp, synthetic construct; identical to SEQ ID NO: 40362
  source 1..120: mol_type = other DNA

SEQ ID NO: 70317 - DNA, 120 bp, synthetic construct; identical to SEQ ID NO: 11552
  source 1..120: mol_type = other DNA

SEQ ID NO: 70318 - DNA, 120 bp, synthetic construct; identical to SEQ ID NO: 40364
  source 1..120: mol_type = other DNA

SEQ ID NO: 70319 - DNA, 120 bp, synthetic construct; identical to SEQ ID NO: 40365
  source 1..120: mol_type = other DNA

SEQ ID NO: 70320 - DNA, 120 bp, synthetic construct; identical to SEQ ID NO: 11553
  source 1..120: mol_type = other DNA

SEQ ID NO: 70321 - DNA, 120 bp, synthetic construct; identical to SEQ ID NO: 40367
  source 1..120: mol_type = other DNA

SEQ ID NO: 70322 - DNA, 120 bp, synthetic construct; identical to SEQ ID NO: 40368
  source 1..120: mol_type = other DNA

SEQ ID NO: 70323 - DNA, 120 bp, synthetic construct; identical to SEQ ID NO: 40369
  source 1..120: mol_type = other DNA

SEQ ID NO: 70324 - DNA, 120 bp, synthetic construct; identical to SEQ ID NO: 11554
  source 1..120: mol_type = other DNA

SEQ ID NO: 70325 - DNA, 120 bp, synthetic construct; identical to SEQ ID NO: 40371
  source 1..120: mol_type = other DNA

SEQ ID NO: 70326 - DNA, 120 bp, synthetic construct; identical to SEQ ID NO: 40372
  source 1..120: mol_type = other DNA

SEQ ID NO: 70327 - DNA, 120 bp, synthetic construct; identical to SEQ ID NO: 40373
  source 1..120: mol_type = other DNA

SEQ ID NO: 70328 - DNA, 120 bp, synthetic construct; identical to SEQ ID NO: 40374
  source 1..120: mol_type = other DNA

SEQ ID NO: 70329 - DNA, 120 bp, synthetic construct; identical to SEQ ID NO: 11555
  source 1..120: mol_type = other DNA

SEQ ID NO: 70330 - DNA, 120 bp, synthetic construct; identical to SEQ ID NO: 40376
  source 1..120: mol_type = other DNA

SEQ ID NO: 70331 - DNA, 120 bp, synthetic construct; identical to SEQ ID NO: 40377
  source 1..120: mol_type = other DNA

SEQ ID NO: 70332 - DNA, 120 bp, synthetic construct; identical to SEQ ID NO: 40378
  source 1..120: mol_type = other DNA

SEQ ID NO: 70333 - DNA, 120 bp, synthetic construct; identical to SEQ ID NO: 11556
  source 1..120: mol_type = other DNA

SEQ ID NO: 70334 - DNA, 120 bp, synthetic construct; identical to SEQ ID NO: 40380
  source 1..120: mol_type = other DNA

SEQ ID NO: 70335 - DNA, 120 bp, synthetic construct; identical to SEQ ID NO: 40381
  source 1..120: mol_type = other DNA

SEQ ID NO: 70336 - DNA, 120 bp, synthetic construct; identical to SEQ ID NO: 40382
  source 1..120: mol_type = other DNA

SEQ ID NO: 70337 - DNA, 120 bp, synthetic construct; identical to SEQ ID NO: 40383
  source 1..120: mol_type = other DNA

SEQ ID NO: 70338 - DNA, 120 bp, synthetic construct; identical to SEQ ID NO: 11557
  source 1..120: mol_type = other DNA

SEQ ID NO: 70339 - DNA, 120 bp, synthetic construct; identical to SEQ ID NO: 40385
  source 1..120: mol_type = other DNA

SEQ ID NO: 70340 - DNA, 120 bp, synthetic construct; identical to SEQ ID NO: 40386
  source 1..120: mol_type = other DNA

SEQ ID NO: 70341 - DNA, 120 bp, synthetic construct; identical to SEQ ID NO: 40387
  source 1..120: mol_type = other DNA

SEQ ID NO: 70342 - DNA, 120 bp, synthetic construct; identical to SEQ ID NO: 11558
  source 1..120: mol_type = other DNA

SEQ ID NO: 70343 - DNA, 120 bp, synthetic construct; identical to SEQ ID NO: 40389
  source 1..120: mol_type = other DNA

SEQ ID NO: 70344 - DNA, 120 bp, synthetic construct; identical to SEQ ID NO: 40390
  source 1..120: mol_type = other DNA

SEQ ID NO: 70345 - DNA, 120 bp, synthetic construct; identical to SEQ ID NO: 40391
  source 1..120: mol_type = other DNA

SEQ ID NO: 70346 - DNA, 120 bp, synthetic construct; identical to SEQ ID NO: 11559
  source 1..120: mol_type = other DNA

SEQ ID NO: 70347 - DNA, 120 bp, synthetic construct; identical to SEQ ID NO: 40393
  source 1..120: mol_type = other DNA

SEQ ID NO: 70348 - DNA, 120 bp, synthetic construct; identical to SEQ ID NO: 40394
  source 1..120: mol_type = other DNA

SEQ ID NO: 70349 - DNA, 120 bp, synthetic construct; identical to SEQ ID NO: 40395
  source 1..120: mol_type = other DNA

SEQ ID NO: 70350 - DNA, 120 bp, synthetic construct; identical to SEQ ID NO: 11560
  source 1..120: mol_type = other DNA

SEQ ID NO: 70351 - DNA, 120 bp, synthetic construct; identical to SEQ ID NO: 40397
  source 1..120: mol_type = other DNA

SEQ ID NO: 70352 - DNA, 120 bp, synthetic construct; identical to SEQ ID NO: 40398
  source 1..120: mol_type = other DNA

SEQ ID NO: 70353 - DNA, 120 bp, synthetic construct; identical to SEQ ID NO: 40399
  source 1..120: mol_type = other DNA

SEQ ID NO: 70354 - DNA, 120 bp, synthetic construct; identical to SEQ ID NO: 11561
  source 1..120: mol_type = other DNA

SEQ ID NO: 70355 - DNA, 120 bp, synthetic construct; identical to SEQ ID NO: 40401
  source 1..120: mol_type = other DNA

SEQ ID NO: 70356 - DNA, 120 bp, synthetic construct; identical to SEQ ID NO: 40402
  source 1..120: mol_type = other DNA

SEQ ID NO: 70357 - DNA, 120 bp, synthetic construct; identical to SEQ ID NO: 11562
  source 1..120: mol_type = other DNA

SEQ ID NO: 70358 - DNA, 120 bp, synthetic construct; identical to SEQ ID NO: 40404
  source 1..120: mol_type = other DNA

SEQ ID NO: 70359 - DNA, 120 bp, synthetic construct; identical to SEQ ID NO: 40405
  source 1..120: mol_type = other DNA

SEQ ID NO: 70360 - DNA, 120 bp, synthetic construct; identical to SEQ ID NO: 40406
  source 1..120: mol_type = other DNA

SEQ ID NO: 70361 - DNA, 120 bp, synthetic construct; identical to SEQ ID NO: 11563
  source 1..120: mol_type = other DNA

SEQ ID NO: 70362 - DNA, 120 bp, synthetic construct; identical to SEQ ID NO: 40408
  source 1..120: mol_type = other DNA

SEQ ID NO: 70363 - DNA, 120 bp, synthetic construct; identical to SEQ ID NO: 40409
  source 1..120: mol_type = other DNA

SEQ ID NO: 70364 - DNA, 120 bp, synthetic construct; identical to SEQ ID NO: 40410
  source 1..120: mol_type = other DNA

SEQ ID NO: 70365 - DNA, 120 bp, synthetic construct; identical to SEQ ID NO: 40411
  source 1..120: mol_type = other DNA

SEQ ID NO: 70366 - DNA, 120 bp, synthetic construct; identical to SEQ ID NO: 11564
  source 1..120: mol_type = other DNA

SEQ ID NO: 70367 - DNA, 120 bp, synthetic construct; identical to SEQ ID NO: 40413
  source 1..120: mol_type = other DNA

SEQ ID NO: 70368 - DNA, 120 bp, synthetic construct; identical to SEQ ID NO: 40414
  source 1..120: mol_type = other DNA

SEQ ID NO: 70369 - DNA, 120 bp, synthetic construct; identical to SEQ ID NO: 11565
  source 1..120: mol_type = other DNA

SEQ ID NO: 70370 - DNA, 120 bp, synthetic construct; identical to SEQ ID NO: 40416
  source 1..120: mol_type = other DNA

SEQ ID NO: 70371 - DNA, 120 bp, synthetic construct; identical to SEQ ID NO: 40417
  source 1..120: mol_type = other DNA

SEQ ID NO: 70372 - DNA, 120 bp, synthetic construct; identical to SEQ ID NO: 40418
  source 1..120: mol_type = other DNA

SEQ ID NO: 70373 - DNA, 120 bp, synthetic construct; identical to SEQ ID NO: 40419
  source 1..120: mol_type = other DNA

SEQ ID NO: 70374 - DNA, 120 bp, synthetic construct; identical to SEQ ID NO: 11566
  source 1..120: mol_type = other DNA

SEQ ID NO: 70375 - DNA, 120 bp, synthetic construct; identical to SEQ ID NO: 40421
  source 1..120: mol_type = other DNA

SEQ ID NO: 70376 - DNA, 120 bp, synthetic construct; identical to SEQ ID NO: 40422
  source 1..120: mol_type = other DNA

SEQ ID NO: 70377 - DNA, 120 bp, synthetic construct; identical to SEQ ID NO: 11567
  source 1..120: mol_type = other DNA

SEQ ID NO: 70378 - DNA, 120 bp, synthetic construct; identical to SEQ ID NO: 40424
  source 1..120: mol_type = other DNA

SEQ ID NO: 70379 - DNA, 120 bp, synthetic construct; identical to SEQ ID NO: 40425
  source 1..120: mol_type = other DNA

SEQ ID NO: 70380 - DNA, 120 bp, synthetic construct; identical to SEQ ID NO: 40426
  source 1..120: mol_type = other DNA

SEQ ID NO: 70381 - DNA, 120 bp, synthetic construct; identical to SEQ ID NO: 11568
  source 1..120: mol_type = other DNA

SEQ ID NO: 70382 - DNA, 120 bp, synthetic construct; identical to SEQ ID NO: 40428
  source 1..120: mol_type = other DNA

SEQ ID NO: 70383 - DNA, 120 bp, synthetic construct; identical to SEQ ID NO: 40429
  source 1..120: mol_type = other DNA

SEQ ID NO: 70384 - DNA, 120 bp, synthetic construct; identical to SEQ ID NO: 40430
  source 1..120: mol_type = other DNA

SEQ ID NO: 70385 - DNA, 120 bp, synthetic construct; identical to SEQ ID NO: 40431
  source 1..120: mol_type = other DNA

SEQ ID NO: 70386 - DNA, 120 bp, synthetic construct; identical to SEQ ID NO: 11569
  source 1..120: mol_type = other DNA

SEQ ID NO: 70387 - DNA, 120 bp, synthetic construct; identical to SEQ ID NO: 40433
  source 1..120: mol_type = other DNA

SEQ ID NO: 70388 - DNA, 120 bp, synthetic construct; identical to SEQ ID NO: 40434
  source 1..120: mol_type = other DNA

SEQ ID NO: 70389 - DNA, 120 bp, synthetic construct; identical to SEQ ID NO: 40435
  source 1..120: mol_type = other DNA

SEQ ID NO: 70390 - DNA, 120 bp, synthetic construct; identical to SEQ ID NO: 11570
  source 1..120: mol_type = other DNA

SEQ ID NO: 70391 - DNA, 120 bp, synthetic construct; identical to SEQ ID NO: 40437
  source 1..120: mol_type = other DNA

SEQ ID NO: 70392 - DNA, 120 bp, synthetic construct; identical to SEQ ID NO: 40438
  source 1..120: mol_type = other DNA

SEQ ID NO: 70393 - DNA, 120 bp, synthetic construct; identical to SEQ ID NO: 40439
  source 1..120: mol_type = other DNA

SEQ ID NO: 70394 - DNA, 120 bp, synthetic construct; identical to SEQ ID NO: 11571
  source 1..120: mol_type = other DNA

SEQ ID NO: 70395 - DNA, 120 bp, synthetic construct; identical to SEQ ID NO: 40441
  source 1..120: mol_type = other DNA

SEQ ID NO: 70396 - DNA, 120 bp, synthetic construct; identical to SEQ ID NO: 40442
  source 1..120: mol_type = other DNA

SEQ ID NO: 70397 - DNA, 120 bp, synthetic construct; identical to SEQ ID NO: 11572
  source 1..120: mol_type = other DNA

SEQ ID NO: 70398 - DNA, 120 bp, synthetic construct; identical to SEQ ID NO: 40444
  source 1..120: mol_type = other DNA

SEQ ID NO: 70399 - DNA, 120 bp, synthetic construct; identical to SEQ ID NO: 40445
  source 1..120: mol_type = other DNA

SEQ ID NO: 70400 - DNA, 120 bp, synthetic construct; identical to SEQ ID NO: 40446
  source 1..120: mol_type = other DNA

SEQ ID NO: 70401 - DNA, 120 bp, synthetic construct; identical to SEQ ID NO: 40447
  source 1..120: mol_type = other DNA

SEQ ID NO: 70402 - DNA, 120 bp, synthetic construct; identical to SEQ ID NO: 11573
  source 1..120: mol_type = other DNA

SEQ ID NO: 70403 - DNA, 120 bp, synthetic construct; identical to SEQ ID NO: 40449
  source 1..120: mol_type = other DNA

SEQ ID NO: 70404 - DNA, 120 bp, synthetic construct; identical to SEQ ID NO: 40450
  source 1..120: mol_type = other DNA

SEQ ID NO: 70405 - DNA, 120 bp, synthetic construct; identical to SEQ ID NO: 40451
  source 1..120: mol_type = other DNA

SEQ ID NO: 70406 - DNA, 120 bp, synthetic construct; identical to SEQ ID NO: 11574
  source 1..120: mol_type = other DNA

SEQ ID NO: 70407 - DNA, 120 bp, synthetic construct; identical to SEQ ID NO: 40453
  source 1..120: mol_type = other DNA

SEQ ID NO: 70408 - DNA, 120 bp, synthetic construct; identical to SEQ ID NO: 40454
  source 1..120: mol_type = other DNA

SEQ ID NO: 70409 - DNA, 120 bp, synthetic construct; identical to SEQ ID NO: 11575
  source 1..120: mol_type = other DNA

SEQ ID NO: 70410 - DNA, 120 bp, synthetic construct; identical to SEQ ID NO: 40456
  source 1..120: mol_type = other DNA

SEQ ID NO: 70411 - DNA, 120 bp, synthetic construct; identical to SEQ ID NO: 40457
  source 1..120: mol_type = other DNA

SEQ ID NO: 70412 - DNA, 120 bp, synthetic construct; identical to SEQ ID NO: 40458
  source 1..120: mol_type = other DNA

SEQ ID NO: 70413 - DNA, 120 bp, synthetic construct; identical to SEQ ID NO: 40459
  source 1..120: mol_type = other DNA

SEQ ID NO: 70414 - DNA, 120 bp, synthetic construct; identical to SEQ ID NO: 40460
  source 1..120: mol_type = other DNA

SEQ ID NO: 70415 - DNA, 120 bp, synthetic construct; identical to SEQ ID NO: 11576
  source 1..120: mol_type = other DNA

SEQ ID NO: 70416 - DNA, 120 bp, synthetic construct; identical to SEQ ID NO: 40462
  source 1..120: mol_type = other DNA

SEQ ID NO: 70417 - DNA, 120 bp, synthetic construct; identical to SEQ ID NO: 40463
  source 1..120: mol_type = other DNA

SEQ ID NO: 70418 - DNA, 120 bp, synthetic construct; identical to SEQ ID NO: 40464
  source 1..120: mol_type = other DNA

SEQ ID NO: 70419 - DNA, 120 bp, synthetic construct; identical to SEQ ID NO: 11577
  source 1..120: mol_type = other DNA

SEQ ID NO: 70420 - DNA, 120 bp, synthetic construct; identical to SEQ ID NO: 40466
  source 1..120: mol_type = other DNA

SEQ ID NO: 70421 - DNA, 120 bp, synthetic construct; identical to SEQ ID NO: 40467
  source 1..120: mol_type = other DNA

SEQ ID NO: 70422 - DNA, 120 bp, synthetic construct; identical to SEQ ID NO: 40468
  source 1..120: mol_type = other DNA

SEQ ID NO: 70423 - DNA, 120 bp, synthetic construct; identical to SEQ ID NO: 40469
  source 1..120: mol_type = other DNA

SEQ ID NO: 70424 - DNA, 120 bp, synthetic construct; identical to SEQ ID NO: 11578
  source 1..120: mol_type = other DNA

SEQ ID NO: 70425 - DNA, 120 bp, synthetic construct; identical to SEQ ID NO: 40471
  source 1..120: mol_type = other DNA

SEQ ID NO: 70426 - DNA, 120 bp, synthetic construct; identical to SEQ ID NO: 40472
  source 1..120: mol_type = other DNA

SEQ ID NO: 70427 - DNA, 120 bp, synthetic construct; identical to SEQ ID NO: 11579
  source 1..120: mol_type = other DNA

SEQ ID NO: 70428 - DNA, 120 bp, synthetic construct; identical to SEQ ID NO: 40474
  source 1..120: mol_type = other DNA

SEQ ID NO: 70429 - DNA, 120 bp, synthetic construct; identical to SEQ ID NO: 40475
  source 1..120: mol_type = other DNA

SEQ ID NO: 70430 - DNA, 120 bp, synthetic construct; identical to SEQ ID NO: 40476
  source 1..120: mol_type = other DNA

SEQ ID NO: 70431 - DNA, 120 bp, synthetic construct; identical to SEQ ID NO: 40477
  source 1..120: mol_type = other DNA

SEQ ID NO: 70432 - DNA, 120 bp, synthetic construct; identical to SEQ ID NO: 11580
  source 1..120: mol_type = other DNA

SEQ ID NO: 70433 - DNA, 120 bp, synthetic construct; identical to SEQ ID NO: 40479
  source 1..120: mol_type = other DNA

SEQ ID NO: 70434 - DNA, 120 bp, synthetic construct; identical to SEQ ID NO: 40480
  source 1..120: mol_type = other DNA

SEQ ID NO: 70435 - DNA, 120 bp, synthetic construct; identical to SEQ ID NO: 40481
  source 1..120: mol_type = other DNA

SEQ ID NO: 70436 - DNA, 120 bp, synthetic construct; identical to SEQ ID NO: 11581
  source 1..120: mol_type = other DNA

SEQ ID NO: 70437 - DNA, 120 bp, synthetic construct; identical to SEQ ID NO: 40483
  source 1..120: mol_type = other DNA

SEQ ID NO: 70438 - DNA, 120 bp, synthetic construct; identical to SEQ ID NO: 40484
  source 1..120: mol_type = other DNA

SEQ ID NO: 70439 - DNA, 120 bp, synthetic construct; identical to SEQ ID NO: 40485
  source 1..120: mol_type = other DNA

SEQ ID NO: 70440 - DNA, 120 bp, synthetic construct; identical to SEQ ID NO: 11582
  source 1..120: mol_type = other DNA

SEQ ID NO: 70441 - DNA, 120 bp, synthetic construct; identical to SEQ ID NO: 40487
  source 1..120: mol_type = other DNA

SEQ ID NO: 70442 - DNA, 120 bp, synthetic construct; identical to SEQ ID NO: 40488
  source 1..120: mol_type = other DNA

SEQ ID NO: 70443 - DNA, 120 bp, synthetic construct; identical to SEQ ID NO: 40489
  source 1..120: mol_type = other DNA

SEQ ID NO: 70444 - DNA, 120 bp, synthetic construct; identical to SEQ ID NO: 11583
  source 1..120: mol_type = other DNA

SEQ ID NO: 70445 - DNA, 120 bp, synthetic construct; identical to SEQ ID NO: 40491
  source 1..120: mol_type = other DNA

SEQ ID NO: 70446 - DNA, 120 bp, synthetic construct; identical to SEQ ID NO: 40492
  source 1..120: mol_type = other DNA

SEQ ID NO: 70447 - DNA, 120 bp, synthetic construct; identical to SEQ ID NO: 40493
  source 1..120: mol_type = other DNA

SEQ ID NO: 70448 - DNA, 120 bp, synthetic construct; identical to SEQ ID NO: 11584
  source 1..120: mol_type = other DNA

SEQ ID NO: 70449 - DNA, 120 bp, synthetic construct; identical to SEQ ID NO: 40495
  source 1..120: mol_type = other DNA

SEQ ID NO: 70450 - DNA, 120 bp, synthetic construct; identical to SEQ ID NO: 40496
  source 1..120: mol_type = other DNA

SEQ ID NO: 70451 - DNA, 120 bp, synthetic construct; identical to SEQ ID NO: 40497
  source 1..120: mol_type = other DNA

SEQ ID NO: 70452 - DNA, 120 bp, synthetic construct; identical to SEQ ID NO: 40498
  source 1..120: mol_type = other DNA

SEQ ID NO: 70453 - DNA, 120 bp, synthetic construct; identical to SEQ ID NO: 11585
  source 1..120: mol_type = other DNA

SEQ ID NO: 70454 - DNA, 120 bp, synthetic construct; identical to SEQ ID NO: 40500
  source 1..120: mol_type = other DNA

SEQ ID NO: 70455 - DNA, 120 bp, synthetic construct; identical to SEQ ID NO: 40501
  source 1..120: mol_type = other DNA

SEQ ID NO: 70456 - DNA, 120 bp, synthetic construct; identical to SEQ ID NO: 11586
  source 1..120: mol_type = other DNA

SEQ ID NO: 70457 - DNA, 120 bp, synthetic construct; identical to SEQ ID NO: 40503
  source 1..120: mol_type = other DNA

SEQ ID NO: 70458 - DNA, 120 bp, synthetic construct; identical to SEQ ID NO: 40504
  source 1..120: mol_type = other DNA

SEQ ID NO: 70459 - DNA, 120 bp, synthetic construct; identical to SEQ ID NO: 40505
  source 1..120: mol_type = other DNA

SEQ ID NO: 70460 - DNA, 120 bp, synthetic construct; identical to SEQ ID NO: 11587
  source 1..120: mol_type = other DNA

SEQ ID NO: 70461 - DNA, 120 bp, synthetic construct; identical to SEQ ID NO: 40507
  source 1..120: mol_type = other DNA

SEQ ID NO: 70462 - DNA, 120 bp, synthetic construct; identical to SEQ ID NO: 40508
  source 1..120: mol_type = other DNA

SEQ ID NO: 70463 - DNA, 120 bp, synthetic construct; identical to SEQ ID NO: 40509
  source 1..120: mol_type = other DNA

SEQ ID NO: 70464 - DNA, 120 bp, synthetic construct; identical to SEQ ID NO: 11588
  source 1..120: mol_type = other DNA

SEQ ID NO: 70465 - DNA, 120 bp, synthetic construct; identical to SEQ ID NO: 40511
  source 1..120: mol_type = other DNA

SEQ ID NO: 70466 - DNA, 120 bp, synthetic construct; identical to SEQ ID NO: 40512
  source 1..120: mol_type = other DNA

SEQ ID NO: 70467 - DNA, 120 bp, synthetic construct; identical to SEQ ID NO: 11589
  source 1..120: mol_type = other DNA

SEQ ID NO: 70468 - DNA, 120 bp, synthetic construct; identical to SEQ ID NO: 40514
  source 1..120: mol_type = other DNA

SEQ ID NO: 70469 - DNA, 120 bp, synthetic construct; identical to SEQ ID NO: 40515
  source 1..120: mol_type = other DNA

SEQ ID NO: 70470 - DNA, 120 bp, synthetic construct; identical to SEQ ID NO: 40516
  source 1..120: mol_type = other DNA

SEQ ID NO: 70471 - DNA, 120 bp, synthetic construct; identical to SEQ ID NO: 40517
  source 1..120: mol_type = other DNA

SEQ ID NO: 70472 - DNA, 120 bp, synthetic construct; identical to SEQ ID NO: 11590
  source 1..120: mol_type = other DNA

SEQ ID NO: 70473 - DNA, 120 bp, synthetic construct; identical to SEQ ID NO: 40519
  source 1..120: mol_type = other DNA

SEQ ID NO: 70474 - DNA, 120 bp, synthetic construct; identical to SEQ ID NO: 40520
  source 1..120: mol_type = other DNA

SEQ ID NO: 70475 - DNA, 120 bp, synthetic construct; identical to SEQ ID NO: 11591
  source 1..120: mol_type = other DNA

SEQ ID NO: 70476 - DNA, 120 bp, synthetic construct; identical to SEQ ID NO: 40522
  source 1..120: mol_type = other DNA

SEQ ID NO: 70477 - DNA, 120 bp, synthetic construct; identical to SEQ ID NO: 40523
  source 1..120: mol_type = other DNA

SEQ ID NO: 70478 - DNA, 120 bp, synthetic construct; identical to SEQ ID NO: 40524
  source 1..120: mol_type = other DNA

SEQ ID NO: 70479 - DNA, 120 bp, synthetic construct; identical to SEQ ID NO: 11592
  source 1..120: mol_type = other DNA

SEQ ID NO: 70480 - DNA, 120 bp, synthetic construct; identical to SEQ ID NO: 40526
  source 1..120: mol_type = other DNA

SEQ ID NO: 70481 - DNA, 120 bp, synthetic construct; identical to SEQ ID NO: 40527
  source 1..120: mol_type = other DNA

SEQ ID NO: 70482 - DNA, 120 bp, synthetic construct; identical to SEQ ID NO: 40528
  source 1..120: mol_type = other DNA

SEQ ID NO: 70483 - DNA, 120 bp, synthetic construct; identical to SEQ ID NO: 4302
  source 1..120: mol_type = other DNA

SEQ ID NO: 70484 - DNA, 120 bp, synthetic construct; identical to SEQ ID NO: 40530
  source 1..120: mol_type = other DNA

SEQ ID NO: 70485 - DNA, 120 bp, synthetic construct; identical to SEQ ID NO: 40531
  source 1..120: mol_type = other DNA

SEQ ID NO: 70486 - DNA, 120 bp, synthetic construct; identical to SEQ ID NO: 40532
  source 1..120: mol_type = other DNA

SEQ ID NO: 70487 - DNA, 120 bp, synthetic construct; identical to SEQ ID NO: 40533
  source 1..120: mol_type = other DNA

SEQ ID NO: 70488 - DNA, 120 bp, synthetic construct; identical to SEQ ID NO: 11594
  source 1..120: mol_type = other DNA

SEQ ID NO: 70489 - DNA, 120 bp, synthetic construct; identical to SEQ ID NO: 40535
  source 1..120: mol_type = other DNA

SEQ ID NO: 70490 - DNA, 120 bp, synthetic construct; identical to SEQ ID NO: 40536
  source 1..120: mol_type = other DNA

SEQ ID NO: 70491 - DNA, 120 bp, synthetic construct; identical to SEQ ID NO: 11595
  source 1..120: mol_type = other DNA

SEQ ID NO: 70492 - DNA, 120 bp, synthetic construct; identical to SEQ ID NO: 40538
  source 1..120: mol_type = other DNA

SEQ ID NO: 70493 - DNA, 120 bp, synthetic construct; identical to SEQ ID NO: 40539
  source 1..120: mol_type = other DNA

SEQ ID NO: 70494 - DNA, 120 bp, synthetic construct; identical to SEQ ID NO: 40540
  source 1..120: mol_type = other DNA

SEQ ID NO: 70495 - DNA, 120 bp, synthetic construct; identical to SEQ ID NO: 40541
  source 1..120: mol_type = other DNA

SEQ ID NO: 70496 - DNA, 120 bp, synthetic construct; identical to SEQ ID NO: 11596
  source 1..120: mol_type = other DNA

SEQ ID NO: 70497 - DNA, 120 bp, synthetic construct; identical to SEQ ID NO: 40543
  source 1..120: mol_type = other DNA

SEQ ID NO: 70498 - DNA, 120 bp, synthetic construct; identical to SEQ ID NO: 40544
  source 1..120: mol_type = other DNA

SEQ ID NO: 70499 - DNA, 120 bp, synthetic construct; identical to SEQ ID NO: 11597
  source 1..120: mol_type = other DNA

SEQ ID NO: 70500 - DNA, 120 bp, synthetic construct; identical to SEQ ID NO: 40546
  source 1..120: mol_type = other DNA

SEQ ID NO: 70501 - DNA, 120 bp, synthetic construct; identical to SEQ ID NO: 40547
  source 1..120: mol_type = other DNA

SEQ ID NO: 70502 - DNA, 120 bp, synthetic construct; identical to SEQ ID NO: 40548
  source 1..120: mol_type = other DNA

SEQ ID NO: 70503 - DNA, 120 bp, synthetic construct; identical to SEQ ID NO: 11598
  source 1..120: mol_type = other DNA

SEQ ID NO: 70504 - DNA, 120 bp, synthetic construct; identical to SEQ ID NO: 40550
  source 1..120: mol_type = other DNA

SEQ ID NO: 70505 - DNA, 120 bp, synthetic construct; identical to SEQ ID NO: 40551
  source 1..120: mol_type = other DNA

SEQ ID NO: 70506 - DNA, 120 bp, synthetic construct; identical to SEQ ID NO: 40552
  source 1..120: mol_type = other DNA

SEQ ID NO: 70507 - DNA, 120 bp, synthetic construct; identical to SEQ ID NO: 40553
  source 1..120: mol_type = other DNA

SEQ ID NO: 70508 - DNA, 120 bp, synthetic construct; identical to SEQ ID NO: 11599
  source 1..120: mol_type = other DNA

SEQ ID NO: 70509 - DNA, 120 bp, synthetic construct; identical to SEQ ID NO: 40555
  source 1..120: mol_type = other DNA

SEQ ID NO: 70510 - DNA, 120 bp, synthetic construct; identical to SEQ ID NO: 40556
  source 1..120: mol_type = other DNA

SEQ ID NO: 70511 - DNA, 120 bp, synthetic construct; identical to SEQ ID NO: 4309
  source 1..120: mol_type = other DNA

SEQ ID NO: 70512 - DNA, 120 bp, synthetic construct; identical to SEQ ID NO: 40558
  source 1..120: mol_type = other DNA

SEQ ID NO: 70513 - DNA, 120 bp, synthetic construct; identical to SEQ ID NO: 40559
  source 1..120: mol_type = other DNA

SEQ ID NO: 70514 - DNA, 120 bp, synthetic construct; identical to SEQ ID NO: 40560
  source 1..120: mol_type = other DNA

SEQ ID NO: 70515 - DNA, 120 bp, synthetic construct; identical to SEQ ID NO: 40561
  source 1..120: mol_type = other DNA

SEQ ID NO: 70516 - DNA, 120 bp, synthetic construct; identical to SEQ ID NO: 11601
  source 1..120: mol_type = other DNA

SEQ ID NO: 70517 - DNA, 120 bp, synthetic construct; identical to SEQ ID NO: 40563
  source 1..120: mol_type = other DNA

SEQ ID NO: 70518 - DNA, 120 bp, synthetic construct; identical to SEQ ID NO: 40564
  source 1..120: mol_type = other DNA

SEQ ID NO: 70519 - DNA, 120 bp, synthetic construct; identical to SEQ ID NO: 11602
  source 1..120: mol_type = other DNA

SEQ ID NO: 70520 - DNA, 120 bp, synthetic construct; identical to SEQ ID NO: 40566
  source 1..120: mol_type = other DNA

SEQ ID NO: 70521 - DNA, 120 bp, synthetic construct; identical to SEQ ID NO: 40567
  source 1..120: mol_type = other DNA

SEQ ID NO: 70522 - DNA, 120 bp, synthetic construct; identical to SEQ ID NO: 40568
  source 1..120: mol_type = other DNA

SEQ ID NO: 70523 - DNA, 120 bp, synthetic construct; identical to SEQ ID NO: 11603
  source 1..120: mol_type = other DNA

SEQ ID NO: 70524 - DNA, 120 bp, synthetic construct; identical to SEQ ID NO: 40570
  source 1..120: mol_type = other DNA

SEQ ID NO: 70525 - DNA, 120 bp, synthetic construct; identical to SEQ ID NO: 40571
  source 1..120: mol_type = other DNA

SEQ ID NO: 70526 - DNA, 120 bp, synthetic construct; identical to SEQ ID NO: 40572
  source 1..120: mol_type = other DNA

SEQ ID NO: 70527 - DNA, 120 bp, synthetic construct; identical to SEQ ID NO: 11604
  source 1..120: mol_type = other DNA

SEQ ID NO: 70528 - DNA, 120 bp, synthetic construct; identical to SEQ ID NO: 40574
  source 1..120: mol_type = other DNA

SEQ ID NO: 70529 - DNA, 120 bp, synthetic construct; identical to SEQ ID NO: 40575
  source 1..120: mol_type = other DNA

SEQ ID NO: 70530 - DNA, 120 bp, synthetic construct; identical to SEQ ID NO: 40576
  source 1..120: mol_type = other DNA

SEQ ID NO: 70531 - DNA, 120 bp, synthetic construct; identical to SEQ ID NO: 4314
  source 1..120: mol_type = other DNA

SEQ ID NO: 70532 - DNA, 120 bp, synthetic construct; identical to SEQ ID NO: 40578
  source 1..120: mol_type = other DNA

SEQ ID NO: 70533 - DNA, 120 bp, synthetic construct; identical to SEQ ID NO: 40579
  source 1..120: mol_type = other DNA

SEQ ID NO: 70534 - DNA, 120 bp, synthetic construct; identical to SEQ ID NO: 40580
  source 1..120: mol_type = other DNA

SEQ ID NO: 70535 - DNA, 120 bp, synthetic construct; identical to SEQ ID NO: 11606
  source 1..120: mol_type = other DNA

SEQ ID NO: 70536 - DNA, 120 bp, synthetic construct; identical to SEQ ID NO: 40582
  source 1..120: mol_type = other DNA

SEQ ID NO: 70537 - DNA, 120 bp, synthetic construct; identical to SEQ ID NO: 40583
  source 1..120: mol_type = other DNA

SEQ ID NO: 70538 - DNA, 120 bp, synthetic construct; identical to SEQ ID NO: 40584
  source 1..120: mol_type = other DNA

SEQ ID NO: 70539 - DNA, 120 bp, synthetic construct; identical to SEQ ID NO: 11607
  source 1..120: mol_type = other DNA

SEQ ID NO: 70540 - DNA, 120 bp, synthetic construct; identical to SEQ ID NO: 40586
  source 1..120: mol_type = other DNA

SEQ ID NO: 70541 - DNA, 120 bp, synthetic construct; identical to SEQ ID NO: 40587
  source 1..120: mol_type = other DNA

SEQ ID NO: 70542 - DNA, 120 bp, synthetic construct; identical to SEQ ID NO: 40588
  source 1..120: mol_type = other DNA

SEQ ID NO: 70543 - DNA, 120 bp, synthetic construct; identical to SEQ ID NO: 11608
  source 1..120: mol_type = other DNA

SEQ ID NO: 70544 - DNA, 120 bp, synthetic construct; identical to SEQ ID NO: 40590
  source 1..120: mol_type = other DNA

SEQ ID NO: 70545 - DNA, 120 bp, synthetic construct; identical to SEQ ID NO: 40591
  source 1..120: mol_type = other DNA

SEQ ID NO: 70546 - DNA, 120 bp, synthetic construct; identical to SEQ ID NO: 40592
  source 1..120: mol_type = other DNA

SEQ ID NO: 70547 - DNA, 120 bp, synthetic construct; identical to SEQ ID NO: 40593
  source 1..120: mol_type = other DNA

SEQ ID NO: 70548 - DNA, 120 bp, synthetic construct; identical to SEQ ID NO: 40594
  source 1..120: mol_type = other DNA

SEQ ID NO: 70549 - DNA, 120 bp, synthetic construct; identical to SEQ ID NO: 11609
  source 1..120: mol_type = other DNA

SEQ ID NO: 70550 - DNA, 120 bp, synthetic construct; identical to SEQ ID NO: 40596
  source 1..120: mol_type = other DNA

SEQ ID NO: 70551 - DNA, 120 bp, synthetic construct; identical to SEQ ID NO: 40597
  source 1..120: mol_type = other DNA

SEQ ID NO: 70552 - DNA, 120 bp, synthetic construct; identical to SEQ ID NO: 40598
  source 1..120: mol_type = other DNA

SEQ ID NO: 70553 - DNA, 120 bp, synthetic construct; identical to SEQ ID NO: 11610
  source 1..120: mol_type = other DNA

SEQ ID NO: 70554 - DNA, 120 bp, synthetic construct; identical to SEQ ID NO: 40600
  source 1..120: mol_type = other DNA

SEQ ID NO: 70555 - DNA, 120 bp, synthetic construct; identical to SEQ ID NO: 40601
  source 1..120: mol_type = other DNA

SEQ ID NO: 70556 - DNA, 120 bp, synthetic construct; identical to SEQ ID NO: 11611
  source 1..120: mol_type = other DNA

SEQ ID NO: 70557 - DNA, 120 bp, synthetic construct; identical to SEQ ID NO: 40603
  source 1..120: mol_type = other DNA

SEQ ID NO: 70558 - DNA, 120 bp, synthetic construct; identical to SEQ ID NO: 40604
  source 1..120: mol_type = other DNA

SEQ ID NO: 70559 - DNA, 120 bp, synthetic construct; identical to SEQ ID NO: 40605
  source 1..120: mol_type = other DNA

SEQ ID NO: 70560 - DNA, 120 bp, synthetic construct; identical to SEQ ID NO: 11612
  source 1..120: mol_type = other DNA

SEQ ID NO: 70561 - DNA, 120 bp, synthetic construct; identical to SEQ ID NO: 40607
  source 1..120: mol_type = other DNA

SEQ ID NO: 70562 - DNA, 120 bp, synthetic construct; identical to SEQ ID NO: 40608
  source 1..120: mol_type = other DNA

SEQ ID NO: 70563 - DNA, 120 bp, synthetic construct; identical to SEQ ID NO: 40609
  source 1..120: mol_type = other DNA

SEQ ID NO: 70564 - DNA, 120 bp, synthetic construct; identical to SEQ ID NO: 11613
  source 1..120: mol_type = other DNA

SEQ ID NO: 70565 - DNA, 120 bp, synthetic construct; identical to SEQ ID NO: 40611
  source 1..120: mol_type = other DNA

SEQ ID NO: 70566 - DNA, 120 bp, synthetic construct; identical to SEQ ID NO: 40612
  source 1..120: mol_type = other DNA

SEQ ID NO: 70567 - DNA, 120 bp, synthetic construct; identical to SEQ ID NO: 40613
  source 1..120: mol_type = other DNA

SEQ ID NO: 70568 - DNA, 120 bp, synthetic construct; identical to SEQ ID NO: 11614
  source 1..120: mol_type = other DNA

SEQ ID NO: 70569 - DNA, 120 bp, synthetic construct; identical to SEQ ID NO: 40615
  source 1..120: mol_type = other DNA

SEQ ID NO: 70570 - DNA, 120 bp, synthetic construct; identical to SEQ ID NO: 40616
  source 1..120: mol_type = other DNA

SEQ ID NO: 70571 - DNA, 120 bp, synthetic construct; identical to SEQ ID NO: 40617
  source 1..120: mol_type = other DNA

SEQ ID NO: 70572 - DNA, 120 bp, synthetic construct; identical to SEQ ID NO: 11615
  source 1..120: mol_type = other DNA

SEQ ID NO: 70573 - DNA, 120 bp, synthetic construct; identical to SEQ ID NO: 40619
  source 1..120: mol_type = other DNA

SEQ ID NO: 70574 - DNA, 120 bp, synthetic construct; identical to SEQ ID NO: 40620
  source 1..120: mol_type = other DNA

SEQ ID NO: 70575 - DNA, 120 bp, synthetic construct; identical to SEQ ID NO: 40621
  source 1..120: mol_type = other DNA

SEQ ID NO: 70576 - DNA, 120 bp, synthetic construct; identical to SEQ ID NO: 40622
  source 1..120: mol_type = other DNA

SEQ ID NO: 70577 - DNA, 120 bp, synthetic construct; identical to SEQ ID NO: 11616
  source 1..120: mol_type = other DNA

SEQ ID NO: 70578 - DNA, 120 bp, synthetic construct; identical to SEQ ID NO: 40624
  source 1..120: mol_type = other DNA

SEQ ID NO: 70579 - DNA, 120 bp, synthetic construct; identical to SEQ ID NO: 40625
  source 1..120: mol_type = other DNA

SEQ ID NO: 70580 - DNA, 120 bp, synthetic construct; identical to SEQ ID NO: 11617
  source 1..120: mol_type = other DNA

SEQ ID NO: 70581 - DNA, 120 bp, synthetic construct; identical to SEQ ID NO: 40627
  source 1..120: mol_type = other DNA

SEQ ID NO: 70582 - DNA, 120 bp, synthetic construct; identical to SEQ ID NO: 40628
  source 1..120: mol_type = other DNA

SEQ ID NO: 70583 - DNA, 120 bp, synthetic construct; identical to SEQ ID NO: 40629
  source 1..120: mol_type = other DNA

SEQ ID NO: 70584 - DNA, 120 bp, synthetic construct; identical to SEQ ID NO: 40630
  source 1..120: mol_type = other DNA

SEQ ID NO: 70585 - DNA, 120 bp, synthetic construct; identical to SEQ ID NO: 11618
  source 1..120: mol_type = other DNA

SEQ ID NO: 70586 - DNA, 120 bp, synthetic construct; identical to SEQ ID NO: 40632
  source 1..120: mol_type = other DNA

SEQ ID NO: 70587 - DNA, 120 bp, synthetic construct; identical to SEQ ID NO: 40633
  source 1..120: mol_type = other DNA

SEQ ID NO: 70588 - DNA, 120 bp, synthetic construct; identical to SEQ ID NO: 11619
  source 1..120: mol_type = other DNA

SEQ ID NO: 70589 - DNA, 120 bp, synthetic construct; identical to SEQ ID NO: 40635
  source 1..120: mol_type = other DNA

SEQ ID NO: 70590 - DNA, 120 bp, synthetic construct; identical to SEQ ID NO: 40636
  source 1..120: mol_type = other DNA

SEQ ID NO: 70591 - DNA, 120 bp, synthetic construct; identical to SEQ ID NO: 40637
  source 1..120: mol_type = other DNA

SEQ ID NO: 70592 - DNA, 120 bp, synthetic construct; identical to SEQ ID NO: 40638
  source 1..120: mol_type = other DNA

SEQ ID NO: 70593 - DNA, 120 bp, synthetic construct; identical to SEQ ID NO: 11620
  source 1..120: mol_type = other DNA

SEQ ID NO: 70594 - DNA, 120 bp, synthetic construct; identical to SEQ ID NO: 40640
  source 1..120: mol_type = other DNA

SEQ ID NO: 70595 - DNA, 120 bp, synthetic construct; identical to SEQ ID NO: 40641
  source 1..120: mol_type = other DNA

SEQ ID NO: 70596 - DNA, 120 bp, synthetic construct; identical to SEQ ID NO: 40642
  source 1..120: mol_type = other DNA

SEQ ID NO: 70597 - DNA, 120 bp, synthetic construct; identical to SEQ ID NO: 11621
  source 1..120: mol_type = other DNA

SEQ ID NO: 70598 - DNA, 120 bp, synthetic construct; identical to SEQ ID NO: 40644
  source 1..120: mol_type = other DNA

SEQ ID NO: 70599 - DNA, 120 bp, synthetic construct; identical to SEQ ID NO: 40645
  source 1..120: mol_type = other DNA

SEQ ID NO: 70600 - DNA, 120 bp, synthetic construct; identical to SEQ ID NO: 11622
  source 1..120: mol_type = other DNA

SEQ ID NO: 70601 - DNA, 120 bp, synthetic construct; identical to SEQ ID NO: 40647
  source 1..120: mol_type = other DNA

SEQ ID NO: 70602 - DNA, 120 bp, synthetic construct; identical to SEQ ID NO: 40648
  source 1..120: mol_type = other DNA

SEQ ID NO: 70603 - DNA, 120 bp, synthetic construct; identical to SEQ ID NO: 40649
  source 1..120: mol_type = other DNA

SEQ ID NO: 70604 - DNA, 120 bp, synthetic construct; identical to SEQ ID NO: 11623
  source 1..120: mol_type = other DNA

SEQ ID NO: 70605 - DNA, 120 bp, synthetic construct; identical to SEQ ID NO: 40651
  source 1..120: mol_type = other DNA

SEQ ID NO: 70606 - DNA, 120 bp, synthetic construct; identical to SEQ ID NO: 40652
  source 1..120: mol_type = other DNA

SEQ ID NO: 70607 - DNA, 120 bp, synthetic construct; identical to SEQ ID NO: 40653
  source 1..120: mol_type = other DNA

SEQ ID NO: 70608 - DNA, 120 bp, synthetic construct; identical to SEQ ID NO: 40654
  source 1..120: mol_type = other DNA

SEQ ID NO: 70609 - DNA, 120 bp, synthetic construct; identical to SEQ ID NO: 11624
  source 1..120: mol_type = other DNA

SEQ ID NO: 70610 - DNA, 120 bp, synthetic construct; identical to SEQ ID NO: 40656
  source 1..120: mol_type = other DNA

SEQ ID NO: 70611 - DNA, 120 bp, synthetic construct; identical to SEQ ID NO: 40657
  source 1..120: mol_type = other DNA

SEQ ID NO: 70612 - DNA, 120 bp, synthetic construct; identical to SEQ ID NO: 40658
  source 1..120: mol_type = other DNA

SEQ ID NO: 70613 - DNA, 120 bp, synthetic construct; identical to SEQ ID NO: 11625
  source 1..120: mol_type = other DNA

SEQ ID NO: 70614 - DNA, 120 bp, synthetic construct; identical to SEQ ID NO: 40660
  source 1..120: mol_type = other DNA

SEQ ID NO: 70615 - DNA, 120 bp, synthetic construct; identical to SEQ ID NO: 40661
  source 1..120: mol_type = other DNA

SEQ ID NO: 70616 - DNA, 120 bp, synthetic construct; identical to SEQ ID NO: 11626
  source 1..120: mol_type = other DNA

SEQ ID NO: 70617 - DNA, 120 bp, synthetic construct; identical to SEQ ID NO: 40663
  source 1..120: mol_type = other DNA

SEQ ID NO: 70618 - DNA, 120 bp, synthetic construct; identical to SEQ ID NO: 40664
  source 1..120: mol_type = other DNA

SEQ ID NO: 70619 - DNA, 120 bp, synthetic construct; identical to SEQ ID NO: 40665
  source 1..120: mol_type = other DNA

SEQ ID NO: 70620 - DNA, 120 bp, synthetic construct; identical to SEQ ID NO: 11627
  source 1..120: mol_type = other DNA

SEQ ID NO: 70621 - DNA, 120 bp, synthetic construct; identical to SEQ ID NO: 40667
  source 1..120: mol_type = other DNA

SEQ ID NO: 70622 - DNA, 120 bp, synthetic construct; identical to SEQ ID NO: 40668
  source 1..120: mol_type = other DNA

SEQ ID NO: 70623 - DNA, 120 bp, synthetic construct; identical to SEQ ID NO: 40669
  source 1..120: mol_type = other DNA

SEQ ID NO: 70624 - DNA, 120 bp, synthetic construct; identical to SEQ ID NO: 40670
  source 1..120: mol_type = other DNA

SEQ ID NO: 70625 - DNA, 120 bp, synthetic construct; identical to SEQ ID NO: 11628
  source 1..120: mol_type = other DNA

SEQ ID NO: 70626 - DNA, 120 bp, synthetic construct; identical to SEQ ID NO: 40672
  source 1..120: mol_type = other DNA

SEQ ID NO: 70627 - DNA, 120 bp, synthetic construct; identical to SEQ ID NO: 40673
  source 1..120: mol_type = other DNA

SEQ ID NO: 70628 - DNA, 120 bp, synthetic construct; identical to SEQ ID NO: 11629
  source 1..120: mol_type = other DNA

SEQ ID NO: 70629 - DNA, 120 bp, synthetic construct; identical to SEQ ID NO: 40675
  source 1..120: mol_type = other DNA

SEQ ID NO: 70630 - DNA, 120 bp, synthetic construct; identical to SEQ ID NO: 40676
  source 1..120: mol_type = other DNA

SEQ ID NO: 70631 - DNA, 120 bp, synthetic construct; identical to SEQ ID NO: 40677
  source 1..120: mol_type = other DNA

SEQ ID NO: 70632 - DNA, 120 bp, synthetic construct; identical to SEQ ID NO: 40678
  source 1..120: mol_type = other DNA

SEQ ID NO: 70633 - DNA, 120 bp, synthetic construct; identical to SEQ ID NO: 4338
  source 1..120: mol_type = other DNA

SEQ ID NO: 70634 - DNA, 120 bp, synthetic construct; identical to SEQ ID NO: 40680
  source 1..120: mol_type = other DNA

SEQ ID NO: 70635 - DNA, 120 bp, synthetic construct; identical to SEQ ID NO: 40681
  source 1..120: mol_type = other DNA

SEQ ID NO: 70636 - DNA, 120 bp, synthetic construct; identical to SEQ ID NO: 40682
  source 1..120: mol_type = other DNA

SEQ ID NO: 70637 - DNA, 120 bp, synthetic construct; identical to SEQ ID NO: 11631
  source 1..120: mol_type = other DNA

SEQ ID NO: 70638 - DNA, 120 bp, synthetic construct; identical to SEQ ID NO: 40684
  source 1..120: mol_type = other DNA

SEQ ID NO: 70639 - DNA, 120 bp, synthetic construct; identical to SEQ ID NO: 40685
  source 1..120: mol_type = other DNA

SEQ ID NO: 70640 - DNA, 120 bp, synthetic construct; identical to SEQ ID NO: 40686
  source 1..120: mol_type = other DNA

SEQ ID NO: 70641 - DNA, 120 bp, synthetic construct; identical to SEQ ID NO: 11632
  source 1..120: mol_type = other DNA

SEQ ID NO: 70642 - DNA, 120 bp, synthetic construct; identical to SEQ ID NO: 40688
  source 1..120: mol_type = other DNA

SEQ ID NO: 70643 - DNA, 120 bp, synthetic construct; identical to SEQ ID NO: 40689
  source 1..120: mol_type = other DNA

SEQ ID NO: 70644 - DNA, 120 bp, synthetic construct; identical to SEQ ID NO: 40690
  source 1..120: mol_type = other DNA

SEQ ID NO: 70645 - DNA, 120 bp, synthetic construct; identical to SEQ ID NO: 11633
  source 1..120: mol_type = other DNA

SEQ ID NO: 70646 - DNA, 120 bp, synthetic construct; identical to SEQ ID NO: 40692
  source 1..120: mol_type = other DNA

SEQ ID NO: 70647 - DNA, 120 bp, synthetic construct; identical to SEQ ID NO: 40693
  source 1..120: mol_type = other DNA

SEQ ID NO: 70648 - DNA, 120 bp, synthetic construct; identical to SEQ ID NO: 40694
  source 1..120: mol_type = other DNA

SEQ ID NO: 70649 - DNA, 120 bp, synthetic construct; identical to SEQ ID NO: 40695
  source 1..120: mol_type = other DNA

SEQ ID NO: 70650 - DNA, 120 bp, synthetic construct; identical to SEQ ID NO: 11634
  source 1..120: mol_type = other DNA

SEQ ID NO: 70651 - DNA, 120 bp, synthetic construct; identical to SEQ ID NO: 40697
  source 1..120: mol_type = other DNA

SEQ ID NO: 70652 - DNA, 120 bp, synthetic construct; identical to SEQ ID NO: 40698
  source 1..120: mol_type = other DNA

SEQ ID NO: 70653 - DNA, 120 bp, synthetic construct; identical to SEQ ID NO: 40699
  source 1..120: mol_type = other DNA

SEQ ID NO: 70654 - DNA, 120 bp, synthetic construct; identical to SEQ ID NO: 40700
  source 1..120: mol_type = other DNA

SEQ ID NO: 70655 - DNA, 120 bp, synthetic construct; identical to SEQ ID NO: 11635
  source 1..120: mol_type = other DNA

SEQ ID NO: 70656 - DNA, 120 bp, synthetic construct; identical to SEQ ID NO: 40702
  source 1..120: mol_type = other DNA

SEQ ID NO: 70657 - DNA, 120 bp, synthetic construct; identical to SEQ ID NO: 40703
  source 1..120: mol_type = other DNA

SEQ ID NO: 70658 - DNA, 120 bp, synthetic construct; identical to SEQ ID NO: 40704
  source 1..120: mol_type = other DNA

SEQ ID NO: 70659 - DNA, 120 bp, synthetic construct; identical to SEQ ID NO: 11636
  source 1..120: mol_type = other DNA

SEQ ID NO: 70660 - DNA, 120 bp, synthetic construct; identical to SEQ ID NO: 40706
  source 1..120: mol_type = other DNA

SEQ ID NO: 70661 - DNA, 120 bp, synthetic construct; identical to SEQ ID NO: 40707
  source 1..120: mol_type = other DNA

SEQ ID NO: 70662 - DNA, 120 bp, synthetic construct; identical to SEQ ID NO: 11637
  source 1..120: mol_type = other DNA

SEQ ID NO: 70663 - DNA, 120 bp, synthetic construct; identical to SEQ ID NO: 40709
  source 1..120: mol_type = other DNA

SEQ ID NO: 70664 - DNA, 120 bp, synthetic construct; identical to SEQ ID NO: 40710
  source 1..120: mol_type = other DNA

SEQ ID NO: 70665 - DNA, 120 bp, synthetic construct; identical to SEQ ID NO: 40711
  source 1..120: mol_type = other DNA

SEQ ID NO: 70666 - DNA, 120 bp, synthetic construct; identical to SEQ ID NO: 11638
  source 1..120: mol_type = other DNA

SEQ ID NO: 70667 - DNA, 120 bp, synthetic construct; identical to SEQ ID NO: 40713
  source 1..120: mol_type = other DNA

SEQ ID NO: 70668 - DNA, 120 bp, synthetic construct; identical to SEQ ID NO: 40714
  source 1..120: mol_type = other DNA

SEQ ID NO: 70669 - DNA, 120 bp, synthetic construct; identical to SEQ ID NO: 40715
  source 1..120: mol_type = other DNA

SEQ ID NO: 70670 - DNA, 120 bp, synthetic construct; identical to SEQ ID NO: 11639
  source 1..120: mol_type = other DNA

SEQ ID NO: 70671 - DNA, 120 bp, synthetic construct; identical to SEQ ID NO: 40717
  source 1..120: mol_type = other DNA

SEQ ID NO: 70672 - DNA, 120 bp, synthetic construct; identical to SEQ ID NO: 40718
  source 1..120: mol_type = other DNA

SEQ ID NO: 70673 - DNA, 120 bp, synthetic construct; identical to SEQ ID NO: 40719
  source 1..120: mol_type = other DNA

SEQ ID NO: 70674 - DNA, 120 bp, synthetic construct; identical to SEQ ID NO: 40720
  source 1..120: mol_type = other DNA

SEQ ID NO: 70675 - DNA, 120 bp, synthetic construct; identical to SEQ ID NO: 11640
  source 1..120: mol_type = other DNA

SEQ ID NO: 70676 - DNA, 120 bp, synthetic construct; identical to SEQ ID NO: 40722
  source 1..120: mol_type = other DNA

SEQ ID NO: 70677 - DNA, 120 bp, synthetic construct; identical to SEQ ID NO: 40723
  source 1..120: mol_type = other DNA

SEQ ID NO: 70678 - DNA, 120 bp, synthetic construct; identical to SEQ ID NO: 11641
  source 1..120: mol_type = other DNA

SEQ ID NO: 70679 - DNA, 120 bp, synthetic construct; identical to SEQ ID NO: 40725
  source 1..120: mol_type = other DNA

SEQ ID NO: 70680 - DNA, 120 bp, synthetic construct; identical to SEQ ID NO: 40726
  source 1..120: mol_type = other DNA

SEQ ID NO: 70681 - DNA, 120 bp, synthetic construct; identical to SEQ ID NO: 40727
  source 1..120: mol_type = other DNA

SEQ ID NO: 70682 - DNA, 120 bp, synthetic construct; identical to SEQ ID NO: 11642
  source 1..120: mol_type = other DNA

SEQ ID NO: 70683 - DNA, 120 bp, synthetic construct; identical to SEQ ID NO: 40729
  source 1..120: mol_type = other DNA

SEQ ID NO: 70684 - DNA, 120 bp, synthetic construct; identical to SEQ ID NO: 40730
  source 1..120: mol_type = other DNA

SEQ ID NO: 70685 - DNA, 120 bp, synthetic construct; identical to SEQ ID NO: 40731
  source 1..120: mol_type = other DNA

SEQ ID NO: 70686 - DNA, 120 bp, synthetic construct; identical to SEQ ID NO: 11643
  source 1..120: mol_type = other DNA

SEQ ID NO: 70687 - DNA, 120 bp, synthetic construct; identical to SEQ ID NO: 40733
  source 1..120: mol_type = other DNA

SEQ ID NO: 70688 - DNA, 120 bp, synthetic construct; identical to SEQ ID NO: 40734
  source 1..120: mol_type = other DNA

SEQ ID NO: 70689 - DNA, 120 bp, synthetic construct; identical to SEQ ID NO: 40735
  source 1..120: mol_type = other DNA

SEQ ID NO: 70690 - DNA, 120 bp, synthetic construct; identical to SEQ ID NO: 40736
  source 1..120: mol_type = other DNA

SEQ ID NO: 70691 - DNA, 120 bp, synthetic construct; identical to SEQ ID NO: 11644
  source 1..120: mol_type = other DNA

SEQ ID NO: 70692 - DNA, 120 bp, synthetic construct; identical to SEQ ID NO: 40738
  source 1..120: mol_type = other DNA

SEQ ID NO: 70693 - DNA, 120 bp, synthetic construct; identical to SEQ ID NO: 40739
  source 1..120: mol_type = other DNA

SEQ ID NO: 70694 - DNA, 120 bp, synthetic construct; identical to SEQ ID NO: 11645
  source 1..120: mol_type = other DNA

SEQ ID NO: 70695 - DNA, 120 bp, synthetic construct; identical to SEQ ID NO: 40741
  source 1..120: mol_type = other DNA

SEQ ID NO: 70696 - DNA, 120 bp, synthetic construct; identical to SEQ ID NO: 40742
  source 1..120: mol_type = other DNA

SEQ ID NO: 70697 - DNA, 120 bp, synthetic construct; identical to SEQ ID NO: 40743
  source 1..120: mol_type = other DNA

SEQ ID NO: 70698 - DNA, 120 bp, synthetic construct; identical to SEQ ID NO: 11646
  source 1..120: mol_type = other DNA

SEQ ID NO: 70699 - DNA, 120 bp, synthetic construct; identical to SEQ ID NO: 40745
  source 1..120: mol_type = other DNA

SEQ ID NO: 70700 - DNA, 120 bp, synthetic construct; identical to SEQ ID NO: 40746
  source 1..120: mol_type = other DNA

SEQ ID NO: 70701 - DNA, 120 bp, synthetic construct; identical to SEQ ID NO: 40747
  source 1..120: mol_type = other DNA

SEQ ID NO: 70702 - DNA, 120 bp, synthetic construct; identical to SEQ ID NO: 40748
  source 1..120: mol_type = other DNA

SEQ ID NO: 70703 - DNA, 120 bp, synthetic construct; identical to SEQ ID NO: 11647
  source 1..120: mol_type = other DNA

SEQ ID NO: 70704 - DNA, 120 bp, synthetic construct; identical to SEQ ID NO: 40750
  source 1..120: mol_type = other DNA

SEQ ID NO: 70705 - DNA, 120 bp, synthetic construct; identical to SEQ ID NO: 40751
  source 1..120: mol_type = other DNA

SEQ ID NO: 70706 - DNA, 120 bp, synthetic construct; identical to SEQ ID NO: 40752
  source 1..120: mol_type = other DNA

SEQ ID NO: 70707 - DNA, 120 bp, synthetic construct; identical to SEQ ID NO: 11648
  source 1..120: mol_type = other DNA

SEQ ID NO: 70708 - DNA, 120 bp, synthetic construct; identical to SEQ ID NO: 40754
  source 1..120: mol_type = other DNA

SEQ ID NO: 70709 - DNA, 120 bp, synthetic construct; identical to SEQ ID NO: 40755
  source 1..120: mol_type = other DNA

SEQ ID NO: 70710 - DNA, 120 bp, synthetic construct; identical to SEQ ID NO: 40756
  source 1..120: mol_type = other DNA

SEQ ID NO: 70711 - DNA, 120 bp, synthetic construct; identical to SEQ ID NO: 11649
  source 1..120: mol_type = other DNA

SEQ ID NO: 70712 - DNA, 120 bp, synthetic construct; identical to SEQ ID NO: 40758
  source 1..120: mol_type = other DNA

SEQ ID NO: 70713 - DNA, 120 bp, synthetic construct; identical to SEQ ID NO: 40759
  source 1..120: mol_type = other DNA

SEQ ID NO: 70714 - DNA, 120 bp, synthetic construct; identical to SEQ ID NO: 40760
  source 1..120: mol_type = other DNA

SEQ ID NO: 70715 - DNA, 120 bp, synthetic construct; identical to SEQ ID NO: 11650
  source 1..120: mol_type = other DNA

SEQ ID NO: 70716 - DNA, 120 bp, synthetic construct; identical to SEQ ID NO: 40762
  source 1..120: mol_type = other DNA

SEQ ID NO: 70717 - DNA, 120 bp, synthetic construct; identical to SEQ ID NO: 40763
  source 1..120: mol_type = other DNA

SEQ ID NO: 70718 - DNA, 120 bp, synthetic construct; identical to SEQ ID NO: 40764
  source 1..120: mol_type = other DNA

SEQ ID NO: 70719 - DNA, 120 bp, synthetic construct; identical to SEQ ID NO: 11651
  source 1..120: mol_type = other DNA

SEQ ID NO: 70720 - DNA, 120 bp, synthetic construct; identical to SEQ ID NO: 40766
  source 1..120: mol_type = other DNA

SEQ ID NO: 70721 - DNA, 120 bp, synthetic construct; identical to SEQ ID NO: 40767
  source 1..120: mol_type = other DNA

SEQ ID NO: 70722 - DNA, 120 bp, synthetic construct; identical to SEQ ID NO: 40768
  source 1..120: mol_type = other DNA

SEQ ID NO: 70723 - DNA, 120 bp, synthetic construct; identical to SEQ ID NO: 11652
  source 1..120: mol_type = other DNA

SEQ ID NO: 70724 - DNA, 120 bp, synthetic construct; identical to SEQ ID NO: 40770
  source 1..120: mol_type = other DNA

SEQ ID NO: 70725 - DNA, 120 bp, synthetic construct; identical to SEQ ID NO: 40771
  source 1..120: mol_type = other DNA

SEQ ID NO: 70726 - DNA, 120 bp, synthetic construct; identical to SEQ ID NO: 11653
  source 1..120: mol_type = other DNA

SEQ ID NO: 70727 - DNA, 120 bp, synthetic construct; identical to SEQ ID NO: 40773
  source 1..120: mol_type = other DNA

SEQ ID NO: 70728 - DNA, 120 bp, synthetic construct; identical to SEQ ID NO: 40774
  source 1..120: mol_type = other DNA

SEQ ID NO: 70729 - DNA, 120 bp, synthetic construct; identical to SEQ ID NO: 40775
  source 1..120: mol_type = other DNA

SEQ ID NO: 70730 - DNA, 120 bp, synthetic construct; identical to SEQ ID NO: 11654
  source 1..120: mol_type = other DNA

SEQ ID NO: 70731 - DNA, 120 bp, synthetic construct; identical to SEQ ID NO: 40777
  source 1..120: mol_type = other DNA

SEQ ID NO: 70732 - DNA, 120 bp, synthetic construct; identical to SEQ ID NO: 40778
  source 1..120: mol_type = other DNA

SEQ ID NO: 70733 - DNA, 120 bp, synthetic construct; identical to SEQ ID NO: 40779
  source 1..120: mol_type = other DNA

SEQ ID NO: 70734 - DNA, 120 bp, synthetic construct; identical to SEQ ID NO: 11655
  source 1..120: mol_type = other DNA

SEQ ID NO: 70735 - DNA, 120 bp, synthetic construct; identical to SEQ ID NO: 40781
  source 1..120: mol_type = other DNA

SEQ ID NO: 70736 - DNA, 120 bp, synthetic construct; identical to SEQ ID NO: 40782
  source 1..120: mol_type = other DNA

SEQ ID NO: 70737 - DNA, 120 bp, synthetic construct; identical to SEQ ID NO: 40783
  source 1..120: mol_type = other DNA

SEQ ID NO: 70738 - DNA, 120 bp, synthetic construct; identical to SEQ ID NO: 40784
  source 1..120: mol_type = other DNA

SEQ ID NO: 70739 - DNA, 120 bp, synthetic construct; identical to SEQ ID NO: 11656
  source 1..120: mol_type = other DNA

SEQ ID NO: 70740 - DNA, 120 bp, synthetic construct; identical to SEQ ID NO: 40786
  source 1..120: mol_type = other DNA

SEQ ID NO: 70741 - DNA, 120 bp, synthetic construct; identical to SEQ ID NO: 40787
  source 1..120: mol_type = other DNA

SEQ ID NO: 70742 - DNA, 120 bp, synthetic construct; identical to SEQ ID NO: 40788
  source 1..120: mol_type = other DNA

SEQ ID NO: 70743 - DNA, 120 bp, synthetic construct; identical to SEQ ID NO: 11657
  source 1..120: mol_type = other DNA

SEQ ID NO: 70744 - DNA, 120 bp, synthetic construct; identical to SEQ ID NO: 40790
  source 1..120: mol_type = other DNA

SEQ ID NO: 70745 - DNA, 120 bp, synthetic construct; identical to SEQ ID NO: 40791
  source 1..120: mol_type = other DNA

SEQ ID NO: 70746 - DNA, 120 bp, synthetic construct; identical to SEQ ID NO: 40792
  source 1..120: mol_type = other DNA

SEQ ID NO: 70747 - DNA, 120 bp, synthetic construct; identical to SEQ ID NO: 11658
  source 1..120: mol_type = other DNA

SEQ ID NO: 70748 - DNA, 120 bp, synthetic construct; identical to SEQ ID NO: 40794
  source 1..120: mol_type = other DNA

SEQ ID NO: 70749 - DNA, 120 bp, synthetic construct; identical to SEQ ID NO: 40795
  source 1..120: mol_type = other DNA

SEQ ID NO: 70750 - DNA, 120 bp, synthetic construct; identical to SEQ ID NO: 40796
  source 1..120: mol_type = other DNA

SEQ ID NO: 70751 - DNA, 120 bp, synthetic construct; identical to SEQ ID NO: 11659
  source 1..120: mol_type = other DNA

SEQ ID NO: 70752 - DNA, 120 bp, synthetic construct; identical to SEQ ID NO: 40798
  source 1..120: mol_type = other DNA

SEQ ID NO: 70753 - DNA, 120 bp, synthetic construct; identical to SEQ ID NO: 40799
  source 1..120: mol_type = other DNA

SEQ ID NO: 70754 - DNA, 120 bp, synthetic construct; identical to SEQ ID NO: 40800
  source 1..120: mol_type = other DNA

SEQ ID NO: 70755 - DNA, 120 bp, synthetic construct; identical to SEQ ID NO: 11660
  source 1..120: mol_type = other DNA

SEQ ID NO: 70756 - DNA, 120 bp, synthetic construct; identical to SEQ ID NO: 40802
  source 1..120: mol_type = other DNA

SEQ ID NO: 70757 - DNA, 120 bp, synthetic construct; identical to SEQ ID NO: 40803
  source 1..120: mol_type = other DNA

SEQ ID NO: 70758 - DNA, 120 bp, synthetic construct; identical to SEQ ID NO: 11661
  source 1..120: mol_type = other DNA

SEQ ID NO: 70759 - DNA, 120 bp, synthetic construct; identical to SEQ ID NO: 40805
  source 1..120: mol_type = other DNA

SEQ ID NO: 70760 - DNA, 120 bp, synthetic construct; identical to SEQ ID NO: 40806
  source 1..120: mol_type = other DNA

SEQ ID NO: 70761 - DNA, 120 bp, synthetic construct; identical to SEQ ID NO: 40807
  source 1..120: mol_type = other DNA

SEQ ID NO: 70762 - DNA, 120 bp, synthetic construct; identical to SEQ ID NO: 40808
  source 1..120: mol_type = other DNA

SEQ ID NO: 70763 - DNA, 120 bp, synthetic construct; identical to SEQ ID NO: 11662
  source 1..120: mol_type = other DNA

SEQ ID NO: 70764 - DNA, 120 bp, synthetic construct; identical to SEQ ID NO: 40810
  source 1..120: mol_type = other DNA

SEQ ID NO: 70765 - DNA, 120 bp, synthetic construct; identical to SEQ ID NO: 40811
  source 1..120: mol_type = other DNA

SEQ ID NO: 70766 - DNA, 120 bp, synthetic construct; identical to SEQ ID NO: 11663
  source 1..120: mol_type = other DNA

SEQ ID NO: 70767 - DNA, 120 bp, synthetic construct; identical to SEQ ID NO: 40813
  source 1..120: mol_type = other DNA

SEQ ID NO: 70768 - DNA, 120 bp, synthetic construct; identical to SEQ ID NO: 40814
  source 1..120: mol_type = other DNA

SEQ ID NO: 70769 - DNA, 120 bp, synthetic construct; identical to SEQ ID NO: 40815
  source 1..120: mol_type = other DNA

SEQ ID NO: 70770 - DNA, 120 bp, synthetic construct; identical to SEQ ID NO: 40816
  source 1..120: mol_type = other DNA

SEQ ID NO: 70771 - DNA, 120 bp, synthetic construct; identical to SEQ ID NO: 11664
  source 1..120: mol_type = other DNA

SEQ ID NO: 70772 - DNA, 120 bp, synthetic construct; identical to SEQ ID NO: 40818
  source 1..120: mol_type = other DNA

SEQ ID NO: 70773 - DNA, 120 bp, synthetic construct; identical to SEQ ID NO: 40819
  source 1..120: mol_type = other DNA

SEQ ID NO: 70774 - DNA, 120 bp, synthetic construct; identical to SEQ ID NO: 40820
  source 1..120: mol_type = other DNA

SEQ ID NO: 70775 - DNA, 120 bp, synthetic construct; identical to SEQ ID NO: 11665
  source 1..120: mol_type = other DNA

SEQ ID NO: 70776 - DNA, 120 bp, synthetic construct; identical to SEQ ID NO: 40822
  source 1..120: mol_type = other DNA

SEQ ID NO: 70777 - DNA, 120 bp, synthetic construct; identical to SEQ ID NO: 40823
  source 1..120: mol_type = other DNA

SEQ ID NO: 70778 - DNA, 120 bp, synthetic construct; identical to SEQ ID NO: 40824
  source 1..120: mol_type = other DNA

SEQ ID NO: 70779 - DNA, 120 bp, synthetic construct; identical to SEQ ID NO: 11666
  source 1..120: mol_type = other DNA

SEQ ID NO: 70780 - DNA, 120 bp, synthetic construct; identical to SEQ ID NO: 40826
  source 1..120: mol_type = other DNA

SEQ ID NO: 70781 - DNA, 120 bp, synthetic construct; identical to SEQ ID NO: 40827
  source 1..120: mol_type = other DNA

SEQ ID NO: 70782 - DNA, 120 bp, synthetic construct; identical to SEQ ID NO: 40828
  source 1..120: mol_type = other DNA

SEQ ID NO: 70783 - DNA, 120 bp, synthetic construct; identical to SEQ ID NO: 11667
  source 1..120: mol_type = other DNA

SEQ ID NO: 70784 - DNA, 120 bp, synthetic construct; identical to SEQ ID NO: 40830
  source 1..120: mol_type = other DNA

SEQ ID NO: 70785 - DNA, 120 bp, synthetic construct; identical to SEQ ID NO: 40831
  source 1..120: mol_type = other DNA

SEQ ID NO: 70786 - DNA, 120 bp, synthetic construct; identical to SEQ ID NO: 11668
  source 1..120: mol_type = other DNA

SEQ ID NO: 70787 - DNA, 120 bp, synthetic construct; identical to SEQ ID NO: 40833
  source 1..120: mol_type = other DNA

SEQ ID NO: 70788 - DNA, 120 bp, synthetic construct; identical to SEQ ID NO: 40834
  source 1..120: mol_type = other DNA

SEQ ID NO: 70789 - DNA, 120 bp, synthetic construct; identical to SEQ ID NO: 40835
  source 1..120: mol_type = other DNA

SEQ ID NO: 70790 - DNA, 120 bp, synthetic construct; identical to SEQ ID NO: 11669
  source 1..120: mol_type = other DNA

SEQ ID NO: 70791 - DNA, 120 bp, synthetic construct; identical to SEQ ID NO: 40837
  source 1..120: mol_type = other DNA

SEQ ID NO: 70792 - DNA, 120 bp, synthetic construct; identical to SEQ ID NO: 40838
  source 1..120: mol_type = other DNA

SEQ ID NO: 70793 - DNA, 120 bp, synthetic construct; identical to SEQ ID NO: 40839
  source 1..120: mol_type = other DNA

SEQ ID NO: 70794 - DNA, 120 bp, synthetic construct; identical to SEQ ID NO: 11670
  source 1..120: mol_type = other DNA

SEQ ID NO: 70795 - DNA, 120 bp, synthetic construct; identical to SEQ ID NO: 40841
  source 1..120: mol_type = other DNA

SEQ ID NO: 70796 - DNA, 120 bp, synthetic construct; identical to SEQ ID NO: 40842
  source 1..120: mol_type = other DNA

SEQ ID NO: 70797 - DNA, 120 bp, synthetic construct; identical to SEQ ID NO: 40843
  source 1..120: mol_type = other DNA

SEQ ID NO: 70798 - DNA, 120 bp, synthetic construct; identical to SEQ ID NO: 11671
  source 1..120: mol_type = other DNA

SEQ ID NO: 70799 - DNA, 120 bp, synthetic construct; identical to SEQ ID NO: 40845
  source 1..120: mol_type = other DNA

SEQ ID NO: 70800 - DNA, 120 bp, synthetic construct; identical to SEQ ID NO: 40846
  source 1..120: mol_type = other DNA

SEQ ID NO: 70801 - DNA, 120 bp, synthetic construct; identical to SEQ ID NO: 40847
  source 1..120: mol_type = other DNA

SEQ ID NO: 70802 - DNA, 120 bp, synthetic construct; identical to SEQ ID NO: 11672
  source 1..120: mol_type = other DNA

SEQ ID NO: 70803 - DNA, 120 bp, synthetic construct; identical to SEQ ID NO: 40849
  source 1..120: mol_type = other DNA

SEQ ID NO: 70804 - DNA, 120 bp, synthetic construct; identical to SEQ ID NO: 40850
  source 1..120: mol_type = other DNA

SEQ ID NO: 70805 - DNA, 120 bp, synthetic construct; identical to SEQ ID NO: 40851
  source 1..120: mol_type = other DNA

SEQ ID NO: 70806 - DNA, 120 bp, synthetic construct; identical to SEQ ID NO: 11673
  source 1..120: mol_type = other DNA

SEQ ID NO: 70807 - DNA, 120 bp, synthetic construct; identical to SEQ ID NO: 40853
  source 1..120: mol_type = other DNA

SEQ ID NO: 70808 - DNA, 120 bp, synthetic construct; identical to SEQ ID NO: 40854
  source 1..120: mol_type = other DNA

SEQ ID NO: 70809 - DNA, 120 bp, synthetic construct; identical to SEQ ID NO: 40855
  source 1..120: mol_type = other DNA

SEQ ID NO: 70810 - DNA, 120 bp, synthetic construct; identical to SEQ ID NO: 11674
  source 1..120: mol_type = other DNA

SEQ ID NO: 70811 - DNA, 120 bp, synthetic construct; identical to SEQ ID NO: 40857
  source 1..120: mol_type = other DNA

SEQ ID NO: 70812 - DNA, 120 bp, synthetic construct; identical to SEQ ID NO: 40858
  source 1..120: mol_type = other DNA

SEQ ID NO: 70813 - DNA, 120 bp, synthetic construct; identical to SEQ ID NO: 40859
  source 1..120: mol_type = other DNA

SEQ ID NO: 70814 - DNA, 120 bp, synthetic construct; identical to SEQ ID NO: 11675
  source 1..120: mol_type = other DNA

SEQ ID NO: 70815 - DNA, 120 bp, synthetic construct; identical to SEQ ID NO: 40861
  source 1..120: mol_type = other DNA

SEQ ID NO: 70816 - DNA, 120 bp, synthetic construct; identical to SEQ ID NO: 40862
  source 1..120: mol_type = other DNA

SEQ ID NO: 70817 - DNA, 120 bp, synthetic construct; identical to SEQ ID NO: 40863
  source 1..120: mol_type = other DNA

SEQ ID NO: 70818 - DNA, 120 bp, synthetic construct; identical to SEQ ID NO: 11676
  source 1..120: mol_type = other DNA

SEQ ID NO: 70819 - DNA, 120 bp, synthetic construct; identical to SEQ ID NO: 40865
  source 1..120: mol_type = other DNA

SEQ ID NO: 70820 - DNA, 120 bp, synthetic construct; identical to SEQ ID NO: 40866
  source 1..120: mol_type = other DNA

SEQ ID NO: 70821 - DNA, 120 bp, synthetic construct; identical to SEQ ID NO: 40867
  source 1..120: mol_type = other DNA

SEQ ID NO: 70822 - DNA, 120 bp, synthetic construct; identical to SEQ ID NO: 11677
  source 1..120: mol_type = other DNA

SEQ ID NO: 70823 - DNA, 120 bp, synthetic construct; identical to SEQ ID NO: 40869
  source 1..120: mol_type = other DNA

SEQ ID NO: 70824 - DNA, 120 bp, synthetic construct; identical to SEQ ID NO: 40870
  source 1..120: mol_type = other DNA

SEQ ID NO: 70825 - DNA, 120 bp, synthetic construct; identical to SEQ ID NO: 40871
  source 1..120: mol_type = other DNA

SEQ ID NO: 70826 - DNA, 120 bp, synthetic construct; identical to SEQ ID NO: 11678
  source 1..120: mol_type = other DNA

SEQ ID NO: 70827 - DNA, 120 bp, synthetic construct; identical to SEQ ID NO: 40873
  source 1..120: mol_type = other DNA

SEQ ID NO: 70828 - DNA, 120 bp, synthetic construct; identical to SEQ ID NO: 40874
  source 1..120: mol_type = other DNA

SEQ ID NO: 70829 - DNA, 120 bp, synthetic construct; identical to SEQ ID NO: 40875
  source 1..120: mol_type = other DNA

SEQ ID NO: 70830 - DNA, 120 bp, synthetic construct; identical to SEQ ID NO: 40876
  source 1..120: mol_type = other DNA

SEQ ID NO: 70831 - DNA, 120 bp, synthetic construct; identical to SEQ ID NO: 11679
  source 1..120: mol_type = other DNA

SEQ ID NO: 70832 - DNA, 120 bp, synthetic construct; identical to SEQ ID NO: 40878
  source 1..120: mol_type = other DNA

SEQ ID NO: 70833 - DNA, 120 bp, synthetic construct; identical to SEQ ID NO: 40879
  source 1..120: mol_type = other DNA

SEQ ID NO: 70834 - DNA, 120 bp, synthetic construct; identical to SEQ ID NO: 40880
  source 1..120: mol_type = other DNA

SEQ ID NO: 70835 - DNA, 120 bp, synthetic construct; identical to SEQ ID NO: 11680
  source 1..120: mol_type = other DNA

SEQ ID NO: 70836 - DNA, 120 bp, synthetic construct; identical to SEQ ID NO: 40882
  source 1..120: mol_type = other DNA

SEQ ID NO: 70837 - DNA, 120 bp, synthetic construct; identical to SEQ ID NO: 40883
  source 1..120: mol_type = other DNA

SEQ ID NO: 70838 - DNA, 120 bp, synthetic construct; identical to SEQ ID NO: 40884
  source 1..120: mol_type = other DNA

SEQ ID NO: 70839 - DNA, 120 bp, synthetic construct; identical to SEQ ID NO: 11681
  source 1..120: mol_type = other DNA

SEQ ID NO: 70840 - DNA, 120 bp, synthetic construct; identical to SEQ ID NO: 40886
  source 1..120: mol_type = other DNA

SEQ ID NO: 70841 - DNA, 120 bp, synthetic construct; identical to SEQ ID NO: 40887
  source 1..120: mol_type = other DNA

SEQ ID NO: 70842 - DNA, 120 bp, synthetic construct; identical to SEQ ID NO: 40888
  source 1..120: mol_type = other DNA

SEQ ID NO: 70843 - DNA, 120 bp, synthetic construct; identical to SEQ ID NO: 11682
  source 1..120: mol_type = other DNA

SEQ ID NO: 70844 - DNA, 120 bp, synthetic construct; identical to SEQ ID NO: 40890
  source 1..120: mol_type = other DNA

SEQ ID NO: 70845 - DNA, 120 bp, synthetic construct; identical to SEQ ID NO: 40891
  source 1..120: mol_type = other DNA

SEQ ID NO: 70846 - DNA, 120 bp, synthetic construct; identical to SEQ ID NO: 40892
  source 1..120: mol_type = other DNA

SEQ ID NO: 70847 - DNA, 120 bp, synthetic construct; identical to SEQ ID NO: 11683
  source 1..120: mol_type = other DNA

SEQ ID NO: 70848 - DNA, 120 bp, synthetic construct; identical to SEQ ID NO: 40894
  source 1..120: mol_type = other DNA

SEQ ID NO: 70849 - DNA, 120 bp, synthetic construct; identical to SEQ ID NO: 40895
  source 1..120: mol_type = other DNA

SEQ ID NO: 70850 - DNA, 120 bp, synthetic construct; identical to SEQ ID NO: 11684
  source 1..120: mol_type = other DNA

SEQ ID NO: 70851 - DNA, 120 bp, synthetic construct; identical to SEQ ID NO: 40897
  source 1..120: mol_type = other DNA

SEQ ID NO: 70852 - DNA, 120 bp, synthetic construct; identical to SEQ ID NO: 40898
  source 1..120: mol_type = other DNA

SEQ ID NO: 70853 - DNA, 120 bp, synthetic construct; identical to SEQ ID NO: 40899
  source 1..120: mol_type = other DNA

SEQ ID NO: 70854 - DNA, 120 bp, synthetic construct; identical to SEQ ID NO: 11685
  source 1..120: mol_type = other DNA

SEQ ID NO: 70855 - DNA, 120 bp, synthetic construct; identical to SEQ ID NO: 40901
  source 1..120: mol_type = other DNA

SEQ ID NO: 70856 - DNA, 120 bp, synthetic construct; identical to SEQ ID NO: 40902
  source 1..120: mol_type = other DNA

SEQ ID NO: 70857 - DNA, 120 bp, synthetic construct; identical to SEQ ID NO: 40903
  source 1..120: mol_type = other DNA

SEQ ID NO: 70858 - DNA, 120 bp, synthetic construct; identical to SEQ ID NO: 40904
  source 1..120: mol_type = other DNA

SEQ ID NO: 70859 - DNA, 120 bp, synthetic construct; identical to SEQ ID NO: 11686
  source 1..120: mol_type = other DNA

SEQ ID NO: 70860 - DNA, 120 bp, synthetic construct; identical to SEQ ID NO: 40906
  source 1..120: mol_type = other DNA

SEQ ID NO: 70861 - DNA, 120 bp, synthetic construct; identical to SEQ ID NO: 40907
  source 1..120: mol_type = other DNA

SEQ ID NO: 70862 - DNA, 120 bp, synthetic construct; identical to SEQ ID NO: 40908
  source 1..120: mol_type = other DNA

SEQ ID NO: 70863 - DNA, 120 bp, synthetic construct; identical to SEQ ID NO: 11687
  source 1..120: mol_type = other DNA

SEQ ID NO: 70864 - DNA, 120 bp, synthetic construct; identical to SEQ ID NO: 40910
  source 1..120: mol_type = other DNA

SEQ ID NO: 70865 - DNA, 120 bp, synthetic construct; identical to SEQ ID NO: 40911
  source 1..120: mol_type = other DNA

SEQ ID NO: 70866 - DNA, 120 bp, synthetic construct; identical to SEQ ID NO: 40912
  source 1..120: mol_type = other DNA

SEQ ID NO: 70867 - DNA, 120 bp, synthetic construct; identical to SEQ ID NO: 11688
  source 1..120: mol_type = other DNA

SEQ ID NO: 70868 - DNA, 120 bp, synthetic construct; identical to SEQ ID NO: 40914
  source 1..120: mol_type = other DNA

SEQ ID NO: 70869 - DNA, 120 bp, synthetic construct; identical to SEQ ID NO: 40915
  source 1..120: mol_type = other DNA

SEQ ID NO: 70870 - DNA, 120 bp, synthetic construct; identical to SEQ ID NO: 40916
  source 1..120: mol_type = other DNA

SEQ ID NO: 70871 - DNA, 120 bp, synthetic construct; identical to SEQ ID NO: 11689
  source 1..120: mol_type = other DNA

SEQ ID NO: 70872 - DNA, 120 bp, synthetic construct; identical to SEQ ID NO: 40918
  source 1..120: mol_type = other DNA

SEQ ID NO: 70873 - DNA, 120 bp, synthetic construct; identical to SEQ ID NO: 40919
  source 1..120: mol_type = other DNA

SEQ ID NO: 70874 - DNA, 120 bp, synthetic construct; identical to SEQ ID NO: 40920
  source 1..120: mol_type = other DNA

SEQ ID NO: 70875 - DNA, 120 bp, synthetic construct; identical to SEQ ID NO: 11690
  source 1..120: mol_type = other DNA

SEQ ID NO: 70876 - DNA, 120 bp, synthetic construct; identical to SEQ ID NO: 40922
  source 1..120: mol_type = other DNA

SEQ ID NO: 70877 - DNA, 120 bp, synthetic construct; identical to SEQ ID NO: 40923
  source 1..120: mol_type = other DNA

SEQ ID NO: 70878 - DNA, 120 bp, synthetic construct; identical to SEQ ID NO: 40924
  source 1..120: mol_type = other DNA

SEQ ID NO: 70879 - DNA, 120 bp, synthetic construct; identical to SEQ ID NO: 11691
  source 1..120: mol_type = other DNA

SEQ ID NO: 70880 - DNA, 120 bp, synthetic construct; identical to SEQ ID NO: 40926
  source 1..120: mol_type = other DNA

SEQ ID NO: 70881 - DNA, 120 bp, synthetic construct; identical to SEQ ID NO: 40927
  source 1..120: mol_type = other DNA

SEQ ID NO: 70882 - DNA, 120 bp, synthetic construct; identical to SEQ ID NO: 40928
  source 1..120: mol_type = other DNA

SEQ ID NO: 70883 - DNA, 120 bp, synthetic construct; identical to SEQ ID NO: 11692
  source 1..120: mol_type = other DNA

SEQ ID NO: 70884 - DNA, 120 bp, synthetic construct; identical to SEQ ID NO: 40930
  source 1..120: mol_type = other DNA

SEQ ID NO: 70885 - DNA, 120 bp, synthetic construct; identical to SEQ ID NO: 40931
  source 1..120: mol_type = other DNA

SEQ ID NO: 70886 - DNA, 120 bp, synthetic construct; identical to SEQ ID NO: 11693
  source 1..120: mol_type = other DNA

SEQ ID NO: 70887 - DNA, 120 bp, synthetic construct; identical to SEQ ID NO: 40933
  source 1..120: mol_type = other DNA

SEQ ID NO: 70888 - DNA, 120 bp, synthetic construct; identical to SEQ ID NO: 40934
  source 1..120: mol_type = other DNA

SEQ ID NO: 70889 - DNA, 120 bp, synthetic construct; identical to SEQ ID NO: 40935
  source 1..120: mol_type = other DNA

SEQ ID NO: 70890 - DNA, 120 bp, synthetic construct; identical to SEQ ID NO: 11694
  source 1..120: mol_type = other DNA

SEQ ID NO: 70891 - DNA, 120 bp, synthetic construct; identical to SEQ ID NO: 40937
  source 1..120: mol_type = other DNA

SEQ ID NO: 70892 - DNA, 120 bp, synthetic construct; identical to SEQ ID NO: 40938
  source 1..120: mol_type = other DNA

SEQ ID NO: 70893 - DNA, 120 bp, synthetic construct; identical to SEQ ID NO: 40939
  source 1..120: mol_type = other DNA

SEQ ID NO: 70894 - DNA, 120 bp, synthetic construct; identical to SEQ ID NO: 11695
  source 1..120: mol_type = other DNA

SEQ ID NO: 70895 - DNA, 120 bp, synthetic construct; identical to SEQ ID NO: 40941
  source 1..120: mol_type = other DNA

SEQ ID NO: 70896 - DNA, 120 bp, synthetic construct; identical to SEQ ID NO: 40942
  source 1..120: mol_type = other DNA

SEQ ID NO: 70897 - DNA, 120 bp, synthetic construct; identical to SEQ ID NO: 40943
  source 1..120: mol_type = other DNA

SEQ ID NO: 70898 - DNA, 120 bp, synthetic construct; identical to SEQ ID NO: 40944
  source 1..120: mol_type = other DNA

SEQ ID NO: 70899 - DNA, 120 bp, synthetic construct; identical to SEQ ID NO: 11696
  source 1..120: mol_type = other DNA

SEQ ID NO: 70900 - DNA, 120 bp, synthetic construct; identical to SEQ ID NO: 40946
  source 1..120: mol_type = other DNA

SEQ ID NO: 70901 - DNA, 120 bp, synthetic construct; identical to SEQ ID NO: 40947
  source 1..120: mol_type = other DNA

SEQ ID NO: 70902 - DNA, 120 bp, synthetic construct; identical to SEQ ID NO: 40948
  source 1..120: mol_type = other DNA

SEQ ID NO: 70903 - DNA, 120 bp, synthetic construct; identical to SEQ ID NO: 11697
  source 1..120: mol_type = other DNA

SEQ ID NO: 70904 - DNA, 120 bp, synthetic construct; identical to SEQ ID NO: 40950
  source 1..120: mol_type = other DNA

SEQ ID NO: 70905 - DNA, 120 bp, synthetic construct; identical to SEQ ID NO: 40951
  source 1..120: mol_type = other DNA

SEQ ID NO: 70906 - DNA, 120 bp, synthetic construct; identical to SEQ ID NO: 11698
  source 1..120: mol_type = other DNA

SEQ ID NO: 70907 - DNA, 120 bp, synthetic construct; identical to SEQ ID NO: 40953
  source 1..120: mol_type = other DNA

SEQ ID NO: 70908 - DNA, 120 bp, synthetic construct; identical to SEQ ID NO: 40954
  source 1..120: mol_type = other DNA

SEQ ID NO: 70909 - DNA, 120 bp, synthetic construct; identical to SEQ ID NO: 40955
  source 1..120: mol_type = other DNA

SEQ ID NO: 70910 - DNA, 120 bp, synthetic construct; identical to SEQ ID NO: 40956
  source 1..120: mol_type = other DNA

SEQ ID NO: 70911 - DNA, 120 bp, synthetic construct; identical to SEQ ID NO: 11699
  source 1..120: mol_type = other DNA

SEQ ID NO: 70912 - DNA, 120 bp, synthetic construct; identical to SEQ ID NO: 40958
  source 1..120: mol_type = other DNA

SEQ ID NO: 70913 - DNA, 120 bp, synthetic construct; identical to SEQ ID NO: 40959
  source 1..120: mol_type = other DNA

SEQ ID NO: 70914 - DNA, 120 bp, synthetic construct; identical to SEQ ID NO: 11700
  source 1..120: mol_type = other DNA

SEQ ID NO: 70915 - DNA, 120 bp, synthetic construct; identical to SEQ ID NO: 40961
  source 1..120: mol_type = other DNA

SEQ ID NO: 70916 - DNA, 120 bp, synthetic construct; identical to SEQ ID NO: 40962
  source 1..120: mol_type = other DNA

SEQ ID NO: 70917 - DNA, 120 bp, synthetic construct; identical to SEQ ID NO: 40963
  source 1..120: mol_type = other DNA

SEQ ID NO: 70918 - DNA, 120 bp, synthetic construct; identical to SEQ ID NO: 40964
  source 1..120: mol_type = other DNA

SEQ ID NO: 70919 - DNA, 120 bp, synthetic construct; identical to SEQ ID NO: 11701
  source 1..120: mol_type = other DNA

SEQ ID NO: 70920 - DNA, 120 bp, synthetic construct; identical to SEQ ID NO: 40966
  source 1..120: mol_type = other DNA

SEQ ID NO: 70921 - DNA, 120 bp, synthetic construct; identical to SEQ ID NO: 40967
  source 1..120: mol_type = other DNA

SEQ ID NO: 70922 - DNA, 120 bp, synthetic construct; identical to SEQ ID NO: 11702
  source 1..120: mol_type = other DNA

SEQ ID NO: 70923 - DNA, 120 bp, synthetic construct; identical to SEQ ID NO: 40969
  source 1..120: mol_type = other DNA

SEQ ID NO: 70924 - DNA, 120 bp, synthetic construct; identical to SEQ ID NO: 40970
  source 1..120: mol_type = other DNA

SEQ ID NO: 70925 - DNA, 120 bp, synthetic construct; identical to SEQ ID NO: 40971
  source 1..120: mol_type = other DNA

SEQ ID NO: 70926 - DNA, 120 bp, synthetic construct; identical to SEQ ID NO: 11703
  source 1..120: mol_type = other DNA

SEQ ID NO: 70927 - DNA, 120 bp, synthetic construct; identical to SEQ ID NO: 40973
  source 1..120: mol_type = other DNA

SEQ ID NO: 70928 - DNA, 120 bp, synthetic construct; identical to SEQ ID NO: 40974
  source 1..120: mol_type = other DNA

SEQ ID NO: 70929 - DNA, 120 bp, synthetic construct; identical to SEQ ID NO: 40975
  source 1..120: mol_type = other DNA

SEQ ID NO: 70930 - DNA, 120 bp, synthetic construct; identical to SEQ ID NO: 40976
  source 1..120: mol_type = other DNA

SEQ ID NO: 70931 - DNA, 120 bp, synthetic construct; identical to SEQ ID NO: 11704
  source 1..120: mol_type = other DNA

SEQ ID NO: 70932 - DNA, 120 bp, synthetic construct; identical to SEQ ID NO: 40978
  source 1..120: mol_type = other DNA

SEQ ID NO: 70933 - DNA, 120 bp, synthetic construct; identical to SEQ ID NO: 40979
  source 1..120: mol_type = other DNA

SEQ ID NO: 70934 - DNA, 120 bp, synthetic construct; identical to SEQ ID NO: 40980
  source 1..120: mol_type = other DNA

SEQ ID NO: 70935 - DNA, 120 bp, synthetic construct; identical to SEQ ID NO: 11705
  source 1..120: mol_type = other DNA

SEQ ID NO: 70936 - DNA, 120 bp, synthetic construct; identical to SEQ ID NO: 40982
  source 1..120: mol_type = other DNA

SEQ ID NO: 70937 - DNA, 120 bp, synthetic construct; identical to SEQ ID NO: 40983
  source 1..120: mol_type = other DNA

SEQ ID NO: 70938 - DNA, 120 bp, synthetic construct; identical to SEQ ID NO: 40984
  source 1..120: mol_type = other DNA

SEQ ID NO: 70939 - DNA, 120 bp, synthetic construct; identical to SEQ ID NO: 11706
  source 1..120: mol_type = other DNA

SEQ ID NO: 70940 - DNA, 120 bp, synthetic construct; identical to SEQ ID NO: 40986
  source 1..120: mol_type = other DNA

SEQ ID NO: 70941 - DNA, 120 bp, synthetic construct; identical to SEQ ID NO: 40987
  source 1..120: mol_type = other DNA

SEQ ID NO: 70942 - DNA, 120 bp, synthetic construct; identical to SEQ ID NO: 40988
  source 1..120: mol_type = other DNA

SEQ ID NO: 70943 - DNA, 120 bp, synthetic construct; identical to SEQ ID NO: 11707
  source 1..120: mol_type = other DNA

SEQ ID NO: 70944 - DNA, 120 bp, synthetic construct; identical to SEQ ID NO: 40990
  source 1..120: mol_type = other DNA

SEQ ID NO: 70945 - DNA, 120 bp, synthetic construct; identical to SEQ ID NO: 40991
  source 1..120: mol_type = other DNA

SEQ ID NO: 70946 - DNA, 120 bp, synthetic construct; identical to SEQ ID NO: 40992
  source 1..120: mol_type = other DNA

SEQ ID NO: 70947 - DNA, 120 bp, synthetic construct; identical to SEQ ID NO: 11708
  source 1..120: mol_type = other DNA

SEQ ID NO: 70948 - DNA, 120 bp, synthetic construct; identical to SEQ ID NO: 40994
  source 1..120: mol_type = other DNA

SEQ ID NO: 70949 - DNA, 120 bp, synthetic construct; identical to SEQ ID NO: 40995
  source 1..120: mol_type = other DNA

SEQ ID NO: 70950 - DNA, 120 bp, synthetic construct; identical to SEQ ID NO: 40996
  source 1..120: mol_type = other DNA

SEQ ID NO: 70951 - DNA, 120 bp, synthetic construct; identical to SEQ ID NO: 11709
  source 1..120: mol_type = other DNA

SEQ ID NO: 70952 - DNA, 120 bp, synthetic construct; identical to SEQ ID NO: 40998
  source 1..120: mol_type = other DNA

SEQ ID NO: 70953 - DNA, 120 bp, synthetic construct; identical to SEQ ID NO: 40999
  source 1..120: mol_type = other DNA

SEQ ID NO: 70954 - DNA, 120 bp, synthetic construct; identical to SEQ ID NO: 41000
  source 1..120: mol_type = other DNA

SEQ ID NO: 70955 - DNA, 120 bp, synthetic construct; identical to SEQ ID NO: 11710
  source 1..120: mol_type = other DNA

SEQ ID NO: 70956 - DNA, 120 bp, synthetic construct; identical to SEQ ID NO: 41002
  source 1..120: mol_type = other DNA

SEQ ID NO: 70957 - DNA, 120 bp, synthetic construct; identical to SEQ ID NO: 41003
  source 1..120: mol_type = other DNA

SEQ ID NO: 70958 - DNA, 120 bp, synthetic construct; identical to SEQ ID NO: 11711
  source 1..120: mol_type = other DNA

SEQ ID NO: 70959 - DNA, 120 bp, synthetic construct; identical to SEQ ID NO: 41005
  source 1..120: mol_type = other DNA

SEQ ID NO: 70960 - DNA, 120 bp, synthetic construct; identical to SEQ ID NO: 41006
  source 1..120: mol_type = other DNA

SEQ ID NO: 70961 - DNA, 120 bp, synthetic construct; identical to SEQ ID NO: 41007
  source 1..120: mol_type = other DNA

SEQ ID NO: 70962 - DNA, 120 bp, synthetic construct; identical to SEQ ID NO: 41008
  source 1..120: mol_type = other DNA

SEQ ID NO: 70963 - DNA, 120 bp, synthetic construct; identical to SEQ ID NO: 11712
  source 1..120: mol_type = other DNA

SEQ ID NO: 70964 - DNA, 120 bp, synthetic construct; identical to SEQ ID NO: 41010
  source 1..120: mol_type = other DNA

SEQ ID NO: 70965 - DNA, 120 bp, synthetic construct; identical to SEQ ID NO: 41011
  source 1..120: mol_type = other DNA

SEQ ID NO: 70966 - DNA, 120 bp, synthetic construct; identical to SEQ ID NO: 11713
  source 1..120: mol_type = other DNA

SEQ ID NO: 70967 - DNA, 120 bp, synthetic construct; identical to SEQ ID NO: 41013
  source 1..120: mol_type = other DNA

SEQ ID NO: 70968 - DNA, 120 bp, synthetic construct; identical to SEQ ID NO: 41014
  source 1..120: mol_type = other DNA

SEQ ID NO: 70969 - DNA, 120 bp, synthetic construct; identical to SEQ ID NO: 41015
  source 1..120: mol_type = other DNA

SEQ ID NO: 70970 - DNA, 120 bp, synthetic construct; identical to SEQ ID NO: 41016
  source 1..120: mol_type = other DNA

SEQ ID NO: 70971 - DNA, 120 bp, synthetic construct; identical to SEQ ID NO: 11714
  source 1..120: mol_type = other DNA

SEQ ID NO: 70972 - DNA, 120 bp, synthetic construct; identical to SEQ ID NO: 41018
  source 1..120: mol_type = other DNA

SEQ ID NO: 70973 - DNA, 120 bp, synthetic construct; identical to SEQ ID NO: 41019
  source 1..120: mol_type = other DNA

SEQ ID NO: 70974 - DNA, 120 bp, synthetic construct; identical to SEQ ID NO: 11715
  source 1..120: mol_type = other DNA

SEQ ID NO: 70975 - DNA, 120 bp, synthetic construct; identical to SEQ ID NO: 41021
  source 1..120: mol_type = other DNA

SEQ ID NO: 70976 - DNA, 120 bp, synthetic construct; identical to SEQ ID NO: 41022
  source 1..120: mol_type = other DNA

SEQ ID NO: 70977 - DNA, 120 bp, synthetic construct; identical to SEQ ID NO: 41023
  source 1..120: mol_type = other DNA

SEQ ID NO: 70978 - DNA, 120 bp, synthetic construct; identical to SEQ ID NO: 41024
  source 1..120: mol_type = other DNA

SEQ ID NO: 70979 - DNA, 120 bp, synthetic construct; identical to SEQ ID NO: 41025
  source 1..120: mol_type = other DNA

SEQ ID NO: 70980 - DNA, 120 bp, synthetic construct; identical to SEQ ID NO: 11716
  source 1..120: mol_type = other DNA

SEQ ID NO: 70981 - DNA, 120 bp, synthetic construct; identical to SEQ ID NO: 41027
  source 1..120: mol_type = other DNA

SEQ ID NO: 70982 - DNA, 120 bp, synthetic construct; identical to SEQ ID NO: 41028
  source 1..120: mol_type = other DNA

SEQ ID NO: 70983 - DNA, 120 bp, synthetic construct; identical to SEQ ID NO: 41029
  source 1..120: mol_type = other DNA

SEQ ID NO: 70984 - DNA, 120 bp, synthetic construct; identical to SEQ ID NO: 11717
  source 1..120: mol_type = other DNA

SEQ ID NO: 70985 - DNA, 120 bp, synthetic construct; identical to SEQ ID NO: 41031
  source 1..120: mol_type = other DNA

SEQ ID NO: 70986 - DNA, 120 bp, synthetic construct; identical to SEQ ID NO: 41032
  source 1..120: mol_type = other DNA

SEQ ID NO: 70987 - DNA, 120 bp, synthetic construct; identical to SEQ ID NO: 41033
  source 1..120: mol_type = other DNA

SEQ ID NO: 70988 - DNA, 120 bp, synthetic construct; identical to SEQ ID NO: 11718
  source 1..120: mol_type = other DNA

SEQ ID NO: 70989 - DNA, 120 bp, synthetic construct; identical to SEQ ID NO: 41035
  source 1..120: mol_type = other DNA

SEQ ID NO: 70990 - DNA, 120 bp, synthetic construct; identical to SEQ ID NO: 41036
  source 1..120: mol_type = other DNA

SEQ ID NO: 70991 - DNA, 120 bp, synthetic construct; identical to SEQ ID NO: 41037
  source 1..120: mol_type = other DNA

SEQ ID NO: 70992 - DNA, 120 bp, synthetic construct; identical to SEQ ID NO: 11719
  source 1..120: mol_type = other DNA

SEQ ID NO: 70993 - DNA, 120 bp, synthetic construct; identical to SEQ ID NO: 41039
  source 1..120: mol_type = other DNA

SEQ ID NO: 70994 - DNA, 120 bp, synthetic construct; identical to SEQ ID NO: 41040
  source 1..120: mol_type = other DNA

SEQ ID NO: 70995 - DNA, 120 bp, synthetic construct; identical to SEQ ID NO: 41041
  source 1..120: mol_type = other DNA

SEQ ID NO: 70996 - DNA, 120 bp, synthetic construct; identical to SEQ ID NO: 11720
  source 1..120: mol_type = other DNA

SEQ ID NO: 70997 - DNA, 120 bp, synthetic construct; identical to SEQ ID NO: 41043
  source 1..120: mol_type = other DNA

SEQ ID NO: 70998 - DNA, 120 bp, synthetic construct; identical to SEQ ID NO: 41044
  source 1..120: mol_type = other DNA

SEQ ID NO: 70999 - DNA, 120 bp, synthetic construct; identical to SEQ ID NO: 41045
  source 1..120: mol_type = other DNA

SEQ ID NO: 71000 - DNA, 120 bp, synthetic construct; identical to SEQ ID NO: 41046
  source 1..120: mol_type = other DNA

SEQ ID NO: 71001 - DNA, 120 bp, synthetic construct; identical to SEQ ID NO: 11721
  source 1..120: mol_type = other DNA

SEQ ID NO: 71002 - DNA, 120 bp, synthetic construct; identical to SEQ ID NO: 41048
  source 1..120: mol_type = other DNA

SEQ ID NO: 71003 - DNA, 120 bp, synthetic construct; identical to SEQ ID NO: 41049
  source 1..120: mol_type = other DNA

SEQ ID NO: 71004 - DNA, 120 bp, synthetic construct; identical to SEQ ID NO: 41050
  source 1..120: mol_type = other DNA

SEQ ID NO: 71005 - DNA, 120 bp, synthetic construct; identical to SEQ ID NO: 41051
  source 1..120: mol_type = other DNA

SEQ ID NO: 71006 - DNA, 120 bp, synthetic construct; identical to SEQ ID NO: 41052
  source 1..120: mol_type = other DNA

SEQ ID NO: 71007 - DNA, 120 bp, synthetic construct; identical to SEQ ID NO: 11722
  source 1..120: mol_type = other DNA

SEQ ID NO: 71008 - DNA, 120 bp, synthetic construct; identical to SEQ ID NO: 41054
  source 1..120: mol_type = other DNA

SEQ ID NO: 71009 - DNA, 120 bp, synthetic construct; identical to SEQ ID NO: 41055
  source 1..120: mol_type = other DNA

SEQ ID NO: 71010 - DNA, 120 bp, synthetic construct; identical to SEQ ID NO: 41056
  source 1..120: mol_type = other DNA

SEQ ID NO: 71011 - DNA, 120 bp, synthetic construct; identical to SEQ ID NO: 11723
  source 1..120: mol_type = other DNA

SEQ ID NO: 71012 - DNA, 120 bp, synthetic construct; identical to SEQ ID NO: 41058
  source 1..120: mol_type = other DNA

SEQ ID NO: 71013 - DNA, 120 bp, synthetic construct; identical to SEQ ID NO: 41059
  source 1..120: mol_type = other DNA

SEQ ID NO: 71014 - DNA, 120 bp, synthetic construct; identical to SEQ ID NO: 41060
  source 1..120: mol_type = other DNA

SEQ ID NO: 71015 - DNA, 120 bp, synthetic construct; identical to SEQ ID NO: 11724
  source 1..120: mol_type = other DNA

SEQ ID NO: 71016 - DNA, 120 bp, synthetic construct; identical to SEQ ID NO: 41062
  source 1..120: mol_type = other DNA

SEQ ID NO: 71017 - DNA, 120 bp, synthetic construct; identical to SEQ ID NO: 41063
  source 1..120: mol_type = other DNA

SEQ ID NO: 71018 - DNA, 120 bp, synthetic construct; identical to SEQ ID NO: 41064
  source 1..120: mol_type = other DNA

SEQ ID NO: 71019 - DNA, 120 bp, synthetic construct; identical to SEQ ID NO: 11725
  source 1..120: mol_type = other DNA

SEQ ID NO: 71020 - DNA, 120 bp, synthetic construct; identical to SEQ ID NO: 41066
  source 1..120: mol_type = other DNA

SEQ ID NO: 71021 - DNA, 120 bp, synthetic construct; identical to SEQ ID NO: 41067
  source 1..120: mol_type = other DNA

SEQ ID NO: 71022 - DNA, 120 bp, synthetic construct; identical to SEQ ID NO: 41068
  source 1..120: mol_type = other DNA

SEQ ID NO: 71023 - DNA, 120 bp, synthetic construct; identical to SEQ ID NO: 41069
  source 1..120: mol_type = other DNA

SEQ ID NO: 71024 - DNA, 120 bp, synthetic construct; identical to SEQ ID NO: 11726
  source 1..120: mol_type = other DNA

SEQ ID NO: 71025 - DNA, 120 bp, synthetic construct; identical to SEQ ID NO: 41071
  source 1..120: mol_type = other DNA

SEQ ID NO: 71026 - DNA, 120 bp, synthetic construct; identical to SEQ ID NO: 41072
  source 1..120: mol_type = other DNA

SEQ ID NO: 71027 - DNA, 120 bp, synthetic construct; identical to SEQ ID NO: 11727
  source 1..120: mol_type = other DNA

SEQ ID NO: 71028 - DNA, 120 bp, synthetic construct; identical to SEQ ID NO: 41074
  source 1..120: mol_type = other DNA

SEQ ID NO: 71029 - DNA, 120 bp, synthetic construct; identical to SEQ ID NO: 41075
  source 1..120: mol_type = other DNA

SEQ ID NO: 71030 - DNA, 120 bp, synthetic construct; identical to SEQ ID NO: 41076
  source 1..120: mol_type = other DNA

SEQ ID NO: 71031 - DNA, 120 bp, synthetic construct; identical to SEQ ID NO: 41077
  source 1..120: mol_type = other DNA

SEQ ID NO: 71032 - DNA, 120 bp, synthetic construct; identical to SEQ ID NO: 11728
  source 1..120: mol_type = other DNA

SEQ ID NO: 71033 - DNA, 120 bp, synthetic construct; identical to SEQ ID NO: 41079
  source 1..120: mol_type = other DNA

SEQ ID NO: 71034 - DNA, 120 bp, synthetic construct; identical to SEQ ID NO: 41080
  source 1..120: mol_type = other DNA

SEQ ID NO: 71035 - DNA, 120 bp, synthetic construct; identical to SEQ ID NO: 11729
  source 1..120: mol_type = other DNA

SEQ ID NO: 71036 - DNA, 120 bp, synthetic construct; identical to SEQ ID NO: 41082
  source 1..120: mol_type = other DNA

SEQ ID NO: 71037 - DNA, 120 bp, synthetic construct; identical to SEQ ID NO: 41083
  source 1..120: mol_type = other DNA

SEQ ID NO: 71038 - DNA, 120 bp, synthetic construct; identical to SEQ ID NO: 41084
  source 1..120: mol_type = other DNA

SEQ ID NO: 71039 - DNA, 120 bp, synthetic construct; identical to SEQ ID NO: 41085
  source 1..120: mol_type = other DNA

SEQ ID NO: 71040 - DNA, 120 bp, synthetic construct; identical to SEQ ID NO: 11730
  source 1..120: mol_type = other DNA

SEQ ID NO: 71041 - DNA, 120 bp, synthetic construct; identical to SEQ ID NO: 41087
  source 1..120: mol_type = other DNA

SEQ ID NO: 71042 - DNA, 120 bp, synthetic construct; identical to SEQ ID NO: 41088
  source 1..120: mol_type = other DNA

SEQ ID NO: 71043 - DNA, 120 bp, synthetic construct; identical to SEQ ID NO: 41089
  source 1..120: mol_type = other DNA

SEQ ID NO: 71044 - DNA, 120 bp, synthetic construct; identical to SEQ ID NO: 11731
  source 1..120: mol_type = other DNA

SEQ ID NO: 71045 - DNA, 120 bp, synthetic construct; identical to SEQ ID NO: 41091
  source 1..120: mol_type = other DNA

SEQ ID NO: 71046 - DNA, 120 bp, synthetic construct; identical to SEQ ID NO: 41092
  source 1..120: mol_type = other DNA

SEQ ID NO: 71047 - DNA, 120 bp, synthetic construct; identical to SEQ ID NO: 11732
  source 1..120: mol_type = other DNA

SEQ ID NO: 71048 - DNA, 120 bp, synthetic construct; identical to SEQ ID NO: 41094
  source 1..120: mol_type = other DNA

SEQ ID NO: 71049 - DNA, 120 bp, synthetic construct; identical to SEQ ID NO: 41095
  source 1..120: mol_type = other DNA

SEQ ID NO: 71050 - DNA, 120 bp, synthetic construct; identical to SEQ ID NO: 41096
  source 1..120: mol_type = other DNA

SEQ ID NO: 71051 - DNA, 120 bp, synthetic construct; identical to SEQ ID NO: 41097
  source 1..120: mol_type = other DNA

SEQ ID NO: 71052 - DNA, 120 bp, synthetic construct; identical to SEQ ID NO: 11733
  source 1..120: mol_type = other DNA

SEQ ID NO: 71053 - DNA, 120 bp, synthetic construct; identical to SEQ ID NO: 41099
  source 1..120: mol_type = other DNA

SEQ ID NO: 71054 - DNA, 120 bp, synthetic construct; identical to SEQ ID NO: 41100
  source 1..120: mol_type = other DNA

SEQ ID NO: 71055 - DNA, 120 bp, synthetic construct; identical to SEQ ID NO: 11734
  source 1..120: mol_type = other DNA

SEQ ID NO: 71056 - DNA, 120 bp, synthetic construct; identical to SEQ ID NO: 41102
  source 1..120: mol_type = other DNA

SEQ ID NO: 71057 - DNA, 120 bp, synthetic construct; identical to SEQ ID NO: 41103
  source 1..120: mol_type = other DNA

SEQ ID NO: 71058 - DNA, 120 bp, synthetic construct; identical to SEQ ID NO: 41104
  source 1..120: mol_type = other DNA

SEQ ID NO: 71059 - DNA, 120 bp, synthetic construct; identical to SEQ ID NO: 11735
  source 1..120: mol_type = other DNA

SEQ ID NO: 71060 - DNA, 120 bp, synthetic construct; identical to SEQ ID NO: 41106
  source 1..120: mol_type = other DNA

SEQ ID NO: 71061 - DNA, 120 bp, synthetic construct; identical to SEQ ID NO: 41107
  source 1..120: mol_type = other DNA

SEQ ID NO: 71062 - DNA, 120 bp, synthetic construct; identical to SEQ ID NO: 41108
  source 1..120: mol_type = other DNA

SEQ ID NO: 71063 - DNA, 120 bp, synthetic construct; identical to SEQ ID NO: 41109
  source 1..120: mol_type = other DNA

SEQ ID NO: 71064 - DNA, 120 bp, synthetic construct; identical to SEQ ID NO: 11736
  source 1..120: mol_type = other DNA

SEQ ID NO: 71065 - DNA, 120 bp, synthetic construct; identical to SEQ ID NO: 41111
  source 1..120: mol_type = other DNA

SEQ ID NO: 71066 - DNA, 120 bp, synthetic construct; identical to SEQ ID NO: 41112
  source 1..120: mol_type = other DNA

SEQ ID NO: 71067 - DNA, 120 bp, synthetic construct; identical to SEQ ID NO: 41113
  source 1..120: mol_type = other DNA

SEQ ID NO: 71068 - DNA, 120 bp, synthetic construct; identical to SEQ ID NO: 4438
  source 1..120: mol_type = other DNA

SEQ ID NO: 71069 - DNA, 120 bp, synthetic construct; identical to SEQ ID NO: 41115
  source 1..120: mol_type = other DNA

SEQ ID NO: 71070 - DNA, 120 bp, synthetic construct; identical to SEQ ID NO: 41116
  source 1..120: mol_type = other DNA

SEQ ID NO: 71071 - DNA, 120 bp, synthetic construct; identical to SEQ ID NO: 41117
  source 1..120: mol_type = other DNA

SEQ ID NO: 71072 - DNA, 120 bp, synthetic construct; identical to SEQ ID NO: 11738
  source 1..120: mol_type = other DNA

SEQ ID NO: 71073 - DNA, 120 bp, synthetic construct; identical to SEQ ID NO: 41119
  source 1..120: mol_type = other DNA

SEQ ID NO: 71074 - DNA, 120 bp, synthetic construct; identical to SEQ ID NO: 41120
  source 1..120: mol_type = other DNA

SEQ ID NO: 71075 - DNA, 120 bp, synthetic construct; identical to SEQ ID NO: 41121
  source 1..120: mol_type = other DNA

SEQ ID NO: 71076 - DNA, 120 bp, synthetic construct; identical to SEQ ID NO: 11739
  source 1..120: mol_type = other DNA

SEQ ID NO: 71077 - DNA, 120 bp, synthetic construct; identical to SEQ ID NO: 41123
  source 1..120: mol_type = other DNA

SEQ ID NO: 71078 - DNA, 120 bp, synthetic construct; identical to SEQ ID NO: 41124
  source 1..120: mol_type = other DNA

SEQ ID NO: 71079 - DNA, 120 bp, synthetic construct; identical to SEQ ID NO: 41125
  source 1..120: mol_type = other DNA

SEQ ID NO: 71080 - DNA, 120 bp, synthetic construct; identical to SEQ ID NO: 41126
  source 1..120: mol_type = other DNA

SEQ ID NO: 71081 - DNA, 120 bp, synthetic construct; identical to SEQ ID NO: 11740
  source 1..120: mol_type = other DNA

SEQ ID NO: 71082 - DNA, 120 bp, synthetic construct; identical to SEQ ID NO: 41128
  source 1..120: mol_type = other DNA

SEQ ID NO: 71083 - DNA, 120 bp, synthetic construct; identical to SEQ ID NO: 41129
  source 1..120: mol_type = other DNA

SEQ ID NO: 71084 - DNA, 120 bp, synthetic construct; identical to SEQ ID NO: 11741
  source 1..120: mol_type = other DNA

SEQ ID NO: 71085 - DNA, 120 bp, synthetic construct; identical to SEQ ID NO: 41131
  source 1..120: mol_type = other DNA

SEQ ID NO: 71086 - DNA, 120 bp, synthetic construct; identical to SEQ ID NO: 41132
  source 1..120: mol_type = other DNA

SEQ ID NO: 71087 - DNA, 120 bp, synthetic construct; identical to SEQ ID NO: 41133
  source 1..120: mol_type = other DNA

SEQ ID NO: 71088 - DNA, 120 bp, synthetic construct; identical to SEQ ID NO: 41134
  source 1..120: mol_type = other DNA

SEQ ID NO: 71089 - DNA, 120 bp, synthetic construct; identical to SEQ ID NO: 11742
  source 1..120: mol_type = other DNA

SEQ ID NO: 71090 - DNA, 120 bp, synthetic construct; identical to SEQ ID NO: 41136
  source 1..120: mol_type = other DNA

SEQ ID NO: 71091 - DNA, 120 bp, synthetic construct; identical to SEQ ID NO: 41137
  source 1..120: mol_type = other DNA

SEQ ID NO: 71092 - DNA, 120 bp, synthetic construct; identical to SEQ ID NO: 11743
  source 1..120: mol_type = other DNA

SEQ ID NO: 71093 - DNA, 120 bp, synthetic construct; identical to SEQ ID NO: 41139
  source 1..120: mol_type = other DNA

SEQ ID NO: 71094 - DNA, 120 bp, synthetic construct; identical to SEQ ID NO: 41140
  source 1..120: mol_type = other DNA

SEQ ID NO: 71095 - DNA, 120 bp, synthetic construct; identical to SEQ ID NO: 41141
  source 1..120: mol_type = other DNA

SEQ ID NO: 71096 - DNA, 120 bp, synthetic construct; identical to SEQ ID NO: 11744
  source 1..120: mol_type = other DNA

SEQ ID NO: 71097 - DNA, 120 bp, synthetic construct; identical to SEQ ID NO: 41143
  source 1..120: mol_type = other DNA

SEQ ID NO: 71098 - DNA, 120 bp, synthetic construct; identical to SEQ ID NO: 41144
  source 1..120: mol_type = other DNA

SEQ ID NO: 71099 - DNA, 120 bp, synthetic construct; identical to SEQ ID NO: 41145
  source 1..120: mol_type = other DNA

SEQ ID NO: 71100 - DNA, 120 bp, synthetic construct; identical to SEQ ID NO: 11745
  source 1..120: mol_type = other DNA

SEQ ID NO: 71101 - DNA, 120 bp, synthetic construct; identical to SEQ ID NO: 41147
  source 1..120: mol_type = other DNA

SEQ ID NO: 71102 - DNA, 120 bp, synthetic construct; identical to SEQ ID NO: 41148
  source 1..120: mol_type = other DNA

SEQ ID NO: 71103 - DNA, 120 bp, synthetic construct; identical to SEQ ID NO: 41149
  source 1..120: mol_type = other DNA

SEQ ID NO: 71104 - DNA, 120 bp, synthetic construct; identical to SEQ ID NO: 41150
  source 1..120: mol_type = other DNA

SEQ ID NO: 71105 - DNA, 120 bp, synthetic construct; identical to SEQ ID NO: 11746
  source 1..120: mol_type = other DNA

SEQ ID NO: 71106 - DNA, 120 bp, synthetic construct; identical to SEQ ID NO: 41152
  source 1..120: mol_type = other DNA

SEQ ID NO: 71107 - DNA, 120 bp, synthetic construct; identical to SEQ ID NO: 41153
  source 1..120: mol_type = other DNA

SEQ ID NO: 71108 - DNA, 120 bp, synthetic construct; identical to SEQ ID NO: 41154
  source 1..120: mol_type = other DNA

SEQ ID NO: 71109 - DNA, 120 bp, synthetic construct; identical to SEQ ID NO: 11747
  source 1..120: mol_type = other DNA

SEQ ID NO: 71110 - DNA, 120 bp, synthetic construct; identical to SEQ ID NO: 41156
  source 1..120: mol_type = other DNA

SEQ ID NO: 71111 - DNA, 120 bp, synthetic construct; identical to SEQ ID NO: 41157
  source 1..120: mol_type = other DNA

SEQ ID NO: 71112 - DNA, 120 bp, synthetic construct; identical to SEQ ID NO: 41158
  source 1..120: mol_type = other DNA

SEQ ID NO: 71113 - DNA, 120 bp, synthetic construct; identical to SEQ ID NO: 4448
  source 1..120: mol_type = other DNA

SEQ ID NO: 71114 - DNA, 120 bp, synthetic construct; identical to SEQ ID NO: 41160
  source 1..120: mol_type = other DNA

SEQ ID NO: 71115 - DNA, 120 bp, synthetic construct; identical to SEQ ID NO: 41161
  source 1..120: mol_type = other DNA

SEQ ID NO: 71116 - DNA, 120 bp, synthetic construct; identical to SEQ ID NO: 41162
  source 1..120: mol_type = other DNA

SEQ ID NO: 71117 - DNA, 120 bp, synthetic construct; identical to SEQ ID NO: 11749
  source 1..120: mol_type = other DNA

SEQ ID NO: 71118 - DNA, 120 bp, synthetic construct; identical to SEQ ID NO: 41164
  source 1..120: mol_type = other DNA

SEQ ID NO: 71119 - DNA, 120 bp, synthetic construct; identical to SEQ ID NO: 41165
  source 1..120: mol_type = other DNA

SEQ ID NO: 71120 - DNA, 120 bp, synthetic construct; identical to SEQ ID NO: 41166
  source 1..120: mol_type = other DNA

SEQ ID NO: 71121 - DNA, 120 bp, synthetic construct; identical to SEQ ID NO: 11750
  source 1..120: mol_type = other DNA

SEQ ID NO: 71122 - DNA, 120 bp, synthetic construct; identical to SEQ ID NO: 41168
  source 1..120: mol_type = other DNA

SEQ ID NO: 71123 - DNA, 120 bp, synthetic construct; identical to SEQ ID NO: 41169
  source 1..120: mol_type = other DNA

SEQ ID NO: 71124 - DNA, 120 bp, synthetic construct; identical to SEQ ID NO: 41170
  source 1..120: mol_type = other DNA

SEQ ID NO: 71125 - DNA, 120 bp, synthetic construct; identical to SEQ ID NO: 11751
  source 1..120: mol_type = other DNA

SEQ ID NO: 71126 - DNA, 120 bp, synthetic construct; identical to SEQ ID NO: 41172
  source 1..120: mol_type = other DNA

SEQ ID NO: 71127 - DNA, 120 bp, synthetic construct; identical to SEQ ID NO: 41173
  source 1..120: mol_type = other DNA

SEQ ID NO: 71128 - DNA, 120 bp, synthetic construct; identical to SEQ ID NO: 41174
  source 1..120: mol_type = other DNA

SEQ ID NO: 71129 - DNA, 120 bp, synthetic construct; identical to SEQ ID NO: 11752
  source 1..120: mol_type = other DNA

SEQ ID NO: 71130 - DNA, 120 bp, synthetic construct; identical to SEQ ID NO: 41176
  source 1..120: mol_type = other DNA

SEQ ID NO: 71131 - DNA, 120 bp, synthetic construct; identical to SEQ ID NO: 41177
  source 1..120: mol_type = other DNA

SEQ ID NO: 71132 - DNA, 120 bp, synthetic construct; identical to SEQ ID NO: 41178
  source 1..120: mol_type = other DNA

SEQ ID NO: 71133 - DNA, 120 bp, synthetic construct; identical to SEQ ID NO: 11753
  source 1..120: mol_type = other DNA

SEQ ID NO: 71134 - DNA, 120 bp, synthetic construct; identical to SEQ ID NO: 41180
  source 1..120: mol_type = other DNA

SEQ ID NO: 71135 - DNA, 120 bp, synthetic construct; identical to SEQ ID NO: 41181
  source 1..120: mol_type = other DNA

SEQ ID NO: 71136 - DNA, 120 bp, synthetic construct; identical to SEQ ID NO: 41182
  source 1..120: mol_type = other DNA

SEQ ID NO: 71137 - DNA, 120 bp, synthetic construct; identical to SEQ ID NO: 41183
  source 1..120: mol_type = other DNA

SEQ ID NO: 71138 - DNA, 120 bp, synthetic construct; identical to SEQ ID NO: 11754
  source 1..120: mol_type = other DNA

SEQ ID NO: 71139 - DNA, 120 bp, synthetic construct; identical to SEQ ID NO: 41185
  source 1..120: mol_type = other DNA

SEQ ID NO: 71140 - DNA, 120 bp, synthetic construct; identical to SEQ ID NO: 41186
  source 1..120: mol_type = other DNA

SEQ ID NO: 71141 - DNA, 120 bp, synthetic construct; identical to SEQ ID NO: 11755
  source 1..120: mol_type = other DNA

SEQ ID NO: 71142 - DNA, 120 bp, synthetic construct; identical to SEQ ID NO: 41188
  source 1..120: mol_type = other DNA

SEQ ID NO: 71143 - DNA, 120 bp, synthetic construct; identical to SEQ ID NO: 41189
  source 1..120: mol_type = other DNA

SEQ ID NO: 71144 - DNA, 120 bp, synthetic construct; identical to SEQ ID NO: 11756
  source 1..120: mol_type = other DNA

SEQ ID NO: 71145 - DNA, 120 bp, synthetic construct; identical to SEQ ID NO: 41191
  source 1..120: mol_type = other DNA

SEQ ID NO: 71146 - DNA, 120 bp, synthetic construct; identical to SEQ ID NO: 41192
  source 1..120: mol_type = other DNA

SEQ ID NO: 71147 - DNA, 120 bp, synthetic construct; identical to SEQ ID NO: 11757
  source 1..120: mol_type = other DNA

SEQ ID NO: 71148 - DNA, 120 bp, synthetic construct; identical to SEQ ID NO: 41194
  source 1..120: mol_type = other DNA

SEQ ID NO: 71149 - DNA, 120 bp, synthetic construct; identical to SEQ ID NO: 41195
  source 1..120: mol_type = other DNA

SEQ ID NO: 71150 - DNA, 120 bp, synthetic construct; identical to SEQ ID NO: 41196
  source 1..120: mol_type = other DNA

SEQ ID NO: 71151 - DNA, 120 bp, synthetic construct; identical to SEQ ID NO: 11758
  source 1..120: mol_type = other DNA

SEQ ID NO: 71152 - DNA, 120 bp, synthetic construct; identical to SEQ ID NO: 41198
  source 1..120: mol_type = other DNA

SEQ ID NO: 71153 - DNA, 120 bp, synthetic construct; identical to SEQ ID NO: 41199
  source 1..120: mol_type = other DNA

SEQ ID NO: 71154 - DNA, 120 bp, synthetic construct; identical to SEQ ID NO: 41200
  source 1..120: mol_type = other DNA

SEQ ID NO: 71155 - DNA, 120 bp, synthetic construct; identical to SEQ ID NO: 41201
  source 1..120: mol_type = other DNA

SEQ ID NO: 71156 - DNA, 120 bp, synthetic construct; identical to SEQ ID NO: 4458
  source 1..120: mol_type = other DNA

SEQ ID NO: 71157 - DNA, 120 bp, synthetic construct; identical to SEQ ID NO: 41203
  source 1..120: mol_type = other DNA

SEQ ID NO: 71158 - DNA, 120 bp, synthetic construct; identical to SEQ ID NO: 41204
  source 1..120: mol_type = other DNA

SEQ ID NO: 71159 - DNA, 120 bp, synthetic construct; identical to SEQ ID NO: 11760
  source 1..120: mol_type = other DNA

SEQ ID NO: 71160 - DNA, 120 bp, synthetic construct; identical to SEQ ID NO: 41206
  source 1..120: mol_type = other DNA

SEQ ID NO: 71161 - DNA, 120 bp, synthetic construct; identical to SEQ ID NO: 41207
  source 1..120: mol_type = other DNA

SEQ ID NO: 71162 - DNA, 120 bp, synthetic construct; identical to SEQ ID NO: 41208
  source 1..120: mol_type = other DNA

SEQ ID NO: 71163 - DNA, 120 bp, synthetic construct; identical to SEQ ID NO: 11761
  source 1..120: mol_type = other DNA

SEQ ID NO: 71164 - DNA, 120 bp, synthetic construct; identical to SEQ ID NO: 41210
  source 1..120: mol_type = other DNA

SEQ ID NO: 71165 - DNA, 120 bp, synthetic construct; identical to SEQ ID NO: 41211
  source 1..120: mol_type = other DNA

SEQ ID NO: 71166 - DNA, 120 bp, synthetic construct; identical to SEQ ID NO: 41212
  source 1..120: mol_type = other DNA

SEQ ID NO: 71167 - DNA, 120 bp, synthetic construct; identical to SEQ ID NO: 11762
  source 1..120: mol_type = other DNA

SEQ ID NO: 71168 - DNA, 120 bp, synthetic construct; identical to SEQ ID NO: 41214
  source 1..120: mol_type = other DNA

SEQ ID NO: 71169 - DNA, 120 bp, synthetic construct; identical to SEQ ID NO: 41215
  source 1..120: mol_type = other DNA

SEQ ID NO: 71170 - DNA, 120 bp, synthetic construct; identical to SEQ ID NO: 41216
  source 1..120: mol_type = other DNA

SEQ ID NO: 71171 - DNA, 120 bp, synthetic construct; identical to SEQ ID NO: 41217
  source 1..120: mol_type = other DNA

SEQ ID NO: 71172 - DNA, 120 bp, synthetic construct; identical to SEQ ID NO: 11763
  source 1..120: mol_type = other DNA

SEQ ID NO: 71173 - DNA, 120 bp, synthetic construct; identical to SEQ ID NO: 41219
  source 1..120: mol_type = other DNA

SEQ ID NO: 71174 - DNA, 120 bp, synthetic construct; identical to SEQ ID NO: 41220
  source 1..120: mol_type = other DNA

SEQ ID NO: 71175 - DNA, 120 bp, synthetic construct; identical to SEQ ID NO: 41221
  source 1..120: mol_type = other DNA

SEQ ID NO: 71176 - DNA, 120 bp, synthetic construct; identical to SEQ ID NO: 11764
  source 1..120: mol_type = other DNA

SEQ ID NO: 71177 - DNA, 120 bp, synthetic construct; identical to SEQ ID NO: 41223
  source 1..120: mol_type = other DNA

SEQ ID NO: 71178 - DNA, 120 bp, synthetic construct; identical to SEQ ID NO: 41224
  source 1..120: mol_type = other DNA

SEQ ID NO: 71179 - DNA, 120 bp, synthetic construct; identical to SEQ ID NO: 11765
  source 1..120: mol_type = other DNA

SEQ ID NO: 71180 - DNA, 120 bp, synthetic construct; identical to SEQ ID NO: 41226
  source 1..120: mol_type = other DNA

SEQ ID NO: 71181 - DNA, 120 bp, synthetic construct; identical to SEQ ID NO: 41227
  source 1..120: mol_type = other DNA

SEQ ID NO: 71182 - DNA, 120 bp, synthetic construct; identical to SEQ ID NO: 41228
  source 1..120: mol_type = other DNA

SEQ ID NO: 71183 - DNA, 120 bp, synthetic construct; identical to SEQ ID NO: 11766
  source 1..120: mol_type = other DNA

SEQ ID NO: 71184 - DNA, 120 bp, synthetic construct; identical to SEQ ID NO: 41230
  source 1..120: mol_type = other DNA

SEQ ID NO: 71185 - DNA, 120 bp, synthetic construct; identical to SEQ ID NO: 41231
  source 1..120: mol_type = other DNA

SEQ ID NO: 71186 - DNA, 120 bp, synthetic construct; identical to SEQ ID NO: 41232
  source 1..120: mol_type = other DNA

SEQ ID NO: 71187 - DNA, 120 bp, synthetic construct; identical to SEQ ID NO: 11767
  source 1..120: mol_type = other DNA

SEQ ID NO: 71188 - DNA, 120 bp, synthetic construct; identical to SEQ ID NO: 41234
  source 1..120: mol_type = other DNA

SEQ ID NO: 71189 - DNA, 120 bp, synthetic construct; identical to SEQ ID NO: 41235
  source 1..120: mol_type = other DNA

SEQ ID NO: 71190 - DNA, 120 bp, synthetic construct; identical to SEQ ID NO: 41236
  source 1..120: mol_type = other DNA

SEQ ID NO: 71191 - DNA, 120 bp, synthetic construct; identical to SEQ ID NO: 11768
  source 1..120: mol_type = other DNA

SEQ ID NO: 71192 - DNA, 120 bp, synthetic construct; identical to SEQ ID NO: 41238
  source 1..120: mol_type = other DNA

SEQ ID NO: 71193 - DNA, 120 bp, synthetic construct; identical to SEQ ID NO: 41239
  source 1..120: mol_type = other DNA

SEQ ID NO: 71194 - DNA, 120 bp, synthetic construct; identical to SEQ ID NO: 41240
  source 1..120: mol_type = other DNA

SEQ ID NO: 71195 - DNA, 120 bp, synthetic construct; identical to SEQ ID NO: 11769
  source 1..120: mol_type = other DNA

SEQ ID NO: 71196 - DNA, 120 bp, synthetic construct; identical to SEQ ID NO: 41242
  source 1..120: mol_type = other DNA

SEQ ID NO: 71197 - DNA, 120 bp, synthetic construct; identical to SEQ ID NO: 41243
  source 1..120: mol_type = other DNA

SEQ ID NO: 71198 - DNA, 120 bp, synthetic construct; identical to SEQ ID NO: 41244
  source 1..120: mol_type = other DNA

SEQ ID NO: 71199 - DNA, 120 bp, synthetic construct; identical to SEQ ID NO: 41245
  source 1..120: mol_type = other DNA

SEQ ID NO: 71200 - DNA, 120 bp, synthetic construct; identical to SEQ ID NO: 11770
  source 1..120: mol_type = other DNA

SEQ ID NO: 71201 - DNA, 120 bp, synthetic construct; identical to SEQ ID NO: 41247
  source 1..120: mol_type = other DNA

SEQ ID NO: 71202 - DNA, 120 bp, synthetic construct; identical to SEQ ID NO: 41248
  source 1..120: mol_type = other DNA

SEQ ID NO: 71203 - DNA, 120 bp, synthetic construct; identical to SEQ ID NO: 41249
  source 1..120: mol_type = other DNA

SEQ ID NO: 71204 - DNA, 120 bp, synthetic construct; identical to SEQ ID NO: 11771
  source 1..120: mol_type = other DNA

SEQ ID NO: 71205 - DNA, 120 bp, synthetic construct; identical to SEQ ID NO: 41251
  source 1..120: mol_type = other DNA

SEQ ID NO: 71206 - DNA, 120 bp, synthetic construct; identical to SEQ ID NO: 41252
  source 1..120: mol_type = other DNA

SEQ ID NO: 71207 - DNA, 120 bp, synthetic construct; identical to SEQ ID NO: 11772
  source 1..120: mol_type = other DNA

SEQ ID NO: 71208 - DNA, 120 bp, synthetic construct; identical to SEQ ID NO: 41254
  source 1..120: mol_type = other DNA

SEQ ID NO: 71209 - DNA, 120 bp, synthetic construct; identical to SEQ ID NO: 41255
  source 1..120: mol_type = other DNA

SEQ ID NO: 71210 - DNA, 120 bp, synthetic construct; identical to SEQ ID NO: 41256
  source 1..120: mol_type = other DNA

SEQ ID NO: 71211 - DNA, 120 bp, synthetic construct; identical to SEQ ID NO: 11773
  source 1..120: mol_type = other DNA

SEQ ID NO: 71212 - DNA, 120 bp, synthetic construct; identical to SEQ ID NO: 41258
  source 1..120: mol_type = other DNA

SEQ ID NO: 71213 - DNA, 120 bp, synthetic construct; identical to SEQ ID NO: 41259
  source 1..120: mol_type = other DNA

SEQ ID NO: 71214 - DNA, 120 bp, synthetic construct; identical to SEQ ID NO: 41260
  source 1..120: mol_type = other DNA

SEQ ID NO: 71215 - DNA, 120 bp, synthetic construct; identical to SEQ ID NO: 41261
  source 1..120: mol_type = other DNA

SEQ ID NO: 71216 - DNA, 120 bp, synthetic construct; identical to SEQ ID NO: 11774
  source 1..120: mol_type = other DNA

SEQ ID NO: 71217 - DNA, 120 bp, synthetic construct; identical to SEQ ID NO: 41263
  source 1..120: mol_type = other DNA

SEQ ID NO: 71218 - DNA, 120 bp, synthetic construct; identical to SEQ ID NO: 41264
  source 1..120: mol_type = other DNA

SEQ ID NO: 71219 - DNA, 120 bp, synthetic construct; identical to SEQ ID NO: 41265
  source 1..120: mol_type = other DNA

SEQ ID NO: 71220 - DNA, 120 bp, synthetic construct; identical to SEQ ID NO: 41266
  source 1..120: mol_type = other DNA

SEQ ID NO: 71221 - DNA, 120 bp, synthetic construct; identical to SEQ ID NO: 11775
  source 1..120: mol_type = other DNA

SEQ ID NO: 71222 - DNA, 120 bp, synthetic construct; identical to SEQ ID NO: 41268
  source 1..120: mol_type = other DNA

SEQ ID NO: 71223 - DNA, 120 bp, synthetic construct; identical to SEQ ID NO: 41269
  source 1..120: mol_type = other DNA

SEQ ID NO: 71224 - DNA, 120 bp, synthetic construct; identical to SEQ ID NO: 41270
  source 1..120: mol_type = other DNA

SEQ ID NO: 71225 - DNA, 120 bp, synthetic construct; identical to SEQ ID NO: 11776
  source 1..120: mol_type = other DNA

SEQ ID NO: 71226 - DNA, 120 bp, synthetic construct; identical to SEQ ID NO: 41272
  source 1..120: mol_type = other DNA

SEQ ID NO: 71227 - DNA, 120 bp, synthetic construct; identical to SEQ ID NO: 41273
  source 1..120: mol_type = other DNA

SEQ ID NO: 71228 - DNA, 120 bp, synthetic construct; identical to SEQ ID NO: 41274
  source 1..120: mol_type = other DNA

SEQ ID NO: 71229 - DNA, 120 bp, synthetic construct; identical to SEQ ID NO: 11777
  source 1..120: mol_type = other DNA

SEQ ID NO: 71230 - DNA, 120 bp, synthetic construct; identical to SEQ ID NO: 41276
  source 1..120: mol_type = other DNA

SEQ ID NO: 71231 - DNA, 120 bp, synthetic construct; identical to SEQ ID NO: 41277
  source 1..120: mol_type = other DNA

SEQ ID NO: 71232 - DNA, 120 bp, synthetic construct; identical to SEQ ID NO: 41278
  source 1..120: mol_type = other DNA

SEQ ID NO: 71233 - DNA, 120 bp, synthetic construct; identical to SEQ ID NO: 41279
  source 1..120: mol_type = other DNA

SEQ ID NO: 71234 - DNA, 120 bp, synthetic construct; identical to SEQ ID NO: 11778
  source 1..120: mol_type = other DNA

SEQ ID NO: 71235 - DNA, 120 bp, synthetic construct; identical to SEQ ID NO: 41281
  source 1..120: mol_type = other DNA

SEQ ID NO: 71236 - DNA, 120 bp, synthetic construct; identical to SEQ ID NO: 41282
  source 1..120: mol_type = other DNA

SEQ ID NO: 71237 - DNA, 120 bp, synthetic construct; identical to SEQ ID NO: 11779
  source 1..120: mol_type = other DNA

SEQ ID NO: 71238 - DNA, 120 bp, synthetic construct; identical to SEQ ID NO: 41284
  source 1..120: mol_type = other DNA

SEQ ID NO: 71239 - DNA, 120 bp, synthetic construct; identical to SEQ ID NO: 11780
  source 1..120: mol_type = other DNA

SEQ ID NO: 71240 - DNA, 120 bp, synthetic construct; identical to SEQ ID NO: 41286
  source 1..120: mol_type = other DNA

SEQ ID NO: 71241 - DNA, 120 bp, synthetic construct; identical to SEQ ID NO: 41287
  source 1..120: mol_type = other DNA

SEQ ID NO: 71242 - DNA, 120 bp, synthetic construct; identical to SEQ ID NO: 41288
  source 1..120: mol_type = other DNA

SEQ ID NO: 71243 - DNA, 120 bp, synthetic construct; identical to SEQ ID NO: 11781
  source 1..120: mol_type = other DNA

SEQ ID NO: 71244 - DNA, 120 bp, synthetic construct; identical to SEQ ID NO: 41290
  source 1..120: mol_type = other DNA

SEQ ID NO: 71245 - DNA, 120 bp, synthetic construct; identical to SEQ ID NO: 41291
  source 1..120: mol_type = other DNA

SEQ ID NO: 71246 - DNA, 120 bp, synthetic construct; identical to SEQ ID NO: 41292
  source 1..120: mol_type = other DNA

SEQ ID NO: 71247 - DNA, 120 bp, synthetic construct; identical to SEQ ID NO: 11782
  source 1..120: mol_type = other DNA

SEQ ID NO: 71248 - DNA, 120 bp, synthetic construct; identical to SEQ ID NO: 41294
  source 1..120: mol_type = other DNA

SEQ ID NO: 71249 - DNA, 120 bp, synthetic construct; identical to SEQ ID NO: 11783
  source 1..120: mol_type = other DNA

SEQ ID NO: 71250 - DNA, 120 bp, synthetic construct; identical to SEQ ID NO: 41296
  source 1..120: mol_type = other DNA

SEQ ID NO: 71251 - DNA, 120 bp, synthetic construct; identical to SEQ ID NO: 41297
  source 1..120: mol_type = other DNA

SEQ ID NO: 71252 - DNA, 120 bp, synthetic construct; identical to SEQ ID NO: 41298
  source 1..120: mol_type = other DNA

SEQ ID NO: 71253 - DNA, 120 bp, synthetic construct; identical to SEQ ID NO: 11784
  source 1..120: mol_type = other DNA

SEQ ID NO: 71254 - DNA, 120 bp, synthetic construct; identical to SEQ ID NO: 41300
  source 1..120: mol_type = other DNA

SEQ ID NO: 71255 - DNA, 120 bp, synthetic construct; identical to SEQ ID NO: 11785
  source 1..120: mol_type = other DNA

SEQ ID NO: 71256 - DNA, 120 bp, synthetic construct; identical to SEQ ID NO: 41302
  source 1..120: mol_type = other DNA

SEQ ID NO: 71257 - DNA, 120 bp, synthetic construct; identical to SEQ ID NO: 41303
  source 1..120: mol_type = other DNA

SEQ ID NO: 71258 - DNA, 120 bp, synthetic construct; identical to SEQ ID NO: 41304
  source 1..120: mol_type = other DNA

SEQ ID NO: 71259 - DNA, 120 bp, synthetic construct; identical to SEQ ID NO: 41305
  source 1..120: mol_type = other DNA

SEQ ID NO: 71260 - DNA, 120 bp, synthetic construct; identical to SEQ ID NO: 11786
  source 1..120: mol_type = other DNA

SEQ ID NO: 71261 - DNA, 120 bp, synthetic construct; identical to SEQ ID NO: 41307
  source 1..120: mol_type = other DNA

SEQ ID NO: 71262 - DNA, 120 bp, synthetic construct; identical to SEQ ID NO: 41308
  source 1..120: mol_type = other DNA

SEQ ID NO: 71263 - DNA, 120 bp, synthetic construct; identical to SEQ ID NO: 11787
  source 1..120: mol_type = other DNA

SEQ ID NO: 71264 - DNA, 120 bp, synthetic construct; identical to SEQ ID NO: 41310
  source 1..120: mol_type = other DNA

SEQ ID NO: 71265 - DNA, 120 bp, synthetic construct; identical to SEQ ID NO: 41311
  source 1..120: mol_type = other DNA

SEQ ID NO: 71266 - DNA, 120 bp, synthetic construct; identical to SEQ ID NO: 41312
  source 1..120: mol_type = other DNA

SEQ ID NO: 71267 - DNA, 120 bp, synthetic construct; identical to SEQ ID NO: 11788
  source 1..120: mol_type = other DNA

SEQ ID NO: 71268 - DNA, 120 bp, synthetic construct; identical to SEQ ID NO: 41314
  source 1..120: mol_type = other DNA

SEQ ID NO: 71269 - DNA, 120 bp, synthetic construct; identical to SEQ ID NO: 41315
  source 1..120: mol_type = other DNA

SEQ ID NO: 71270 - DNA, 120 bp, synthetic construct; identical to SEQ ID NO: 41316
  source 1..120: mol_type = other DNA

SEQ ID NO: 71271 - DNA, 120 bp, synthetic construct; identical to SEQ ID NO: 41317
  source 1..120: mol_type = other DNA

SEQ ID NO: 71272 - DNA, 120 bp, synthetic construct; identical to SEQ ID NO: 11789
  source 1..120: mol_type = other DNA

SEQ ID NO: 71273 - DNA, 120 bp, synthetic construct; identical to SEQ ID NO: 41319
  source 1..120: mol_type = other DNA

SEQ ID NO: 71274 - DNA, 120 bp, synthetic construct; identical to SEQ ID NO: 41320
  source 1..120: mol_type = other DNA

SEQ ID NO: 71275 - DNA, 120 bp, synthetic construct; identical to SEQ ID NO: 11790
  source 1..120: mol_type = other DNA

SEQ ID NO: 71276 - DNA, 120 bp, synthetic construct; identical to SEQ ID NO: 41322
  source 1..120: mol_type = other DNA

SEQ ID NO: 71277 - DNA, 120 bp, synthetic construct; identical to SEQ ID NO: 41323
  source 1..120: mol_type = other DNA

SEQ ID NO: 71278 - DNA, 120 bp, synthetic construct; identical to SEQ ID NO: 41324
  source 1..120: mol_type = other DNA

SEQ ID NO: 71279 - DNA, 120 bp, synthetic construct; identical to SEQ ID NO: 11791
  source 1..120: mol_type = other DNA

SEQ ID NO: 71280 - DNA, 120 bp, synthetic construct; identical to SEQ ID NO: 41326
  source 1..120: mol_type = other DNA

SEQ ID NO: 71281 - DNA, 120 bp, synthetic construct; identical to SEQ ID NO: 41327
  source 1..120: mol_type = other DNA

SEQ ID NO: 71282 - DNA, 120 bp, synthetic construct; identical to SEQ ID NO: 41328
  source 1..120: mol_type = other DNA

SEQ ID NO: 71283 - DNA, 120 bp, synthetic construct; identical to SEQ ID NO: 11792
  source 1..120: mol_type = other DNA

SEQ ID NO: 71284 - DNA, 120 bp, synthetic construct; identical to SEQ ID NO: 41330
  source 1..120: mol_type = other DNA

SEQ ID NO: 71285 - DNA, 120 bp, synthetic construct; identical to SEQ ID NO: 41331
  source 1..120: mol_type = other DNA

SEQ ID NO: 71286 - DNA, 120 bp, synthetic construct; identical to SEQ ID NO: 41332
  source 1..120: mol_type = other DNA

SEQ ID NO: 71287 - DNA, 120 bp, synthetic construct; identical to SEQ ID NO: 11793
  source 1..120: mol_type = other DNA

SEQ ID NO: 71288 - DNA, 120 bp, synthetic construct; identical to SEQ ID NO: 41334
  source 1..120: mol_type = other DNA

SEQ ID NO: 71289 - DNA, 120 bp, synthetic construct; identical to SEQ ID NO: 41335
  source 1..120: mol_type = other DNA

SEQ ID NO: 71290 - DNA, 120 bp, synthetic construct; identical to SEQ ID NO: 41336
  source 1..120: mol_type = other DNA

SEQ ID NO: 71291 - DNA, 120 bp, synthetic construct; identical to SEQ ID NO: 11794
  source 1..120: mol_type = other DNA

SEQ ID NO: 71292 - DNA, 120 bp, synthetic construct; identical to SEQ ID NO: 41338
  source 1..120: mol_type = other DNA

SEQ ID NO: 71293 - DNA, 120 bp, synthetic construct; identical to SEQ ID NO: 41339
  source 1..120: mol_type = other DNA

SEQ ID NO: 71294 - DNA, 120 bp, synthetic construct; identical to SEQ ID NO: 41340
  source 1..120: mol_type = other DNA

SEQ ID NO: 71295 - DNA, 120 bp, synthetic construct; identical to SEQ ID NO: 11795
  source 1..120: mol_type = other DNA

SEQ ID NO: 71296 - DNA, 120 bp, synthetic construct; identical to SEQ ID NO: 41342
  source 1..120: mol_type = other DNA

SEQ ID NO: 71297 - DNA, 120 bp, synthetic construct; identical to SEQ ID NO: 41343
  source 1..120: mol_type = other DNA

SEQ ID NO: 71298 - DNA, 120 bp, synthetic construct; identical to SEQ ID NO: 41344
  source 1..120: mol_type = other DNA

SEQ ID NO: 71299 - DNA, 120 bp, synthetic construct; identical to SEQ ID NO: 41345
  source 1..120: mol_type = other DNA

SEQ ID NO: 71300 - DNA, 120 bp, synthetic construct; identical to SEQ ID NO: 11796
  source 1..120: mol_type = other DNA

SEQ ID NO: 71301 - DNA, 120 bp, synthetic construct; identical to SEQ ID NO: 41347
  source 1..120: mol_type = other DNA

SEQ ID NO: 71302 - DNA, 120 bp, synthetic construct; identical to SEQ ID NO: 41348
  source 1..120: mol_type = other DNA

SEQ ID NO: 71303 - DNA, 120 bp, synthetic construct; identical to SEQ ID NO: 41349
  source 1..120: mol_type = other DNA

SEQ ID NO: 71304 - DNA, 120 bp, synthetic construct; identical to SEQ ID NO: 41350
  source 1..120: mol_type = other DNA

SEQ ID NO: 71305 - DNA, 120 bp, synthetic construct; identical to SEQ ID NO: 11797
  source 1..120: mol_type = other DNA

SEQ ID NO: 71306 - DNA, 120 bp, synthetic construct; identical to SEQ ID NO: 41352
  source 1..120: mol_type = other DNA

SEQ ID NO: 71307 - DNA, 120 bp, synthetic construct; identical to SEQ ID NO: 41353
  source 1..120: mol_type = other DNA

SEQ ID NO: 71308 - DNA, 120 bp, synthetic construct; identical to SEQ ID NO: 11798
  source 1..120: mol_type = other DNA

SEQ ID NO: 71309 - DNA, 120 bp, synthetic construct; identical to SEQ ID NO: 41355
  source 1..120: mol_type = other DNA

SEQ ID NO: 71310 - DNA, 120 bp, synthetic construct; identical to SEQ ID NO: 41356
  source 1..120: mol_type = other DNA

SEQ ID NO: 71311 - DNA, 120 bp, synthetic construct; identical to SEQ ID NO: 41357
  source 1..120: mol_type = other DNA

SEQ ID NO: 71312 - DNA, 120 bp, synthetic construct; identical to SEQ ID NO: 41358
  source 1..120: mol_type = other DNA

SEQ ID NO: 71313 - DNA, 120 bp, synthetic construct; identical to SEQ ID NO: 11799
  source 1..120: mol_type = other DNA

SEQ ID NO: 71314 - DNA, 120 bp, synthetic construct; identical to SEQ ID NO: 41360
  source 1..120: mol_type = other DNA

SEQ ID NO: 71315 - DNA, 120 bp, synthetic construct; identical to SEQ ID NO: 41361
  source 1..120: mol_type = other DNA

SEQ ID NO: 71316 - DNA, 120 bp, synthetic construct; identical to SEQ ID NO: 11800
  source 1..120: mol_type = other DNA

SEQ ID NO: 71317 - DNA, 120 bp, synthetic construct; identical to SEQ ID NO: 41363
  source 1..120: mol_type = other DNA

SEQ ID NO: 71318 - DNA, 120 bp, synthetic construct; identical to SEQ ID NO: 41364
  source 1..120: mol_type = other DNA

SEQ ID NO: 71319 - DNA, 120 bp, synthetic construct; identical to SEQ ID NO: 41365
  source 1..120: mol_type = other DNA

SEQ ID NO: 71320 - DNA, 120 bp, synthetic construct; identical to SEQ ID NO: 11801
  source 1..120: mol_type = other DNA

SEQ ID NO: 71321 - DNA, 120 bp, synthetic construct; identical to SEQ ID NO: 41367
  source 1..120: mol_type = other DNA

SEQ ID NO: 71322 - DNA, 120 bp, synthetic construct; identical to SEQ ID NO: 41368
  source 1..120: mol_type = other DNA

SEQ ID NO: 71323 - DNA, 120 bp, synthetic construct; identical to SEQ ID NO: 41369
  source 1..120: mol_type = other DNA

SEQ ID NO: 71324 - DNA, 120 bp, synthetic construct; identical to SEQ ID NO: 11802
  source 1..120: mol_type = other DNA

SEQ ID NO: 71325 - DNA, 120 bp, synthetic construct; identical to SEQ ID NO: 41371
  source 1..120: mol_type = other DNA

SEQ ID NO: 71326 - DNA, 120 bp, synthetic construct; identical to SEQ ID NO: 41372
  source 1..120: mol_type = other DNA

SEQ ID NO: 71327 - DNA, 120 bp, synthetic construct; identical to SEQ ID NO: 41373
  source 1..120: mol_type = other DNA

SEQ ID NO: 71328 - DNA, 120 bp, synthetic construct; identical to SEQ ID NO: 41374
  source 1..120: mol_type = other DNA

SEQ ID NO: 71329 - DNA, 120 bp, synthetic construct; identical to SEQ ID NO: 11803
  source 1..120: mol_type = other DNA

SEQ ID NO: 71330 - DNA, 120 bp, synthetic construct; identical to SEQ ID NO: 41376
  source 1..120: mol_type = other DNA

SEQ ID NO: 71331 - DNA, 120 bp, synthetic construct; identical to SEQ ID NO: 41377
  source 1..120: mol_type = other DNA

SEQ ID NO: 71332 - DNA, 120 bp, synthetic construct; identical to SEQ ID NO: 11804
  source 1..120: mol_type = other DNA

SEQ ID NO: 71333 - DNA, 120 bp, synthetic construct; identical to SEQ ID NO: 41379
  source 1..120: mol_type = other DNA

SEQ ID NO: 71334 - DNA, 120 bp, synthetic construct; identical to SEQ ID NO: 41380
  source 1..120: mol_type = other DNA

SEQ ID NO: 71335 - DNA, 120 bp, synthetic construct; identical to SEQ ID NO: 41381
  source 1..120: mol_type = other DNA

SEQ ID NO: 71336 - DNA, 120 bp, synthetic construct; identical to SEQ ID NO: 11805
  source 1..120: mol_type = other DNA

SEQ ID NO: 71337 - DNA, 120 bp, synthetic construct; identical to SEQ ID NO: 41383
  source 1..120: mol_type = other DNA

SEQ ID NO: 71338 - DNA, 120 bp, synthetic construct; identical to SEQ ID NO: 41384
  source 1..120: mol_type = other DNA

SEQ ID NO: 71339 - DNA, 120 bp, synthetic construct; identical to SEQ ID NO: 41385
  source 1..120: mol_type = other DNA

SEQ ID NO: 71340 - DNA, 120 bp, synthetic construct; identical to SEQ ID NO: 41386
  source 1..120: mol_type = other DNA

SEQ ID NO: 71341 - DNA, 120 bp, synthetic construct; identical to SEQ ID NO: 11806
  source 1..120: mol_type = other DNA

SEQ ID NO: 71342 - DNA, 120 bp, synthetic construct; identical to SEQ ID NO: 41388
  source 1..120: mol_type = other DNA

SEQ ID NO: 71343 - DNA, 120 bp, synthetic construct; identical to SEQ ID NO: 41389
  source 1..120: mol_type = other DNA

SEQ ID NO: 71344 - DNA, 120 bp, synthetic construct; identical to SEQ ID NO: 11807
  source 1..120: mol_type = other DNA

SEQ ID NO: 71345 - DNA, 120 bp, synthetic construct; identical to SEQ ID NO: 41391
  source 1..120: mol_type = other DNA

SEQ ID NO: 71346 - DNA, 120 bp, synthetic construct; identical to SEQ ID NO: 41392
  source 1..120: mol_type = other DNA

SEQ ID NO: 71347 - DNA, 120 bp, synthetic construct; identical to SEQ ID NO: 41393
  source 1..120: mol_type = other DNA

SEQ ID NO: 71348 - DNA, 120 bp, synthetic construct; identical to SEQ ID NO: 41394
  source 1..120: mol_type = other DNA

SEQ ID NO: 71349 - DNA, 120 bp, synthetic construct; identical to SEQ ID NO: 11808
  source 1..120: mol_type = other DNA

SEQ ID NO: 71350 - DNA, 120 bp, synthetic construct; identical to SEQ ID NO: 41396
  source 1..120: mol_type = other DNA

SEQ ID NO: 71351 - DNA, 120 bp, synthetic construct; identical to SEQ ID NO: 41397
  source 1..120: mol_type = other DNA

SEQ ID NO: 71352 - DNA, 120 bp, synthetic construct; identical to SEQ ID NO: 11809
  source 1..120: mol_type = other DNA

SEQ ID NO: 71353 - DNA, 120 bp, synthetic construct; identical to SEQ ID NO: 41399
  source 1..120: mol_type = other DNA

SEQ ID NO: 71354 - DNA, 120 bp, synthetic construct; identical to SEQ ID NO: 41400
  source 1..120: mol_type = other DNA

SEQ ID NO: 71355 - DNA, 120 bp, synthetic construct; identical to SEQ ID NO: 41401
  source 1..120: mol_type = other DNA

SEQ ID NO: 71356 - DNA, 120 bp, synthetic construct; identical to SEQ ID NO: 11810
  source 1..120: mol_type = other DNA

SEQ ID NO: 71357 - DNA, 120 bp, synthetic construct; identical to SEQ ID NO: 41403
  source 1..120: mol_type = other DNA

SEQ ID NO: 71358 - DNA, 120 bp, synthetic construct; identical to SEQ ID NO: 41404
  source 1..120: mol_type = other DNA

SEQ ID NO: 71359 - DNA, 120 bp, synthetic construct; identical to SEQ ID NO: 41405
  source 1..120: mol_type = other DNA

SEQ ID NO: 71360 - DNA, 120 bp, synthetic construct; identical to SEQ ID NO: 11811
  source 1..120: mol_type = other DNA

SEQ ID NO: 71361 - DNA, 120 bp, synthetic construct; identical to SEQ ID NO: 41407
  source 1..120: mol_type = other DNA

SEQ ID NO: 71362 - DNA, 120 bp, synthetic construct; identical to SEQ ID NO: 41408
  source 1..120: mol_type = other DNA

SEQ ID NO: 71363 - DNA, 120 bp, synthetic construct; identical to SEQ ID NO: 41409
  source 1..120: mol_type = other DNA

SEQ ID NO: 71364 - DNA, 120 bp, synthetic construct; identical to SEQ ID NO: 11812
  source 1..120: mol_type = other DNA

SEQ ID NO: 71365 - DNA, 120 bp, synthetic construct; identical to SEQ ID NO: 41411
  source 1..120: mol_type = other DNA

SEQ ID NO: 71366 - DNA, 120 bp, synthetic construct; identical to SEQ ID NO: 41412
  source 1..120: mol_type = other DNA

SEQ ID NO: 71367 - DNA, 120 bp, synthetic construct; identical to SEQ ID NO: 41413
  source 1..120: mol_type = other DNA

SEQ ID NO: 71368 - DNA, 120 bp, synthetic construct; identical to SEQ ID NO: 11813
  source 1..120: mol_type = other DNA

SEQ ID NO: 71369 - DNA, 120 bp, synthetic construct; identical to SEQ ID NO: 41415
  source 1..120: mol_type = other DNA

SEQ ID NO: 71370 - DNA, 120 bp, synthetic construct; identical to SEQ ID NO: 41416
  source 1..120: mol_type = other DNA

SEQ ID NO: 71371 - DNA, 120 bp, synthetic construct; identical to SEQ ID NO: 41417
  source 1..120: mol_type = other DNA

SEQ ID NO: 71372 - DNA, 120 bp, synthetic construct; identical to SEQ ID NO: 11814
  source 1..120: mol_type = other DNA

SEQ ID NO: 71373 - DNA, 120 bp, synthetic construct; identical to SEQ ID NO: 41419
  source 1..120: mol_type = other DNA

SEQ ID NO: 71374 - DNA, 120 bp, synthetic construct; identical to SEQ ID NO: 41420
  source 1..120: mol_type = other DNA

SEQ ID NO: 71375 - DNA, 120 bp, synthetic construct; identical to SEQ ID NO: 41421
  source 1..120: mol_type = other DNA

SEQ ID NO: 71376 - DNA, 120 bp, synthetic construct; identical to SEQ ID NO: 11815
  source 1..120: mol_type = other DNA

SEQ ID NO: 71377 - DNA, 120 bp, synthetic construct; identical to SEQ ID NO: 41423
  source 1..120: mol_type = other DNA

SEQ ID NO: 71378 - DNA, 120 bp, synthetic construct; identical to SEQ ID NO: 41424
  source 1..120: mol_type = other DNA

SEQ ID NO: 71379 - DNA, 120 bp, synthetic construct; identical to SEQ ID NO: 41425
  source 1..120: mol_type = other DNA

SEQ ID NO: 71380 - DNA, 120 bp, synthetic construct; identical to SEQ ID NO: 41426
  source 1..120: mol_type = other DNA

SEQ ID NO: 71381 - DNA, 120 bp, synthetic construct; identical to SEQ ID NO: 11816
  source 1..120: mol_type = other DNA

SEQ ID NO: 71382 - DNA, 120 bp, synthetic construct; identical to SEQ ID NO: 41428
  source 1..120: mol_type = other DNA

SEQ ID NO: 71383 - DNA, 120 bp, synthetic construct; identical to SEQ ID NO: 41429
  source 1..120: mol_type = other DNA

SEQ ID NO: 71384 - DNA, 120 bp, synthetic construct; identical to SEQ ID NO: 41430
  source 1..120: mol_type = other DNA

SEQ ID NO: 71385 - DNA, 120 bp, synthetic construct; identical to SEQ ID NO: 11817
  source 1..120: mol_type = other DNA

SEQ ID NO: 71386 - DNA, 120 bp, synthetic construct; identical to SEQ ID NO: 41432
  source 1..120: mol_type = other DNA

SEQ ID NO: 71387 - DNA, 120 bp, synthetic construct; identical to SEQ ID NO: 41433
  source 1..120: mol_type = other DNA

SEQ ID NO: 71388 - DNA, 120 bp, synthetic construct; identical to SEQ ID NO: 41434
  source 1..120: mol_type = other DNA

SEQ ID NO: 71389 - DNA, 120 bp, synthetic construct; identical to SEQ ID NO: 11818
  source 1..120: mol_type = other DNA

SEQ ID NO: 71390 - DNA, 120 bp, synthetic construct; identical to SEQ ID NO: 41436
  source 1..120: mol_type = other DNA

SEQ ID NO: 71391 - DNA, 120 bp, synthetic construct; identical to SEQ ID NO: 41437
  source 1..120: mol_type = other DNA

SEQ ID NO: 71392 - DNA, 120 bp, synthetic construct; identical to SEQ ID NO: 41438
  source 1..120: mol_type = other DNA

SEQ ID NO: 71393 - DNA, 120 bp, synthetic construct; identical to SEQ ID NO: 11819
  source 1..120: mol_type = other DNA

SEQ ID NO: 71394 - DNA, 120 bp, synthetic construct; identical to SEQ ID NO: 41440
  source 1..120: mol_type = other DNA

SEQ ID NO: 71395 - DNA, 120 bp, synthetic construct; identical to SEQ ID NO: 41441
  source 1..120: mol_type = other DNA

SEQ ID NO: 71396 - DNA, 120 bp, synthetic construct; identical to SEQ ID NO: 41442
  source 1..120: mol_type = other DNA

SEQ ID NO: 71397 - DNA, 120 bp, synthetic construct; identical to SEQ ID NO: 41443
  source 1..120: mol_type = other DNA

SEQ ID NO: 71398 - DNA, 120 bp, synthetic construct; identical to SEQ ID NO: 11820
  source 1..120: mol_type = other DNA

SEQ ID NO: 71399 - DNA, 120 bp, synthetic construct; identical to SEQ ID NO: 41445
  source 1..120: mol_type = other DNA

SEQ ID NO: 71400 - DNA, 120 bp, synthetic construct; identical to SEQ ID NO: 41446
  source 1..120: mol_type = other DNA

SEQ ID NO: 71401 - DNA, 120 bp, synthetic construct; identical to SEQ ID NO: 41447
  source 1..120: mol_type = other DNA

SEQ ID NO: 71402 - DNA, 120 bp, synthetic construct; identical to SEQ ID NO: 11821
  source 1..120: mol_type = other DNA

SEQ ID NO: 71403 - DNA, 120 bp, synthetic construct; identical to SEQ ID NO: 41449
  source 1..120: mol_type = other DNA

SEQ ID NO: 71404 - DNA, 120 bp, synthetic construct; identical to SEQ ID NO: 41450
  source 1..120: mol_type = other DNA

SEQ ID NO: 71405 - DNA, 120 bp, synthetic construct; identical to SEQ ID NO: 11822
  source 1..120: mol_type = other DNA

SEQ ID NO: 71406 - DNA, 120 bp, synthetic construct; identical to SEQ ID NO: 41452
  source 1..120: mol_type = other DNA

SEQ ID NO: 71407 - DNA, 120 bp, synthetic construct; identical to SEQ ID NO: 41453
  source 1..120: mol_type = other DNA

SEQ ID NO: 71408 - DNA, 120 bp, synthetic construct; identical to SEQ ID NO: 11823
  source 1..120: mol_type = other DNA

SEQ ID NO: 71409 - DNA, 120 bp, synthetic construct; identical to SEQ ID NO: 41455
  source 1..120: mol_type = other DNA

SEQ ID NO: 71410 - DNA, 120 bp, synthetic construct; identical to SEQ ID NO: 41456
  source 1..120: mol_type = other DNA

SEQ ID NO: 71411 - DNA, 120 bp, synthetic construct; identical to SEQ ID NO: 11824
  source 1..120: mol_type = other DNA

SEQ ID NO: 71412 - DNA, 120 bp, synthetic construct; identical to SEQ ID NO: 41458
  source 1..120: mol_type = other DNA

SEQ ID NO: 71413 - DNA, 120 bp, synthetic construct; identical to SEQ ID NO: 41459
  source 1..120: mol_type = other DNA

SEQ ID NO: 71414 - DNA, 120 bp, synthetic construct; identical to SEQ ID NO: 41460
  source 1..120: mol_type = other DNA

SEQ ID NO: 71415 - DNA, 120 bp, synthetic construct; identical to SEQ ID NO: 11825
  source 1..120: mol_type = other DNA

SEQ ID NO: 71416 - DNA, 120 bp, synthetic construct; identical to SEQ ID NO: 41462
  source 1..120: mol_type = other DNA

SEQ ID NO: 71417 - DNA, 120 bp, synthetic construct; identical to SEQ ID NO: 41463
  source 1..120: mol_type = other DNA

SEQ ID NO: 71418 - DNA, 120 bp, synthetic construct; identical to SEQ ID NO: 41464
  source 1..120: mol_type = other DNA

SEQ ID NO: 71419 - DNA, 120 bp, synthetic construct; identical to SEQ ID NO: 41465
  source 1..120: mol_type = other DNA

SEQ ID NO: 71420 - DNA, 120 bp, synthetic construct; identical to SEQ ID NO: 11826
  source 1..120: mol_type = other DNA

SEQ ID NO: 71421 - DNA, 120 bp, synthetic construct; identical to SEQ ID NO: 41467
  source 1..120: mol_type = other DNA

SEQ ID NO: 71422 - DNA, 120 bp, synthetic construct; identical to SEQ ID NO: 41468
  source 1..120: mol_type = other DNA

SEQ ID NO: 71423 - DNA, 120 bp, synthetic construct; identical to SEQ ID NO: 11827
  source 1..120: mol_type = other DNA

SEQ ID NO: 71424 - DNA, 120 bp, synthetic construct; identical to SEQ ID NO: 41470
  source 1..120: mol_type = other DNA

SEQ ID NO: 71425 - DNA, 120 bp, synthetic construct; identical to SEQ ID NO: 41471
  source 1..120: mol_type = other DNA

SEQ ID NO: 71426 - DNA, 120 bp, synthetic construct; identical to SEQ ID NO: 41472
  source 1..120: mol_type = other DNA

SEQ ID NO: 71427 - DNA, 120 bp, synthetic construct; identical to SEQ ID NO: 41473
  source 1..120: mol_type = other DNA

SEQ ID NO: 71428 - DNA, 120 bp, synthetic construct; identical to SEQ ID NO: 11828
  source 1..120: mol_type = other DNA

SEQ ID NO: 71429 - DNA, 120 bp, synthetic construct; identical to SEQ ID NO: 41475
  source 1..120: mol_type = other DNA

SEQ ID NO: 71430 - DNA, 120 bp, synthetic construct; identical to SEQ ID NO: 41476
  source 1..120: mol_type = other DNA

SEQ ID NO: 71431 - DNA, 120 bp, synthetic construct; identical to SEQ ID NO: 11829
  source 1..120: mol_type = other DNA

SEQ ID NO: 71432 - DNA, 120 bp, synthetic construct; identical to SEQ ID NO: 41478
  source 1..120: mol_type = other DNA

SEQ ID NO: 71433 - DNA, 120 bp, synthetic construct; identical to SEQ ID NO: 41479
  source 1..120: mol_type = other DNA

SEQ ID NO: 71434 - DNA, 120 bp, synthetic construct; identical to SEQ ID NO: 41480
  source 1..120: mol_type = other DNA

SEQ ID NO: 71435 - DNA, 120 bp, synthetic construct; identical to SEQ ID NO: 11830
  source 1..120: mol_type = other DNA

SEQ ID NO: 71436 - DNA, 120 bp, synthetic construct; identical to SEQ ID NO: 41482
  source 1..120: mol_type = other DNA

SEQ ID NO: 71437 - DNA, 120 bp, synthetic construct; identical to SEQ ID NO: 41483
  source 1..120: mol_type = other DNA

SEQ ID NO: 71438 - DNA, 120 bp, synthetic construct; identical to SEQ ID NO: 41484
  source 1..120: mol_type = other DNA

SEQ ID NO: 71439 - DNA, 120 bp, synthetic construct; identical to SEQ ID NO: 11831
  source 1..120: mol_type = other DNA

SEQ ID NO: 71440 - DNA, 120 bp, synthetic construct; identical to SEQ ID NO: 41486
  source 1..120: mol_type = other DNA

SEQ ID NO: 71441 - DNA, 120 bp, synthetic construct; identical to SEQ ID NO: 41487
  source 1..120: mol_type = other DNA

SEQ ID NO: 71442 - DNA, 120 bp, synthetic construct; identical to SEQ ID NO: 41488
  source 1..120: mol_type = other DNA

SEQ ID NO: 71443 - DNA, 120 bp, synthetic construct; identical to SEQ ID NO: 41489
  source 1..120: mol_type = other DNA

SEQ ID NO: 71444 - DNA, 120 bp, synthetic construct; identical to SEQ ID NO: 11832
  source 1..120: mol_type = other DNA

SEQ ID NO: 71445 - DNA, 120 bp, synthetic construct; identical to SEQ ID NO: 41491
  source 1..120: mol_type = other DNA

SEQ ID NO: 71446 - DNA, 120 bp, synthetic construct; identical to SEQ ID NO: 41492
  source 1..120: mol_type = other DNA

SEQ ID NO: 71447 - DNA, 120 bp, synthetic construct; identical to SEQ ID NO: 41493
  source 1..120: mol_type = other DNA

SEQ ID NO: 71448 - DNA, 120 bp, synthetic construct; identical to SEQ ID NO: 11833
  source 1..120: mol_type = other DNA

SEQ ID NO: 71449 - DNA, 120 bp, synthetic construct; identical to SEQ ID NO: 41495
  source 1..120: mol_type = other DNA

SEQ ID NO: 71450 - DNA, 120 bp, synthetic construct; identical to SEQ ID NO: 41496
  source 1..120: mol_type = other DNA

SEQ ID NO: 71451 - DNA, 120 bp, synthetic construct; identical to SEQ ID NO: 11834
  source 1..120: mol_type = other DNA

SEQ ID NO: 71452 - DNA, 120 bp, synthetic construct; identical to SEQ ID NO: 41498
  source 1..120: mol_type = other DNA

SEQ ID NO: 71453 - DNA, 120 bp, synthetic construct; identical to SEQ ID NO: 41499
  source 1..120: mol_type = other DNA

SEQ ID NO: 71454 - DNA, 120 bp, synthetic construct; identical to SEQ ID NO: 41500
  source 1..120: mol_type = other DNA

SEQ ID NO: 71455 - DNA, 120 bp, synthetic construct; identical to SEQ ID NO: 11835
  source 1..120: mol_type = other DNA

SEQ ID NO: 71456 - DNA, 120 bp, synthetic construct; identical to SEQ ID NO: 41502
  source 1..120: mol_type = other DNA

SEQ ID NO: 71457 - DNA, 120 bp, synthetic construct; identical to SEQ ID NO: 41503
  source 1..120: mol_type = other DNA

SEQ ID NO: 71458 - DNA, 120 bp, synthetic construct; identical to SEQ ID NO: 41504
  source 1..120: mol_type = other DNA

SEQ ID NO: 71459 - DNA, 120 bp, synthetic construct; identical to SEQ ID NO: 41505
  source 1..120: mol_type = other DNA

SEQ ID NO: 71460 - DNA, 120 bp, synthetic construct; identical to SEQ ID NO: 11836
  source 1..120: mol_type = other DNA

SEQ ID NO: 71461 - DNA, 120 bp, synthetic construct; identical to SEQ ID NO: 41507
  source 1..120: mol_type = other DNA

SEQ ID NO: 71462 - DNA, 120 bp, synthetic construct; identical to SEQ ID NO: 41508
  source 1..120: mol_type = other DNA

SEQ ID NO: 71463 - DNA, 120 bp, synthetic construct; identical to SEQ ID NO: 41509
  source 1..120: mol_type = other DNA

SEQ ID NO: 71464 - DNA, 120 bp, synthetic construct; identical to SEQ ID NO: 11837
  source 1..120: mol_type = other DNA

SEQ ID NO: 71465 - DNA, 120 bp, synthetic construct; identical to SEQ ID NO: 41511
  source 1..120: mol_type = other DNA

SEQ ID NO: 71466 - DNA, 120 bp, synthetic construct; identical to SEQ ID NO: 41512
  source 1..120: mol_type = other DNA

SEQ ID NO: 71467 - DNA, 120 bp, synthetic construct; identical to SEQ ID NO: 41513
  source 1..120: mol_type = other DNA

SEQ ID NO: 71468 - DNA, 120 bp, synthetic construct; identical to SEQ ID NO: 11838
  source 1..120: mol_type = other DNA

SEQ ID NO: 71469 - DNA, 120 bp, synthetic construct; identical to SEQ ID NO: 41515
  source 1..120: mol_type = other DNA

SEQ ID NO: 71470 - DNA, 120 bp, synthetic construct; identical to SEQ ID NO: 41516
  source 1..120: mol_type = other DNA

SEQ ID NO: 71471 - DNA, 120 bp, synthetic construct; identical to SEQ ID NO: 11839
  source 1..120: mol_type = other DNA

SEQ ID NO: 71472 - DNA, 120 bp, synthetic construct; identical to SEQ ID NO: 41518
  source 1..120: mol_type = other DNA

SEQ ID NO: 71473 - DNA, 120 bp, synthetic construct; identical to SEQ ID NO: 41519
  source 1..120: mol_type = other DNA

SEQ ID NO: 71474 - DNA, 120 bp, synthetic construct; identical to SEQ ID NO: 41520
  source 1..120: mol_type = other DNA

SEQ ID NO: 71475 - DNA, 120 bp, synthetic construct; identical to SEQ ID NO: 11840
  source 1..120: mol_type = other DNA

SEQ ID NO: 71476 - DNA, 120 bp, synthetic construct; identical to SEQ ID NO: 41522
  source 1..120: mol_type = other DNA

SEQ ID NO: 71477 - DNA, 120 bp, synthetic construct; identical to SEQ ID NO: 41523
  source 1..120: mol_type = other DNA

SEQ ID NO: 71478 - DNA, 120 bp, synthetic construct; identical to SEQ ID NO: 41524
  source 1..120: mol_type = other DNA

SEQ ID NO: 71479 - DNA, 120 bp, synthetic construct; identical to SEQ ID NO: 41525
  source 1..120: mol_type = other DNA

SEQ ID NO: 71480 - DNA, 120 bp, synthetic construct; identical to SEQ ID NO: 11841
  source 1..120: mol_type = other DNA

SEQ ID NO: 71481 - DNA, 120 bp, synthetic construct; identical to SEQ ID NO: 41527
  source 1..120: mol_type = other DNA

SEQ ID NO: 71482 - DNA, 120 bp, synthetic construct; identical to SEQ ID NO: 41528
  source 1..120: mol_type = other DNA

SEQ ID NO: 71483 - DNA, 120 bp, synthetic construct; identical to SEQ ID NO: 11842
  source 1..120: mol_type = other DNA

SEQ ID NO: 71484 - DNA, 120 bp, synthetic construct; identical to SEQ ID NO: 41530
  source 1..120: mol_type = other DNA

SEQ ID NO: 71485 - DNA, 120 bp, synthetic construct; identical to SEQ ID NO: 41531
  source 1..120: mol_type = other DNA

SEQ ID NO: 71486 - DNA, 120 bp, synthetic construct; identical to SEQ ID NO: 41532
  source 1..120: mol_type = other DNA

SEQ ID NO: 71487 - DNA, 120 bp, synthetic construct; identical to SEQ ID NO: 41533
  source 1..120: mol_type = other DNA

SEQ ID NO: 71488 - DNA, 120 bp, synthetic construct; identical to SEQ ID NO: 11843
  source 1..120: mol_type = other DNA

SEQ ID NO: 71489 - DNA, 120 bp, synthetic construct; identical to SEQ ID NO: 41535
  source 1..120: mol_type = other DNA

SEQ ID NO: 71490 - DNA, 120 bp, synthetic construct; identical to SEQ ID NO: 41536
  source 1..120: mol_type = other DNA

SEQ ID NO: 71491 - DNA, 120 bp, synthetic construct; identical to SEQ ID NO: 11844
  source 1..120: mol_type = other DNA

SEQ ID NO: 71492 - DNA, 120 bp, synthetic construct; identical to SEQ ID NO: 41538
  source 1..120: mol_type = other DNA

SEQ ID NO: 71493 - DNA, 120 bp, synthetic construct; identical to SEQ ID NO: 41539
  source 1..120: mol_type = other DNA

SEQ ID NO: 71494 - DNA, 120 bp, synthetic construct; identical to SEQ ID NO: 41540
  source 1..120: mol_type = other DNA

SEQ ID NO: 71495 - DNA, 120 bp, synthetic construct; identical to SEQ ID NO: 11845
  source 1..120: mol_type = other DNA

SEQ ID NO: 71496 - DNA, 120 bp, synthetic construct; identical to SEQ ID NO: 41542
  source 1..120: mol_type = other DNA

SEQ ID NO: 71497 - DNA, 120 bp, synthetic construct; identical to SEQ ID NO: 41543
  source 1..120: mol_type = other DNA

SEQ ID NO: 71498 - DNA, 120 bp, synthetic construct; identical to SEQ ID NO: 41544
  source 1..120: mol_type = other DNA

SEQ ID NO: 71499 - DNA, 120 bp, synthetic construct; identical to SEQ ID NO: 41545
  source 1..120: mol_type = other DNA

SEQ ID NO: 71500 - DNA, 120 bp, synthetic construct; identical to SEQ ID NO: 11846
  source 1..120: mol_type = other DNA

SEQ ID NO: 71501 - DNA, 120 bp, synthetic construct; identical to SEQ ID NO: 41547
  source 1..120: mol_type = other DNA

SEQ ID NO: 71502 - DNA, 120 bp, synthetic construct; identical to SEQ ID NO: 41548
  source 1..120: mol_type = other DNA

SEQ ID NO: 71503 - DNA, 120 bp, synthetic construct; identical to SEQ ID NO: 11847
  source 1..120: mol_type = other DNA

SEQ ID NO: 71504 - DNA, 120 bp, synthetic construct; identical to SEQ ID NO: 41550
  source 1..120: mol_type = other DNA

SEQ ID NO: 71505 - DNA, 120 bp, synthetic construct; identical to SEQ ID NO: 41551
  source 1..120: mol_type = other DNA

SEQ ID NO: 71506 - DNA, 120 bp, synthetic construct; identical to SEQ ID NO: 41552
  source 1..120: mol_type = other DNA

SEQ ID NO: 71507 - DNA, 120 bp, synthetic construct; identical to SEQ ID NO: 11848
  source 1..120: mol_type = other DNA

SEQ ID NO: 71508 - DNA, 120 bp, synthetic construct; identical to SEQ ID NO: 41554
  source 1..120: mol_type = other DNA

SEQ ID NO: 71509 - DNA, 120 bp, synthetic construct; identical to SEQ ID NO: 41555
  source 1..120: mol_type = other DNA

SEQ ID NO: 71510 - DNA, 120 bp, synthetic construct; identical to SEQ ID NO: 41556
  source 1..120: mol_type = other DNA

SEQ ID NO: 71511 - DNA, 120 bp, synthetic construct; identical to SEQ ID NO: 11849
  source 1..120: mol_type = other DNA

SEQ ID NO: 71512 - DNA, 120 bp, synthetic construct; identical to SEQ ID NO: 41558
  source 1..120: mol_type = other DNA

SEQ ID NO: 71513 - DNA, 120 bp, synthetic construct; identical to SEQ ID NO: 41559
  source 1..120: mol_type = other DNA

SEQ ID NO: 71514 - DNA, 120 bp, synthetic construct; identical to SEQ ID NO: 41560
  source 1..120: mol_type = other DNA

SEQ ID NO: 71515 - DNA, 120 bp, synthetic construct; identical to SEQ ID NO: 41561
  source 1..120: mol_type = other DNA

SEQ ID NO: 71516 - DNA, 120 bp, synthetic construct; identical to SEQ ID NO: 11850
  source 1..120: mol_type = other DNA

SEQ ID NO: 71517 - DNA, 120 bp, synthetic construct; identical to SEQ ID NO: 41563
  source 1..120: mol_type = other DNA

SEQ ID NO: 71518 - DNA, 120 bp, synthetic construct; identical to SEQ ID NO: 41564
  source 1..120: mol_type = other DNA

SEQ ID NO: 71519 - DNA, 120 bp, synthetic construct; identical to SEQ ID NO: 11851
  source 1..120: mol_type = other DNA

SEQ ID NO: 71520 - DNA, 120 bp, synthetic construct; identical to SEQ ID NO: 41566
  source 1..120: mol_type = other DNA

SEQ ID NO: 71521 - DNA, 120 bp, synthetic construct; identical to SEQ ID NO: 41567
  source 1..120: mol_type = other DNA

SEQ ID NO: 71522 - DNA, 120 bp, synthetic construct; identical to SEQ ID NO: 41568
  source 1..120: mol_type = other DNA

SEQ ID NO: 71523 - DNA, 120 bp, synthetic construct; identical to SEQ ID NO: 41569
  source 1..120: mol_type = other DNA

SEQ ID NO: 71524 - DNA, 120 bp, synthetic construct; identical to SEQ ID NO: 11852
  source 1..120: mol_type = other DNA

SEQ ID NO: 71525 - DNA, 120 bp, synthetic construct; identical to SEQ ID NO: 41571
  source 1..120: mol_type = other DNA

SEQ ID NO: 71526 - DNA, 120 bp, synthetic construct; identical to SEQ ID NO: 41572
  source 1..120: mol_type = other DNA

SEQ ID NO: 71527 - DNA, 120 bp, synthetic construct; identical to SEQ ID NO: 11853
  source 1..120: mol_type = other DNA

SEQ ID NO: 71528 - DNA, 120 bp, synthetic construct; identical to SEQ ID NO: 41574
  source 1..120: mol_type = other DNA

SEQ ID NO: 71529 - DNA, 120 bp, synthetic construct; identical to SEQ ID NO: 41575
  source 1..120: mol_type = other DNA

SEQ ID NO: 71530 - DNA, 120 bp, synthetic construct; identical to SEQ ID NO: 41576
  source 1..120: mol_type = other DNA

SEQ ID NO: 71531 - DNA, 120 bp, synthetic construct; identical to SEQ ID NO: 11854
  source 1..120: mol_type = other DNA

SEQ ID NO: 71532 - DNA, 120 bp, synthetic construct; identical to SEQ ID NO: 41578
  source 1..120: mol_type = other DNA

SEQ ID NO: 71533 - DNA, 120 bp, synthetic construct; identical to SEQ ID NO: 41579
  source 1..120: mol_type = other DNA

SEQ ID NO: 71534 - DNA, 120 bp, synthetic construct; identical to SEQ ID NO: 41580
  source 1..120: mol_type = other DNA

SEQ ID NO: 71535 - DNA, 120 bp, synthetic construct; identical to SEQ ID NO: 11855
  source 1..120: mol_type = other DNA

SEQ ID NO: 71536 - DNA, 120 bp, synthetic construct; identical to SEQ ID NO: 41582
  source 1..120: mol_type = other DNA

SEQ ID NO: 71537 - DNA, 120 bp, synthetic construct; identical to SEQ ID NO: 41583
  source 1..120: mol_type = other DNA

SEQ ID NO: 71538 - DNA, 120 bp, synthetic construct; identical to SEQ ID NO: 41584
  source 1..120: mol_type = other DNA

SEQ ID NO: 71539 - DNA, 120 bp, synthetic construct; identical to SEQ ID NO: 41585
  source 1..120: mol_type = other DNA

SEQ ID NO: 71540 - DNA, 120 bp, synthetic construct; identical to SEQ ID NO: 11856
  source 1..120: mol_type = other DNA

SEQ ID NO: 71541 - DNA, 120 bp, synthetic construct; identical to SEQ ID NO: 41587
  source 1..120: mol_type = other DNA

SEQ ID NO: 71542 - DNA, 120 bp, synthetic construct; identical to SEQ ID NO: 41588
  source 1..120: mol_type = other DNA

SEQ ID NO: 71543 - DNA, 120 bp, synthetic construct; identical to SEQ ID NO: 11857
  source 1..120: mol_type = other DNA

SEQ ID NO: 71544 - DNA, 120 bp, synthetic construct; identical to SEQ ID NO: 41590
  source 1..120: mol_type = other DNA

SEQ ID NO: 71545 - DNA, 120 bp, synthetic construct; identical to SEQ ID NO: 41591
  source 1..120: mol_type = other DNA

SEQ ID NO: 71546 - DNA, 120 bp, synthetic construct; identical to SEQ ID NO: 41592
  source 1..120: mol_type = other DNA

SEQ ID NO: 71547 - DNA, 120 bp, synthetic construct; identical to SEQ ID NO: 41593
  source 1..120: mol_type = other DNA

SEQ ID NO: 71548 - DNA, 120 bp, synthetic construct; identical to SEQ ID NO: 11858
  source 1..120: mol_type = other DNA

SEQ ID NO: 71549 - DNA, 120 bp, synthetic construct; identical to SEQ ID NO: 41595
  source 1..120: mol_type = other DNA

SEQ ID NO: 71550 - DNA, 120 bp, synthetic construct; identical to SEQ ID NO: 41596
  source 1..120: mol_type = other DNA

SEQ ID NO: 71551 - DNA, 120 bp, synthetic construct; identical to SEQ ID NO: 11859
  source 1..120: mol_type = other DNA

SEQ ID NO: 71552 - DNA, 120 bp, synthetic construct; identical to SEQ ID NO: 41598
  source 1..120: mol_type = other DNA

SEQ ID NO: 71553 - DNA, 120 bp, synthetic construct; identical to SEQ ID NO: 41599
  source 1..120: mol_type = other DNA

SEQ ID NO: 71554 - DNA, 120 bp, synthetic construct; identical to SEQ ID NO: 41600
  source 1..120: mol_type = other DNA

SEQ ID NO: 71555 - DNA, 120 bp, synthetic construct; identical to SEQ ID NO: 41601
  source 1..120: mol_type = other DNA

SEQ ID NO: 71556 - DNA, 120 bp, synthetic construct; identical to SEQ ID NO: 11860
  source 1..120: mol_type = other DNA

SEQ ID NO: 71557 - DNA, 120 bp, synthetic construct; identical to SEQ ID NO: 41603
  source 1..120: mol_type = other DNA

SEQ ID NO: 71558 - DNA, 120 bp, synthetic construct; identical to SEQ ID NO: 41604
  source 1..120: mol_type = other DNA

SEQ ID NO: 71559 - DNA, 120 bp, synthetic construct; identical to SEQ ID NO: 11861
  source 1..120: mol_type = other DNA

SEQ ID NO: 71560 - DNA, 120 bp, synthetic construct; identical to SEQ ID NO: 41606
  source 1..120: mol_type = other DNA

SEQ ID NO: 71561 - DNA, 120 bp, synthetic construct; identical to SEQ ID NO: 41607
  source 1..120: mol_type = other DNA

SEQ ID NO: 71562 - DNA, 120 bp, synthetic construct; identical to SEQ ID NO: 41608
  source 1..120: mol_type = other DNA

SEQ ID NO: 71563 - DNA, 120 bp, synthetic construct; identical to SEQ ID NO: 41609
  source 1..120: mol_type = other DNA

SEQ ID NO: 71564 - DNA, 120 bp, synthetic construct; identical to SEQ ID NO: 11862
  source 1..120: mol_type = other DNA

SEQ ID NO: 71565 - DNA, 120 bp, synthetic construct; identical to SEQ ID NO: 41611
  source 1..120: mol_type = other DNA

SEQ ID NO: 71566 - DNA, 120 bp, synthetic construct; identical to SEQ ID NO: 41612
  source 1..120: mol_type = other DNA

SEQ ID NO: 71567 - DNA, 120 bp, synthetic construct; identical to SEQ ID NO: 11863
  source 1..120: mol_type = other DNA

SEQ ID NO: 71568 - DNA, 120 bp, synthetic construct; identical to SEQ ID NO: 41614
  source 1..120: mol_type = other DNA

SEQ ID NO: 71569 - DNA, 120 bp, synthetic construct; identical to SEQ ID NO: 41615
  source 1..120: mol_type = other DNA

SEQ ID NO: 71570 - DNA, 120 bp, synthetic construct; identical to SEQ ID NO: 41616
  source 1..120: mol_type = other DNA

SEQ ID NO: 71571 - DNA, 120 bp, synthetic construct; identical to SEQ ID NO: 11864
  source 1..120: mol_type = other DNA

SEQ ID NO: 71572 - DNA, 120 bp, synthetic construct; identical to SEQ ID NO: 41618
  source 1..120: mol_type = other DNA

SEQ ID NO: 71573 - DNA, 120 bp, synthetic construct; identical to SEQ ID NO: 41619
  source 1..120: mol_type = other DNA

SEQ ID NO: 71574 - DNA, 120 bp, synthetic construct; identical to SEQ ID NO: 41620
  source 1..120: mol_type = other DNA

SEQ ID NO: 71575 - DNA, 120 bp, synthetic construct; identical to SEQ ID NO: 11865
  source 1..120: mol_type = other DNA

SEQ ID NO: 71576 - DNA, 120 bp, synthetic construct; identical to SEQ ID NO: 41622
  source 1..120: mol_type = other DNA

SEQ ID NO: 71577 - DNA, 120 bp, synthetic construct; identical to SEQ ID NO: 41623
  source 1..120: mol_type = other DNA

SEQ ID NO: 71578 - DNA, 120 bp, synthetic construct; identical to SEQ ID NO: 41624
  source 1..120: mol_type = other DNA

SEQ ID NO: 71579 - DNA, 120 bp, synthetic construct; identical to SEQ ID NO: 11866
  source 1..120: mol_type = other DNA

SEQ ID NO: 71580 - DNA, 120 bp, synthetic construct; identical to SEQ ID NO: 41626
  source 1..120: mol_type = other DNA

SEQ ID NO: 71581 - DNA, 120 bp, synthetic construct; identical to SEQ ID NO: 41627
  source 1..120: mol_type = other DNA

SEQ ID NO: 71582 - DNA, 120 bp, synthetic construct; identical to SEQ ID NO: 41628
  source 1..120: mol_type = other DNA

SEQ ID NO: 71583 - DNA, 120 bp, synthetic construct; identical to SEQ ID NO: 11867
  source 1..120: mol_type = other DNA

SEQ ID NO: 71584 - DNA, 120 bp, synthetic construct; identical to SEQ ID NO: 41630
  source 1..120: mol_type = other DNA

SEQ ID NO: 71585 - DNA, 120 bp, synthetic construct; identical to SEQ ID NO: 41631
  source 1..120: mol_type = other DNA

SEQ ID NO: 71586 - DNA, 120 bp, synthetic construct; identical to SEQ ID NO: 41632
  source 1..120: mol_type = other DNA

SEQ ID NO: 71587 - DNA, 120 bp, synthetic construct; identical to SEQ ID NO: 41633
  source 1..120: mol_type = other DNA

SEQ ID NO: 71588 - DNA, 120 bp, synthetic construct; identical to SEQ ID NO: 11868
  source 1..120: mol_type = other DNA

SEQ ID NO: 71589 - DNA, 120 bp, synthetic construct; identical to SEQ ID NO: 41635
  source 1..120: mol_type = other DNA

SEQ ID NO: 71590 - DNA, 120 bp, synthetic construct; identical to SEQ ID NO: 41636
  source 1..120: mol_type = other DNA

SEQ ID NO: 71591 - DNA, 120 bp, synthetic construct; identical to SEQ ID NO: 11869
  source 1..120: mol_type = other DNA

SEQ ID NO: 71592 - DNA, 120 bp, synthetic construct; identical to SEQ ID NO: 41638
  source 1..120: mol_type = other DNA

SEQ ID NO: 71593 - DNA, 120 bp, synthetic construct; identical to SEQ ID NO: 41639
  source 1..120: mol_type = other DNA

SEQ ID NO: 71594 - DNA, 120 bp, synthetic construct; identical to SEQ ID NO: 41640
  source 1..120: mol_type = other DNA

SEQ ID NO: 71595 - DNA, 120 bp, synthetic construct; identical to SEQ ID NO: 11870
  source 1..120: mol_type = other DNA

SEQ ID NO: 71596 - DNA, 120 bp, synthetic construct; identical to SEQ ID NO: 41642
  source 1..120: mol_type = other DNA

SEQ ID NO: 71597 - DNA, 120 bp, synthetic construct; identical to SEQ ID NO: 41643
  source 1..120: mol_type = other DNA

SEQ ID NO: 71598 - DNA, 120 bp, synthetic construct; identical to SEQ ID NO: 41644
  source 1..120: mol_type = other DNA

SEQ ID NO: 71599 - DNA, 120 bp, synthetic construct; identical to SEQ ID NO: 41645
  source 1..120: mol_type = other DNA

SEQ ID NO: 71600 - DNA, 120 bp, synthetic construct; identical to SEQ ID NO: 11871
  source 1..120: mol_type = other DNA

SEQ ID NO: 71601 - DNA, 120 bp, synthetic construct; identical to SEQ ID NO: 41647
  source 1..120: mol_type = other DNA

SEQ ID NO: 71602 - DNA, 120 bp, synthetic construct; identical to SEQ ID NO: 41648
  source 1..120: mol_type = other DNA

SEQ ID NO: 71603 - DNA, 120 bp, synthetic construct; identical to SEQ ID NO: 41649
  source 1..120: mol_type = other DNA

SEQ ID NO: 71604 - DNA, 120 bp, synthetic construct; identical to SEQ ID NO: 11872
  source 1..120: mol_type = other DNA

SEQ ID NO: 71605 - DNA, 120 bp, synthetic construct; identical to SEQ ID NO: 41651
  source 1..120: mol_type = other DNA

SEQ ID NO: 71606 - DNA, 120 bp, synthetic construct; identical to SEQ ID NO: 41652
  source 1..120: mol_type = other DNA

SEQ ID NO: 71607 - DNA, 120 bp, synthetic construct; identical to SEQ ID NO: 41653
  source 1..120: mol_type = other DNA

SEQ ID NO: 71608 - DNA, 120 bp, synthetic construct; identical to SEQ ID NO: 11873
  source 1..120: mol_type = other DNA

SEQ ID NO: 71609 - DNA, 120 bp, synthetic construct; identical to SEQ ID NO: 41655
  source 1..120: mol_type = other DNA

SEQ ID NO: 71610 - DNA, 120 bp, synthetic construct; identical to SEQ ID NO: 41656
  source 1..120: mol_type = other DNA

SEQ ID NO: 71611 - DNA, 120 bp, synthetic construct; identical to SEQ ID NO: 41657
  source 1..120: mol_type = other DNA

SEQ ID NO: 71612 - DNA, 120 bp, synthetic construct; identical to SEQ ID NO: 11874
  source 1..120: mol_type = other DNA

SEQ ID NO: 71613 - DNA, 120 bp, synthetic construct; identical to SEQ ID NO: 41659
  source 1..120: mol_type = other DNA

SEQ ID NO: 71614 - DNA, 120 bp, synthetic construct; identical to SEQ ID NO: 41660
  source 1..120: mol_type = other DNA

SEQ ID NO: 71615 - DNA, 120 bp, synthetic construct; identical to SEQ ID NO: 41661
  source 1..120: mol_type = other DNA

SEQ ID NO: 71616 - DNA, 120 bp, synthetic construct; identical to SEQ ID NO: 11875
  source 1..120: mol_type = other DNA

SEQ ID NO: 71617 - DNA, 120 bp, synthetic construct; identical to SEQ ID NO: 41663
  source 1..120: mol_type = other DNA

SEQ ID NO: 71618 - DNA, 120 bp, synthetic construct; identical to SEQ ID NO: 41664
  source 1..120: mol_type = other DNA

SEQ ID NO: 71619 - DNA, 120 bp, synthetic construct; identical to SEQ ID NO: 11876
  source 1..120: mol_type = other DNA

SEQ ID NO: 71620 - DNA, 120 bp, synthetic construct; identical to SEQ ID NO: 41666
  source 1..120: mol_type = other DNA

SEQ ID NO: 71621 - DNA, 120 bp, synthetic construct; identical to SEQ ID NO: 41667
  source 1..120: mol_type = other DNA

SEQ ID NO: 71622 - DNA, 120 bp, synthetic construct; identical to SEQ ID NO: 41668
  source 1..120: mol_type = other DNA

SEQ ID NO: 71623 - DNA, 120 bp, synthetic construct; identical to SEQ ID NO: 41669
  source 1..120: mol_type = other DNA

SEQ ID NO: 71624 - DNA, 120 bp, synthetic construct; identical to SEQ ID NO: 11877
  source 1..120: mol_type = other DNA

SEQ ID NO: 71625 - DNA, 120 bp, synthetic construct; identical to SEQ ID NO: 41671
  source 1..120: mol_type = other DNA

SEQ ID NO: 71626 - DNA, 120 bp, synthetic construct; identical to SEQ ID NO: 41672
  source 1..120: mol_type = other DNA

SEQ ID NO: 71627 - DNA, 120 bp, synthetic construct; identical to SEQ ID NO: 41673
  source 1..120: mol_type = other DNA

SEQ ID NO: 71628 - DNA, 120 bp, synthetic construct; identical to SEQ ID NO: 41674
  source 1..120: mol_type = other DNA

SEQ ID NO: 71629 - DNA, 120 bp, synthetic construct; identical to SEQ ID NO: 11878
  source 1..120: mol_type = other DNA

SEQ ID NO: 71630 - DNA, 120 bp, synthetic construct; identical to SEQ ID NO: 41676
  source 1..120: mol_type = other DNA

SEQ ID NO: 71631 - DNA, 120 bp, synthetic construct; identical to SEQ ID NO: 41677
  source 1..120: mol_type = other DNA

SEQ ID NO: 71632 - DNA, 120 bp, synthetic construct; identical to SEQ ID NO: 11879
  source 1..120: mol_type = other DNA

SEQ ID NO: 71633 - DNA, 120 bp, synthetic construct; identical to SEQ ID NO: 41679
  source 1..120: mol_type = other DNA

SEQ ID NO: 71634 - DNA, 120 bp, synthetic construct; identical to SEQ ID NO: 41680
  source 1..120: mol_type = other DNA

SEQ ID NO: 71635 - DNA, 120 bp, synthetic construct; identical to SEQ ID NO: 41681
  source 1..120: mol_type = other DNA

SEQ ID NO: 71636 - DNA, 120 bp, synthetic construct; identical to SEQ ID NO: 11880
  source 1..120: mol_type = other DNA

SEQ ID NO: 71637 - DNA, 120 bp, synthetic construct; identical to SEQ ID NO: 41683
  source 1..120: mol_type = other DNA

SEQ ID NO: 71638 - DNA, 120 bp, synthetic construct; identical to SEQ ID NO: 41684
  source 1..120: mol_type = other DNA

SEQ ID NO: 71639 - DNA, 120 bp, synthetic construct; identical to SEQ ID NO: 41685
  source 1..120: mol_type = other DNA

SEQ ID NO: 71640 - DNA, 120 bp, synthetic construct; identical to SEQ ID NO: 11881
  source 1..120: mol_type = other DNA

SEQ ID NO: 71641 - DNA, 120 bp, synthetic construct; identical to SEQ ID NO: 41687
  source 1..120: mol_type = other DNA

SEQ ID NO: 71642 - DNA, 120 bp, synthetic construct; identical to SEQ ID NO: 41688
  source 1..120: mol_type = other DNA

SEQ ID NO: 71643 - DNA, 120 bp, synthetic construct; identical to SEQ ID NO: 41689
  source 1..120: mol_type = other DNA

SEQ ID NO: 71644 - DNA, 120 bp, synthetic construct; identical to SEQ ID NO: 41690
  source 1..120: mol_type = other DNA

SEQ ID NO: 71645 - DNA, 120 bp, synthetic construct; identical to SEQ ID NO: 11882
  source 1..120: mol_type = other DNA

SEQ ID NO: 71646 - DNA, 120 bp, synthetic construct; identical to SEQ ID NO: 41692
  source 1..120: mol_type = other DNA

SEQ ID NO: 71647 - DNA, 120 bp, synthetic construct; identical to SEQ ID NO: 41693
  source 1..120: mol_type = other DNA

SEQ ID NO: 71648 - DNA, 120 bp, synthetic construct; identical to SEQ ID NO: 11883
  source 1..120: mol_type = other DNA

SEQ ID NO: 71649 - DNA, 120 bp, synthetic construct; identical to SEQ ID NO: 41695
  source 1..120: mol_type = other DNA

SEQ ID NO: 71650 - DNA, 120 bp, synthetic construct; identical to SEQ ID NO: 41696
  source 1..120: mol_type = other DNA

SEQ ID NO: 71651 - DNA, 120 bp, synthetic construct; identical to SEQ ID NO: 41697
  source 1..120: mol_type = other DNA

SEQ ID NO: 71652 - DNA, 120 bp, synthetic construct; identical to SEQ ID NO: 11884
  source 1..120: mol_type = other DNA

SEQ ID NO: 71653 - DNA, 120 bp, synthetic construct; identical to SEQ ID NO: 41699
  source 1..120: mol_type = other DNA

SEQ ID NO: 71654 - DNA, 120 bp, synthetic construct; identical to SEQ ID NO: 41700
  source 1..120: mol_type = other DNA

SEQ ID NO: 71655 - DNA, 120 bp, synthetic construct; identical to SEQ ID NO: 41701
  source 1..120: mol_type = other DNA

SEQ ID NO: 71656 - DNA, 120 bp, synthetic construct; identical to SEQ ID NO: 11885
  source 1..120: mol_type = other DNA

SEQ ID NO: 71657 - DNA, 120 bp, synthetic construct; identical to SEQ ID NO: 41703
  source 1..120: mol_type = other DNA

SEQ ID NO: 71658 - DNA, 120 bp, synthetic construct; identical to SEQ ID NO: 41704
  source 1..120: mol_type = other DNA

SEQ ID NO: 71659 - DNA, 120 bp, synthetic construct; identical to SEQ ID NO: 41705
  source 1..120: mol_type = other DNA

SEQ ID NO: 71660 - DNA, 120 bp, synthetic construct; identical to SEQ ID NO: 41706
  source 1..120: mol_type = other DNA

SEQ ID NO: 71661 - DNA, 120 bp, synthetic construct; identical to SEQ ID NO: 41707
  source 1..120: mol_type = other DNA

SEQ ID NO: 71662 - DNA, 120 bp, synthetic construct; identical to SEQ ID NO: 11886
  source 1..120: mol_type = other DNA

SEQ ID NO: 71663 - DNA, 120 bp, synthetic construct; identical to SEQ ID NO: 41709
  source 1..120: mol_type = other DNA

SEQ ID NO: 71664 - DNA, 120 bp, synthetic construct; identical to SEQ ID NO: 41710
  source 1..120: mol_type = other DNA

SEQ ID NO: 71665 - DNA, 120 bp, synthetic construct; identical to SEQ ID NO: 41711
  source 1..120: mol_type = other DNA

SEQ ID NO: 71666 - DNA, 120 bp, synthetic construct; identical to SEQ ID NO: 11887
  source 1..120: mol_type = other DNA

SEQ ID NO: 71667 - DNA, 120 bp, synthetic construct; identical to SEQ ID NO: 41713
  source 1..120: mol_type = other DNA

SEQ ID NO: 71668 - DNA, 120 bp, synthetic construct; identical to SEQ ID NO: 41714
  source 1..120: mol_type = other DNA

SEQ ID NO: 71669 - DNA, 120 bp, synthetic construct; identical to SEQ ID NO: 11888
  source 1..120: mol_type = other DNA

SEQ ID NO: 71670 - DNA, 120 bp, synthetic construct; identical to SEQ ID NO: 41716
  source 1..120: mol_type = other DNA

SEQ ID NO: 71671 - DNA, 120 bp, synthetic construct; identical to SEQ ID NO: 41717
  source 1..120: mol_type = other DNA

SEQ ID NO: 71672 - DNA, 120 bp, synthetic construct; identical to SEQ ID NO: 41718
  source 1..120: mol_type = other DNA

SEQ ID NO: 71673 - DNA, 120 bp, synthetic construct; identical to SEQ ID NO: 11889
  source 1..120: mol_type = other DNA

SEQ ID NO: 71674 - DNA, 120 bp, synthetic construct; identical to SEQ ID NO: 41720
  source 1..120: mol_type = other DNA

SEQ ID NO: 71675 - DNA, 120 bp, synthetic construct; identical to SEQ ID NO: 41721
  source 1..120: mol_type = other DNA

SEQ ID NO: 71676 - DNA, 120 bp, synthetic construct; identical to SEQ ID NO: 41722
  source 1..120: mol_type = other DNA

SEQ ID NO: 71677 - DNA, 120 bp, synthetic construct; identical to SEQ ID NO: 11890
  source 1..120: mol_type = other DNA

SEQ ID NO: 71678 - DNA, 120 bp, synthetic construct; identical to SEQ ID NO: 41724
  source 1..120: mol_type = other DNA

SEQ ID NO: 71679 - DNA, 120 bp, synthetic construct; identical to SEQ ID NO: 41725
  source 1..120: mol_type = other DNA

SEQ ID NO: 71680 - DNA, 120 bp, synthetic construct; identical to SEQ ID NO: 41726
  source 1..120: mol_type = other DNA

SEQ ID NO: 71681 - DNA, 120 bp, synthetic construct; identical to SEQ ID NO: 41727
  source 1..120: mol_type = other DNA

SEQ ID NO: 71682 - DNA, 120 bp, synthetic construct; identical to SEQ ID NO: 11891
  source 1..120: mol_type = other DNA

SEQ ID NO: 71683 - DNA, 120 bp, synthetic construct; identical to SEQ ID NO: 41729
  source 1..120: mol_type = other DNA

SEQ ID NO: 71684 - DNA, 120 bp, synthetic construct; identical to SEQ ID NO: 41730
  source 1..120: mol_type = other DNA

SEQ ID NO: 71685 - DNA, 120 bp, synthetic construct; identical to SEQ ID NO: 11892
  source 1..120: mol_type = other DNA

SEQ ID NO: 71686 - DNA, 120 bp, synthetic construct; identical to SEQ ID NO: 41732
  source 1..120: mol_type = other DNA

SEQ ID NO: 71687 - DNA, 120 bp, synthetic construct; identical to SEQ ID NO: 41733
  source 1..120: mol_type = other DNA

SEQ ID NO: 71688 - DNA, 120 bp, synthetic construct; identical to SEQ ID NO: 41734
  source 1..120: mol_type = other DNA

SEQ ID NO: 71689 - DNA, 120 bp, synthetic construct; identical to SEQ ID NO: 41735
  source 1..120: mol_type = other DNA

SEQ ID NO: 71690 - DNA, 120 bp, synthetic construct; identical to SEQ ID NO: 41736
  source 1..120: mol_type = other DNA

SEQ ID NO: 71691 - DNA, 120 bp, synthetic construct; identical to SEQ ID NO: 11893
  source 1..120: mol_type = other DNA

SEQ ID NO: 71692 - DNA, 120 bp, synthetic construct; identical to SEQ ID NO: 41738
  source 1..120: mol_type = other DNA

SEQ ID NO: 71693 - DNA, 120 bp, synthetic construct; identical to SEQ ID NO: 11894
  source 1..120: mol_type = other DNA

SEQ ID NO: 71694 - DNA, 120 bp, synthetic construct; identical to SEQ ID NO: 41740
  source 1..120: mol_type = other DNA

SEQ ID NO: 71695 - DNA, 120 bp, synthetic construct; identical to SEQ ID NO: 41741
  source 1..120: mol_type = other DNA

SEQ ID NO: 71696 - DNA, 120 bp, synthetic construct; identical to SEQ ID NO: 41742
  source 1..120: mol_type = other DNA

SEQ ID NO: 71697 - DNA, 120 bp, synthetic construct; identical to SEQ ID NO: 11895
  source 1..120: mol_type = other DNA

SEQ ID NO: 71698 - DNA, 120 bp, synthetic construct; identical to SEQ ID NO: 41744
  source 1..120: mol_type = other DNA

SEQ ID NO: 71699 - DNA, 120 bp, synthetic construct; identical to SEQ ID NO: 41745
  source 1..120: mol_type = other DNA

SEQ ID NO: 71700 - DNA, 120 bp, synthetic construct; identical to SEQ ID NO: 41746
  source 1..120: mol_type = other DNA

SEQ ID NO: 71701 - DNA, 120 bp, synthetic construct; identical to SEQ ID NO: 41747
  source 1..120: mol_type = other DNA

SEQ ID NO: 71702 - DNA, 120 bp, synthetic construct; identical to SEQ ID NO: 11896
  source 1..120: mol_type = other DNA

SEQ ID NO: 71703 - DNA, 120 bp, synthetic construct; identical to SEQ ID NO: 41749
  source 1..120: mol_type = other DNA

SEQ ID NO: 71704 - DNA, 120 bp, synthetic construct; identical to SEQ ID NO: 41750
  source 1..120: mol_type = other DNA

SEQ ID NO: 71705 - DNA, 120 bp, synthetic construct; identical to SEQ ID NO: 41751
  source 1..120: mol_type = other DNA

SEQ ID NO: 71706 - DNA, 120 bp, synthetic construct; identical to SEQ ID NO: 11897
  source 1..120: mol_type = other DNA

SEQ ID NO: 71707 - DNA, 120 bp, synthetic construct; identical to SEQ ID NO: 41753
  source 1..120: mol_type = other DNA

SEQ ID NO: 71708 - DNA, 120 bp, synthetic construct; identical to SEQ ID NO: 41754
  source 1..120: mol_type = other DNA

SEQ ID NO: 71709 - DNA, 120 bp, synthetic construct; identical to SEQ ID NO: 11898
  source 1..120: mol_type = other DNA

SEQ ID NO: 71710 - DNA, 120 bp, synthetic construct; identical to SEQ ID NO: 41756
  source 1..120: mol_type = other DNA

SEQ ID NO: 71711 - DNA, 120 bp, synthetic construct; identical to SEQ ID NO: 41757
  source 1..120: mol_type = other DNA

SEQ ID NO: 71712 - DNA, 120 bp, synthetic construct; identical to SEQ ID NO: 41758
  source 1..120: mol_type = other DNA

SEQ ID NO: 71713 - DNA, 120 bp, synthetic construct; identical to SEQ ID NO: 11899
  source 1..120: mol_type = other DNA

SEQ ID NO: 71714 - DNA, 120 bp, synthetic construct; identical to SEQ ID NO: 41760
  source 1..120: mol_type = other DNA

SEQ ID NO: 71715 - DNA, 120 bp, synthetic construct; identical to SEQ ID NO: 41761
  source 1..120: mol_type = other DNA

SEQ ID NO: 71716 - DNA, 120 bp, synthetic construct; identical to SEQ ID NO: 41762
  source 1..120: mol_type = other DNA

SEQ ID NO: 71717 - DNA, 120 bp, synthetic construct; identical to SEQ ID NO: 41763
  source 1..120: mol_type = other DNA

SEQ ID NO: 71718 - DNA, 120 bp, synthetic construct; identical to SEQ ID NO: 11900
  source 1..120: mol_type = other DNA

SEQ ID NO: 71719 - DNA, 120 bp, synthetic construct; identical to SEQ ID NO: 41765
  source 1..120: mol_type = other DNA

SEQ ID NO: 71720 - DNA, 120 bp, synthetic construct; identical to SEQ ID NO: 41766
  source 1..120: mol_type = other DNA

SEQ ID NO: 71721 - DNA, 120 bp, synthetic construct; identical to SEQ ID NO: 41767
  source 1..120: mol_type = other DNA

SEQ ID NO: 71722 - DNA, 120 bp, synthetic construct; identical to SEQ ID NO: 41768
  source 1..120: mol_type = other DNA

SEQ ID NO: 71723 - DNA, 120 bp, synthetic construct; identical to SEQ ID NO: 11901
  source 1..120: mol_type = other DNA

SEQ ID NO: 71724 - DNA, 120 bp, synthetic construct; identical to SEQ ID NO: 41770
  source 1..120: mol_type = other DNA

SEQ ID NO: 71725 - DNA, 120 bp, synthetic construct; identical to SEQ ID NO: 41771
  source 1..120: mol_type = other DNA

SEQ ID NO: 71726 - DNA, 120 bp, synthetic construct; identical to SEQ ID NO: 11902
  source 1..120: mol_type = other DNA

SEQ ID NO: 71727 - DNA, 120 bp, synthetic construct; identical to SEQ ID NO: 41773
  source 1..120: mol_type = other DNA

SEQ ID NO: 71728 - DNA, 120 bp, synthetic construct; identical to SEQ ID NO: 41774
  source 1..120: mol_type = other DNA

SEQ ID NO: 71729 - DNA, 120 bp, synthetic construct; identical to SEQ ID NO: 41775
  source 1..120: mol_type = other DNA

SEQ ID NO: 71730 - DNA, 120 bp, synthetic construct; identical to SEQ ID NO: 11903
  source 1..120: mol_type = other DNA

SEQ ID NO: 71731 - DNA, 120 bp, synthetic construct; identical to SEQ ID NO: 41777
  source 1..120: mol_type = other DNA

SEQ ID NO: 71732 - DNA, 120 bp, synthetic construct; identical to SEQ ID NO: 41778
  source 1..120: mol_type = other DNA

SEQ ID NO: 71733 - DNA, 120 bp, synthetic construct; identical to SEQ ID NO: 41779
  source 1..120: mol_type = other DNA

SEQ ID NO: 71734 - DNA, 120 bp, synthetic construct; identical to SEQ ID NO: 41780
  source 1..120: mol_type = other DNA

SEQ ID NO: 71735 - DNA, 120 bp, synthetic construct; identical to SEQ ID NO: 11904
  source 1..120: mol_type = other DNA

SEQ ID NO: 71736 - DNA, 120 bp, synthetic construct; identical to SEQ ID NO: 41782
  source 1..120: mol_type = other DNA

SEQ ID NO: 71737 - DNA, 120 bp, synthetic construct; identical to SEQ ID NO: 41783
  source 1..120: mol_type = other DNA

SEQ ID NO: 71738 - DNA, 120 bp, synthetic construct; identical to SEQ ID NO: 11905
  source 1..120: mol_type = other DNA

SEQ ID NO: 71739 - DNA, 120 bp, synthetic construct; identical to SEQ ID NO: 41785
  source 1..120: mol_type = other DNA

SEQ ID NO: 71740 - DNA, 120 bp, synthetic construct; identical to SEQ ID NO: 41786
  source 1..120: mol_type = other DNA

SEQ ID NO: 71741 - DNA, 120 bp, synthetic construct; identical to SEQ ID NO: 41787
  source 1..120: mol_type = other DNA

SEQ ID NO: 71742 - DNA, 120 bp, synthetic construct; identical to SEQ ID NO: 11906
  source 1..120: mol_type = other DNA

SEQ ID NO: 71743 - DNA, 120 bp, synthetic construct; identical to SEQ ID NO: 41789
  source 1..120: mol_type = other DNA

SEQ ID NO: 71744 - DNA, 120 bp, synthetic construct; identical to SEQ ID NO: 41790
  source 1..120: mol_type = other DNA

SEQ ID NO: 71745 - DNA, 120 bp, synthetic construct; identical to SEQ ID NO: 41791
  source 1..120: mol_type = other DNA

SEQ ID NO: 71746 - DNA, 120 bp, synthetic construct; identical to SEQ ID NO: 41792
  source 1..120: mol_type = other DNA

SEQ ID NO: 71747 - DNA, 120 bp, synthetic construct; identical to SEQ ID NO: 11907
  source 1..120: mol_type = other DNA

SEQ ID NO: 71748 - DNA, 120 bp, synthetic construct; identical to SEQ ID NO: 41794
  source 1..120: mol_type = other DNA

SEQ ID NO: 71749 - DNA, 120 bp, synthetic construct; identical to SEQ ID NO: 41795
  source 1..120: mol_type = other DNA

SEQ ID NO: 71750 - DNA, 120 bp, synthetic construct; identical to SEQ ID NO: 11908
  source 1..120: mol_type = other DNA

SEQ ID NO: 71751 - DNA, 120 bp, synthetic construct; identical to SEQ ID NO: 41797
  source 1..120: mol_type = other DNA

SEQ ID NO: 71752 - DNA, 120 bp, synthetic construct; identical to SEQ ID NO: 41798
  source 1..120: mol_type = other DNA

SEQ ID NO: 71753 - DNA, 120 bp, synthetic construct; identical to SEQ ID NO: 41799
  source 1..120: mol_type = other DNA

SEQ ID NO: 71754 - DNA, 120 bp, synthetic construct; identical to SEQ ID NO: 11909
  source 1..120: mol_type = other DNA

SEQ ID NO: 71755 - DNA, 120 bp, synthetic construct; identical to SEQ ID NO: 41801
  source 1..120: mol_type = other DNA

SEQ ID NO: 71756 - DNA, 120 bp, synthetic construct; identical to SEQ ID NO: 41802
  source 1..120: mol_type = other DNA

SEQ ID NO: 71757 - DNA, 120 bp, synthetic construct; identical to SEQ ID NO: 41803
  source 1..120: mol_type = other DNA

SEQ ID NO: 71758 - DNA, 120 bp, synthetic construct; identical to SEQ ID NO: 41804
  source 1..120: mol_type = other DNA

SEQ ID NO: 71759 - DNA, 120 bp, synthetic construct; identical to SEQ ID NO: 11910
  source 1..120: mol_type = other DNA

SEQ ID NO: 71760 - DNA, 120 bp, synthetic construct; identical to SEQ ID NO: 41806
  source 1..120: mol_type = other DNA

SEQ ID NO: 71761 - DNA, 120 bp, synthetic construct; identical to SEQ ID NO: 41807
  source 1..120: mol_type = other DNA

SEQ ID NO: 71762 - DNA, 120 bp, synthetic construct; identical to SEQ ID NO: 11911
  source 1..120: mol_type = other DNA

SEQ ID NO: 71763 - DNA, 120 bp, synthetic construct; identical to SEQ ID NO: 41809
  source 1..120: mol_type = other DNA

SEQ ID NO: 71764 - DNA, 120 bp, synthetic construct; identical to SEQ ID NO: 41810
  source 1..120: mol_type = other DNA

SEQ ID NO: 71765 - DNA, 120 bp, synthetic construct; identical to SEQ ID NO: 41811
  source 1..120: mol_type = other DNA

SEQ ID NO: 71766 - DNA, 120 bp, synthetic construct; identical to SEQ ID NO: 11912
  source 1..120: mol_type = other DNA

SEQ ID NO: 71767 - DNA, 120 bp, synthetic construct; identical to SEQ ID NO: 41813
  source 1..120: mol_type = other DNA

SEQ ID NO: 71768 - DNA, 120 bp, synthetic construct; identical to SEQ ID NO: 41814
  source 1..120: mol_type = other DNA

SEQ ID NO: 71769 - DNA, 120 bp, synthetic construct; identical to SEQ ID NO: 41815
  source 1..120: mol_type = other DNA

SEQ ID NO: 71770 - DNA, 120 bp, synthetic construct; identical to SEQ ID NO: 41816
  source 1..120: mol_type = other DNA

SEQ ID NO: 71771 - DNA, 120 bp, synthetic construct; identical to SEQ ID NO: 11913
  source 1..120: mol_type = other DNA

SEQ ID NO: 71772 - DNA, 120 bp, synthetic construct; identical to SEQ ID NO: 41818
  source 1..120: mol_type = other DNA

SEQ ID NO: 71773 - DNA, 120 bp, synthetic construct; identical to SEQ ID NO: 41819
  source 1..120: mol_type = other DNA

SEQ ID NO: 71774 - DNA, 120 bp, synthetic construct; identical to SEQ ID NO: 41820
  source 1..120: mol_type = other DNA

SEQ ID NO: 71775 - DNA, 120 bp, synthetic construct; identical to SEQ ID NO: 11914
  source 1..120: mol_type = other DNA

SEQ ID NO: 71776 - DNA, 120 bp, synthetic construct; identical to SEQ ID NO: 41822
  source 1..120: mol_type = other DNA

SEQ ID NO: 71777 - DNA, 120 bp, synthetic construct; identical to SEQ ID NO: 41823
  source 1..120: mol_type = other DNA

SEQ ID NO: 71778 - DNA, 120 bp, synthetic construct; identical to SEQ ID NO: 41824
  source 1..120: mol_type = other DNA

SEQ ID NO: 71779 - DNA, 120 bp, synthetic construct; identical to SEQ ID NO: 11915
  source 1..120: mol_type = other DNA

SEQ ID NO: 71780 - DNA, 120 bp, synthetic construct; identical to SEQ ID NO: 41826
  source 1..120: mol_type = other DNA

SEQ ID NO: 71781 - DNA, 120 bp, synthetic construct; identical to SEQ ID NO: 41827
  source 1..120: mol_type = other DNA

SEQ ID NO: 71782 - DNA, 120 bp, synthetic construct; identical to SEQ ID NO: 41828
  source 1..120: mol_type = other DNA

SEQ ID NO: 71783 - DNA, 120 bp, synthetic construct; identical to SEQ ID NO: 11916
  source 1..120: mol_type = other DNA

SEQ ID NO: 71784 - DNA, 120 bp, synthetic construct; identical to SEQ ID NO: 41830
  source 1..120: mol_type = other DNA

SEQ ID NO: 71785 - DNA, 120 bp, synthetic construct; identical to SEQ ID NO: 41831
  source 1..120: mol_type = other DNA

SEQ ID NO: 71786 - DNA, 120 bp, synthetic construct; identical to SEQ ID NO: 11917
  source 1..120: mol_type = other DNA

SEQ ID NO: 71787 - DNA, 120 bp, synthetic construct; identical to SEQ ID NO: 41833
  source 1..120: mol_type = other DNA

SEQ ID NO: 71788 - DNA, 120 bp, synthetic construct; identical to SEQ ID NO: 41834
  source 1..120: mol_type = other DNA

SEQ ID NO: 71789 - DNA, 120 bp, synthetic construct; identical to SEQ ID NO: 41835
  source 1..120: mol_type = other DNA

SEQ ID NO: 71790 - DNA, 120 bp, synthetic construct; identical to SEQ ID NO: 11918
  source 1..120: mol_type = other DNA

SEQ ID NO: 71791 - DNA, 120 bp, synthetic construct; identical to SEQ ID NO: 41837
  source 1..120: mol_type = other DNA

SEQ ID NO: 71792 - DNA, 120 bp, synthetic construct; identical to SEQ ID NO: 41838
  source 1..120: mol_type = other DNA

SEQ ID NO: 71793 - DNA, 120 bp, synthetic construct; identical to SEQ ID NO: 41839
  source 1..120: mol_type = other DNA

SEQ ID NO: 71794 - DNA, 120 bp, synthetic construct; identical to SEQ ID NO: 11919
  source 1..120: mol_type = other DNA

SEQ ID NO: 71795 - DNA, 120 bp, synthetic construct; identical to SEQ ID NO: 41841
  source 1..120: mol_type = other DNA

SEQ ID NO: 71796 - DNA, 120 bp, synthetic construct; identical to SEQ ID NO: 41842
  source 1..120: mol_type = other DNA

SEQ ID NO: 71797 - DNA, 120 bp, synthetic construct; identical to SEQ ID NO: 41843
  source 1..120: mol_type = other DNA

SEQ ID NO: 71798 - DNA, 120 bp, synthetic construct; identical to SEQ ID NO: 41844
  source 1..120: mol_type = other DNA

SEQ ID NO: 71799 - DNA, 120 bp, synthetic construct; identical to SEQ ID NO: 11920
  source 1..120: mol_type = other DNA

SEQ ID NO: 71800 - DNA, 120 bp, synthetic construct; identical to SEQ ID NO: 41846
  source 1..120: mol_type = other DNA

SEQ ID NO: 71801 - DNA, 120 bp, synthetic construct; identical to SEQ ID NO: 41847
  source 1..120: mol_type = other DNA

SEQ ID NO: 71802 - DNA, 120 bp, synthetic construct; identical to SEQ ID NO: 11921
  source 1..120: mol_type = other DNA

SEQ ID NO: 71803 - DNA, 120 bp, synthetic construct; identical to SEQ ID NO: 41849
  source 1..120: mol_type = other DNA

SEQ ID NO: 71804 - DNA, 120 bp, synthetic construct; identical to SEQ ID NO: 41850
  source 1..120: mol_type = other DNA

SEQ ID NO: 71805 - DNA, 120 bp, synthetic construct; identical to SEQ ID NO: 41851
  source 1..120: mol_type = other DNA

SEQ ID NO: 71806 - DNA, 120 bp, synthetic construct; identical to SEQ ID NO: 11922
  source 1..120: mol_type = other DNA

SEQ ID NO: 71807 - DNA, 120 bp, synthetic construct; identical to SEQ ID NO: 41853
  source 1..120: mol_type = other DNA

SEQ ID NO: 71808 - DNA, 120 bp, synthetic construct; identical to SEQ ID NO: 41854
  source 1..120: mol_type = other DNA

SEQ ID NO: 71809 - DNA, 120 bp, synthetic construct; identical to SEQ ID NO: 41855
  source 1..120: mol_type = other DNA

SEQ ID NO: 71810 - DNA, 120 bp, synthetic construct; identical to SEQ ID NO: 11923
  source 1..120: mol_type = other DNA

SEQ ID NO: 71811 - DNA, 120 bp, synthetic construct; identical to SEQ ID NO: 41857
  source 1..120: mol_type = other DNA

SEQ ID NO: 71812 - DNA, 120 bp, synthetic construct; identical to SEQ ID NO: 41858
  source 1..120: mol_type = other DNA

SEQ ID NO: 71813 - DNA, 120 bp, synthetic construct; identical to SEQ ID NO: 41859
  source 1..120: mol_type = other DNA

SEQ ID NO: 71814 - DNA, 120 bp, synthetic construct; identical to SEQ ID NO: 41860
  source 1..120: mol_type = other DNA

SEQ ID NO: 71815 - DNA, 120 bp, synthetic construct; identical to SEQ ID NO: 11924
  source 1..120: mol_type = other DNA

SEQ ID NO: 71816 - DNA, 120 bp, synthetic construct; identical to SEQ ID NO: 41862
  source 1..120: mol_type = other DNA

SEQ ID NO: 71817 - DNA, 120 bp, synthetic construct; identical to SEQ ID NO: 41863
  source 1..120: mol_type = other DNA

SEQ ID NO: 71818 - DNA, 120 bp, synthetic construct; identical to SEQ ID NO: 41864
  source 1..120: mol_type = other DNA

SEQ ID NO: 71819 - DNA, 120 bp, synthetic construct; identical to SEQ ID NO: 11925
  source 1..120: mol_type = other DNA

SEQ ID NO: 71820 - DNA, 120 bp, synthetic construct; identical to SEQ ID NO: 41866
  source 1..120: mol_type = other DNA

SEQ ID NO: 71821 - DNA, 120 bp, synthetic construct; identical to SEQ ID NO: 41867
  source 1..120: mol_type = other DNA

SEQ ID NO: 71822 - DNA, 120 bp, synthetic construct; identical to SEQ ID NO: 11926
  source 1..120: mol_type = other DNA

SEQ ID NO: 71823 - DNA, 120 bp, synthetic construct; identical to SEQ ID NO: 41869
  source 1..120: mol_type = other DNA

SEQ ID NO: 71824 - DNA, 120 bp, synthetic construct; identical to SEQ ID NO: 41870
  source 1..120: mol_type = other DNA

SEQ ID NO: 71825 - DNA, 120 bp, synthetic construct; identical to SEQ ID NO: 41871
  source 1..120: mol_type = other DNA

SEQ ID NO: 71826 - DNA, 120 bp, synthetic construct; identical to SEQ ID NO: 41872
  source 1..120: mol_type = other DNA

SEQ ID NO: 71827 - DNA, 120 bp, synthetic construct; identical to SEQ ID NO: 11927
  source 1..120: mol_type = other DNA

SEQ ID NO: 71828 - DNA, 120 bp, synthetic construct; identical to SEQ ID NO: 41874
  source 1..120: mol_type = other DNA

SEQ ID NO: 71829 - DNA, 120 bp, synthetic construct; identical to SEQ ID NO: 41875
  source 1..120: mol_type = other DNA

SEQ ID NO: 71830 - DNA, 120 bp, synthetic construct; identical to SEQ ID NO: 41876
  source 1..120: mol_type = other DNA

SEQ ID NO: 71831 - DNA, 120 bp, synthetic construct; identical to SEQ ID NO: 11928
  source 1..120: mol_type = other DNA

SEQ ID NO: 71832 - DNA, 120 bp, synthetic construct; identical to SEQ ID NO: 41878
  source 1..120: mol_type = other DNA

SEQ ID NO: 71833 - DNA, 120 bp, synthetic construct; identical to SEQ ID NO: 41879
  source 1..120: mol_type = other DNA

SEQ ID NO: 71834 - DNA, 120 bp, synthetic construct; identical to SEQ ID NO: 41880
  source 1..120: mol_type = other DNA

SEQ ID NO: 71835 - DNA, 120 bp, synthetic construct; identical to SEQ ID NO: 41881
  source 1..120: mol_type = other DNA

SEQ ID NO: 71836 - DNA, 120 bp, synthetic construct; identical to SEQ ID NO: 11929
  source 1..120: mol_type = other DNA

SEQ ID NO: 71837 - DNA, 120 bp, synthetic construct; identical to SEQ ID NO: 41883
  source 1..120: mol_type = other DNA

SEQ ID NO: 71838 - DNA, 120 bp, synthetic construct; identical to SEQ ID NO: 41884
  source 1..120: mol_type = other DNA

SEQ ID NO: 71839 - DNA, 120 bp, synthetic construct; identical to SEQ ID NO: 11930
  source 1..120: mol_type = other DNA

SEQ ID NO: 71840 - DNA, 120 bp, synthetic construct; identical to SEQ ID NO: 41886
  source 1..120: mol_type = other DNA

SEQ ID NO: 71841 - DNA, 120 bp, synthetic construct; identical to SEQ ID NO: 41887
  source 1..120: mol_type = other DNA

SEQ ID NO: 71842 - DNA, 120 bp, synthetic construct; identical to SEQ ID NO: 41888
  source 1..120: mol_type = other DNA

SEQ ID NO: 71843 - DNA, 120 bp, synthetic construct; identical to SEQ ID NO: 41889
  source 1..120: mol_type = other DNA

SEQ ID NO: 71844 - DNA, 120 bp, synthetic construct; identical to SEQ ID NO: 11931
  source 1..120: mol_type = other DNA

SEQ ID NO: 71845 - DNA, 120 bp, synthetic construct; identical to SEQ ID NO: 41891
  source 1..120: mol_type = other DNA

SEQ ID NO: 71846 - DNA, 120 bp, synthetic construct; identical to SEQ ID NO: 41892
  source 1..120: mol_type = other DNA

SEQ ID NO: 71847 - DNA, 120 bp, synthetic construct; identical to SEQ ID NO: 41893
  source 1..120: mol_type = other DNA

SEQ ID NO: 71848 - DNA, 120 bp, synthetic construct; identical to SEQ ID NO: 41894
  source 1..120: mol_type = other DNA

SEQ ID NO: 71849 - DNA, 120 bp, synthetic construct; identical to SEQ ID NO: 11932
  source 1..120: mol_type = other DNA

SEQ ID NO: 71850 - DNA, 120 bp, synthetic construct; identical to SEQ ID NO: 41896
  source 1..120: mol_type = other DNA

SEQ ID NO: 71851 - DNA, 120 bp, synthetic construct; identical to SEQ ID NO: 41897
  source 1..120: mol_type = other DNA

SEQ ID NO: 71852 - DNA, 120 bp, synthetic construct; identical to SEQ ID NO: 41898
  source 1..120: mol_type = other DNA

SEQ ID NO: 71853 - DNA, 120 bp, synthetic construct; identical to SEQ ID NO: 11933
  source 1..120: mol_type = other DNA

SEQ ID NO: 71854 - DNA, 120 bp, synthetic construct; identical to SEQ ID NO: 41900
  source 1..120: mol_type = other DNA

SEQ ID NO: 71855 - DNA, 120 bp, synthetic construct; identical to SEQ ID NO: 41901
  source 1..120: mol_type = other DNA

SEQ ID NO: 71856 - DNA, 120 bp, synthetic construct; identical to SEQ ID NO: 11934
  source 1..120: mol_type = other DNA

SEQ ID NO: 71857 - DNA, 120 bp, synthetic construct; identical to SEQ ID NO: 41903
  source 1..120: mol_type = other DNA

SEQ ID NO: 71858 - DNA, 120 bp, synthetic construct; identical to SEQ ID NO: 41904
  source 1..120: mol_type = other DNA

SEQ ID NO: 71859 - DNA, 120 bp, synthetic construct; identical to SEQ ID NO: 41905
  source 1..120: mol_type = other DNA

SEQ ID NO: 71860 - DNA, 120 bp, synthetic construct; identical to SEQ ID NO: 11935
  source 1..120: mol_type = other DNA

SEQ ID NO: 71861 - DNA, 120 bp, synthetic construct; identical to SEQ ID NO: 41907
  source 1..120: mol_type = other DNA

SEQ ID NO: 71862 - DNA, 120 bp, synthetic construct; identical to SEQ ID NO: 41908
  source 1..120: mol_type = other DNA

SEQ ID NO: 71863 - DNA, 120 bp, synthetic construct; identical to SEQ ID NO: 41909
  source 1..120: mol_type = other DNA

SEQ ID NO: 71864 - DNA, 120 bp, synthetic construct; identical to SEQ ID NO: 41910
  source 1..120: mol_type = other DNA

SEQ ID NO: 71865 - DNA, 120 bp, synthetic construct; identical to SEQ ID NO: 11936
  source 1..120: mol_type = other DNA

SEQ ID NO: 71866 - DNA, 120 bp, synthetic construct; identical to SEQ ID NO: 41912
  source 1..120: mol_type = other DNA

SEQ ID NO: 71867 - DNA, 120 bp, synthetic construct; identical to SEQ ID NO: 4620
  source 1..120: mol_type = other DNA

SEQ ID NO: 71868 - DNA, 120 bp, synthetic construct; identical to SEQ ID NO: 41914
  source 1..120: mol_type = other DNA

SEQ ID NO: 71869 - DNA, 120 bp, synthetic construct; identical to SEQ ID NO: 11937
  source 1..120: mol_type = other DNA

SEQ ID NO: 71870 - DNA, 120 bp, synthetic construct; identical to SEQ ID NO: 41916
  source 1..120: mol_type = other DNA

SEQ ID NO: 71871 - DNA, 120 bp, synthetic construct; identical to SEQ ID NO: 41917
  source 1..120: mol_type = other DNA

SEQ ID NO: 71872 - DNA, 120 bp, synthetic construct; identical to SEQ ID NO: 41918
  source 1..120: mol_type = other DNA

SEQ ID NO: 71873 - DNA, 120 bp, synthetic construct; identical to SEQ ID NO: 11938
  source 1..120: mol_type = other DNA

SEQ ID NO: 71874 - DNA, 120 bp, synthetic construct; identical to SEQ ID NO: 41920
  source 1..120: mol_type = other DNA

SEQ ID NO: 71875 - DNA, 120 bp, synthetic construct; identical to SEQ ID NO: 41921
  source 1..120: mol_type = other DNA

SEQ ID NO: 71876 - DNA, 120 bp, synthetic construct; identical to SEQ ID NO: 41922
  source 1..120: mol_type = other DNA

SEQ ID NO: 71877 - DNA, 120 bp, synthetic construct; identical to SEQ ID NO: 11939
  source 1..120: mol_type = other DNA

SEQ ID NO: 71878 - DNA, 120 bp, synthetic construct; identical to SEQ ID NO: 41924
  source 1..120: mol_type = other DNA

SEQ ID NO: 71879 - DNA, 120 bp, synthetic construct; identical to SEQ ID NO: 41925
  source 1..120: mol_type = other DNA

SEQ ID NO: 71880 - DNA, 120 bp, synthetic construct; identical to SEQ ID NO: 41926
  source 1..120: mol_type = other DNA

SEQ ID NO: 71881 - DNA, 120 bp, synthetic construct; identical to SEQ ID NO: 41927
  source 1..120: mol_type = other DNA

SEQ ID NO: 71882 - DNA, 120 bp, synthetic construct; identical to SEQ ID NO: 11940
  source 1..120: mol_type = other DNA

SEQ ID NO: 71883 - DNA, 120 bp, synthetic construct; identical to SEQ ID NO: 41929
  source 1..120: mol_type = other DNA

SEQ ID NO: 71884 - DNA, 120 bp, synthetic construct; identical to SEQ ID NO: 41930
  source 1..120: mol_type = other DNA

SEQ ID NO: 71885 - DNA, 120 bp, synthetic construct; identical to SEQ ID NO: 11941
  source 1..120: mol_type = other DNA

SEQ ID NO: 71886 - DNA, 120 bp, synthetic construct; identical to SEQ ID NO: 41932
  source 1..120: mol_type = other DNA

SEQ ID NO: 71887 - DNA, 120 bp, synthetic construct; identical to SEQ ID NO: 41933
  source 1..120: mol_type = other DNA

SEQ ID NO: 71888 - DNA, 120 bp, synthetic construct; identical to SEQ ID NO: 41934
  source 1..120: mol_type = other DNA

SEQ ID NO: 71889 - DNA, 120 bp, synthetic construct; identical to SEQ ID NO: 41935
  source 1..120: mol_type = other DNA

SEQ ID NO: 71890 - DNA, 120 bp, synthetic construct; identical to SEQ ID NO: 11942
  source 1..120: mol_type = other DNA

SEQ ID NO: 71891 - DNA, 120 bp, synthetic construct; identical to SEQ ID NO: 41937
  source 1..120: mol_type = other DNA

SEQ ID NO: 71892 - DNA, 120 bp, synthetic construct; identical to SEQ ID NO: 41938
  source 1..120: mol_type = other DNA

SEQ ID NO: 71893 - DNA, 120 bp, synthetic construct; identical to SEQ ID NO: 11943
  source 1..120: mol_type = other DNA

SEQ ID NO: 71894 - DNA, 120 bp, synthetic construct; identical to SEQ ID NO: 41940
  source 1..120: mol_type = other DNA

SEQ ID NO: 71895 - DNA, 120 bp, synthetic construct; identical to SEQ ID NO: 41941
  source 1..120: mol_type = other DNA

SEQ ID NO: 71896 - DNA, 120 bp, synthetic construct; identical to SEQ ID NO: 41942
  source 1..120: mol_type = other DNA

SEQ ID NO: 71897 - DNA, 120 bp, synthetic construct; identical to SEQ ID NO: 41943
  source 1..120: mol_type = other DNA

SEQ ID NO: 71898 - DNA, 120 bp, synthetic construct; identical to SEQ ID NO: 11944
  source 1..120: mol_type = other DNA

SEQ ID NO: 71899 - DNA, 120 bp, synthetic construct; identical to SEQ ID NO: 41945
  source 1..120: mol_type = other DNA

SEQ ID NO: 71900 - DNA, 120 bp, synthetic construct; identical to SEQ ID NO: 41946
  source 1..120: mol_type = other DNA

SEQ ID NO: 71901 - DNA, 120 bp, synthetic construct; identical to SEQ ID NO: 41947
  source 1..120: mol_type = other DNA

SEQ ID NO: 71902 - DNA, 120 bp, synthetic construct; identical to SEQ ID NO: 11945
  source 1..120: mol_type = other DNA

SEQ ID NO: 71903 - DNA, 120 bp, synthetic construct; identical to SEQ ID NO: 41949
  source 1..120: mol_type = other DNA

SEQ ID NO: 71904 - DNA, 120 bp, synthetic construct; identical to SEQ ID NO: 41950
  source 1..120: mol_type = other DNA

SEQ ID NO: 71905 - DNA, 120 bp, synthetic construct; identical to SEQ ID NO: 11946
  source 1..120: mol_type = other DNA

SEQ ID NO: 71906 - DNA, 120 bp, synthetic construct; identical to SEQ ID NO: 41952
  source 1..120: mol_type = other DNA

SEQ ID NO: 71907 - DNA, 120 bp, synthetic construct; identical to SEQ ID NO: 41953
  source 1..120: mol_type = other DNA

SEQ ID NO: 71908 - DNA, 120 bp, synthetic construct; identical to SEQ ID NO: 41954
  source 1..120: mol_type = other DNA

SEQ ID NO: 71909 - DNA, 120 bp, synthetic construct; identical to SEQ ID NO: 11947
  source 1..120: mol_type = other DNA

SEQ ID NO: 71910 - DNA, 120 bp, synthetic construct; identical to SEQ ID NO: 41956
  source 1..120: mol_type = other DNA

SEQ ID NO: 71911 - DNA, 120 bp, synthetic construct; identical to SEQ ID NO: 41957
  source 1..120: mol_type = other DNA

SEQ ID NO: 71912 - DNA, 120 bp, synthetic construct; identical to SEQ ID NO: 41958
  source 1..120: mol_type = other DNA

SEQ ID NO: 71913 - DNA, 120 bp, synthetic construct; identical to SEQ ID NO: 11948
  source 1..120: mol_type = other DNA

SEQ ID NO: 71914 - DNA, 120 bp, synthetic construct; identical to SEQ ID NO: 41960
  source 1..120: mol_type = other DNA

SEQ ID NO: 71915 - DNA, 120 bp, synthetic construct; identical to SEQ ID NO: 41961
  source 1..120: mol_type = other DNA

SEQ ID NO: 71916 - DNA, 120 bp, synthetic construct; identical to SEQ ID NO: 41962
  source 1..120: mol_type = other DNA

SEQ ID NO: 71917 - DNA, 120 bp, synthetic construct; identical to SEQ ID NO: 41963
  source 1..120: mol_type = other DNA

SEQ ID NO: 71918 - DNA, 120 bp, synthetic construct; identical to SEQ ID NO: 11949
  source 1..120: mol_type = other DNA

SEQ ID NO: 71919 - DNA, 120 bp, synthetic construct; identical to SEQ ID NO: 41965
  source 1..120: mol_type = other DNA

SEQ ID NO: 71920 - DNA, 120 bp, synthetic construct; identical to SEQ ID NO: 41966
  source 1..120: mol_type = other DNA

SEQ ID NO: 71921 - DNA, 120 bp, synthetic construct; identical to SEQ ID NO: 11950
  source 1..120: mol_type = other DNA

SEQ ID NO: 71922 - DNA, 120 bp, synthetic construct; identical to SEQ ID NO: 41968
  source 1..120: mol_type = other DNA

SEQ ID NO: 71923 - DNA, 120 bp, synthetic construct; identical to SEQ ID NO: 41969
  source 1..120: mol_type = other DNA

SEQ ID NO: 71924 - DNA, 120 bp, synthetic construct; identical to SEQ ID NO: 41970
  source 1..120: mol_type = other DNA

SEQ ID NO: 71925 - DNA, 120 bp, synthetic construct; identical to SEQ ID NO: 11951
  source 1..120: mol_type = other DNA

SEQ ID NO: 71926 - DNA, 120 bp, synthetic construct; identical to SEQ ID NO: 41972
  source 1..120: mol_type = other DNA

SEQ ID NO: 71927 - DNA, 120 bp, synthetic construct; identical to SEQ ID NO: 41973
  source 1..120: mol_type = other DNA

SEQ ID NO: 71928 - DNA, 120 bp, synthetic construct; identical to SEQ ID NO: 41974
  source 1..120: mol_type = other DNA

SEQ ID NO: 71929 - DNA, 120 bp, synthetic construct; identical to SEQ ID NO: 41975
  source 1..120: mol_type = other DNA

SEQ ID NO: 71930 - DNA, 120 bp, synthetic construct; identical to SEQ ID NO: 11952
  source 1..120: mol_type = other DNA

SEQ ID NO: 71931 - DNA, 120 bp, synthetic construct; identical to SEQ ID NO: 41977
  source 1..120: mol_type = other DNA

SEQ ID NO: 71932 - DNA, 120 bp, synthetic construct; identical to SEQ ID NO: 41978
  source 1..120: mol_type = other DNA

SEQ ID NO: 71933 - DNA, 120 bp, synthetic construct; identical to SEQ ID NO: 41979
  source 1..120: mol_type = other DNA

SEQ ID NO: 71934 - DNA, 120 bp, synthetic construct; identical to SEQ ID NO: 11953
  source 1..120: mol_type = other DNA

SEQ ID NO: 71935 - DNA, 120 bp, synthetic construct; identical to SEQ ID NO: 41981
  source 1..120: mol_type = other DNA

SEQ ID NO: 71936 - DNA, 120 bp, synthetic construct; identical to SEQ ID NO: 41982
  source 1..120: mol_type = other DNA

SEQ ID NO: 71937 - DNA, 120 bp, synthetic construct; identical to SEQ ID NO: 11954
  source 1..120: mol_type = other DNA

SEQ ID NO: 71938 - DNA, 120 bp, synthetic construct; identical to SEQ ID NO: 41984
  source 1..120: mol_type = other DNA

SEQ ID NO: 71939 - DNA, 120 bp, synthetic construct; identical to SEQ ID NO: 41985
  source 1..120: mol_type = other DNA

SEQ ID NO: 71940 - DNA, 120 bp, synthetic construct; identical to SEQ ID NO: 41986
  source 1..120: mol_type = other DNA

SEQ ID NO: 71941 - DNA, 120 bp, synthetic construct; identical to SEQ ID NO: 11955
  source 1..120: mol_type = other DNA

SEQ ID NO: 71942 - DNA, 120 bp, synthetic construct; identical to SEQ ID NO: 41988
  source 1..120: mol_type = other DNA

SEQ ID NO: 71943 - DNA, 120 bp, synthetic construct; identical to SEQ ID NO: 41989
  source 1..120: mol_type = other DNA

SEQ ID NO: 71944 - DNA, 120 bp, synthetic construct; identical to SEQ ID NO: 41990
  source 1..120: mol_type = other DNA

SEQ ID NO: 71945 - DNA, 120 bp, synthetic construct; identical to SEQ ID NO: 41991
  source 1..120: mol_type = other DNA

SEQ ID NO: 71946 - DNA, 120 bp, synthetic construct; identical to SEQ ID NO: 11956
  source 1..120: mol_type = other DNA

SEQ ID NO: 71947 - DNA, 120 bp, synthetic construct; identical to SEQ ID NO: 41993
  source 1..120: mol_type = other DNA

SEQ ID NO: 71948 - DNA, 120 bp, synthetic construct; identical to SEQ ID NO: 41994
  source 1..120: mol_type = other DNA

SEQ ID NO: 71949 - DNA, 120 bp, synthetic construct; identical to SEQ ID NO: 11957
  source 1..120: mol_type = other DNA

SEQ ID NO: 71950 - DNA, 120 bp, synthetic construct; identical to SEQ ID NO: 41996
  source 1..120: mol_type = other DNA

SEQ ID NO: 71951 - DNA, 120 bp, synthetic construct; identical to SEQ ID NO: 41997
  source 1..120: mol_type = other DNA

SEQ ID NO: 71952 - DNA, 120 bp, synthetic construct; identical to SEQ ID NO: 41998
  source 1..120: mol_type = other DNA

SEQ ID NO: 71953 - DNA, 120 bp, synthetic construct; identical to SEQ ID NO: 11958
  source 1..120: mol_type = other DNA

SEQ ID NO: 71954 - DNA, 120 bp, synthetic construct; identical to SEQ ID NO: 42000
  source 1..120: mol_type = other DNA

SEQ ID NO: 71955 - DNA, 120 bp, synthetic construct; identical to SEQ ID NO: 42001
  source 1..120: mol_type = other DNA

SEQ ID NO: 71956 - DNA, 120 bp, synthetic construct; identical to SEQ ID NO: 42002
  source 1..120: mol_type = other DNA

SEQ ID NO: 71957 - DNA, 120 bp, synthetic construct; identical to SEQ ID NO: 11959
  source 1..120: mol_type = other DNA

SEQ ID NO: 71958 - DNA, 120 bp, synthetic construct; identical to SEQ ID NO: 42004
  source 1..120: mol_type = other DNA

SEQ ID NO: 71959 - DNA, 120 bp, synthetic construct; identical to SEQ ID NO: 42005
  source 1..120: mol_type = other DNA

SEQ ID NO: 71960 - DNA, 120 bp, synthetic construct; identical to SEQ ID NO: 42006
  source 1..120: mol_type = other DNA

SEQ ID NO: 71961 - DNA, 120 bp, synthetic construct; identical to SEQ ID NO: 42007
  source 1..120: mol_type = other DNA

SEQ ID NO: 71962 - DNA, 120 bp, synthetic construct; identical to SEQ ID NO: 11960
  source 1..120: mol_type = other DNA

SEQ ID NO: 71963 - DNA, 120 bp, synthetic construct; identical to SEQ ID NO: 42009
  source 1..120: mol_type = other DNA

SEQ ID NO: 71964 - DNA, 120 bp, synthetic construct; identical to SEQ ID NO: 42010
  source 1..120: mol_type = other DNA

SEQ ID NO: 71965 - DNA, 120 bp, synthetic construct; identical to SEQ ID NO: 11961
  source 1..120: mol_type = other DNA

SEQ ID NO: 71966 - DNA, 120 bp, synthetic construct; identical to SEQ ID NO: 42012
  source 1..120: mol_type = other DNA

SEQ ID NO: 71967 - DNA, 120 bp, synthetic construct; identical to SEQ ID NO: 42013
  source 1..120: mol_type = other DNA

SEQ ID NO: 71968 - DNA, 120 bp, synthetic construct; identical to SEQ ID NO: 42014
  source 1..120: mol_type = other DNA

SEQ ID NO: 71969 - DNA, 120 bp, synthetic construct; identical to SEQ ID NO: 11962
  source 1..120: mol_type = other DNA

SEQ ID NO: 71970 - DNA, 120 bp, synthetic construct; identical to SEQ ID NO: 42016
  source 1..120: mol_type = other DNA

SEQ ID NO: 71971 - DNA, 120 bp, synthetic construct; identical to SEQ ID NO: 42017
  source 1..120: mol_type = other DNA

SEQ ID NO: 71972 - DNA, 120 bp, synthetic construct; identical to SEQ ID NO: 11963
  source 1..120: mol_type = other DNA

SEQ ID NO: 71973 - DNA, 120 bp, synthetic construct; identical to SEQ ID NO: 42019
  source 1..120: mol_type = other DNA

SEQ ID NO: 71974 - DNA, 120 bp, synthetic construct; identical to SEQ ID NO: 42020
  source 1..120: mol_type = other DNA

SEQ ID NO: 71975 - DNA, 120 bp, synthetic construct; identical to SEQ ID NO: 42021
  source 1..120: mol_type = other DNA

SEQ ID NO: 71976 - DNA, 120 bp, synthetic construct; identical to SEQ ID NO: 42022
  source 1..120: mol_type = other DNA

SEQ ID NO: 71977 - DNA, 120 bp, synthetic construct; identical to SEQ ID NO: 11964
  source 1..120: mol_type = other DNA

SEQ ID NO: 71978 - DNA, 120 bp, synthetic construct; identical to SEQ ID NO: 42024
  source 1..120: mol_type = other DNA

SEQ ID NO: 71979 - DNA, 120 bp, synthetic construct; identical to SEQ ID NO: 42025
  source 1..120: mol_type = other DNA

SEQ ID NO: 71980 - DNA, 120 bp, synthetic construct; identical to SEQ ID NO: 11965
  source 1..120: mol_type = other DNA

SEQ ID NO: 71981 - DNA, 120 bp, synthetic construct; identical to SEQ ID NO: 42027
  source 1..120: mol_type = other DNA

SEQ ID NO: 71982 - DNA, 120 bp, synthetic construct; identical to SEQ ID NO: 42028
  source 1..120: mol_type = other DNA

SEQ ID NO: 71983 - DNA, 120 bp, synthetic construct; identical to SEQ ID NO: 42029
  source 1..120: mol_type = other DNA

SEQ ID NO: 71984 - DNA, 120 bp, synthetic construct; identical to SEQ ID NO: 11966
  source 1..120: mol_type = other DNA

SEQ ID NO: 71985 - DNA, 120 bp, synthetic construct; identical to SEQ ID NO: 42031
  source 1..120: mol_type = other DNA

SEQ ID NO: 71986 - DNA, 120 bp, synthetic construct; identical to SEQ ID NO: 42032
  source 1..120: mol_type = other DNA

SEQ ID NO: 71987 - DNA, 120 bp, synthetic construct; identical to SEQ ID NO: 42033
  source 1..120: mol_type = other DNA

SEQ ID NO: 71988 - DNA, 120 bp, synthetic construct; identical to SEQ ID NO: 11967
  source 1..120: mol_type = other DNA

SEQ ID NO: 71989 - DNA, 120 bp, synthetic construct; identical to SEQ ID NO: 42035
  source 1..120: mol_type = other DNA

SEQ ID NO: 71990 - DNA, 120 bp, synthetic construct; identical to SEQ ID NO: 42036
  source 1..120: mol_type = other DNA

SEQ ID NO: 71991 - DNA, 120 bp, synthetic construct; identical to SEQ ID NO: 42037
  source 1..120: mol_type = other DNA

SEQ ID NO: 71992 - DNA, 120 bp, synthetic construct; identical to SEQ ID NO: 42038
  source 1..120: mol_type = other DNA

SEQ ID NO: 71993 - DNA, 120 bp, synthetic construct; identical to SEQ ID NO: 11968
  source 1..120: mol_type = other DNA

SEQ ID NO: 71994 - DNA, 120 bp, synthetic construct; identical to SEQ ID NO: 42040
  source 1..120: mol_type = other DNA

SEQ ID NO: 71995 - DNA, 120 bp, synthetic construct; identical to SEQ ID NO: 42041
  source 1..120: mol_type = other DNA

SEQ ID NO: 71996 - DNA, 120 bp, synthetic construct; identical to SEQ ID NO: 11969
  source 1..120: mol_type = other DNA

SEQ ID NO: 71997 - DNA, 120 bp, synthetic construct; identical to SEQ ID NO: 42043
  source 1..120: mol_type = other DNA

SEQ ID NO: 71998 - DNA, 120 bp, synthetic construct; identical to SEQ ID NO: 42044
  source 1..120: mol_type = other DNA

SEQ ID NO: 71999 - DNA, 120 bp, synthetic construct; identical to SEQ ID NO: 42045
  source 1..120: mol_type = other DNA

SEQ ID NO: 72000 - DNA, 120 bp, synthetic construct; identical to SEQ ID NO: 11970
  source 1..120: mol_type = other DNA

SEQ ID NO: 72001 - DNA, 120 bp, synthetic construct; identical to SEQ ID NO: 42047
  source 1..120: mol_type = other DNA

SEQ ID NO: 72002 - DNA, 120 bp, synthetic construct; identical to SEQ ID NO: 42048
  source 1..120: mol_type = other DNA

SEQ ID NO: 72003 - DNA, 120 bp, synthetic construct; identical to SEQ ID NO: 42049
  source 1..120: mol_type = other DNA

SEQ ID NO: 72004 - DNA, 120 bp, synthetic construct; identical to SEQ ID NO: 11971
  source 1..120: mol_type = other DNA

SEQ ID NO: 72005 - DNA, 120 bp, synthetic construct; identical to SEQ ID NO: 42051
  source 1..120: mol_type = other DNA

SEQ ID NO: 72006 - DNA, 120 bp, synthetic construct; identical to SEQ ID NO: 42052
  source 1..120: mol_type = other DNA

SEQ ID NO: 72007 - DNA, 120 bp, synthetic construct; identical to SEQ ID NO: 42053
  source 1..120: mol_type = other DNA

SEQ ID NO: 72008 - DNA, 120 bp, synthetic construct; identical to SEQ ID NO: 11972
  source 1..120: mol_type = other DNA

SEQ ID NO: 72009 - DNA, 120 bp, synthetic construct; identical to SEQ ID NO: 42055
  source 1..120: mol_type = other DNA

SEQ ID NO: 72010 - DNA, 120 bp, synthetic construct; identical to SEQ ID NO: 42056
  source 1..120: mol_type = other DNA

SEQ ID NO: 72011 - DNA, 120 bp, synthetic construct; identical to SEQ ID NO: 42057
  source 1..120: mol_type = other DNA

SEQ ID NO: 72012 - DNA, 120 bp, synthetic construct; identical to SEQ ID NO: 42058
  source 1..120: mol_type = other DNA

SEQ ID NO: 72013 - DNA, 120 bp, synthetic construct; identical to SEQ ID NO: 11973
  source 1..120: mol_type = other DNA

SEQ ID NO: 72014 - DNA, 120 bp, synthetic construct; identical to SEQ ID NO: 42060
  source 1..120: mol_type = other DNA

SEQ ID NO: 72015 - DNA, 120 bp, synthetic construct; identical to SEQ ID NO: 42061
  source 1..120: mol_type = other DNA

SEQ ID NO: 72016 - DNA, 120 bp, synthetic construct; identical to SEQ ID NO: 11974
  source 1..120: mol_type = other DNA

SEQ ID NO: 72017 - DNA, 120 bp, synthetic construct; identical to SEQ ID NO: 42063
  source 1..120: mol_type = other DNA

SEQ ID NO: 72018 - DNA, 120 bp, synthetic construct; identical to SEQ ID NO: 42064
  source 1..120: mol_type = other DNA

SEQ ID NO: 72019 - DNA, 120 bp, synthetic construct; identical to SEQ ID NO: 42065
  source 1..120: mol_type = other DNA

SEQ ID NO: 72020 - DNA, 120 bp, synthetic construct; identical to SEQ ID NO: 11975
  source 1..120: mol_type = other DNA

SEQ ID NO: 72021 - DNA, 120 bp, synthetic construct; identical to SEQ ID NO: 42067
  source 1..120: mol_type = other DNA

SEQ ID NO: 72022 - DNA, 120 bp, synthetic construct; identical to SEQ ID NO: 42068
  source 1..120: mol_type = other DNA

SEQ ID NO: 72023 - DNA, 120 bp, synthetic construct; identical to SEQ ID NO: 42069
  source 1..120: mol_type = other DNA

SEQ ID NO: 72024 - DNA, 120 bp, synthetic construct; identical to SEQ ID NO: 42070
  source 1..120: mol_type = other DNA

SEQ ID NO: 72025 - DNA, 120 bp, synthetic construct; identical to SEQ ID NO: 11976
  source 1..120: mol_type = other DNA

SEQ ID NO: 72026 - DNA, 120 bp, synthetic construct; identical to SEQ ID NO: 42072
  source 1..120: mol_type = other DNA

SEQ ID NO: 72027 - DNA, 120 bp, synthetic construct; identical to SEQ ID NO: 42073
  source 1..120: mol_type = other DNA

SEQ ID NO: 72028 - DNA, 120 bp, synthetic construct; identical to SEQ ID NO: 42074
  source 1..120: mol_type = other DNA

SEQ ID NO: 72029 - DNA, 120 bp, synthetic construct; identical to SEQ ID NO: 11977
  source 1..120: mol_type = other DNA

SEQ ID NO: 72030 - DNA, 120 bp, synthetic construct; identical to SEQ ID NO: 42076
  source 1..120: mol_type = other DNA

SEQ ID NO: 72031 - DNA, 120 bp, synthetic construct; identical to SEQ ID NO: 42077
  source 1..120: mol_type = other DNA

SEQ ID NO: 72032 - DNA, 120 bp, synthetic construct; identical to SEQ ID NO: 42078
  source 1..120: mol_type = other DNA

SEQ ID NO: 72033 - DNA, 120 bp, synthetic construct; identical to SEQ ID NO: 42079
  source 1..120: mol_type = other DNA

SEQ ID NO: 72034 - DNA, 120 bp, synthetic construct; identical to SEQ ID NO: 11978
  source 1..120: mol_type = other DNA

SEQ ID NO: 72035 - DNA, 120 bp, synthetic construct; identical to SEQ ID NO: 42081
  source 1..120: mol_type = other DNA

SEQ ID NO: 72036 - DNA, 120 bp, synthetic construct; identical to SEQ ID NO: 42082
  source 1..120: mol_type = other DNA

SEQ ID NO: 72037 - DNA, 120 bp, synthetic construct; identical to SEQ ID NO: 42083
  source 1..120: mol_type = other DNA

SEQ ID NO: 72038 - DNA, 120 bp, synthetic construct; identical to SEQ ID NO: 11979
  source 1..120: mol_type = other DNA

SEQ ID NO: 72039 - DNA, 120 bp, synthetic construct; identical to SEQ ID NO: 42085
  source 1..120: mol_type = other DNA

SEQ ID NO: 72040 - DNA, 120 bp, synthetic construct; identical to SEQ ID NO: 42086
  source 1..120: mol_type = other DNA

SEQ ID NO: 72041 - DNA, 120 bp, synthetic construct; identical to SEQ ID NO: 11980
  source 1..120: mol_type = other DNA

SEQ ID NO: 72042 - DNA, 120 bp, synthetic construct; identical to SEQ ID NO: 42088
  source 1..120: mol_type = other DNA

SEQ ID NO: 72043 - DNA, 120 bp, synthetic construct; identical to SEQ ID NO: 42089
  source 1..120: mol_type = other DNA

SEQ ID NO: 72044 - DNA, 120 bp, synthetic construct; identical to SEQ ID NO: 42090
  source 1..120: mol_type = other DNA

SEQ ID NO: 72045 - DNA, 120 bp, synthetic construct; identical to SEQ ID NO: 42091
  source 1..120: mol_type = other DNA

SEQ ID NO: 72046 - DNA, 120 bp, synthetic construct; identical to SEQ ID NO: 11981
  source 1..120: mol_type = other DNA

SEQ ID NO: 72047 - DNA, 120 bp, synthetic construct; identical to SEQ ID NO: 42093
  source 1..120: mol_type = other DNA

SEQ ID NO: 72048 - DNA, 120 bp, synthetic construct; identical to SEQ ID NO: 42094
  source 1..120: mol_type = other DNA

SEQ ID NO: 72049 - DNA, 120 bp, synthetic construct; identical to SEQ ID NO: 42095
  source 1..120: mol_type = other DNA

SEQ ID NO: 72050 - DNA, 120 bp, synthetic construct; identical to SEQ ID NO: 11982
  source 1..120: mol_type = other DNA

SEQ ID NO: 72051 - DNA, 120 bp, synthetic construct; identical to SEQ ID NO: 42097
  source 1..120: mol_type = other DNA

SEQ ID NO: 72052 - DNA, 120 bp, synthetic construct; identical to SEQ ID NO: 42098
  source 1..120: mol_type = other DNA

SEQ ID NO: 72053 - DNA, 120 bp, synthetic construct; identical to SEQ ID NO: 11983
  source 1..120: mol_type = other DNA

SEQ ID NO: 72054 - DNA, 120 bp, synthetic construct; identical to SEQ ID NO: 42100
  source 1..120: mol_type = other DNA

SEQ ID NO: 72055 - DNA, 120 bp, synthetic construct; identical to SEQ ID NO: 42101
  source 1..120: mol_type = other DNA

SEQ ID NO: 72056 - DNA, 120 bp, synthetic construct; identical to SEQ ID NO: 42102
  source 1..120: mol_type = other DNA

SEQ ID NO: 72057 - DNA, 120 bp, synthetic construct; identical to SEQ ID NO: 42103
  source 1..120: mol_type = other DNA

SEQ ID NO: 72058 - DNA, 120 bp, synthetic construct; identical to SEQ ID NO: 11984
  source 1..120: mol_type = other DNA

SEQ ID NO: 72059 - DNA, 120 bp, synthetic construct; identical to SEQ ID NO: 42105
  source 1..120: mol_type = other DNA

SEQ ID NO: 72060 - DNA, 120 bp, synthetic construct; identical to SEQ ID NO: 42106
  source 1..120: mol_type = other DNA

SEQ ID NO: 72061 - DNA, 120 bp, synthetic construct; identical to SEQ ID NO: 42107
  source 1..120: mol_type = other DNA

SEQ ID NO: 72062 - DNA, 120 bp, synthetic construct; identical to SEQ ID NO: 11985
  source 1..120: mol_type = other DNA

SEQ ID NO: 72063 - DNA, 120 bp, synthetic construct; identical to SEQ ID NO: 42109
  source 1..120: mol_type = other DNA

SEQ ID NO: 72064 - DNA, 120 bp, synthetic construct; identical to SEQ ID NO: 42110
  source 1..120: mol_type = other DNA

SEQ ID NO: 72065 - DNA, 120 bp, synthetic construct; identical to SEQ ID NO: 11986
  source 1..120: mol_type = other DNA

SEQ ID NO: 72066 - DNA, 120 bp, synthetic construct; identical to SEQ ID NO: 42112
  source 1..120: mol_type = other DNA

SEQ ID NO: 72067 - DNA, 120 bp, synthetic construct; identical to SEQ ID NO: 42113
  source 1..120: mol_type = other DNA

SEQ ID NO: 72068 - DNA, 120 bp, synthetic construct; identical to SEQ ID NO: 42114
  source 1..120: mol_type = other DNA

SEQ ID NO: 72069 - DNA, 120 bp, synthetic construct; identical to SEQ ID NO: 11987
  source 1..120: mol_type = other DNA

SEQ ID NO: 72070 - DNA, 120 bp, synthetic construct; identical to SEQ ID NO: 42116
  source 1..120: mol_type = other DNA

SEQ ID NO: 72071 - DNA, 120 bp, synthetic construct; identical to SEQ ID NO: 42117
  source 1..120: mol_type = other DNA

SEQ ID NO: 72072 - DNA, 120 bp, synthetic construct; identical to SEQ ID NO: 42118
  source 1..120: mol_type = other DNA

SEQ ID NO: 72073 - DNA, 120 bp, synthetic construct; identical to SEQ ID NO: 11988
  source 1..120: mol_type = other DNA

SEQ ID NO: 72074 - DNA, 120 bp, synthetic construct; identical to SEQ ID NO: 42120
  source 1..120: mol_type = other DNA

SEQ ID NO: 72075 - DNA, 120 bp, synthetic construct; identical to SEQ ID NO: 42121
  source 1..120: mol_type = other DNA

SEQ ID NO: 72076 - DNA, 120 bp, synthetic construct; identical to SEQ ID NO: 42122
  source 1..120: mol_type = other DNA

SEQ ID NO: 72077 - DNA, 120 bp, synthetic construct; identical to SEQ ID NO: 11989
  source 1..120: mol_type = other DNA

SEQ ID NO: 72078 - DNA, 120 bp, synthetic construct; identical to SEQ ID NO: 42124
  source 1..120: mol_type = other DNA

SEQ ID NO: 72079 - DNA, 120 bp, synthetic construct; identical to SEQ ID NO: 42125
  source 1..120: mol_type = other DNA

SEQ ID NO: 72080 - DNA, 120 bp, synthetic construct; identical to SEQ ID NO: 42126
  source 1..120: mol_type = other DNA

SEQ ID NO: 72081 - DNA, 120 bp, synthetic construct; identical to SEQ ID NO: 42127
  source 1..120: mol_type = other DNA

SEQ ID NO: 72082 - DNA, 120 bp, synthetic construct; identical to SEQ ID NO: 11990
  source 1..120: mol_type = other DNA

SEQ ID NO: 72083 - DNA, 120 bp, synthetic construct; identical to SEQ ID NO: 42129
  source 1..120: mol_type = other DNA

SEQ ID NO: 72084 - DNA, 120 bp, synthetic construct; identical to SEQ ID NO: 42130
  source 1..120: mol_type = other DNA

SEQ ID NO: 72085 - DNA, 120 bp, synthetic construct; identical to SEQ ID NO: 42131
  source 1..120: mol_type = other DNA

SEQ ID NO: 72086 - DNA, 120 bp, synthetic construct; identical to SEQ ID NO: 42132
  source 1..120: mol_type = other DNA

SEQ ID NO: 72087 - DNA, 120 bp, synthetic construct; identical to SEQ ID NO: 11991
  source 1..120: mol_type = other DNA

SEQ ID NO: 72088 - DNA, 120 bp, synthetic construct; identical to SEQ ID NO: 42134
  source 1..120: mol_type = other DNA

SEQ ID NO: 72089 - DNA, 120 bp, synthetic construct; identical to SEQ ID NO: 42135
  source 1..120: mol_type = other DNA

SEQ ID NO: 72090 - DNA, 120 bp, synthetic construct; identical to SEQ ID NO: 11992
  source 1..120: mol_type = other DNA

SEQ ID NO: 72091 - DNA, 120 bp, synthetic construct; identical to SEQ ID NO: 42137
  source 1..120: mol_type = other DNA

SEQ ID NO: 72092 - DNA, 120 bp, synthetic construct; identical to SEQ ID NO: 42138
  source 1..120: mol_type = other DNA

SEQ ID NO: 72093 - DNA, 120 bp, synthetic construct; identical to SEQ ID NO: 42139
  source 1..120: mol_type = other DNA

SEQ ID NO: 72094 - DNA, 120 bp, synthetic construct; identical to SEQ ID NO: 11993
  source 1..120: mol_type = other DNA

SEQ ID NO: 72095 - DNA, 120 bp, synthetic construct; identical to SEQ ID NO: 42141
  source 1..120: mol_type = other DNA

SEQ ID NO: 72096 - DNA, 120 bp, synthetic construct; identical to SEQ ID NO: 42142
  source 1..120: mol_type = other DNA

SEQ ID NO: 72097 - DNA, 120 bp, synthetic construct; identical to SEQ ID NO: 42143
  source 1..120: mol_type = other DNA

SEQ ID NO: 72098 - DNA, 120 bp, synthetic construct; identical to SEQ ID NO: 42144
  source 1..120: mol_type = other DNA

SEQ ID NO: 72099 - DNA, 120 bp, synthetic construct; identical to SEQ ID NO: 11994
  source 1..120: mol_type = other DNA

SEQ ID NO: 72100 - DNA, 120 bp, synthetic construct; identical to SEQ ID NO: 42146
  source 1..120: mol_type = other DNA

SEQ ID NO: 72101 - DNA, 120 bp, synthetic construct; identical to SEQ ID NO: 42147
  source 1..120: mol_type = other DNA

SEQ ID NO: 72102 - DNA, 120 bp, synthetic construct; identical to SEQ ID NO: 42148
  source 1..120: mol_type = other DNA

SEQ ID NO: 72103 - DNA, 120 bp, synthetic construct; identical to SEQ ID NO: 11995
  source 1..120: mol_type = other DNA

SEQ ID NO: 72104 - DNA, 120 bp, synthetic construct; identical to SEQ ID NO: 42150
  source 1..120: mol_type = other DNA

SEQ ID NO: 72105 - DNA, 120 bp, synthetic construct; identical to SEQ ID NO: 42151
  source 1..120: mol_type = other DNA

SEQ ID NO: 72106 - DNA, 120 bp, synthetic construct; identical to SEQ ID NO: 42152
  source 1..120: mol_type = other DNA

SEQ ID NO: 72107 - DNA, 120 bp, synthetic construct; identical to SEQ ID NO: 11996
  source 1..120: mol_type = other DNA

SEQ ID NO: 72108 - DNA, 120 bp, synthetic construct; identical to SEQ ID NO: 42154
  source 1..120: mol_type = other DNA

SEQ ID NO: 72109 - DNA, 120 bp, synthetic construct; identical to SEQ ID NO: 42155
  source 1..120: mol_type = other DNA

SEQ ID NO: 72110 - DNA, 120 bp, synthetic construct; identical to SEQ ID NO: 42156
  source 1..120: mol_type = other DNA

SEQ ID NO: 72111 - DNA, 120 bp, synthetic construct; identical to SEQ ID NO: 11997
  source 1..120: mol_type = other DNA

SEQ ID NO: 72112 - DNA, 120 bp, synthetic construct; identical to SEQ ID NO: 42158
  source 1..120: mol_type = other DNA

SEQ ID NO: 72113 - DNA, 120 bp, synthetic construct; identical to SEQ ID NO: 42159
  source 1..120: mol_type = other DNA

SEQ ID NO: 72114 - DNA, 120 bp, synthetic construct; identical to SEQ ID NO: 11998
  source 1..120: mol_type = other DNA

SEQ ID NO: 72115 - DNA, 120 bp, synthetic construct; identical to SEQ ID NO: 42161
  source 1..120: mol_type = other DNA

SEQ ID NO: 72116 - DNA, 120 bp, synthetic construct; identical to SEQ ID NO: 42162
  source 1..120: mol_type = other DNA

SEQ ID NO: 72117 - DNA, 120 bp, synthetic construct; identical to SEQ ID NO: 42163
  source 1..120: mol_type = other DNA

SEQ ID NO: 72118 - DNA, 120 bp, synthetic construct; identical to SEQ ID NO: 11999
  source 1..120: mol_type = other DNA

SEQ ID NO: 72119 - DNA, 120 bp, synthetic construct; identical to SEQ ID NO: 42165
  source 1..120: mol_type = other DNA

SEQ ID NO: 72120 - DNA, 120 bp, synthetic construct; identical to SEQ ID NO: 42166
  source 1..120: mol_type = other DNA

SEQ ID NO: 72121 - DNA, 120 bp, synthetic construct; identical to SEQ ID NO: 42167
  source 1..120: mol_type = other DNA

SEQ ID NO: 72122 - DNA, 120 bp, synthetic construct; identical to SEQ ID NO: 42168
  source 1..120: mol_type = other DNA

SEQ ID NO: 72123 - DNA, 120 bp, synthetic construct; identical to SEQ ID NO: 12000
  source 1..120: mol_type = other DNA

SEQ ID NO: 72124 - DNA, 120 bp, synthetic construct; identical to SEQ ID NO: 42170
  source 1..120: mol_type = other DNA

SEQ ID NO: 72125 - DNA, 120 bp, synthetic construct; identical to SEQ ID NO: 42171
  source 1..120: mol_type = other DNA

SEQ ID NO: 72126 - DNA, 120 bp, synthetic construct; identical to SEQ ID NO: 12001
  source 1..120: mol_type = other DNA

SEQ ID NO: 72127 - DNA, 120 bp, synthetic construct; identical to SEQ ID NO: 42173
  source 1..120: mol_type = other DNA

SEQ ID NO: 72128 - DNA, 120 bp, synthetic construct; identical to SEQ ID NO: 42174
  source 1..120: mol_type = other DNA

SEQ ID NO: 72129 - DNA, 120 bp, synthetic construct; identical to SEQ ID NO: 42175
  source 1..120: mol_type = other DNA

SEQ ID NO: 72130 - DNA, 120 bp, synthetic construct; identical to SEQ ID NO: 12002
  source 1..120: mol_type = other DNA

SEQ ID NO: 72131 - DNA, 120 bp, synthetic construct; identical to SEQ ID NO: 42177
  source 1..120: mol_type = other DNA

SEQ ID NO: 72132 - DNA, 120 bp, synthetic construct; identical to SEQ ID NO: 42178
  source 1..120: mol_type = other DNA

SEQ ID NO: 72133 - DNA, 120 bp, synthetic construct; identical to SEQ ID NO: 42179
  source 1..120: mol_type = other DNA

SEQ ID NO: 72134 - DNA, 120 bp, synthetic construct; identical to SEQ ID NO: 42180
  source 1..120: mol_type = other DNA

SEQ ID NO: 72135 - DNA, 120 bp, synthetic construct; identical to SEQ ID NO: 12003
  source 1..120: mol_type = other DNA

SEQ ID NO: 72136 - DNA, 120 bp, synthetic construct; identical to SEQ ID NO: 42182
  source 1..120: mol_type = other DNA

SEQ ID NO: 72137 - DNA, 120 bp, synthetic construct; identical to SEQ ID NO: 42183
  source 1..120: mol_type = other DNA

SEQ ID NO: 72138 - DNA, 120 bp, synthetic construct; identical to SEQ ID NO: 12004
  source 1..120: mol_type = other DNA

SEQ ID NO: 72139 - DNA, 120 bp, synthetic construct; identical to SEQ ID NO: 42185
  source 1..120: mol_type = other DNA

SEQ ID NO: 72140 - DNA, 120 bp, synthetic construct; identical to SEQ ID NO: 42186
  source 1..120: mol_type = other DNA

SEQ ID NO: 72141 - DNA, 120 bp, synthetic construct; identical to SEQ ID NO: 42187
  source 1..120: mol_type = other DNA

SEQ ID NO: 72142 - DNA, 120 bp, synthetic construct; identical to SEQ ID NO: 12005
  source 1..120: mol_type = other DNA

SEQ ID NO: 72143 - DNA, 120 bp, synthetic construct; identical to SEQ ID NO: 42189
  source 1..120: mol_type = other DNA

SEQ ID NO: 72144 - DNA, 120 bp, synthetic construct; identical to SEQ ID NO: 42190
  source 1..120: mol_type = other DNA

SEQ ID NO: 72145 - DNA, 120 bp, synthetic construct; identical to SEQ ID NO: 42191
  source 1..120: mol_type = other DNA

SEQ ID NO: 72146 - DNA, 120 bp, synthetic construct; identical to SEQ ID NO: 12006
  source 1..120: mol_type = other DNA

SEQ ID NO: 72147 - DNA, 120 bp, synthetic construct; identical to SEQ ID NO: 42193
  source 1..120: mol_type = other DNA

SEQ ID NO: 72148 - DNA, 120 bp, synthetic construct; identical to SEQ ID NO: 42194
  source 1..120: mol_type = other DNA

SEQ ID NO: 72149 - DNA, 120 bp, synthetic construct; identical to SEQ ID NO: 42195
  source 1..120: mol_type = other DNA

SEQ ID NO: 72150 - DNA, 120 bp, synthetic construct; identical to SEQ ID NO: 12007
  source 1..120: mol_type = other DNA

SEQ ID NO: 72151 - DNA, 120 bp, synthetic construct; identical to SEQ ID NO: 42197
  source 1..120: mol_type = other DNA

SEQ ID NO: 72152 - DNA, 120 bp, synthetic construct; identical to SEQ ID NO: 42198
  source 1..120: mol_type = other DNA

SEQ ID NO: 72153 - DNA, 120 bp, synthetic construct; identical to SEQ ID NO: 42199
  source 1..120: mol_type = other DNA

SEQ ID NO: 72154 - DNA, 120 bp, synthetic construct; identical to SEQ ID NO: 12008
  source 1..120: mol_type = other DNA

SEQ ID NO: 72155 - DNA, 120 bp, synthetic construct; identical to SEQ ID NO: 42201
  source 1..120: mol_type = other DNA

SEQ ID NO: 72156 - DNA, 120 bp, synthetic construct; identical to SEQ ID NO: 42202
  source 1..120: mol_type = other DNA

SEQ ID NO: 72157 - DNA, 120 bp, synthetic construct; identical to SEQ ID NO: 42203
  source 1..120: mol_type = other DNA

SEQ ID NO: 72158 - DNA, 120 bp, synthetic construct; identical to SEQ ID NO: 12009
  source 1..120: mol_type = other DNA

SEQ ID NO: 72159 - DNA, 120 bp, synthetic construct; identical to SEQ ID NO: 42205
  source 1..120: mol_type = other DNA

SEQ ID NO: 72160 - DNA, 120 bp, synthetic construct; identical to SEQ ID NO: 42206
  source 1..120: mol_type = other DNA

SEQ ID NO: 72161 - DNA, 120 bp, synthetic construct; identical to SEQ ID NO: 42207
  source 1..120: mol_type = other DNA

SEQ ID NO: 72162 - DNA, 120 bp, synthetic construct; identical to SEQ ID NO: 42208
  source 1..120: mol_type = other DNA

SEQ ID NO: 72163 - DNA, 120 bp, synthetic construct; identical to SEQ ID NO: 12010
  source 1..120: mol_type = other DNA

SEQ ID NO: 72164 - DNA, 120 bp, synthetic construct; identical to SEQ ID NO: 42210
  source 1..120: mol_type = other DNA

SEQ ID NO: 72165 - DNA, 120 bp, synthetic construct; identical to SEQ ID NO: 42211
  source 1..120: mol_type = other DNA

SEQ ID NO: 72166 - DNA, 120 bp, synthetic construct; identical to SEQ ID NO: 42212
  source 1..120: mol_type = other DNA

SEQ ID NO: 72167 - DNA, 120 bp, synthetic construct; identical to SEQ ID NO: 12011
  source 1..120: mol_type = other DNA

SEQ ID NO: 72168 - DNA, 120 bp, synthetic construct; identical to SEQ ID NO: 42214
  source 1..120: mol_type = other DNA

SEQ ID NO: 72169 - DNA, 120 bp, synthetic construct; identical to SEQ ID NO: 42215
  source 1..120: mol_type = other DNA

SEQ ID NO: 72170 - DNA, 120 bp, synthetic construct; identical to SEQ ID NO: 42216
  source 1..120: mol_type = other DNA

SEQ ID NO: 72171 - DNA, 120 bp, synthetic construct; identical to SEQ ID NO: 12012
  source 1..120: mol_type = other DNA

SEQ ID NO: 72172 - DNA, 120 bp, synthetic construct; identical to SEQ ID NO: 42218
  source 1..120: mol_type = other DNA

SEQ ID NO: 72173 - DNA, 120 bp, synthetic construct; identical to SEQ ID NO: 42219
  source 1..120: mol_type = other DNA

SEQ ID NO: 72174 - DNA, 120 bp, synthetic construct; identical to SEQ ID NO: 42220
  source 1..120: mol_type = other DNA

SEQ ID NO: 72175 - DNA, 120 bp, synthetic construct; identical to SEQ ID NO: 12013
  source 1..120: mol_type = other DNA

SEQ ID NO: 72176 - DNA, 120 bp, synthetic construct; identical to SEQ ID NO: 42222
  source 1..120: mol_type = other DNA

SEQ ID NO: 72177 - DNA, 120 bp, synthetic construct; identical to SEQ ID NO: 42223
  source 1..120: mol_type = other DNA

SEQ ID NO: 72178 - DNA, 120 bp, synthetic construct; identical to SEQ ID NO: 42224
  source 1..120: mol_type = other DNA

SEQ ID NO: 72179 - DNA, 120 bp, synthetic construct; identical to SEQ ID NO: 12014
  source 1..120: mol_type = other DNA

SEQ ID NO: 72180 - DNA, 120 bp, synthetic construct; identical to SEQ ID NO: 42226
  source 1..120: mol_type = other DNA

SEQ ID NO: 72181 - DNA, 120 bp, synthetic construct; identical to SEQ ID NO: 42227
  source 1..120: mol_type = other DNA

SEQ ID NO: 72182 - DNA, 120 bp, synthetic construct; identical to SEQ ID NO: 12015
  source 1..120: mol_type = other DNA

SEQ ID NO: 72183 - DNA, 120 bp, synthetic construct; identical to SEQ ID NO: 42229
  source 1..120: mol_type = other DNA

SEQ ID NO: 72184 - DNA, 120 bp, synthetic construct; identical to SEQ ID NO: 42230
  source 1..120: mol_type = other DNA

SEQ ID NO: 72185 - DNA, 120 bp, synthetic construct; identical to SEQ ID NO: 42231
  source 1..120: mol_type = other DNA

SEQ ID NO: 72186 - DNA, 120 bp, synthetic construct; identical to SEQ ID NO: 12016
  source 1..120: mol_type = other DNA

SEQ ID NO: 72187 - DNA, 120 bp, synthetic construct; identical to SEQ ID NO: 42233
  source 1..120: mol_type = other DNA

SEQ ID NO: 72188 - DNA, 120 bp, synthetic construct; identical to SEQ ID NO: 42234
  source 1..120: mol_type = other DNA

SEQ ID NO: 72189 - DNA, 120 bp, synthetic construct; identical to SEQ ID NO: 42235
  source 1..120: mol_type = other DNA

SEQ ID NO: 72190 - DNA, 120 bp, synthetic construct; identical to SEQ ID NO: 12017
  source 1..120: mol_type = other DNA

SEQ ID NO: 72191 - DNA, 120 bp, synthetic construct; identical to SEQ ID NO: 42237
  source 1..120: mol_type = other DNA

SEQ ID NO: 72192 - DNA, 120 bp, synthetic construct; identical to SEQ ID NO: 42238
  source 1..120: mol_type = other DNA

SEQ ID NO: 72193 - DNA, 120 bp, synthetic construct; identical to SEQ ID NO: 42239
  source 1..120: mol_type = other DNA

SEQ ID NO: 72194 - DNA, 120 bp, synthetic construct; identical to SEQ ID NO: 42240
  source 1..120: mol_type = other DNA

SEQ ID NO: 72195 - DNA, 120 bp, synthetic construct; identical to SEQ ID NO: 12018
  source 1..120: mol_type = other DNA

SEQ ID NO: 72196 - DNA, 120 bp, synthetic construct; identical to SEQ ID NO: 42242
  source 1..120: mol_type = other DNA

SEQ ID NO: 72197 - DNA, 120 bp, synthetic construct; identical to SEQ ID NO: 42243
  source 1..120: mol_type = other DNA

SEQ ID NO: 72198 - DNA, 120 bp, synthetic construct; identical to SEQ ID NO: 42244
  source 1..120: mol_type = other DNA

SEQ ID NO: 72199 - DNA, 120 bp, synthetic construct; identical to SEQ ID NO: 12019
  source 1..120: mol_type = other DNA

SEQ ID NO: 72200 - DNA, 120 bp, synthetic construct; identical to SEQ ID NO: 42246
  source 1..120: mol_type = other DNA

SEQ ID NO: 72201 - DNA, 120 bp, synthetic construct; identical to SEQ ID NO: 42247
  source 1..120: mol_type = other DNA

SEQ ID NO: 72202 - DNA, 120 bp, synthetic construct; identical to SEQ ID NO: 42248
  source 1..120: mol_type = other DNA

SEQ ID NO: 72203 - DNA, 120 bp, synthetic construct; identical to SEQ ID NO: 12020
  source 1..120: mol_type = other DNA

SEQ ID NO: 72204 - DNA, 120 bp, synthetic construct; identical to SEQ ID NO: 42250
  source 1..120: mol_type = other DNA

SEQ ID NO: 72205 - DNA, 120 bp, synthetic construct; identical to SEQ ID NO: 42251
  source 1..120: mol_type = other DNA

SEQ ID NO: 72206 - DNA, 120 bp, synthetic construct; identical to SEQ ID NO: 42252
  source 1..120: mol_type = other DNA

SEQ ID NO: 72207 - DNA, 120 bp, synthetic construct; identical to SEQ ID NO: 12021
  source 1..120: mol_type = other DNA

SEQ ID NO: 72208 - DNA, 120 bp, synthetic construct; identical to SEQ ID NO: 42254
  source 1..120: mol_type = other DNA

SEQ ID NO: 72209 - DNA, 120 bp, synthetic construct; identical to SEQ ID NO: 42255
  source 1..120: mol_type = other DNA

SEQ ID NO: 72210 - DNA, 120 bp, synthetic construct; identical to SEQ ID NO: 12022
  source 1..120: mol_type = other DNA

SEQ ID NO: 72211 - DNA, 120 bp, synthetic construct; identical to SEQ ID NO: 42257
  source 1..120: mol_type = other DNA

SEQ ID NO: 72212 - DNA, 120 bp, synthetic construct; identical to SEQ ID NO: 42258
  source 1..120: mol_type = other DNA

SEQ ID NO: 72213 - DNA, 120 bp, synthetic construct; identical to SEQ ID NO: 42259
  source 1..120: mol_type = other DNA

SEQ ID NO: 72214 - DNA, 120 bp, synthetic construct; identical to SEQ ID NO: 12023
  source 1..120: mol_type = other DNA

SEQ ID NO: 72215 - DNA, 120 bp, synthetic construct; identical to SEQ ID NO: 42261
  source 1..120: mol_type = other DNA

SEQ ID NO: 72216 - DNA, 120 bp, synthetic construct; identical to SEQ ID NO: 42262
  source 1..120: mol_type = other DNA

SEQ ID NO: 72217 - DNA, 120 bp, synthetic construct; identical to SEQ ID NO: 42263
  source 1..120: mol_type = other DNA

SEQ ID NO: 72218 - DNA, 120 bp, synthetic construct; identical to SEQ ID NO: 42264
  source 1..120: mol_type = other DNA

SEQ ID NO: 72219 - DNA, 120 bp, synthetic construct; identical to SEQ ID NO: 12024
  source 1..120: mol_type = other DNA

SEQ ID NO: 72220 - DNA, 120 bp, synthetic construct; identical to SEQ ID NO: 42266
  source 1..120: mol_type = other DNA

SEQ ID NO: 72221 - DNA, 120 bp, synthetic construct; identical to SEQ ID NO: 42267
  source 1..120: mol_type = other DNA

SEQ ID NO: 72222 - DNA, 120 bp, synthetic construct; identical to SEQ ID NO: 42268
  source 1..120: mol_type = other DNA

SEQ ID NO: 72223 - DNA, 120 bp, synthetic construct; identical to SEQ ID NO: 12025
  source 1..120: mol_type = other DNA

SEQ ID NO: 72224 - DNA, 120 bp, synthetic construct; identical to SEQ ID NO: 42270
  source 1..120: mol_type = other DNA

SEQ ID NO: 72225 - DNA, 120 bp, synthetic construct; identical to SEQ ID NO: 42271
  source 1..120: mol_type = other DNA

SEQ ID NO: 72226 - DNA, 120 bp, synthetic construct; identical to SEQ ID NO: 42272
  source 1..120: mol_type = other DNA

SEQ ID NO: 72227 - DNA, 120 bp, synthetic construct; identical to SEQ ID NO: 12026
  source 1..120: mol_type = other DNA

SEQ ID NO: 72228 - DNA, 120 bp, synthetic construct; identical to SEQ ID NO: 42274
  source 1..120: mol_type = other DNA

SEQ ID NO: 72229 - DNA, 120 bp, synthetic construct; identical to SEQ ID NO: 42275
  source 1..120: mol_type = other DNA

SEQ ID NO: 72230 - DNA, 120 bp, synthetic construct; identical to SEQ ID NO: 42276
  source 1..120: mol_type = other DNA

SEQ ID NO: 72231 - DNA, 120 bp, synthetic construct; identical to SEQ ID NO: 12027
  source 1..120: mol_type = other DNA

SEQ ID NO: 72232 - DNA, 120 bp, synthetic construct; identical to SEQ ID NO: 42278
  source 1..120: mol_type = other DNA

SEQ ID NO: 72233 - DNA, 120 bp, synthetic construct; identical to SEQ ID NO: 42279
  source 1..120: mol_type = other DNA

SEQ ID NO: 72234 - DNA, 120 bp, synthetic construct; identical to SEQ ID NO: 12028
  source 1..120: mol_type = other DNA

SEQ ID NO: 72235 - DNA, 120 bp, synthetic construct; identical to SEQ ID NO: 42281
  source 1..120: mol_type = other DNA

SEQ ID NO: 72236 - DNA, 120 bp, synthetic construct; identical to SEQ ID NO: 42282
  source 1..120: mol_type = other DNA

SEQ ID NO: 72237 - DNA, 120 bp, synthetic construct; identical to SEQ ID NO: 42283
  source 1..120: mol_type = other DNA

SEQ ID NO: 72238 - DNA, 120 bp, synthetic construct; identical to SEQ ID NO: 12029
  source 1..120: mol_type = other DNA

SEQ ID NO: 72239 - DNA, 120 bp, synthetic construct; identical to SEQ ID NO: 42285
  source 1..120: mol_type = other DNA

SEQ ID NO: 72240 - DNA, 120 bp, synthetic construct; identical to SEQ ID NO: 42286
  source 1..120: mol_type = other DNA

SEQ ID NO: 72241 - DNA, 120 bp, synthetic construct; identical to SEQ ID NO: 42287
  source 1..120: mol_type = other DNA

SEQ ID NO: 72242 - DNA, 120 bp, synthetic construct; identical to SEQ ID NO: 12030
  source 1..120: mol_type = other DNA

SEQ ID NO: 72243 - DNA, 120 bp, synthetic construct; identical to SEQ ID NO: 42289
  source 1..120: mol_type = other DNA

SEQ ID NO: 72244 - DNA, 120 bp, synthetic construct; identical to SEQ ID NO: 42290
  source 1..120: mol_type = other DNA

SEQ ID NO: 72245 - DNA, 120 bp, synthetic construct; identical to SEQ ID NO: 42291
  source 1..120: mol_type = other DNA

SEQ ID NO: 72246 - DNA, 120 bp, synthetic construct; identical to SEQ ID NO: 12031
  source 1..120: mol_type = other DNA

SEQ ID NO: 72247 - DNA, 120 bp, synthetic construct; identical to SEQ ID NO: 42293
  source 1..120: mol_type = other DNA

SEQ ID NO: 72248 - DNA, 120 bp, synthetic construct; identical to SEQ ID NO: 42294
  source 1..120: mol_type = other DNA

SEQ ID NO: 72249 - DNA, 120 bp, synthetic construct; identical to SEQ ID NO: 42295
  source 1..120: mol_type = other DNA

SEQ ID NO: 72250 - DNA, 120 bp, synthetic construct; identical to SEQ ID NO: 12032
  source 1..120: mol_type = other DNA

SEQ ID NO: 72251 - DNA, 120 bp, synthetic construct; identical to SEQ ID NO: 42297
  source 1..120: mol_type = other DNA

SEQ ID NO: 72252 - DNA, 120 bp, synthetic construct; identical to SEQ ID NO: 42298
  source 1..120: mol_type = other DNA

SEQ ID NO: 72253 - DNA, 120 bp, synthetic construct; identical to SEQ ID NO: 42299
  source 1..120: mol_type = other DNA

SEQ ID NO: 72254 - DNA, 120 bp, synthetic construct; identical to SEQ ID NO: 12033
  source 1..120: mol_type = other DNA

SEQ ID NO: 72255 - DNA, 120 bp, synthetic construct; identical to SEQ ID NO: 42301
  source 1..120: mol_type = other DNA

SEQ ID NO: 72256 - DNA, 120 bp, synthetic construct; identical to SEQ ID NO: 42302
  source 1..120: mol_type = other DNA

SEQ ID NO: 72257 - DNA, 120 bp, synthetic construct; identical to SEQ ID NO: 42303
  source 1..120: mol_type = other DNA

SEQ ID NO: 72258 - DNA, 120 bp, synthetic construct; identical to SEQ ID NO: 12034
  source 1..120: mol_type = other DNA

SEQ ID NO: 72259 - DNA, 120 bp, synthetic construct; identical to SEQ ID NO: 4710
  source 1..120: mol_type = other DNA

SEQ ID NO: 72260 - DNA, 120 bp, synthetic construct; identical to SEQ ID NO: 42306
  source 1..120: mol_type = other DNA

SEQ ID NO: 72261 - DNA, 120 bp, synthetic construct; identical to SEQ ID NO: 42307
  source 1..120: mol_type = other DNA

SEQ ID NO: 72262 - DNA, 120 bp, synthetic construct; identical to SEQ ID NO: 12035
  source 1..120: mol_type = other DNA

SEQ ID NO: 72263 - DNA, 120 bp, synthetic construct; identical to SEQ ID NO: 42309
  source 1..120: mol_type = other DNA

SEQ ID NO: 72264 - DNA, 120 bp, synthetic construct; identical to SEQ ID NO: 42310
  source 1..120: mol_type = other DNA

SEQ ID NO: 72265 - DNA, 120 bp, synthetic construct; identical to SEQ ID NO: 42311
  source 1..120: mol_type = other DNA

SEQ ID NO: 72266 - DNA, 120 bp, synthetic construct; identical to SEQ ID NO: 42312
  source 1..120: mol_type = other DNA

SEQ ID NO: 72267 - DNA, 120 bp, synthetic construct; identical to SEQ ID NO: 12036
  source 1..120: mol_type = other DNA

SEQ ID NO: 72268 - DNA, 120 bp, synthetic construct; identical to SEQ ID NO: 42314
  source 1..120: mol_type = other DNA

SEQ ID NO: 72269 - DNA, 120 bp, synthetic construct; identical to SEQ ID NO: 42315
  source 1..120: mol_type = other DNA

SEQ ID NO: 72270 - DNA, 120 bp, synthetic construct; identical to SEQ ID NO: 42316
  source 1..120: mol_type = other DNA

SEQ ID NO: 72271 - DNA, 120 bp, synthetic construct; identical to SEQ ID NO: 42317
  source 1..120: mol_type = other DNA

SEQ ID NO: 72272 - DNA, 120 bp, synthetic construct; identical to SEQ ID NO: 12037
  source 1..120: mol_type = other DNA

SEQ ID NO: 72273 - DNA, 120 bp, synthetic construct; identical to SEQ ID NO: 42319
  source 1..120: mol_type = other DNA

SEQ ID NO: 72274 - DNA, 120 bp, synthetic construct; identical to SEQ ID NO: 42320
  source 1..120: mol_type = other DNA

SEQ ID NO: 72275 - DNA, 120 bp, synthetic construct; identical to SEQ ID NO: 42321
  source 1..120: mol_type = other DNA

SEQ ID NO: 72276 - DNA, 120 bp, synthetic construct; identical to SEQ ID NO: 12038
  source 1..120: mol_type = other DNA

SEQ ID NO: 72277 - DNA, 120 bp, synthetic construct; identical to SEQ ID NO: 42323
  source 1..120: mol_type = other DNA

SEQ ID NO: 72278 - DNA, 120 bp, synthetic construct; identical to SEQ ID NO: 42324
  source 1..120: mol_type = other DNA

SEQ ID NO: 72279 - DNA, 120 bp, synthetic construct; identical to SEQ ID NO: 42325
  source 1..120: mol_type = other DNA

SEQ ID NO: 72280 - DNA, 120 bp, synthetic construct; identical to SEQ ID NO: 12039
  source 1..120: mol_type = other DNA

SEQ ID NO: 72281 - DNA, 120 bp, synthetic construct; identical to SEQ ID NO: 42327
  source 1..120: mol_type = other DNA

SEQ ID NO: 72282 - DNA, 120 bp, synthetic construct; identical to SEQ ID NO: 42328
  source 1..120: mol_type = other DNA

SEQ ID NO: 72283 - DNA, 120 bp, synthetic construct; identical to SEQ ID NO: 42329
  source 1..120: mol_type = other DNA

SEQ ID NO: 72284 - DNA, 120 bp, synthetic construct; identical to SEQ ID NO: 12040
  source 1..120: mol_type = other DNA

SEQ ID NO: 72285 - DNA, 120 bp, synthetic construct; identical to SEQ ID NO: 42331
  source 1..120: mol_type = other DNA

SEQ ID NO: 72286 - DNA, 120 bp, synthetic construct; identical to SEQ ID NO: 42332
  source 1..120: mol_type = other DNA

SEQ ID NO: 72287 - DNA, 120 bp, synthetic construct; identical to SEQ ID NO: 42333
  source 1..120: mol_type = other DNA

SEQ ID NO: 72288 - DNA, 120 bp, synthetic construct; identical to SEQ ID NO: 12041
  source 1..120: mol_type = other DNA

SEQ ID NO: 72289 - DNA, 120 bp, synthetic construct; identical to SEQ ID NO: 42335
  source 1..120: mol_type = other DNA

SEQ ID NO: 72290 - DNA, 120 bp, synthetic construct; identical to SEQ ID NO: 42336
  source 1..120: mol_type = other DNA

SEQ ID NO: 72291 - DNA, 120 bp, synthetic construct; identical to SEQ ID NO: 12042
  source 1..120: mol_type = other DNA

SEQ ID NO: 72292 - DNA, 120 bp, synthetic construct; identical to SEQ ID NO: 42338
  source 1..120: mol_type = other DNA

SEQ ID NO: 72293 - DNA, 120 bp, synthetic construct; identical to SEQ ID NO: 42339
  source 1..120: mol_type = other DNA

SEQ ID NO: 72294 - DNA, 120 bp, synthetic construct; identical to SEQ ID NO: 42340
  source 1..120: mol_type = other DNA

SEQ ID NO: 72295 - DNA, 120 bp, synthetic construct; identical to SEQ ID NO: 42341
  source 1..120: mol_type = other DNA

SEQ ID NO: 72296 - DNA, 120 bp, synthetic construct; identical to SEQ ID NO: 12043
  source 1..120: mol_type = other DNA

SEQ ID NO: 72297 - DNA, 120 bp, synthetic construct; identical to SEQ ID NO: 42343
  source 1..120: mol_type = other DNA

SEQ ID NO: 72298 - DNA, 120 bp, synthetic construct; identical to SEQ ID NO: 42344
  source 1..120: mol_type = other DNA

SEQ ID NO: 72299 - DNA, 120 bp, synthetic construct; identical to SEQ ID NO: 12044
  source 1..120: mol_type = other DNA

SEQ ID NO: 72300 - DNA, 120 bp, synthetic construct; identical to SEQ ID NO: 42346
  source 1..120: mol_type = other DNA

SEQ ID NO: 72301 - DNA, 120 bp, synthetic construct; identical to SEQ ID NO: 42347
  source 1..120: mol_type = other DNA

SEQ ID NO: 72302 - DNA, 120 bp, synthetic construct; identical to SEQ ID NO: 42348
  source 1..120: mol_type = other DNA

SEQ ID NO: 72303 - DNA, 120 bp, synthetic construct; identical to SEQ ID NO: 42349
  source 1..120: mol_type = other DNA

SEQ ID NO: 72304 - DNA, 120 bp, synthetic construct; identical to SEQ ID NO: 12045
  source 1..120: mol_type = other DNA

SEQ ID NO: 72305 - DNA, 120 bp, synthetic construct; identical to SEQ ID NO: 42351
  source 1..120: mol_type = other DNA

SEQ ID NO: 72306 - DNA, 120 bp, synthetic construct; identical to SEQ ID NO: 42352
  source 1..120: mol_type = other DNA

SEQ ID NO: 72307 - DNA, 120 bp, synthetic construct; identical to SEQ ID NO: 12046
  source 1..120: mol_type = other DNA

SEQ ID NO: 72308 - DNA, 120 bp, synthetic construct; identical to SEQ ID NO: 42354
  source 1..120: mol_type = other DNA

SEQ ID NO: 72309 - DNA, 120 bp, synthetic construct; identical to SEQ ID NO: 42355
  source 1..120: mol_type = other DNA

SEQ ID NO: 72310 - DNA, 120 bp, synthetic construct; identical to SEQ ID NO: 42356
  source 1..120: mol_type = other DNA

SEQ ID NO: 72311 - DNA, 120 bp, synthetic construct; identical to SEQ ID NO: 12047
  source 1..120: mol_type = other DNA

SEQ ID NO: 72312 - DNA, 120 bp, synthetic construct; identical to SEQ ID NO: 42358
  source 1..120: mol_type = other DNA

SEQ ID NO: 72313 - DNA, 120 bp, synthetic construct; identical to SEQ ID NO: 42359
  source 1..120: mol_type = other DNA

SEQ ID NO: 72314 - DNA, 120 bp, synthetic construct; identical to SEQ ID NO: 42360
  source 1..120: mol_type = other DNA

SEQ ID NO: 72315 - DNA, 120 bp, synthetic construct; identical to SEQ ID NO: 12048
  source 1..120: mol_type = other DNA

SEQ ID NO: 72316 - DNA, 120 bp, synthetic construct; identical to SEQ ID NO: 42362
  source 1..120: mol_type = other DNA

SEQ ID NO: 72317 - DNA, 120 bp, synthetic construct; identical to SEQ ID NO: 42363
  source 1..120: mol_type = other DNA

SEQ ID NO: 72318 - DNA, 120 bp, synthetic construct; identical to SEQ ID NO: 42364
  source 1..120: mol_type = other DNA

SEQ ID NO: 72319 - DNA, 120 bp, synthetic construct; identical to SEQ ID NO: 12049
  source 1..120: mol_type = other DNA

SEQ ID NO: 72320 - DNA, 120 bp, synthetic construct; identical to SEQ ID NO: 42366
  source 1..120: mol_type = other DNA

SEQ ID NO: 72321 - DNA, 120 bp, synthetic construct; identical to SEQ ID NO: 42367
  source 1..120: mol_type = other DNA

SEQ ID NO: 72322 - DNA, 120 bp, synthetic construct; identical to SEQ ID NO: 42368
  source 1..120: mol_type = other DNA

SEQ ID NO: 72323 - DNA, 120 bp, synthetic construct; identical to SEQ ID NO: 12050
  source 1..120: mol_type = other DNA

SEQ ID NO: 72324 - DNA, 120 bp, synthetic construct; identical to SEQ ID NO: 42370
  source 1..120: mol_type = other DNA

SEQ ID NO: 72325 - DNA, 120 bp, synthetic construct; identical to SEQ ID NO: 12051
  source 1..120: mol_type = other DNA

SEQ ID NO: 72326 - DNA, 120 bp, synthetic construct; identical to SEQ ID NO: 42372
  source 1..120: mol_type = other DNA

SEQ ID NO: 72327 - DNA, 120 bp, synthetic construct; identical to SEQ ID NO: 42373
  source 1..120: mol_type = other DNA

SEQ ID NO: 72328 - DNA, 120 bp, synthetic construct; identical to SEQ ID NO: 12052
  source 1..120: mol_type = other DNA

SEQ ID NO: 72329 - DNA, 120 bp, synthetic construct; identical to SEQ ID NO: 42375
  source 1..120: mol_type = other DNA

SEQ ID NO: 72330 - DNA, 120 bp, synthetic construct; identical to SEQ ID NO: 12053
  source 1..120: mol_type = other DNA

SEQ ID NO: 72331 - DNA, 120 bp, synthetic construct; identical to SEQ ID NO: 42377
  source 1..120: mol_type = other DNA

SEQ ID NO: 72332 - DNA, 120 bp, synthetic construct; identical to SEQ ID NO: 42378
  source 1..120: mol_type = other DNA

SEQ ID NO: 72333 - DNA, 120 bp, synthetic construct; identical to SEQ ID NO: 42379
  source 1..120: mol_type = other DNA

SEQ ID NO: 72334 - DNA, 120 bp, synthetic construct; identical to SEQ ID NO: 42380
  source 1..120: mol_type = other DNA

SEQ ID NO: 72335 - DNA, 120 bp, synthetic construct; identical to SEQ ID NO: 12054
  source 1..120: mol_type = other DNA

SEQ ID NO: 72336 - DNA, 120 bp, synthetic construct; identical to SEQ ID NO: 42382
  source 1..120: mol_type = other DNA

SEQ ID NO: 72337 - DNA, 120 bp, synthetic construct; identical to SEQ ID NO: 42383
  source 1..120: mol_type = other DNA

SEQ ID NO: 72338 - DNA, 120 bp, synthetic construct; identical to SEQ ID NO: 42384
  source 1..120: mol_type = other DNA

SEQ ID NO: 72339 - DNA, 120 bp, synthetic construct; identical to SEQ ID NO: 12055
  source 1..120: mol_type = other DNA

SEQ ID NO: 72340 - DNA, 120 bp, synthetic construct; identical to SEQ ID NO: 42386
  source 1..120: mol_type = other DNA

SEQ ID NO: 72341 - DNA, 120 bp, synthetic construct; identical to SEQ ID NO: 42387
  source 1..120: mol_type = other DNA

SEQ ID NO: 72342 - DNA, 120 bp, synthetic construct; identical to SEQ ID NO: 42388
  source 1..120: mol_type = other DNA

SEQ ID NO: 72343 - DNA, 120 bp, synthetic construct; identical to SEQ ID NO: 12056
  source 1..120: mol_type = other DNA

SEQ ID NO: 72344 - DNA, 120 bp, synthetic construct; identical to SEQ ID NO: 42390
  source 1..120: mol_type = other DNA

SEQ ID NO: 72345 - DNA, 120 bp, synthetic construct; identical to SEQ ID NO: 42391
  source 1..120: mol_type = other DNA

SEQ ID NO: 72346 - DNA, 120 bp, synthetic construct; identical to SEQ ID NO: 42392
  source 1..120: mol_type = other DNA

SEQ ID NO: 72347 - DNA, 120 bp, synthetic construct; identical to SEQ ID NO: 12057
  source 1..120: mol_type = other DNA

SEQ ID NO: 72348 - DNA, 120 bp, synthetic construct; identical to SEQ ID NO: 42394
  source 1..120: mol_type = other DNA

SEQ ID NO: 72349 - DNA, 120 bp, synthetic construct; identical to SEQ ID NO: 42395
  source 1..120: mol_type = other DNA

SEQ ID NO: 72350 - DNA, 120 bp, synthetic construct; identical to SEQ ID NO: 42396
  source 1..120: mol_type = other DNA

SEQ ID NO: 72351 - DNA, 120 bp, synthetic construct; identical to SEQ ID NO: 12058
  source 1..120: mol_type = other DNA

SEQ ID NO: 72352 - DNA, 120 bp, synthetic construct; identical to SEQ ID NO: 42398
  source 1..120: mol_type = other DNA

SEQ ID NO: 72353 - DNA, 120 bp, synthetic construct; identical to SEQ ID NO: 42399
  source 1..120: mol_type = other DNA

SEQ ID NO: 72354 - DNA, 120 bp, synthetic construct; identical to SEQ ID NO: 42400
  source 1..120: mol_type = other DNA

SEQ ID NO: 72355 - DNA, 120 bp, synthetic construct; identical to SEQ ID NO: 42401
  source 1..120: mol_type = other DNA

SEQ ID NO: 72356 - DNA, 120 bp, synthetic construct; identical to SEQ ID NO: 12059
  source 1..120: mol_type = other DNA

SEQ ID NO: 72357 - DNA, 120 bp, synthetic construct; identical to SEQ ID NO: 42403
  source 1..120: mol_type = other DNA

SEQ ID NO: 72358 - DNA, 120 bp, synthetic construct; identical to SEQ ID NO: 42404
  source 1..120: mol_type = other DNA

SEQ ID NO: 72359 - DNA, 120 bp, synthetic construct; identical to SEQ ID NO: 42405
  source 1..120: mol_type = other DNA

SEQ ID NO: 72360 - DNA, 120 bp, synthetic construct; identical to SEQ ID NO: 12060
  source 1..120: mol_type = other DNA

SEQ ID NO: 72361 - DNA, 120 bp, synthetic construct; identical to SEQ ID NO: 42407
  source 1..120: mol_type = other DNA

SEQ ID NO: 72362 - DNA, 120 bp, synthetic construct; identical to SEQ ID NO: 42408
  source 1..120: mol_type = other DNA

SEQ ID NO: 72363 - DNA, 120 bp, synthetic construct; identical to SEQ ID NO: 12061
  source 1..120: mol_type = other DNA

SEQ ID NO: 72364 - DNA, 120 bp, synthetic construct; identical to SEQ ID NO: 42410
  source 1..120: mol_type = other DNA

SEQ ID NO: 72365 - DNA, 120 bp, synthetic construct; identical to SEQ ID NO: 42411
  source 1..120: mol_type = other DNA

SEQ ID NO: 72366 - DNA, 120 bp, synthetic construct; identical to SEQ ID NO: 42412
  source 1..120: mol_type = other DNA

SEQ ID NO: 72367 - DNA, 120 bp, synthetic construct; identical to SEQ ID NO: 42413
  source 1..120: mol_type = other DNA

SEQ ID NO: 72368 - DNA, 120 bp, synthetic construct; identical to SEQ ID NO: 12062
  source 1..120: mol_type = other DNA

SEQ ID NO: 72369 - DNA, 120 bp, synthetic construct; identical to SEQ ID NO: 42415
  source 1..120: mol_type = other DNA

SEQ ID NO: 72370 - DNA, 120 bp, synthetic construct; identical to SEQ ID NO: 42416
  source 1..120: mol_type = other DNA

SEQ ID NO: 72371 - DNA, 120 bp, synthetic construct; identical to SEQ ID NO: 42417
  source 1..120: mol_type = other DNA

SEQ ID NO: 72372 - DNA, 120 bp, synthetic construct; identical to SEQ ID NO: 12063
  source 1..120: mol_type = other DNA

SEQ ID NO: 72373 - DNA, 120 bp, synthetic construct; identical to SEQ ID NO: 42419
  source 1..120: mol_type = other DNA

SEQ ID NO: 72374 - DNA, 120 bp, synthetic construct; identical to SEQ ID NO: 42420
  source 1..120: mol_type = other DNA

SEQ ID NO: 72375 - DNA, 120 bp, synthetic construct; identical to SEQ ID NO: 12064
  source 1..120: mol_type = other DNA

SEQ ID NO: 72376 - DNA, 120 bp, synthetic construct; identical to SEQ ID NO: 42422
  source 1..120: mol_type = other DNA

SEQ ID NO: 72377 - DNA, 120 bp, synthetic construct; identical to SEQ ID NO: 42423
  source 1..120: mol_type = other DNA

SEQ ID NO: 72378 - DNA, 120 bp, synthetic construct; identical to SEQ ID NO: 42424
  source 1..120: mol_type = other DNA

SEQ ID NO: 72379 - DNA, 120 bp, synthetic construct; identical to SEQ ID NO: 42425
  source 1..120: mol_type = other DNA

SEQ ID NO: 72380 - DNA, 120 bp, synthetic construct; identical to SEQ ID NO: 12065
  source 1..120: mol_type = other DNA

SEQ ID NO: 72381 - DNA, 120 bp, synthetic construct; identical to SEQ ID NO: 42427
  source 1..120: mol_type = other DNA

SEQ ID NO: 72382 - DNA, 120 bp, synthetic construct; identical to SEQ ID NO: 42428
  source 1..120: mol_type = other DNA

SEQ ID NO: 72383 - DNA, 120 bp, synthetic construct; identical to SEQ ID NO: 12066
  source 1..120: mol_type = other DNA

SEQ ID NO: 72384 - DNA, 120 bp, synthetic construct; identical to SEQ ID NO: 42430
  source 1..120: mol_type = other DNA

SEQ ID NO: 72385 - DNA, 120 bp, synthetic construct; identical to SEQ ID NO: 42431
  source 1..120: mol_type = other DNA

SEQ ID NO: 72386 - DNA, 120 bp, synthetic construct; identical to SEQ ID NO: 42432
  source 1..120: mol_type = other DNA

SEQ ID NO: 72387 - DNA, 120 bp, synthetic construct; identical to SEQ ID NO: 42433
  source 1..120: mol_type = other DNA

SEQ ID NO: 72388 - DNA, 120 bp, synthetic construct; identical to SEQ ID NO: 12067
  source 1..120: mol_type = other DNA

SEQ ID NO: 72389 - DNA, 120 bp, synthetic construct; identical to SEQ ID NO: 42435
  source 1..120: mol_type = other DNA

SEQ ID NO: 72390 - DNA, 120 bp, synthetic construct; identical to SEQ ID NO: 42436
  source 1..120: mol_type = other DNA

SEQ ID NO: 72391 - DNA, 120 bp, synthetic construct; identical to SEQ ID NO: 42437
  source 1..120: mol_type = other DNA

SEQ ID NO: 72392 - DNA, 120 bp, synthetic construct; identical to SEQ ID NO: 12068
  source 1..120: mol_type = other DNA

SEQ ID NO: 72393 - DNA, 120 bp, synthetic construct; identical to SEQ ID NO: 42439
  source 1..120: mol_type = other DNA

SEQ ID NO: 72394 - DNA, 120 bp, synthetic construct; identical to SEQ ID NO: 42440
  source 1..120: mol_type = other DNA

SEQ ID NO: 72395 - DNA, 120 bp, synthetic construct; identical to SEQ ID NO: 42441
  source 1..120: mol_type = other DNA

SEQ ID NO: 72396 - DNA, 120 bp, synthetic construct; identical to SEQ ID NO: 12069
  source 1..120: mol_type = other DNA

SEQ ID NO: 72397 - DNA, 120 bp, synthetic construct; identical to SEQ ID NO: 42443
  source 1..120: mol_type = other DNA

SEQ ID NO: 72398 - DNA, 120 bp, synthetic construct; identical to SEQ ID NO: 42444
  source 1..120: mol_type = other DNA

SEQ ID NO: 72399 - DNA, 120 bp, synthetic construct; identical to SEQ ID NO: 12070
  source 1..120: mol_type = other DNA

SEQ ID NO: 72400 - DNA, 120 bp, synthetic construct; identical to SEQ ID NO: 42446
  source 1..120: mol_type = other DNA

SEQ ID NO: 72401 - DNA, 120 bp, synthetic construct; identical to SEQ ID NO: 42447
  source 1..120: mol_type = other DNA

SEQ ID NO: 72402 - DNA, 120 bp, synthetic construct; identical to SEQ ID NO: 42448
  source 1..120: mol_type = other DNA

SEQ ID NO: 72403 - DNA, 120 bp, synthetic construct; identical to SEQ ID NO: 12071
  source 1..120: mol_type = other DNA

SEQ ID NO: 72404 - DNA, 120 bp, synthetic construct; identical to SEQ ID NO: 42450
  source 1..120: mol_type = other DNA

SEQ ID NO: 72405 - DNA, 120 bp, synthetic construct; identical to SEQ ID NO: 42451
  source 1..120: mol_type = other DNA

SEQ ID NO: 72406 - DNA, 120 bp, synthetic construct; identical to SEQ ID NO: 42452
  source 1..120: mol_type = other DNA

SEQ ID NO: 72407 - DNA, 120 bp, synthetic construct; identical to SEQ ID NO: 12072
  source 1..120: mol_type = other DNA

SEQ ID NO: 72408 - DNA, 120 bp, synthetic construct; identical to SEQ ID NO: 42454
  source 1..120: mol_type = other DNA

SEQ ID NO: 72409 - DNA, 120 bp, synthetic construct; identical to SEQ ID NO: 42455
  source 1..120: mol_type = other DNA

SEQ ID NO: 72410 - DNA, 120 bp, synthetic construct; identical to SEQ ID NO: 42456
  source 1..120: mol_type = other DNA

SEQ ID NO: 72411 - DNA, 120 bp, synthetic construct; identical to SEQ ID NO: 12073
  source 1..120: mol_type = other DNA

SEQ ID NO: 72412 - DNA, 120 bp, synthetic construct; identical to SEQ ID NO: 42458
  source 1..120: mol_type = other DNA

SEQ ID NO: 72413 - DNA, 120 bp, synthetic construct; identical to SEQ ID NO: 42459
  source 1..120: mol_type = other DNA

SEQ ID NO: 72414 - DNA, 120 bp, synthetic construct; identical to SEQ ID NO: 12074
  source 1..120: mol_type = other DNA

SEQ ID NO: 72415 - DNA, 120 bp, synthetic construct; identical to SEQ ID NO: 42461
  source 1..120: mol_type = other DNA

SEQ ID NO: 72416 - DNA, 120 bp, synthetic construct; identical to SEQ ID NO: 42462
  source 1..120: mol_type = other DNA

SEQ ID NO: 72417 - DNA, 120 bp, synthetic construct; identical to SEQ ID NO: 12075
  source 1..120: mol_type = other DNA

SEQ ID NO: 72418 - DNA, 120 bp, synthetic construct; identical to SEQ ID NO: 42464
  source 1..120: mol_type = other DNA

SEQ ID NO: 72419 - DNA, 120 bp, synthetic construct; identical to SEQ ID NO: 42465
  source 1..120: mol_type = other DNA

SEQ ID NO: 72420 - DNA, 120 bp, synthetic construct; identical to SEQ ID NO: 12076
  source 1..120: mol_type = other DNA

SEQ ID NO: 72421 - DNA, 120 bp, synthetic construct; identical to SEQ ID NO: 42467
  source 1..120: mol_type = other DNA

SEQ ID NO: 72422 - DNA, 120 bp, synthetic construct; identical to SEQ ID NO: 42468
  source 1..120: mol_type = other DNA

SEQ ID NO: 72423 - DNA, 120 bp, synthetic construct; identical to SEQ ID NO: 12077
  source 1..120: mol_type = other DNA

SEQ ID NO: 72424 - DNA, 120 bp, synthetic construct; identical to SEQ ID NO: 42470
  source 1..120: mol_type = other DNA

SEQ ID NO: 72425 - DNA, 120 bp, synthetic construct; identical to SEQ ID NO: 42471
  source 1..120: mol_type = other DNA

SEQ ID NO: 72426 - DNA, 120 bp, synthetic construct; identical to SEQ ID NO: 42472
  source 1..120: mol_type = other DNA

SEQ ID NO: 72427 - DNA, 120 bp, synthetic construct; identical to SEQ ID NO: 42473
  source 1..120: mol_type = other DNA

SEQ ID NO: 72428 - DNA, 120 bp, synthetic construct; identical to SEQ ID NO: 12078
  source 1..120: mol_type = other DNA

SEQ ID NO: 72429 - DNA, 120 bp, synthetic construct; identical to SEQ ID NO: 42475
  source 1..120: mol_type = other DNA

SEQ ID NO: 72430 - DNA, 120 bp, synthetic construct; identical to SEQ ID NO: 42476
  source 1..120: mol_type = other DNA

SEQ ID NO: 72431 - DNA, 120 bp, synthetic construct; identical to SEQ ID NO: 42477
  source 1..120: mol_type = other DNA

SEQ ID NO: 72432 - DNA, 120 bp, synthetic construct; identical to SEQ ID NO: 12079
  source 1..120: mol_type = other DNA

SEQ ID NO: 72433 - DNA, 120 bp, synthetic construct; identical to SEQ ID NO: 42479
  source 1..120: mol_type = other DNA

SEQ ID NO: 72434 - DNA, 120 bp, synthetic construct; identical to SEQ ID NO: 42480
  source 1..120: mol_type = other DNA

SEQ ID NO: 72435 - DNA, 120 bp, synthetic construct; identical to SEQ ID NO: 12080
  source 1..120: mol_type = other DNA

SEQ ID NO: 72436 - DNA, 120 bp, synthetic construct; identical to SEQ ID NO: 42482
  source 1..120: mol_type = other DNA

SEQ ID NO: 72437 - DNA, 120 bp, synthetic construct; identical to SEQ ID NO: 42483
  source 1..120: mol_type = other DNA

SEQ ID NO: 72438 - DNA, 120 bp, synthetic construct; identical to SEQ ID NO: 42484
  source 1..120: mol_type = other DNA

SEQ ID NO: 72439 - DNA, 120 bp, synthetic construct; identical to SEQ ID NO: 12081
  source 1..120: mol_type = other DNA

SEQ ID NO: 72440 - DNA, 120 bp, synthetic construct; identical to SEQ ID NO: 42486
  source 1..120: mol_type = other DNA

SEQ ID NO: 72441 - DNA, 120 bp, synthetic construct; identical to SEQ ID NO: 42487
  source 1..120: mol_type = other DNA

SEQ ID NO: 72442 - DNA, 120 bp, synthetic construct; identical to SEQ ID NO: 42488
  source 1..120: mol_type = other DNA

SEQ ID NO: 72443 - DNA, 120 bp, synthetic construct; identical to SEQ ID NO: 42489
  source 1..120: mol_type = other DNA

SEQ ID NO: 72444 - DNA, 120 bp, synthetic construct; identical to SEQ ID NO: 12082
  source 1..120: mol_type = other DNA

SEQ ID NO: 72445 - DNA, 120 bp, synthetic construct; identical to SEQ ID NO: 42491
  source 1..120: mol_type = other DNA

SEQ ID NO: 72446 - DNA, 120 bp, synthetic construct; identical to SEQ ID NO: 42492
  source 1..120: mol_type = other DNA

SEQ ID NO: 72447 - DNA, 120 bp, synthetic construct; identical to SEQ ID NO: 42493
  source 1..120: mol_type = other DNA

SEQ ID NO: 72448 - DNA, 120 bp, synthetic construct; identical to SEQ ID NO: 12083
  source 1..120: mol_type = other DNA

SEQ ID NO: 72449 - DNA, 120 bp, synthetic construct; identical to SEQ ID NO: 42495
  source 1..120: mol_type = other DNA

SEQ ID NO: 72450 - DNA, 120 bp, synthetic construct; identical to SEQ ID NO: 42496
  source 1..120: mol_type = other DNA

SEQ ID NO: 72451 - DNA, 120 bp, synthetic construct; identical to SEQ ID NO: 42497
  source 1..120: mol_type = other DNA

SEQ ID NO: 72452 - DNA, 120 bp, synthetic construct; identical to SEQ ID NO: 12084
  source 1..120: mol_type = other DNA

SEQ ID NO: 72453 - DNA, 120 bp, synthetic construct; identical to SEQ ID NO: 42499
  source 1..120: mol_type = other DNA

SEQ ID NO: 72454 - DNA, 120 bp, synthetic construct; identical to SEQ ID NO: 42500
  source 1..120: mol_type = other DNA

SEQ ID NO: 72455 - DNA, 120 bp, synthetic construct; identical to SEQ ID NO: 42501
  source 1..120: mol_type = other DNA

SEQ ID NO: 72456 - DNA, 120 bp, synthetic construct; identical to SEQ ID NO: 12085
  source 1..120: mol_type = other DNA

SEQ ID NO: 72457 - DNA, 120 bp, synthetic construct; identical to SEQ ID NO: 42503
  source 1..120: mol_type = other DNA

SEQ ID NO: 72458 - DNA, 120 bp, synthetic construct; identical to SEQ ID NO: 42504
  source 1..120: mol_type = other DNA

SEQ ID NO: 72459 - DNA, 120 bp, synthetic construct; identical to SEQ ID NO: 42505
  source 1..120: mol_type = other DNA

SEQ ID NO: 72460 - DNA, 120 bp, synthetic construct; identical to SEQ ID NO: 12086
  source 1..120: mol_type = other DNA

SEQ ID NO: 72461 - DNA, 120 bp, synthetic construct; identical to SEQ ID NO: 42507
  source 1..120: mol_type = other DNA

SEQ ID NO: 72462 - DNA, 120 bp, synthetic construct; identical to SEQ ID NO: 42508
  source 1..120: mol_type = other DNA

SEQ ID NO: 72463 - DNA, 120 bp, synthetic construct; identical to SEQ ID NO: 42509
  source 1..120: mol_type = other DNA

SEQ ID NO: 72464 - DNA, 120 bp, synthetic construct; identical to SEQ ID NO: 42510
  source 1..120: mol_type = other DNA

SEQ ID NO: 72465 - DNA, 120 bp, synthetic construct; identical to SEQ ID NO: 42511
  source 1..120: mol_type = other DNA

SEQ ID NO: 72466 - DNA, 120 bp, synthetic construct; identical to SEQ ID NO: 12087
  source 1..120: mol_type = other DNA

SEQ ID NO: 72467 - DNA, 120 bp, synthetic construct; identical to SEQ ID NO: 42513
  source 1..120: mol_type = other DNA

SEQ ID NO: 72468 - DNA, 120 bp, synthetic construct; identical to SEQ ID NO: 42514
  source 1..120: mol_type = other DNA

SEQ ID NO: 72469 - DNA, 120 bp, synthetic construct; identical to SEQ ID NO: 42515
  source 1..120: mol_type = other DNA

SEQ ID NO: 72470 - DNA, 120 bp, synthetic construct; identical to SEQ ID NO: 12088
  source 1..120: mol_type = other DNA

SEQ ID NO: 72471 - DNA, 120 bp, synthetic construct; identical to SEQ ID NO: 42517
  source 1..120: mol_type = other DNA

SEQ ID NO: 72472 - DNA, 120 bp, synthetic construct; identical to SEQ ID NO: 42518
  source 1..120: mol_type = other DNA

SEQ ID NO: 72473 - DNA, 120 bp, synthetic construct; identical to SEQ ID NO: 42519
  source 1..120: mol_type = other DNA

SEQ ID NO: 72474 - DNA, 120 bp, synthetic construct; identical to SEQ ID NO: 12089
  source 1..120: mol_type = other DNA

SEQ ID NO: 72475 - DNA, 120 bp, synthetic construct; identical to SEQ ID NO: 42521
  source 1..120: mol_type = other DNA

SEQ ID NO: 72476 - DNA, 120 bp, synthetic construct; identical to SEQ ID NO: 42522
  source 1..120: mol_type = other DNA

SEQ ID NO: 72477 - DNA, 120 bp, synthetic construct; identical to SEQ ID NO: 42523
  source 1..120: mol_type = other DNA

SEQ ID NO: 72478 - DNA, 120 bp, synthetic construct; identical to SEQ ID NO: 12090
  source 1..120: mol_type = other DNA

SEQ ID NO: 72479 - DNA, 120 bp, synthetic construct; identical to SEQ ID NO: 42525
  source 1..120: mol_type = other DNA

SEQ ID NO: 72480 - DNA, 120 bp, synthetic construct; identical to SEQ ID NO: 42526
  source 1..120: mol_type = other DNA

SEQ ID NO: 72481 - DNA, 120 bp, synthetic construct; identical to SEQ ID NO: 42527
  source 1..120: mol_type = other DNA

SEQ ID NO: 72482 - DNA, 120 bp, synthetic construct; identical to SEQ ID NO: 12091
  source 1..120: mol_type = other DNA

SEQ ID NO: 72483 - DNA, 120 bp, synthetic construct; identical to SEQ ID NO: 42529
  source 1..120: mol_type = other DNA

SEQ ID NO: 72484 - DNA, 120 bp, synthetic construct; identical to SEQ ID NO: 42530
  source 1..120: mol_type = other DNA

SEQ ID NO: 72485 - DNA, 120 bp, synthetic construct; identical to SEQ ID NO: 42531
  source 1..120: mol_type = other DNA

SEQ ID NO: 72486 - DNA, 120 bp, synthetic construct; identical to SEQ ID NO: 12092
  source 1..120: mol_type = other DNA

SEQ ID NO: 72487 - DNA, 120 bp, synthetic construct; identical to SEQ ID NO: 42533
  source 1..120: mol_type = other DNA

SEQ ID NO: 72488 - DNA, 120 bp, synthetic construct; identical to SEQ ID NO: 42534
  source 1..120: mol_type = other DNA

SEQ ID NO: 72489 - DNA, 120 bp, synthetic construct; identical to SEQ ID NO: 42535
  source 1..120: mol_type = other DNA

SEQ ID NO: 72490 - DNA, 120 bp, synthetic construct; identical to SEQ ID NO: 12093
  source 1..120: mol_type = other DNA

SEQ ID NO: 72491 - DNA, 120 bp, synthetic construct; identical to SEQ ID NO: 42537
  source 1..120: mol_type = other DNA

SEQ ID NO: 72492 - DNA, 120 bp, synthetic construct; identical to SEQ ID NO: 42538
  source 1..120: mol_type = other DNA

SEQ ID NO: 72493 - DNA, 120 bp, synthetic construct; identical to SEQ ID NO: 12094
  source 1..120: mol_type = other DNA

SEQ ID NO: 72494 - DNA, 120 bp, synthetic construct; identical to SEQ ID NO: 42540
  source 1..120: mol_type = other DNA

SEQ ID NO: 72495 - DNA, 120 bp, synthetic construct; identical to SEQ ID NO: 42541
  source 1..120: mol_type = other DNA

SEQ ID NO: 72496 - DNA, 120 bp, synthetic construct; identical to SEQ ID NO: 42542
  source 1..120: mol_type = other DNA

SEQ ID NO: 72497 - DNA, 120 bp, synthetic construct; identical to SEQ ID NO: 42543
  source 1..120: mol_type = other DNA

SEQ ID NO: 72498 - DNA, 120 bp, synthetic construct; identical to SEQ ID NO: 12095
  source 1..120: mol_type = other DNA

SEQ ID NO: 72499 - DNA, 120 bp, synthetic construct; identical to SEQ ID NO: 42545
  source 1..120: mol_type = other DNA

SEQ ID NO: 72500 - DNA, 120 bp, synthetic construct; identical to SEQ ID NO: 42546
  source 1..120: mol_type = other DNA

SEQ ID NO: 72501 - DNA, 120 bp, synthetic construct; identical to SEQ ID NO: 12096
  source 1..120: mol_type = other DNA

SEQ ID NO: 72502 - DNA, 120 bp, synthetic construct; identical to SEQ ID NO: 42548
  source 1..120: mol_type = other DNA

SEQ ID NO: 72503 - DNA, 120 bp, synthetic construct; identical to SEQ ID NO: 42549
  source 1..120: mol_type = other DNA

SEQ ID NO: 72504 - DNA, 120 bp, synthetic construct; identical to SEQ ID NO: 42550
  source 1..120: mol_type = other DNA

SEQ ID NO: 72505 - DNA, 120 bp, synthetic construct; identical to SEQ ID NO: 42551
  source 1..120: mol_type = other DNA

SEQ ID NO: 72506 - DNA, 120 bp, synthetic construct; identical to SEQ ID NO: 12097
  source 1..120: mol_type = other DNA

SEQ ID NO: 72507 - DNA, 120 bp, synthetic construct; identical to SEQ ID NO: 42553
  source 1..120: mol_type = other DNA

SEQ ID NO: 72508 - DNA, 120 bp, synthetic construct; identical to SEQ ID NO: 42554
  source 1..120: mol_type = other DNA

SEQ ID NO: 72509 - DNA, 120 bp, synthetic construct; identical to SEQ ID NO: 42555
  source 1..120: mol_type = other DNA

SEQ ID NO: 72510 - DNA, 120 bp, synthetic construct; identical to SEQ ID NO: 12098
  source 1..120: mol_type = other DNA

SEQ ID NO: 72511 - DNA, 120 bp, synthetic construct; identical to SEQ ID NO: 42557
  source 1..120: mol_type = other DNA

SEQ ID NO: 72512 - DNA, 120 bp, synthetic construct; identical to SEQ ID NO: 42558
  source 1..120: mol_type = other DNA

SEQ ID NO: 72513 - DNA, 120 bp, synthetic construct; identical to SEQ ID NO: 42559
  source 1..120: mol_type = other DNA

SEQ ID NO: 72514 - DNA, 120 bp, synthetic construct; identical to SEQ ID NO: 12099
  source 1..120: mol_type = other DNA

SEQ ID NO: 72515 - DNA, 120 bp, synthetic construct; identical to SEQ ID NO: 42561
  source 1..120: mol_type = other DNA

SEQ ID NO: 72516 - DNA, 120 bp, synthetic construct; identical to SEQ ID NO: 42562
  source 1..120: mol_type = other DNA

SEQ ID NO: 72517 - DNA, 120 bp, synthetic construct; identical to SEQ ID NO: 42563
  source 1..120: mol_type = other DNA

SEQ ID NO: 72518 - DNA, 120 bp, synthetic construct; identical to SEQ ID NO: 12100
  source 1..120: mol_type = other DNA

SEQ ID NO: 72519 - DNA, 120 bp, synthetic construct; identical to SEQ ID NO: 42565
  source 1..120: mol_type = other DNA

SEQ ID NO: 72520 - DNA, 120 bp, synthetic construct; identical to SEQ ID NO: 42566
  source 1..120: mol_type = other DNA

SEQ ID NO: 72521 - DNA, 120 bp, synthetic construct; identical to SEQ ID NO: 42567
  source 1..120: mol_type = other DNA

SEQ ID NO: 72522 - DNA, 120 bp, synthetic construct; identical to SEQ ID NO: 12101
  source 1..120: mol_type = other DNA

SEQ ID NO: 72523 - DNA, 120 bp, synthetic construct; identical to SEQ ID NO: 42569
  source 1..120: mol_type = other DNA

SEQ ID NO: 72524 - DNA, 120 bp, synthetic construct; identical to SEQ ID NO: 42570
  source 1..120: mol_type = other DNA

SEQ ID NO: 72525 - DNA, 120 bp, synthetic construct; identical to SEQ ID NO: 42571
  source 1..120: mol_type = other DNA

SEQ ID NO: 72526 - DNA, 120 bp, synthetic construct; identical to SEQ ID NO: 42572
  source 1..120: mol_type = other DNA

SEQ ID NO: 72527 - DNA, 120 bp, synthetic construct; identical to SEQ ID NO: 42573
  source 1..120: mol_type = other DNA

SEQ ID NO: 72528 - DNA, 120 bp, synthetic construct; identical to SEQ ID NO: 12102
  source 1..120: mol_type = other DNA

SEQ ID NO: 72529 - DNA, 120 bp, synthetic construct; identical to SEQ ID NO: 42575
  source 1..120: mol_type = other DNA

SEQ ID NO: 72530 - DNA, 120 bp, synthetic construct; identical to SEQ ID NO: 42576
  source 1..120: mol_type = other DNA

SEQ ID NO: 72531 - DNA, 120 bp, synthetic construct; identical to SEQ ID NO: 42577
  source 1..120: mol_type = other DNA

SEQ ID NO: 72532 - DNA, 120 bp, synthetic construct; identical to SEQ ID NO: 12103
  source 1..120: mol_type = other DNA

SEQ ID NO: 72533 - DNA, 120 bp, synthetic construct; identical to SEQ ID NO: 42579
  source 1..120: mol_type = other DNA

SEQ ID NO: 72534 - DNA, 120 bp, synthetic construct; identical to SEQ ID NO: 42580
  source 1..120: mol_type = other DNA

SEQ ID NO: 72535 - DNA, 120 bp, synthetic construct; identical to SEQ ID NO: 42581
  source 1..120: mol_type = other DNA

SEQ ID NO: 72536 - DNA, 120 bp, synthetic construct; identical to SEQ ID NO: 12104
  source 1..120: mol_type = other DNA

SEQ ID NO: 72537 - DNA, 120 bp, synthetic construct; identical to SEQ ID NO: 42583
  source 1..120: mol_type = other DNA

SEQ ID NO: 72538 - DNA, 120 bp, synthetic construct; identical to SEQ ID NO: 42584
  source 1..120: mol_type = other DNA

SEQ ID NO: 72539 - DNA, 120 bp, synthetic construct; identical to SEQ ID NO: 12105
  source 1..120: mol_type = other DNA

SEQ ID NO: 72540 - DNA, 120 bp, synthetic construct; identical to SEQ ID NO: 42586
  source 1..120: mol_type = other DNA

SEQ ID NO: 72541 - DNA, 120 bp, synthetic construct; identical to SEQ ID NO: 42587
  source 1..120: mol_type = other DNA

SEQ ID NO: 72542 - DNA, 120 bp, synthetic construct; identical to SEQ ID NO: 42588
  source 1..120: mol_type = other DNA

SEQ ID NO: 72543 - DNA, 120 bp, synthetic construct; identical to SEQ ID NO: 12106
  source 1..120: mol_type = other DNA

SEQ ID NO: 72544 - DNA, 120 bp, synthetic construct; identical to SEQ ID NO: 42590
  source 1..120: mol_type = other DNA

SEQ ID NO: 72545 - DNA, 120 bp, synthetic construct; identical to SEQ ID NO: 42591
  source 1..120: mol_type = other DNA

SEQ ID NO: 72546 - DNA, 120 bp, synthetic construct; identical to SEQ ID NO: 42592
  source 1..120: mol_type = other DNA

SEQ ID NO: 72547 - DNA, 120 bp, synthetic construct; identical to SEQ ID NO: 12107
  source 1..120: mol_type = other DNA

SEQ ID NO: 72548 - DNA, 120 bp, synthetic construct; identical to SEQ ID NO: 42594
  source 1..120: mol_type = other DNA

SEQ ID NO: 72549 - DNA, 120 bp, synthetic construct; identical to SEQ ID NO: 42595
  source 1..120: mol_type = other DNA

SEQ ID NO: 72550 - DNA, 120 bp, synthetic construct; identical to SEQ ID NO: 42596
  source 1..120: mol_type = other DNA

SEQ ID NO: 72551 - DNA, 120 bp, synthetic construct; identical to SEQ ID NO: 12108
  source 1..120: mol_type = other DNA

SEQ ID NO: 72552 - DNA, 120 bp, synthetic construct; identical to SEQ ID NO: 42598
  source 1..120: mol_type = other DNA

SEQ ID NO: 72553 - DNA, 120 bp, synthetic construct; identical to SEQ ID NO: 42599
  source 1..120: mol_type = other DNA

SEQ ID NO: 72554 - DNA, 120 bp, synthetic construct; identical to SEQ ID NO: 42600
  source 1..120: mol_type = other DNA

SEQ ID NO: 72555 - DNA, 120 bp, synthetic construct; identical to SEQ ID NO: 42601
  source 1..120: mol_type = other DNA

SEQ ID NO: 72556 - DNA, 120 bp, synthetic construct; identical to SEQ ID NO: 12109
  source 1..120: mol_type = other DNA

SEQ ID NO: 72557 - DNA, 120 bp, synthetic construct; identical to SEQ ID NO: 42603
  source 1..120: mol_type = other DNA

SEQ ID NO: 72558 - DNA, 120 bp, synthetic construct; identical to SEQ ID NO: 42604
  source 1..120: mol_type = other DNA

SEQ ID NO: 72559 - DNA, 120 bp, synthetic construct; identical to SEQ ID NO: 42605
  source 1..120: mol_type = other DNA

SEQ ID NO: 72560 - DNA, 120 bp, synthetic construct; identical to SEQ ID NO: 12110
  source 1..120: mol_type = other DNA

SEQ ID NO: 72561 - DNA, 120 bp, synthetic construct; identical to SEQ ID NO: 42607
  source 1..120: mol_type = other DNA

SEQ ID NO: 72562 - DNA, 120 bp, synthetic construct; identical to SEQ ID NO: 42608
  source 1..120: mol_type = other DNA

SEQ ID NO: 72563 - DNA, 120 bp, synthetic construct; identical to SEQ ID NO: 12111
  source 1..120: mol_type = other DNA

SEQ ID NO: 72564 - DNA, 120 bp, synthetic construct; identical to SEQ ID NO: 42610
  source 1..120: mol_type = other DNA

SEQ ID NO: 72565 - DNA, 120 bp, synthetic construct; identical to SEQ ID NO: 42611
  source 1..120: mol_type = other DNA

SEQ ID NO: 72566 - DNA, 120 bp, synthetic construct; identical to SEQ ID NO: 42612
  source 1..120: mol_type = other DNA

SEQ ID NO: 72567 - DNA, 120 bp, synthetic construct; identical to SEQ ID NO: 12112
  source 1..120: mol_type = other DNA

SEQ ID NO: 72568 - DNA, 120 bp, synthetic construct; identical to SEQ ID NO: 42614
  source 1..120: mol_type = other DNA

SEQ ID NO: 72569 - DNA, 120 bp, synthetic construct; identical to SEQ ID NO: 42615
  source 1..120: mol_type = other DNA

SEQ ID NO: 72570 - DNA, 120 bp, synthetic construct; identical to SEQ ID NO: 42616
  source 1..120: mol_type = other DNA

SEQ ID NO: 72571 - DNA, 120 bp, synthetic construct; identical to SEQ ID NO: 42617
  source 1..120: mol_type = other DNA

SEQ ID NO: 72572 - DNA, 120 bp, synthetic construct; identical to SEQ ID NO: 12113
  source 1..120: mol_type = other DNA

SEQ ID NO: 72573 - DNA, 120 bp, synthetic construct; identical to SEQ ID NO: 42619
  source 1..120: mol_type = other DNA

SEQ ID NO: 72574 - DNA, 120 bp, synthetic construct; identical to SEQ ID NO: 42620
  source 1..120: mol_type = other DNA

SEQ ID NO: 72575 - DNA, 120 bp, synthetic construct; identical to SEQ ID NO: 42621
  source 1..120: mol_type = other DNA

SEQ ID NO: 72576 - DNA, 120 bp, synthetic construct; identical to SEQ ID NO: 12114
  source 1..120: mol_type = other DNA

SEQ ID NO: 72577 - DNA, 120 bp, synthetic construct; identical to SEQ ID NO: 42623
  source 1..120: mol_type = other DNA

SEQ ID NO: 72578 - DNA, 120 bp, synthetic construct; identical to SEQ ID NO: 42624
  source 1..120: mol_type = other DNA

SEQ ID NO: 72579 - DNA, 120 bp, synthetic construct; identical to SEQ ID NO: 12115
  source 1..120: mol_type = other DNA

SEQ ID NO: 72580 - DNA, 120 bp, synthetic construct; identical to SEQ ID NO: 42626
  source 1..120: mol_type = other DNA

SEQ ID NO: 72581 - DNA, 120 bp, synthetic construct; identical to SEQ ID NO: 42627
  source 1..120: mol_type = other DNA

SEQ ID NO: 72582 - DNA, 120 bp, synthetic construct; identical to SEQ ID NO: 42628
  source 1..120: mol_type = other DNA

SEQ ID NO: 72583 - DNA, 120 bp, synthetic construct; identical to SEQ ID NO: 12116
  source 1..120: mol_type = other DNA

SEQ ID NO: 72584 - DNA, 120 bp, synthetic construct; identical to SEQ ID NO: 42630
  source 1..120: mol_type = other DNA

SEQ ID NO: 72585 - DNA, 120 bp, synthetic construct; identical to SEQ ID NO: 42631
  source 1..120: mol_type = other DNA

SEQ ID NO: 72586 - DNA, 120 bp, synthetic construct; identical to SEQ ID NO: 42632
  source 1..120: mol_type = other DNA

SEQ ID NO: 72587 - DNA, 120 bp, synthetic construct; identical to SEQ ID NO: 42633
  source 1..120: mol_type = other DNA

SEQ ID NO: 72588 - DNA, 120 bp, synthetic construct; identical to SEQ ID NO: 12117
  source 1..120: mol_type = other DNA

SEQ ID NO: 72589 - DNA, 120 bp, synthetic construct; identical to SEQ ID NO: 42635
  source 1..120: mol_type = other DNA

SEQ ID NO: 72590 - DNA, 120 bp, synthetic construct; identical to SEQ ID NO: 42636
  source 1..120: mol_type = other DNA

SEQ ID NO: 72591 - DNA, 120 bp, synthetic construct; identical to SEQ ID NO: 12118
  source 1..120: mol_type = other DNA

SEQ ID NO: 72592 - DNA, 120 bp, synthetic construct; identical to SEQ ID NO: 42638
  source 1..120: mol_type = other DNA

SEQ ID NO: 72593 - DNA, 120 bp, synthetic construct; identical to SEQ ID NO: 42639
  source 1..120: mol_type = other DNA

SEQ ID NO: 72594 - DNA, 120 bp, synthetic construct; identical to SEQ ID NO: 42640
  source 1..120: mol_type = other DNA

SEQ ID NO: 72595 - DNA, 120 bp, synthetic construct; identical to SEQ ID NO: 42641
  source 1..120: mol_type = other DNA

SEQ ID NO: 72596 - DNA, 120 bp, synthetic construct; identical to SEQ ID NO: 12119
  source 1..120: mol_type = other DNA

SEQ ID NO: 72597 - DNA, 120 bp, synthetic construct; identical to SEQ ID NO: 42643
  source 1..120: mol_type = other DNA

SEQ ID NO: 72598 - DNA, 120 bp, synthetic construct; identical to SEQ ID NO: 42644
  source 1..120: mol_type = other DNA

SEQ ID NO: 72599 - DNA, 120 bp, synthetic construct; identical to SEQ ID NO: 42645
  source 1..120: mol_type = other DNA

SEQ ID NO: 72600 - DNA, 120 bp, synthetic construct; identical to SEQ ID NO: 12120
  source 1..120: mol_type = other DNA

SEQ ID NO: 72601 - DNA, 120 bp, synthetic construct; identical to SEQ ID NO: 42647
  source 1..120: mol_type = other DNA

SEQ ID NO: 72602 - DNA, 120 bp, synthetic construct; identical to SEQ ID NO: 42648
  source 1..120: mol_type = other DNA

SEQ ID NO: 72603 - DNA, 120 bp, synthetic construct; identical to SEQ ID NO: 42649
  source 1..120: mol_type = other DNA

SEQ ID NO: 72604 - DNA, 120 bp, synthetic construct; identical to SEQ ID NO: 12121
  source 1..120: mol_type = other DNA

SEQ ID NO: 72605 - DNA, 120 bp, synthetic construct; identical to SEQ ID NO: 42651
  source 1..120: mol_type = other DNA

SEQ ID NO: 72606 - DNA, 120 bp, synthetic construct; identical to SEQ ID NO: 42652
  source 1..120: mol_type = other DNA

SEQ ID NO: 72607 - DNA, 120 bp, synthetic construct; identical to SEQ ID NO: 42653
  source 1..120: mol_type = other DNA

SEQ ID NO: 72608 - DNA, 120 bp, synthetic construct; identical to SEQ ID NO: 12122
  source 1..120: mol_type = other DNA

SEQ ID NO: 72609 - DNA, 120 bp, synthetic construct; identical to SEQ ID NO: 42655
  source 1..120: mol_type = other DNA

SEQ ID NO: 72610 - DNA, 120 bp, synthetic construct; identical to SEQ ID NO: 42656
  source 1..120: mol_type = other DNA

SEQ ID NO: 72611 - DNA, 120 bp, synthetic construct; identical to SEQ ID NO: 42657
  source 1..120: mol_type = other DNA

SEQ ID NO: 72612 - DNA, 120 bp, synthetic construct; identical to SEQ ID NO: 12123
  source 1..120: mol_type = other DNA

SEQ ID NO: 72613 - DNA, 120 bp, synthetic construct; identical to SEQ ID NO: 42659
  source 1..120: mol_type = other DNA

SEQ ID NO: 72614 - DNA, 120 bp, synthetic construct; identical to SEQ ID NO: 42660
  source 1..120: mol_type = other DNA

SEQ ID NO: 72615 - DNA, 120 bp, synthetic construct; identical to SEQ ID NO: 42661
  source 1..120: mol_type = other DNA

SEQ ID NO: 72616 - DNA, 120 bp, synthetic construct; identical to SEQ ID NO: 12124
  source 1..120: mol_type = other DNA

SEQ ID NO: 72617 - DNA, 120 bp, synthetic construct; identical to SEQ ID NO: 42663
  source 1..120: mol_type = other DNA

SEQ ID NO: 72618 - DNA, 120 bp, synthetic construct; identical to SEQ ID NO: 42664
  source 1..120: mol_type = other DNA

SEQ ID NO: 72619 - DNA, 120 bp, synthetic construct; identical to SEQ ID NO: 42665
  source 1..120: mol_type = other DNA

SEQ ID NO: 72620 - DNA, 120 bp, synthetic construct; identical to SEQ ID NO: 42666
  source 1..120: mol_type = other DNA

SEQ ID NO: 72621 - DNA, 120 bp, synthetic construct; identical to SEQ ID NO: 12125
  source 1..120: mol_type = other DNA

SEQ ID NO: 72622 - DNA, 120 bp, synthetic construct; identical to SEQ ID NO: 42668
  source 1..120: mol_type = other DNA

SEQ ID NO: 72623 - DNA, 120 bp, synthetic construct; identical to SEQ ID NO: 42669
  source 1..120: mol_type = other DNA

SEQ ID NO: 72624 - DNA, 120 bp, synthetic construct; identical to SEQ ID NO: 12126
  source 1..120: mol_type = other DNA

SEQ ID NO: 72625 - DNA, 120 bp, synthetic construct; identical to SEQ ID NO: 42671
  source 1..120: mol_type = other DNA

SEQ ID NO: 72626 - DNA, 120 bp, synthetic construct; identical to SEQ ID NO: 42672
  source 1..120: mol_type = other DNA

SEQ ID NO: 72627 - DNA, 120 bp, synthetic construct; identical to SEQ ID NO: 42673
  source 1..120: mol_type = other DNA

SEQ ID NO: 72628 - DNA, 120 bp, synthetic construct; identical to SEQ ID NO: 12127
  source 1..120: mol_type = other DNA

SEQ ID NO: 72629 - DNA, 120 bp, synthetic construct; identical to SEQ ID NO: 42675
  source 1..120: mol_type = other DNA

SEQ ID NO: 72630 - DNA, 120 bp, synthetic construct; identical to SEQ ID NO: 42676
  source 1..120: mol_type = other DNA

SEQ ID NO: 72631 - DNA, 120 bp, synthetic construct; identical to SEQ ID NO: 42677
  source 1..120: mol_type = other DNA

SEQ ID NO: 72632 - DNA, 120 bp, synthetic construct; identical to SEQ ID NO: 42678
  source 1..120: mol_type = other DNA

SEQ ID NO: 72633 - DNA, 120 bp, synthetic construct; identical to SEQ ID NO: 12128
  source 1..120: mol_type = other DNA

SEQ ID NO: 72634 - DNA, 120 bp, synthetic construct; identical to SEQ ID NO: 42680
  source 1..120: mol_type = other DNA

SEQ ID NO: 72635 - DNA, 120 bp, synthetic construct; identical to SEQ ID NO: 42681
  source 1..120: mol_type = other DNA

SEQ ID NO: 72636 - DNA, 120 bp, synthetic construct; identical to SEQ ID NO: 42682
  source 1..120: mol_type = other DNA

SEQ ID NO: 72637 - DNA, 120 bp, synthetic construct; identical to SEQ ID NO: 12129
  source 1..120: mol_type = other DNA

SEQ ID NO: 72638 - DNA, 120 bp, synthetic construct; identical to SEQ ID NO: 42684
  source 1..120: mol_type = other DNA

SEQ ID NO: 72639 - DNA, 120 bp, synthetic construct; identical to SEQ ID NO: 42685
  source 1..120: mol_type = other DNA

SEQ ID NO: 72640 - DNA, 120 bp, synthetic construct; identical to SEQ ID NO: 42686
  source 1..120: mol_type = other DNA

SEQ ID NO: 72641 - DNA, 120 bp, synthetic construct; identical to SEQ ID NO: 12130
  source 1..120: mol_type = other DNA

SEQ ID NO: 72642 - DNA, 120 bp, synthetic construct; identical to SEQ ID NO: 42688
  source 1..120: mol_type = other DNA

SEQ ID NO: 72643 - DNA, 120 bp, synthetic construct; identical to SEQ ID NO: 42689
  source 1..120: mol_type = other DNA

SEQ ID NO: 72644 - DNA, 120 bp, synthetic construct; identical to SEQ ID NO: 12131
  source 1..120: mol_type = other DNA

SEQ ID NO: 72645 - DNA, 120 bp, synthetic construct; identical to SEQ ID NO: 42691
  source 1..120: mol_type = other DNA

SEQ ID NO: 72646 - DNA, 120 bp, synthetic construct; identical to SEQ ID NO: 42692
  source 1..120: mol_type = other DNA

SEQ ID NO: 72647 - DNA, 120 bp, synthetic construct; identical to SEQ ID NO: 42693
  source 1..120: mol_type = other DNA

SEQ ID NO: 72648 - DNA, 120 bp, synthetic construct; identical to SEQ ID NO: 42694
  source 1..120: mol_type = other DNA

SEQ ID NO: 72649 - DNA, 120 bp, synthetic construct; identical to SEQ ID NO: 12132
  source 1..120: mol_type = other DNA

SEQ ID NO: 72650 - DNA, 120 bp, synthetic construct; identical to SEQ ID NO: 42696
  source 1..120: mol_type = other DNA

SEQ ID NO: 72651 - DNA, 120 bp, synthetic construct; identical to SEQ ID NO: 42697
  source 1..120: mol_type = other DNA

SEQ ID NO: 72652 - DNA, 120 bp, synthetic construct; identical to SEQ ID NO: 42698
  source 1..120: mol_type = other DNA

SEQ ID NO: 72653 - DNA, 120 bp, synthetic construct; identical to SEQ ID NO: 12133
  source 1..120: mol_type = other DNA

SEQ ID NO: 72654 - DNA, 120 bp, synthetic construct; identical to SEQ ID NO: 42700
  source 1..120: mol_type = other DNA

SEQ ID NO: 72655 - DNA, 120 bp, synthetic construct; identical to SEQ ID NO: 42701
  source 1..120: mol_type = other DNA

SEQ ID NO: 72656 - DNA, 120 bp, synthetic construct; identical to SEQ ID NO: 12134
  source 1..120: mol_type = other DNA

SEQ ID NO: 72657 - DNA, 120 bp, synthetic construct; identical to SEQ ID NO: 42703
  source 1..120: mol_type = other DNA

SEQ ID NO: 72658 - DNA, 120 bp, synthetic construct; identical to SEQ ID NO: 42704
  source 1..120: mol_type = other DNA

SEQ ID NO: 72659 - DNA, 120 bp, synthetic construct; identical to SEQ ID NO: 42705
  source 1..120: mol_type = other DNA

SEQ ID NO: 72660 - DNA, 120 bp, synthetic construct; identical to SEQ ID NO: 42706
  source 1..120: mol_type = other DNA

SEQ ID NO: 72661 - DNA, 120 bp, synthetic construct; identical to SEQ ID NO: 12135
  source 1..120: mol_type = other DNA

SEQ ID NO: 72662 - DNA, 120 bp, synthetic construct; identical to SEQ ID NO: 42708
  source 1..120: mol_type = other DNA

SEQ ID NO: 72663 - DNA, 120 bp, synthetic construct; identical to SEQ ID NO: 42709
  source 1..120: mol_type = other DNA

SEQ ID NO: 72664 - DNA, 120 bp, synthetic construct; identical to SEQ ID NO: 12136
  source 1..120: mol_type = other DNA

SEQ ID NO: 72665 - DNA, 120 bp, synthetic construct; identical to SEQ ID NO: 42711
  source 1..120: mol_type = other DNA

SEQ ID NO: 72666 - DNA, 120 bp, synthetic construct; identical to SEQ ID NO: 42712
  source 1..120: mol_type = other DNA

SEQ ID NO: 72667 - DNA, 120 bp, synthetic construct; identical to SEQ ID NO: 42713
  source 1..120: mol_type = other DNA

SEQ ID NO: 72668 - DNA, 120 bp, synthetic construct; identical to SEQ ID NO: 42714
  source 1..120: mol_type = other DNA

SEQ ID NO: 72669 - DNA, 120 bp, synthetic construct; identical to SEQ ID NO: 12137
  source 1..120: mol_type = other DNA

SEQ ID NO: 72670 - DNA, 120 bp, synthetic construct; identical to SEQ ID NO: 42716
  source 1..120: mol_type = other DNA

SEQ ID NO: 72671 - DNA, 120 bp, synthetic construct; identical to SEQ ID NO: 42717
  source 1..120: mol_type = other DNA

SEQ ID NO: 72672 - DNA, 120 bp, synthetic construct; identical to SEQ ID NO: 12138
  source 1..120: mol_type = other DNA

SEQ ID NO: 72673 - DNA, 120 bp, synthetic construct; identical to SEQ ID NO: 42719
  source 1..120: mol_type = other DNA

SEQ ID NO: 72674 - DNA, 120 bp, synthetic construct; identical to SEQ ID NO: 42720
  source 1..120: mol_type = other DNA

SEQ ID NO: 72675 - DNA, 120 bp, synthetic construct; identical to SEQ ID NO: 42721
  source 1..120: mol_type = other DNA

SEQ ID NO: 72676 - DNA, 120 bp, synthetic construct; identical to SEQ ID NO: 12139
  source 1..120: mol_type = other DNA

SEQ ID NO: 72677 - DNA, 120 bp, synthetic construct; identical to SEQ ID NO: 42723
  source 1..120: mol_type = other DNA

SEQ ID NO: 72678 - DNA, 120 bp, synthetic construct; identical to SEQ ID NO: 42724
  source 1..120: mol_type = other DNA

SEQ ID NO: 72679 - DNA, 120 bp, synthetic construct; identical to SEQ ID NO: 42725
  source 1..120: mol_type = other DNA

SEQ ID NO: 72680 - DNA, 120 bp, synthetic construct; identical to SEQ ID NO: 12140
  source 1..120: mol_type = other DNA

SEQ ID NO: 72681 - DNA, 120 bp, synthetic construct; identical to SEQ ID NO: 42727
  source 1..120: mol_type = other DNA

SEQ ID NO: 72682 - DNA, 120 bp, synthetic construct; identical to SEQ ID NO: 42728
  source 1..120: mol_type = other DNA

SEQ ID NO: 72683 - DNA, 120 bp, synthetic construct; identical to SEQ ID NO: 42729
  source 1..120: mol_type = other DNA

SEQ ID NO: 72684 - DNA, 120 bp, synthetic construct; identical to SEQ ID NO: 12141
  source 1..120: mol_type = other DNA

SEQ ID NO: 72685 - DNA, 120 bp, synthetic construct; identical to SEQ ID NO: 42731
  source 1..120: mol_type = other DNA

SEQ ID NO: 72686 - DNA, 120 bp, synthetic construct; identical to SEQ ID NO: 42732
  source 1..120: mol_type = other DNA

SEQ ID NO: 72687 - DNA, 120 bp, synthetic construct; identical to SEQ ID NO: 42733
  source 1..120: mol_type = other DNA

SEQ ID NO: 72688 - DNA, 120 bp, synthetic construct; identical to SEQ ID NO: 12142
  source 1..120: mol_type = other DNA

SEQ ID NO: 72689 - DNA, 120 bp, synthetic construct; identical to SEQ ID NO: 42735
  source 1..120: mol_type = other DNA

SEQ ID NO: 72690 - DNA, 120 bp, synthetic construct; identical to SEQ ID NO: 42736
  source 1..120: mol_type = other DNA

SEQ ID NO: 72691 - DNA, 120 bp, synthetic construct; identical to SEQ ID NO: 42737
  source 1..120: mol_type = other DNA

SEQ ID NO: 72692 - DNA, 120 bp, synthetic construct; identical to SEQ ID NO: 42738
  source 1..120: mol_type = other DNA

SEQ ID NO: 72693 - DNA, 120 bp, synthetic construct; identical to SEQ ID NO: 12143
  source 1..120: mol_type = other DNA

SEQ ID NO: 72694 - DNA, 120 bp, synthetic construct; identical to SEQ ID NO: 42740
  source 1..120: mol_type = other DNA

SEQ ID NO: 72695 - DNA, 120 bp, synthetic construct; identical to SEQ ID NO: 42741
  source 1..120: mol_type = other DNA

SEQ ID NO: 72696 - DNA, 120 bp, synthetic construct; identical to SEQ ID NO: 42742
  source 1..120: mol_type = other DNA

SEQ ID NO: 72697 - DNA, 120 bp, synthetic construct; identical to SEQ ID NO: 12144
  source 1..120: mol_type = other DNA

SEQ ID NO: 72698 - DNA, 120 bp, synthetic construct; identical to SEQ ID NO: 42744
  source 1..120: mol_type = other DNA

SEQ ID NO: 72699 - DNA, 120 bp, synthetic construct; identical to SEQ ID NO: 42745
  source 1..120: mol_type = other DNA

SEQ ID NO: 72700 - DNA, 120 bp, synthetic construct; identical to SEQ ID NO: 42746
  source 1..120: mol_type = other DNA

SEQ ID NO: 72701 - DNA, 120 bp, synthetic construct; identical to SEQ ID NO: 12145
  source 1..120: mol_type = other DNA

SEQ ID NO: 72702 - DNA, 120 bp, synthetic construct; identical to SEQ ID NO: 42748
  source 1..120: mol_type = other DNA

SEQ ID NO: 72703 - DNA, 120 bp, synthetic construct; identical to SEQ ID NO: 42749
  source 1..120: mol_type = other DNA

SEQ ID NO: 72704 - DNA, 120 bp, synthetic construct; identical to SEQ ID NO: 12146
  source 1..120: mol_type = other DNA

SEQ ID NO: 72705 - DNA, 120 bp, synthetic construct; identical to SEQ ID NO: 42751
  source 1..120: mol_type = other DNA

SEQ ID NO: 72706 - DNA, 120 bp, synthetic construct; identical to SEQ ID NO: 42752
  source 1..120: mol_type = other DNA

SEQ ID NO: 72707 - DNA, 120 bp, synthetic construct; identical to SEQ ID NO: 42753
  source 1..120: mol_type = other DNA

SEQ ID NO: 72708 - DNA, 120 bp, synthetic construct; identical to SEQ ID NO: 42754
  source 1..120: mol_type = other DNA

SEQ ID NO: 72709 - DNA, 120 bp, synthetic construct; identical to SEQ ID NO: 12147
  source 1..120: mol_type = other DNA

SEQ ID NO: 72710 - DNA, 120 bp, synthetic construct; identical to SEQ ID NO: 42756
  source 1..120: mol_type = other DNA

SEQ ID NO: 72711 - DNA, 120 bp, synthetic construct; identical to SEQ ID NO: 42757
  source 1..120: mol_type = other DNA

SEQ ID NO: 72712 - DNA, 120 bp, synthetic construct; identical to SEQ ID NO: 42758
  source 1..120: mol_type = other DNA

SEQ ID NO: 72713 - DNA, 120 bp, synthetic construct; identical to SEQ ID NO: 12148
  source 1..120: mol_type = other DNA

SEQ ID NO: 72714 - DNA, 120 bp, synthetic construct; identical to SEQ ID NO: 42760
  source 1..120: mol_type = other DNA

SEQ ID NO: 72715 - DNA, 120 bp, synthetic construct; identical to SEQ ID NO: 42761
  source 1..120: mol_type = other DNA

SEQ ID NO: 72716 - DNA, 120 bp, synthetic construct; identical to SEQ ID NO: 42762
  source 1..120: mol_type = other DNA

SEQ ID NO: 72717 - DNA, 120 bp, synthetic construct; identical to SEQ ID NO: 12149
  source 1..120: mol_type = other DNA

SEQ ID NO: 72718 - DNA, 120 bp, synthetic construct; identical to SEQ ID NO: 42764
  source 1..120: mol_type = other DNA

SEQ ID NO: 72719 - DNA, 120 bp, synthetic construct; identical to SEQ ID NO: 42765
  source 1..120: mol_type = other DNA

SEQ ID NO: 72720 - DNA, 120 bp, synthetic construct; identical to SEQ ID NO: 12150
  source 1..120: mol_type = other DNA

SEQ ID NO: 72721 - DNA, 120 bp, synthetic construct; identical to SEQ ID NO: 42767
  source 1..120: mol_type = other DNA

SEQ ID NO: 72722 - DNA, 120 bp, synthetic construct; identical to SEQ ID NO: 42768
  source 1..120: mol_type = other DNA

SEQ ID NO: 72723 - DNA, 120 bp, synthetic construct; identical to SEQ ID NO: 42769
  source 1..120: mol_type = other DNA

SEQ ID NO: 72724 - DNA, 120 bp, synthetic construct; identical to SEQ ID NO: 42770
  source 1..120: mol_type = other DNA

SEQ ID NO: 72725 - DNA, 120 bp, synthetic construct; identical to SEQ ID NO: 12151
  source 1..120: mol_type = other DNA

SEQ ID NO: 72726 - DNA, 120 bp, synthetic construct; identical to SEQ ID NO: 42772
  source 1..120: mol_type = other DNA

SEQ ID NO: 72727 - DNA, 120 bp, synthetic construct; identical to SEQ ID NO: 42773
  source 1..120: mol_type = other DNA

SEQ ID NO: 72728 - DNA, 120 bp, synthetic construct; identical to SEQ ID NO: 42774
  source 1..120: mol_type = other DNA

SEQ ID NO: 72729 - DNA, 120 bp, synthetic construct; identical to SEQ ID NO: 12152
  source 1..120: mol_type = other DNA

SEQ ID NO: 72730 - DNA, 120 bp, synthetic construct; identical to SEQ ID NO: 42776
  source 1..120: mol_type = other DNA

SEQ ID NO: 72731 - DNA, 120 bp, synthetic construct; identical to SEQ ID NO: 42777
  source 1..120: mol_type = other DNA

SEQ ID NO: 72732 - DNA, 120 bp, synthetic construct; identical to SEQ ID NO: 42778
  source 1..120: mol_type = other DNA

SEQ ID NO: 72733 - DNA, 120 bp, synthetic construct; identical to SEQ ID NO: 12153
  source 1..120: mol_type = other DNA

SEQ ID NO: 72734 - DNA, 120 bp, synthetic construct; identical to SEQ ID NO: 42780
  source 1..120: mol_type = other DNA

SEQ ID NO: 72735 - DNA, 120 bp, synthetic construct; identical to SEQ ID NO: 42781
  source 1..120: mol_type = other DNA

SEQ ID NO: 72736 - DNA, 120 bp, synthetic construct; identical to SEQ ID NO: 42782
  source 1..120: mol_type = other DNA

SEQ ID NO: 72737 - DNA, 120 bp, synthetic construct; identical to SEQ ID NO: 42783
  source 1..120: mol_type = other DNA

SEQ ID NO: 72738 - DNA, 120 bp, synthetic construct; identical to SEQ ID NO: 12154
  source 1..120: mol_type = other DNA

SEQ ID NO: 72739 - DNA, 120 bp, synthetic construct; identical to SEQ ID NO: 42785
  source 1..120: mol_type = other DNA

SEQ ID NO: 72740 - DNA, 120 bp, synthetic construct; identical to SEQ ID NO: 42786
  source 1..120: mol_type = other DNA

SEQ ID NO: 72741 - DNA, 120 bp, synthetic construct; identical to SEQ ID NO: 42787
  source 1..120: mol_type = other DNA

SEQ ID NO: 72742 - DNA, 120 bp, synthetic construct; identical to SEQ ID NO: 12155
  source 1..120: mol_type = other DNA

SEQ ID NO: 72743 - DNA, 120 bp, synthetic construct; identical to SEQ ID NO: 42789
  source 1..120: mol_type = other DNA

SEQ ID NO: 72744 - DNA, 120 bp, synthetic construct; identical to SEQ ID NO: 42790
  source 1..120: mol_type = other DNA

SEQ ID NO: 72745 - DNA, 120 bp, synthetic construct; identical to SEQ ID NO: 42791
  source 1..120: mol_type = other DNA

SEQ ID NO: 72746 - DNA, 120 bp, synthetic construct; identical to SEQ ID NO: 12156
  source 1..120: mol_type = other DNA

SEQ ID NO: 72747 - DNA, 120 bp, synthetic construct; identical to SEQ ID NO: 42793
  source 1..120: mol_type = other DNA

SEQ ID NO: 72748 - DNA, 120 bp, synthetic construct; identical to SEQ ID NO: 42794
  source 1..120: mol_type = other DNA

SEQ ID NO: 72749 - DNA, 120 bp, synthetic construct; identical to SEQ ID NO: 42795
  source 1..120: mol_type = other DNA

SEQ ID NO: 72750 - DNA, 120 bp, synthetic construct; identical to SEQ ID NO: 42796
  source 1..120: mol_type = other DNA

SEQ ID NO: 72751 - DNA, 120 bp, synthetic construct; identical to SEQ ID NO: 12157
  source 1..120: mol_type = other DNA

SEQ ID NO: 72752 - DNA, 120 bp, synthetic construct; identical to SEQ ID NO: 42798
  source 1..120: mol_type = other DNA

SEQ ID NO: 72753 - DNA, 120 bp, synthetic construct; identical to SEQ ID NO: 42799
  source 1..120: mol_type = other DNA

SEQ ID NO: 72754 - DNA, 120 bp, synthetic construct; identical to SEQ ID NO: 42800
  source 1..120: mol_type = other DNA

SEQ ID NO: 72755 - DNA, 120 bp, synthetic construct; identical to SEQ ID NO: 12158
  source 1..120: mol_type = other DNA

SEQ ID NO: 72756 - DNA, 120 bp, synthetic construct; identical to SEQ ID NO: 42802
  source 1..120: mol_type = other DNA

SEQ ID NO: 72757 - DNA, 120 bp, synthetic construct; identical to SEQ ID NO: 42803
  source 1..120: mol_type = other DNA

SEQ ID NO: 72758 - DNA, 120 bp, synthetic construct; identical to SEQ ID NO: 12159
  source 1..120: mol_type = other DNA

SEQ ID NO: 72759 - DNA, 120 bp, synthetic construct; identical to SEQ ID NO: 42805
  source 1..120: mol_type = other DNA

SEQ ID NO: 72760 - DNA, 120 bp, synthetic construct; identical to SEQ ID NO: 42806
  source 1..120: mol_type = other DNA

SEQ ID NO: 72761 - DNA, 120 bp, synthetic construct; identical to SEQ ID NO: 42807
  source 1..120: mol_type = other DNA

SEQ ID NO: 72762 - DNA, 120 bp, synthetic construct; identical to SEQ ID NO: 42808
  source 1..120: mol_type = other DNA

SEQ ID NO: 72763 - DNA, 120 bp, synthetic construct; identical to SEQ ID NO: 12160
  source 1..120: mol_type = other DNA

SEQ ID NO: 72764 - DNA, 120 bp, synthetic construct; identical to SEQ ID NO: 42810
  source 1..120: mol_type = other DNA

SEQ ID NO: 72765 - DNA, 120 bp, synthetic construct; identical to SEQ ID NO: 42811
  source 1..120: mol_type = other DNA

SEQ ID NO: 72766 - DNA, 120 bp, synthetic construct; identical to SEQ ID NO: 12161
  source 1..120: mol_type = other DNA

SEQ ID NO: 72767 - DNA, 120 bp, synthetic construct; identical to SEQ ID NO: 42813
  source 1..120: mol_type = other DNA

SEQ ID NO: 72768 - DNA, 120 bp, synthetic construct; identical to SEQ ID NO: 42814
  source 1..120: mol_type = other DNA

SEQ ID NO: 72769 - DNA, 120 bp, synthetic construct; identical to SEQ ID NO: 42815
  source 1..120: mol_type = other DNA

SEQ ID NO: 72770 - DNA, 120 bp, synthetic construct; identical to SEQ ID NO: 42816
  source 1..120: mol_type = other DNA

SEQ ID NO: 72771 - DNA, 120 bp, synthetic construct; identical to SEQ ID NO: 12162
  source 1..120: mol_type = other DNA

SEQ ID NO: 72772 - DNA, 120 bp, synthetic construct; identical to SEQ ID NO: 42818
  source 1..120: mol_type = other DNA

SEQ ID NO: 72773 - DNA, 120 bp, synthetic construct; identical to SEQ ID NO: 42819
  source 1..120: mol_type = other DNA

SEQ ID NO: 72774 - DNA, 120 bp, synthetic construct; identical to SEQ ID NO: 42820
  source 1..120: mol_type = other DNA

SEQ ID NO: 72775 - DNA, 120 bp, synthetic construct; identical to SEQ ID NO: 12163
  source 1..120: mol_type = other DNA

SEQ ID NO: 72776 - DNA, 120 bp, synthetic construct; identical to SEQ ID NO: 42822
  source 1..120: mol_type = other DNA

SEQ ID NO: 72777 - DNA, 120 bp, synthetic construct; identical to SEQ ID NO: 42823
  source 1..120: mol_type = other DNA

SEQ ID NO: 72778 - DNA, 120 bp, synthetic construct; identical to SEQ ID NO: 12164
  source 1..120: mol_type = other DNA

SEQ ID NO: 72779 - DNA, 120 bp, synthetic construct; identical to SEQ ID NO: 42825
  source 1..120: mol_type = other DNA

SEQ ID NO: 72780 - DNA, 120 bp, synthetic construct; identical to SEQ ID NO: 42826
  source 1..120: mol_type = other DNA

SEQ ID NO: 72781 - DNA, 120 bp, synthetic construct; identical to SEQ ID NO: 42827
  source 1..120: mol_type = other DNA

SEQ ID NO: 72782 - DNA, 120 bp, synthetic construct; identical to SEQ ID NO: 42828
  source 1..120: mol_type = other DNA

SEQ ID NO: 72783 - DNA, 120 bp, synthetic construct; identical to SEQ ID NO: 12165
  source 1..120: mol_type = other DNA

SEQ ID NO: 72784 - DNA, 120 bp, synthetic construct; identical to SEQ ID NO: 42830
  source 1..120: mol_type = other DNA

SEQ ID NO: 72785 - DNA, 120 bp, synthetic construct; identical to SEQ ID NO: 42831
  source 1..120: mol_type = other DNA

SEQ ID NO: 72786 - DNA, 120 bp, synthetic construct; identical to SEQ ID NO: 12166
  source 1..120: mol_type = other DNA

SEQ ID NO: 72787 - DNA, 120 bp, synthetic construct; identical to SEQ ID NO: 42833
  source 1..120: mol_type = other DNA

SEQ ID NO: 72788 - DNA, 120 bp, synthetic construct; identical to SEQ ID NO: 42834
  source 1..120: mol_type = other DNA

SEQ ID NO: 72789 - DNA, 120 bp, synthetic construct; identical to SEQ ID NO: 42835
  source 1..120: mol_type = other DNA

SEQ ID NO: 72790 - DNA, 120 bp, synthetic construct; identical to SEQ ID NO: 42836
  source 1..120: mol_type = other DNA

SEQ ID NO: 72791 - DNA, 120 bp, synthetic construct; identical to SEQ ID NO: 12167
  source 1..120: mol_type = other DNA

SEQ ID NO: 72792 - DNA, 120 bp, synthetic construct; identical to SEQ ID NO: 42838
  source 1..120: mol_type = other DNA

SEQ ID NO: 72793 - DNA, 120 bp, synthetic construct; identical to SEQ ID NO: 42839
  source 1..120: mol_type = other DNA

SEQ ID NO: 72794 - DNA, 120 bp, synthetic construct; identical to SEQ ID NO: 42840
  source 1..120: mol_type = other DNA

SEQ ID NO: 72795 - DNA, 120 bp, synthetic construct; identical to SEQ ID NO: 12168
  source 1..120: mol_type = other DNA

SEQ ID NO: 72796 - DNA, 120 bp, synthetic construct; identical to SEQ ID NO: 42842
  source 1..120: mol_type = other DNA

SEQ ID NO: 72797 - DNA, 120 bp, synthetic construct; identical to SEQ ID NO: 42843
  source 1..120: mol_type = other DNA

SEQ ID NO: 72798 - DNA, 120 bp, synthetic construct; identical to SEQ ID NO: 12169
  source 1..120: mol_type = other DNA

SEQ ID NO: 72799 - DNA, 120 bp, synthetic construct; identical to SEQ ID NO: 42845
  source 1..120: mol_type = other DNA

SEQ ID NO: 72800 - DNA, 120 bp, synthetic construct; identical to SEQ ID NO: 42846
  source 1..120: mol_type = other DNA

SEQ ID NO: 72801 - DNA, 120 bp, synthetic construct; identical to SEQ ID NO: 42847
  source 1..120: mol_type = other DNA

SEQ ID NO: 72802 - DNA, 120 bp, synthetic construct; identical to SEQ ID NO: 12170
  source 1..120: mol_type = other DNA

SEQ ID NO: 72803 - DNA, 120 bp, synthetic construct; identical to SEQ ID NO: 42849
  source 1..120: mol_type = other DNA

SEQ ID NO: 72804 - DNA, 120 bp, synthetic construct; identical to SEQ ID NO: 42850
  source 1..120: mol_type = other DNA

SEQ ID NO: 72805 - DNA, 120 bp, synthetic construct; identical to SEQ ID NO: 42851
  source 1..120: mol_type = other DNA

SEQ ID NO: 72806 - DNA, 120 bp, synthetic construct; identical to SEQ ID NO: 42852
  source 1..120: mol_type = other DNA

SEQ ID NO: 72807 - DNA, 120 bp, synthetic construct; identical to SEQ ID NO: 12171
  source 1..120: mol_type = other DNA

SEQ ID NO: 72808 - DNA, 120 bp, synthetic construct; identical to SEQ ID NO: 42854
  source 1..120: mol_type = other DNA

SEQ ID NO: 72809 - DNA, 120 bp, synthetic construct; identical to SEQ ID NO: 42855
  source 1..120: mol_type = other DNA

SEQ ID NO: 72810 - DNA, 120 bp, synthetic construct; identical to SEQ ID NO: 12172
  source 1..120: mol_type = other DNA

SEQ ID NO: 72811 - DNA, 120 bp, synthetic construct; identical to SEQ ID NO: 42857
  source 1..120: mol_type = other DNA

SEQ ID NO: 72812 - DNA, 120 bp, synthetic construct; identical to SEQ ID NO: 42858
  source 1..120: mol_type = other DNA

SEQ ID NO: 72813 - DNA, 120 bp, synthetic construct; identical to SEQ ID NO: 42859
  source 1..120: mol_type = other DNA

SEQ ID NO: 72814 - DNA, 120 bp, synthetic construct; identical to SEQ ID NO: 42860
  source 1..120: mol_type = other DNA

SEQ ID NO: 72815 - DNA, 120 bp, synthetic construct; identical to SEQ ID NO: 12173
  source 1..120: mol_type = other DNA

SEQ ID NO: 72816 - DNA, 120 bp, synthetic construct; identical to SEQ ID NO: 42862
  source 1..120: mol_type = other DNA

SEQ ID NO: 72817 - DNA, 120 bp, synthetic construct; identical to SEQ ID NO: 42863
  source 1..120: mol_type = other DNA

SEQ ID NO: 72818 - DNA, 120 bp, synthetic construct; identical to SEQ ID NO: 42864
  source 1..120: mol_type = other DNA

SEQ ID NO: 72819 - DNA, 120 bp, synthetic construct; identical to SEQ ID NO: 12174
  source 1..120: mol_type = other DNA

SEQ ID NO: 72820 - DNA, 120 bp, synthetic construct; identical to SEQ ID NO: 42866
  source 1..120: mol_type = other DNA

SEQ ID NO: 72821 - DNA, 120 bp, synthetic construct; identical to SEQ ID NO: 42867
  source 1..120: mol_type = other DNA

SEQ ID NO: 72822 - DNA, 120 bp, synthetic construct; identical to SEQ ID NO: 12175
  source 1..120: mol_type = other DNA

SEQ ID NO: 72823 - DNA, 120 bp, synthetic construct; identical to SEQ ID NO: 42869
  source 1..120: mol_type = other DNA

SEQ ID NO: 72824 - DNA, 120 bp, synthetic construct; identical to SEQ ID NO: 42870
  source 1..120: mol_type = other DNA

SEQ ID NO: 72825 - DNA, 120 bp, synthetic construct; identical to SEQ ID NO: 42871
  source 1..120: mol_type = other DNA

SEQ ID NO: 72826 - DNA, 120 bp, synthetic construct; identical to SEQ ID NO: 42872
  source 1..120: mol_type = other DNA

SEQ ID NO: 72827 - DNA, 120 bp, synthetic construct; identical to SEQ ID NO: 12176
  source 1..120: mol_type = other DNA

SEQ ID NO: 72828 - DNA, 120 bp, synthetic construct; identical to SEQ ID NO: 42874
  source 1..120: mol_type = other DNA

SEQ ID NO: 72829 - DNA, 120 bp, synthetic construct; identical to SEQ ID NO: 42875
  source 1..120: mol_type = other DNA

SEQ ID NO: 72830 - DNA, 120 bp, synthetic construct; identical to SEQ ID NO: 42876
  source 1..120: mol_type = other DNA

SEQ ID NO: 72831 - DNA, 120 bp, synthetic construct; identical to SEQ ID NO: 12177
  source 1..120: mol_type = other DNA

SEQ ID NO: 72832 - DNA, 120 bp, synthetic construct; identical to SEQ ID NO: 42878
  source 1..120: mol_type = other DNA

SEQ ID NO: 72833 - DNA, 120 bp, synthetic construct; identical to SEQ ID NO: 42879
  source 1..120: mol_type = other DNA

SEQ ID NO: 72834 - DNA, 120 bp, synthetic construct; identical to SEQ ID NO: 42880
  source 1..120: mol_type = other DNA

SEQ ID NO: 72835 - DNA, 120 bp, synthetic construct; identical to SEQ ID NO: 12178
  source 1..120: mol_type = other DNA

SEQ ID NO: 72836 - DNA, 120 bp, synthetic construct; identical to SEQ ID NO: 42882
  source 1..120: mol_type = other DNA

SEQ ID NO: 72837 - DNA, 120 bp, synthetic construct; identical to SEQ ID NO: 42883
  source 1..120: mol_type = other DNA

SEQ ID NO: 72838 - DNA, 120 bp, synthetic construct; identical to SEQ ID NO: 42884
  source 1..120: mol_type = other DNA

SEQ ID NO: 72839 - DNA, 120 bp, synthetic construct; identical to SEQ ID NO: 12179
  source 1..120: mol_type = other DNA

SEQ ID NO: 72840 - DNA, 120 bp, synthetic construct; identical to SEQ ID NO: 42886
  source 1..120: mol_type = other DNA

SEQ ID NO: 72841 - DNA, 120 bp, synthetic construct; identical to SEQ ID NO: 42887
  source 1..120: mol_type = other DNA

SEQ ID NO: 72842 - DNA, 120 bp, synthetic construct; identical to SEQ ID NO: 42888
  source 1..120: mol_type = other DNA

SEQ ID NO: 72843 - DNA, 120 bp, synthetic construct; identical to SEQ ID NO: 12180
  source 1..120: mol_type = other DNA

SEQ ID NO: 72844 - DNA, 120 bp, synthetic construct; identical to SEQ ID NO: 42890
  source 1..120: mol_type = other DNA

SEQ ID NO: 72845 - DNA, 120 bp, synthetic construct; identical to SEQ ID NO: 42891
  source 1..120: mol_type = other DNA

SEQ ID NO: 72846 - DNA, 120 bp, synthetic construct; identical to SEQ ID NO: 42892
  source 1..120: mol_type = other DNA

SEQ ID NO: 72847 - DNA, 120 bp, synthetic construct; identical to SEQ ID NO: 42893
  source 1..120: mol_type = other DNA

SEQ ID NO: 72848 - DNA, 120 bp, synthetic construct; identical to SEQ ID NO: 12181
  source 1..120: mol_type = other DNA

SEQ ID NO: 72849 - DNA, 120 bp, synthetic construct; identical to SEQ ID NO: 42895
  source 1..120: mol_type = other DNA

SEQ ID NO: 72850 - DNA, 120 bp, synthetic construct; identical to SEQ ID NO: 42896
  source 1..120: mol_type = other DNA

SEQ ID NO: 72851 - DNA, 120 bp, synthetic construct; identical to SEQ ID NO: 12182
  source 1..120: mol_type = other DNA

SEQ ID NO: 72852 - DNA, 120 bp, synthetic construct; identical to SEQ ID NO: 42898
  source 1..120: mol_type = other DNA

SEQ ID NO: 72853 - DNA, 120 bp, synthetic construct; identical to SEQ ID NO: 42899
  source 1..120: mol_type = other DNA

SEQ ID NO: 72854 - DNA, 120 bp, synthetic construct; identical to SEQ ID NO: 42900
  source 1..120: mol_type = other DNA

SEQ ID NO: 72855 - DNA, 120 bp, synthetic construct; identical to SEQ ID NO: 12183
  source 1..120: mol_type = other DNA

SEQ ID NO: 72856 - DNA, 120 bp, synthetic construct; identical to SEQ ID NO: 42902
  source 1..120: mol_type = other DNA

SEQ ID NO: 72857 - DNA, 120 bp, synthetic construct; identical to SEQ ID NO: 42903
  source 1..120: mol_type = other DNA

SEQ ID NO: 72858 - DNA, 120 bp, synthetic construct; identical to SEQ ID NO: 42904
  source 1..120: mol_type = other DNA

SEQ ID NO: 72859 - DNA, 120 bp, synthetic construct; identical to SEQ ID NO: 12184
  source 1..120: mol_type = other DNA

SEQ ID NO: 72860 - DNA, 120 bp, synthetic construct; identical to SEQ ID NO: 42906
  source 1..120: mol_type = other DNA

SEQ ID NO: 72861 - DNA, 120 bp, synthetic construct; identical to SEQ ID NO: 42907
  source 1..120: mol_type = other DNA

SEQ ID NO: 72862 - DNA, 120 bp, synthetic construct; identical to SEQ ID NO: 42908
  source 1..120: mol_type = other DNA

SEQ ID NO: 72863 - DNA, 120 bp, synthetic construct; identical to SEQ ID NO: 12185
  source 1..120: mol_type = other DNA

SEQ ID NO: 72864 - DNA, 120 bp, synthetic construct; identical to SEQ ID NO: 42910
  source 1..120: mol_type = other DNA

SEQ ID NO: 72865 - DNA, 120 bp, synthetic construct; identical to SEQ ID NO: 42911
  source 1..120: mol_type = other DNA

SEQ ID NO: 72866 - DNA, 120 bp, synthetic construct; identical to SEQ ID NO: 42912
  source 1..120: mol_type = other DNA

SEQ ID NO: 72867 - DNA, 120 bp, synthetic construct; identical to SEQ ID NO: 42913
  source 1..120: mol_type = other DNA

SEQ ID NO: 72868 - DNA, 120 bp, synthetic construct; identical to SEQ ID NO: 12186
  source 1..120: mol_type = other DNA

SEQ ID NO: 72869 - DNA, 120 bp, synthetic construct; identical to SEQ ID NO: 42915
  source 1..120: mol_type = other DNA

SEQ ID NO: 72870 - DNA, 120 bp, synthetic construct; identical to SEQ ID NO: 42916
  source 1..120: mol_type = other DNA

SEQ ID NO: 72871 - DNA, 120 bp, synthetic construct; identical to SEQ ID NO: 42917
  source 1..120: mol_type = other DNA

SEQ ID NO: 72872 - DNA, 120 bp, synthetic construct; identical to SEQ ID NO: 12187
  source 1..120: mol_type = other DNA

SEQ ID NO: 72873 - DNA, 120 bp, synthetic construct; identical to SEQ ID NO: 42919
  source 1..120: mol_type = other DNA

SEQ ID NO: 72874 - DNA, 120 bp, synthetic construct; identical to SEQ ID NO: 42920
  source 1..120: mol_type = other DNA

SEQ ID NO: 72875 - DNA, 120 bp, synthetic construct; identical to SEQ ID NO: 42921
  source 1..120: mol_type = other DNA

SEQ ID NO: 72876 - DNA, 120 bp, synthetic construct; identical to SEQ ID NO: 12188
  source 1..120: mol_type = other DNA

SEQ ID NO: 72877 - DNA, 120 bp, synthetic construct; identical to SEQ ID NO: 42923
  source 1..120: mol_type = other DNA

SEQ ID NO: 72878 - DNA, 120 bp, synthetic construct; identical to SEQ ID NO: 42924
  source 1..120: mol_type = other DNA

SEQ ID NO: 72879 - DNA, 120 bp, synthetic construct; identical to SEQ ID NO: 12189
  source 1..120: mol_type = other DNA

SEQ ID NO: 72880 - DNA, 120 bp, synthetic construct; identical to SEQ ID NO: 42926
  source 1..120: mol_type = other DNA

SEQ ID NO: 72881 - DNA, 120 bp, synthetic construct; identical to SEQ ID NO: 42927
  source 1..120: mol_type = other DNA

SEQ ID NO: 72882 - DNA, 120 bp, synthetic construct; identical to SEQ ID NO: 42928
  source 1..120: mol_type = other DNA

SEQ ID NO: 72883 - DNA, 120 bp, synthetic construct; identical to SEQ ID NO: 42929
  source 1..120: mol_type = other DNA

SEQ ID NO: 72884 - DNA, 120 bp, synthetic construct; identical to SEQ ID NO: 12190
  source 1..120: mol_type = other DNA

SEQ ID NO: 72885 - DNA, 120 bp, synthetic construct; identical to SEQ ID NO: 42931
  source 1..120: mol_type = other DNA

SEQ ID NO: 72886 - DNA, 120 bp, synthetic construct; identical to SEQ ID NO: 42932
  source 1..120: mol_type = other DNA

SEQ ID NO: 72887 - DNA, 120 bp, synthetic construct; identical to SEQ ID NO: 42933
  source 1..120: mol_type = other DNA

SEQ ID NO: 72888 - DNA, 120 bp, synthetic construct; identical to SEQ ID NO: 12191
  source 1..120: mol_type = other DNA

SEQ ID NO: 72889 - DNA, 120 bp, synthetic construct; identical to SEQ ID NO: 42935
  source 1..120: mol_type = other DNA

SEQ ID NO: 72890 - DNA, 120 bp, synthetic construct; identical to SEQ ID NO: 42936
  source 1..120: mol_type = other DNA

SEQ ID NO: 72891 - DNA, 120 bp, synthetic construct; identical to SEQ ID NO: 42937
  source 1..120: mol_type = other DNA

SEQ ID NO: 72892 - DNA, 120 bp, synthetic construct; identical to SEQ ID NO: 42938
  source 1..120: mol_type = other DNA

SEQ ID NO: 72893 - DNA, 120 bp, synthetic construct; identical to SEQ ID NO: 12192
  source 1..120: mol_type = other DNA

SEQ ID NO: 72894 - DNA, 120 bp, synthetic construct; identical to SEQ ID NO: 42940
  source 1..120: mol_type = other DNA

SEQ ID NO: 72895 - DNA, 120 bp, synthetic construct; identical to SEQ ID NO: 42941
  source 1..120: mol_type = other DNA

SEQ ID NO: 72896 - DNA, 120 bp, synthetic construct; identical to SEQ ID NO: 42942
  source 1..120: mol_type = other DNA

SEQ ID NO: 72897 - DNA, 120 bp, synthetic construct; identical to SEQ ID NO: 12193
  source 1..120: mol_type = other DNA

SEQ ID NO: 72898 - DNA, 120 bp, synthetic construct; identical to SEQ ID NO: 42944
  source 1..120: mol_type = other DNA

SEQ ID NO: 72899 - DNA, 120 bp, synthetic construct; identical to SEQ ID NO: 42945
  source 1..120: mol_type = other DNA

SEQ ID NO: 72900 - DNA, 120 bp, synthetic construct; identical to SEQ ID NO: 42946
  source 1..120: mol_type = other DNA

SEQ ID NO: 72901 - DNA, 120 bp, synthetic construct; identical to SEQ ID NO: 42947
  source 1..120: mol_type = other DNA

SEQ ID NO: 72902 - DNA, 120 bp, synthetic construct; identical to SEQ ID NO: 12194
  source 1..120: mol_type = other DNA

SEQ ID NO: 72903 - DNA, 120 bp, synthetic construct; identical to SEQ ID NO: 42949
  source 1..120: mol_type = other DNA

SEQ ID NO: 72904 - DNA, 120 bp, synthetic construct; identical to SEQ ID NO: 42950
  source 1..120: mol_type = other DNA

SEQ ID NO: 72905 - DNA, 120 bp, synthetic construct; identical to SEQ ID NO: 42951
  source 1..120: mol_type = other DNA

SEQ ID NO: 72906 - DNA, 120 bp, synthetic construct; identical to SEQ ID NO: 12195
  source 1..120: mol_type = other DNA

SEQ ID NO: 72907 - DNA, 120 bp, synthetic construct; identical to SEQ ID NO: 42953
  source 1..120: mol_type = other DNA

SEQ ID NO: 72908 - DNA, 120 bp, synthetic construct; identical to SEQ ID NO: 42954
  source 1..120: mol_type = other DNA

SEQ ID NO: 72909 - DNA, 120 bp, synthetic construct; identical to SEQ ID NO: 42955
  source 1..120: mol_type = other DNA

SEQ ID NO: 72910 - DNA, 120 bp, synthetic construct; identical to SEQ ID NO: 12196
  source 1..120: mol_type = other DNA

SEQ ID NO: 72911 - DNA, 120 bp, synthetic construct; identical to SEQ ID NO: 42957
  source 1..120: mol_type = other DNA

SEQ ID NO: 72912 - DNA, 120 bp, synthetic construct; identical to SEQ ID NO: 42958
  source 1..120: mol_type = other DNA

SEQ ID NO: 72913 - DNA, 120 bp, synthetic construct; identical to SEQ ID NO: 42959
  source 1..120: mol_type = other DNA

SEQ ID NO: 72914 - DNA, 120 bp, synthetic construct; identical to SEQ ID NO: 12197
  source 1..120: mol_type = other DNA

SEQ ID NO: 72915 - DNA, 120 bp, synthetic construct; identical to SEQ ID NO: 42961
  source 1..120: mol_type = other DNA

SEQ ID NO: 72916 - DNA, 120 bp, synthetic construct; identical to SEQ ID NO: 42962
  source 1..120: mol_type = other DNA

SEQ ID NO: 72917 - DNA, 120 bp, synthetic construct; identical to SEQ ID NO: 42963
  source 1..120: mol_type = other DNA

SEQ ID NO: 72918 - DNA, 120 bp, synthetic construct; identical to SEQ ID NO: 12198
  source 1..120: mol_type = other DNA

SEQ ID NO: 72919 - DNA, 120 bp, synthetic construct; identical to SEQ ID NO: 42965
  source 1..120: mol_type = other DNA

SEQ ID NO: 72920 - DNA, 120 bp, synthetic construct; identical to SEQ ID NO: 42966
  source 1..120: mol_type = other DNA

SEQ ID NO: 72921 - DNA, 120 bp, synthetic construct; identical to SEQ ID NO: 42967
  source 1..120: mol_type = other DNA

SEQ ID NO: 72922 - DNA, 120 bp, synthetic construct; identical to SEQ ID NO: 42968
  source 1..120: mol_type = other DNA

SEQ ID NO: 72923 - DNA, 120 bp, synthetic construct; identical to SEQ ID NO: 12199
  source 1..120: mol_type = other DNA

SEQ ID NO: 72924 - DNA, 120 bp, synthetic construct; identical to SEQ ID NO: 42970
  source 1..120: mol_type = other DNA

SEQ ID NO: 72925 - DNA, 120 bp, synthetic construct; identical to SEQ ID NO: 42971
  source 1..120: mol_type = other DNA

SEQ ID NO: 72926 - DNA, 120 bp, synthetic construct; identical to SEQ ID NO: 42972
  source 1..120: mol_type = other DNA

SEQ ID NO: 72927 - DNA, 120 bp, synthetic construct; identical to SEQ ID NO: 12200
  source 1..120: mol_type = other DNA

SEQ ID NO: 72928 - DNA, 120 bp, synthetic construct; identical to SEQ ID NO: 42974
  source 1..120: mol_type = other DNA

SEQ ID NO: 72929 - DNA, 120 bp, synthetic construct; identical to SEQ ID NO: 42975
  source 1..120: mol_type = other DNA

SEQ ID NO: 72930 - DNA, 120 bp, synthetic construct; identical to SEQ ID NO: 12201
  source 1..120: mol_type = other DNA

SEQ ID NO: 72931 - DNA, 120 bp, synthetic construct; identical to SEQ ID NO: 42977
  source 1..120: mol_type = other DNA

SEQ ID NO: 72932 - DNA, 120 bp, synthetic construct; identical to SEQ ID NO: 42978
  source 1..120: mol_type = other DNA

SEQ ID NO: 72933 - DNA, 120 bp, synthetic construct; identical to SEQ ID NO: 42979
  source 1..120: mol_type = other DNA

SEQ ID NO: 72934 - DNA, 120 bp, synthetic construct; identical to SEQ ID NO: 12202
  source 1..120: mol_type = other DNA

SEQ ID NO: 72935 - DNA, 120 bp, synthetic construct; identical to SEQ ID NO: 42981
  source 1..120: mol_type = other DNA

SEQ ID NO: 72936 - DNA, 120 bp, synthetic construct; identical to SEQ ID NO: 12203
  source 1..120: mol_type = other DNA

SEQ ID NO: 72937 - DNA, 120 bp, synthetic construct; identical to SEQ ID NO: 42983
  source 1..120: mol_type = other DNA

SEQ ID NO: 72938 - DNA, 120 bp, synthetic construct; identical to SEQ ID NO: 42984
  source 1..120: mol_type = other DNA

SEQ ID NO: 72939 - DNA, 120 bp, synthetic construct; identical to SEQ ID NO: 42985
  source 1..120: mol_type = other DNA

SEQ ID NO: 72940 - DNA, 120 bp, synthetic construct; identical to SEQ ID NO: 12204
  source 1..120: mol_type = other DNA

SEQ ID NO: 72941 - DNA, 120 bp, synthetic construct; identical to SEQ ID NO: 42987
  source 1..120: mol_type = other DNA

SEQ ID NO: 72942 - DNA, 120 bp, synthetic construct; identical to SEQ ID NO: 42988
  source 1..120: mol_type = other DNA

SEQ ID NO: 72943 - DNA, 120 bp, synthetic construct; identical to SEQ ID NO: 12205
  source 1..120: mol_type = other DNA

SEQ ID NO: 72944 - DNA, 120 bp, synthetic construct; identical to SEQ ID NO: 42990
  source 1..120: mol_type = other DNA

SEQ ID NO: 72945 - DNA, 120 bp, synthetic construct; identical to SEQ ID NO: 42991
  source 1..120: mol_type = other DNA

SEQ ID NO: 72946 - DNA, 120 bp, synthetic construct; identical to SEQ ID NO: 42992
  source 1..120: mol_type = other DNA

SEQ ID NO: 72947 - DNA, 120 bp, synthetic construct; identical to SEQ ID NO: 12206
  source 1..120: mol_type = other DNA

SEQ ID NO: 72948 - DNA, 120 bp, synthetic construct; identical to SEQ ID NO: 42994
  source 1..120: mol_type = other DNA

SEQ ID NO: 72949 - DNA, 120 bp, synthetic construct; identical to SEQ ID NO: 42995
  source 1..120: mol_type = other DNA

SEQ ID NO: 72950 - DNA, 120 bp, synthetic construct; identical to SEQ ID NO: 42996
  source 1..120: mol_type = other DNA

SEQ ID NO: 72951 - DNA, 120 bp, synthetic construct; identical to SEQ ID NO: 12207
  source 1..120: mol_type = other DNA

SEQ ID NO: 72952 - DNA, 120 bp, synthetic construct; identical to SEQ ID NO: 42998
  source 1..120: mol_type = other DNA

SEQ ID NO: 72953 - DNA, 120 bp, synthetic construct; identical to SEQ ID NO: 42999
  source 1..120: mol_type = other DNA

SEQ ID NO: 72954 - DNA, 120 bp, synthetic construct; identical to SEQ ID NO: 43000
  source 1..120: mol_type = other DNA

SEQ ID NO: 72955 - DNA, 120 bp, synthetic construct; identical to SEQ ID NO: 43001
  source 1..120: mol_type = other DNA

SEQ ID NO: 72956 - DNA, 120 bp, synthetic construct; identical to SEQ ID NO: 12208
  source 1..120: mol_type = other DNA

SEQ ID NO: 72957 - DNA, 120 bp, synthetic construct; identical to SEQ ID NO: 43003
  source 1..120: mol_type = other DNA

SEQ ID NO: 72958 - DNA, 120 bp, synthetic construct; identical to SEQ ID NO: 43004
  source 1..120: mol_type = other DNA

SEQ ID NO: 72959 - DNA, 120 bp, synthetic construct; identical to SEQ ID NO: 12209
  source 1..120: mol_type = other DNA

SEQ ID NO: 72960 - DNA, 120 bp, synthetic construct; identical to SEQ ID NO: 43006
  source 1..120: mol_type = other DNA

SEQ ID NO: 72961 - DNA, 120 bp, synthetic construct; identical to SEQ ID NO: 43007
  source 1..120: mol_type = other DNA

SEQ ID NO: 72962 - DNA, 120 bp, synthetic construct; identical to SEQ ID NO: 43008
  source 1..120: mol_type = other DNA

SEQ ID NO: 72963 - DNA, 120 bp, synthetic construct; identical to SEQ ID NO: 12210
  source 1..120: mol_type = other DNA

SEQ ID NO: 72964 - DNA, 120 bp, synthetic construct; identical to SEQ ID NO: 43010
  source 1..120: mol_type = other DNA

SEQ ID NO: 72965 - DNA, 120 bp, synthetic construct; identical to SEQ ID NO: 43011
  source 1..120: mol_type = other DNA

SEQ ID NO: 72966 - DNA, 120 bp, synthetic construct; identical to SEQ ID NO: 43012
  source 1..120: mol_type = other DNA

SEQ ID NO: 72967 - DNA, 120 bp, synthetic construct; identical to SEQ ID NO: 12211
  source 1..120: mol_type = other DNA

SEQ ID NO: 72968 - DNA, 120 bp, synthetic construct; identical to SEQ ID NO: 43014
  source 1..120: mol_type = other DNA

SEQ ID NO: 72969 - DNA, 120 bp, synthetic construct; identical to SEQ ID NO: 43015
  source 1..120: mol_type = other DNA

SEQ ID NO: 72970 - DNA, 120 bp, synthetic construct; identical to SEQ ID NO: 43016
  source 1..120: mol_type = other DNA

SEQ ID NO: 72971 - DNA, 120 bp, synthetic construct; identical to SEQ ID NO: 43017
  source 1..120: mol_type = other DNA

SEQ ID NO: 72972 - DNA, 120 bp, synthetic construct; identical to SEQ ID NO: 12212
  source 1..120: mol_type = other DNA

SEQ ID NO: 72973 - DNA, 120 bp, synthetic construct; identical to SEQ ID NO: 43019
  source 1..120: mol_type = other DNA

SEQ ID NO: 72974 - DNA, 120 bp, synthetic construct; identical to SEQ ID NO: 43020
  source 1..120: mol_type = other DNA

SEQ ID NO: 72975 - DNA, 120 bp, synthetic construct; identical to SEQ ID NO: 43021
  source 1..120: mol_type = other DNA

SEQ ID NO: 72976 - DNA, 120 bp, synthetic construct; identical to SEQ ID NO: 12213
  source 1..120: mol_type = other DNA

SEQ ID NO: 72977 - DNA, 120 bp, synthetic construct; identical to SEQ ID NO: 43023
  source 1..120: mol_type = other DNA

SEQ ID NO: 72978 - DNA, 120 bp, synthetic construct; identical to SEQ ID NO: 43024
  source 1..120: mol_type = other DNA

SEQ ID NO: 72979 - DNA, 120 bp, synthetic construct; identical to SEQ ID NO: 12214
  source 1..120: mol_type = other DNA

SEQ ID NO: 72980 - DNA, 120 bp, synthetic construct; identical to SEQ ID NO: 43026
  source 1..120: mol_type = other DNA

SEQ ID NO: 72981 - DNA, 120 bp, synthetic construct; identical to SEQ ID NO: 43027
  source 1..120: mol_type = other DNA

SEQ ID NO: 72982 - DNA, 120 bp, synthetic construct; identical to SEQ ID NO: 43028
  source 1..120: mol_type = other DNA

SEQ ID NO: 72983 - DNA, 120 bp, synthetic construct; identical to SEQ ID NO: 43029
  source 1..120: mol_type = other DNA

SEQ ID NO: 72984 - DNA, 120 bp, synthetic construct; identical to SEQ ID NO: 12215
  source 1..120: mol_type = other DNA

SEQ ID NO: 72985 - DNA, 120 bp, synthetic construct; identical to SEQ ID NO: 43031
  source 1..120: mol_type = other DNA

SEQ ID NO: 72986 - DNA, 120 bp, synthetic construct; identical to SEQ ID NO: 43032
  source 1..120: mol_type = other DNA

SEQ ID NO: 72987 - DNA, 120 bp, synthetic construct; identical to SEQ ID NO: 12216
  source 1..120: mol_type = other DNA

SEQ ID NO: 72988 - DNA, 120 bp, synthetic construct; identical to SEQ ID NO: 43034
  source 1..120: mol_type = other DNA

SEQ ID NO: 72989 - DNA, 120 bp, synthetic construct; identical to SEQ ID NO: 43035
  source 1..120: mol_type = other DNA

SEQ ID NO: 72990 - DNA, 120 bp, synthetic construct; identical to SEQ ID NO: 43036
  source 1..120: mol_type = other DNA

SEQ ID NO: 72991 - DNA, 120 bp, synthetic construct; identical to SEQ ID NO: 43037
  source 1..120: mol_type = other DNA

SEQ ID NO: 72992 - DNA, 120 bp, synthetic construct; identical to SEQ ID NO: 12217
  source 1..120: mol_type = other DNA

SEQ ID NO: 72993 - DNA, 120 bp, synthetic construct; identical to SEQ ID NO: 43039
  source 1..120: mol_type = other DNA

SEQ ID NO: 72994 - DNA, 120 bp, synthetic construct; identical to SEQ ID NO: 43040
  source 1..120: mol_type = other DNA

SEQ ID NO: 72995 - DNA, 120 bp, synthetic construct; identical to SEQ ID NO: 43041
  source 1..120: mol_type = other DNA

SEQ ID NO: 72996 - DNA, 120 bp, synthetic construct; identical to SEQ ID NO: 12218
  source 1..120: mol_type = other DNA

SEQ ID NO: 72997 - DNA, 120 bp, synthetic construct; identical to SEQ ID NO: 43043
  source 1..120: mol_type = other DNA

SEQ ID NO: 72998 - DNA, 120 bp, synthetic construct; identical to SEQ ID NO: 43044
  source 1..120: mol_type = other DNA

SEQ ID NO: 72999 - DNA, 120 bp, synthetic construct; identical to SEQ ID NO: 12219
  source 1..120: mol_type = other DNA

SEQ ID NO: 73000 - DNA, 120 bp, synthetic construct; identical to SEQ ID NO: 43046
  source 1..120: mol_type = other DNA

SEQ ID NO: 73001 - DNA, 120 bp, synthetic construct; identical to SEQ ID NO: 43047
  source 1..120: mol_type = other DNA

SEQ ID NO: 73002 - DNA, 120 bp, synthetic construct; identical to SEQ ID NO: 43048
  source 1..120: mol_type = other DNA

SEQ ID NO: 73003 - DNA, 120 bp, synthetic construct; identical to SEQ ID NO: 12220
  source 1..120: mol_type = other DNA

SEQ ID NO: 73004 - DNA, 120 bp, synthetic construct; identical to SEQ ID NO: 43050
  source 1..120: mol_type = other DNA

SEQ ID NO: 73005 - DNA, 120 bp, synthetic construct; identical to SEQ ID NO: 43051
  source 1..120: mol_type = other DNA

SEQ ID NO: 73006 - DNA, 120 bp, synthetic construct; identical to SEQ ID NO: 43052
  source 1..120: mol_type = other DNA

SEQ ID NO: 73007 - DNA, 120 bp, synthetic construct; identical to SEQ ID NO: 12221
  source 1..120: mol_type = other DNA

SEQ ID NO: 73008 - DNA, 120 bp, synthetic construct; identical to SEQ ID NO: 43054
  source 1..120: mol_type = other DNA

SEQ ID NO: 73009 - DNA, 120 bp, synthetic construct; identical to SEQ ID NO: 43055
  source 1..120: mol_type = other DNA

SEQ ID NO: 73010 - DNA, 120 bp, synthetic construct; identical to SEQ ID NO: 43056
  source 1..120: mol_type = other DNA

SEQ ID NO: 73011 - DNA, 120 bp, synthetic construct; identical to SEQ ID NO: 43057
  source 1..120: mol_type = other DNA

SEQ ID NO: 73012 - DNA, 120 bp, synthetic construct; identical to SEQ ID NO: 43058
  source 1..120: mol_type = other DNA

SEQ ID NO: 73013 - DNA, 120 bp, synthetic construct; identical to SEQ ID NO: 12222
  source 1..120: mol_type = other DNA

SEQ ID NO: 73014 - DNA, 120 bp, synthetic construct; identical to SEQ ID NO: 43060
  source 1..120: mol_type = other DNA

SEQ ID NO: 73015 - DNA, 120 bp, synthetic construct; identical to SEQ ID NO: 43061
  source 1..120: mol_type = other DNA

SEQ ID NO: 73016 - DNA, 120 bp, synthetic construct; identical to SEQ ID NO: 12223
  source 1..120: mol_type = other DNA

SEQ ID NO: 73017 - DNA, 120 bp, synthetic construct; identical to SEQ ID NO: 43063
  source 1..120: mol_type = other DNA

SEQ ID NO: 73018 - DNA, 120 bp, synthetic construct; identical to SEQ ID NO: 43064
  source 1..120: mol_type = other DNA

SEQ ID NO: 73019 - DNA, 120 bp, synthetic construct; identical to SEQ ID NO: 12224
  source 1..120: mol_type = other DNA

SEQ ID NO: 73020 - DNA, 120 bp, synthetic construct; identical to SEQ ID NO: 43066
  source 1..120: mol_type = other DNA

SEQ ID NO: 73021 - DNA, 120 bp, synthetic construct; identical to SEQ ID NO: 43067
  source 1..120: mol_type = other DNA

SEQ ID NO: 73022 - DNA, 120 bp, synthetic construct; identical to SEQ ID NO: 43068
  source 1..120: mol_type = other DNA

SEQ ID NO: 73023 - DNA, 120 bp, synthetic construct; identical to SEQ ID NO: 43069
  source 1..120: mol_type = other DNA

SEQ ID NO: 73024 - DNA, 120 bp, synthetic construct; identical to SEQ ID NO: 12225
  source 1..120: mol_type = other DNA

SEQ ID NO: 73025 - DNA, 120 bp, synthetic construct; identical to SEQ ID NO: 43071
  source 1..120: mol_type = other DNA

SEQ ID NO: 73026 - DNA, 120 bp, synthetic construct; identical to SEQ ID NO: 43072
  source 1..120: mol_type = other DNA

SEQ ID NO: 73027 - DNA, 120 bp, synthetic construct; identical to SEQ ID NO: 12226
  source 1..120: mol_type = other DNA

SEQ ID NO: 73028 - DNA, 120 bp, synthetic construct; identical to SEQ ID NO: 43074
  source 1..120: mol_type = other DNA

SEQ ID NO: 73029 - DNA, 120 bp, synthetic construct; identical to SEQ ID NO: 43075
  source 1..120: mol_type = other DNA

SEQ ID NO: 73030 - DNA, 120 bp, synthetic construct; identical to SEQ ID NO: 43076
  source 1..120: mol_type = other DNA

SEQ ID NO: 73031 - DNA, 120 bp, synthetic construct; identical to SEQ ID NO: 43077
  source 1..120: mol_type = other DNA

SEQ ID NO: 73032 - DNA, 120 bp, synthetic construct; identical to SEQ ID NO: 12227
  source 1..120: mol_type = other DNA

SEQ ID NO: 73033 - DNA, 120 bp, synthetic construct; identical to SEQ ID NO: 43079
  source 1..120: mol_type = other DNA

SEQ ID NO: 73034 - DNA, 120 bp, synthetic construct; identical to SEQ ID NO: 43080
  source 1..120: mol_type = other DNA

SEQ ID NO: 73035 - DNA, 120 bp, synthetic construct; identical to SEQ ID NO: 43081
  source 1..120: mol_type = other DNA

SEQ ID NO: 73036 - DNA, 120 bp, synthetic construct; identical to SEQ ID NO: 12228
  source 1..120: mol_type = other DNA

SEQ ID NO: 73037 - DNA, 120 bp, synthetic construct; identical to SEQ ID NO: 43083
  source 1..120: mol_type = other DNA

SEQ ID NO: 73038 - DNA, 120 bp, synthetic construct; identical to SEQ ID NO: 43084
  source 1..120: mol_type = other DNA

SEQ ID NO: 73039 - DNA, 120 bp, synthetic construct; identical to SEQ ID NO: 12229
  source 1..120: mol_type = other DNA

SEQ ID NO: 73040 - DNA, 120 bp, synthetic construct; identical to SEQ ID NO: 43086
  source 1..120: mol_type = other DNA

SEQ ID NO: 73041 - DNA, 120 bp, synthetic construct; identical to SEQ ID NO: 43087
  source 1..120: mol_type = other DNA

SEQ ID NO: 73042 - DNA, 120 bp, synthetic construct; identical to SEQ ID NO: 43088
  source 1..120: mol_type = other DNA

SEQ ID NO: 73043 - DNA, 120 bp, synthetic construct; identical to SEQ ID NO: 12230
  source 1..120: mol_type = other DNA

SEQ ID NO: 73044 - DNA, 120 bp, synthetic construct; identical to SEQ ID NO: 43090
  source 1..120: mol_type = other DNA

SEQ ID NO: 73045 - DNA, 120 bp, synthetic construct; identical to SEQ ID NO: 43091
  source 1..120: mol_type = other DNA

SEQ ID NO: 73046 - DNA, 120 bp, synthetic construct; identical to SEQ ID NO: 43092
  source 1..120: mol_type = other DNA

SEQ ID NO: 73047 - DNA, 120 bp, synthetic construct; identical to SEQ ID NO: 43093
  source 1..120: mol_type = other DNA

SEQ ID NO: 73048 - DNA, 120 bp, synthetic construct; identical to SEQ ID NO: 12231
  source 1..120: mol_type = other DNA

SEQ ID NO: 73049 - DNA, 120 bp, synthetic construct; identical to SEQ ID NO: 43095
  source 1..120: mol_type = other DNA

SEQ ID NO: 73050 - DNA, 120 bp, synthetic construct; identical to SEQ ID NO: 43096
  source 1..120: mol_type = other DNA

SEQ ID NO: 73051 - DNA, 120 bp, synthetic construct; identical to SEQ ID NO: 43097
  source 1..120: mol_type = other DNA

SEQ ID NO: 73052 - DNA, 120 bp, synthetic construct; identical to SEQ ID NO: 12232
  source 1..120: mol_type = other DNA

SEQ ID NO: 73053 - DNA, 120 bp, synthetic construct; identical to SEQ ID NO: 43099
  source 1..120: mol_type = other DNA

SEQ ID NO: 73054 - DNA, 120 bp, synthetic construct; identical to SEQ ID NO: 43100
  source 1..120: mol_type = other DNA

SEQ ID NO: 73055 - DNA, 120 bp, synthetic construct; identical to SEQ ID NO: 12233
  source 1..120: mol_type = other DNA

SEQ ID NO: 73056 - DNA, 120 bp, synthetic construct; identical to SEQ ID NO: 43102
  source 1..120: mol_type = other DNA

SEQ ID NO: 73057 - DNA, 120 bp, synthetic construct; identical to SEQ ID NO: 43103
  source 1..120: mol_type = other DNA

SEQ ID NO: 73058 - DNA, 120 bp, synthetic construct; identical to SEQ ID NO: 43104
  source 1..120: mol_type = other DNA

SEQ ID NO: 73059 - DNA, 120 bp, synthetic construct; identical to SEQ ID NO: 12234
  source 1..120: mol_type = other DNA

SEQ ID NO: 73060 - DNA, 120 bp, synthetic construct; identical to SEQ ID NO: 43106
  source 1..120: mol_type = other DNA

SEQ ID NO: 73061 - DNA, 120 bp, synthetic construct; identical to SEQ ID NO: 43107
  source 1..120: mol_type = other DNA

SEQ ID NO: 73062 - DNA, 120 bp, synthetic construct; identical to SEQ ID NO: 43108
  source 1..120: mol_type = other DNA

SEQ ID NO: 73063 - DNA, 120 bp, synthetic construct; identical to SEQ ID NO: 12235
  source 1..120: mol_type = other DNA

SEQ ID NO: 73064 - DNA, 120 bp, synthetic construct; identical to SEQ ID NO: 43110
  source 1..120: mol_type = other DNA

SEQ ID NO: 73065 - DNA, 120 bp, synthetic construct; identical to SEQ ID NO: 43111
  source 1..120: mol_type = other DNA

SEQ ID NO: 73066 - DNA, 120 bp, synthetic construct; identical to SEQ ID NO: 43112
  source 1..120: mol_type = other DNA

SEQ ID NO: 73067 - DNA, 120 bp, synthetic construct; identical to SEQ ID NO: 43113
  source 1..120: mol_type = other DNA

SEQ ID NO: 73068 - DNA, 120 bp, synthetic construct; identical to SEQ ID NO: 12236
  source 1..120: mol_type = other DNA

SEQ ID NO: 73069 - DNA, 120 bp, synthetic construct; identical to SEQ ID NO: 43115
  source 1..120: mol_type = other DNA

SEQ ID NO: 73070 - DNA, 120 bp, synthetic construct; identical to SEQ ID NO: 43116
  source 1..120: mol_type = other DNA

SEQ ID NO: 73071 - DNA, 120 bp, synthetic construct; identical to SEQ ID NO: 12237
  source 1..120: mol_type = other DNA

SEQ ID NO: 73072 - DNA, 120 bp, synthetic construct; identical to SEQ ID NO: 43118
  source 1..120: mol_type = other DNA

SEQ ID NO: 73073 - DNA, 120 bp, synthetic construct; identical to SEQ ID NO: 43119
  source 1..120: mol_type = other DNA

SEQ ID NO: 73074 - DNA, 120 bp, synthetic construct; identical to SEQ ID NO: 43120
  source 1..120: mol_type = other DNA

SEQ ID NO: 73075 - DNA, 120 bp, synthetic construct; identical to SEQ ID NO: 43121
  source 1..120: mol_type = other DNA

SEQ ID NO: 73076 - DNA, 120 bp, synthetic construct; identical to SEQ ID NO: 12238
  source 1..120: mol_type = other DNA

SEQ ID NO: 73077 - DNA, 120 bp, synthetic construct; identical to SEQ ID NO: 43123
  source 1..120: mol_type = other DNA

SEQ ID NO: 73078 - DNA, 120 bp, synthetic construct; identical to SEQ ID NO: 43124
  source 1..120: mol_type = other DNA

SEQ ID NO: 73079 - DNA, 120 bp, synthetic construct; identical to SEQ ID NO: 12239
  source 1..120: mol_type = other DNA

SEQ ID NO: 73080 - DNA, 120 bp, synthetic construct; identical to SEQ ID NO: 43126
  source 1..120: mol_type = other DNA

SEQ ID NO: 73081 - DNA, 120 bp, synthetic construct; identical to SEQ ID NO: 43127
  source 1..120: mol_type = other DNA

SEQ ID NO: 73082 - DNA, 120 bp, synthetic construct; identical to SEQ ID NO: 43128
  source 1..120: mol_type = other DNA

SEQ ID NO: 73083 - DNA, 120 bp, synthetic construct; identical to SEQ ID NO: 43129
  source 1..120: mol_type = other DNA

SEQ ID NO: 73084 - DNA, 120 bp, synthetic construct; identical to SEQ ID NO: 12240
  source 1..120: mol_type = other DNA

SEQ ID NO: 73085 - DNA, 120 bp, synthetic construct; identical to SEQ ID NO: 43131
  source 1..120: mol_type = other DNA

SEQ ID NO: 73086 - DNA, 120 bp, synthetic construct; identical to SEQ ID NO: 43132
  source 1..120: mol_type = other DNA

SEQ ID NO: 73087 - DNA, 120 bp, synthetic construct; identical to SEQ ID NO: 43133
  source 1..120: mol_type = other DNA

SEQ ID NO: 73088 - DNA, 120 bp, synthetic construct; identical to SEQ ID NO: 12241
  source 1..120: mol_type = other DNA

SEQ ID NO: 73089 - DNA, 120 bp, synthetic construct; identical to SEQ ID NO: 43135
  source 1..120: mol_type = other DNA

SEQ ID NO: 73090 - DNA, 120 bp, synthetic construct; identical to SEQ ID NO: 43136
  source 1..120: mol_type = other DNA

SEQ ID NO: 73091 - DNA, 120 bp, synthetic construct; identical to SEQ ID NO: 12242
  source 1..120: mol_type = other DNA

SEQ ID NO: 73092 - DNA, 120 bp, synthetic construct; identical to SEQ ID NO: 43138
  source 1..120: mol_type = other DNA

SEQ ID NO: 73093 - DNA, 120 bp, synthetic construct; identical to SEQ ID NO: 43139
  source 1..120: mol_type = other DNA

SEQ ID NO: 73094 - DNA, 120 bp, synthetic construct; identical to SEQ ID NO: 43140
  source 1..120: mol_type = other DNA

SEQ ID NO: 73095 - DNA, 120 bp, synthetic construct; identical to SEQ ID NO: 12243
  source 1..120: mol_type = other DNA

SEQ ID NO: 73096 - DNA, 120 bp, synthetic construct; identical to SEQ ID NO: 43142
  source 1..120: mol_type = other DNA

SEQ ID NO: 73097 - DNA, 120 bp, synthetic construct; identical to SEQ ID NO: 43143
  source 1..120: mol_type = other DNA

SEQ ID NO: 73098 - DNA, 120 bp, synthetic construct; identical to SEQ ID NO: 43144
  source 1..120: mol_type = other DNA

SEQ ID NO: 73099 - DNA, 120 bp, synthetic construct; identical to SEQ ID NO: 43145
  source 1..120: mol_type = other DNA

SEQ ID NO: 73100 - DNA, 120 bp, synthetic construct; identical to SEQ ID NO: 12244
  source 1..120: mol_type = other DNA

SEQ ID NO: 73101 - DNA, 120 bp, synthetic construct; identical to SEQ ID NO: 43147
  source 1..120: mol_type = other DNA

SEQ ID NO: 73102 - DNA, 120 bp, synthetic construct; identical to SEQ ID NO: 43148
  source 1..120: mol_type = other DNA

SEQ ID NO: 73103 - DNA, 120 bp, synthetic construct; identical to SEQ ID NO: 43149
  source 1..120: mol_type = other DNA

SEQ ID NO: 73104 - DNA, 120 bp, synthetic construct; identical to SEQ ID NO: 12245
  source 1..120: mol_type = other DNA

SEQ ID NO: 73105 - DNA, 120 bp, synthetic construct; identical to SEQ ID NO: 43151
  source 1..120: mol_type = other DNA

SEQ ID NO: 73106 - DNA, 120 bp, synthetic construct; identical to SEQ ID NO: 43152
  source 1..120: mol_type = other DNA

SEQ ID NO: 73107 - DNA, 120 bp, synthetic construct; identical to SEQ ID NO: 12246
  source 1..120: mol_type = other DNA

SEQ ID NO: 73108 - DNA, 120 bp, synthetic construct; identical to SEQ ID NO: 43154
  source 1..120: mol_type = other DNA

SEQ ID NO: 73109 - DNA, 120 bp, synthetic construct; identical to SEQ ID NO: 43155
  source 1..120: mol_type = other DNA

SEQ ID NO: 73110 - DNA, 120 bp, synthetic construct; identical to SEQ ID NO: 43156
  source 1..120: mol_type = other DNA

SEQ ID NO: 73111 - DNA, 120 bp, synthetic construct; identical to SEQ ID NO: 12247
  source 1..120: mol_type = other DNA

SEQ ID NO: 73112 - DNA, 120 bp, synthetic construct; identical to SEQ ID NO: 43158
  source 1..120: mol_type = other DNA

SEQ ID NO: 73113 - DNA, 120 bp, synthetic construct; identical to SEQ ID NO: 43159
  source 1..120: mol_type = other DNA

SEQ ID NO: 73114 - DNA, 120 bp, synthetic construct; identical to SEQ ID NO: 43160
  source 1..120: mol_type = other DNA

SEQ ID NO: 73115 - DNA, 120 bp, synthetic construct; identical to SEQ ID NO: 12248
  source 1..120: mol_type = other DNA

SEQ ID NO: 73116 - DNA, 120 bp, synthetic construct; identical to SEQ ID NO: 43162
  source 1..120: mol_type = other DNA

SEQ ID NO: 73117 - DNA, 120 bp, synthetic construct; identical to SEQ ID NO: 43163
  source 1..120: mol_type = other DNA

SEQ ID NO: 73118 - DNA, 120 bp, synthetic construct; identical to SEQ ID NO: 43164
  source 1..120: mol_type = other DNA

SEQ ID NO: 73119 - DNA, 120 bp, synthetic construct; identical to SEQ ID NO: 43165
  source 1..120: mol_type = other DNA

SEQ ID NO: 73120 - DNA, 120 bp, synthetic construct; identical to SEQ ID NO: 12249
  source 1..120: mol_type = other DNA

SEQ ID NO: 73121 - DNA, 120 bp, synthetic construct; identical to SEQ ID NO: 43167
  source 1..120: mol_type = other DNA

SEQ ID NO: 73122 - DNA, 120 bp, synthetic construct; identical to SEQ ID NO: 43168
  source 1..120: mol_type = other DNA

SEQ ID NO: 73123 - DNA, 120 bp, synthetic construct; identical to SEQ ID NO: 12250
  source 1..120: mol_type = other DNA

SEQ ID NO: 73124 - DNA, 120 bp, synthetic construct; identical to SEQ ID NO: 43170
  source 1..120: mol_type = other DNA

SEQ ID NO: 73125 - DNA, 120 bp, synthetic construct; identical to SEQ ID NO: 43171
  source 1..120: mol_type = other DNA

SEQ ID NO: 73126 - DNA, 120 bp, synthetic construct; identical to SEQ ID NO: 43172
  source 1..120: mol_type = other DNA

SEQ ID NO: 73127 - DNA, 120 bp, synthetic construct; identical to SEQ ID NO: 12251
  source 1..120: mol_type = other DNA

SEQ ID NO: 73128 - DNA, 120 bp, synthetic construct; identical to SEQ ID NO: 43174
  source 1..120: mol_type = other DNA

SEQ ID NO: 73129 - DNA, 120 bp, synthetic construct; identical to SEQ ID NO: 43175
  source 1..120: mol_type = other DNA

SEQ ID NO: 73130 - DNA, 120 bp, synthetic construct; identical to SEQ ID NO: 43176
  source 1..120: mol_type = other DNA

SEQ ID NO: 73131 - DNA, 120 bp, synthetic construct; identical to SEQ ID NO: 12252
  source 1..120: mol_type = other DNA

SEQ ID NO: 73132 - DNA, 120 bp, synthetic construct; identical to SEQ ID NO: 43178
  source 1..120: mol_type = other DNA

SEQ ID NO: 73133 - DNA, 120 bp, synthetic construct; identical to SEQ ID NO: 43179
  source 1..120: mol_type = other DNA

SEQ ID NO: 73134 - DNA, 120 bp, synthetic construct; identical to SEQ ID NO: 43180
  source 1..120: mol_type = other DNA

SEQ ID NO: 73135 - DNA, 120 bp, synthetic construct; identical to SEQ ID NO: 12253
  source 1..120: mol_type = other DNA

SEQ ID NO: 73136 - DNA, 120 bp, synthetic construct; identical to SEQ ID NO: 43182
  source 1..120: mol_type = other DNA

SEQ ID NO: 73137 - DNA, 120 bp, synthetic construct; identical to SEQ ID NO: 43183
  source 1..120: mol_type = other DNA

SEQ ID NO: 73138 - DNA, 120 bp, synthetic construct; identical to SEQ ID NO: 43184
  source 1..120: mol_type = other DNA

SEQ ID NO: 73139 - DNA, 120 bp, synthetic construct; identical to SEQ ID NO: 43185
  source 1..120: mol_type = other DNA

SEQ ID NO: 73140 - DNA, 120 bp, synthetic construct; identical to SEQ ID NO: 12254
  source 1..120: mol_type = other DNA

SEQ ID NO: 73141 - DNA, 120 bp, synthetic construct; identical to SEQ ID NO: 43187
  source 1..120: mol_type = other DNA

SEQ ID NO: 73142 - DNA, 120 bp, synthetic construct; identical to SEQ ID NO: 43188
  source 1..120: mol_type = other DNA

SEQ ID NO: 73143 - DNA, 120 bp, synthetic construct; identical to SEQ ID NO: 12255
  source 1..120: mol_type = other DNA

SEQ ID NO: 73144 - DNA, 120 bp, synthetic construct; identical to SEQ ID NO: 43190
  source 1..120: mol_type = other DNA

SEQ ID NO: 73145 - DNA, 120 bp, synthetic construct; identical to SEQ ID NO: 43191
  source 1..120: mol_type = other DNA

SEQ ID NO: 73146 - DNA, 120 bp, synthetic construct; identical to SEQ ID NO: 43192
  source 1..120: mol_type = other DNA

SEQ ID NO: 73147 - DNA, 120 bp, synthetic construct; identical to SEQ ID NO: 12256
  source 1..120: mol_type = other DNA

SEQ ID NO: 73148 - DNA, 120 bp, synthetic construct; identical to SEQ ID NO: 43194
  source 1..120: mol_type = other DNA

SEQ ID NO: 73149 - DNA, 120 bp, synthetic construct; identical to SEQ ID NO: 43195
  source 1..120: mol_type = other DNA

SEQ ID NO: 73150 - DNA, 120 bp, synthetic construct; identical to SEQ ID NO: 43196
  source 1..120: mol_type = other DNA

SEQ ID NO: 73151 - DNA, 120 bp, synthetic construct; identical to SEQ ID NO: 12257
  source 1..120: mol_type = other DNA

SEQ ID NO: 73152 - DNA, 120 bp, synthetic construct; identical to SEQ ID NO: 43198
  source 1..120: mol_type = other DNA

SEQ ID NO: 73153 - DNA, 120 bp, synthetic construct; identical to SEQ ID NO: 43199
  source 1..120: mol_type = other DNA

SEQ ID NO: 73154 - DNA, 120 bp, synthetic construct; identical to SEQ ID NO: 43200
  source 1..120: mol_type = other DNA

SEQ ID NO: 73155 - DNA, 120 bp, synthetic construct; identical to SEQ ID NO: 43201
  source 1..120: mol_type = other DNA

SEQ ID NO: 73156 - DNA, 120 bp, synthetic construct; identical to SEQ ID NO: 12258
  source 1..120: mol_type = other DNA

SEQ ID NO: 73157 - DNA, 120 bp, synthetic construct; identical to SEQ ID NO: 43203
  source 1..120: mol_type = other DNA

SEQ ID NO: 73158 - DNA, 120 bp, synthetic construct; identical to SEQ ID NO: 43204
  source 1..120: mol_type = other DNA

SEQ ID NO: 73159 - DNA, 120 bp, synthetic construct; identical to SEQ ID NO: 12259
  source 1..120: mol_type = other DNA

SEQ ID NO: 73160 - DNA, 120 bp, synthetic construct; identical to SEQ ID NO: 43206
  source 1..120: mol_type = other DNA

SEQ ID NO: 73161 - DNA, 120 bp, synthetic construct; identical to SEQ ID NO: 43207
  source 1..120: mol_type = other DNA

SEQ ID NO: 73162 - DNA, 120 bp, synthetic construct; identical to SEQ ID NO: 43208
  source 1..120: mol_type = other DNA

SEQ ID NO: 73163 - DNA, 120 bp, synthetic construct; identical to SEQ ID NO: 43209
  source 1..120: mol_type = other DNA

SEQ ID NO: 73164 - DNA, 120 bp, synthetic construct; identical to SEQ ID NO: 12260
  source 1..120: mol_type = other DNA

SEQ ID NO: 73165 - DNA, 120 bp, synthetic construct; identical to SEQ ID NO: 43211
  source 1..120: mol_type = other DNA

SEQ ID NO: 73166 - DNA, 120 bp, synthetic construct; identical to SEQ ID NO: 43212
  source 1..120: mol_type = other DNA

SEQ ID NO: 73167 - DNA, 120 bp, synthetic construct; identical to SEQ ID NO: 12261
  source 1..120: mol_type = other DNA

SEQ ID NO: 73168 - DNA, 120 bp, synthetic construct; identical to SEQ ID NO: 43214
  source 1..120: mol_type = other DNA

SEQ ID NO: 73169 - DNA, 120 bp, synthetic construct; identical to SEQ ID NO: 43215
  source 1..120: mol_type = other DNA

SEQ ID NO: 73170 - DNA, 120 bp, synthetic construct; identical to SEQ ID NO: 43216
  source 1..120: mol_type = other DNA

SEQ ID NO: 73171 - DNA, 120 bp, synthetic construct; identical to SEQ ID NO: 43217
  source 1..120: mol_type = other DNA

SEQ ID NO: 73172 - DNA, 120 bp, synthetic construct; identical to SEQ ID NO: 12262
  source 1..120: mol_type = other DNA

SEQ ID NO: 73173 - DNA, 120 bp, synthetic construct; identical to SEQ ID NO: 43219
  source 1..120: mol_type = other DNA

SEQ ID NO: 73174 - DNA, 120 bp, synthetic construct; identical to SEQ ID NO: 43220
  source 1..120: mol_type = other DNA

SEQ ID NO: 73175 - DNA, 120 bp, synthetic construct; identical to SEQ ID NO: 43221
  source 1..120: mol_type = other DNA

SEQ ID NO: 73176 - DNA, 120 bp, synthetic construct; identical to SEQ ID NO: 12263
  source 1..120: mol_type = other DNA

SEQ ID NO: 73177 - DNA, 120 bp, synthetic construct; identical to SEQ ID NO: 43223
  source 1..120: mol_type = other DNA

SEQ ID NO: 73178 - DNA, 120 bp, synthetic construct; identical to SEQ ID NO: 43224
  source 1..120: mol_type = other DNA

SEQ ID NO: 73179 - DNA, 120 bp, synthetic construct; identical to SEQ ID NO: 12264
  source 1..120: mol_type = other DNA

SEQ ID NO: 73180 - DNA, 120 bp, synthetic construct; identical to SEQ ID NO: 43226
  source 1..120: mol_type = other DNA

SEQ ID NO: 73181 - DNA, 120 bp, synthetic construct; identical to SEQ ID NO: 43227
  source 1..120: mol_type = other DNA

SEQ ID NO: 73182 - DNA, 120 bp, synthetic construct; identical to SEQ ID NO: 43228
  source 1..120: mol_type = other DNA

SEQ ID NO: 73183 - DNA, 120 bp, synthetic construct; identical to SEQ ID NO: 12265
  source 1..120: mol_type = other DNA

SEQ ID NO: 73184 - DNA, 120 bp, synthetic construct; identical to SEQ ID NO: 43230
  source 1..120: mol_type = other DNA

SEQ ID NO: 73185 - DNA, 120 bp, synthetic construct; identical to SEQ ID NO: 43231
  source 1..120: mol_type = other DNA

SEQ ID NO: 73186 - DNA, 120 bp, synthetic construct; identical to SEQ ID NO: 43232
  source 1..120: mol_type = other DNA

SEQ ID NO: 73187 - DNA, 120 bp, synthetic construct; identical to SEQ ID NO: 12266
  source 1..120: mol_type = other DNA

SEQ ID NO: 73188 - DNA, 120 bp, synthetic construct; identical to SEQ ID NO: 43234
  source 1..120: mol_type = other DNA

SEQ ID NO: 73189 - DNA, 120 bp, synthetic construct; identical to SEQ ID NO: 43235
  source 1..120: mol_type = other DNA

SEQ ID NO: 73190 - DNA, 120 bp, synthetic construct; identical to SEQ ID NO: 43236
  source 1..120: mol_type = other DNA

SEQ ID NO: 73191 - DNA, 120 bp, synthetic construct; identical to SEQ ID NO: 43237
  source 1..120: mol_type = other DNA

SEQ ID NO: 73192 - DNA, 120 bp, synthetic construct; identical to SEQ ID NO: 12267
  source 1..120: mol_type = other DNA

SEQ ID NO: 73193 - DNA, 120 bp, synthetic construct; identical to SEQ ID NO: 43239
  source 1..120: mol_type = other DNA

SEQ ID NO: 73194 - DNA, 120 bp, synthetic construct; identical to SEQ ID NO: 43240
  source 1..120: mol_type = other DNA

SEQ ID NO: 73195 - DNA, 120 bp, synthetic construct; identical to SEQ ID NO: 12268
  source 1..120: mol_type = other DNA

SEQ ID NO: 73196 - DNA, 120 bp, synthetic construct; identical to SEQ ID NO: 43242
  source 1..120: mol_type = other DNA

SEQ ID NO: 73197 - DNA, 120 bp, synthetic construct; identical to SEQ ID NO: 43243
  source 1..120: mol_type = other DNA

SEQ ID NO: 73198 - DNA, 120 bp, synthetic construct; identical to SEQ ID NO: 43244
  source 1..120: mol_type = other DNA

SEQ ID NO: 73199 - DNA, 120 bp, synthetic construct; identical to SEQ ID NO: 43245
  source 1..120: mol_type = other DNA

SEQ ID NO: 73200 - DNA, 120 bp, synthetic construct; identical to SEQ ID NO: 12269
  source 1..120: mol_type = other DNA

SEQ ID NO: 73201 - DNA, 120 bp, synthetic construct; identical to SEQ ID NO: 43247
  source 1..120: mol_type = other DNA

SEQ ID NO: 73202 - DNA, 120 bp, synthetic construct; identical to SEQ ID NO: 43248
  source 1..120: mol_type = other DNA

SEQ ID NO: 73203 - DNA, 120 bp, synthetic construct; identical to SEQ ID NO: 12270
  source 1..120: mol_type = other DNA

SEQ ID NO: 73204 - DNA, 120 bp, synthetic construct; identical to SEQ ID NO: 43250
  source 1..120: mol_type = other DNA

SEQ ID NO: 73205 - DNA, 120 bp, synthetic construct; identical to SEQ ID NO: 43251
  source 1..120: mol_type = other DNA

SEQ ID NO: 73206 - DNA, 120 bp, synthetic construct; identical to SEQ ID NO: 43252
  source 1..120: mol_type = other DNA

SEQ ID NO: 73207 - DNA, 120 bp, synthetic construct; identical to SEQ ID NO: 43253
  source 1..120: mol_type = other DNA

SEQ ID NO: 73208 - DNA, 120 bp, synthetic construct; identical to SEQ ID NO: 12271
  source 1..120: mol_type = other DNA

SEQ ID NO: 73209 - DNA, 120 bp, synthetic construct; identical to SEQ ID NO: 43255
  source 1..120: mol_type = other DNA

SEQ ID NO: 73210 - DNA, 120 bp, synthetic construct; identical to SEQ ID NO: 43256
  source 1..120: mol_type = other DNA

SEQ ID NO: 73211 - DNA, 120 bp, synthetic construct; identical to SEQ ID NO: 12272
  source 1..120: mol_type = other DNA

SEQ ID NO: 73212 - DNA, 120 bp, synthetic construct; identical to SEQ ID NO: 43258
  source 1..120: mol_type = other DNA

SEQ ID NO: 73213 - DNA, 120 bp, synthetic construct; identical to SEQ ID NO: 43259
  source 1..120: mol_type = other DNA

SEQ ID NO: 73214 - DNA, 120 bp, synthetic construct; identical to SEQ ID NO: 43260
  source 1..120: mol_type = other DNA

SEQ ID NO: 73215 - DNA, 120 bp, synthetic construct; identical to SEQ ID NO: 12273
  source 1..120: mol_type = other DNA

SEQ ID NO: 73216 - DNA, 120 bp, synthetic construct; identical to SEQ ID NO: 43262
  source 1..120: mol_type = other DNA

SEQ ID NO: 73217 - DNA, 120 bp, synthetic construct; identical to SEQ ID NO: 43263
  source 1..120: mol_type = other DNA

SEQ ID NO: 73218 - DNA, 120 bp, synthetic construct; identical to SEQ ID NO: 43264
  source 1..120: mol_type = other DNA

SEQ ID NO: 73219 - DNA, 120 bp, synthetic construct; identical to SEQ ID NO: 12274
  source 1..120: mol_type = other DNA

SEQ ID NO: 73220 - DNA, 120 bp, synthetic construct; identical to SEQ ID NO: 43266
  source 1..120: mol_type = other DNA

SEQ ID NO: 73221 - DNA, 120 bp, synthetic construct; identical to SEQ ID NO: 43267
  source 1..120: mol_type = other DNA

SEQ ID NO: 73222 - DNA, 120 bp, synthetic construct; identical to SEQ ID NO: 43268
  source 1..120: mol_type = other DNA

SEQ ID NO: 73223 - DNA, 120 bp, synthetic construct; identical to SEQ ID NO: 43269
  source 1..120: mol_type = other DNA

SEQ ID NO: 73224 - DNA, 120 bp, synthetic construct; identical to SEQ ID NO: 12275
  source 1..120: mol_type = other DNA

SEQ ID NO: 73225 - DNA, 120 bp, synthetic construct; identical to SEQ ID NO: 43271
  source 1..120: mol_type = other DNA

SEQ ID NO: 73226 - DNA, 120 bp, synthetic construct; identical to SEQ ID NO: 43272
  source 1..120: mol_type = other DNA

SEQ ID NO: 73227 - DNA, 120 bp, synthetic construct; identical to SEQ ID NO: 43273
  source 1..120: mol_type = other DNA

SEQ ID NO: 73228 - DNA, 120 bp, synthetic construct; identical to SEQ ID NO: 12276
  source 1..120: mol_type = other DNA

SEQ ID NO: 73229 - DNA, 120 bp, synthetic construct; identical to SEQ ID NO: 43275
  source 1..120: mol_type = other DNA

SEQ ID NO: 73230 - DNA, 120 bp, synthetic construct; identical to SEQ ID NO: 43276
  source 1..120: mol_type = other DNA

SEQ ID NO: 73231 - DNA, 120 bp, synthetic construct; identical to SEQ ID NO: 12277
  source 1..120: mol_type = other DNA

SEQ ID NO: 73232 - DNA, 120 bp, synthetic construct; identical to SEQ ID NO: 43278
  source 1..120: mol_type = other DNA

SEQ ID NO: 73233 - DNA, 120 bp, synthetic construct; identical to SEQ ID NO: 43279
  source 1..120: mol_type = other DNA

SEQ ID NO: 73234 - DNA, 120 bp, synthetic construct; identical to SEQ ID NO: 43280
  source 1..120: mol_type = other DNA

SEQ ID NO: 73235 - DNA, 120 bp, synthetic construct; identical to SEQ ID NO: 12278
  source 1..120: mol_type = other DNA

SEQ ID NO: 73236 - DNA, 120 bp, synthetic construct; identical to SEQ ID NO: 43282
  source 1..120: mol_type = other DNA

SEQ ID NO: 73237 - DNA, 120 bp, synthetic construct; identical to SEQ ID NO: 43283
  source 1..120: mol_type = other DNA

SEQ ID NO: 73238 - DNA, 120 bp, synthetic construct; identical to SEQ ID NO: 43284
  source 1..120: mol_type = other DNA

SEQ ID NO: 73239 - DNA, 120 bp, synthetic construct; identical to SEQ ID NO: 12279
  source 1..120: mol_type = other DNA

SEQ ID NO: 73240 - DNA, 120 bp, synthetic construct; identical to SEQ ID NO: 43286
  source 1..120: mol_type = other DNA

SEQ ID NO: 73241 - DNA, 120 bp, synthetic construct; identical to SEQ ID NO: 43287
  source 1..120: mol_type = other DNA

SEQ ID NO: 73242 - DNA, 120 bp, synthetic construct; identical to SEQ ID NO: 43288
  source 1..120: mol_type = other DNA

SEQ ID NO: 73243 - DNA, 120 bp, synthetic construct; identical to SEQ ID NO: 43289
  source 1..120: mol_type = other DNA

SEQ ID NO: 73244 - DNA, 120 bp, synthetic construct; identical to SEQ ID NO: 12280
  source 1..120: mol_type = other DNA

SEQ ID NO: 73245 - DNA, 120 bp, synthetic construct; identical to SEQ ID NO: 43291
  source 1..120: mol_type = other DNA

SEQ ID NO: 73246 - DNA, 120 bp, synthetic construct; identical to SEQ ID NO: 43292
  source 1..120: mol_type = other DNA

SEQ ID NO: 73247 - DNA, 120 bp, synthetic construct; identical to SEQ ID NO: 43293
  source 1..120: mol_type = other DNA

SEQ ID NO: 73248 - DNA, 120 bp, synthetic construct; identical to SEQ ID NO: 12281
  source 1..120: mol_type = other DNA

SEQ ID NO: 73249 - DNA, 120 bp, synthetic construct; identical to SEQ ID NO: 43295
  source 1..120: mol_type = other DNA

SEQ ID NO: 73250 - DNA, 120 bp, synthetic construct; identical to SEQ ID NO: 43296
  source 1..120: mol_type = other DNA

SEQ ID NO: 73251 - DNA, 120 bp, synthetic construct; identical to SEQ ID NO: 12282
  source 1..120: mol_type = other DNA

SEQ ID NO: 73252 - DNA, 120 bp, synthetic construct; identical to SEQ ID NO: 43298
  source 1..120: mol_type = other DNA

SEQ ID NO: 73253 - DNA, 120 bp, synthetic construct; identical to SEQ ID NO: 43299
  source 1..120: mol_type = other DNA

SEQ ID NO: 73254 - DNA, 120 bp, synthetic construct; identical to SEQ ID NO: 43300
  source 1..120: mol_type = other DNA

SEQ ID NO: 73255 - DNA, 120 bp, synthetic construct; identical to SEQ ID NO: 12283
  source 1..120: mol_type = other DNA

SEQ ID NO: 73256 - DNA, 120 bp, synthetic construct; identical to SEQ ID NO: 43302
  source 1..120: mol_type = other DNA

SEQ ID NO: 73257 - DNA, 120 bp, synthetic construct; identical to SEQ ID NO: 43303
  source 1..120: mol_type = other DNA

SEQ ID NO: 73258 - DNA, 120 bp, synthetic construct; identical to SEQ ID NO: 43304
  source 1..120: mol_type = other DNA

SEQ ID NO: 73259 - DNA, 120 bp, synthetic construct; identical to SEQ ID NO: 43305
  source 1..120: mol_type = other DNA

SEQ ID NO: 73260 - DNA, 120 bp, synthetic construct; identical to SEQ ID NO: 12284
  source 1..120: mol_type = other DNA

SEQ ID NO: 73261 - DNA, 120 bp, synthetic construct; identical to SEQ ID NO: 43307
  source 1..120: mol_type = other DNA

SEQ ID NO: 73262 - DNA, 120 bp, synthetic construct; identical to SEQ ID NO: 43308
  source 1..120: mol_type = other DNA

SEQ ID NO: 73263 - DNA, 120 bp, synthetic construct; identical to SEQ ID NO: 43309
  source 1..120: mol_type = other DNA

SEQ ID NO: 73264 - DNA, 120 bp, synthetic construct; identical to SEQ ID NO: 12285
  source 1..120: mol_type = other DNA

SEQ ID NO: 73265 - DNA, 120 bp, synthetic construct; identical to SEQ ID NO: 43311
  source 1..120: mol_type = other DNA

SEQ ID NO: 73266 - DNA, 120 bp, synthetic construct; identical to SEQ ID NO: 43312
  source 1..120: mol_type = other DNA

SEQ ID NO: 73267 - DNA, 120 bp, synthetic construct; identical to SEQ ID NO: 12286
  source 1..120: mol_type = other DNA

SEQ ID NO: 73268 - DNA, 120 bp, synthetic construct; identical to SEQ ID NO: 43314
  source 1..120: mol_type = other DNA

SEQ ID NO: 73269 - DNA, 120 bp, synthetic construct; identical to SEQ ID NO: 43315
  source 1..120: mol_type = other DNA

SEQ ID NO: 73270 - DNA, 120 bp, synthetic construct; identical to SEQ ID NO: 43316
  source 1..120: mol_type = other DNA

SEQ ID NO: 73271 - DNA, 120 bp, synthetic construct; identical to SEQ ID NO: 12287
  source 1..120: mol_type = other DNA

SEQ ID NO: 73272 - DNA, 120 bp, synthetic construct; identical to SEQ ID NO: 43318
  source 1..120: mol_type = other DNA

SEQ ID NO: 73273 - DNA, 120 bp, synthetic construct; identical to SEQ ID NO: 43319
  source 1..120: mol_type = other DNA

SEQ ID NO: 73274 - DNA, 120 bp, synthetic construct; identical to SEQ ID NO: 43320
  source 1..120: mol_type = other DNA

SEQ ID NO: 73275 - DNA, 120 bp, synthetic construct; identical to SEQ ID NO: 43321
  source 1..120: mol_type = other DNA

SEQ ID NO: 73276 - DNA, 120 bp, synthetic construct; identical to SEQ ID NO: 12288
  source 1..120: mol_type = other DNA

SEQ ID NO: 73277 - DNA, 120 bp, synthetic construct; identical to SEQ ID NO: 43323
  source 1..120: mol_type = other DNA

SEQ ID NO: 73278 - DNA, 120 bp, synthetic construct; identical to SEQ ID NO: 43324
  source 1..120: mol_type = other DNA

SEQ ID NO: 73279 - DNA, 120 bp, synthetic construct; identical to SEQ ID NO: 12289
  source 1..120: mol_type = other DNA

SEQ ID NO: 73280 - DNA, 120 bp, synthetic construct; identical to SEQ ID NO: 43326
  source 1..120: mol_type = other DNA

SEQ ID NO: 73281 - DNA, 120 bp, synthetic construct; identical to SEQ ID NO: 43327
  source 1..120: mol_type = other DNA

SEQ ID NO: 73282 - DNA, 120 bp, synthetic construct; identical to SEQ ID NO: 43328
  source 1..120: mol_type = other DNA

SEQ ID NO: 73283 - DNA, 120 bp, synthetic construct; identical to SEQ ID NO: 12290
  source 1..120: mol_type = other DNA

SEQ ID NO: 73284 - DNA, 120 bp, synthetic construct; identical to SEQ ID NO: 43330
  source 1..120: mol_type = other DNA

SEQ ID NO: 73285 - DNA, 120 bp, synthetic construct; identical to SEQ ID NO: 43331
  source 1..120: mol_type = other DNA

SEQ ID NO: 73286 - DNA, 120 bp, synthetic construct; identical to SEQ ID NO: 43332
  source 1..120: mol_type = other DNA

SEQ ID NO: 73287 - DNA, 120 bp, synthetic construct; identical to SEQ ID NO: 12291
  source 1..120: mol_type = other DNA

SEQ ID NO: 73288 - DNA, 120 bp, synthetic construct; identical to SEQ ID NO: 43334
  source 1..120: mol_type = other DNA

SEQ ID NO: 73289 - DNA, 120 bp, synthetic construct; identical to SEQ ID NO: 43335
  source 1..120: mol_type = other DNA

SEQ ID NO: 73290 - DNA, 120 bp, synthetic construct; identical to SEQ ID NO: 43336
  source 1..120: mol_type = other DNA

SEQ ID NO: 73291 - DNA, 120 bp, synthetic construct; identical to SEQ ID NO: 43337
  source 1..120: mol_type = other DNA

SEQ ID NO: 73292 - DNA, 120 bp, synthetic construct; identical to SEQ ID NO: 12292
  source 1..120: mol_type = other DNA

SEQ ID NO: 73293 - DNA, 120 bp, synthetic construct; identical to SEQ ID NO: 43339
  source 1..120: mol_type = other DNA

SEQ ID NO: 73294 - DNA, 120 bp, synthetic construct; identical to SEQ ID NO: 43340
  source 1..120: mol_type = other DNA

SEQ ID NO: 73295 - DNA, 120 bp, synthetic construct; identical to SEQ ID NO: 43341
  source 1..120: mol_type = other DNA

SEQ ID NO: 73296 - DNA, 120 bp, synthetic construct; identical to SEQ ID NO: 43342
  source 1..120: mol_type = other DNA

SEQ ID NO: 73297 - DNA, 120 bp, synthetic construct; identical to SEQ ID NO: 12293
  source 1..120: mol_type = other DNA

SEQ ID NO: 73298 - DNA, 120 bp, synthetic construct; identical to SEQ ID NO: 43344
  source 1..120: mol_type = other DNA

SEQ ID NO: 73299 - DNA, 120 bp, synthetic construct; identical to SEQ ID NO: 43345
  source 1..120: mol_type = other DNA

SEQ ID NO: 73300 - DNA, 120 bp, synthetic construct; identical to SEQ ID NO: 43346
  source 1..120: mol_type = other DNA

SEQ ID NO: 73301 - DNA, 120 bp, synthetic construct; identical to SEQ ID NO: 12294
  source 1..120: mol_type = other DNA

SEQ ID NO: 73302 - DNA, 120 bp, synthetic construct; identical to SEQ ID NO: 43348
  source 1..120: mol_type = other DNA

SEQ ID NO: 73303 - DNA, 120 bp, synthetic construct; identical to SEQ ID NO: 43349
  source 1..120: mol_type = other DNA

SEQ ID NO: 73304 - DNA, 120 bp, synthetic construct; identical to SEQ ID NO: 12295
  source 1..120: mol_type = other DNA

SEQ ID NO: 73305 - DNA, 120 bp, synthetic construct; identical to SEQ ID NO: 43351
  source 1..120: mol_type = other DNA

SEQ ID NO: 73306 - DNA, 120 bp, synthetic construct; identical to SEQ ID NO: 4950
  source 1..120: mol_type = other DNA

SEQ ID NO: 73307 - DNA, 120 bp, synthetic construct; identical to SEQ ID NO: 43353
  source 1..120: mol_type = other DNA

SEQ ID NO: 73308 - DNA, 120 bp, synthetic construct; identical to SEQ ID NO: 12296
  source 1..120: mol_type = other DNA

SEQ ID NO: 73309 - DNA, 120 bp, synthetic construct; identical to SEQ ID NO: 43355
  source 1..120: mol_type = other DNA

SEQ ID NO: 73310 - DNA, 120 bp, synthetic construct; identical to SEQ ID NO: 43356
  source 1..120: mol_type = other DNA

SEQ ID NO: 73311 - DNA, 120 bp, synthetic construct; identical to SEQ ID NO: 43357
  source 1..120: mol_type = other DNA

SEQ ID NO: 73312 - DNA, 120 bp, synthetic construct; identical to SEQ ID NO: 43358
  source 1..120: mol_type = other DNA

SEQ ID NO: 73313 - DNA, 120 bp, synthetic construct; identical to SEQ ID NO: 12297
  source 1..120: mol_type = other DNA

SEQ ID NO: 73314 - DNA, 120 bp, synthetic construct; identical to SEQ ID NO: 43360
  source 1..120: mol_type = other DNA

SEQ ID NO: 73315 - DNA, 120 bp, synthetic construct; identical to SEQ ID NO: 43361
  source 1..120: mol_type = other DNA

SEQ ID NO: 73316 - DNA, 120 bp, synthetic construct; identical to SEQ ID NO: 12298
  source 1..120: mol_type = other DNA

SEQ ID NO: 73317 - DNA, 120 bp, synthetic construct; identical to SEQ ID NO: 43363
  source 1..120: mol_type = other DNA

SEQ ID NO: 73318 - DNA, 120 bp, synthetic construct; identical to SEQ ID NO: 43364
  source 1..120: mol_type = other DNA

SEQ ID NO: 73319 - DNA, 120 bp, synthetic construct; identical to SEQ ID NO: 43365
  source 1..120: mol_type = other DNA

SEQ ID NO: 73320 - DNA, 120 bp, synthetic construct; identical to SEQ ID NO: 43366
  source 1..120: mol_type = other DNA

SEQ ID NO: 73321 - DNA, 120 bp, synthetic construct; identical to SEQ ID NO: 12299
  source 1..120: mol_type = other DNA

SEQ ID NO: 73322 - DNA, 120 bp, synthetic construct; identical to SEQ ID NO: 43368
  source 1..120: mol_type = other DNA

SEQ ID NO: 73323 - DNA, 120 bp, synthetic construct; identical to SEQ ID NO: 43369
  source 1..120: mol_type = other DNA

SEQ ID NO: 73324 - DNA, 120 bp, synthetic construct; identical to SEQ ID NO: 12300
  source 1..120: mol_type = other DNA

SEQ ID NO: 73325 - DNA, 120 bp, synthetic construct; identical to SEQ ID NO: 43371
  source 1..120: mol_type = other DNA

SEQ ID NO: 73326 - DNA, 120 bp, synthetic construct; identical to SEQ ID NO: 43372
  source 1..120: mol_type = other DNA

SEQ ID NO: 73327 - DNA, 120 bp, synthetic construct; identical to SEQ ID NO: 43373
  source 1..120: mol_type = other DNA

SEQ ID NO: 73328 - DNA, 120 bp, synthetic construct; identical to SEQ ID NO: 43374
  source 1..120: mol_type = other DNA

SEQ ID NO: 73329 - DNA, 120 bp, synthetic construct; identical to SEQ ID NO: 12301
  source 1..120: mol_type = other DNA

SEQ ID NO: 73330 - DNA, 120 bp, synthetic construct; identical to SEQ ID NO: 43376
  source 1..120: mol_type = other DNA

SEQ ID NO: 73331 - DNA, 120 bp, synthetic construct; identical to SEQ ID NO: 43377
  source 1..120: mol_type = other DNA

SEQ ID NO: 73332 - DNA, 120 bp, synthetic construct; identical to SEQ ID NO: 12302
  source 1..120: mol_type = other DNA

SEQ ID NO: 73333 - DNA, 120 bp, synthetic construct; identical to SEQ ID NO: 43379
  source 1..120: mol_type = other DNA

SEQ ID NO: 73334 - DNA, 120 bp, synthetic construct; identical to SEQ ID NO: 43380
  source 1..120: mol_type = other DNA

SEQ ID NO: 73335 - DNA, 120 bp, synthetic construct; identical to SEQ ID NO: 12303
  source 1..120: mol_type = other DNA

SEQ ID NO: 73336 - DNA, 120 bp, synthetic construct; identical to SEQ ID NO: 43382
  source 1..120: mol_type = other DNA

SEQ ID NO: 73337 - DNA, 120 bp, synthetic construct; identical to SEQ ID NO: 43383
  source 1..120: mol_type = other DNA

SEQ ID NO: 73338 - DNA, 120 bp, synthetic construct; identical to SEQ ID NO: 43384
  source 1..120: mol_type = other DNA

SEQ ID NO: 73339 - DNA, 120 bp, synthetic construct; identical to SEQ ID NO: 12304
  source 1..120: mol_type = other DNA

SEQ ID NO: 73340 - DNA, 120 bp, synthetic construct; identical to SEQ ID NO: 43386
  source 1..120: mol_type = other DNA

SEQ ID NO: 73341 - DNA, 120 bp, synthetic construct; identical to SEQ ID NO: 43387
  source 1..120: mol_type = other DNA

SEQ ID NO: 73342 - DNA, 120 bp, synthetic construct; identical to SEQ ID NO: 43388
  source 1..120: mol_type = other DNA

SEQ ID NO: 73343 - DNA, 120 bp, synthetic construct; identical to SEQ ID NO: 12305
  source 1..120: mol_type = other DNA

SEQ ID NO: 73344 - DNA, 120 bp, synthetic construct; identical to SEQ ID NO: 43390
  source 1..120: mol_type = other DNA

SEQ ID NO: 73345 - DNA, 120 bp, synthetic construct; identical to SEQ ID NO: 43391
  source 1..120: mol_type = other DNA

SEQ ID NO: 73346 - DNA, 120 bp, synthetic construct; identical to SEQ ID NO: 43392
  source 1..120: mol_type = other DNA

SEQ ID NO: 73347 - DNA, 120 bp, synthetic construct; identical to SEQ ID NO: 43393
  source 1..120: mol_type = other DNA

SEQ ID NO: 73348 - DNA, 120 bp, synthetic construct; identical to SEQ ID NO: 12306
  source 1..120: mol_type = other DNA

SEQ ID NO: 73349 - DNA, 120 bp, synthetic construct; identical to SEQ ID NO: 43395
  source 1..120: mol_type = other DNA

SEQ ID NO: 73350 - DNA, 120 bp, synthetic construct; identical to SEQ ID NO: 43396
  source 1..120: mol_type = other DNA

SEQ ID NO: 73351 - DNA, 120 bp, synthetic construct; identical to SEQ ID NO: 12307
  source 1..120: mol_type = other DNA

SEQ ID NO: 73352 - DNA, 120 bp, synthetic construct; identical to SEQ ID NO: 43398
  source 1..120: mol_type = other DNA

SEQ ID NO: 73353 - DNA, 120 bp, synthetic construct; identical to SEQ ID NO: 43399
  source 1..120: mol_type = other DNA

SEQ ID NO: 73354 - DNA, 120 bp, synthetic construct; identical to SEQ ID NO: 43400
  source 1..120: mol_type = other DNA

SEQ ID NO: 73355 - DNA, 120 bp, synthetic construct; identical to SEQ ID NO: 12308
  source 1..120: mol_type = other DNA

SEQ ID NO: 73356 - DNA, 120 bp, synthetic construct; identical to SEQ ID NO: 43402
  source 1..120: mol_type = other DNA

SEQ ID NO: 73357 - DNA, 120 bp, synthetic construct; identical to SEQ ID NO: 43403
  source 1..120: mol_type = other DNA

SEQ ID NO: 73358 - DNA, 120 bp, synthetic construct; identical to SEQ ID NO: 43404
  source 1..120: mol_type = other DNA

SEQ ID NO: 73359 - DNA, 120 bp, synthetic construct; identical to SEQ ID NO: 43405
  source 1..120: mol_type = other DNA

SEQ ID NO: 73360 - DNA, 120 bp, synthetic construct; identical to SEQ ID NO: 12309
  source 1..120: mol_type = other DNA

SEQ ID NO: 73361 - DNA, 120 bp, synthetic construct; identical to SEQ ID NO: 43407
  source 1..120: mol_type = other DNA

SEQ ID NO: 73362 - DNA, 120 bp, synthetic construct; identical to SEQ ID NO: 43408
  source 1..120: mol_type = other DNA

SEQ ID NO: 73363 - DNA, 120 bp, synthetic construct; identical to SEQ ID NO: 12310
  source 1..120: mol_type = other DNA

SEQ ID NO: 73364 - DNA, 120 bp, synthetic construct; identical to SEQ ID NO: 43410
  source 1..120: mol_type = other DNA

SEQ ID NO: 73365 - DNA, 120 bp, synthetic construct; identical to SEQ ID NO: 43411
  source 1..120: mol_type = other DNA

SEQ ID NO: 73366 - DNA, 120 bp, synthetic construct; identical to SEQ ID NO: 43412
  source 1..120: mol_type = other DNA

SEQ ID NO: 73367 - DNA, 120 bp, synthetic construct; identical to SEQ ID NO: 43413
  source 1..120: mol_type = other DNA

SEQ ID NO: 73368 - DNA, 120 bp, synthetic construct; identical to SEQ ID NO: 12311
  source 1..120: mol_type = other DNA

SEQ ID NO: 73369 - DNA, 120 bp, synthetic construct; identical to SEQ ID NO: 43415
  source 1..120: mol_type = other DNA

SEQ ID NO: 73370 - DNA, 120 bp, synthetic construct; identical to SEQ ID NO: 43416
  source 1..120: mol_type = other DNA

SEQ ID NO: 73371 - DNA, 120 bp, synthetic construct; identical to SEQ ID NO: 12312
  source 1..120: mol_type = other DNA

SEQ ID NO: 73372 - DNA, 120 bp, synthetic construct; identical to SEQ ID NO: 43418
  source 1..120: mol_type = other DNA

SEQ ID NO: 73373 - DNA, 120 bp, synthetic construct; identical to SEQ ID NO: 43419
  source 1..120: mol_type = other DNA

SEQ ID NO: 73374 - DNA, 120 bp, synthetic construct; identical to SEQ ID NO: 43420
  source 1..120: mol_type = other DNA

SEQ ID NO: 73375 - DNA, 120 bp, synthetic construct; identical to SEQ ID NO: 43421
  source 1..120: mol_type = other DNA

SEQ ID NO: 73376 - DNA, 120 bp, synthetic construct; identical to SEQ ID NO: 12313
  source 1..120: mol_type = other DNA

SEQ ID NO: 73377 - DNA, 120 bp, synthetic construct; identical to SEQ ID NO: 43423
  source 1..120: mol_type = other DNA

SEQ ID NO: 73378 - DNA, 120 bp, synthetic construct; identical to SEQ ID NO: 43424
  source 1..120: mol_type = other DNA

SEQ ID NO: 73379 - DNA, 120 bp, synthetic construct; identical to SEQ ID NO: 12314
  source 1..120: mol_type = other DNA

SEQ ID NO: 73380 - DNA, 120 bp, synthetic construct; identical to SEQ ID NO: 43426
  source 1..120: mol_type = other DNA

SEQ ID NO: 73381 - DNA, 120 bp, synthetic construct; identical to SEQ ID NO: 43427
  source 1..120: mol_type = other DNA

SEQ ID NO: 73382 - DNA, 120 bp, synthetic construct; identical to SEQ ID NO: 43428
  source 1..120: mol_type = other DNA

SEQ ID NO: 73383 - DNA, 120 bp, synthetic construct; identical to SEQ ID NO: 43429
  source 1..120: mol_type = other DNA

SEQ ID NO: 73384 - DNA, 120 bp, synthetic construct; identical to SEQ ID NO: 12315
  source 1..120: mol_type = other DNA

SEQ ID NO: 73385 - DNA, 120 bp, synthetic construct; identical to SEQ ID NO: 43431
  source 1..120: mol_type = other DNA

SEQ ID NO: 73386 - DNA, 120 bp, synthetic construct; identical to SEQ ID NO: 43432
  source 1..120: mol_type = other DNA

SEQ ID NO: 73387 - DNA, 120 bp, synthetic construct; identical to SEQ ID NO: 43433
  source 1..120: mol_type = other DNA

SEQ ID NO: 73388 - DNA, 120 bp, synthetic construct; identical to SEQ ID NO: 12316
  source 1..120: mol_type = other DNA

SEQ ID NO: 73389 - DNA, 120 bp, synthetic construct; identical to SEQ ID NO: 43435
  source 1..120: mol_type = other DNA

SEQ ID NO: 73390 - DNA, 120 bp, synthetic construct; identical to SEQ ID NO: 43436
  source 1..120: mol_type = other DNA

SEQ ID NO: 73391 - DNA, 120 bp, synthetic construct; identical to SEQ ID NO: 43437
  source 1..120: mol_type = other DNA

SEQ ID NO: 73392 - DNA, 120 bp, synthetic construct; identical to SEQ ID NO: 12317
  source 1..120: mol_type = other DNA

SEQ ID NO: 73393 - DNA, 120 bp, synthetic construct; identical to SEQ ID NO: 43439
  source 1..120: mol_type = other DNA

SEQ ID NO: 73394 - DNA, 120 bp, synthetic construct; identical to SEQ ID NO: 43440
  source 1..120: mol_type = other DNA

SEQ ID NO: 73395 - DNA, 120 bp, synthetic construct; identical to SEQ ID NO: 43441
  source 1..120: mol_type = other DNA

SEQ ID NO: 73396 - DNA, 120 bp, synthetic construct; identical to SEQ ID NO: 12318
  source 1..120: mol_type = other DNA

SEQ ID NO: 73397 - DNA, 120 bp, synthetic construct; identical to SEQ ID NO: 43443
  source 1..120: mol_type = other DNA

SEQ ID NO: 73398 - DNA, 120 bp, synthetic construct; identical to SEQ ID NO: 43444
  source 1..120: mol_type = other DNA

SEQ ID NO: 73399 - DNA, 120 bp, synthetic construct; identical to SEQ ID NO: 12319
  source 1..120: mol_type = other DNA

SEQ ID NO: 73400 - DNA, 120 bp, synthetic construct; identical to SEQ ID NO: 43446
  source 1..120: mol_type = other DNA

SEQ ID NO: 73401 - DNA, 120 bp, synthetic construct; identical to SEQ ID NO: 43447
  source 1..120: mol_type = other DNA

SEQ ID NO: 73402 - DNA, 120 bp, synthetic construct; identical to SEQ ID NO: 43448
  source 1..120: mol_type = other DNA

SEQ ID NO: 73403 - DNA, 120 bp, synthetic construct; identical to SEQ ID NO: 43449
  source 1..120: mol_type = other DNA

SEQ ID NO: 73404 - DNA, 120 bp, synthetic construct; identical to SEQ ID NO: 12320
  source 1..120: mol_type = other DNA

SEQ ID NO: 73405 - DNA, 120 bp, synthetic construct; identical to SEQ ID NO: 43451
  source 1..120: mol_type = other DNA

SEQ ID NO: 73406 - DNA, 120 bp, synthetic construct; identical to SEQ ID NO: 43452
  source 1..120: mol_type = other DNA

SEQ ID NO: 73407 - DNA, 120 bp, synthetic construct; identical to SEQ ID NO: 12321
  source 1..120: mol_type = other DNA

SEQ ID NO: 73408 - DNA, 120 bp, synthetic construct; identical to SEQ ID NO: 43454
  source 1..120: mol_type = other DNA

SEQ ID NO: 73409 - DNA, 120 bp, synthetic construct; identical to SEQ ID NO: 43455
  source 1..120: mol_type = other DNA

SEQ ID NO: 73410 - DNA, 120 bp, synthetic construct; identical to SEQ ID NO: 43456
  source 1..120: mol_type = other DNA

SEQ ID NO: 73411 - DNA, 120 bp, synthetic construct; identical to SEQ ID NO: 12322
  source 1..120: mol_type = other DNA

SEQ ID NO: 73412 - DNA, 120 bp, synthetic construct; identical to SEQ ID NO: 43458
  source 1..120: mol_type = other DNA

SEQ ID NO: 73413 - DNA, 120 bp, synthetic construct; identical to SEQ ID NO: 43459
  source 1..120: mol_type = other DNA

SEQ ID NO: 73414 - DNA, 120 bp, synthetic construct; identical to SEQ ID NO: 43460
  source 1..120: mol_type = other DNA

SEQ ID NO: 73415 - DNA, 120 bp, synthetic construct; identical to SEQ ID NO: 43461
  source 1..120: mol_type = other DNA

SEQ ID NO: 73416 - DNA, 120 bp, synthetic construct; identical to SEQ ID NO: 12323
  source 1..120: mol_type = other DNA

SEQ ID NO: 73417 - DNA, 120 bp, synthetic construct; identical to SEQ ID NO: 43463
  source 1..120: mol_type = other DNA

SEQ ID NO: 73418 - DNA, 120 bp, synthetic construct; identical to SEQ ID NO: 43464
  source 1..120: mol_type = other DNA

SEQ ID NO: 73419 - DNA, 120 bp, synthetic construct; identical to SEQ ID NO: 43465
  source 1..120: mol_type = other DNA

SEQ ID NO: 73420 - DNA, 120 bp, synthetic construct; identical to SEQ ID NO: 12324
  source 1..120: mol_type = other DNA

SEQ ID NO: 73421 - DNA, 120 bp, synthetic construct; identical to SEQ ID NO: 43467
  source 1..120: mol_type = other DNA

SEQ ID NO: 73422 - DNA, 120 bp, synthetic construct; identical to SEQ ID NO: 43468
  source 1..120: mol_type = other DNA

SEQ ID NO: 73423 - DNA, 120 bp, synthetic construct; identical to SEQ ID NO: 43469
  source 1..120: mol_type = other DNA

SEQ ID NO: 73424 - DNA, 120 bp, synthetic construct; identical to SEQ ID NO: 12325
  source 1..120: mol_type = other DNA

SEQ ID NO: 73425 - DNA, 120 bp, synthetic construct; identical to SEQ ID NO: 43471
  source 1..120: mol_type = other DNA

SEQ ID NO: 73426 - DNA, 120 bp, synthetic construct; identical to SEQ ID NO: 43472
  source 1..120: mol_type = other DNA

SEQ ID NO: 73427 - DNA, 120 bp, synthetic construct; identical to SEQ ID NO: 43473
  source 1..120: mol_type = other DNA

SEQ ID NO: 73428 - DNA, 120 bp, synthetic construct; identical to SEQ ID NO: 12326
  source 1..120: mol_type = other DNA

SEQ ID NO: 73429 - DNA, 120 bp, synthetic construct; identical to SEQ ID NO: 43475
  source 1..120: mol_type = other DNA

SEQ ID NO: 73430 - DNA, 120 bp, synthetic construct; identical to SEQ ID NO: 43476
  source 1..120: mol_type = other DNA

SEQ ID NO: 73431 - DNA, 120 bp, synthetic construct; identical to SEQ ID NO: 12327
  source 1..120: mol_type = other DNA

SEQ ID NO: 73432 - DNA, 120 bp, synthetic construct; identical to SEQ ID NO: 43478
  source 1..120: mol_type = other DNA

SEQ ID NO: 73433 - DNA, 120 bp, synthetic construct; identical to SEQ ID NO: 43479
  source 1..120: mol_type = other DNA

SEQ ID NO: 73434 - DNA, 120 bp, synthetic construct; identical to SEQ ID NO: 43480
  source 1..120: mol_type = other DNA

SEQ ID NO: 73435 - DNA, 120 bp, synthetic construct; identical to SEQ ID NO: 4980
  source 1..120: mol_type = other DNA

SEQ ID NO: 73436 - DNA, 120 bp, synthetic construct; identical to SEQ ID NO: 43482
  source 1..120: mol_type = other DNA

SEQ ID NO: 73437 - DNA, 120 bp, synthetic construct; identical to SEQ ID NO: 43483
  source 1..120: mol_type = other DNA

SEQ ID NO: 73438 - DNA, 120 bp, synthetic construct; identical to SEQ ID NO: 43484
  source 1..120: mol_type = other DNA

SEQ ID NO: 73439 - DNA, 120 bp, synthetic construct; identical to SEQ ID NO: 43485
  source 1..120: mol_type = other DNA

SEQ ID NO: 73440 - DNA, 120 bp, synthetic construct; identical to SEQ ID NO: 12329
  source 1..120: mol_type = other DNA

SEQ ID NO: 73441 - DNA, 120 bp, synthetic construct; identical to SEQ ID NO: 43487
  source 1..120: mol_type = other DNA

SEQ ID NO: 73442 - DNA, 120 bp, synthetic construct; identical to SEQ ID NO: 43488
  source 1..120: mol_type = other DNA

SEQ ID NO: 73443 - DNA, 120 bp, synthetic construct; identical to SEQ ID NO: 43489
  source 1..120: mol_type = other DNA

SEQ ID NO: 73444 - DNA, 120 bp, synthetic construct; identical to SEQ ID NO: 12330
  source 1..120: mol_type = other DNA

SEQ ID NO: 73445 - DNA, 120 bp, synthetic construct; identical to SEQ ID NO: 43491
  source 1..120: mol_type = other DNA

SEQ ID NO: 73446 - DNA, 120 bp, synthetic construct; identical to SEQ ID NO: 43492
  source 1..120: mol_type = other DNA

SEQ ID NO: 73447 - DNA, 120 bp, synthetic construct; identical to SEQ ID NO: 43493
  source 1..120: mol_type = other DNA

SEQ ID NO: 73448 - DNA, 120 bp, synthetic construct; identical to SEQ ID NO: 43494
  source 1..120: mol_type = other DNA

SEQ ID NO: 73449 - DNA, 120 bp, synthetic construct; identical to SEQ ID NO: 12331
  source 1..120: mol_type = other DNA

SEQ ID NO: 73450 - DNA, 120 bp, synthetic construct; identical to SEQ ID NO: 43496
  source 1..120: mol_type = other DNA

SEQ ID NO: 73451 - DNA, 120 bp, synthetic construct; identical to SEQ ID NO: 43497
  source 1..120: mol_type = other DNA

SEQ ID NO: 73452 - DNA, 120 bp, synthetic construct; identical to SEQ ID NO: 43498
  source 1..120: mol_type = other DNA

SEQ ID NO: 73453 - DNA, 120 bp, synthetic construct; identical to SEQ ID NO: 12332
  source 1..120: mol_type = other DNA

SEQ ID NO: 73454 - DNA, 120 bp, synthetic construct; identical to SEQ ID NO: 43500
  source 1..120: mol_type = other DNA

SEQ ID NO: 73455 - DNA, 120 bp, synthetic construct; identical to SEQ ID NO: 43501
  source 1..120: mol_type = other DNA

SEQ ID NO: 73456 - DNA, 120 bp, synthetic construct; identical to SEQ ID NO: 43502
  source 1..120: mol_type = other DNA

SEQ ID NO: 73457 - DNA, 120 bp, synthetic construct; identical to SEQ ID NO: 12333
  source 1..120: mol_type = other DNA

SEQ ID NO: 73458 - DNA, 120 bp, synthetic construct; identical to SEQ ID NO: 43504
  source 1..120: mol_type = other DNA

SEQ ID NO: 73459 - DNA, 120 bp, synthetic construct; identical to SEQ ID NO: 43505
  source 1..120: mol_type = other DNA

SEQ ID NO: 73460 - DNA, 120 bp, synthetic construct; identical to SEQ ID NO: 43506
  source 1..120: mol_type = other DNA

SEQ ID NO: 73461 - DNA, 120 bp, synthetic construct; identical to SEQ ID NO: 12334
  source 1..120: mol_type = other DNA

SEQ ID NO: 73462 - DNA, 120 bp, synthetic construct; identical to SEQ ID NO: 43508
  source 1..120: mol_type = other DNA

SEQ ID NO: 73463 - DNA, 120 bp, synthetic construct; identical to SEQ ID NO: 43509
  source 1..120: mol_type = other DNA

SEQ ID NO: 73464 - DNA, 120 bp, synthetic construct; identical to SEQ ID NO: 43510
  source 1..120: mol_type = other DNA

SEQ ID NO: 73465 - DNA, 120 bp, synthetic construct; identical to SEQ ID NO: 12335
  source 1..120: mol_type = other DNA

SEQ ID NO: 73466 - DNA, 120 bp, synthetic construct; identical to SEQ ID NO: 43512
  source 1..120: mol_type = other DNA

SEQ ID NO: 73467 - DNA, 120 bp, synthetic construct; identical to SEQ ID NO: 43513
  source 1..120: mol_type = other DNA

SEQ ID NO: 73468 - DNA, 120 bp, synthetic construct; identical to SEQ ID NO: 12336
  source 1..120: mol_type = other DNA

SEQ ID NO: 73469 - DNA, 120 bp, synthetic construct; identical to SEQ ID NO: 43515
  source 1..120: mol_type = other DNA

SEQ ID NO: 73470 - DNA, 120 bp, synthetic construct; identical to SEQ ID NO: 43516
  source 1..120: mol_type = other DNA

SEQ ID NO: 73471 - DNA, 120 bp, synthetic construct; identical to SEQ ID NO: 43517
  source 1..120: mol_type = other DNA

SEQ ID NO: 73472 - DNA, 120 bp, synthetic construct; identical to SEQ ID NO: 12337
  source 1..120: mol_type = other DNA

SEQ ID NO: 73473 - DNA, 120 bp, synthetic construct; identical to SEQ ID NO: 43519
  source 1..120: mol_type = other DNA

SEQ ID NO: 73474 - DNA, 120 bp, synthetic construct; identical to SEQ ID NO: 43520
  source 1..120: mol_type = other DNA

SEQ ID NO: 73475 - DNA, 120 bp, synthetic construct; identical to SEQ ID NO: 43521
  source 1..120: mol_type = other DNA

SEQ ID NO: 73476 - DNA, 120 bp, synthetic construct; identical to SEQ ID NO: 43522
  source 1..120: mol_type = other DNA

SEQ ID NO: 73477 - DNA, 120 bp, synthetic construct; identical to SEQ ID NO: 12338
  source 1..120: mol_type = other DNA

SEQ ID NO: 73478 - DNA, 120 bp, synthetic construct; identical to SEQ ID NO: 43524
  source 1..120: mol_type = other DNA

SEQ ID NO: 73479 - DNA, 120 bp, synthetic construct; identical to SEQ ID NO: 43525
  source 1..120: mol_type = other DNA

SEQ ID NO: 73480 - DNA, 120 bp, synthetic construct; identical to SEQ ID NO: 43526
  source 1..120: mol_type = other DNA

SEQ ID NO: 73481 - DNA, 120 bp, synthetic construct; identical to SEQ ID NO: 12339
  source 1..120: mol_type = other DNA

SEQ ID NO: 73482 - DNA, 120 bp, synthetic construct; identical to SEQ ID NO: 43528
  source 1..120: mol_type = other DNA

SEQ ID NO: 73483 - DNA, 120 bp, synthetic construct; identical to SEQ ID NO: 43529
  source 1..120: mol_type = other DNA

SEQ ID NO: 73484 - DNA, 120 bp, synthetic construct; identical to SEQ ID NO: 12340
  source 1..120: mol_type = other DNA

SEQ ID NO: 73485 - DNA, 120 bp, synthetic construct; identical to SEQ ID NO: 43531
  source 1..120: mol_type = other DNA

SEQ ID NO: 73486 - DNA, 120 bp, synthetic construct; identical to SEQ ID NO: 43532
  source 1..120: mol_type = other DNA

SEQ ID NO: 73487 - DNA, 120 bp, synthetic construct; identical to SEQ ID NO: 43533
  source 1..120: mol_type = other DNA

SEQ ID NO: 73488 - DNA, 120 bp, synthetic construct; identical to SEQ ID NO: 12341
  source 1..120: mol_type = other DNA

SEQ ID NO: 73489 - DNA, 120 bp, synthetic construct; identical to SEQ ID NO: 43535
  source 1..120: mol_type = other DNA

SEQ ID NO: 73490 - DNA, 120 bp, synthetic construct; identical to SEQ ID NO: 43536
  source 1..120: mol_type = other DNA

SEQ ID NO: 73491 - DNA, 120 bp, synthetic construct; identical to SEQ ID NO: 43537
  source 1..120: mol_type = other DNA

SEQ ID NO: 73492 - DNA, 120 bp, synthetic construct; identical to SEQ ID NO: 12342
  source 1..120: mol_type = other DNA

SEQ ID NO: 73493 - DNA, 120 bp, synthetic construct; identical to SEQ ID NO: 43539
  source 1..120: mol_type = other DNA

SEQ ID NO: 73494 - DNA, 120 bp, synthetic construct; identical to SEQ ID NO: 43540
  source 1..120: mol_type = other DNA

SEQ ID NO: 73495 - DNA, 120 bp, synthetic construct; identical to SEQ ID NO: 43541
  source 1..120: mol_type = other DNA

SEQ ID NO: 73496 - DNA, 120 bp, synthetic construct; identical to SEQ ID NO: 43542
  source 1..120: mol_type = other DNA

SEQ ID NO: 73497 - DNA, 120 bp, synthetic construct; identical to SEQ ID NO: 12343
  source 1..120: mol_type = other DNA

SEQ ID NO: 73498 - DNA, 120 bp, synthetic construct; identical to SEQ ID NO: 43544
  source 1..120: mol_type = other DNA

SEQ ID NO: 73499 - DNA, 120 bp, synthetic construct; identical to SEQ ID NO: 43545
  source 1..120: mol_type = other DNA

SEQ ID NO: 73500 - DNA, 120 bp, synthetic construct; identical to SEQ ID NO: 12344
  source 1..120: mol_type = other DNA

SEQ ID NO: 73501 - DNA, 120 bp, synthetic construct; identical to SEQ ID NO: 43547
  source 1..120: mol_type = other DNA

SEQ ID NO: 73502 - DNA, 120 bp, synthetic construct; identical to SEQ ID NO: 43548
  source 1..120: mol_type = other DNA

SEQ ID NO: 73503 - DNA, 120 bp, synthetic construct; identical to SEQ ID NO: 43549
  source 1..120: mol_type = other DNA

SEQ ID NO: 73504 - DNA, 120 bp, synthetic construct; identical to SEQ ID NO: 12345
  source 1..120: mol_type = other DNA

SEQ ID NO: 73505 - DNA, 120 bp, synthetic construct; identical to SEQ ID NO: 43551
  source 1..120: mol_type = other DNA

SEQ ID NO: 73506 - DNA, 120 bp, synthetic construct; identical to SEQ ID NO: 43552
  source 1..120: mol_type = other DNA

SEQ ID NO: 73507 - DNA, 120 bp, synthetic construct; identical to SEQ ID NO: 43553
  source 1..120: mol_type = other DNA

SEQ ID NO: 73508 - DNA, 120 bp, synthetic construct; identical to SEQ ID NO: 12346
  source 1..120: mol_type = other DNA

SEQ ID NO: 73509 - DNA, 120 bp, synthetic construct; identical to SEQ ID NO: 43555
  source 1..120: mol_type = other DNA

SEQ ID NO: 73510 - DNA, 120 bp, synthetic construct; identical to SEQ ID NO: 43556
  source 1..120: mol_type = other DNA

SEQ ID NO: 73511 - DNA, 120 bp, synthetic construct; identical to SEQ ID NO: 43557
  source 1..120: mol_type = other DNA

SEQ ID NO: 73512 - DNA, 120 bp, synthetic construct; identical to SEQ ID NO: 43558
  source 1..120: mol_type = other DNA

SEQ ID NO: 73513 - DNA, 120 bp, synthetic construct; identical to SEQ ID NO: 12347
  source 1..120: mol_type = other DNA

SEQ ID NO: 73514 - DNA, 120 bp, synthetic construct; identical to SEQ ID NO: 43560
  source 1..120: mol_type = other DNA

SEQ ID NO: 73515 - DNA, 120 bp, synthetic construct; identical to SEQ ID NO: 43561
  source 1..120: mol_type = other DNA

SEQ ID NO: 73516 - DNA, 120 bp, synthetic construct; identical to SEQ ID NO: 43562
  source 1..120: mol_type = other DNA

SEQ ID NO: 73517 - DNA, 120 bp, synthetic construct; identical to SEQ ID NO: 12348
  source 1..120: mol_type = other DNA

SEQ ID NO: 73518 - DNA, 120 bp, synthetic construct; identical to SEQ ID NO: 43564
  source 1..120: mol_type = other DNA

SEQ ID NO: 73519 - DNA, 120 bp, synthetic construct; identical to SEQ ID NO: 43565
  source 1..120: mol_type = other DNA

SEQ ID NO: 73520 - DNA, 120 bp, synthetic construct; identical to SEQ ID NO: 43566
  source 1..120: mol_type = other DNA

SEQ ID NO: 73521 - DNA, 120 bp, synthetic construct; identical to SEQ ID NO: 12349
  source 1..120: mol_type = other DNA

SEQ ID NO: 73522 - DNA, 120 bp, synthetic construct; identical to SEQ ID NO: 43568
  source 1..120: mol_type = other DNA

SEQ ID NO: 73523 - DNA, 120 bp, synthetic construct; identical to SEQ ID NO: 43569
  source 1..120: mol_type = other DNA

SEQ ID NO: 73524 - DNA, 120 bp, synthetic construct; identical to SEQ ID NO: 43570
  source 1..120: mol_type = other DNA

SEQ ID NO: 73525 - DNA, 120 bp, synthetic construct; identical to SEQ ID NO: 12350
  source 1..120: mol_type = other DNA

SEQ ID NO: 73526 - DNA, 120 bp, synthetic construct; identical to SEQ ID NO: 43572
  source 1..120: mol_type = other DNA

SEQ ID NO: 73527 - DNA, 120 bp, synthetic construct; identical to SEQ ID NO: 43573
  source 1..120: mol_type = other DNA

SEQ ID NO: 73528 - DNA, 120 bp, synthetic construct; identical to SEQ ID NO: 43574
  source 1..120: mol_type = other DNA

SEQ ID NO: 73529 - DNA, 120 bp, synthetic construct; identical to SEQ ID NO: 12351
  source 1..120: mol_type = other DNA

SEQ ID NO: 73530 - DNA, 120 bp, synthetic construct; identical to SEQ ID NO: 43576
  source 1..120: mol_type = other DNA

SEQ ID NO: 73531 - DNA, 120 bp, synthetic construct; identical to SEQ ID NO: 43577
  source 1..120: mol_type = other DNA

SEQ ID NO: 73532 - DNA, 120 bp, synthetic construct; identical to SEQ ID NO: 43578
  source 1..120: mol_type = other DNA

SEQ ID NO: 73533 - DNA, 120 bp, synthetic construct; identical to SEQ ID NO: 43579
  source 1..120: mol_type = other DNA

SEQ ID NO: 73534 - DNA, 120 bp, synthetic construct; identical to SEQ ID NO: 12352
  source 1..120: mol_type = other DNA

SEQ ID NO: 73535 - DNA, 120 bp, synthetic construct; identical to SEQ ID NO: 43581
  source 1..120: mol_type = other DNA

SEQ ID NO: 73536 - DNA, 120 bp, synthetic construct; identical to SEQ ID NO: 43582
  source 1..120: mol_type = other DNA

SEQ ID NO: 73537 - DNA, 120 bp, synthetic construct; identical to SEQ ID NO: 12353
  source 1..120: mol_type = other DNA

SEQ ID NO: 73538 - DNA, 120 bp, synthetic construct; identical to SEQ ID NO: 43584
  source 1..120: mol_type = other DNA

SEQ ID NO: 73539 - DNA, 120 bp, synthetic construct; identical to SEQ ID NO: 43585
  source 1..120: mol_type = other DNA

SEQ ID NO: 73540 - DNA, 120 bp, synthetic construct; identical to SEQ ID NO: 43586
  source 1..120: mol_type = other DNA

SEQ ID NO: 73541 - DNA, 120 bp, synthetic construct; identical to SEQ ID NO: 12354
  source 1..120: mol_type = other DNA

SEQ ID NO: 73542 - DNA, 120 bp, synthetic construct; identical to SEQ ID NO: 43588
  source 1..120: mol_type = other DNA

SEQ ID NO: 73543 - DNA, 120 bp, synthetic construct; identical to SEQ ID NO: 43589
  source 1..120: mol_type = other DNA

SEQ ID NO: 73544 - DNA, 120 bp, synthetic construct; identical to SEQ ID NO: 12355
  source 1..120: mol_type = other DNA

SEQ ID NO: 73545 - DNA, 120 bp, synthetic construct; identical to SEQ ID NO: 43591
  source 1..120: mol_type = other DNA

SEQ ID NO: 73546 - DNA, 120 bp, synthetic construct; identical to SEQ ID NO: 43592
  source 1..120: mol_type = other DNA

SEQ ID NO: 73547 - DNA, 120 bp, synthetic construct; identical to SEQ ID NO: 43593
  source 1..120: mol_type = other DNA

SEQ ID NO: 73548 - DNA, 120 bp, synthetic construct; identical to SEQ ID NO: 43594
  source 1..120: mol_type = other DNA

SEQ ID NO: 73549 - DNA, 120 bp, synthetic construct; identical to SEQ ID NO: 12356
  source 1..120: mol_type = other DNA

SEQ ID NO: 73550 - DNA, 120 bp, synthetic construct; identical to SEQ ID NO: 43596
  source 1..120: mol_type = other DNA

SEQ ID NO: 73551 - DNA, 120 bp, synthetic construct; identical to SEQ ID NO: 43597
  source 1..120: mol_type = other DNA

SEQ ID NO: 73552 - DNA, 120 bp, synthetic construct; identical to SEQ ID NO: 43598
  source 1..120: mol_type = other DNA

SEQ ID NO: 73553 - DNA, 120 bp, synthetic construct; identical to SEQ ID NO: 12357
  source 1..120: mol_type = other DNA

SEQ ID NO: 73554 - DNA, 120 bp, synthetic construct; identical to SEQ ID NO: 43600
  source 1..120: mol_type = other DNA

SEQ ID NO: 73555 - DNA, 120 bp, synthetic construct; identical to SEQ ID NO: 43601
  source 1..120: mol_type = other DNA

SEQ ID NO: 73556 - DNA, 120 bp, synthetic construct; identical to SEQ ID NO: 43602
  source 1..120: mol_type = other DNA

SEQ ID NO: 73557 - DNA, 120 bp, synthetic construct; identical to SEQ ID NO: 12358
  source 1..120: mol_type = other DNA

SEQ ID NO: 73558 - DNA, 120 bp, synthetic construct; identical to SEQ ID NO: 43604
  source 1..120: mol_type = other DNA

SEQ ID NO: 73559 - DNA, 120 bp, synthetic construct; identical to SEQ ID NO: 43605
  source 1..120: mol_type = other DNA

SEQ ID NO: 73560 - DNA, 120 bp, synthetic construct; identical to SEQ ID NO: 43606
  source 1..120: mol_type = other DNA

SEQ ID NO: 73561 - DNA, 120 bp, synthetic construct; identical to SEQ ID NO: 12359
  source 1..120: mol_type = other DNA

SEQ ID NO: 73562 - DNA, 120 bp, synthetic construct; identical to SEQ ID NO: 43608
  source 1..120: mol_type = other DNA

SEQ ID NO: 73563 - DNA, 120 bp, synthetic construct; identical to SEQ ID NO: 43609
  source 1..120: mol_type = other DNA

SEQ ID NO: 73564 - DNA, 120 bp, synthetic construct; identical to SEQ ID NO: 43610
  source 1..120: mol_type = other DNA

SEQ ID NO: 73565 - DNA, 120 bp, synthetic construct; identical to SEQ ID NO: 43611
  source 1..120: mol_type = other DNA

SEQ ID NO: 73566 - DNA, 120 bp, synthetic construct; identical to SEQ ID NO: 12360
  source 1..120: mol_type = other DNA

SEQ ID NO: 73567 - DNA, 120 bp, synthetic construct; identical to SEQ ID NO: 43613
  source 1..120: mol_type = other DNA

SEQ ID NO: 73568 - DNA, 120 bp, synthetic construct; identical to SEQ ID NO: 43614
  source 1..120: mol_type = other DNA

SEQ ID NO: 73569 - DNA, 120 bp, synthetic construct; identical to SEQ ID NO: 43615
  source 1..120: mol_type = other DNA

SEQ ID NO: 73570 - DNA, 120 bp, synthetic construct; identical to SEQ ID NO: 12361
  source 1..120: mol_type = other DNA

SEQ ID NO: 73571 - DNA, 120 bp, synthetic construct; identical to SEQ ID NO: 43617
  source 1..120: mol_type = other DNA

SEQ ID NO: 73572 - DNA, 120 bp, synthetic construct; identical to SEQ ID NO: 43618
  source 1..120: mol_type = other DNA

SEQ ID NO: 73573 - DNA, 120 bp, synthetic construct; identical to SEQ ID NO: 12362
  source 1..120: mol_type = other DNA

SEQ ID NO: 73574 - DNA, 120 bp, synthetic construct; identical to SEQ ID NO: 43620
  source 1..120: mol_type = other DNA

SEQ ID NO: 73575 - DNA, 120 bp, synthetic construct; identical to SEQ ID NO: 43621
  source 1..120: mol_type = other DNA

SEQ ID NO: 73576 - DNA, 120 bp, synthetic construct; identical to SEQ ID NO: 43622
  source 1..120: mol_type = other DNA

SEQ ID NO: 73577 - DNA, 120 bp, synthetic construct; identical to SEQ ID NO: 43623
  source 1..120: mol_type = other DNA

SEQ ID NO: 73578 - DNA, 120 bp, synthetic construct; identical to SEQ ID NO: 12363
  source 1..120: mol_type = other DNA

SEQ ID NO: 73579 - DNA, 120 bp, synthetic construct; identical to SEQ ID NO: 43625
  source 1..120: mol_type = other DNA

SEQ ID NO: 73580 - DNA, 120 bp, synthetic construct; identical to SEQ ID NO: 43626
  source 1..120: mol_type = other DNA

SEQ ID NO: 73581 - DNA, 120 bp, synthetic construct; identical to SEQ ID NO: 12364
  source 1..120: mol_type = other DNA

SEQ ID NO: 73582 - DNA, 120 bp, synthetic construct; identical to SEQ ID NO: 43628
  source 1..120: mol_type = other DNA

SEQ ID NO: 73583 - DNA, 120 bp, synthetic construct; identical to SEQ ID NO: 43629
  source 1..120: mol_type = other DNA

SEQ ID NO: 73584 - DNA, 120 bp, synthetic construct; identical to SEQ ID NO: 43630
  source 1..120: mol_type = other DNA

SEQ ID NO: 73585 - DNA, 120 bp, synthetic construct; identical to SEQ ID NO: 43631
  source 1..120: mol_type = other DNA

SEQ ID NO: 73586 - DNA, 120 bp, synthetic construct; identical to SEQ ID NO: 12365
  source 1..120: mol_type = other DNA

SEQ ID NO: 73587 - DNA, 120 bp, synthetic construct; identical to SEQ ID NO: 43633
  source 1..120: mol_type = other DNA

SEQ ID NO: 73588 - DNA, 120 bp, synthetic construct; identical to SEQ ID NO: 43634
  source 1..120: mol_type = other DNA

SEQ ID NO: 73589 - DNA, 120 bp, synthetic construct; identical to SEQ ID NO: 12366
  source 1..120: mol_type = other DNA

SEQ ID NO: 73590 - DNA, 120 bp, synthetic construct; identical to SEQ ID NO: 43636
  source 1..120: mol_type = other DNA

SEQ ID NO: 73591 - DNA, 120 bp, synthetic construct; identical to SEQ ID NO: 43637
  source 1..120: mol_type = other DNA

SEQ ID NO: 73592 - DNA, 120 bp, synthetic construct; identical to SEQ ID NO: 43638
  source 1..120: mol_type = other DNA

SEQ ID NO: 73593 - DNA, 120 bp, synthetic construct; identical to SEQ ID NO: 43639
  source 1..120: mol_type = other DNA

SEQ ID NO: 73594 - DNA, 120 bp, synthetic construct; identical to SEQ ID NO: 12367
  source 1..120: mol_type = other DNA

SEQ ID NO: 73595 - DNA, 120 bp, synthetic construct; identical to SEQ ID NO: 43641
  source 1..120: mol_type = other DNA

SEQ ID NO: 73596 - DNA, 120 bp, synthetic construct; identical to SEQ ID NO: 43642
  source 1..120: mol_type = other DNA

SEQ ID NO: 73597 - DNA, 120 bp, synthetic construct; identical to SEQ ID NO: 12368
  source 1..120: mol_type = other DNA

SEQ ID NO: 73598 - DNA, 120 bp, synthetic construct; identical to SEQ ID NO: 43644
  source 1..120: mol_type = other DNA

SEQ ID NO: 73599 - DNA, 120 bp, synthetic construct; identical to SEQ ID NO: 43645
  source 1..120: mol_type = other DNA

SEQ ID NO: 73600 - DNA, 120 bp, synthetic construct; identical to SEQ ID NO: 43646
  source 1..120: mol_type = other DNA

SEQ ID NO: 73601 - DNA, 120 bp, synthetic construct; identical to SEQ ID NO: 43647
  source 1..120: mol_type = other DNA

SEQ ID NO: 73602 - DNA, 120 bp, synthetic construct; identical to SEQ ID NO: 12369
  source 1..120: mol_type = other DNA

SEQ ID NO: 73603 - DNA, 120 bp, synthetic construct; identical to SEQ ID NO: 43649
  source 1..120: mol_type = other DNA

SEQ ID NO: 73604 - DNA, 120 bp, synthetic construct; identical to SEQ ID NO: 43650
  source 1..120: mol_type = other DNA

SEQ ID NO: 73605 - DNA, 120 bp, synthetic construct; identical to SEQ ID NO: 43651
  source 1..120: mol_type = other DNA

SEQ ID NO: 73606 - DNA, 120 bp, synthetic construct; identical to SEQ ID NO: 12370
  source 1..120: mol_type = other DNA

SEQ ID NO: 73607 - DNA, 120 bp, synthetic construct; identical to SEQ ID NO: 43653
  source 1..120: mol_type = other DNA

SEQ ID NO: 73608 - DNA, 120 bp, synthetic construct; identical to SEQ ID NO: 43654
  source 1..120: mol_type = other DNA

SEQ ID NO: 73609 - DNA, 120 bp, synthetic construct; identical to SEQ ID NO: 43655
  source 1..120: mol_type = other DNA

SEQ ID NO: 73610 - DNA, 120 bp, synthetic construct; identical to SEQ ID NO: 12371
  source 1..120: mol_type = other DNA

SEQ ID NO: 73611 - DNA, 120 bp, synthetic construct; identical to SEQ ID NO: 43657
  source 1..120: mol_type = other DNA

SEQ ID NO: 73612 - DNA, 120 bp, synthetic construct; identical to SEQ ID NO: 43658
  source 1..120: mol_type = other DNA

SEQ ID NO: 73613 - DNA, 120 bp, synthetic construct; identical to SEQ ID NO: 12372
  source 1..120: mol_type = other DNA

SEQ ID NO: 73614 - DNA, 120 bp, synthetic construct; identical to SEQ ID NO: 43660
  source 1..120: mol_type = other DNA

SEQ ID NO: 73615 - DNA, 120 bp, synthetic construct; identical to SEQ ID NO: 43661
  source 1..120: mol_type = other DNA

SEQ ID NO: 73616 - DNA, 120 bp, synthetic construct; identical to SEQ ID NO: 43662
  source 1..120: mol_type = other DNA

SEQ ID NO: 73617 - DNA, 120 bp, synthetic construct; identical to SEQ ID NO: 43663
  source 1..120: mol_type = other DNA

SEQ ID NO: 73618 - DNA, 120 bp, synthetic construct; identical to SEQ ID NO: 12373
  source 1..120: mol_type = other DNA

SEQ ID NO: 73619 - DNA, 120 bp, synthetic construct; identical to SEQ ID NO: 43665
  source 1..120: mol_type = other DNA

SEQ ID NO: 73620 - DNA, 120 bp, synthetic construct; identical to SEQ ID NO: 43666
  source 1..120: mol_type = other DNA

SEQ ID NO: 73621 - DNA, 120 bp, synthetic construct; identical to SEQ ID NO: 43667
  source 1..120: mol_type = other DNA

SEQ ID NO: 73622 - DNA, 120 bp, synthetic construct; identical to SEQ ID NO: 12374
  source 1..120: mol_type = other DNA

SEQ ID NO: 73623 - DNA, 120 bp, synthetic construct; identical to SEQ ID NO: 43669
  source 1..120: mol_type = other DNA

SEQ ID NO: 73624 - DNA, 120 bp, synthetic construct; identical to SEQ ID NO: 43670
  source 1..120: mol_type = other DNA

SEQ ID NO: 73625 - DNA, 120 bp, synthetic construct; identical to SEQ ID NO: 43671
  source 1..120: mol_type = other DNA

SEQ ID NO: 73626 - DNA, 120 bp, synthetic construct; identical to SEQ ID NO: 12375
  source 1..120: mol_type = other DNA

SEQ ID NO: 73627 - DNA, 120 bp, synthetic construct; identical to SEQ ID NO: 43673
  source 1..120: mol_type = other DNA

SEQ ID NO: 73628 - DNA, 120 bp, synthetic construct; identical to SEQ ID NO: 43674
  source 1..120: mol_type = other DNA

SEQ ID NO: 73629 - DNA, 120 bp, synthetic construct; identical to SEQ ID NO: 43675
  source 1..120: mol_type = other DNA

SEQ ID NO: 73630 - DNA, 120 bp, synthetic construct; identical to SEQ ID NO: 12376
  source 1..120: mol_type = other DNA

SEQ ID NO: 73631 - DNA, 120 bp, synthetic construct; identical to SEQ ID NO: 43677
  source 1..120: mol_type = other DNA

SEQ ID NO: 73632 - DNA, 120 bp, synthetic construct; identical to SEQ ID NO: 43678
  source 1..120: mol_type = other DNA

SEQ ID NO: 73633 - DNA, 120 bp, synthetic construct; identical to SEQ ID NO: 12377
  source 1..120: mol_type = other DNA

SEQ ID NO: 73634 - DNA, 120 bp, synthetic construct; identical to SEQ ID NO: 43680
  source 1..120: mol_type = other DNA

SEQ ID NO: 73635 - DNA, 120 bp, synthetic construct; identical to SEQ ID NO: 43681
  source 1..120: mol_type = other DNA

SEQ ID NO: 73636 - DNA, 120 bp, synthetic construct; identical to SEQ ID NO: 43682
  source 1..120: mol_type = other DNA

SEQ ID NO: 73637 - DNA, 120 bp, synthetic construct; identical to SEQ ID NO: 43683
  source 1..120: mol_type = other DNA

SEQ ID NO: 73638 - DNA, 120 bp, synthetic construct; identical to SEQ ID NO: 12378
  source 1..120: mol_type = other DNA

SEQ ID NO: 73639 - DNA, 120 bp, synthetic construct; identical to SEQ ID NO: 43685
  source 1..120: mol_type = other DNA

SEQ ID NO: 73640 - DNA, 120 bp, synthetic construct; identical to SEQ ID NO: 43686
  source 1..120: mol_type = other DNA

SEQ ID NO: 73641 - DNA, 120 bp, synthetic construct; identical to SEQ ID NO: 12379
  source 1..120: mol_type = other DNA

SEQ ID NO: 73642 - DNA, 120 bp, synthetic construct; identical to SEQ ID NO: 43688
  source 1..120: mol_type = other DNA

SEQ ID NO: 73643 - DNA, 120 bp, synthetic construct; identical to SEQ ID NO: 43689
  source 1..120: mol_type = other DNA

SEQ ID NO: 73644 - DNA, 120 bp, synthetic construct; identical to SEQ ID NO: 43690
  source 1..120: mol_type = other DNA

SEQ ID NO: 73645 - DNA, 120 bp, synthetic construct; identical to SEQ ID NO: 12380
  source 1..120: mol_type = other DNA

SEQ ID NO: 73646 - DNA, 120 bp, synthetic construct; identical to SEQ ID NO: 43692
  source 1..120: mol_type = other DNA

SEQ ID NO: 73647 - DNA, 120 bp, synthetic construct; identical to SEQ ID NO: 43693
  source 1..120: mol_type = other DNA

SEQ ID NO: 73648 - DNA, 120 bp, synthetic construct; identical to SEQ ID NO: 43694
  source 1..120: mol_type = other DNA

SEQ ID NO: 73649 - DNA, 120 bp, synthetic construct; identical to SEQ ID NO: 12381
  source 1..120: mol_type = other DNA

SEQ ID NO: 73650 - DNA, 120 bp, synthetic construct; identical to SEQ ID NO: 43696
  source 1..120: mol_type = other DNA

SEQ ID NO: 73651 - DNA, 120 bp, synthetic construct; identical to SEQ ID NO: 43697
  source 1..120: mol_type = other DNA

SEQ ID NO: 73652 - DNA, 120 bp, synthetic construct; identical to SEQ ID NO: 43698
  source 1..120: mol_type = other DNA

SEQ ID NO: 73653 - DNA, 120 bp, synthetic construct; identical to SEQ ID NO: 12382
  source 1..120: mol_type = other DNA

SEQ ID NO: 73654 - DNA, 120 bp, synthetic construct; identical to SEQ ID NO: 43700
  source 1..120: mol_type = other DNA

SEQ ID NO: 73655 - DNA, 120 bp, synthetic construct; identical to SEQ ID NO: 43701
  source 1..120: mol_type = other DNA

SEQ ID NO: 73656 - DNA, 120 bp, synthetic construct; identical to SEQ ID NO: 43702
  source 1..120: mol_type = other DNA

SEQ ID NO: 73657 - DNA, 120 bp, synthetic construct; identical to SEQ ID NO: 43703
  source 1..120: mol_type = other DNA

SEQ ID NO: 73658 - DNA, 120 bp, synthetic construct; identical to SEQ ID NO: 12383
  source 1..120: mol_type = other DNA

SEQ ID NO: 73659 - DNA, 120 bp, synthetic construct; identical to SEQ ID NO: 43705
  source 1..120: mol_type = other DNA

SEQ ID NO: 73660 - DNA, 120 bp, synthetic construct; identical to SEQ ID NO: 43706
  source 1..120: mol_type = other DNA

SEQ ID NO: 73661 - DNA, 120 bp, synthetic construct; identical to SEQ ID NO: 12384
  source 1..120: mol_type = other DNA

SEQ ID NO: 73662 - DNA, 120 bp, synthetic construct; identical to SEQ ID NO: 43708
  source 1..120: mol_type = other DNA

SEQ ID NO: 73663 - DNA, 120 bp, synthetic construct; identical to SEQ ID NO: 43709
  source 1..120: mol_type = other DNA

SEQ ID NO: 73664 - DNA, 120 bp, synthetic construct; identical to SEQ ID NO: 43710
  source 1..120: mol_type = other DNA

SEQ ID NO: 73665 - DNA, 120 bp, synthetic construct; identical to SEQ ID NO: 12385
  source 1..120: mol_type = other DNA

SEQ ID NO: 73666 - DNA, 120 bp, synthetic construct; identical to SEQ ID NO: 43712
  source 1..120: mol_type = other DNA

SEQ ID NO: 73667 - DNA, 120 bp, synthetic construct; identical to SEQ ID NO: 43713
  source 1..120: mol_type = other DNA

SEQ ID NO: 73668 - DNA, 120 bp, synthetic construct; identical to SEQ ID NO: 43714
  source 1..120: mol_type = other DNA

SEQ ID NO: 73669 - DNA, 120 bp, synthetic construct; identical to SEQ ID NO: 12386
  source 1..120: mol_type = other DNA

SEQ ID NO: 73670 - DNA, 120 bp, synthetic construct; identical to SEQ ID NO: 43716
  source 1..120: mol_type = other DNA

SEQ ID NO: 73671 - DNA, 120 bp, synthetic construct; identical to SEQ ID NO: 43717
  source 1..120: mol_type = other DNA

SEQ ID NO: 73672 - DNA, 120 bp, synthetic construct; identical to SEQ ID NO: 43718
  source 1..120: mol_type = other DNA

SEQ ID NO: 73673 - DNA, 120 bp, synthetic construct; identical to SEQ ID NO: 12387
  source 1..120: mol_type = other DNA

SEQ ID NO: 73674 - DNA, 120 bp, synthetic construct; identical to SEQ ID NO: 43720
  source 1..120: mol_type = other DNA

SEQ ID NO: 73675 - DNA, 120 bp, synthetic construct; identical to SEQ ID NO: 43721
  source 1..120: mol_type = other DNA

SEQ ID NO: 73676 - DNA, 120 bp, synthetic construct; identical to SEQ ID NO: 43722
  source 1..120: mol_type = other DNA

SEQ ID NO: 73677 - DNA, 120 bp, synthetic construct; identical to SEQ ID NO: 12388
  source 1..120: mol_type = other DNA

SEQ ID NO: 73678 - DNA, 120 bp, synthetic construct; identical to SEQ ID NO: 43724
  source 1..120: mol_type = other DNA

SEQ ID NO: 73679 - DNA, 120 bp, synthetic construct; identical to SEQ ID NO: 43725
  source 1..120: mol_type = other DNA

SEQ ID NO: 73680 - DNA, 120 bp, synthetic construct; identical to SEQ ID NO: 43726
  source 1..120: mol_type = other DNA

SEQ ID NO: 73681 - DNA, 120 bp, synthetic construct; identical to SEQ ID NO: 12389
  source 1..120: mol_type = other DNA

SEQ ID NO: 73682 - DNA, 120 bp, synthetic construct; identical to SEQ ID NO: 43728
  source 1..120: mol_type = other DNA

SEQ ID NO: 73683 - DNA, 120 bp, synthetic construct; identical to SEQ ID NO: 43729
  source 1..120: mol_type = other DNA

SEQ ID NO: 73684 - DNA, 120 bp, synthetic construct; identical to SEQ ID NO: 43730
  source 1..120: mol_type = other DNA

SEQ ID NO: 73685 - DNA, 120 bp, synthetic construct; identical to SEQ ID NO: 43731
  source 1..120: mol_type = other DNA

SEQ ID NO: 73686 - DNA, 120 bp, synthetic construct; identical to SEQ ID NO: 12390
  source 1..120: mol_type = other DNA

SEQ ID NO: 73687 - DNA, 120 bp, synthetic construct; identical to SEQ ID NO: 43733
  source 1..120: mol_type = other DNA

SEQ ID NO: 73688 - DNA, 120 bp, synthetic construct; identical to SEQ ID NO: 43734
  source 1..120: mol_type = other DNA

SEQ ID NO: 73689 - DNA, 120 bp, synthetic construct; identical to SEQ ID NO: 43735
  source 1..120: mol_type = other DNA

SEQ ID NO: 73690 - DNA, 120 bp, synthetic construct; identical to SEQ ID NO: 12391
  source 1..120: mol_type = other DNA

SEQ ID NO: 73691 - DNA, 120 bp, synthetic construct; identical to SEQ ID NO: 43737
  source 1..120: mol_type = other DNA

SEQ ID NO: 73692 - DNA, 120 bp, synthetic construct; identical to SEQ ID NO: 43738
  source 1..120: mol_type = other DNA

SEQ ID NO: 73693 - DNA, 120 bp, synthetic construct; identical to SEQ ID NO: 43739
  source 1..120: mol_type = other DNA

SEQ ID NO: 73694 - DNA, 120 bp, synthetic construct; identical to SEQ ID NO: 12392
  source 1..120: mol_type = other DNA

SEQ ID NO: 73695 - DNA, 120 bp, synthetic construct; identical to SEQ ID NO: 43741
  source 1..120: mol_type = other DNA

SEQ ID NO: 73696 - DNA, 120 bp, synthetic construct; identical to SEQ ID NO: 43742
  source 1..120: mol_type = other DNA

SEQ ID NO: 73697 - DNA, 120 bp, synthetic construct; identical to SEQ ID NO: 12393
  source 1..120: mol_type = other DNA

SEQ ID NO: 73698 - DNA, 120 bp, synthetic construct; identical to SEQ ID NO: 43744
  source 1..120: mol_type = other DNA

SEQ ID NO: 73699 - DNA, 120 bp, synthetic construct; identical to SEQ ID NO: 43745
  source 1..120: mol_type = other DNA

SEQ ID NO: 73700 - DNA, 120 bp, synthetic construct; identical to SEQ ID NO: 43746
  source 1..120: mol_type = other DNA

SEQ ID NO: 73701 - DNA, 120 bp, synthetic construct; identical to SEQ ID NO: 43747
  source 1..120: mol_type = other DNA

SEQ ID NO: 73702 - DNA, 120 bp, synthetic construct; identical to SEQ ID NO: 12394
  source 1..120: mol_type = other DNA

SEQ ID NO: 73703 - DNA, 120 bp, synthetic construct; identical to SEQ ID NO: 43749
  source 1..120: mol_type = other DNA

SEQ ID NO: 73704 - DNA, 120 bp, synthetic construct; identical to SEQ ID NO: 12395
  source 1..120: mol_type = other DNA

SEQ ID NO: 73705 - DNA, 120 bp, synthetic construct; identical to SEQ ID NO: 43751
  source 1..120: mol_type = other DNA

SEQ ID NO: 73706 - DNA, 120 bp, synthetic construct; identical to SEQ ID NO: 43752
  source 1..120: mol_type = other DNA

SEQ ID NO: 73707 - DNA, 120 bp, synthetic construct; identical to SEQ ID NO: 43753
  source 1..120: mol_type = other DNA

SEQ ID NO: 73708 - DNA, 120 bp, synthetic construct; identical to SEQ ID NO: 43754
  source 1..120: mol_type = other DNA

SEQ ID NO: 73709 - DNA, 120 bp, synthetic construct; identical to SEQ ID NO: 12396
  source 1..120: mol_type = other DNA

SEQ ID NO: 73710 - DNA, 120 bp, synthetic construct; identical to SEQ ID NO: 43756
  source 1..120: mol_type = other DNA

SEQ ID NO: 73711 - DNA, 120 bp, synthetic construct; identical to SEQ ID NO: 43757
  source 1..120: mol_type = other DNA

SEQ ID NO: 73712 - DNA, 120 bp, synthetic construct; identical to SEQ ID NO: 43758
  source 1..120: mol_type = other DNA

SEQ ID NO: 73713 - DNA, 120 bp, synthetic construct; identical to SEQ ID NO: 43759
  source 1..120: mol_type = other DNA

SEQ ID NO: 73714 - DNA, 120 bp, synthetic construct; identical to SEQ ID NO: 12397
  source 1..120: mol_type = other DNA

SEQ ID NO: 73715 - DNA, 120 bp, synthetic construct; identical to SEQ ID NO: 43761
  source 1..120: mol_type = other DNA

SEQ ID NO: 73716 - DNA, 120 bp, synthetic construct; identical to SEQ ID NO: 43762
  source 1..120: mol_type = other DNA

SEQ ID NO: 73717 - DNA, 120 bp, synthetic construct; identical to SEQ ID NO: 12398
  source 1..120: mol_type = other DNA

SEQ ID NO: 73718 - DNA, 120 bp, synthetic construct; identical to SEQ ID NO: 43764
  source 1..120: mol_type = other DNA

SEQ ID NO: 73719 - DNA, 120 bp, synthetic construct; identical to SEQ ID NO: 43765
  source 1..120: mol_type = other DNA

SEQ ID NO: 73720 - DNA, 120 bp, synthetic construct; identical to SEQ ID NO: 43766
  source 1..120: mol_type = other DNA

SEQ ID NO: 73721 - DNA, 120 bp, synthetic construct; identical to SEQ ID NO: 43767
  source 1..120: mol_type = other DNA

SEQ ID NO: 73722 - DNA, 120 bp, synthetic construct; identical to SEQ ID NO: 12399
  source 1..120: mol_type = other DNA

SEQ ID NO: 73723 - DNA, 120 bp, synthetic construct; identical to SEQ ID NO: 43769
  source 1..120: mol_type = other DNA

SEQ ID NO: 73724 - DNA, 120 bp, synthetic construct; identical to SEQ ID NO: 12400
  source 1..120: mol_type = other DNA

SEQ ID NO: 73725 - DNA, 120 bp, synthetic construct; identical to SEQ ID NO: 43771
  source 1..120: mol_type = other DNA

SEQ ID NO: 73726 - DNA, 120 bp, synthetic construct; identical to SEQ ID NO: 43772
  source 1..120: mol_type = other DNA

SEQ ID NO: 73727 - DNA, 120 bp, synthetic construct; identical to SEQ ID NO: 43773
  source 1..120: mol_type = other DNA

SEQ ID NO: 73728 - DNA, 120 bp, synthetic construct; identical to SEQ ID NO: 43774
  source 1..120: mol_type = other DNA

SEQ ID NO: 73729 - DNA, 120 bp, synthetic construct; identical to SEQ ID NO: 12401
  source 1..120: mol_type = other DNA

SEQ ID NO: 73730 - DNA, 120 bp, synthetic construct; identical to SEQ ID NO: 43776
  source 1..120: mol_type = other DNA

SEQ ID NO: 73731 - DNA, 120 bp, synthetic construct; identical to SEQ ID NO: 43777
  source 1..120: mol_type = other DNA

SEQ ID NO: 73732 - DNA, 120 bp, synthetic construct; identical to SEQ ID NO: 12402
  source 1..120: mol_type = other DNA

SEQ ID NO: 73733 - DNA, 120 bp, synthetic construct; identical to SEQ ID NO: 43779
  source 1..120: mol_type = other DNA

SEQ ID NO: 73734 - DNA, 120 bp, synthetic construct; identical to SEQ ID NO: 43780
  source 1..120: mol_type = other DNA

SEQ ID NO: 73735 - DNA, 120 bp, synthetic construct; identical to SEQ ID NO: 43781
  source 1..120: mol_type = other DNA

SEQ ID NO: 73736 - DNA, 120 bp, synthetic construct; identical to SEQ ID NO: 12403
  source 1..120: mol_type = other DNA

SEQ ID NO: 73737 - DNA, 120 bp, synthetic construct; identical to SEQ ID NO: 43783
  source 1..120: mol_type = other DNA

SEQ ID NO: 73738 - DNA, 120 bp, synthetic construct; identical to SEQ ID NO: 43784
  source 1..120: mol_type = other DNA

SEQ ID NO: 73739 - DNA, 120 bp, synthetic construct; identical to SEQ ID NO: 43785
  source 1..120: mol_type = other DNA

SEQ ID NO: 73740 - DNA, 120 bp, synthetic construct; identical to SEQ ID NO: 43786
  source 1..120: mol_type = other DNA

SEQ ID NO: 73741 - DNA, 120 bp, synthetic construct; identical to SEQ ID NO: 12404
  source 1..120: mol_type = other DNA

SEQ ID NO: 73742 - DNA, 120 bp, synthetic construct; identical to SEQ ID NO: 43788
  source 1..120: mol_type = other DNA

SEQ ID NO: 73743 - DNA, 120 bp, synthetic construct; identical to SEQ ID NO: 43789
  source 1..120: mol_type = other DNA

SEQ ID NO: 73744 - DNA, 120 bp, synthetic construct; identical to SEQ ID NO: 12405
  source 1..120: mol_type = other DNA

SEQ ID NO: 73745 - DNA, 120 bp, synthetic construct; identical to SEQ ID NO: 43791
  source 1..120: mol_type = other DNA

SEQ ID NO: 73746 - DNA, 120 bp, synthetic construct; identical to SEQ ID NO: 43792
  source 1..120: mol_type = other DNA

SEQ ID NO: 73747 - DNA, 120 bp, synthetic construct; identical to SEQ ID NO: 43793
  source 1..120: mol_type = other DNA

SEQ ID NO: 73748 - DNA, 120 bp, synthetic construct; identical to SEQ ID NO: 43794
  source 1..120: mol_type = other DNA

SEQ ID NO: 73749 - DNA, 120 bp, synthetic construct; identical to SEQ ID NO: 12406
  source 1..120: mol_type = other DNA

SEQ ID NO: 73750 - DNA, 120 bp, synthetic construct; identical to SEQ ID NO: 43796
  source 1..120: mol_type = other DNA

SEQ ID NO: 73751 - DNA, 120 bp, synthetic construct; identical to SEQ ID NO: 43797
  source 1..120: mol_type = other DNA

SEQ ID NO: 73752 - DNA, 120 bp, synthetic construct; identical to SEQ ID NO: 43798
  source 1..120: mol_type = other DNA

SEQ ID NO: 73753 - DNA, 120 bp, synthetic construct; identical to SEQ ID NO: 12407
  source 1..120: mol_type = other DNA

SEQ ID NO: 73754 - DNA, 120 bp, synthetic construct; identical to SEQ ID NO: 43800
  source 1..120: mol_type = other DNA

SEQ ID NO: 73755 - DNA, 120 bp, synthetic construct; identical to SEQ ID NO: 43801
  source 1..120: mol_type = other DNA

SEQ ID NO: 73756 - DNA, 120 bp, synthetic construct; identical to SEQ ID NO: 12408
  source 1..120: mol_type = other DNA

SEQ ID NO: 73757 - DNA, 120 bp, synthetic construct; identical to SEQ ID NO: 43803
  source 1..120: mol_type = other DNA

SEQ ID NO: 73758 - DNA, 120 bp, synthetic construct; identical to SEQ ID NO: 43804
  source 1..120: mol_type = other DNA

SEQ ID NO: 73759 - DNA, 120 bp, synthetic construct; identical to SEQ ID NO: 43805
  source 1..120: mol_type = other DNA

SEQ ID NO: 73760 - DNA, 120 bp, synthetic construct; identical to SEQ ID NO: 43806
  source 1..120: mol_type = other DNA

SEQ ID NO: 73761 - DNA, 120 bp, synthetic construct; identical to SEQ ID NO: 12409
  source 1..120: mol_type = other DNA

SEQ ID NO: 73762 - DNA, 120 bp, synthetic construct; identical to SEQ ID NO: 43808
  source 1..120: mol_type = other DNA

SEQ ID NO: 73763 - DNA, 120 bp, synthetic construct; identical to SEQ ID NO: 43809
  source 1..120: mol_type = other DNA

SEQ ID NO: 73764 - DNA, 120 bp, synthetic construct; identical to SEQ ID NO: 12410
  source 1..120: mol_type = other DNA

SEQ ID NO: 73765 - DNA, 120 bp, synthetic construct; identical to SEQ ID NO: 43811
  source 1..120: mol_type = other DNA

SEQ ID NO: 73766 - DNA, 120 bp, synthetic construct; identical to SEQ ID NO: 43812
  source 1..120: mol_type = other DNA

SEQ ID NO: 73767 - DNA, 120 bp, synthetic construct; identical to SEQ ID NO: 43813
  source 1..120: mol_type = other DNA

SEQ ID NO: 73768 - DNA, 120 bp, synthetic construct; identical to SEQ ID NO: 43814
  source 1..120: mol_type = other DNA

SEQ ID NO: 73769 - DNA, 120 bp, synthetic construct; identical to SEQ ID NO: 12411
  source 1..120: mol_type = other DNA

SEQ ID NO: 73770 - DNA, 120 bp, synthetic construct; identical to SEQ ID NO: 43816
  source 1..120: mol_type = other DNA

SEQ ID NO: 73771 - DNA, 120 bp, synthetic construct; identical to SEQ ID NO: 43817
  source 1..120: mol_type = other DNA

SEQ ID NO: 73772 - DNA, 120 bp, synthetic construct; identical to SEQ ID NO: 12412
  source 1..120: mol_type = other DNA

SEQ ID NO: 73773 - DNA, 120 bp, synthetic construct; identical to SEQ ID NO: 43819
  source 1..120: mol_type = other DNA

SEQ ID NO: 73774 - DNA, 120 bp, synthetic construct; identical to SEQ ID NO: 43820
  source 1..120: mol_type = other DNA

SEQ ID NO: 73775 - DNA, 120 bp, synthetic construct; identical to SEQ ID NO: 43821
  source 1..120: mol_type = other DNA

SEQ ID NO: 73776 - DNA, 120 bp, synthetic construct; identical to SEQ ID NO: 43822
  source 1..120: mol_type = other DNA

SEQ ID NO: 73777 - DNA, 120 bp, synthetic construct; identical to SEQ ID NO: 12413
  source 1..120: mol_type = other DNA

SEQ ID NO: 73778 - DNA, 120 bp, synthetic construct; identical to SEQ ID NO: 43824
  source 1..120: mol_type = other DNA

SEQ ID NO: 73779 - DNA, 120 bp, synthetic construct; identical to SEQ ID NO: 43825
  source 1..120: mol_type = other DNA

SEQ ID NO: 73780 - DNA, 120 bp, synthetic construct; identical to SEQ ID NO: 12414
  source 1..120: mol_type = other DNA

SEQ ID NO: 73781 - DNA, 120 bp, synthetic construct; identical to SEQ ID NO: 43827
  source 1..120: mol_type = other DNA

SEQ ID NO: 73782 - DNA, 120 bp, synthetic construct; identical to SEQ ID NO: 43828
  source 1..120: mol_type = other DNA

SEQ ID NO: 73783 - DNA, 120 bp, synthetic construct; identical to SEQ ID NO: 43829
  source 1..120: mol_type = other DNA

SEQ ID NO: 73784 - DNA, 120 bp, synthetic construct; identical to SEQ ID NO: 12415
  source 1..120: mol_type = other DNA

SEQ ID NO: 73785 - DNA, 120 bp, synthetic construct; identical to SEQ ID NO: 43831
  source 1..120: mol_type = other DNA

SEQ ID NO: 73786 - DNA, 120 bp, synthetic construct; identical to SEQ ID NO: 43832
  source 1..120: mol_type = other DNA

SEQ ID NO: 73787 - DNA, 120 bp, synthetic construct; identical to SEQ ID NO: 43833
  source 1..120: mol_type = other DNA

SEQ ID NO: 73788 - DNA, 120 bp, synthetic construct; identical to SEQ ID NO: 43834
  source 1..120: mol_type = other DNA

SEQ ID NO: 73789 - DNA, 120 bp, synthetic construct; identical to SEQ ID NO: 12416
  source 1..120: mol_type = other DNA

SEQ ID NO: 73790 - DNA, 120 bp, synthetic construct; identical to SEQ ID NO: 43836
  source 1..120: mol_type = other DNA

SEQ ID NO: 73791 - DNA, 120 bp, synthetic construct; identical to SEQ ID NO: 43837
  source 1..120: mol_type = other DNA

SEQ ID NO: 73792 - DNA, 120 bp, synthetic construct; identical to SEQ ID NO: 43838
  source 1..120: mol_type = other DNA

SEQ ID NO: 73793 - DNA, 120 bp, synthetic construct; identical to SEQ ID NO: 12417
  source 1..120: mol_type = other DNA

SEQ ID NO: 73794 - DNA, 120 bp, synthetic construct; identical to SEQ ID NO: 43840
  source 1..120: mol_type = other DNA

SEQ ID NO: 73795 - DNA, 120 bp, synthetic construct; identical to SEQ ID NO: 43841
  source 1..120: mol_type = other DNA

SEQ ID NO: 73796 - DNA, 120 bp, synthetic construct; identical to SEQ ID NO: 12418
  source 1..120: mol_type = other DNA

SEQ ID NO: 73797 - DNA, 120 bp, synthetic construct; identical to SEQ ID NO: 43843
  source 1..120: mol_type = other DNA

SEQ ID NO: 73798 - DNA, 120 bp, synthetic construct; identical to SEQ ID NO: 43844
  source 1..120: mol_type = other DNA

SEQ ID NO: 73799 - DNA, 120 bp, synthetic construct; identical to SEQ ID NO: 43845
  source 1..120: mol_type = other DNA

SEQ ID NO: 73800 - DNA, 120 bp, synthetic construct; identical to SEQ ID NO: 12419
  source 1..120: mol_type = other DNA

SEQ ID NO: 73801 - DNA, 120 bp, synthetic construct; identical to SEQ ID NO: 43847
  source 1..120: mol_type = other DNA

SEQ ID NO: 73802 - DNA, 120 bp, synthetic construct; identical to SEQ ID NO: 43848
  source 1..120: mol_type = other DNA

SEQ ID NO: 73803 - DNA, 120 bp, synthetic construct; identical to SEQ ID NO: 43849
  source 1..120: mol_type = other DNA

SEQ ID NO: 73804 - DNA, 120 bp, synthetic construct; identical to SEQ ID NO: 12420
  source 1..120: mol_type = other DNA

SEQ ID NO: 73805 - DNA, 120 bp, synthetic construct; identical to SEQ ID NO: 43851
  source 1..120: mol_type = other DNA

SEQ ID NO: 73806 - DNA, 120 bp, synthetic construct; identical to SEQ ID NO: 43852
  source 1..120: mol_type = other DNA

SEQ ID NO: 73807 - DNA, 120 bp, synthetic construct; identical to SEQ ID NO: 43853
  source 1..120: mol_type = other DNA

SEQ ID NO: 73808 - DNA, 120 bp, synthetic construct; identical to SEQ ID NO: 43854
  source 1..120: mol_type = other DNA

SEQ ID NO: 73809 - DNA, 120 bp, synthetic construct; identical to SEQ ID NO: 12421
  source 1..120: mol_type = other DNA

SEQ ID NO: 73810 - DNA, 120 bp, synthetic construct; identical to SEQ ID NO: 43856
  source 1..120: mol_type = other DNA

SEQ ID NO: 73811 - DNA, 120 bp, synthetic construct; identical to SEQ ID NO: 43857
  source 1..120: mol_type = other DNA

SEQ ID NO: 73812 - DNA, 120 bp, synthetic construct; identical to SEQ ID NO: 12422
  source 1..120: mol_type = other DNA

SEQ ID NO: 73813 - DNA, 120 bp, synthetic construct; identical to SEQ ID NO: 43859
  source 1..120: mol_type = other DNA

SEQ ID NO: 73814 - DNA, 120 bp, synthetic construct; identical to SEQ ID NO: 43860
  source 1..120: mol_type = other DNA

SEQ ID NO: 73815 - DNA, 120 bp, synthetic construct; identical to SEQ ID NO: 43861
  source 1..120: mol_type = other DNA

SEQ ID NO: 73816 - DNA, 120 bp, synthetic construct; identical to SEQ ID NO: 12423
  source 1..120: mol_type = other DNA

SEQ ID NO: 73817 - DNA, 120 bp, synthetic construct; identical to SEQ ID NO: 43863
  source 1..120: mol_type = other DNA

SEQ ID NO: 73818 - DNA, 120 bp, synthetic construct; identical to SEQ ID NO: 43864
  source 1..120: mol_type = other DNA

SEQ ID NO: 73819 - DNA, 120 bp, synthetic construct; identical to SEQ ID NO: 43865
  source 1..120: mol_type = other DNA

SEQ ID NO: 73820 - DNA, 120 bp, synthetic construct; identical to SEQ ID NO: 43866
  source 1..120: mol_type = other DNA

SEQ ID NO: 73821 - DNA, 120 bp, synthetic construct; identical to SEQ ID NO: 12424
  source 1..120: mol_type = other DNA

SEQ ID NO: 73822 - DNA, 120 bp, synthetic construct; identical to SEQ ID NO: 43868
  source 1..120: mol_type = other DNA

SEQ ID NO: 73823 - DNA, 120 bp, synthetic construct; identical to SEQ ID NO: 43869
  source 1..120: mol_type = other DNA

SEQ ID NO: 73824 - DNA, 120 bp, synthetic construct; identical to SEQ ID NO: 43870
  source 1..120: mol_type = other DNA

SEQ ID NO: 73825 - DNA, 120 bp, synthetic construct; identical to SEQ ID NO: 12425
  source 1..120: mol_type = other DNA

SEQ ID NO: 73826 - DNA, 120 bp, synthetic construct; identical to SEQ ID NO: 43872
  source 1..120: mol_type = other DNA

SEQ ID NO: 73827 - DNA, 120 bp, synthetic construct; identical to SEQ ID NO: 43873
  source 1..120: mol_type = other DNA

SEQ ID NO: 73828 - DNA, 120 bp, synthetic construct; identical to SEQ ID NO: 12426
  source 1..120: mol_type = other DNA

SEQ ID NO: 73829 - DNA, 120 bp, synthetic construct; identical to SEQ ID NO: 43875
  source 1..120: mol_type = other DNA

SEQ ID NO: 73830 - DNA, 120 bp, synthetic construct; identical to SEQ ID NO: 43876
  source 1..120: mol_type = other DNA

SEQ ID NO: 73831 - DNA, 120 bp, synthetic construct; identical to SEQ ID NO: 43877
  source 1..120: mol_type = other DNA

SEQ ID NO: 73832 - DNA, 120 bp, synthetic construct; identical to SEQ ID NO: 43878
  source 1..120: mol_type = other DNA

SEQ ID NO: 73833 - DNA, 120 bp, synthetic construct; identical to SEQ ID NO: 12427
  source 1..120: mol_type = other DNA

SEQ ID NO: 73834 - DNA, 120 bp, synthetic construct; identical to SEQ ID NO: 43880
  source 1..120: mol_type = other DNA

SEQ ID NO: 73835 - DNA, 120 bp, synthetic construct; identical to SEQ ID NO: 43881
  source 1..120: mol_type = other DNA

SEQ ID NO: 73836 - DNA, 120 bp, synthetic construct; identical to SEQ ID NO: 12428
  source 1..120: mol_type = other DNA

SEQ ID NO: 73837 - DNA, 120 bp, synthetic construct; identical to SEQ ID NO: 43883
  source 1..120: mol_type = other DNA

SEQ ID NO: 73838 - DNA, 120 bp, synthetic construct; identical to SEQ ID NO: 43884
  source 1..120: mol_type = other DNA

SEQ ID NO: 73839 - DNA, 120 bp, synthetic construct; identical to SEQ ID NO: 43885
  source 1..120: mol_type = other DNA

SEQ ID NO: 73840 - DNA, 120 bp, synthetic construct; identical to SEQ ID NO: 12429
  source 1..120: mol_type = other DNA

SEQ ID NO: 73841 - DNA, 120 bp, synthetic construct; identical to SEQ ID NO: 43887
  source 1..120: mol_type = other DNA

SEQ ID NO: 73842 - DNA, 120 bp, synthetic construct; identical to SEQ ID NO: 43888
  source 1..120: mol_type = other DNA

SEQ ID NO: 73843 - DNA, 120 bp, synthetic construct; identical to SEQ ID NO: 43889
  source 1..120: mol_type = other DNA

SEQ ID NO: 73844 - DNA, 120 bp, synthetic construct; identical to SEQ ID NO: 43890
  source 1..120: mol_type = other DNA

SEQ ID NO: 73845 - DNA, 120 bp, synthetic construct; identical to SEQ ID NO: 12430
  source 1..120: mol_type = other DNA

SEQ ID NO: 73846 - DNA, 120 bp, synthetic construct; identical to SEQ ID NO: 43892
  source 1..120: mol_type = other DNA

SEQ ID NO: 73847 - DNA, 120 bp, synthetic construct; identical to SEQ ID NO: 43893
  source 1..120: mol_type = other DNA

SEQ ID NO: 73848 - DNA, 120 bp, synthetic construct; identical to SEQ ID NO: 43894
  source 1..120: mol_type = other DNA

SEQ ID NO: 73849 - DNA, 120 bp, synthetic construct; identical to SEQ ID NO: 12431
  source 1..120: mol_type = other DNA

SEQ ID NO: 73850 - DNA, 120 bp, synthetic construct; identical to SEQ ID NO: 43896
  source 1..120: mol_type = other DNA

SEQ ID NO: 73851 - DNA, 120 bp, synthetic construct; identical to SEQ ID NO: 43897
  source 1..120: mol_type = other DNA

SEQ ID NO: 73852 - DNA, 120 bp, synthetic construct; identical to SEQ ID NO: 12432
  source 1..120: mol_type = other DNA

SEQ ID NO: 73853 - DNA, 120 bp, synthetic construct; identical to SEQ ID NO: 43899
  source 1..120: mol_type = other DNA

SEQ ID NO: 73854 - DNA, 120 bp, synthetic construct; identical to SEQ ID NO: 43900
  source 1..120: mol_type = other DNA

SEQ ID NO: 73855 - DNA, 120 bp, synthetic construct; identical to SEQ ID NO: 43901
  source 1..120: mol_type = other DNA

SEQ ID NO: 73856 - DNA, 120 bp, synthetic construct; identical to SEQ ID NO: 43902
  source 1..120: mol_type = other DNA

SEQ ID NO: 73857 - DNA, 120 bp, synthetic construct; identical to SEQ ID NO: 12433
  source 1..120: mol_type = other DNA

SEQ ID NO: 73858 - DNA, 120 bp, synthetic construct; identical to SEQ ID NO: 43904
  source 1..120: mol_type = other DNA

SEQ ID NO: 73859 - DNA, 120 bp, synthetic construct; identical to SEQ ID NO: 43905
  source 1..120: mol_type = other DNA

SEQ ID NO: 73860 - DNA, 120 bp, synthetic construct; identical to SEQ ID NO: 43906
  source 1..120: mol_type = other DNA

SEQ ID NO: 73861 - DNA, 120 bp, synthetic construct; identical to SEQ ID NO: 12434
  source 1..120: mol_type = other DNA

SEQ ID NO: 73862 - DNA, 120 bp, synthetic construct; identical to SEQ ID NO: 43908
  source 1..120: mol_type = other DNA

SEQ ID NO: 73863 - DNA, 120 bp, synthetic construct; identical to SEQ ID NO: 43909
  source 1..120: mol_type = other DNA

SEQ ID NO: 73864 - DNA, 120 bp, synthetic construct; identical to SEQ ID NO: 12435
  source 1..120: mol_type = other DNA

SEQ ID NO: 73865 - DNA, 120 bp, synthetic construct; identical to SEQ ID NO: 43911
  source 1..120: mol_type = other DNA

SEQ ID NO: 73866 - DNA, 120 bp, synthetic construct; identical to SEQ ID NO: 43912
  source 1..120: mol_type = other DNA

SEQ ID NO: 73867 - DNA, 120 bp, synthetic construct; identical to SEQ ID NO: 43913
  source 1..120: mol_type = other DNA

SEQ ID NO: 73868 - DNA, 120 bp, synthetic construct; identical to SEQ ID NO: 43914
  source 1..120: mol_type = other DNA

SEQ ID NO: 73869 - DNA, 120 bp, synthetic construct; identical to SEQ ID NO: 12436
  source 1..120: mol_type = other DNA

SEQ ID NO: 73870 - DNA, 120 bp, synthetic construct; identical to SEQ ID NO: 43916
  source 1..120: mol_type = other DNA

SEQ ID NO: 73871 - DNA, 120 bp, synthetic construct; identical to SEQ ID NO: 43917
  source 1..120: mol_type = other DNA

SEQ ID NO: 73872 - DNA, 120 bp, synthetic construct; identical to SEQ ID NO: 43918
  source 1..120: mol_type = other DNA

SEQ ID NO: 73873 - DNA, 120 bp, synthetic construct; identical to SEQ ID NO: 12437
  source 1..120: mol_type = other DNA

SEQ ID NO: 73874 - DNA, 120 bp, synthetic construct; identical to SEQ ID NO: 43920
  source 1..120: mol_type = other DNA

SEQ ID NO: 73875 - DNA, 120 bp, synthetic construct; identical to SEQ ID NO: 43921
  source 1..120: mol_type = other DNA

SEQ ID NO: 73876 - DNA, 120 bp, synthetic construct; identical to SEQ ID NO: 12438
  source 1..120: mol_type = other DNA

SEQ ID NO: 73877 - DNA, 120 bp, synthetic construct; identical to SEQ ID NO: 43923
  source 1..120: mol_type = other DNA

SEQ ID NO: 73878 - DNA, 120 bp, synthetic construct; identical to SEQ ID NO: 43924
  source 1..120: mol_type = other DNA

SEQ ID NO: 73879 - DNA, 120 bp, synthetic construct; identical to SEQ ID NO: 43925
  source 1..120: mol_type = other DNA

SEQ ID NO: 73880 - DNA, 120 bp, synthetic construct; identical to SEQ ID NO: 12439
  source 1..120: mol_type = other DNA

SEQ ID NO: 73881 - DNA, 120 bp, synthetic construct; identical to SEQ ID NO: 43927
  source 1..120: mol_type = other DNA

SEQ ID NO: 73882 - DNA, 120 bp, synthetic construct; identical to SEQ ID NO: 43928
  source 1..120: mol_type = other DNA

SEQ ID NO: 73883 - DNA, 120 bp, synthetic construct; identical to SEQ ID NO: 43929
  source 1..120: mol_type = other DNA

SEQ ID NO: 73884 - DNA, 120 bp, synthetic construct; identical to SEQ ID NO: 43930
  source 1..120: mol_type = other DNA

SEQ ID NO: 73885 - DNA, 120 bp, synthetic construct; identical to SEQ ID NO: 12440
  source 1..120: mol_type = other DNA

SEQ ID NO: 73886 - DNA, 120 bp, synthetic construct; identical to SEQ ID NO: 43932
  source 1..120: mol_type = other DNA

SEQ ID NO: 73887 - DNA, 120 bp, synthetic construct; identical to SEQ ID NO: 43933
  source 1..120: mol_type = other DNA

SEQ ID NO: 73888 - DNA, 120 bp, synthetic construct; identical to SEQ ID NO: 12441
  source 1..120: mol_type = other DNA

SEQ ID NO: 73889 - DNA, 120 bp, synthetic construct; identical to SEQ ID NO: 43935
  source 1..120: mol_type = other DNA

SEQ ID NO: 73890 - DNA, 120 bp, synthetic construct; identical to SEQ ID NO: 43936
  source 1..120: mol_type = other DNA

SEQ ID NO: 73891 - DNA, 120 bp, synthetic construct; identical to SEQ ID NO: 43937
  source 1..120: mol_type = other DNA

SEQ ID NO: 73892 - DNA, 120 bp, synthetic construct; identical to SEQ ID NO: 43938
  source 1..120: mol_type = other DNA

SEQ ID NO: 73893 - DNA, 120 bp, synthetic construct; identical to SEQ ID NO: 12442
  source 1..120: mol_type = other DNA

SEQ ID NO: 73894 - DNA, 120 bp, synthetic construct; identical to SEQ ID NO: 43940
  source 1..120: mol_type = other DNA

SEQ ID NO: 73895 - DNA, 120 bp, synthetic construct; identical to SEQ ID NO: 43941
  source 1..120: mol_type = other DNA

SEQ ID NO: 73896 - DNA, 120 bp, synthetic construct; identical to SEQ ID NO: 43942
  source 1..120: mol_type = other DNA

SEQ ID NO: 73897 - DNA, 120 bp, synthetic construct; identical to SEQ ID NO: 12443
  source 1..120: mol_type = other DNA

SEQ ID NO: 73898 - DNA, 120 bp, synthetic construct; identical to SEQ ID NO: 43944
  source 1..120: mol_type = other DNA

SEQ ID NO: 73899 - DNA, 120 bp, synthetic construct; identical to SEQ ID NO: 43945
  source 1..120: mol_type = other DNA

SEQ ID NO: 73900 - DNA, 120 bp, synthetic construct; identical to SEQ ID NO: 43946
  source 1..120: mol_type = other DNA

SEQ ID NO: 73901 - DNA, 120 bp, synthetic construct; identical to SEQ ID NO: 12444
  source 1..120: mol_type = other DNA

SEQ ID NO: 73902 - DNA, 120 bp, synthetic construct; identical to SEQ ID NO: 43948
  source 1..120: mol_type = other DNA

SEQ ID NO: 73903 - DNA, 120 bp, synthetic construct; identical to SEQ ID NO: 43949
  source 1..120: mol_type = other DNA

SEQ ID NO: 73904 - DNA, 120 bp, synthetic construct; identical to SEQ ID NO: 43950
  source 1..120: mol_type = other DNA

SEQ ID NO: 73905 - DNA, 120 bp, synthetic construct; identical to SEQ ID NO: 12445
  source 1..120: mol_type = other DNA

SEQ ID NO: 73906 - DNA, 120 bp, synthetic construct; identical to SEQ ID NO: 43952
  source 1..120: mol_type = other DNA

SEQ ID NO: 73907 - DNA, 120 bp, synthetic construct; identical to SEQ ID NO: 43953
  source 1..120: mol_type = other DNA

SEQ ID NO: 73908 - DNA, 120 bp, synthetic construct; identical to SEQ ID NO: 43954
  source 1..120: mol_type = other DNA

SEQ ID NO: 73909 - DNA, 120 bp, synthetic construct; identical to SEQ ID NO: 12446
  source 1..120: mol_type = other DNA

SEQ ID NO: 73910 - DNA, 120 bp, synthetic construct; identical to SEQ ID NO: 43956
  source 1..120: mol_type = other DNA

SEQ ID NO: 73911 - DNA, 120 bp, synthetic construct; identical to SEQ ID NO: 43957
  source 1..120: mol_type = other DNA

SEQ ID NO: 73912 - DNA, 120 bp, synthetic construct; identical to SEQ ID NO: 12447
  source 1..120: mol_type = other DNA

SEQ ID NO: 73913 - DNA, 120 bp, synthetic construct; identical to SEQ ID NO: 43959
  source 1..120: mol_type = other DNA

SEQ ID NO: 73914 - DNA, 120 bp, synthetic construct; identical to SEQ ID NO: 43960
  source 1..120: mol_type = other DNA

SEQ ID NO: 73915 - DNA, 120 bp, synthetic construct; identical to SEQ ID NO: 43961
  source 1..120: mol_type = other DNA

SEQ ID NO: 73916 - DNA, 120 bp, synthetic construct; identical to SEQ ID NO: 12448
  source 1..120: mol_type = other DNA

SEQ ID NO: 73917 - DNA, 120 bp, synthetic construct; identical to SEQ ID NO: 43963
  source 1..120: mol_type = other DNA

SEQ ID NO: 73918 - DNA, 120 bp, synthetic construct; identical to SEQ ID NO: 43964
  source 1..120: mol_type = other DNA

SEQ ID NO: 73919 - DNA, 120 bp, synthetic construct; identical to SEQ ID NO: 43965
  source 1..120: mol_type = other DNA

SEQ ID NO: 73920 - DNA, 120 bp, synthetic construct; identical to SEQ ID NO: 43966
  source 1..120: mol_type = other DNA

SEQ ID NO: 73921 - DNA, 120 bp, synthetic construct; identical to SEQ ID NO: 12449
  source 1..120: mol_type = other DNA

SEQ ID NO: 73922 - DNA, 120 bp, synthetic construct; identical to SEQ ID NO: 43968
  source 1..120: mol_type = other DNA

SEQ ID NO: 73923 - DNA, 120 bp, synthetic construct; identical to SEQ ID NO: 43969
  source 1..120: mol_type = other DNA

SEQ ID NO: 73924 - DNA, 120 bp, synthetic construct; identical to SEQ ID NO: 12450
  source 1..120: mol_type = other DNA

SEQ ID NO: 73925 - DNA, 120 bp, synthetic construct; identical to SEQ ID NO: 43971
  source 1..120: mol_type = other DNA

SEQ ID NO: 73926 - DNA, 120 bp, synthetic construct; identical to SEQ ID NO: 43972
  source 1..120: mol_type = other DNA

SEQ ID NO: 73927 - DNA, 120 bp, synthetic construct; identical to SEQ ID NO: 43973
  source 1..120: mol_type = other DNA

SEQ ID NO: 73928 - DNA, 120 bp, synthetic construct; identical to SEQ ID NO: 43974
  source 1..120: mol_type = other DNA

SEQ ID NO: 73929 - DNA, 120 bp, synthetic construct; identical to SEQ ID NO: 12451
  source 1..120: mol_type = other DNA

SEQ ID NO: 73930 - DNA, 120 bp, synthetic construct; identical to SEQ ID NO: 43976
  source 1..120: mol_type = other DNA

SEQ ID NO: 73931 - DNA, 120 bp, synthetic construct; identical to SEQ ID NO: 43977
  source 1..120: mol_type = other DNA

SEQ ID NO: 73932 - DNA, 120 bp, synthetic construct; identical to SEQ ID NO: 12452
  source 1..120: mol_type = other DNA

SEQ ID NO: 73933 - DNA, 120 bp, synthetic construct; identical to SEQ ID NO: 43979
  source 1..120: mol_type = other DNA

SEQ ID NO: 73934 - DNA, 120 bp, synthetic construct; identical to SEQ ID NO: 43980
  source 1..120: mol_type = other DNA

SEQ ID NO: 73935 - DNA, 120 bp, synthetic construct; identical to SEQ ID NO: 43981
  source 1..120: mol_type = other DNA

SEQ ID NO: 73936 - DNA, 120 bp, synthetic construct; identical to SEQ ID NO: 43982
  source 1..120: mol_type = other DNA

SEQ ID NO: 73937 - DNA, 120 bp, synthetic construct; identical to SEQ ID NO: 12453
  source 1..120: mol_type = other DNA

SEQ ID NO: 73938 - DNA, 120 bp, synthetic construct; identical to SEQ ID NO: 43984
  source 1..120: mol_type = other DNA

SEQ ID NO: 73939 - DNA, 120 bp, synthetic construct; identical to SEQ ID NO: 43985
  source 1..120: mol_type = other DNA

SEQ ID NO: 73940 - DNA, 120 bp, synthetic construct; identical to SEQ ID NO: 12454
  source 1..120: mol_type = other DNA

SEQ ID NO: 73941 - DNA, 120 bp, synthetic construct; identical to SEQ ID NO: 43987
  source 1..120: mol_type = other DNA

SEQ ID NO: 73942 - DNA, 120 bp, synthetic construct; identical to SEQ ID NO: 43988
  source 1..120: mol_type = other DNA

SEQ ID NO: 73943 - DNA, 120 bp, synthetic construct; identical to SEQ ID NO: 43989
  source 1..120: mol_type = other DNA

SEQ ID NO: 73944 - DNA, 120 bp, synthetic construct; identical to SEQ ID NO: 12455
  source 1..120: mol_type = other DNA

SEQ ID NO: 73945 - DNA, 120 bp, synthetic construct; identical to SEQ ID NO: 43991
  source 1..120: mol_type = other DNA

SEQ ID NO: 73946 - DNA, 120 bp, synthetic construct; identical to SEQ ID NO: 43992
  source 1..120: mol_type = other DNA

SEQ ID NO: 73947 - DNA, 120 bp, synthetic construct; identical to SEQ ID NO: 43993
  source 1..120: mol_type = other DNA

SEQ ID NO: 73948 - DNA, 120 bp, synthetic construct; identical to SEQ ID NO: 43994
  source 1..120: mol_type = other DNA

SEQ ID NO: 73949 - DNA, 120 bp, synthetic construct; identical to SEQ ID NO: 12456
  source 1..120: mol_type = other DNA

SEQ ID NO: 73950 - DNA, 120 bp, synthetic construct; identical to SEQ ID NO: 43996
  source 1..120: mol_type = other DNA

SEQ ID NO: 73951 - DNA, 120 bp, synthetic construct; identical to SEQ ID NO: 43997
  source 1..120: mol_type = other DNA

SEQ ID NO: 73952 - DNA, 120 bp, synthetic construct; identical to SEQ ID NO: 43998
  source 1..120: mol_type = other DNA

SEQ ID NO: 73953 - DNA, 120 bp, synthetic construct; identical to SEQ ID NO: 12457
  source 1..120: mol_type = other DNA

SEQ ID NO: 73954 - DNA, 120 bp, synthetic construct; identical to SEQ ID NO: 44000
  source 1..120: mol_type = other DNA

SEQ ID NO: 73955 - DNA, 120 bp, synthetic construct; identical to SEQ ID NO: 44001
  source 1..120: mol_type = other DNA

SEQ ID NO: 73956 - DNA, 120 bp, synthetic construct; identical to SEQ ID NO: 12458
  source 1..120: mol_type = other DNA

SEQ ID NO: 73957 - DNA, 120 bp, synthetic construct; identical to SEQ ID NO: 44003
  source 1..120: mol_type = other DNA

SEQ ID NO: 73958 - DNA, 120 bp, synthetic construct; identical to SEQ ID NO: 44004
  source 1..120: mol_type = other DNA

SEQ ID NO: 73959 - DNA, 120 bp, synthetic construct; identical to SEQ ID NO: 44005
  source 1..120: mol_type = other DNA

SEQ ID NO: 73960 - DNA, 120 bp, synthetic construct; identical to SEQ ID NO: 12459
  source 1..120: mol_type = other DNA

SEQ ID NO: 73961 - DNA, 120 bp, synthetic construct; identical to SEQ ID NO: 44007
  source 1..120: mol_type = other DNA

SEQ ID NO: 73962 - DNA, 120 bp, synthetic construct; identical to SEQ ID NO: 44008
  source 1..120: mol_type = other DNA

SEQ ID NO: 73963 - DNA, 120 bp, synthetic construct; identical to SEQ ID NO: 44009
  source 1..120: mol_type = other DNA

SEQ ID NO: 73964 - DNA, 120 bp, synthetic construct; identical to SEQ ID NO: 44010
  source 1..120: mol_type = other DNA

SEQ ID NO: 73965 - DNA, 120 bp, synthetic construct; identical to SEQ ID NO: 12460
  source 1..120: mol_type = other DNA

SEQ ID NO: 73966 - DNA, 120 bp, synthetic construct; identical to SEQ ID NO: 44012
  source 1..120: mol_type = other DNA

SEQ ID NO: 73967 - DNA, 120 bp, synthetic construct; identical to SEQ ID NO: 44013
  source 1..120: mol_type = other DNA

SEQ ID NO: 73968 - DNA, 120 bp, synthetic construct; identical to SEQ ID NO: 44014
  source 1..120: mol_type = other DNA

SEQ ID NO: 73969 - DNA, 120 bp, synthetic construct; identical to SEQ ID NO: 12461
  source 1..120: mol_type = other DNA

SEQ ID NO: 73970 - DNA, 120 bp, synthetic construct; identical to SEQ ID NO: 44016
  source 1..120: mol_type = other DNA

SEQ ID NO: 73971 - DNA, 120 bp, synthetic construct; identical to SEQ ID NO: 44017
  source 1..120: mol_type = other DNA

SEQ ID NO: 73972 - DNA, 120 bp, synthetic construct; identical to SEQ ID NO: 44018
  source 1..120: mol_type = other DNA

SEQ ID NO: 73973 - DNA, 120 bp, synthetic construct; identical to SEQ ID NO: 12462
  source 1..120: mol_type = other DNA

SEQ ID NO: 73974 - DNA, 120 bp, synthetic construct; identical to SEQ ID NO: 44020
  source 1..120: mol_type = other DNA

SEQ ID NO: 73975 - DNA, 120 bp, synthetic construct; identical to SEQ ID NO: 44021
  source 1..120: mol_type = other DNA

SEQ ID NO: 73976 - DNA, 120 bp, synthetic construct; identical to SEQ ID NO: 44022
  source 1..120: mol_type = other DNA

SEQ ID NO: 73977 - DNA, 120 bp, synthetic construct; identical to SEQ ID NO: 12463
  source 1..120: mol_type = other DNA

SEQ ID NO: 73978 - DNA, 120 bp, synthetic construct; identical to SEQ ID NO: 44024
  source 1..120: mol_type = other DNA

SEQ ID NO: 73979 - DNA, 120 bp, synthetic construct; identical to SEQ ID NO: 44025
  source 1..120: mol_type = other DNA

SEQ ID NO: 73980 - DNA, 120 bp, synthetic construct; identical to SEQ ID NO: 44026
  source 1..120: mol_type = other DNA

SEQ ID NO: 73981 - DNA, 120 bp, synthetic construct; identical to SEQ ID NO: 12464
  source 1..120: mol_type = other DNA

SEQ ID NO: 73982 - DNA, 120 bp, synthetic construct; identical to SEQ ID NO: 44028
  source 1..120: mol_type = other DNA

SEQ ID NO: 73983 - DNA, 120 bp, synthetic construct; identical to SEQ ID NO: 12465
  source 1..120: mol_type = other DNA

SEQ ID NO: 73984 - DNA, 120 bp, synthetic construct; identical to SEQ ID NO: 44030
  source 1..120: mol_type = other DNA

SEQ ID NO: 73985 - DNA, 120 bp, synthetic construct; identical to SEQ ID NO: 44031
  source 1..120: mol_type = other DNA

SEQ ID NO: 73986 - DNA, 120 bp, synthetic construct; identical to SEQ ID NO: 44032
  source 1..120: mol_type = other DNA

SEQ ID NO: 73987 - DNA, 120 bp, synthetic construct; identical to SEQ ID NO: 44033
  source 1..120: mol_type = other DNA

SEQ ID NO: 73988 - DNA, 120 bp, synthetic construct; identical to SEQ ID NO: 12466
  source 1..120: mol_type = other DNA

SEQ ID NO: 73989 - DNA, 120 bp, synthetic construct; identical to SEQ ID NO: 44035
  source 1..120: mol_type = other DNA

SEQ ID NO: 73990 - DNA, 120 bp, synthetic construct; identical to SEQ ID NO: 44036
  source 1..120: mol_type = other DNA

SEQ ID NO: 73991 - DNA, 120 bp, synthetic construct; identical to SEQ ID NO: 12467
  source 1..120: mol_type = other DNA

SEQ ID NO: 73992 - DNA, 120 bp, synthetic construct; identical to SEQ ID NO: 44038
  source 1..120: mol_type = other DNA

SEQ ID NO: 73993 - DNA, 120 bp, synthetic construct; identical to SEQ ID NO: 44039
  source 1..120: mol_type = other DNA

SEQ ID NO: 73994 - DNA, 120 bp, synthetic construct; identical to SEQ ID NO: 12468
  source 1..120: mol_type = other DNA

SEQ ID NO: 73995 - DNA, 120 bp, synthetic construct; identical to SEQ ID NO: 44041
  source 1..120: mol_type = other DNA

SEQ ID NO: 73996 - DNA, 120 bp, synthetic construct; identical to SEQ ID NO: 44042
  source 1..120: mol_type = other DNA

SEQ ID NO: 73997 - DNA, 120 bp, synthetic construct; identical to SEQ ID NO: 44043
  source 1..120: mol_type = other DNA

SEQ ID NO: 73998 - DNA, 120 bp, synthetic construct; identical to SEQ ID NO: 12469
  source 1..120: mol_type = other DNA

SEQ ID NO: 73999 - DNA, 120 bp, synthetic construct; identical to SEQ ID NO: 44045
  source 1..120: mol_type = other DNA

SEQ ID NO: 74000 - DNA, 120 bp, synthetic construct; identical to SEQ ID NO: 44046
  source 1..120: mol_type = other DNA

SEQ ID NO: 74001 - DNA, 120 bp, synthetic construct; identical to SEQ ID NO: 44047
  source 1..120: mol_type = other DNA

SEQ ID NO: 74002 - DNA, 120 bp, synthetic construct; identical to SEQ ID NO: 44048
  source 1..120: mol_type = other DNA

SEQ ID NO: 74003 - DNA, 120 bp, synthetic construct; identical to SEQ ID NO: 12470
  source 1..120: mol_type = other DNA

SEQ ID NO: 74004 - DNA, 120 bp, synthetic construct; identical to SEQ ID NO: 44050
  source 1..120: mol_type = other DNA

SEQ ID NO: 74005 - DNA, 120 bp, synthetic construct; identical to SEQ ID NO: 44051
  source 1..120: mol_type = other DNA

SEQ ID NO: 74006 - DNA, 120 bp, synthetic construct; identical to SEQ ID NO: 12471
  source 1..120: mol_type = other DNA

SEQ ID NO: 74007 - DNA, 120 bp, synthetic construct; identical to SEQ ID NO: 44053
  source 1..120: mol_type = other DNA

SEQ ID NO: 74008 - DNA, 120 bp, synthetic construct; identical to SEQ ID NO: 44054
  source 1..120: mol_type = other DNA

SEQ ID NO: 74009 - DNA, 120 bp, synthetic construct; identical to SEQ ID NO: 44055
  source 1..120: mol_type = other DNA

SEQ ID NO: 74010 - DNA, 120 bp, synthetic construct; identical to SEQ ID NO: 12472
  source 1..120: mol_type = other DNA

SEQ ID NO: 74011 - DNA, 120 bp, synthetic construct; identical to SEQ ID NO: 44057
  source 1..120: mol_type = other DNA

SEQ ID NO: 74012 - DNA, 120 bp, synthetic construct; identical to SEQ ID NO: 44058
  source 1..120: mol_type = other DNA

SEQ ID NO: 74013 - DNA, 120 bp, synthetic construct; identical to SEQ ID NO: 44059
  source 1..120: mol_type = other DNA

SEQ ID NO: 74014 - DNA, 120 bp, synthetic construct; identical to SEQ ID NO: 12473
  source 1..120: mol_type = other DNA

SEQ ID NO: 74015 - DNA, 120 bp, synthetic construct; identical to SEQ ID NO: 44061
  source 1..120: mol_type = other DNA

SEQ ID NO: 74016 - DNA, 120 bp, synthetic construct; identical to SEQ ID NO: 44062
  source 1..120: mol_type = other DNA

SEQ ID NO: 74017 - DNA, 120 bp, synthetic construct; identical to SEQ ID NO: 44063
  source 1..120: mol_type = other DNA

SEQ ID NO: 74018 - DNA, 120 bp, synthetic construct; identical to SEQ ID NO: 12474
  source 1..120: mol_type = other DNA

SEQ ID NO: 74019 - DNA, 120 bp, synthetic construct; identical to SEQ ID NO: 44065
  source 1..120: mol_type = other DNA

SEQ ID NO: 74020 - DNA, 120 bp, synthetic construct; identical to SEQ ID NO: 44066
  source 1..120: mol_type = other DNA

SEQ ID NO: 74021 - DNA, 120 bp, synthetic construct; identical to SEQ ID NO: 44067
  source 1..120: mol_type = other DNA

SEQ ID NO: 74022 - DNA, 120 bp, synthetic construct; identical to SEQ ID NO: 44068
  source 1..120: mol_type = other DNA

SEQ ID NO: 74023 - DNA, 120 bp, synthetic construct; identical to SEQ ID NO: 12475
  source 1..120: mol_type = other DNA

SEQ ID NO: 74024 - DNA, 120 bp, synthetic construct; identical to SEQ ID NO: 44070
  source 1..120: mol_type = other DNA

SEQ ID NO: 74025 - DNA, 120 bp, synthetic construct; identical to SEQ ID NO: 44071
  source 1..120: mol_type = other DNA

SEQ ID NO: 74026 - DNA, 120 bp, synthetic construct; identical to SEQ ID NO: 44072
  source 1..120: mol_type = other DNA

SEQ ID NO: 74027 - DNA, 120 bp, synthetic construct; identical to SEQ ID NO: 12476
  source 1..120: mol_type = other DNA

SEQ ID NO: 74028 - DNA, 120 bp, synthetic construct; identical to SEQ ID NO: 44074
  source 1..120: mol_type = other DNA

SEQ ID NO: 74029 - DNA, 120 bp, synthetic construct; identical to SEQ ID NO: 44075
  source 1..120: mol_type = other DNA

SEQ ID NO: 74030 - DNA, 120 bp, synthetic construct; identical to SEQ ID NO: 44076
  source 1..120: mol_type = other DNA

SEQ ID NO: 74031 - DNA, 120 bp, synthetic construct; identical to SEQ ID NO: 12477
  source 1..120: mol_type = other DNA

SEQ ID NO: 74032 - DNA, 120 bp, synthetic construct; identical to SEQ ID NO: 44078
  source 1..120: mol_type = other DNA

SEQ ID NO: 74033 - DNA, 120 bp, synthetic construct; identical to SEQ ID NO: 44079
  source 1..120: mol_type = other DNA

SEQ ID NO: 74034 - DNA, 120 bp, synthetic construct; identical to SEQ ID NO: 12478
  source 1..120: mol_type = other DNA

SEQ ID NO: 74035 - DNA, 120 bp, synthetic construct; identical to SEQ ID NO: 44081
  source 1..120: mol_type = other DNA

SEQ ID NO: 74036 - DNA, 120 bp, synthetic construct; identical to SEQ ID NO: 44082
  source 1..120: mol_type = other DNA

SEQ ID NO: 74037 - DNA, 120 bp, synthetic construct; identical to SEQ ID NO: 44083
  source 1..120: mol_type = other DNA

SEQ ID NO: 74038 - DNA, 120 bp, synthetic construct; identical to SEQ ID NO: 12479
  source 1..120: mol_type = other DNA

SEQ ID NO: 74039 - DNA, 120 bp, synthetic construct; identical to SEQ ID NO: 44085
  source 1..120: mol_type = other DNA

SEQ ID NO: 74040 - DNA, 120 bp, synthetic construct; identical to SEQ ID NO: 44086
  source 1..120: mol_type = other DNA

SEQ ID NO: 74041 - DNA, 120 bp, synthetic construct; identical to SEQ ID NO: 44087
  source 1..120: mol_type = other DNA

SEQ ID NO: 74042 - DNA, 120 bp, synthetic construct; identical to SEQ ID NO: 44088
  source 1..120: mol_type = other DNA

SEQ ID NO: 74043 - DNA, 120 bp, synthetic construct; identical to SEQ ID NO: 12480
  source 1..120: mol_type = other DNA

SEQ ID NO: 74044 - DNA, 120 bp, synthetic construct; identical to SEQ ID NO: 44090
  source 1..120: mol_type = other DNA

SEQ ID NO: 74045 - DNA, 120 bp, synthetic construct; identical to SEQ ID NO: 44091
  source 1..120: mol_type = other DNA

SEQ ID NO: 74046 - DNA, 120 bp, synthetic construct; identical to SEQ ID NO: 44092
  source 1..120: mol_type = other DNA

SEQ ID NO: 74047 - DNA, 120 bp, synthetic construct; identical to SEQ ID NO: 44093
  source 1..120: mol_type = other DNA

SEQ ID NO: 74048 - DNA, 120 bp, synthetic construct; identical to SEQ ID NO: 12481
  source 1..120: mol_type = other DNA

SEQ ID NO: 74049 - DNA, 120 bp, synthetic construct; identical to SEQ ID NO: 44095
  source 1..120: mol_type = other DNA

SEQ ID NO: 74050 - DNA, 120 bp, synthetic construct; identical to SEQ ID NO: 44096
  source 1..120: mol_type = other DNA

SEQ ID NO: 74051 - DNA, 120 bp, synthetic construct; identical to SEQ ID NO: 12482
  source 1..120: mol_type = other DNA

SEQ ID NO: 74052 - DNA, 120 bp, synthetic construct; identical to SEQ ID NO: 44098
  source 1..120: mol_type = other DNA

SEQ ID NO: 74053 - DNA, 120 bp, synthetic construct; identical to SEQ ID NO: 44099
  source 1..120: mol_type = other DNA

SEQ ID NO: 74054 - DNA, 120 bp, synthetic construct; identical to SEQ ID NO: 44100
  source 1..120: mol_type = other DNA

SEQ ID NO: 74055 - DNA, 120 bp, synthetic construct; identical to SEQ ID NO: 44101
  source 1..120: mol_type = other DNA

SEQ ID NO: 74056 - DNA, 120 bp, synthetic construct; identical to SEQ ID NO: 12483
  source 1..120: mol_type = other DNA

SEQ ID NO: 74057 - DNA, 120 bp, synthetic construct; identical to SEQ ID NO: 44103
  source 1..120: mol_type = other DNA

SEQ ID NO: 74058 - DNA, 120 bp, synthetic construct; identical to SEQ ID NO: 44104
  source 1..120: mol_type = other DNA

SEQ ID NO: 74059 - DNA, 120 bp, synthetic construct; identical to SEQ ID NO: 44105
  source 1..120: mol_type = other DNA

SEQ ID NO: 74060 - DNA, 120 bp, synthetic construct; identical to SEQ ID NO: 12484
  source 1..120: mol_type = other DNA

SEQ ID NO: 74061 - DNA, 120 bp, synthetic construct; identical to SEQ ID NO: 44107
  source 1..120: mol_type = other DNA

SEQ ID NO: 74062 - DNA, 120 bp, synthetic construct; identical to SEQ ID NO: 44108
  source 1..120: mol_type = other DNA

SEQ ID NO: 74063 - DNA, 120 bp, synthetic construct; identical to SEQ ID NO: 44109
  source 1..120: mol_type = other DNA

SEQ ID NO: 74064 - DNA, 120 bp, synthetic construct; identical to SEQ ID NO: 12485
  source 1..120: mol_type = other DNA

SEQ ID NO: 74065 - DNA, 120 bp, synthetic construct; identical to SEQ ID NO: 44111
  source 1..120: mol_type = other DNA

SEQ ID NO: 74066 - DNA, 120 bp, synthetic construct; identical to SEQ ID NO: 44112
  source 1..120: mol_type = other DNA

SEQ ID NO: 74067 - DNA, 120 bp, synthetic construct; identical to SEQ ID NO: 12486
  source 1..120: mol_type = other DNA

SEQ ID NO: 74068 - DNA, 120 bp, synthetic construct; identical to SEQ ID NO: 44114
  source 1..120: mol_type = other DNA

SEQ ID NO: 74069 - DNA, 120 bp, synthetic construct; identical to SEQ ID NO: 44115
  source 1..120: mol_type = other DNA

SEQ ID NO: 74070 - DNA, 120 bp, synthetic construct; identical to SEQ ID NO: 44116
  source 1..120: mol_type = other DNA

SEQ ID NO: 74071 - DNA, 120 bp, synthetic construct; identical to SEQ ID NO: 44117
  source 1..120: mol_type = other DNA

SEQ ID NO: 74072 - DNA, 120 bp, synthetic construct; identical to SEQ ID NO: 12487
  source 1..120: mol_type = other DNA

SEQ ID NO: 74073 - DNA, 120 bp, synthetic construct; identical to SEQ ID NO: 44119
  source 1..120: mol_type = other DNA

SEQ ID NO: 74074 - DNA, 120 bp, synthetic construct; identical to SEQ ID NO: 44120
  source 1..120: mol_type = other DNA

SEQ ID NO: 74075 - DNA, 120 bp, synthetic construct; identical to SEQ ID NO: 12488
  source 1..120: mol_type = other DNA

SEQ ID NO: 74076 - DNA, 120 bp, synthetic construct; identical to SEQ ID NO: 44122
  source 1..120: mol_type = other DNA

SEQ ID NO: 74077 - DNA, 120 bp, synthetic construct; identical to SEQ ID NO: 44123
  source 1..120: mol_type = other DNA

SEQ ID NO: 74078 - DNA, 120 bp, synthetic construct; identical to SEQ ID NO: 44124
  source 1..120: mol_type = other DNA

SEQ ID NO: 74079 - DNA, 120 bp, synthetic construct; identical to SEQ ID NO: 44125
  source 1..120: mol_type = other DNA

SEQ ID NO: 74080 - DNA, 120 bp, synthetic construct; identical to SEQ ID NO: 12489
  source 1..120: mol_type = other DNA

SEQ ID NO: 74081 - DNA, 120 bp, synthetic construct; identical to SEQ ID NO: 44127
  source 1..120: mol_type = other DNA

SEQ ID NO: 74082 - DNA, 120 bp, synthetic construct; identical to SEQ ID NO: 44128
  source 1..120: mol_type = other DNA

SEQ ID NO: 74083 - DNA, 120 bp, synthetic construct; identical to SEQ ID NO: 12490
  source 1..120: mol_type = other DNA

SEQ ID NO: 74084 - DNA, 120 bp, synthetic construct; identical to SEQ ID NO: 44130
  source 1..120: mol_type = other DNA

SEQ ID NO: 74085 - DNA, 120 bp, synthetic construct; identical to SEQ ID NO: 44131
  source 1..120: mol_type = other DNA

SEQ ID NO: 74086 - DNA, 120 bp, synthetic construct; identical to SEQ ID NO: 44132
  source 1..120: mol_type = other DNA

SEQ ID NO: 74087 - DNA, 120 bp, synthetic construct; identical to SEQ ID NO: 12491
  source 1..120: mol_type = other DNA

SEQ ID NO: 74088 - DNA, 120 bp, synthetic construct; identical to SEQ ID NO: 44134
  source 1..120: mol_type = other DNA

SEQ ID NO: 74089 - DNA, 120 bp, synthetic construct; identical to SEQ ID NO: 44135
  source 1..120: mol_type = other DNA

SEQ ID NO: 74090 - DNA, 120 bp, synthetic construct; identical to SEQ ID NO: 44136
  source 1..120: mol_type = other DNA

SEQ ID NO: 74091 - DNA, 120 bp, synthetic construct; identical to SEQ ID NO: 44137
  source 1..120: mol_type = other DNA

SEQ ID NO: 74092 - DNA, 120 bp, synthetic construct; identical to SEQ ID NO: 12492
  source 1..120: mol_type = other DNA

SEQ ID NO: 74093 - DNA, 120 bp, synthetic construct; identical to SEQ ID NO: 44139
  source 1..120: mol_type = other DNA

SEQ ID NO: 74094 - DNA, 120 bp, synthetic construct; identical to SEQ ID NO: 44140
  source 1..120: mol_type = other DNA

SEQ ID NO: 74095 - DNA, 120 bp, synthetic construct; identical to SEQ ID NO: 44141
  source 1..120: mol_type = other DNA

SEQ ID NO: 74096 - DNA, 120 bp, synthetic construct; identical to SEQ ID NO: 12493
  source 1..120: mol_type = other DNA

SEQ ID NO: 74097 - DNA, 120 bp, synthetic construct; identical to SEQ ID NO: 44143
  source 1..120: mol_type = other DNA

SEQ ID NO: 74098 - DNA, 120 bp, synthetic construct; identical to SEQ ID NO: 44144
  source 1..120: mol_type = other DNA

SEQ ID NO: 74099 - DNA, 120 bp, synthetic construct; identical to SEQ ID NO: 12494
  source 1..120: mol_type = other DNA

SEQ ID NO: 74100 - DNA, 120 bp, synthetic construct; identical to SEQ ID NO: 44146
  source 1..120: mol_type = other DNA

SEQ ID NO: 74101 - DNA, 120 bp, synthetic construct; identical to SEQ ID NO: 44147
  source 1..120: mol_type = other DNA

SEQ ID NO: 74102 - DNA, 120 bp, synthetic construct; identical to SEQ ID NO: 44148
  source 1..120: mol_type = other DNA

SEQ ID NO: 74103 - DNA, 120 bp, synthetic construct; identical to SEQ ID NO: 12495
  source 1..120: mol_type = other DNA

SEQ ID NO: 74104 - DNA, 120 bp, synthetic construct; identical to SEQ ID NO: 44150
  source 1..120: mol_type = other DNA

SEQ ID NO: 74105 - DNA, 120 bp, synthetic construct; identical to SEQ ID NO: 44151
  source 1..120: mol_type = other DNA

SEQ ID NO: 74106 - DNA, 120 bp, synthetic construct; identical to SEQ ID NO: 44152
  source 1..120: mol_type = other DNA

SEQ ID NO: 74107 - DNA, 120 bp, synthetic construct; identical to SEQ ID NO: 12496
  source 1..120: mol_type = other DNA

SEQ ID NO: 74108 - DNA, 120 bp, synthetic construct; identical to SEQ ID NO: 44154
  source 1..120: mol_type = other DNA

SEQ ID NO: 74109 - DNA, 120 bp, synthetic construct; identical to SEQ ID NO: 44155
  source 1..120: mol_type = other DNA

SEQ ID NO: 74110 - DNA, 120 bp, synthetic construct; identical to SEQ ID NO: 44156
  source 1..120: mol_type = other DNA

SEQ ID NO: 74111 - DNA, 120 bp, synthetic construct; identical to SEQ ID NO: 44157
  source 1..120: mol_type = other DNA

SEQ ID NO: 74112 - DNA, 120 bp, synthetic construct; identical to SEQ ID NO: 12497
  source 1..120: mol_type = other DNA

SEQ ID NO: 74113 - DNA, 120 bp, synthetic construct; identical to SEQ ID NO: 44159
  source 1..120: mol_type = other DNA

SEQ ID NO: 74114 - DNA, 120 bp, synthetic construct; identical to SEQ ID NO: 44160
  source 1..120: mol_type = other DNA

SEQ ID NO: 74115 - DNA, 120 bp, synthetic construct; identical to SEQ ID NO: 12498
  source 1..120: mol_type = other DNA

SEQ ID NO: 74116 - DNA, 120 bp, synthetic construct; identical to SEQ ID NO: 44162
  source 1..120: mol_type = other DNA

SEQ ID NO: 74117 - DNA, 120 bp, synthetic construct; identical to SEQ ID NO: 44163
  source 1..120: mol_type = other DNA

SEQ ID NO: 74118 - DNA, 120 bp, synthetic construct; identical to SEQ ID NO: 44164
  source 1..120: mol_type = other DNA

SEQ ID NO: 74119 - DNA, 120 bp, synthetic construct; identical to SEQ ID NO: 44165
  source 1..120: mol_type = other DNA

SEQ ID NO: 74120 - DNA, 120 bp, synthetic construct; identical to SEQ ID NO: 12499
  source 1..120: mol_type = other DNA

SEQ ID NO: 74121 - DNA, 120 bp, synthetic construct; identical to SEQ ID NO: 44167
  source 1..120: mol_type = other DNA

SEQ ID NO: 74122 - DNA, 120 bp, synthetic construct; identical to SEQ ID NO: 44168
  source 1..120: mol_type = other DNA

SEQ ID NO: 74123 - DNA, 120 bp, synthetic construct; identical to SEQ ID NO: 44169
  source 1..120: mol_type = other DNA

SEQ ID NO: 74124 - DNA, 120 bp, synthetic construct; identical to SEQ ID NO: 12500
  source 1..120: mol_type = other DNA

SEQ ID NO: 74125 - DNA, 120 bp, synthetic construct; identical to SEQ ID NO: 44171
  source 1..120: mol_type = other DNA

SEQ ID NO: 74126 - DNA, 120 bp, synthetic construct; identical to SEQ ID NO: 44172
  source 1..120: mol_type = other DNA

SEQ ID NO: 74127 - DNA, 120 bp, synthetic construct; identical to SEQ ID NO: 44173
  source 1..120: mol_type = other DNA

SEQ ID NO: 74128 - DNA, 120 bp, synthetic construct; identical to SEQ ID NO: 12501
  source 1..120: mol_type = other DNA

SEQ ID NO: 74129 - DNA, 120 bp, synthetic construct; identical to SEQ ID NO: 44175
  source 1..120: mol_type = other DNA

SEQ ID NO: 74130 - DNA, 120 bp, synthetic construct; identical to SEQ ID NO: 44176
  source 1..120: mol_type = other DNA

SEQ ID NO: 74131 - DNA, 120 bp, synthetic construct; identical to SEQ ID NO: 44177
  source 1..120: mol_type = other DNA

SEQ ID NO: 74132 - DNA, 120 bp, synthetic construct; identical to SEQ ID NO: 12502
  source 1..120: mol_type = other DNA

SEQ ID NO: 74133 - DNA, 120 bp, synthetic construct; identical to SEQ ID NO: 44179
  source 1..120: mol_type = other DNA

SEQ ID NO: 74134 - DNA, 120 bp, synthetic construct; identical to SEQ ID NO: 44180
  source 1..120: mol_type = other DNA

SEQ ID NO: 74135 - DNA, 120 bp, synthetic construct; identical to SEQ ID NO: 44181
  source 1..120: mol_type = other DNA

SEQ ID NO: 74136 - DNA, 120 bp, synthetic construct; identical to SEQ ID NO: 44182
  source 1..120: mol_type = other DNA

SEQ ID NO: 74137 - DNA, 120 bp, synthetic construct; identical to SEQ ID NO: 12503
  source 1..120: mol_type = other DNA

SEQ ID NO: 74138 - DNA, 120 bp, synthetic construct; identical to SEQ ID NO: 44184
  source 1..120: mol_type = other DNA

SEQ ID NO: 74139 - DNA, 120 bp, synthetic construct; identical to SEQ ID NO: 44185
  source 1..120: mol_type = other DNA

SEQ ID NO: 74140 - DNA, 120 bp, synthetic construct; identical to SEQ ID NO: 12504
  source 1..120: mol_type = other DNA

SEQ ID NO: 74141 - DNA, 120 bp, synthetic construct; identical to SEQ ID NO: 44187
  source 1..120: mol_type = other DNA

SEQ ID NO: 74142 - DNA, 120 bp, synthetic construct; identical to SEQ ID NO: 44188
  source 1..120: mol_type = other DNA

SEQ ID NO: 74143 - DNA, 120 bp, synthetic construct; identical to SEQ ID NO: 44189
  source 1..120: mol_type = other DNA

SEQ ID NO: 74144 - DNA, 120 bp, synthetic construct; identical to SEQ ID NO: 12505
  source 1..120: mol_type = other DNA

SEQ ID NO: 74145 - DNA, 120 bp, synthetic construct; identical to SEQ ID NO: 44191
  source 1..120: mol_type = other DNA

SEQ ID NO: 74146 - DNA, 120 bp, synthetic construct; identical to SEQ ID NO: 44192
  source 1..120: mol_type = other DNA

SEQ ID NO: 74147 - DNA, 120 bp, synthetic construct; identical to SEQ ID NO: 44193
  source 1..120: mol_type = other DNA

SEQ ID NO: 74148 - DNA, 120 bp, synthetic construct; identical to SEQ ID NO: 44194
  source 1..120: mol_type = other DNA

SEQ ID NO: 74149 - DNA, 120 bp, synthetic construct; identical to SEQ ID NO: 12506
  source 1..120: mol_type = other DNA

SEQ ID NO: 74150 - DNA, 120 bp, synthetic construct; identical to SEQ ID NO: 44196
  source 1..120: mol_type = other DNA

SEQ ID NO: 74151 - DNA, 120 bp, synthetic construct; identical to SEQ ID NO: 44197
  source 1..120: mol_type = other DNA

SEQ ID NO: 74152 - DNA, 120 bp, synthetic construct; identical to SEQ ID NO: 44198
  source 1..120: mol_type = other DNA

SEQ ID NO: 74153 - DNA, 120 bp, synthetic construct; identical to SEQ ID NO: 44199
  source 1..120: mol_type = other DNA

SEQ ID NO: 74154 - DNA, 120 bp, synthetic construct; identical to SEQ ID NO: 12507
  source 1..120: mol_type = other DNA

SEQ ID NO: 74155 - DNA, 120 bp, synthetic construct; identical to SEQ ID NO: 44201
  source 1..120: mol_type = other DNA

SEQ ID NO: 74156 - DNA, 120 bp, synthetic construct; identical to SEQ ID NO: 44202
  source 1..120: mol_type = other DNA

SEQ ID NO: 74157 - DNA, 120 bp, synthetic construct; identical to SEQ ID NO: 12508
  source 1..120: mol_type = other DNA

SEQ ID NO: 74158 - DNA, 120 bp, synthetic construct; identical to SEQ ID NO: 44204
  source 1..120: mol_type = other DNA

SEQ ID NO: 74159 - DNA, 120 bp, synthetic construct; identical to SEQ ID NO: 44205
  source 1..120: mol_type = other DNA

SEQ ID NO: 74160 - DNA, 120 bp, synthetic construct; identical to SEQ ID NO: 44206
  source 1..120: mol_type = other DNA

SEQ ID NO: 74161 - DNA, 120 bp, synthetic construct; identical to SEQ ID NO: 12509
  source 1..120: mol_type = other DNA

SEQ ID NO: 74162 - DNA, 120 bp, synthetic construct; identical to SEQ ID NO: 44208
  source 1..120: mol_type = other DNA

SEQ ID NO: 74163 - DNA, 120 bp, synthetic construct; identical to SEQ ID NO: 44209
  source 1..120: mol_type = other DNA

SEQ ID NO: 74164 - DNA, 120 bp, synthetic construct; identical to SEQ ID NO: 44210
  source 1..120: mol_type = other DNA

SEQ ID NO: 74165 - DNA, 120 bp, synthetic construct; identical to SEQ ID NO: 44211
  source 1..120: mol_type = other DNA

SEQ ID NO: 74166 - DNA, 120 bp, synthetic construct; identical to SEQ ID NO: 12510
  source 1..120: mol_type = other DNA

SEQ ID NO: 74167 - DNA, 120 bp, synthetic construct; identical to SEQ ID NO: 44213
  source 1..120: mol_type = other DNA

SEQ ID NO: 74168 - DNA, 120 bp, synthetic construct; identical to SEQ ID NO: 44214
  source 1..120: mol_type = other DNA

SEQ ID NO: 74169 - DNA, 120 bp, synthetic construct; identical to SEQ ID NO: 12511
  source 1..120: mol_type = other DNA

SEQ ID NO: 74170 - DNA, 120 bp, synthetic construct; identical to SEQ ID NO: 44216
  source 1..120: mol_type = other DNA

SEQ ID NO: 74171 - DNA, 120 bp, synthetic construct; identical to SEQ ID NO: 44217
  source 1..120: mol_type = other DNA

SEQ ID NO: 74172 - DNA, 120 bp, synthetic construct; identical to SEQ ID NO: 44218
  source 1..120: mol_type = other DNA

SEQ ID NO: 74173 - DNA, 120 bp, synthetic construct; identical to SEQ ID NO: 12512
  source 1..120: mol_type = other DNA

SEQ ID NO: 74174 - DNA, 120 bp, synthetic construct; identical to SEQ ID NO: 44220
  source 1..120: mol_type = other DNA

SEQ ID NO: 74175 - DNA, 120 bp, synthetic construct; identical to SEQ ID NO: 44221
  source 1..120: mol_type = other DNA

SEQ ID NO: 74176 - DNA, 120 bp, synthetic construct; identical to SEQ ID NO: 44222
  source 1..120: mol_type = other DNA

SEQ ID NO: 74177 - DNA, 120 bp, synthetic construct; identical to SEQ ID NO: 12513
  source 1..120: mol_type = other DNA

SEQ ID NO: 74178 - DNA, 120 bp, synthetic construct; identical to SEQ ID NO: 44224
  source 1..120: mol_type = other DNA

SEQ ID NO: 74179 - DNA, 120 bp, synthetic construct; identical to SEQ ID NO: 44225
  source 1..120: mol_type = other DNA

SEQ ID NO: 74180 - DNA, 120 bp, synthetic construct; identical to SEQ ID NO: 44226
  source 1..120: mol_type = other DNA

SEQ ID NO: 74181 - DNA, 120 bp, synthetic construct; identical to SEQ ID NO: 44227
  source 1..120: mol_type = other DNA

SEQ ID NO: 74182 - DNA, 120 bp, synthetic construct; identical to SEQ ID NO: 12514
  source 1..120: mol_type = other DNA

SEQ ID NO: 74183 - DNA, 120 bp, synthetic construct; identical to SEQ ID NO: 44229
  source 1..120: mol_type = other DNA

SEQ ID NO: 74184 - DNA, 120 bp, synthetic construct; identical to SEQ ID NO: 44230
  source 1..120: mol_type = other DNA

SEQ ID NO: 74185 - DNA, 120 bp, synthetic construct; identical to SEQ ID NO: 44231
  source 1..120: mol_type = other DNA

SEQ ID NO: 74186 - DNA, 120 bp, synthetic construct; identical to SEQ ID NO: 12515
  source 1..120: mol_type = other DNA

SEQ ID NO: 74187 - DNA, 120 bp, synthetic construct; identical to SEQ ID NO: 44233
  source 1..120: mol_type = other DNA

SEQ ID NO: 74188 - DNA, 120 bp, synthetic construct; identical to SEQ ID NO: 44234
  source 1..120: mol_type = other DNA

SEQ ID NO: 74189 - DNA, 120 bp, synthetic construct; identical to SEQ ID NO: 44235
  source 1..120: mol_type = other DNA

SEQ ID NO: 74190 - DNA, 120 bp, synthetic construct; identical to SEQ ID NO: 12516
  source 1..120: mol_type = other DNA

SEQ ID NO: 74191 - DNA, 120 bp, synthetic construct; identical to SEQ ID NO: 44237
  source 1..120: mol_type = other DNA

SEQ ID NO: 74192 - DNA, 120 bp, synthetic construct; identical to SEQ ID NO: 44238
  source 1..120: mol_type = other DNA

SEQ ID NO: 74193 - DNA, 120 bp, synthetic construct; identical to SEQ ID NO: 12517
  source 1..120: mol_type = other DNA

SEQ ID NO: 74194 - DNA, 120 bp, synthetic construct; identical to SEQ ID NO: 44240
  source 1..120: mol_type = other DNA

SEQ ID NO: 74195 - DNA, 120 bp, synthetic construct; identical to SEQ ID NO: 44241
  source 1..120: mol_type = other DNA

SEQ ID NO: 74196 - DNA, 120 bp, synthetic construct; identical to SEQ ID NO: 44242
  source 1..120: mol_type = other DNA

SEQ ID NO: 74197 - DNA, 120 bp, synthetic construct; identical to SEQ ID NO: 12518
  source 1..120: mol_type = other DNA

SEQ ID NO: 74198 - DNA, 120 bp, synthetic construct; identical to SEQ ID NO: 44244
  source 1..120: mol_type = other DNA

SEQ ID NO: 74199 - DNA, 120 bp, synthetic construct; identical to SEQ ID NO: 44245
  source 1..120: mol_type = other DNA

SEQ ID NO: 74200 - DNA, 120 bp, synthetic construct; identical to SEQ ID NO: 44246
  source 1..120: mol_type = other DNA

SEQ ID NO: 74201 - DNA, 120 bp, synthetic construct; identical to SEQ ID NO: 44247
  source 1..120: mol_type = other DNA

SEQ ID NO: 74202 - DNA, 120 bp, synthetic construct; identical to SEQ ID NO: 12519
  source 1..120: mol_type = other DNA

SEQ ID NO: 74203 - DNA, 120 bp, synthetic construct; identical to SEQ ID NO: 44249
  source 1..120: mol_type = other DNA

SEQ ID NO: 74204 - DNA, 120 bp, synthetic construct; identical to SEQ ID NO: 44250
  source 1..120: mol_type = other DNA

SEQ ID NO: 74205 - DNA, 120 bp, synthetic construct; identical to SEQ ID NO: 12520
  source 1..120: mol_type = other DNA

SEQ ID NO: 74206 - DNA, 120 bp, synthetic construct; identical to SEQ ID NO: 44252
  source 1..120: mol_type = other DNA

SEQ ID NO: 74207 - DNA, 120 bp, synthetic construct; identical to SEQ ID NO: 44253
  source 1..120: mol_type = other DNA

SEQ ID NO: 74208 - DNA, 120 bp, synthetic construct; identical to SEQ ID NO: 44254
  source 1..120: mol_type = other DNA

SEQ ID NO: 74209 - DNA, 120 bp, synthetic construct; identical to SEQ ID NO: 12521
  source 1..120: mol_type = other DNA

SEQ ID NO: 74210 - DNA, 120 bp, synthetic construct; identical to SEQ ID NO: 44256
  source 1..120: mol_type = other DNA

SEQ ID NO: 74211 - DNA, 120 bp, synthetic construct; identical to SEQ ID NO: 44257
  source 1..120: mol_type = other DNA

SEQ ID NO: 74212 - DNA, 120 bp, synthetic construct; identical to SEQ ID NO: 44258
  source 1..120: mol_type = other DNA

SEQ ID NO: 74213 - DNA, 120 bp, synthetic construct; identical to SEQ ID NO: 12522
  source 1..120: mol_type = other DNA

SEQ ID NO: 74214 - DNA, 120 bp, synthetic construct; identical to SEQ ID NO: 44260
  source 1..120: mol_type = other DNA

SEQ ID NO: 74215 - DNA, 120 bp, synthetic construct; identical to SEQ ID NO: 44261
  source 1..120: mol_type = other DNA

SEQ ID NO: 74216 - DNA, 120 bp, synthetic construct; identical to SEQ ID NO: 44262
  source 1..120: mol_type = other DNA

SEQ ID NO: 74217 - DNA, 120 bp, synthetic construct; identical to SEQ ID NO: 12523
  source 1..120: mol_type = other DNA

SEQ ID NO: 74218 - DNA, 120 bp, synthetic construct; identical to SEQ ID NO: 44264
  source 1..120: mol_type = other DNA

SEQ ID NO: 74219 - DNA, 120 bp, synthetic construct; identical to SEQ ID NO: 44265
  source 1..120: mol_type = other DNA

SEQ ID NO: 74220 - DNA, 120 bp, synthetic construct; identical to SEQ ID NO: 44266
  source 1..120: mol_type = other DNA

SEQ ID NO: 74221 - DNA, 120 bp, synthetic construct; identical to SEQ ID NO: 44267
  source 1..120: mol_type = other DNA

SEQ ID NO: 74222 - DNA, 120 bp, synthetic construct; identical to SEQ ID NO: 12524
  source 1..120: mol_type = other DNA

SEQ ID NO: 74223 - DNA, 120 bp, synthetic construct; identical to SEQ ID NO: 44269
  source 1..120: mol_type = other DNA

SEQ ID NO: 74224 - DNA, 120 bp, synthetic construct; identical to SEQ ID NO: 44270
  source 1..120: mol_type = other DNA

SEQ ID NO: 74225 - DNA, 120 bp, synthetic construct; identical to SEQ ID NO: 12525
  source 1..120: mol_type = other DNA

SEQ ID NO: 74226 - DNA, 120 bp, synthetic construct; identical to SEQ ID NO: 44272
  source 1..120: mol_type = other DNA

SEQ ID NO: 74227 - DNA, 120 bp, synthetic construct; identical to SEQ ID NO: 44273
  source 1..120: mol_type = other DNA

SEQ ID NO: 74228 - DNA, 120 bp, synthetic construct; identical to SEQ ID NO: 44274
  source 1..120: mol_type = other DNA

SEQ ID NO: 74229 - DNA, 120 bp, synthetic construct; identical to SEQ ID NO: 44275
  source 1..120: mol_type = other DNA

SEQ ID NO: 74230 - DNA, 120 bp, synthetic construct; identical to SEQ ID NO: 12526
  source 1..120: mol_type = other DNA

SEQ ID NO: 74231 - DNA, 120 bp, synthetic construct; identical to SEQ ID NO: 44277
  source 1..120: mol_type = other DNA

SEQ ID NO: 74232 - DNA, 120 bp, synthetic construct; identical to SEQ ID NO: 44278
  source 1..120: mol_type = other DNA

SEQ ID NO: 74233 - DNA, 120 bp, synthetic construct; identical to SEQ ID NO: 44279
  source 1..120: mol_type = other DNA

SEQ ID NO: 74234 - DNA, 120 bp, synthetic construct; identical to SEQ ID NO: 12527
  source 1..120: mol_type = other DNA

SEQ ID NO: 74235 - DNA, 120 bp, synthetic construct; identical to SEQ ID NO: 44281
  source 1..120: mol_type = other DNA

SEQ ID NO: 74236 - DNA, 120 bp, synthetic construct; identical to SEQ ID NO: 44282
  source 1..120: mol_type = other DNA

SEQ ID NO: 74237 - DNA, 120 bp, synthetic construct; identical to SEQ ID NO: 44283
  source 1..120: mol_type = other DNA

SEQ ID NO: 74238 - DNA, 120 bp, synthetic construct; identical to SEQ ID NO: 12528
  source 1..120: mol_type = other DNA

SEQ ID NO: 74239 - DNA, 120 bp, synthetic construct; identical to SEQ ID NO: 44285
  source 1..120: mol_type = other DNA

SEQ ID NO: 74240 - DNA, 120 bp, synthetic construct; identical to SEQ ID NO: 44286
  source 1..120: mol_type = other DNA

SEQ ID NO: 74241 - DNA, 120 bp, synthetic construct; identical to SEQ ID NO: 44287
  source 1..120: mol_type = other DNA

SEQ ID NO: 74242 - DNA, 120 bp, synthetic construct; identical to SEQ ID NO: 44288
  source 1..120: mol_type = other DNA

SEQ ID NO: 74243 - DNA, 120 bp, synthetic construct; identical to SEQ ID NO: 12529
  source 1..120: mol_type = other DNA

SEQ ID NO: 74244 - DNA, 120 bp, synthetic construct; identical to SEQ ID NO: 44290
  source 1..120: mol_type = other DNA

SEQ ID NO: 74245 - DNA, 120 bp, synthetic construct; identical to SEQ ID NO: 44291
  source 1..120: mol_type = other DNA

SEQ ID NO: 74246 - DNA, 120 bp, synthetic construct; identical to SEQ ID NO: 44292
  source 1..120: mol_type = other DNA

SEQ ID NO: 74247 - DNA, 120 bp, synthetic construct; identical to SEQ ID NO: 12530
  source 1..120: mol_type = other DNA

SEQ ID NO: 74248 - DNA, 120 bp, synthetic construct; identical to SEQ ID NO: 44294
  source 1..120: mol_type = other DNA

SEQ ID NO: 74249 - DNA, 120 bp, synthetic construct; identical to SEQ ID NO: 44295
  source 1..120: mol_type = other DNA

SEQ ID NO: 74250 - DNA, 120 bp, synthetic construct; identical to SEQ ID NO: 44296
  source 1..120: mol_type = other DNA

SEQ ID NO: 74251 - DNA, 120 bp, synthetic construct; identical to SEQ ID NO: 12531
  source 1..120: mol_type = other DNA

SEQ ID NO: 74252 - DNA, 120 bp, synthetic construct; identical to SEQ ID NO: 44298
  source 1..120: mol_type = other DNA

SEQ ID NO: 74253 - DNA, 120 bp, synthetic construct; identical to SEQ ID NO: 44299
  source 1..120: mol_type = other DNA

SEQ ID NO: 74254 - DNA, 120 bp, synthetic construct; identical to SEQ ID NO: 44300
  source 1..120: mol_type = other DNA

SEQ ID NO: 74255 - DNA, 120 bp, synthetic construct; identical to SEQ ID NO: 44301
  source 1..120: mol_type = other DNA

SEQ ID NO: 74256 - DNA, 120 bp, synthetic construct; identical to SEQ ID NO: 12532
  source 1..120: mol_type = other DNA

SEQ ID NO: 74257 - DNA, 120 bp, synthetic construct; identical to SEQ ID NO: 44303
  source 1..120: mol_type = other DNA

SEQ ID NO: 74258 - DNA, 120 bp, synthetic construct; identical to SEQ ID NO: 44304
  source 1..120: mol_type = other DNA

SEQ ID NO: 74259 - DNA, 120 bp, synthetic construct; identical to SEQ ID NO: 12533
  source 1..120: mol_type = other DNA

SEQ ID NO: 74260 - DNA, 120 bp, synthetic construct; identical to SEQ ID NO: 44306
  source 1..120: mol_type = other DNA

SEQ ID NO: 74261 - DNA, 120 bp, synthetic construct; identical to SEQ ID NO: 44307
  source 1..120: mol_type = other DNA

SEQ ID NO: 74262 - DNA, 120 bp, synthetic construct; identical to SEQ ID NO: 44308
  source 1..120: mol_type = other DNA

SEQ ID NO: 74263 - DNA, 120 bp, synthetic construct; identical to SEQ ID NO: 44309
  source 1..120: mol_type = other DNA

SEQ ID NO: 74264 - DNA, 120 bp, synthetic construct; identical to SEQ ID NO: 12534
  source 1..120: mol_type = other DNA

SEQ ID NO: 74265 - DNA, 120 bp, synthetic construct; identical to SEQ ID NO: 44311
  source 1..120: mol_type = other DNA

SEQ ID NO: 74266 - DNA, 120 bp, synthetic construct; identical to SEQ ID NO: 44312
  source 1..120: mol_type = other DNA

SEQ ID NO: 74267 - DNA, 120 bp, synthetic construct; identical to SEQ ID NO: 12535
  source 1..120: mol_type = other DNA

SEQ ID NO: 74268 - DNA, 120 bp, synthetic construct; identical to SEQ ID NO: 44314
  source 1..120: mol_type = other DNA

SEQ ID NO: 74269 - DNA, 120 bp, synthetic construct; identical to SEQ ID NO: 5170
  source 1..120: mol_type = other DNA

SEQ ID NO: 74270 - DNA, 120 bp, synthetic construct; identical to SEQ ID NO: 44316
  source 1..120: mol_type = other DNA

SEQ ID NO: 74271 - DNA, 120 bp, synthetic construct; identical to SEQ ID NO: 44317
  source 1..120: mol_type = other DNA

SEQ ID NO: 74272 - DNA, 120 bp, synthetic construct; identical to SEQ ID NO: 12536
  source 1..120: mol_type = other DNA

SEQ ID NO: 74273 - DNA, 120 bp, synthetic construct; identical to SEQ ID NO: 44319
  source 1..120: mol_type = other DNA

SEQ ID NO: 74274 - DNA, 120 bp, synthetic construct; identical to SEQ ID NO: 44320
  source 1..120: mol_type = other DNA

SEQ ID NO: 74275 - DNA, 120 bp, synthetic construct; identical to SEQ ID NO: 44321
  source 1..120: mol_type = other DNA

SEQ ID NO: 74276 - DNA, 120 bp, synthetic construct; identical to SEQ ID NO: 12537
  source 1..120: mol_type = other DNA

SEQ ID NO: 74277 - DNA, 120 bp, synthetic construct; identical to SEQ ID NO: 44323
  source 1..120: mol_type = other DNA

SEQ ID NO: 74278 - DNA, 120 bp, synthetic construct; identical to SEQ ID NO: 44324
  source 1..120: mol_type = other DNA

SEQ ID NO: 74279 - DNA, 120 bp, synthetic construct; identical to SEQ ID NO: 44325
  source 1..120: mol_type = other DNA

SEQ ID NO: 74280 - DNA, 120 bp, synthetic construct; identical to SEQ ID NO: 12538
  source 1..120: mol_type = other DNA

SEQ ID NO: 74281 - DNA, 120 bp, synthetic construct; identical to SEQ ID NO: 44327
  source 1..120: mol_type = other DNA

SEQ ID NO: 74282 - DNA, 120 bp, synthetic construct; identical to SEQ ID NO: 44328
  source 1..120: mol_type = other DNA

SEQ ID NO: 74283 - DNA, 120 bp, synthetic construct; identical to SEQ ID NO: 44329
  source 1..120: mol_type = other DNA

SEQ ID NO: 74284 - DNA, 120 bp, synthetic construct; identical to SEQ ID NO: 12539
  source 1..120: mol_type = other DNA

SEQ ID NO: 74285 - DNA, 120 bp, synthetic construct; identical to SEQ ID NO: 44331
  source 1..120: mol_type = other DNA

SEQ ID NO: 74286 - DNA, 120 bp, synthetic construct; identical to SEQ ID NO: 44332
  source 1..120: mol_type = other DNA

SEQ ID NO: 74287 - DNA, 120 bp, synthetic construct; identical to SEQ ID NO: 44333
  source 1..120: mol_type = other DNA

SEQ ID NO: 74288 - DNA, 120 bp, synthetic construct; identical to SEQ ID NO: 12540
  source 1..120: mol_type = other DNA

SEQ ID NO: 74289 - DNA, 120 bp, synthetic construct; identical to SEQ ID NO: 44335
  source 1..120: mol_type = other DNA

SEQ ID NO: 74290 - DNA, 120 bp, synthetic construct; identical to SEQ ID NO: 44336
  source 1..120: mol_type = other DNA

SEQ ID NO: 74291 - DNA, 120 bp, synthetic construct; identical to SEQ ID NO: 44337
  source 1..120: mol_type = other DNA

SEQ ID NO: 74292 - DNA, 120 bp, synthetic construct; identical to SEQ ID NO: 12541
  source 1..120: mol_type = other DNA

SEQ ID NO: 74293 - DNA, 120 bp, synthetic construct; identical to SEQ ID NO: 44339
  source 1..120: mol_type = other DNA

SEQ ID NO: 74294 - DNA, 120 bp, synthetic construct; identical to SEQ ID NO: 44340
  source 1..120: mol_type = other DNA

SEQ ID NO: 74295 - DNA, 120 bp, synthetic construct; identical to SEQ ID NO: 44341
  source 1..120: mol_type = other DNA

SEQ ID NO: 74296 - DNA, 120 bp, synthetic construct; identical to SEQ ID NO: 44342
  source 1..120: mol_type = other DNA

SEQ ID NO: 74297 - DNA, 120 bp, synthetic construct; identical to SEQ ID NO: 12542
  source 1..120: mol_type = other DNA

SEQ ID NO: 74298 - DNA, 120 bp, synthetic construct; identical to SEQ ID NO: 44344
  source 1..120: mol_type = other DNA

SEQ ID NO: 74299 - DNA, 120 bp, synthetic construct; identical to SEQ ID NO: 44345
  source 1..120: mol_type = other DNA

SEQ ID NO: 74300 - DNA, 120 bp, synthetic construct; identical to SEQ ID NO: 44346
  source 1..120: mol_type = other DNA

SEQ ID NO: 74301 - DNA, 120 bp, synthetic construct; identical to SEQ ID NO: 12543
  source 1..120: mol_type = other DNA

SEQ ID NO: 74302 - DNA, 120 bp, synthetic construct; identical to SEQ ID NO: 44348
  source 1..120: mol_type = other DNA

SEQ ID NO: 74303 - DNA, 120 bp, synthetic construct; identical to SEQ ID NO: 44349
  source 1..120: mol_type = other DNA

SEQ ID NO: 74304 - DNA, 120 bp, synthetic construct; identical to SEQ ID NO: 44350
  source 1..120: mol_type = other DNA

SEQ ID NO: 74305 - DNA, 120 bp, synthetic construct; identical to SEQ ID NO: 12544
  source 1..120: mol_type = other DNA

SEQ ID NO: 74306 - DNA, 120 bp, synthetic construct; identical to SEQ ID NO: 44352
  source 1..120: mol_type = other DNA

SEQ ID NO: 74307 - DNA, 120 bp, synthetic construct; identical to SEQ ID NO: 44353
  source 1..120: mol_type = other DNA

SEQ ID NO: 74308 - DNA, 120 bp, synthetic construct; identical to SEQ ID NO: 44354
  source 1..120: mol_type = other DNA

SEQ ID NO: 74309 - DNA, 120 bp, synthetic construct; identical to SEQ ID NO: 12545
  source 1..120: mol_type = other DNA

SEQ ID NO: 74310 - DNA, 120 bp, synthetic construct; identical to SEQ ID NO: 44356
  source 1..120: mol_type = other DNA

SEQ ID NO: 74311 - DNA, 120 bp, synthetic construct; identical to SEQ ID NO: 44357
  source 1..120: mol_type = other DNA

SEQ ID NO: 74312 - DNA, 120 bp, synthetic construct; identical to SEQ ID NO: 12546
  source 1..120: mol_type = other DNA

SEQ ID NO: 74313 - DNA, 120 bp, synthetic construct; identical to SEQ ID NO: 44359
  source 1..120: mol_type = other DNA

SEQ ID NO: 74314 - DNA, 120 bp, synthetic construct; identical to SEQ ID NO: 44360
  source 1..120: mol_type = other DNA

SEQ ID NO: 74315 - DNA, 120 bp, synthetic construct; identical to SEQ ID NO: 44361
  source 1..120: mol_type = other DNA

SEQ ID NO: 74316 - DNA, 120 bp, synthetic construct; identical to SEQ ID NO: 12547
  source 1..120: mol_type = other DNA

SEQ ID NO: 74317 - DNA, 120 bp, synthetic construct; identical to SEQ ID NO: 44363
  source 1..120: mol_type = other DNA

SEQ ID NO: 74318 - DNA, 120 bp, synthetic construct; identical to SEQ ID NO: 44364
  source 1..120: mol_type = other DNA

SEQ ID NO: 74319 - DNA, 120 bp, synthetic construct; identical to SEQ ID NO: 44365
  source 1..120: mol_type = other DNA

SEQ ID NO: 74320 - DNA, 120 bp, synthetic construct; identical to SEQ ID NO: 44366
  source 1..120: mol_type = other DNA

SEQ ID NO: 74321 - DNA, 120 bp, synthetic construct; identical to SEQ ID NO: 12548
  source 1..120: mol_type = other DNA

SEQ ID NO: 74322 - DNA, 120 bp, synthetic construct; identical to SEQ ID NO: 44368
  source 1..120: mol_type = other DNA

SEQ ID NO: 74323 - DNA, 120 bp, synthetic construct; identical to SEQ ID NO: 44369
  source 1..120: mol_type = other DNA

SEQ ID NO: 74324 - DNA, 120 bp, synthetic construct; identical to SEQ ID NO: 12549
  source 1..120: mol_type = other DNA

SEQ ID NO: 74325 - DNA, 120 bp, synthetic construct; identical to SEQ ID NO: 44371
  source 1..120: mol_type = other DNA

SEQ ID NO: 74326 - DNA, 120 bp, synthetic construct; identical to SEQ ID NO: 44372
  source 1..120: mol_type = other DNA

SEQ ID NO: 74327 - DNA, 120 bp, synthetic construct; identical to SEQ ID NO: 44373
  source 1..120: mol_type = other DNA

SEQ ID NO: 74328 - DNA, 120 bp, synthetic construct; identical to SEQ ID NO: 44374
  source 1..120: mol_type = other DNA

SEQ ID NO: 74329 - DNA, 120 bp, synthetic construct; identical to SEQ ID NO: 12550
  source 1..120: mol_type = other DNA

SEQ ID NO: 74330 - DNA, 120 bp, synthetic construct; identical to SEQ ID NO: 44376
  source 1..120: mol_type = other DNA

SEQ ID NO: 74331 - DNA, 120 bp, synthetic construct; identical to SEQ ID NO: 44377
  source 1..120: mol_type = other DNA

SEQ ID NO: 74332 - DNA, 120 bp, synthetic construct; identical to SEQ ID NO: 44378
  source 1..120: mol_type = other DNA

SEQ ID NO: 74333 - DNA, 120 bp, synthetic construct; identical to SEQ ID NO: 44379
  source 1..120: mol_type = other DNA

SEQ ID NO: 74334 - DNA, 120 bp, synthetic construct; identical to SEQ ID NO: 12551
  source 1..120: mol_type = other DNA

SEQ ID NO: 74335 - DNA, 120 bp, synthetic construct; identical to SEQ ID NO: 44381
  source 1..120: mol_type = other DNA

SEQ ID NO: 74336 - DNA, 120 bp, synthetic construct; identical to SEQ ID NO: 44382
  source 1..120: mol_type = other DNA

SEQ ID NO: 74337 - DNA, 120 bp, synthetic construct; identical to SEQ ID NO: 12552
  source 1..120: mol_type = other DNA

SEQ ID NO: 74338 - DNA, 120 bp, synthetic construct; identical to SEQ ID NO: 44384
  source 1..120: mol_type = other DNA

SEQ ID NO: 74339 - DNA, 120 bp, synthetic construct; identical to SEQ ID NO: 44385
  source 1..120: mol_type = other DNA

SEQ ID NO: 74340 - DNA, 120 bp, synthetic construct; identical to SEQ ID NO: 44386
  source 1..120: mol_type = other DNA

SEQ ID NO: 74341 - DNA, 120 bp, synthetic construct; identical to SEQ ID NO: 44387
  source 1..120: mol_type = other DNA

SEQ ID NO: 74342 - DNA, 120 bp, synthetic construct; identical to SEQ ID NO: 12553
  source 1..120: mol_type = other DNA

SEQ ID NO: 74343 - DNA, 120 bp, synthetic construct; identical to SEQ ID NO: 44389
  source 1..120: mol_type = other DNA

SEQ ID NO: 74344 - DNA, 120 bp, synthetic construct; identical to SEQ ID NO: 44390
  source 1..120: mol_type = other DNA

SEQ ID NO: 74345 - DNA, 120 bp, synthetic construct; identical to SEQ ID NO: 44391
  source 1..120: mol_type = other DNA

SEQ ID NO: 74346 - DNA, 120 bp, synthetic construct; identical to SEQ ID NO: 12554
  source 1..120: mol_type = other DNA

SEQ ID NO: 74347 - DNA, 120 bp, synthetic construct; identical to SEQ ID NO: 44393
  source 1..120: mol_type = other DNA

SEQ ID NO: 74348 - DNA, 120 bp, synthetic construct; identical to SEQ ID NO: 44394
  source 1..120: mol_type = other DNA

SEQ ID NO: 74349 - DNA, 120 bp, synthetic construct; identical to SEQ ID NO: 12555
  source 1..120: mol_type = other DNA

SEQ ID NO: 74350 - DNA, 120 bp, synthetic construct; identical to SEQ ID NO: 44396
  source 1..120: mol_type = other DNA

SEQ ID NO: 74351 - DNA, 120 bp, synthetic construct; identical to SEQ ID NO: 44397
  source 1..120: mol_type = other DNA

SEQ ID NO: 74352 - DNA, 120 bp, synthetic construct; identical to SEQ ID NO: 44398
  source 1..120: mol_type = other DNA

SEQ ID NO: 74353 - DNA, 120 bp, synthetic construct; identical to SEQ ID NO: 12556
  source 1..120: mol_type = other DNA

SEQ ID NO: 74354 - DNA, 120 bp, synthetic construct; identical to SEQ ID NO: 44400
  source 1..120: mol_type = other DNA

SEQ ID NO: 74355 - DNA, 120 bp, synthetic construct; identical to SEQ ID NO: 44401
  source 1..120: mol_type = other DNA

SEQ ID NO: 74356 - DNA, 120 bp, synthetic construct; identical to SEQ ID NO: 44402
  source 1..120: mol_type = other DNA

SEQ ID NO: 74357 - DNA, 120 bp, synthetic construct; identical to SEQ ID NO: 12557
  source 1..120: mol_type = other DNA

SEQ ID NO: 74358 - DNA, 120 bp, synthetic construct; identical to SEQ ID NO: 44404
  source 1..120: mol_type = other DNA

SEQ ID NO: 74359 - DNA, 120 bp, synthetic construct; identical to SEQ ID NO: 44405
  source 1..120: mol_type = other DNA

SEQ ID NO: 74360 - DNA, 120 bp, synthetic construct; identical to SEQ ID NO: 44406
  source 1..120: mol_type = other DNA

SEQ ID NO: 74361 - DNA, 120 bp, synthetic construct; identical to SEQ ID NO: 44407
  source 1..120: mol_type = other DNA

SEQ ID NO: 74362 - DNA, 120 bp, synthetic construct; identical to SEQ ID NO: 12558
  source 1..120: mol_type = other DNA

SEQ ID NO: 74363 - DNA, 120 bp, synthetic construct; identical to SEQ ID NO: 44409
  source 1..120: mol_type = other DNA

SEQ ID NO: 74364 - DNA, 120 bp, synthetic construct; identical to SEQ ID NO: 44410
  source 1..120: mol_type = other DNA

SEQ ID NO: 74365 - DNA, 120 bp, synthetic construct; identical to SEQ ID NO: 44411
  source 1..120: mol_type = other DNA

SEQ ID NO: 74366 - DNA, 120 bp, synthetic construct; identical to SEQ ID NO: 12559
  source 1..120: mol_type = other DNA

SEQ ID NO: 74367 - DNA, 120 bp, synthetic construct; identical to SEQ ID NO: 44413
  source 1..120: mol_type = other DNA

SEQ ID NO: 74368 - DNA, 120 bp, synthetic construct; identical to SEQ ID NO: 44414
  source 1..120: mol_type = other DNA

SEQ ID NO: 74369 - DNA, 120 bp, synthetic construct; identical to SEQ ID NO: 12560
  source 1..120: mol_type = other DNA

SEQ ID NO: 74370 - DNA, 120 bp, synthetic construct; identical to SEQ ID NO: 44416
  source 1..120: mol_type = other DNA

SEQ ID NO: 74371 - DNA, 120 bp, synthetic construct; identical to SEQ ID NO: 44417
  source 1..120: mol_type = other DNA

SEQ ID NO: 74372 - DNA, 120 bp, synthetic construct; identical to SEQ ID NO: 44418
  source 1..120: mol_type = other DNA

SEQ ID NO: 74373 - DNA, 120 bp, synthetic construct; identical to SEQ ID NO: 44419
  source 1..120: mol_type = other DNA

SEQ ID NO: 74374 - DNA, 120 bp, synthetic construct; identical to SEQ ID NO: 12561
  source 1..120: mol_type = other DNA

SEQ ID NO: 74375 - DNA, 120 bp, synthetic construct; identical to SEQ ID NO: 44421
  source 1..120: mol_type = other DNA

SEQ ID NO: 74376 - DNA, 120 bp, synthetic construct; identical to SEQ ID NO: 44422
  source 1..120: mol_type = other DNA

SEQ ID NO: 74377 - DNA, 120 bp, synthetic construct; identical to SEQ ID NO: 12562
  source 1..120: mol_type = other DNA

SEQ ID NO: 74378 - DNA, 120 bp, synthetic construct; identical to SEQ ID NO: 44424
  source 1..120: mol_type = other DNA

SEQ ID NO: 74379 - DNA, 120 bp, synthetic construct; identical to SEQ ID NO: 44425
  source 1..120: mol_type = other DNA

SEQ ID NO: 74380 - DNA, 120 bp, synthetic construct; identical to SEQ ID NO: 44426
  source 1..120: mol_type = other DNA

SEQ ID NO: 74381 - DNA, 120 bp, synthetic construct; identical to SEQ ID NO: 12563
  source 1..120: mol_type = other DNA

SEQ ID NO: 74382 - DNA, 120 bp, synthetic construct; identical to SEQ ID NO: 44428
  source 1..120: mol_type = other DNA

SEQ ID NO: 74383 - DNA, 120 bp, synthetic construct; identical to SEQ ID NO: 44429
  source 1..120: mol_type = other DNA

SEQ ID NO: 74384 - DNA, 120 bp, synthetic construct; identical to SEQ ID NO: 44430
  source 1..120: mol_type = other DNA

SEQ ID NO: 74385 - DNA, 120 bp, synthetic construct; identical to SEQ ID NO: 12564
  source 1..120: mol_type = other DNA

SEQ ID NO: 74386 - DNA, 120 bp, synthetic construct; identical to SEQ ID NO: 44432
  source 1..120: mol_type = other DNA

SEQ ID NO: 74387 - DNA, 120 bp, synthetic construct; identical to SEQ ID NO: 44433
  source 1..120: mol_type = other DNA

SEQ ID NO: 74388 - DNA, 120 bp, synthetic construct; identical to SEQ ID NO: 44434
  source 1..120: mol_type = other DNA

SEQ ID NO: 74389 - DNA, 120 bp, synthetic construct; identical to SEQ ID NO: 44435
  source 1..120: mol_type = other DNA

SEQ ID NO: 74390 - DNA, 120 bp, synthetic construct; identical to SEQ ID NO: 12565
  source 1..120: mol_type = other DNA

SEQ ID NO: 74391 - DNA, 120 bp, synthetic construct; identical to SEQ ID NO: 44437
  source 1..120: mol_type = other DNA

SEQ ID NO: 74392 - DNA, 120 bp, synthetic construct; identical to SEQ ID NO: 44438
  source 1..120: mol_type = other DNA

SEQ ID NO: 74393 - DNA, 120 bp, synthetic construct; identical to SEQ ID NO: 12566
  source 1..120: mol_type = other DNA

SEQ ID NO: 74394 - DNA, 120 bp, synthetic construct; identical to SEQ ID NO: 44440
  source 1..120: mol_type = other DNA

SEQ ID NO: 74395 - DNA, 120 bp, synthetic construct; identical to SEQ ID NO: 44441
  source 1..120: mol_type = other DNA

SEQ ID NO: 74396 - DNA, 120 bp, synthetic construct; identical to SEQ ID NO: 44442
  source 1..120: mol_type = other DNA

SEQ ID NO: 74397 - DNA, 120 bp, synthetic construct; identical to SEQ ID NO: 12567
  source 1..120: mol_type = other DNA

SEQ ID NO: 74398 - DNA, 120 bp, synthetic construct; identical to SEQ ID NO: 44444
  source 1..120: mol_type = other DNA

SEQ ID NO: 74399 - DNA, 120 bp, synthetic construct; identical to SEQ ID NO: 44445
  source 1..120: mol_type = other DNA

SEQ ID NO: 74400 - DNA, 120 bp, synthetic construct; identical to SEQ ID NO: 44446
  source 1..120: mol_type = other DNA

SEQ ID NO: 74401 - DNA, 120 bp, synthetic construct; identical to SEQ ID NO: 12568
  source 1..120: mol_type = other DNA

SEQ ID NO: 74402 - DNA, 120 bp, synthetic construct; identical to SEQ ID NO: 44448
  source 1..120: mol_type = other DNA

SEQ ID NO: 74403 - DNA, 120 bp, synthetic construct; identical to SEQ ID NO: 44449
  source 1..120: mol_type = other DNA

SEQ ID NO: 74404 - DNA, 120 bp, synthetic construct; identical to SEQ ID NO: 44450
  source 1..120: mol_type = other DNA

SEQ ID NO: 74405 - DNA, 120 bp, synthetic construct; identical to SEQ ID NO: 12569
  source 1..120: mol_type = other DNA

SEQ ID NO: 74406 - DNA, 120 bp, synthetic construct; identical to SEQ ID NO: 44452
  source 1..120: mol_type = other DNA

SEQ ID NO: 74407 - DNA, 120 bp, synthetic construct; identical to SEQ ID NO: 44453
  source 1..120: mol_type = other DNA

SEQ ID NO: 74408 - DNA, 120 bp, synthetic construct; identical to SEQ ID NO: 44454
  source 1..120: mol_type = other DNA

SEQ ID NO: 74409 - DNA, 120 bp, synthetic construct; identical to SEQ ID NO: 12570
  source 1..120: mol_type = other DNA

SEQ ID NO: 74410 - DNA, 120 bp, synthetic construct; identical to SEQ ID NO: 44456
  source 1..120: mol_type = other DNA

SEQ ID NO: 74411 - DNA, 120 bp, synthetic construct; identical to SEQ ID NO: 44457
  source 1..120: mol_type = other DNA

SEQ ID NO: 74412 - DNA, 120 bp, synthetic construct; identical to SEQ ID NO: 44458
  source 1..120: mol_type = other DNA

SEQ ID NO: 74413 - DNA, 120 bp, synthetic construct; identical to SEQ ID NO: 12571
  source 1..120: mol_type = other DNA

SEQ ID NO: 74414 - DNA, 120 bp, synthetic construct; identical to SEQ ID NO: 44460
  source 1..120: mol_type = other DNA

SEQ ID NO: 74415 - DNA, 120 bp, synthetic construct; identical to SEQ ID NO: 44461
  source 1..120: mol_type = other DNA

SEQ ID NO: 74416 - DNA, 120 bp, synthetic construct; identical to SEQ ID NO: 44462
  source 1..120: mol_type = other DNA

SEQ ID NO: 74417 - DNA, 120 bp, synthetic construct; identical to SEQ ID NO: 44463
  source 1..120: mol_type = other DNA

SEQ ID NO: 74418 - DNA, 120 bp, synthetic construct; identical to SEQ ID NO: 12572
  source 1..120: mol_type = other DNA

SEQ ID NO: 74419 - DNA, 120 bp, synthetic construct; identical to SEQ ID NO: 44465
  source 1..120: mol_type = other DNA

SEQ ID NO: 74420 - DNA, 120 bp, synthetic construct; identical to SEQ ID NO: 44466
  source 1..120: mol_type = other DNA

SEQ ID NO: 74421 - DNA, 120 bp, synthetic construct; identical to SEQ ID NO: 12573
  source 1..120: mol_type = other DNA

SEQ ID NO: 74422 - DNA, 120 bp, synthetic construct; identical to SEQ ID NO: 44468
  source 1..120: mol_type = other DNA

SEQ ID NO: 74423 - DNA, 120 bp, synthetic construct; identical to SEQ ID NO: 44469
  source 1..120: mol_type = other DNA

SEQ ID NO: 74424 - DNA, 120 bp, synthetic construct; identical to SEQ ID NO: 44470
  source 1..120: mol_type = other DNA

SEQ ID NO: 74425 - DNA, 120 bp, synthetic construct; identical to SEQ ID NO: 12574
  source 1..120: mol_type = other DNA

SEQ ID NO: 74426 - DNA, 120 bp, synthetic construct; identical to SEQ ID NO: 44472
  source 1..120: mol_type = other DNA

SEQ ID NO: 74427 - DNA, 120 bp, synthetic construct; identical to SEQ ID NO: 44473
  source 1..120: mol_type = other DNA

SEQ ID NO: 74428 - DNA, 120 bp, synthetic construct; identical to SEQ ID NO: 44474
  source 1..120: mol_type = other DNA

SEQ ID NO: 74429 - DNA, 120 bp, synthetic construct; identical to SEQ ID NO: 12575
  source 1..120: mol_type = other DNA

SEQ ID NO: 74430 - DNA, 120 bp, synthetic construct; identical to SEQ ID NO: 44476
  source 1..120: mol_type = other DNA

SEQ ID NO: 74431 - DNA, 120 bp, synthetic construct; identical to SEQ ID NO: 44477
  source 1..120: mol_type = other DNA

SEQ ID NO: 74432 - DNA, 120 bp, synthetic construct; identical to SEQ ID NO: 44478
  source 1..120: mol_type = other DNA

SEQ ID NO: 74433 - DNA, 120 bp, synthetic construct; identical to SEQ ID NO: 12576
  source 1..120: mol_type = other DNA

SEQ ID NO: 74434 - DNA, 120 bp, synthetic construct; identical to SEQ ID NO: 44480
  source 1..120: mol_type = other DNA

SEQ ID NO: 74435 - DNA, 120 bp, synthetic construct; identical to SEQ ID NO: 44481
  source 1..120: mol_type = other DNA

SEQ ID NO: 74436 - DNA, 120 bp, synthetic construct; identical to SEQ ID NO: 44482
  source 1..120: mol_type = other DNA

SEQ ID NO: 74437 - DNA, 120 bp, synthetic construct; identical to SEQ ID NO: 12577
  source 1..120: mol_type = other DNA

SEQ ID NO: 74438 - DNA, 120 bp, synthetic construct; identical to SEQ ID NO: 44484
  source 1..120: mol_type = other DNA

SEQ ID NO: 74439 - DNA, 120 bp, synthetic construct; identical to SEQ ID NO: 44485
  source 1..120: mol_type = other DNA

SEQ ID NO: 74440 - DNA, 120 bp, synthetic construct; identical to SEQ ID NO: 44486
  source 1..120: mol_type = other DNA

SEQ ID NO: 74441 - DNA, 120 bp, synthetic construct; identical to SEQ ID NO: 44487
  source 1..120: mol_type = other DNA

SEQ ID NO: 74442 - DNA, 120 bp, synthetic construct; identical to SEQ ID NO: 44488
  source 1..120: mol_type = other DNA

SEQ ID NO: 74443 - DNA, 120 bp, synthetic construct; identical to SEQ ID NO: 12578
  source 1..120: mol_type = other DNA

SEQ ID NO: 74444 - DNA, 120 bp, synthetic construct; identical to SEQ ID NO: 44490
  source 1..120: mol_type = other DNA

SEQ ID NO: 74445 - DNA, 120 bp, synthetic construct; identical to SEQ ID NO: 44491
  source 1..120: mol_type = other DNA

SEQ ID NO: 74446 - DNA, 120 bp, synthetic construct; identical to SEQ ID NO: 12579
  source 1..120: mol_type = other DNA

SEQ ID NO: 74447 - DNA, 120 bp, synthetic construct; identical to SEQ ID NO: 44493
  source 1..120: mol_type = other DNA

SEQ ID NO: 74448 - DNA, 120 bp, synthetic construct; identical to SEQ ID NO: 44494
  source 1..120: mol_type = other DNA

SEQ ID NO: 74449 - DNA, 120 bp, synthetic construct; identical to SEQ ID NO: 44495
  source 1..120: mol_type = other DNA

SEQ ID NO: 74450 - DNA, 120 bp, synthetic construct; identical to SEQ ID NO: 44496
  source 1..120: mol_type = other DNA

SEQ ID NO: 74451 - DNA, 120 bp, synthetic construct; identical to SEQ ID NO: 12580
  source 1..120: mol_type = other DNA

SEQ ID NO: 74452 - DNA, 120 bp, synthetic construct; identical to SEQ ID NO: 44498
  source 1..120: mol_type = other DNA

SEQ ID NO: 74453 - DNA, 120 bp, synthetic construct; identical to SEQ ID NO: 44499
  source 1..120: mol_type = other DNA

SEQ ID NO: 74454 - DNA, 120 bp, synthetic construct; identical to SEQ ID NO: 12581
  source 1..120: mol_type = other DNA

SEQ ID NO: 74455 - DNA, 120 bp, synthetic construct; identical to SEQ ID NO: 44501
  source 1..120: mol_type = other DNA

SEQ ID NO: 74456 - DNA, 120 bp, synthetic construct; identical to SEQ ID NO: 44502
  source 1..120: mol_type = other DNA

SEQ ID NO: 74457 - DNA, 120 bp, synthetic construct; identical to SEQ ID NO: 44503
  source 1..120: mol_type = other DNA

SEQ ID NO: 74458 - DNA, 120 bp, synthetic construct; identical to SEQ ID NO: 44504
  source 1..120: mol_type = other DNA

SEQ ID NO: 74459 - DNA, 120 bp, synthetic construct; identical to SEQ ID NO: 12582
  source 1..120: mol_type = other DNA

SEQ ID NO: 74460 - DNA, 120 bp, synthetic construct; identical to SEQ ID NO: 44506
  source 1..120: mol_type = other DNA

SEQ ID NO: 74461 - DNA, 120 bp, synthetic construct; identical to SEQ ID NO: 44507
  source 1..120: mol_type = other DNA

SEQ ID NO: 74462 - DNA, 120 bp, synthetic construct; identical to SEQ ID NO: 44508
  source 1..120: mol_type = other DNA

SEQ ID NO: 74463 - DNA, 120 bp, synthetic construct; identical to SEQ ID NO: 12583
  source 1..120: mol_type = other DNA

SEQ ID NO: 74464 - DNA, 120 bp, synthetic construct; identical to SEQ ID NO: 44510
  source 1..120: mol_type = other DNA

SEQ ID NO: 74465 - DNA, 120 bp, synthetic construct; identical to SEQ ID NO: 44511
  source 1..120: mol_type = other DNA

SEQ ID NO: 74466 - DNA, 120 bp, synthetic construct; identical to SEQ ID NO: 12584
  source 1..120: mol_type = other DNA

SEQ ID NO: 74467 - DNA, 120 bp, synthetic construct; identical to SEQ ID NO: 44513
  source 1..120: mol_type = other DNA

SEQ ID NO: 74468 - DNA, 120 bp, synthetic construct; identical to SEQ ID NO: 44514
  source 1..120: mol_type = other DNA

SEQ ID NO: 74469 - DNA, 120 bp, synthetic construct; identical to SEQ ID NO: 44515
  source 1..120: mol_type = other DNA

SEQ ID NO: 74470 - DNA, 120 bp, synthetic construct; identical to SEQ ID NO: 12585
  source 1..120: mol_type = other DNA

SEQ ID NO: 74471 - DNA, 120 bp, synthetic construct; identical to SEQ ID NO: 44517
  source 1..120: mol_type = other DNA

SEQ ID NO: 74472 - DNA, 120 bp, synthetic construct; identical to SEQ ID NO: 44518
  source 1..120: mol_type = other DNA

SEQ ID NO: 74473 - DNA, 120 bp, synthetic construct; identical to SEQ ID NO: 44519
  source 1..120: mol_type = other DNA

SEQ ID NO: 74474 - DNA, 120 bp, synthetic construct; identical to SEQ ID NO: 12586
  source 1..120: mol_type = other DNA

SEQ ID NO: 74475 - DNA, 120 bp, synthetic construct; identical to SEQ ID NO: 44521
  source 1..120: mol_type = other DNA

SEQ ID NO: 74476 - DNA, 120 bp, synthetic construct; identical to SEQ ID NO: 44522
  source 1..120: mol_type = other DNA

SEQ ID NO: 74477 - DNA, 120 bp, synthetic construct; identical to SEQ ID NO: 44523
  source 1..120: mol_type = other DNA

SEQ ID NO: 74478 - DNA, 120 bp, synthetic construct; identical to SEQ ID NO: 12587
  source 1..120: mol_type = other DNA

SEQ ID NO: 74479 - DNA, 120 bp, synthetic construct; identical to SEQ ID NO: 44525
  source 1..120: mol_type = other DNA

SEQ ID NO: 74480 - DNA, 120 bp, synthetic construct; identical to SEQ ID NO: 44526
  source 1..120: mol_type = other DNA

SEQ ID NO: 74481 - DNA, 120 bp, synthetic construct; identical to SEQ ID NO: 44527
  source 1..120: mol_type = other DNA

SEQ ID NO: 74482 - DNA, 120 bp, synthetic construct; identical to SEQ ID NO: 44528
  source 1..120: mol_type = other DNA

SEQ ID NO: 74483 - DNA, 120 bp, synthetic construct; identical to SEQ ID NO: 12588
  source 1..120: mol_type = other DNA

SEQ ID NO: 74484 - DNA, 120 bp, synthetic construct; identical to SEQ ID NO: 44530
  source 1..120: mol_type = other DNA

SEQ ID NO: 74485 - DNA, 120 bp, synthetic construct; identical to SEQ ID NO: 44531
  source 1..120: mol_type = other DNA

SEQ ID NO: 74486 - DNA, 120 bp, synthetic construct; identical to SEQ ID NO: 12589
  source 1..120: mol_type = other DNA

SEQ ID NO: 74487 - DNA, 120 bp, synthetic construct; identical to SEQ ID NO: 44533
  source 1..120: mol_type = other DNA

SEQ ID NO: 74488 - DNA, 120 bp, synthetic construct; identical to SEQ ID NO: 44534
  source 1..120: mol_type = other DNA

SEQ ID NO: 74489 - DNA, 120 bp, synthetic construct; identical to SEQ ID NO: 44535
  source 1..120: mol_type = other DNA

SEQ ID NO: 74490 - DNA, 120 bp, synthetic construct; identical to SEQ ID NO: 12590
  source 1..120: mol_type = other DNA

SEQ ID NO: 74491 - DNA, 120 bp, synthetic construct; identical to SEQ ID NO: 44537
  source 1..120: mol_type = other DNA

SEQ ID NO: 74492 - DNA, 120 bp, synthetic construct; identical to SEQ ID NO: 44538
  source 1..120: mol_type = other DNA

SEQ ID NO: 74493 - DNA, 120 bp, synthetic construct; identical to SEQ ID NO: 44539
  source 1..120: mol_type = other DNA

SEQ ID NO: 74494 - DNA, 120 bp, synthetic construct; identical to SEQ ID NO: 44540
  source 1..120: mol_type = other DNA

SEQ ID NO: 74495 - DNA, 120 bp, synthetic construct; identical to SEQ ID NO: 12591
  source 1..120: mol_type = other DNA

SEQ ID NO: 74496 - DNA, 120 bp, synthetic construct; identical to SEQ ID NO: 44542
  source 1..120: mol_type = other DNA

SEQ ID NO: 74497 - DNA, 120 bp, synthetic construct; identical to SEQ ID NO: 44543
  source 1..120: mol_type = other DNA

SEQ ID NO: 74498 - DNA, 120 bp, synthetic construct; identical to SEQ ID NO: 44544
  source 1..120: mol_type = other DNA

SEQ ID NO: 74499 - DNA, 120 bp, synthetic construct; identical to SEQ ID NO: 12592
  source 1..120: mol_type = other DNA

SEQ ID NO: 74500 - DNA, 120 bp, synthetic construct; identical to SEQ ID NO: 44546
  source 1..120: mol_type = other DNA

SEQ ID NO: 74501 - DNA, 120 bp, synthetic construct; identical to SEQ ID NO: 44547
  source 1..120: mol_type = other DNA

SEQ ID NO: 74502 - DNA, 120 bp, synthetic construct; identical to SEQ ID NO: 44548
  source 1..120: mol_type = other DNA

SEQ ID NO: 74503 - DNA, 120 bp, synthetic construct; identical to SEQ ID NO: 12593
  source 1..120: mol_type = other DNA

SEQ ID NO: 74504 - DNA, 120 bp, synthetic construct; identical to SEQ ID NO: 44550
  source 1..120: mol_type = other DNA

SEQ ID NO: 74505 - DNA, 120 bp, synthetic construct; identical to SEQ ID NO: 44551
  source 1..120: mol_type = other DNA

SEQ ID NO: 74506 - DNA, 120 bp, synthetic construct; identical to SEQ ID NO: 44552
  source 1..120: mol_type = other DNA

SEQ ID NO: 74507 - DNA, 120 bp, synthetic construct; identical to SEQ ID NO: 12594
  source 1..120: mol_type = other DNA

SEQ ID NO: 74508 - DNA, 120 bp, synthetic construct; identical to SEQ ID NO: 44554
  source 1..120: mol_type = other DNA

SEQ ID NO: 74509 - DNA, 120 bp, synthetic construct; identical to SEQ ID NO: 44555
  source 1..120: mol_type = other DNA

SEQ ID NO: 74510 - DNA, 120 bp, synthetic construct; identical to SEQ ID NO: 44556
  source 1..120: mol_type = other DNA

SEQ ID NO: 74511 - DNA, 120 bp, synthetic construct; identical to SEQ ID NO: 12595
  source 1..120: mol_type = other DNA

SEQ ID NO: 74512 - DNA, 120 bp, synthetic construct; identical to SEQ ID NO: 44558
  source 1..120: mol_type = other DNA

SEQ ID NO: 74513 - DNA, 120 bp, synthetic construct; identical to SEQ ID NO: 44559
  source 1..120: mol_type = other DNA

SEQ ID NO: 74514 - DNA, 120 bp, synthetic construct; identical to SEQ ID NO: 44560
  source 1..120: mol_type = other DNA

SEQ ID NO: 74515 - DNA, 120 bp, synthetic construct; identical to SEQ ID NO: 12596
  source 1..120: mol_type = other DNA

SEQ ID NO: 74516 - DNA, 120 bp, synthetic construct; identical to SEQ ID NO: 44562
  source 1..120: mol_type = other DNA

SEQ ID NO: 74517 - DNA, 120 bp, synthetic construct; identical to SEQ ID NO: 44563
  source 1..120: mol_type = other DNA

SEQ ID NO: 74518 - DNA, 120 bp, synthetic construct; identical to SEQ ID NO: 44564
  source 1..120: mol_type = other DNA

SEQ ID NO: 74519 - DNA, 120 bp, synthetic construct; identical to SEQ ID NO: 12597
  source 1..120: mol_type = other DNA

SEQ ID NO: 74520 - DNA, 120 bp, synthetic construct; identical to SEQ ID NO: 44566
  source 1..120: mol_type = other DNA

SEQ ID NO: 74521 - DNA, 120 bp, synthetic construct; identical to SEQ ID NO: 44567
  source 1..120: mol_type = other DNA

SEQ ID NO: 74522 - DNA, 120 bp, synthetic construct; identical to SEQ ID NO: 44568
  source 1..120: mol_type = other DNA

SEQ ID NO: 74523 - DNA, 120 bp, synthetic construct; identical to SEQ ID NO: 12598
  source 1..120: mol_type = other DNA

SEQ ID NO: 74524 - DNA, 120 bp, synthetic construct; identical to SEQ ID NO: 44570
  source 1..120: mol_type = other DNA

SEQ ID NO: 74525 - DNA, 120 bp, synthetic construct; identical to SEQ ID NO: 44571
  source 1..120: mol_type = other DNA

SEQ ID NO: 74526 - DNA, 120 bp, synthetic construct; identical to SEQ ID NO: 44572
  source 1..120: mol_type = other DNA

SEQ ID NO: 74527 - DNA, 120 bp, synthetic construct; identical to SEQ ID NO: 44573
  source 1..120: mol_type = other DNA

SEQ ID NO: 74528 - DNA, 120 bp, synthetic construct; identical to SEQ ID NO: 12599
  source 1..120: mol_type = other DNA

SEQ ID NO: 74529 - DNA, 120 bp, synthetic construct; identical to SEQ ID NO: 44575
  source 1..120: mol_type = other DNA

SEQ ID NO: 74530 - DNA, 120 bp, synthetic construct; identical to SEQ ID NO: 44576
  source 1..120: mol_type = other DNA

SEQ ID NO: 74531 - DNA, 120 bp, synthetic construct; identical to SEQ ID NO: 44577
  source 1..120: mol_type = other DNA

SEQ ID NO: 74532 - DNA, 120 bp, synthetic construct; identical to SEQ ID NO: 12600
  source 1..120: mol_type = other DNA

SEQ ID NO: 74533 - DNA, 120 bp, synthetic construct; identical to SEQ ID NO: 44579
  source 1..120: mol_type = other DNA

SEQ ID NO: 74534 - DNA, 120 bp, synthetic construct; identical to SEQ ID NO: 44580
  source 1..120: mol_type = other DNA

SEQ ID NO: 74535 - DNA, 120 bp, synthetic construct; identical to SEQ ID NO: 44581
  source 1..120: mol_type = other DNA

SEQ ID NO: 74536 - DNA, 120 bp, synthetic construct; identical to SEQ ID NO: 12601
  source 1..120: mol_type = other DNA

SEQ ID NO: 74537 - DNA, 120 bp, synthetic construct; identical to SEQ ID NO: 44583
  source 1..120: mol_type = other DNA

SEQ ID NO: 74538 - DNA, 120 bp, synthetic construct; identical to SEQ ID NO: 44584
  source 1..120: mol_type = other DNA

SEQ ID NO: 74539 - DNA, 120 bp, synthetic construct; identical to SEQ ID NO: 12602
  source 1..120: mol_type = other DNA

SEQ ID NO: 74540 - DNA, 120 bp, synthetic construct; identical to SEQ ID NO: 44586
  source 1..120: mol_type = other DNA

SEQ ID NO: 74541 - DNA, 120 bp, synthetic construct; identical to SEQ ID NO: 44587
  source 1..120: mol_type = other DNA

SEQ ID NO: 74542 - DNA, 120 bp, synthetic construct; identical to SEQ ID NO: 44588
  source 1..120: mol_type = other DNA

SEQ ID NO: 74543 - DNA, 120 bp, synthetic construct; identical to SEQ ID NO: 44589
  source 1..120: mol_type = other DNA

SEQ ID NO: 74544 - DNA, 120 bp, synthetic construct; identical to SEQ ID NO: 12603
  source 1..120: mol_type = other DNA

SEQ ID NO: 74545 - DNA, 120 bp, synthetic construct; identical to SEQ ID NO: 44591
  source 1..120: mol_type = other DNA

SEQ ID NO: 74546 - DNA, 120 bp, synthetic construct; identical to SEQ ID NO: 44592
  source 1..120: mol_type = other DNA

SEQ ID NO: 74547 - DNA, 120 bp, synthetic construct; identical to SEQ ID NO: 44593
  source 1..120: mol_type = other DNA

SEQ ID NO: 74548 - DNA, 120 bp, synthetic construct; identical to SEQ ID NO: 44594
  source 1..120: mol_type = other DNA

SEQ ID NO: 74549 - DNA, 120 bp, synthetic construct; identical to SEQ ID NO: 12604
  source 1..120: mol_type = other DNA

SEQ ID NO: 74550 - DNA, 120 bp, synthetic construct; identical to SEQ ID NO: 44596
  source 1..120: mol_type = other DNA

SEQ ID NO: 74551 - DNA, 120 bp, synthetic construct; identical to SEQ ID NO: 44597
  source 1..120: mol_type = other DNA

SEQ ID NO: 74552 - DNA, 120 bp, synthetic construct; identical to SEQ ID NO: 44598
  source 1..120: mol_type = other DNA

SEQ ID NO: 74553 - DNA, 120 bp, synthetic construct; identical to SEQ ID NO: 12605
  source 1..120: mol_type = other DNA

SEQ ID NO: 74554 - DNA, 120 bp, synthetic construct; identical to SEQ ID NO: 44600
  source 1..120: mol_type = other DNA

SEQ ID NO: 74555 - DNA, 120 bp, synthetic construct; identical to SEQ ID NO: 44601
  source 1..120: mol_type = other DNA

SEQ ID NO: 74556 - DNA, 120 bp, synthetic construct; identical to SEQ ID NO: 12606
  source 1..120: mol_type = other DNA

SEQ ID NO: 74557 - DNA, 120 bp, synthetic construct; identical to SEQ ID NO: 44603
  source 1..120: mol_type = other DNA

SEQ ID NO: 74558 - DNA, 120 bp, synthetic construct; identical to SEQ ID NO: 44604
  source 1..120: mol_type = other DNA

SEQ ID NO: 74559 - DNA, 120 bp, synthetic construct; identical to SEQ ID NO: 44605
  source 1..120: mol_type = other DNA

SEQ ID NO: 74560 - DNA, 120 bp, synthetic construct; identical to SEQ ID NO: 12607
  source 1..120: mol_type = other DNA

SEQ ID NO: 74561 - DNA, 120 bp, synthetic construct; identical to SEQ ID NO: 44607
  source 1..120: mol_type = other DNA

SEQ ID NO: 74562 - DNA, 120 bp, synthetic construct; identical to SEQ ID NO: 44608
  source 1..120: mol_type = other DNA

SEQ ID NO: 74563 - DNA, 120 bp, synthetic construct; identical to SEQ ID NO: 12608
  source 1..120: mol_type = other DNA

SEQ ID NO: 74564 - DNA, 120 bp, synthetic construct; identical to SEQ ID NO: 44610
  source 1..120: mol_type = other DNA

SEQ ID NO: 74565 - DNA, 120 bp, synthetic construct; identical to SEQ ID NO: 44611
  source 1..120: mol_type = other DNA

SEQ ID NO: 74566 - DNA, 120 bp, synthetic construct; identical to SEQ ID NO: 44612
  source 1..120: mol_type = other DNA

SEQ ID NO: 74567 - DNA, 120 bp, synthetic construct; identical to SEQ ID NO: 44613
  source 1..120: mol_type = other DNA

SEQ ID NO: 74568 - DNA, 120 bp, synthetic construct; identical to SEQ ID NO: 12609
  source 1..120: mol_type = other DNA

SEQ ID NO: 74569 - DNA, 120 bp, synthetic construct; identical to SEQ ID NO: 44615
  source 1..120: mol_type = other DNA

SEQ ID NO: 74570 - DNA, 120 bp, synthetic construct; identical to SEQ ID NO: 44616
  source 1..120: mol_type = other DNA

SEQ ID NO: 74571 - DNA, 120 bp, synthetic construct; identical to SEQ ID NO: 12610
  source 1..120: mol_type = other DNA

SEQ ID NO: 74572 - DNA, 120 bp, synthetic construct; identical to SEQ ID NO: 44618
  source 1..120: mol_type = other DNA

SEQ ID NO: 74573 - DNA, 120 bp, synthetic construct; identical to SEQ ID NO: 44619
  source 1..120: mol_type = other DNA

SEQ ID NO: 74574 - DNA, 120 bp, synthetic construct; identical to SEQ ID NO: 44620
  source 1..120: mol_type = other DNA

SEQ ID NO: 74575 - DNA, 120 bp, synthetic construct; identical to SEQ ID NO: 44621
  source 1..120: mol_type = other DNA

SEQ ID NO: 74576 - DNA, 120 bp, synthetic construct; identical to SEQ ID NO: 12611
  source 1..120: mol_type = other DNA

SEQ ID NO: 74577 - DNA, 120 bp, synthetic construct; identical to SEQ ID NO: 44623
  source 1..120: mol_type = other DNA

SEQ ID NO: 74578 - DNA, 120 bp, synthetic construct; identical to SEQ ID NO: 44624
  source 1..120: mol_type = other DNA

SEQ ID NO: 74579 - DNA, 120 bp, synthetic construct; identical to SEQ ID NO: 44625
  source 1..120: mol_type = other DNA

SEQ ID NO: 74580 - DNA, 120 bp, synthetic construct; identical to SEQ ID NO: 5240
  source 1..120: mol_type = other DNA

SEQ ID NO: 74581 - DNA, 120 bp, synthetic construct; identical to SEQ ID NO: 44627
  source 1..120: mol_type = other DNA

SEQ ID NO: 74582 - DNA, 120 bp, synthetic construct; identical to SEQ ID NO: 44628
  source 1..120: mol_type = other DNA

SEQ ID NO: 74583 - DNA, 120 bp, synthetic construct; identical to SEQ ID NO: 44629
  source 1..120: mol_type = other DNA

SEQ ID NO: 74584 - DNA, 120 bp, synthetic construct; identical to SEQ ID NO: 12613
  source 1..120: mol_type = other DNA

SEQ ID NO: 74585 - DNA, 120 bp, synthetic construct; identical to SEQ ID NO: 44631
  source 1..120: mol_type = other DNA

SEQ ID NO: 74586 - DNA, 120 bp, synthetic construct; identical to SEQ ID NO: 44632
  source 1..120: mol_type = other DNA

SEQ ID NO: 74587 - DNA, 120 bp, synthetic construct; identical to SEQ ID NO: 44633
  source 1..120: mol_type = other DNA

SEQ ID NO: 74588 - DNA, 120 bp, synthetic construct; identical to SEQ ID NO: 12614
  source 1..120: mol_type = other DNA

SEQ ID NO: 74589 - DNA, 120 bp, synthetic construct; identical to SEQ ID NO: 44635
  source 1..120: mol_type = other DNA

SEQ ID NO: 74590 - DNA, 120 bp, synthetic construct; identical to SEQ ID NO: 44636
  source 1..120: mol_type = other DNA

SEQ ID NO: 74591 - DNA, 120 bp, synthetic construct; identical to SEQ ID NO: 12615
  source 1..120: mol_type = other DNA

SEQ ID NO: 74592 - DNA, 120 bp, synthetic construct; identical to SEQ ID NO: 44638
  source 1..120: mol_type = other DNA

SEQ ID NO: 74593 - DNA, 120 bp, synthetic construct; identical to SEQ ID NO: 44639
  source 1..120: mol_type = other DNA

SEQ ID NO: 74594 - DNA, 120 bp, synthetic construct; identical to SEQ ID NO: 44640
  source 1..120: mol_type = other DNA

SEQ ID NO: 74595 - DNA, 120 bp, synthetic construct; identical to SEQ ID NO: 12616
  source 1..120: mol_type = other DNA

SEQ ID NO: 74596 - DNA, 120 bp, synthetic construct; identical to SEQ ID NO: 44642
  source 1..120: mol_type = other DNA

SEQ ID NO: 74597 - DNA, 120 bp, synthetic construct; identical to SEQ ID NO: 44643
  source 1..120: mol_type = other DNA

SEQ ID NO: 74598 - DNA, 120 bp, synthetic construct; identical to SEQ ID NO: 44644
  source 1..120: mol_type = other DNA

SEQ ID NO: 74599 - DNA, 120 bp, synthetic construct; identical to SEQ ID NO: 12617
  source 1..120: mol_type = other DNA

SEQ ID NO: 74600 - DNA, 120 bp, synthetic construct; identical to SEQ ID NO: 44646
  source 1..120: mol_type = other DNA

SEQ ID NO: 74601 - DNA, 120 bp, synthetic construct; identical to SEQ ID NO: 44647
  source 1..120: mol_type = other DNA

SEQ ID NO: 74602 - DNA, 120 bp, synthetic construct; identical to SEQ ID NO: 44648
  source 1..120: mol_type = other DNA

SEQ ID NO: 74603 - DNA, 120 bp, synthetic construct; identical to SEQ ID NO: 44649
  source 1..120: mol_type = other DNA

SEQ ID NO: 74604 - DNA, 120 bp, synthetic construct; identical to SEQ ID NO: 12618
  source 1..120: mol_type = other DNA

SEQ ID NO: 74605 - DNA, 120 bp, synthetic construct; identical to SEQ ID NO: 44651
  source 1..120: mol_type = other DNA

SEQ ID NO: 74606 - DNA, 120 bp, synthetic construct; identical to SEQ ID NO: 44652
  source 1..120: mol_type = other DNA

SEQ ID NO: 74607 - DNA, 120 bp, synthetic construct; identical to SEQ ID NO: 12619
  source 1..120: mol_type = other DNA

SEQ ID NO: 74608 - DNA, 120 bp, synthetic construct; identical to SEQ ID NO: 44654
  source 1..120: mol_type = other DNA

SEQ ID NO: 74609 - DNA, 120 bp, synthetic construct; identical to SEQ ID NO: 44655
  source 1..120: mol_type = other DNA

SEQ ID NO: 74610 - DNA, 120 bp, synthetic construct; identical to SEQ ID NO: 44656
  source 1..120: mol_type = other DNA

SEQ ID NO: 74611 - DNA, 120 bp, synthetic construct; identical to SEQ ID NO: 12620
  source 1..120: mol_type = other DNA

SEQ ID NO: 74612 - DNA, 120 bp, synthetic construct; identical to SEQ ID NO: 44658
  source 1..120: mol_type = other DNA

SEQ ID NO: 74613 - DNA, 120 bp, synthetic construct; identical to SEQ ID NO: 44659
  source 1..120: mol_type = other DNA

SEQ ID NO: 74614 - DNA, 120 bp, synthetic construct; identical to SEQ ID NO: 44660
  source 1..120: mol_type = other DNA

SEQ ID NO: 74615 - DNA, 120 bp, synthetic construct; identical to SEQ ID NO: 44661
  source 1..120: mol_type = other DNA

SEQ ID NO: 74616 - DNA, 120 bp, synthetic construct; identical to SEQ ID NO: 12621
  source 1..120: mol_type = other DNA

SEQ ID NO: 74617 - DNA, 120 bp, synthetic construct; identical to SEQ ID NO: 44663
  source 1..120: mol_type = other DNA

SEQ ID NO: 74618 - DNA, 120 bp, synthetic construct; identical to SEQ ID NO: 44664
  source 1..120: mol_type = other DNA

SEQ ID NO: 74619 - DNA, 120 bp, synthetic construct; identical to SEQ ID NO: 44665
  source 1..120: mol_type = other DNA

SEQ ID NO: 74620 - DNA, 120 bp, synthetic construct; identical to SEQ ID NO: 12622
  source 1..120: mol_type = other DNA

SEQ ID NO: 74621 - DNA, 120 bp, synthetic construct; identical to SEQ ID NO: 44667
  source 1..120: mol_type = other DNA

SEQ ID NO: 74622 - DNA, 120 bp, synthetic construct; identical to SEQ ID NO: 44668
  source 1..120: mol_type = other DNA

SEQ ID NO: 74623 - DNA, 120 bp, synthetic construct; identical to SEQ ID NO: 44669
  source 1..120: mol_type = other DNA

SEQ ID NO: 74624 - DNA, 120 bp, synthetic construct; identical to SEQ ID NO: 12623
  source 1..120: mol_type = other DNA

SEQ ID NO: 74625 - DNA, 120 bp, synthetic construct; identical to SEQ ID NO: 44671
  source 1..120: mol_type = other DNA

SEQ ID NO: 74626 - DNA, 120 bp, synthetic construct; identical to SEQ ID NO: 44672
  source 1..120: mol_type = other DNA

SEQ ID NO: 74627 - DNA, 120 bp, synthetic construct; identical to SEQ ID NO: 12624
  source 1..120: mol_type = other DNA

SEQ ID NO: 74628 - DNA, 120 bp, synthetic construct; identical to SEQ ID NO: 44674
  source 1..120: mol_type = other DNA

SEQ ID NO: 74629 - DNA, 120 bp, synthetic construct; identical to SEQ ID NO: 44675
  source 1..120: mol_type = other DNA

SEQ ID NO: 74630 - DNA, 120 bp, synthetic construct; identical to SEQ ID NO: 44676
  source 1..120: mol_type = other DNA

SEQ ID NO: 74631 - DNA, 120 bp, synthetic construct; identical to SEQ ID NO: 44677
  source 1..120: mol_type = other DNA

SEQ ID NO: 74632 - DNA, 120 bp, synthetic construct; identical to SEQ ID NO: 12625
  source 1..120: mol_type = other DNA

SEQ ID NO: 74633 - DNA, 120 bp, synthetic construct; identical to SEQ ID NO: 44679
  source 1..120: mol_type = other DNA

SEQ ID NO: 74634 - DNA, 120 bp, synthetic construct; identical to SEQ ID NO: 44680
  source 1..120: mol_type = other DNA

SEQ ID NO: 74635 - DNA, 120 bp, synthetic construct; identical to SEQ ID NO: 44681
  source 1..120: mol_type = other DNA

SEQ ID NO: 74636 - DNA, 120 bp, synthetic construct; identical to SEQ ID NO: 12626
  source 1..120: mol_type = other DNA

SEQ ID NO: 74637 - DNA, 120 bp, synthetic construct; identical to SEQ ID NO: 44683
  source 1..120: mol_type = other DNA

SEQ ID NO: 74638 - DNA, 120 bp, synthetic construct; identical to SEQ ID NO: 44684
  source 1..120: mol_type = other DNA

SEQ ID NO: 74639 - DNA, 120 bp, synthetic construct; identical to SEQ ID NO: 12627
  source 1..120: mol_type = other DNA

SEQ ID NO: 74640 - DNA, 120 bp, synthetic construct; identical to SEQ ID NO: 44686
  source 1..120: mol_type = other DNA

SEQ ID NO: 74641 - DNA, 120 bp, synthetic construct; identical to SEQ ID NO: 44687
  source 1..120: mol_type = other DNA

SEQ ID NO: 74642 - DNA, 120 bp, synthetic construct; identical to SEQ ID NO: 44688
  source 1..120: mol_type = other DNA

SEQ ID NO: 74643 - DNA, 120 bp, synthetic construct; identical to SEQ ID NO: 44689
  source 1..120: mol_type = other DNA

SEQ ID NO: 74644 - DNA, 120 bp, synthetic construct; identical to SEQ ID NO: 12628
  source 1..120: mol_type = other DNA

SEQ ID NO: 74645 - DNA, 120 bp, synthetic construct; identical to SEQ ID NO: 44691
  source 1..120: mol_type = other DNA

SEQ ID NO: 74646 - DNA, 120 bp, synthetic construct; identical to SEQ ID NO: 44692
  source 1..120: mol_type = other DNA

SEQ ID NO: 74647 - DNA, 120 bp, synthetic construct; identical to SEQ ID NO: 44693
  source 1..120: mol_type = other DNA

SEQ ID NO: 74648 - DNA, 120 bp, synthetic construct; identical to SEQ ID NO: 12629
  source 1..120: mol_type = other DNA

SEQ ID NO: 74649 - DNA, 120 bp, synthetic construct; identical to SEQ ID NO: 44695
  source 1..120: mol_type = other DNA

SEQ ID NO: 74650 - DNA, 120 bp, synthetic construct; identical to SEQ ID NO: 44696
  source 1..120: mol_type = other DNA

SEQ ID NO: 74651 - DNA, 120 bp, synthetic construct; identical to SEQ ID NO: 44697
  source 1..120: mol_type = other DNA

SEQ ID NO: 74652 - DNA, 120 bp, synthetic construct; identical to SEQ ID NO: 12630
  source 1..120: mol_type = other DNA

SEQ ID NO: 74653 - DNA, 120 bp, synthetic construct; identical to SEQ ID NO: 44699
  source 1..120: mol_type = other DNA

SEQ ID NO: 74654 - DNA, 120 bp, synthetic construct; identical to SEQ ID NO: 44700
  source 1..120: mol_type = other DNA

SEQ ID NO: 74655 - DNA, 120 bp, synthetic construct; identical to SEQ ID NO: 44701
  source 1..120: mol_type = other DNA

SEQ ID NO: 74656 - DNA, 120 bp, synthetic construct; identical to SEQ ID NO: 12631
  source 1..120: mol_type = other DNA

SEQ ID NO: 74657 - DNA, 120 bp, synthetic construct; identical to SEQ ID NO: 44703
  source 1..120: mol_type = other DNA

SEQ ID NO: 74658 - DNA, 120 bp, synthetic construct; identical to SEQ ID NO: 44704
  source 1..120: mol_type = other DNA

SEQ ID NO: 74659 - DNA, 120 bp, synthetic construct; identical to SEQ ID NO: 12632
  source 1..120: mol_type = other DNA

SEQ ID NO: 74660 - DNA, 120 bp, synthetic construct; identical to SEQ ID NO: 44706
  source 1..120: mol_type = other DNA

SEQ ID NO: 74661 - DNA, 120 bp, synthetic construct; identical to SEQ ID NO: 44707
  source 1..120: mol_type = other DNA

SEQ ID NO: 74662 - DNA, 120 bp, synthetic construct; identical to SEQ ID NO: 44708
  source 1..120: mol_type = other DNA

SEQ ID NO: 74663 - DNA, 120 bp, synthetic construct; identical to SEQ ID NO: 44709
  source 1..120: mol_type = other DNA

SEQ ID NO: 74664 - DNA, 120 bp, synthetic construct; identical to SEQ ID NO: 12633
  source 1..120: mol_type = other DNA

SEQ ID NO: 74665 - DNA, 120 bp, synthetic construct; identical to SEQ ID NO: 44711
  source 1..120: mol_type = other DNA

SEQ ID NO: 74666 - DNA, 120 bp, synthetic construct; identical to SEQ ID NO: 44712
  source 1..120: mol_type = other DNA

SEQ ID NO: 74667 - DNA, 120 bp, synthetic construct; identical to SEQ ID NO: 12634
  source 1..120: mol_type = other DNA

SEQ ID NO: 74668 - DNA, 120 bp, synthetic construct; identical to SEQ ID NO: 44714
  source 1..120: mol_type = other DNA

SEQ ID NO: 74669 - DNA, 120 bp, synthetic construct; identical to SEQ ID NO: 44715
  source 1..120: mol_type = other DNA

SEQ ID NO: 74670 - DNA, 120 bp, synthetic construct; identical to SEQ ID NO: 44716
  source 1..120: mol_type = other DNA

SEQ ID NO: 74671 - DNA, 120 bp, synthetic construct; identical to SEQ ID NO: 44717
  source 1..120: mol_type = other DNA

SEQ ID NO: 74672 - DNA, 120 bp, synthetic construct; identical to SEQ ID NO: 12635
  source 1..120: mol_type = other DNA

SEQ ID NO: 74673 - DNA, 120 bp, synthetic construct; identical to SEQ ID NO: 44719
  source 1..120: mol_type = other DNA

SEQ ID NO: 74674 - DNA, 120 bp, synthetic construct; identical to SEQ ID NO: 44720
  source 1..120: mol_type = other DNA

SEQ ID NO: 74675 - DNA, 120 bp, synthetic construct; identical to SEQ ID NO: 44721
  source 1..120: mol_type = other DNA

SEQ ID NO: 74676 - DNA, 120 bp, synthetic construct; identical to SEQ ID NO: 12636
  source 1..120: mol_type = other DNA

SEQ ID NO: 74677 - DNA, 120 bp, synthetic construct; identical to SEQ ID NO: 44723
  source 1..120: mol_type = other DNA

SEQ ID NO: 74678 - DNA, 120 bp, synthetic construct; identical to SEQ ID NO: 44724
  source 1..120: mol_type = other DNA

SEQ ID NO: 74679 - DNA, 120 bp, synthetic construct; identical to SEQ ID NO: 12637
  source 1..120: mol_type = other DNA

SEQ ID NO: 74680 - DNA, 120 bp, synthetic construct; identical to SEQ ID NO: 44726
  source 1..120: mol_type = other DNA

SEQ ID NO: 74681 - DNA, 120 bp, synthetic construct; identical to SEQ ID NO: 44727
  source 1..120: mol_type = other DNA

SEQ ID NO: 74682 - DNA, 120 bp, synthetic construct; identical to SEQ ID NO: 44728
  source 1..120: mol_type = other DNA

SEQ ID NO: 74683 - DNA, 120 bp, synthetic construct; identical to SEQ ID NO: 44729
  source 1..120: mol_type = other DNA

SEQ ID NO: 74684 - DNA, 120 bp, synthetic construct; identical to SEQ ID NO: 12638
  source 1..120: mol_type = other DNA

SEQ ID NO: 74685 - DNA, 120 bp, synthetic construct; identical to SEQ ID NO: 44731
  source 1..120: mol_type = other DNA

SEQ ID NO: 74686 - DNA, 120 bp, synthetic construct; identical to SEQ ID NO: 44732
  source 1..120: mol_type = other DNA

SEQ ID NO: 74687 - DNA, 120 bp, synthetic construct; identical to SEQ ID NO: 12639
  source 1..120: mol_type = other DNA

SEQ ID NO: 74688 - DNA, 120 bp, synthetic construct; identical to SEQ ID NO: 44734
  source 1..120: mol_type = other DNA

SEQ ID NO: 74689 - DNA, 120 bp, synthetic construct; identical to SEQ ID NO: 44735
  source 1..120: mol_type = other DNA

SEQ ID NO: 74690 - DNA, 120 bp, synthetic construct; identical to SEQ ID NO: 44736
  source 1..120: mol_type = other DNA

SEQ ID NO: 74691 - DNA, 120 bp, synthetic construct; identical to SEQ ID NO: 44737
  source 1..120: mol_type = other DNA

SEQ ID NO: 74692 - DNA, 120 bp, synthetic construct; identical to SEQ ID NO: 44738
  source 1..120: mol_type = other DNA

SEQ ID NO: 74693 - DNA, 120 bp, synthetic construct; identical to SEQ ID NO: 5272
  source 1..120: mol_type = other DNA

SEQ ID NO: 74694 - DNA, 120 bp, synthetic construct; identical to SEQ ID NO: 44740
  source 1..120: mol_type = other DNA

SEQ ID NO: 74695 - DNA, 120 bp, synthetic construct; identical to SEQ ID NO: 44741
  source 1..120: mol_type = other DNA

SEQ ID NO: 74696 - DNA, 120 bp, synthetic construct; identical to SEQ ID NO: 44742
  source 1..120: mol_type = other DNA

SEQ ID NO: 74697 - DNA, 120 bp, synthetic construct; identical to SEQ ID NO: 12641
  source 1..120: mol_type = other DNA

SEQ ID NO: 74698 - DNA, 120 bp, synthetic construct; identical to SEQ ID NO: 44744
  source 1..120: mol_type = other DNA

SEQ ID NO: 74699 - DNA, 120 bp, synthetic construct; identical to SEQ ID NO: 44745
  source 1..120: mol_type = other DNA

SEQ ID NO: 74700 - DNA, 120 bp, synthetic construct; identical to SEQ ID NO: 44746
  source 1..120: mol_type = other DNA

SEQ ID NO: 74701 - DNA, 120 bp, synthetic construct; identical to SEQ ID NO: 12642
  source 1..120: mol_type = other DNA

SEQ ID NO: 74702 - DNA, 120 bp, synthetic construct; identical to SEQ ID NO: 44748
  source 1..120: mol_type = other DNA

SEQ ID NO: 74703 - DNA, 120 bp, synthetic construct; identical to SEQ ID NO: 44749
  source 1..120: mol_type = other DNA

SEQ ID NO: 74704 - DNA, 120 bp, synthetic construct; identical to SEQ ID NO: 44750
  source 1..120: mol_type = other DNA

SEQ ID NO: 74705 - DNA, 120 bp, synthetic construct; identical to SEQ ID NO: 44751
  source 1..120: mol_type = other DNA

SEQ ID NO: 74706 - DNA, 120 bp, synthetic construct; identical to SEQ ID NO: 12643
  source 1..120: mol_type = other DNA

SEQ ID NO: 74707 - DNA, 120 bp, synthetic construct; identical to SEQ ID NO: 44753
  source 1..120: mol_type = other DNA

SEQ ID NO: 74708 - DNA, 120 bp, synthetic construct; identical to SEQ ID NO: 44754
  source 1..120: mol_type = other DNA

SEQ ID NO: 74709 - DNA, 120 bp, synthetic construct; identical to SEQ ID NO: 44755
  source 1..120: mol_type = other DNA

SEQ ID NO: 74710 - DNA, 120 bp, synthetic construct; identical to SEQ ID NO: 12644
  source 1..120: mol_type = other DNA

SEQ ID NO: 74711 - DNA, 120 bp, synthetic construct; identical to SEQ ID NO: 44757
  source 1..120: mol_type = other DNA

SEQ ID NO: 74712 - DNA, 120 bp, synthetic construct; identical to SEQ ID NO: 44758
  source 1..120: mol_type = other DNA

SEQ ID NO: 74713 - DNA, 120 bp, synthetic construct; identical to SEQ ID NO: 44759
  source 1..120: mol_type = other DNA

SEQ ID NO: 74714 - DNA, 120 bp, synthetic construct; identical to SEQ ID NO: 12645
  source 1..120: mol_type = other DNA

SEQ ID NO: 74715 - DNA, 120 bp, synthetic construct; identical to SEQ ID NO: 44761
  source 1..120: mol_type = other DNA

SEQ ID NO: 74716 - DNA, 120 bp, synthetic construct; identical to SEQ ID NO: 44762
  source 1..120: mol_type = other DNA

SEQ ID NO: 74717 - DNA, 120 bp, synthetic construct; identical to SEQ ID NO: 44763
  source 1..120: mol_type = other DNA

SEQ ID NO: 74718 - DNA, 120 bp, synthetic construct; identical to SEQ ID NO: 44764
  source 1..120: mol_type = other DNA

SEQ ID NO: 74719 - DNA, 120 bp, synthetic construct; identical to SEQ ID NO: 12646
  source 1..120: mol_type = other DNA

SEQ ID NO: 74720 - DNA, 120 bp, synthetic construct; identical to SEQ ID NO: 44766
  source 1..120: mol_type = other DNA

SEQ ID NO: 74721 - DNA, 120 bp, synthetic construct; identical to SEQ ID NO: 44767
  source 1..120: mol_type = other DNA

SEQ ID NO: 74722 - DNA, 120 bp, synthetic construct; identical to SEQ ID NO: 12647
  source 1..120: mol_type = other DNA

SEQ ID NO: 74723 - DNA, 120 bp, synthetic construct; identical to SEQ ID NO: 44769
  source 1..120: mol_type = other DNA

SEQ ID NO: 74724 - DNA, 120 bp, synthetic construct; identical to SEQ ID NO: 44770
  source 1..120: mol_type = other DNA

SEQ ID NO: 74725 - DNA, 120 bp, synthetic construct; identical to SEQ ID NO: 44771
  source 1..120: mol_type = other DNA

SEQ ID NO: 74726 - DNA, 120 bp, synthetic construct; identical to SEQ ID NO: 12648
  source 1..120: mol_type = other DNA

SEQ ID NO: 74727 - DNA, 120 bp, synthetic construct; identical to SEQ ID NO: 44773
  source 1..120: mol_type = other DNA

SEQ ID NO: 74728 - DNA, 120 bp, synthetic construct; identical to SEQ ID NO: 44774
  source 1..120: mol_type = other DNA

SEQ ID NO: 74729 - DNA, 120 bp, synthetic construct; identical to SEQ ID NO: 44775
  source 1..120: mol_type = other DNA

SEQ ID NO: 74730 - DNA, 120 bp, synthetic construct; identical to SEQ ID NO: 44776
  source 1..120: mol_type = other DNA

SEQ ID NO: 74731 - DNA, 120 bp, synthetic construct; identical to SEQ ID NO: 44777
  source 1..120: mol_type = other DNA

SEQ ID NO: 74732 - DNA, 120 bp, synthetic construct; identical to SEQ ID NO: 12649
  source 1..120: mol_type = other DNA

SEQ ID NO: 74733 - DNA, 120 bp, synthetic construct; identical to SEQ ID NO: 44779
  source 1..120: mol_type = other DNA

SEQ ID NO: 74734 - DNA, 120 bp, synthetic construct; identical to SEQ ID NO: 44780
  source 1..120: mol_type = other DNA

SEQ ID NO: 74735 - DNA, 120 bp, synthetic construct; identical to SEQ ID NO: 44781
  source 1..120: mol_type = other DNA

SEQ ID NO: 74736 - DNA, 120 bp, synthetic construct; identical to SEQ ID NO: 12650
  source 1..120: mol_type = other DNA

SEQ ID NO: 74737 - DNA, 120 bp, synthetic construct; identical to SEQ ID NO: 44783
  source 1..120: mol_type = other DNA

SEQ ID NO: 74738 - DNA, 120 bp, synthetic construct; identical to SEQ ID NO: 44784
  source 1..120: mol_type = other DNA

SEQ ID NO: 74739 - DNA, 120 bp, synthetic construct; identical to SEQ ID NO: 44785
  source 1..120: mol_type = other DNA

SEQ ID NO: 74740 - DNA, 120 bp, synthetic construct; identical to SEQ ID NO: 44786
  source 1..120: mol_type = other DNA

SEQ ID NO: 74741 - DNA, 120 bp, synthetic construct; identical to SEQ ID NO: 12651
  source 1..120: mol_type = other DNA

SEQ ID NO: 74742 - DNA, 120 bp, synthetic construct; identical to SEQ ID NO: 44788
  source 1..120: mol_type = other DNA

SEQ ID NO: 74743 - DNA, 120 bp, synthetic construct; identical to SEQ ID NO: 44789
  source 1..120: mol_type = other DNA

SEQ ID NO: 74744 - DNA, 120 bp, synthetic construct; identical to SEQ ID NO: 44790
  source 1..120: mol_type = other DNA

SEQ ID NO: 74745 - DNA, 120 bp, synthetic construct; identical to SEQ ID NO: 12652
  source 1..120: mol_type = other DNA

SEQ ID NO: 74746 - DNA, 120 bp, synthetic construct; identical to SEQ ID NO: 44792
  source 1..120: mol_type = other DNA

SEQ ID NO: 74747 - DNA, 120 bp, synthetic construct; identical to SEQ ID NO: 44793
  source 1..120: mol_type = other DNA

SEQ ID NO: 74748 - DNA, 120 bp, synthetic construct; identical to SEQ ID NO: 12653
  source 1..120: mol_type = other DNA

SEQ ID NO: 74749 - DNA, 120 bp, synthetic construct; identical to SEQ ID NO: 44795
  source 1..120: mol_type = other DNA

SEQ ID NO: 74750 - DNA, 120 bp, synthetic construct; identical to SEQ ID NO: 44796
  source 1..120: mol_type = other DNA

SEQ ID NO: 74751 - DNA, 120 bp, synthetic construct; identical to SEQ ID NO: 44797
  source 1..120: mol_type = other DNA

SEQ ID NO: 74752 - DNA, 120 bp, synthetic construct; identical to SEQ ID NO: 44798
  source 1..120: mol_type = other DNA

SEQ ID NO: 74753 - DNA, 120 bp, synthetic construct; identical to SEQ ID NO: 12654
  source 1..120: mol_type = other DNA

SEQ ID NO: 74754 - DNA, 120 bp, synthetic construct; identical to SEQ ID NO: 44800
  source 1..120: mol_type = other DNA

SEQ ID NO: 74755 - DNA, 120 bp, synthetic construct; identical to SEQ ID NO: 44801
  source 1..120: mol_type = other DNA

SEQ ID NO: 74756 - DNA, 120 bp, synthetic construct; identical to SEQ ID NO: 12655
  source 1..120: mol_type = other DNA

SEQ ID NO: 74757 - DNA, 120 bp, synthetic construct; identical to SEQ ID NO: 44803
  source 1..120: mol_type = other DNA

SEQ ID NO: 74758 - DNA, 120 bp, synthetic construct; identical to SEQ ID NO: 44804
  source 1..120: mol_type = other DNA

SEQ ID NO: 74759 - DNA, 120 bp, synthetic construct; identical to SEQ ID NO: 44805
  source 1..120: mol_type = other DNA

SEQ ID NO: 74760 - DNA, 120 bp, synthetic construct; identical to SEQ ID NO: 5287
  source 1..120: mol_type = other DNA

SEQ ID NO: 74761 - DNA, 120 bp, synthetic construct; identical to SEQ ID NO: 12656
  source 1..120: mol_type = other DNA

SEQ ID NO: 74762 - DNA, 120 bp, synthetic construct; identical to SEQ ID NO: 44808
  source 1..120: mol_type = other DNA

SEQ ID NO: 74763 - DNA, 120 bp, synthetic construct; identical to SEQ ID NO: 44809
  source 1..120: mol_type = other DNA

SEQ ID NO: 74764 - DNA, 120 bp, synthetic construct; identical to SEQ ID NO: 12657
  source 1..120: mol_type = other DNA

SEQ ID NO: 74765 - DNA, 120 bp, synthetic construct; identical to SEQ ID NO: 44811
  source 1..120: mol_type = other DNA

SEQ ID NO: 74766 - DNA, 120 bp, synthetic construct; identical to SEQ ID NO: 44812
  source 1..120: mol_type = other DNA

SEQ ID NO: 74767 - DNA, 120 bp, synthetic construct; identical to SEQ ID NO: 44813
  source 1..120: mol_type = other DNA

SEQ ID NO: 74768 - DNA, 120 bp, synthetic construct; identical to SEQ ID NO: 12658
  source 1..120: mol_type = other DNA

SEQ ID NO: 74769 - DNA, 120 bp, synthetic construct; identical to SEQ ID NO: 44815
  source 1..120: mol_type = other DNA

SEQ ID NO: 74770 - DNA, 120 bp, synthetic construct; identical to SEQ ID NO: 44816
  source 1..120: mol_type = other DNA

SEQ ID NO: 74771 - DNA, 120 bp, synthetic construct; identical to SEQ ID NO: 44817
  source 1..120: mol_type = other DNA

SEQ ID NO: 74772 - DNA, 120 bp, synthetic construct; identical to SEQ ID NO: 12659
  source 1..120: mol_type = other DNA

SEQ ID NO: 74773 - DNA, 120 bp, synthetic construct; identical to SEQ ID NO: 44819
  source 1..120: mol_type = other DNA

SEQ ID NO: 74774 - DNA, 120 bp, synthetic construct; identical to SEQ ID NO: 44820
  source 1..120: mol_type = other DNA

SEQ ID NO: 74775 - DNA, 120 bp, synthetic construct; identical to SEQ ID NO: 44821
  source 1..120: mol_type = other DNA

SEQ ID NO: 74776 - DNA, 120 bp, synthetic construct; identical to SEQ ID NO: 12660
  source 1..120: mol_type = other DNA

SEQ ID NO: 74777 - DNA, 120 bp, synthetic construct; identical to SEQ ID NO: 44823
  source 1..120: mol_type = other DNA

SEQ ID NO: 74778 - DNA, 120 bp, synthetic construct; identical to SEQ ID NO: 44824
  source 1..120: mol_type = other DNA

SEQ ID NO: 74779 - DNA, 120 bp, synthetic construct; identical to SEQ ID NO: 44825
  source 1..120: mol_type = other DNA

SEQ ID NO: 74780 - DNA, 120 bp, synthetic construct; identical to SEQ ID NO: 44826
  source 1..120: mol_type = other DNA

SEQ ID NO: 74781 - DNA, 120 bp, synthetic construct; identical to SEQ ID NO: 12661
  source 1..120: mol_type = other DNA

SEQ ID NO: 74782 - DNA, 120 bp, synthetic construct; identical to SEQ ID NO: 44828
  source 1..120: mol_type = other DNA

SEQ ID NO: 74783 - DNA, 120 bp, synthetic construct; identical to SEQ ID NO: 44829
  source 1..120: mol_type = other DNA

SEQ ID NO: 74784 - DNA, 120 bp, synthetic construct; identical to SEQ ID NO: 44830
  source 1..120: mol_type = other DNA

SEQ ID NO: 74785 - DNA, 120 bp, synthetic construct; identical to SEQ ID NO: 12662
  source 1..120: mol_type = other DNA

SEQ ID NO: 74786 - DNA, 120 bp, synthetic construct; identical to SEQ ID NO: 44832
  source 1..120: mol_type = other DNA

SEQ ID NO: 74787 - DNA, 120 bp, synthetic construct; identical to SEQ ID NO: 44833
  source 1..120: mol_type = other DNA

SEQ ID NO: 74788 - DNA, 120 bp, synthetic construct; identical to SEQ ID NO: 12663
  source 1..120: mol_type = other DNA

SEQ ID NO: 74789 - DNA, 120 bp, synthetic construct; identical to SEQ ID NO: 44835
  source 1..120: mol_type = other DNA

SEQ ID NO: 74790 - DNA, 120 bp, synthetic construct; identical to SEQ ID NO: 44836
  source 1..120: mol_type = other DNA

SEQ ID NO: 74791 - DNA, 120 bp, synthetic construct; identical to SEQ ID NO: 44837
  source 1..120: mol_type = other DNA

SEQ ID NO: 74792 - DNA, 120 bp, synthetic construct; identical to SEQ ID NO: 12664
  source 1..120: mol_type = other DNA

SEQ ID NO: 74793 - DNA, 120 bp, synthetic construct; identical to SEQ ID NO: 44839
  source 1..120: mol_type = other DNA

SEQ ID NO: 74794 - DNA, 120 bp, synthetic construct; identical to SEQ ID NO: 44840
  source 1..120: mol_type = other DNA

SEQ ID NO: 74795 - DNA, 120 bp, synthetic construct; identical to SEQ ID NO: 44841
  source 1..120: mol_type = other DNA

SEQ ID NO: 74796 - DNA, 120 bp, synthetic construct; identical to SEQ ID NO: 44842
  source 1..120: mol_type = other DNA

SEQ ID NO: 74797 - DNA, 120 bp, synthetic construct; identical to SEQ ID NO: 12665
  source 1..120: mol_type = other DNA

SEQ ID NO: 74798 - DNA, 120 bp, synthetic construct; identical to SEQ ID NO: 44844
  source 1..120: mol_type = other DNA

SEQ ID NO: 74799 - DNA, 120 bp, synthetic construct; identical to SEQ ID NO: 44845
  source 1..120: mol_type = other DNA

SEQ ID NO: 74800 - DNA, 120 bp, synthetic construct; identical to SEQ ID NO: 44846
  source 1..120: mol_type = other DNA

SEQ ID NO: 74801 - DNA, 120 bp, synthetic construct; identical to SEQ ID NO: 44847
  source 1..120: mol_type = other DNA

SEQ ID NO: 74802 - DNA, 120 bp, synthetic construct; identical to SEQ ID NO: 12666
  source 1..120: mol_type = other DNA

SEQ ID NO: 74803 - DNA, 120 bp, synthetic construct; identical to SEQ ID NO: 44849
  source 1..120: mol_type = other DNA

SEQ ID NO: 74804 - DNA, 120 bp, synthetic construct; identical to SEQ ID NO: 44850
  source 1..120: mol_type = other DNA

SEQ ID NO: 74805 - DNA, 120 bp, synthetic construct; identical to SEQ ID NO: 44851
  source 1..120: mol_type = other DNA

SEQ ID NO: 74806 - DNA, 120 bp, synthetic construct; identical to SEQ ID NO: 12667
  source 1..120: mol_type = other DNA

SEQ ID NO: 74807 - DNA, 120 bp, synthetic construct; identical to SEQ ID NO: 44853
  source 1..120: mol_type = other DNA

SEQ ID NO: 74808 - DNA, 120 bp, synthetic construct; identical to SEQ ID NO: 44854
  source 1..120: mol_type = other DNA

SEQ ID NO: 74809 - DNA, 120 bp, synthetic construct; identical to SEQ ID NO: 12668
  source 1..120: mol_type = other DNA

SEQ ID NO: 74810 - DNA, 120 bp, synthetic construct; identical to SEQ ID NO: 44856
  source 1..120: mol_type = other DNA

SEQ ID NO: 74811 - DNA, 120 bp, synthetic construct; identical to SEQ ID NO: 44857
  source 1..120: mol_type = other DNA

SEQ ID NO: 74812 - DNA, 120 bp, synthetic construct; identical to SEQ ID NO: 44858
  source 1..120: mol_type = other DNA

SEQ ID NO: 74813 - DNA, 120 bp, synthetic construct; identical to SEQ ID NO: 44859
  source 1..120: mol_type = other DNA

SEQ ID NO: 74814 - DNA, 120 bp, synthetic construct; identical to SEQ ID NO: 12669
  source 1..120: mol_type = other DNA

SEQ ID NO: 74815 - DNA, 120 bp, synthetic construct; identical to SEQ ID NO: 44861
  source 1..120: mol_type = other DNA

SEQ ID NO: 74816 - DNA, 120 bp, synthetic construct; identical to SEQ ID NO: 44862
  source 1..120: mol_type = other DNA

SEQ ID NO: 74817 - DNA, 120 bp, synthetic construct; identical to SEQ ID NO: 44863
  source 1..120: mol_type = other DNA

SEQ ID NO: 74818 - DNA, 120 bp, synthetic construct; identical to SEQ ID NO: 12670
  source 1..120: mol_type = other DNA

SEQ ID NO: 74819 - DNA, 120 bp, synthetic construct; identical to SEQ ID NO: 44865
  source 1..120: mol_type = other DNA

SEQ ID NO: 74820 - DNA, 120 bp, synthetic construct; identical to SEQ ID NO: 44866
  source 1..120: mol_type = other DNA

SEQ ID NO: 74821 - DNA, 120 bp, synthetic construct; identical to SEQ ID NO: 12671
  source 1..120: mol_type = other DNA

SEQ ID NO: 74822 - DNA, 120 bp, synthetic construct; identical to SEQ ID NO: 44868
  source 1..120: mol_type = other DNA

SEQ ID NO: 74823 - DNA, 120 bp, synthetic construct; identical to SEQ ID NO: 44869
  source 1..120: mol_type = other DNA

SEQ ID NO: 74824 - DNA, 120 bp, synthetic construct; identical to SEQ ID NO: 44870
  source 1..120: mol_type = other DNA

SEQ ID NO: 74825 - DNA, 120 bp, synthetic construct; identical to SEQ ID NO: 12672
  source 1..120: mol_type = other DNA

SEQ ID NO: 74826 - DNA, 120 bp, synthetic construct; identical to SEQ ID NO: 44872
  source 1..120: mol_type = other DNA

SEQ ID NO: 74827 - DNA, 120 bp, synthetic construct; identical to SEQ ID NO: 44873
  source 1..120: mol_type = other DNA

SEQ ID NO: 74828 - DNA, 120 bp, synthetic construct; identical to SEQ ID NO: 44874
  source 1..120: mol_type = other DNA

SEQ ID NO: 74829 - DNA, 120 bp, synthetic construct; identical to SEQ ID NO: 12673
  source 1..120: mol_type = other DNA

SEQ ID NO: 74830 - DNA, 120 bp, synthetic construct; identical to SEQ ID NO: 44876
  source 1..120: mol_type = other DNA

SEQ ID NO: 74831 - DNA, 120 bp, synthetic construct; identical to SEQ ID NO: 44877
  source 1..120: mol_type = other DNA

SEQ ID NO: 74832 - DNA, 120 bp, synthetic construct; identical to SEQ ID NO: 44878
  source 1..120: mol_type = other DNA

SEQ ID NO: 74833 - DNA, 120 bp, synthetic construct; identical to SEQ ID NO: 12674
  source 1..120: mol_type = other DNA

SEQ ID NO: 74834 - DNA, 120 bp, synthetic construct; identical to SEQ ID NO: 44880
  source 1..120: mol_type = other DNA

SEQ ID NO: 74835 - DNA, 120 bp, synthetic construct; identical to SEQ ID NO: 44881
  source 1..120: mol_type = other DNA

SEQ ID NO: 74836 - DNA, 120 bp, synthetic construct; identical to SEQ ID NO: 44882
  source 1..120: mol_type = other DNA

SEQ ID NO: 74837 - DNA, 120 bp, synthetic construct; identical to SEQ ID NO: 12675
  source 1..120: mol_type = other DNA

SEQ ID NO: 74838 - DNA, 120 bp, synthetic construct; identical to SEQ ID NO: 44884
  source 1..120: mol_type = other DNA

SEQ ID NO: 74839 - DNA, 120 bp, synthetic construct; identical to SEQ ID NO: 44885
  source 1..120: mol_type = other DNA

SEQ ID NO: 74840 - DNA, 120 bp, synthetic construct; identical to SEQ ID NO: 44886
  source 1..120: mol_type = other DNA

SEQ ID NO: 74841 - DNA, 120 bp, synthetic construct; identical to SEQ ID NO: 12676
  source 1..120: mol_type = other DNA

SEQ ID NO: 74842 - DNA, 120 bp, synthetic construct; identical to SEQ ID NO: 44888
  source 1..120: mol_type = other DNA

SEQ ID NO: 74843 - DNA, 120 bp, synthetic construct; identical to SEQ ID NO: 44889
  source 1..120: mol_type = other DNA

SEQ ID NO: 74844 - DNA, 120 bp, synthetic construct; identical to SEQ ID NO: 44890
  source 1..120: mol_type = other DNA

SEQ ID NO: 74845 - DNA, 120 bp, synthetic construct; identical to SEQ ID NO: 44891
  source 1..120: mol_type = other DNA

SEQ ID NO: 74846 - DNA, 120 bp, synthetic construct; identical to SEQ ID NO: 12677
  source 1..120: mol_type = other DNA

SEQ ID NO: 74847 - DNA, 120 bp, synthetic construct; identical to SEQ ID NO: 44893
  source 1..120: mol_type = other DNA

SEQ ID NO: 74848 - DNA, 120 bp, synthetic construct; identical to SEQ ID NO: 44894
  source 1..120: mol_type = other DNA

SEQ ID NO: 74849 - DNA, 120 bp, synthetic construct; identical to SEQ ID NO: 12678
  source 1..120: mol_type = other DNA

SEQ ID NO: 74850 - DNA, 120 bp, synthetic construct; identical to SEQ ID NO: 44896
  source 1..120: mol_type = other DNA

SEQ ID NO: 74851 - DNA, 120 bp, synthetic construct; identical to SEQ ID NO: 44897
  source 1..120: mol_type = other DNA

SEQ ID NO: 74852 - DNA, 120 bp, synthetic construct; identical to SEQ ID NO: 44898
  source 1..120: mol_type = other DNA

SEQ ID NO: 74853 - DNA, 120 bp, synthetic construct; identical to SEQ ID NO: 12679
  source 1..120: mol_type = other DNA

SEQ ID NO: 74854 - DNA, 120 bp, synthetic construct; identical to SEQ ID NO: 44900
  source 1..120: mol_type = other DNA

SEQ ID NO: 74855 - DNA, 120 bp, synthetic construct; identical to SEQ ID NO: 44901
  source 1..120: mol_type = other DNA

SEQ ID NO: 74856 - DNA, 120 bp, synthetic construct; identical to SEQ ID NO: 44902
  source 1..120: mol_type = other DNA

SEQ ID NO: 74857 - DNA, 120 bp, synthetic construct; identical to SEQ ID NO: 44903
  source 1..120: mol_type = other DNA

SEQ ID NO: 74858 - DNA, 120 bp, synthetic construct; identical to SEQ ID NO: 12680
  source 1..120: mol_type = other DNA

SEQ ID NO: 74859 - DNA, 120 bp, synthetic construct; identical to SEQ ID NO: 44905
  source 1..120: mol_type = other DNA

SEQ ID NO: 74860 - DNA, 120 bp, synthetic construct; identical to SEQ ID NO: 44906
  source 1..120: mol_type = other DNA

SEQ ID NO: 74861 - DNA, 120 bp, synthetic construct; identical to SEQ ID NO: 44907
  source 1..120: mol_type = other DNA

SEQ ID NO: 74862 - DNA, 120 bp, synthetic construct; identical to SEQ ID NO: 12681
  source 1..120: mol_type = other DNA

SEQ ID NO: 74863 - DNA, 120 bp, synthetic construct; identical to SEQ ID NO: 44909
  source 1..120: mol_type = other DNA

SEQ ID NO: 74864 - DNA, 120 bp, synthetic construct; identical to SEQ ID NO: 44910
  source 1..120: mol_type = other DNA

SEQ ID NO: 74865 - DNA, 120 bp, synthetic construct; identical to SEQ ID NO: 5312
  source 1..120: mol_type = other DNA

SEQ ID NO: 74866 - DNA, 120 bp, synthetic construct; identical to SEQ ID NO: 44912
  source 1..120: mol_type = other DNA

SEQ ID NO: 74867 - DNA, 120 bp, synthetic construct; identical to SEQ ID NO: 44913
  source 1..120: mol_type = other DNA

SEQ ID NO: 74868 - DNA, 120 bp, synthetic construct; identical to SEQ ID NO: 44914
  source 1..120: mol_type = other DNA

SEQ ID NO: 74869 - DNA, 120 bp, synthetic construct; identical to SEQ ID NO: 44915
  source 1..120: mol_type = other DNA

SEQ ID NO: 74870 - DNA, 120 bp, synthetic construct; identical to SEQ ID NO: 12683
  source 1..120: mol_type = other DNA

SEQ ID NO: 74871 - DNA, 120 bp, synthetic construct; identical to SEQ ID NO: 44917
  source 1..120: mol_type = other DNA

SEQ ID NO: 74872 - DNA, 120 bp, synthetic construct; identical to SEQ ID NO: 44918
  source 1..120: mol_type = other DNA

SEQ ID NO: 74873 - DNA, 120 bp, synthetic construct; identical to SEQ ID NO: 12684
  source 1..120: mol_type = other DNA

SEQ ID NO: 74874 - DNA, 120 bp, synthetic construct; identical to SEQ ID NO: 44920
  source 1..120: mol_type = other DNA

SEQ ID NO: 74875 - DNA, 120 bp, synthetic construct; identical to SEQ ID NO: 44921
  source 1..120: mol_type = other DNA

SEQ ID NO: 74876 - DNA, 120 bp, synthetic construct; identical to SEQ ID NO: 44922
  source 1..120: mol_type = other DNA

SEQ ID NO: 74877 - DNA, 120 bp, synthetic construct; identical to SEQ ID NO: 44923
  source 1..120: mol_type = other DNA

SEQ ID NO: 74878 - DNA, 120 bp, synthetic construct; identical to SEQ ID NO: 12685
  source 1..120: mol_type = other DNA

SEQ ID NO: 74879 - DNA, 120 bp, synthetic construct; identical to SEQ ID NO: 44925
  source 1..120: mol_type = other DNA

SEQ ID NO: 74880 - DNA, 120 bp, synthetic construct; identical to SEQ ID NO: 44926
  source 1..120: mol_type = other DNA

SEQ ID NO: 74881 - DNA, 120 bp, synthetic construct; identical to SEQ ID NO: 12686
  source 1..120: mol_type = other DNA

SEQ ID NO: 74882 - DNA, 120 bp, synthetic construct; identical to SEQ ID NO: 44928
  source 1..120: mol_type = other DNA

SEQ ID NO: 74883 - DNA, 120 bp, synthetic construct; identical to SEQ ID NO: 44929
  source 1..120: mol_type = other DNA

SEQ ID NO: 74884 - DNA, 120 bp, synthetic construct; identical to SEQ ID NO: 44930
  source 1..120: mol_type = other DNA

SEQ ID NO: 74885 - DNA, 120 bp, synthetic construct; identical to SEQ ID NO: 44931
  source 1..120: mol_type = other DNA

SEQ ID NO: 74886 - DNA, 120 bp, synthetic construct; identical to SEQ ID NO: 12687
  source 1..120: mol_type = other DNA

SEQ ID NO: 74887 - DNA, 120 bp, synthetic construct; identical to SEQ ID NO: 44933
  source 1..120: mol_type = other DNA

SEQ ID NO: 74888 - DNA, 120 bp, synthetic construct; identical to SEQ ID NO: 44934
  source 1..120: mol_type = other DNA

SEQ ID NO: 74889 - DNA, 120 bp, synthetic construct; identical to SEQ ID NO: 44935
  source 1..120: mol_type = other DNA

SEQ ID NO: 74890 - DNA, 120 bp, synthetic construct; identical to SEQ ID NO: 12688
  source 1..120: mol_type = other DNA

SEQ ID NO: 74891 - DNA, 120 bp, synthetic construct; identical to SEQ ID NO: 44937
  source 1..120: mol_type = other DNA

SEQ ID NO: 74892 - DNA, 120 bp, synthetic construct; identical to SEQ ID NO: 44938
  source 1..120: mol_type = other DNA

SEQ ID NO: 74893 - DNA, 120 bp, synthetic construct; identical to SEQ ID NO: 12689
  source 1..120: mol_type = other DNA

SEQ ID NO: 74894 - DNA, 120 bp, synthetic construct; identical to SEQ ID NO: 44940
  source 1..120: mol_type = other DNA

SEQ ID NO: 74895 - DNA, 120 bp, synthetic construct; identical to SEQ ID NO: 44941
  source 1..120: mol_type = other DNA

SEQ ID NO: 74896 - DNA, 120 bp, synthetic construct; identical to SEQ ID NO: 44942
  source 1..120: mol_type = other DNA

SEQ ID NO: 74897 - DNA, 120 bp, synthetic construct; identical to SEQ ID NO: 44943
  source 1..120: mol_type = other DNA

SEQ ID NO: 74898 - DNA, 120 bp, synthetic construct; identical to SEQ ID NO: 12690
  source 1..120: mol_type = other DNA

SEQ ID NO: 74899 - DNA, 120 bp, synthetic construct; identical to SEQ ID NO: 44945
  source 1..120: mol_type = other DNA

SEQ ID NO: 74900 - DNA, 120 bp, synthetic construct; identical to SEQ ID NO: 44946
  source 1..120: mol_type = other DNA

SEQ ID NO: 74901 - DNA, 120 bp, synthetic construct; identical to SEQ ID NO: 44947
  source 1..120: mol_type = other DNA

SEQ ID NO: 74902 - DNA, 120 bp, synthetic construct; identical to SEQ ID NO: 12691
  source 1..120: mol_type = other DNA

SEQ ID NO: 74903 - DNA, 120 bp, synthetic construct; identical to SEQ ID NO: 44949
  source 1..120: mol_type = other DNA

SEQ ID NO: 74904 - DNA, 120 bp, synthetic construct; identical to SEQ ID NO: 44950
  source 1..120: mol_type = other DNA

SEQ ID NO: 74905 - DNA, 120 bp, synthetic construct; identical to SEQ ID NO: 44951
  source 1..120: mol_type = other DNA

SEQ ID NO: 74906 - DNA, 120 bp, synthetic construct; identical to SEQ ID NO: 12692
  source 1..120: mol_type = other DNA

SEQ ID NO: 74907 - DNA, 120 bp, synthetic construct; identical to SEQ ID NO: 44953
  source 1..120: mol_type = other DNA

SEQ ID NO: 74908 - DNA, 120 bp, synthetic construct; identical to SEQ ID NO: 44954
  source 1..120: mol_type = other DNA

SEQ ID NO: 74909 - DNA, 120 bp, synthetic construct; identical to SEQ ID NO: 44955
  source 1..120: mol_type = other DNA

SEQ ID NO: 74910 - DNA, 120 bp, synthetic construct; identical to SEQ ID NO: 12693
  source 1..120: mol_type = other DNA

SEQ ID NO: 74911 - DNA, 120 bp, synthetic construct; identical to SEQ ID NO: 44957
  source 1..120: mol_type = other DNA

SEQ ID NO: 74912 - DNA, 120 bp, synthetic construct; identical to SEQ ID NO: 44958
  source 1..120: mol_type = other DNA

SEQ ID NO: 74913 - DNA, 120 bp, synthetic construct; identical to SEQ ID NO: 44959
  source 1..120: mol_type = other DNA

SEQ ID NO: 74914 - DNA, 120 bp, synthetic construct; identical to SEQ ID NO: 44960
  source 1..120: mol_type = other DNA

SEQ ID NO: 74915 - DNA, 120 bp, synthetic construct; identical to SEQ ID NO: 12694
  source 1..120: mol_type = other DNA

SEQ ID NO: 74916 - DNA, 120 bp, synthetic construct; identical to SEQ ID NO: 44962
  source 1..120: mol_type = other DNA

SEQ ID NO: 74917 - DNA, 120 bp, synthetic construct; identical to SEQ ID NO: 44963
  source 1..120: mol_type = other DNA

SEQ ID NO: 74918 - DNA, 120 bp, synthetic construct; identical to SEQ ID NO: 44964
  source 1..120: mol_type = other DNA

SEQ ID NO: 74919 - DNA, 120 bp, synthetic construct; identical to SEQ ID NO: 12695
  source 1..120: mol_type = other DNA

SEQ ID NO: 74920 - DNA, 120 bp, synthetic construct; identical to SEQ ID NO: 44966
  source 1..120: mol_type = other DNA

SEQ ID NO: 74921 - DNA, 120 bp, synthetic construct; identical to SEQ ID NO: 44967
  source 1..120: mol_type = other DNA

SEQ ID NO: 74922 - DNA, 120 bp, synthetic construct; identical to SEQ ID NO: 44968
  source 1..120: mol_type = other DNA

SEQ ID NO: 74923 - DNA, 120 bp, synthetic construct; identical to SEQ ID NO: 12696
  source 1..120: mol_type = other DNA

SEQ ID NO: 74924 - DNA, 120 bp, synthetic construct; identical to SEQ ID NO: 44970
  source 1..120: mol_type = other DNA

SEQ ID NO: 74925 - DNA, 120 bp, synthetic construct; identical to SEQ ID NO: 44971
  source 1..120: mol_type = other DNA

SEQ ID NO: 74926 - DNA, 120 bp, synthetic construct; identical to SEQ ID NO: 12697
  source 1..120: mol_type = other DNA

SEQ ID NO: 74927 - DNA, 120 bp, synthetic construct; identical to SEQ ID NO: 44973
  source 1..120: mol_type = other DNA

SEQ ID NO: 74928 - DNA, 120 bp, synthetic construct; identical to SEQ ID NO: 44974
  source 1..120: mol_type = other DNA

SEQ ID NO: 74929 - DNA, 120 bp, synthetic construct; identical to SEQ ID NO: 44975
  source 1..120: mol_type = other DNA

SEQ ID NO: 74930 - DNA, 120 bp, synthetic construct; identical to SEQ ID NO: 44976
  source 1..120: mol_type = other DNA

SEQ ID NO: 74931 - DNA, 120 bp, synthetic construct; identical to SEQ ID NO: 12698
  source 1..120: mol_type = other DNA

SEQ ID NO: 74932 - DNA, 120 bp, synthetic construct; identical to SEQ ID NO: 44978
  source 1..120: mol_type = other DNA

SEQ ID NO: 74933 - DNA, 120 bp, synthetic construct; identical to SEQ ID NO: 44979
  source 1..120: mol_type = other DNA

SEQ ID NO: 74934 - DNA, 120 bp, synthetic construct; identical to SEQ ID NO: 44980
  source 1..120: mol_type = other DNA

SEQ ID NO: 74935 - DNA, 120 bp, synthetic construct; identical to SEQ ID NO: 12699
  source 1..120: mol_type = other DNA

SEQ ID NO: 74936 - DNA, 120 bp, synthetic construct; identical to SEQ ID NO: 44982
  source 1..120: mol_type = other DNA

SEQ ID NO: 74937 - DNA, 120 bp, synthetic construct; identical to SEQ ID NO: 44983
  source 1..120: mol_type = other DNA

SEQ ID NO: 74938 - DNA, 120 bp, synthetic construct; identical to SEQ ID NO: 44984
  source 1..120: mol_type = other DNA

SEQ ID NO: 74939 - DNA, 120 bp, synthetic construct; identical to SEQ ID NO: 12700
  source 1..120: mol_type = other DNA

SEQ ID NO: 74940 - DNA, 120 bp, synthetic construct; identical to SEQ ID NO: 44986
  source 1..120: mol_type = other DNA

SEQ ID NO: 74941 - DNA, 120 bp, synthetic construct; identical to SEQ ID NO: 44987
  source 1..120: mol_type = other DNA

SEQ ID NO: 74942 - DNA, 120 bp, synthetic construct; identical to SEQ ID NO: 12701
  source 1..120: mol_type = other DNA

SEQ ID NO: 74943 - DNA, 120 bp, synthetic construct; identical to SEQ ID NO: 44989
  source 1..120: mol_type = other DNA

SEQ ID NO: 74944 - DNA, 120 bp, synthetic construct; identical to SEQ ID NO: 44990
  source 1..120: mol_type = other DNA

SEQ ID NO: 74945 - DNA, 120 bp, synthetic construct; identical to SEQ ID NO: 44991
  source 1..120: mol_type = other DNA

SEQ ID NO: 74946 - DNA, 120 bp, synthetic construct; identical to SEQ ID NO: 44992
  source 1..120: mol_type = other DNA

SEQ ID NO: 74947 - DNA, 120 bp, synthetic construct; identical to SEQ ID NO: 12702
  source 1..120: mol_type = other DNA

SEQ ID NO: 74948 - DNA, 120 bp, synthetic construct; identical to SEQ ID NO: 44994
  source 1..120: mol_type = other DNA

SEQ ID NO: 74949 - DNA, 120 bp, synthetic construct; identical to SEQ ID NO: 44995
  source 1..120: mol_type = other DNA

SEQ ID NO: 74950 - DNA, 120 bp, synthetic construct; identical to SEQ ID NO: 12703
  source 1..120: mol_type = other DNA

SEQ ID NO: 74951 - DNA, 120 bp, synthetic construct; identical to SEQ ID NO: 44997
  source 1..120: mol_type = other DNA

SEQ ID NO: 74952 - DNA, 120 bp, synthetic construct; identical to SEQ ID NO: 44998
  source 1..120: mol_type = other DNA

SEQ ID NO: 74953 - DNA, 120 bp, synthetic construct; identical to SEQ ID NO: 44999
  source 1..120: mol_type = other DNA

SEQ ID NO: 74954 - DNA, 120 bp, synthetic construct; identical to SEQ ID NO: 45000
  source 1..120: mol_type = other DNA

SEQ ID NO: 74955 - DNA, 120 bp, synthetic construct; identical to SEQ ID NO: 12704
  source 1..120: mol_type = other DNA

SEQ ID NO: 74956 - DNA, 120 bp, synthetic construct; identical to SEQ ID NO: 45002
  source 1..120: mol_type = other DNA

SEQ ID NO: 74957 - DNA, 120 bp, synthetic construct; identical to SEQ ID NO: 45003
  source 1..120: mol_type = other DNA

SEQ ID NO: 74958 - DNA, 120 bp, synthetic construct; identical to SEQ ID NO: 12705
  source 1..120: mol_type = other DNA

SEQ ID NO: 74959 - DNA, 120 bp, synthetic construct; identical to SEQ ID NO: 45005
  source 1..120: mol_type = other DNA

SEQ ID NO: 74960 - DNA, 120 bp, synthetic construct; identical to SEQ ID NO: 45006
  source 1..120: mol_type = other DNA

SEQ ID NO: 74961 - DNA, 120 bp, synthetic construct; identical to SEQ ID NO: 45007
  source 1..120: mol_type = other DNA

SEQ ID NO: 74962 - DNA, 120 bp, synthetic construct; identical to SEQ ID NO: 12706
  source 1..120: mol_type = other DNA

SEQ ID NO: 74963 - DNA, 120 bp, synthetic construct; identical to SEQ ID NO: 45009
  source 1..120: mol_type = other DNA

SEQ ID NO: 74964 - DNA, 120 bp, synthetic construct; identical to SEQ ID NO: 45010
  source 1..120: mol_type = other DNA

SEQ ID NO: 74965 - DNA, 120 bp, synthetic construct; identical to SEQ ID NO: 45011
  source 1..120: mol_type = other DNA

SEQ ID NO: 74966 - DNA, 120 bp, synthetic construct; identical to SEQ ID NO: 45012
  source 1..120: mol_type = other DNA

SEQ ID NO: 74967 - DNA, 120 bp, synthetic construct; identical to SEQ ID NO: 12707
  source 1..120: mol_type = other DNA

SEQ ID NO: 74968 - DNA, 120 bp, synthetic construct; identical to SEQ ID NO: 45014
  source 1..120: mol_type = other DNA

SEQ ID NO: 74969 - DNA, 120 bp, synthetic construct; identical to SEQ ID NO: 45015
  source 1..120: mol_type = other DNA

SEQ ID NO: 74970 - DNA, 120 bp, synthetic construct; identical to SEQ ID NO: 45016
  source 1..120: mol_type = other DNA

SEQ ID NO: 74971 - DNA, 120 bp, synthetic construct; identical to SEQ ID NO: 12708
  source 1..120: mol_type = other DNA

SEQ ID NO: 74972 - DNA, 120 bp, synthetic construct; identical to SEQ ID NO: 45018
  source 1..120: mol_type = other DNA

SEQ ID NO: 74973 - DNA, 120 bp, synthetic construct; identical to SEQ ID NO: 45019
  source 1..120: mol_type = other DNA

SEQ ID NO: 74974 - DNA, 120 bp, synthetic construct; identical to SEQ ID NO: 45020
  source 1..120: mol_type = other DNA

SEQ ID NO: 74975 - DNA, 120 bp, synthetic construct; identical to SEQ ID NO: 12709
  source 1..120: mol_type = other DNA

SEQ ID NO: 74976 - DNA, 120 bp, synthetic construct; identical to SEQ ID NO: 45022
  source 1..120: mol_type = other DNA

SEQ ID NO: 74977 - DNA, 120 bp, synthetic construct; identical to SEQ ID NO: 45023
  source 1..120: mol_type = other DNA

SEQ ID NO: 74978 - DNA, 120 bp, synthetic construct; identical to SEQ ID NO: 12710
  source 1..120: mol_type = other DNA

SEQ ID NO: 74979 - DNA, 120 bp, synthetic construct; identical to SEQ ID NO: 45025
  source 1..120: mol_type = other DNA

SEQ ID NO: 74980 - DNA, 120 bp, synthetic construct; identical to SEQ ID NO: 45026
  source 1..120: mol_type = other DNA

SEQ ID NO: 74981 - DNA, 120 bp, synthetic construct; identical to SEQ ID NO: 45027
  source 1..120: mol_type = other DNA

SEQ ID NO: 74982 - DNA, 120 bp, synthetic construct; identical to SEQ ID NO: 45028
  source 1..120: mol_type = other DNA

SEQ ID NO: 74983 - DNA, 120 bp, synthetic construct; identical to SEQ ID NO: 12711
  source 1..120: mol_type = other DNA

SEQ ID NO: 74984 - DNA, 120 bp, synthetic construct; identical to SEQ ID NO: 45030
  source 1..120: mol_type = other DNA

SEQ ID NO: 74985 - DNA, 120 bp, synthetic construct; identical to SEQ ID NO: 45031
  source 1..120: mol_type = other DNA

SEQ ID NO: 74986 - DNA, 120 bp, synthetic construct; identical to SEQ ID NO: 12712
  source 1..120: mol_type = other DNA

SEQ ID NO: 74987 - DNA, 120 bp, synthetic construct; identical to SEQ ID NO: 45033
  source 1..120: mol_type = other DNA

SEQ ID NO: 74988 - DNA, 120 bp, synthetic construct; identical to SEQ ID NO: 45034
  source 1..120: mol_type = other DNA

SEQ ID NO: 74989 - DNA, 120 bp, synthetic construct; identical to SEQ ID NO: 45035
  source 1..120: mol_type = other DNA

SEQ ID NO: 74990 - DNA, 120 bp, synthetic construct; identical to SEQ ID NO: 45036
  source 1..120: mol_type = other DNA

SEQ ID NO: 74991 - DNA, 120 bp, synthetic construct; identical to SEQ ID NO: 12713
  source 1..120: mol_type = other DNA

SEQ ID NO: 74992 - DNA, 120 bp, synthetic construct; identical to SEQ ID NO: 45038
  source 1..120: mol_type = other DNA

SEQ ID NO: 74993 - DNA, 120 bp, synthetic construct; identical to SEQ ID NO: 45039
  source 1..120: mol_type = other DNA

SEQ ID NO: 74994 - DNA, 120 bp, synthetic construct; identical to SEQ ID NO: 12714
  source 1..120: mol_type = other DNA

SEQ ID NO: 74995 - DNA, 120 bp, synthetic construct; identical to SEQ ID NO: 45041
  source 1..120: mol_type = other DNA

SEQ ID NO: 74996 - DNA, 120 bp, synthetic construct; identical to SEQ ID NO: 45042
  source 1..120: mol_type = other DNA

SEQ ID NO: 74997 - DNA, 120 bp, synthetic construct; identical to SEQ ID NO: 45043
  source 1..120: mol_type = other DNA

SEQ ID NO: 74998 - DNA, 120 bp, synthetic construct; identical to SEQ ID NO: 45044
  source 1..120: mol_type = other DNA

SEQ ID NO: 74999 - DNA, 120 bp, synthetic construct; identical to SEQ ID NO: 12715
  source 1..120: mol_type = other DNA

SEQ ID NO: 75000 - DNA, 120 bp, synthetic construct; identical to SEQ ID NO: 45046
  source 1..120: mol_type = other DNA

SEQ ID NO: 75001 - DNA, 120 bp, synthetic construct; identical to SEQ ID NO: 45047
  source 1..120: mol_type = other DNA

SEQ ID NO: 75002 - DNA, 120 bp, synthetic construct; identical to SEQ ID NO: 12716
  source 1..120: mol_type = other DNA

SEQ ID NO: 75003 - DNA, 120 bp, synthetic construct; identical to SEQ ID NO: 45049
  source 1..120: mol_type = other DNA

SEQ ID NO: 75004 - DNA, 120 bp, synthetic construct; identical to SEQ ID NO: 45050
  source 1..120: mol_type = other DNA

SEQ ID NO: 75005 - DNA, 120 bp, synthetic construct; identical to SEQ ID NO: 45051
  source 1..120: mol_type = other DNA

SEQ ID NO: 75006 - DNA, 120 bp, synthetic construct; identical to SEQ ID NO: 45052
  source 1..120: mol_type = other DNA

SEQ ID NO: 75007 - DNA, 120 bp, synthetic construct; identical to SEQ ID NO: 12717
  source 1..120: mol_type = other DNA

SEQ ID NO: 75008 - DNA, 120 bp, synthetic construct; identical to SEQ ID NO: 45054
  source 1..120: mol_type = other DNA

SEQ ID NO: 75009 - DNA, 120 bp, synthetic construct; identical to SEQ ID NO: 45055
  source 1..120: mol_type = other DNA

SEQ ID NO: 75010 - DNA, 120 bp, synthetic construct; identical to SEQ ID NO: 12718
  source 1..120: mol_type = other DNA

SEQ ID NO: 75011 - DNA, 120 bp, synthetic construct; identical to SEQ ID NO: 45057
  source 1..120: mol_type = other DNA

SEQ ID NO: 75012 - DNA, 120 bp, synthetic construct; identical to SEQ ID NO: 45058
  source 1..120: mol_type = other DNA

SEQ ID NO: 75013 - DNA, 120 bp, synthetic construct; identical to SEQ ID NO: 45059
  source 1..120: mol_type = other DNA

SEQ ID NO: 75014 - DNA, 120 bp, synthetic construct; identical to SEQ ID NO: 12719
  source 1..120: mol_type = other DNA

SEQ ID NO: 75015 - DNA, 120 bp, synthetic construct; identical to SEQ ID NO: 45061
  source 1..120: mol_type = other DNA

SEQ ID NO: 75016 - DNA, 120 bp, synthetic construct; identical to SEQ ID NO: 45062
  source 1..120: mol_type = other DNA

SEQ ID NO: 75017 - DNA, 120 bp, synthetic construct; identical to SEQ ID NO: 45063
  source 1..120: mol_type = other DNA

SEQ ID NO: 75018 - DNA, 120 bp, synthetic construct; identical to SEQ ID NO: 45064
  source 1..120: mol_type = other DNA

SEQ ID NO: 75019 - DNA, 120 bp, synthetic construct; identical to SEQ ID NO: 5347
  source 1..120: mol_type = other DNA

SEQ ID NO: 75020 - DNA, 120 bp, synthetic construct; identical to SEQ ID NO: 45066
  source 1..120: mol_type = other DNA

SEQ ID NO: 75021 - DNA, 120 bp, synthetic construct; identical to SEQ ID NO: 45067
  source 1..120: mol_type = other DNA

SEQ ID NO: 75022 - DNA, 120 bp, synthetic construct; identical to SEQ ID NO: 12721
  source 1..120: mol_type = other DNA

SEQ ID NO: 75023 - DNA, 120 bp, synthetic construct; identical to SEQ ID NO: 45069
  source 1..120: mol_type = other DNA

SEQ ID NO: 75024 - DNA, 120 bp, synthetic construct; identical to SEQ ID NO: 45070
  source 1..120: mol_type = other DNA

SEQ ID NO: 75025 - DNA, 120 bp, synthetic construct; identical to SEQ ID NO: 45071
  source 1..120: mol_type = other DNA

SEQ ID NO: 75026 - DNA, 120 bp, synthetic construct; identical to SEQ ID NO: 12722
  source 1..120: mol_type = other DNA

SEQ ID NO: 75027 - DNA, 120 bp, synthetic construct; identical to SEQ ID NO: 45073
  source 1..120: mol_type = other DNA

SEQ ID NO: 75028 - DNA, 120 bp, synthetic construct; identical to SEQ ID NO: 45074
  source 1..120: mol_type = other DNA

SEQ ID NO: 75029 - DNA, 120 bp, synthetic construct; identical to SEQ ID NO: 45075
  source 1..120: mol_type = other DNA

SEQ ID NO: 75030 - DNA, 120 bp, synthetic construct; identical to SEQ ID NO: 45076
  source 1..120: mol_type = other DNA

SEQ ID NO: 75031 - DNA, 120 bp, synthetic construct; identical to SEQ ID NO: 12723
  source 1..120: mol_type = other DNA

SEQ ID NO: 75032 - DNA, 120 bp, synthetic construct; identical to SEQ ID NO: 45078
  source 1..120: mol_type = other DNA

SEQ ID NO: 75033 - DNA, 120 bp, synthetic construct; identical to SEQ ID NO: 45079
  source 1..120: mol_type = other DNA

SEQ ID NO: 75034 - DNA, 120 bp, synthetic construct; identical to SEQ ID NO: 45080
  source 1..120: mol_type = other DNA

SEQ ID NO: 75035 - DNA, 120 bp, synthetic construct; identical to SEQ ID NO: 12724
  source 1..120: mol_type = other DNA

SEQ ID NO: 75036 - DNA, 120 bp, synthetic construct; identical to SEQ ID NO: 45082
  source 1..120: mol_type = other DNA

SEQ ID NO: 75037 - DNA, 120 bp, synthetic construct; identical to SEQ ID NO: 45083
  source 1..120: mol_type = other DNA

SEQ ID NO: 75038 - DNA, 120 bp, synthetic construct; identical to SEQ ID NO: 12725
  source 1..120: mol_type = other DNA

SEQ ID NO: 75039 - DNA, 120 bp, synthetic construct; identical to SEQ ID NO: 45085
  source 1..120: mol_type = other DNA

SEQ ID NO: 75040 - DNA, 120 bp, synthetic construct; identical to SEQ ID NO: 45086
  source 1..120: mol_type = other DNA

SEQ ID NO: 75041 - DNA, 120 bp, synthetic construct; identical to SEQ ID NO: 45087
  source 1..120: mol_type = other DNA

SEQ ID NO: 75042 - DNA, 120 bp, synthetic construct; identical to SEQ ID NO: 12726
  source 1..120: mol_type = other DNA

SEQ ID NO: 75043 - DNA, 120 bp, synthetic construct; identical to SEQ ID NO: 45089
  source 1..120: mol_type = other DNA

SEQ ID NO: 75044 - DNA, 120 bp, synthetic construct; identical to SEQ ID NO: 45090
  source 1..120: mol_type = other DNA

SEQ ID NO: 75045 - DNA, 120 bp, synthetic construct; identical to SEQ ID NO: 45091
  source 1..120: mol_type = other DNA

SEQ ID NO: 75046 - DNA, 120 bp, synthetic construct; identical to SEQ ID NO: 12727
  source 1..120: mol_type = other DNA

SEQ ID NO: 75047 - DNA, 120 bp, synthetic construct; identical to SEQ ID NO: 45093
  source 1..120: mol_type = other DNA

SEQ ID NO: 75048 - DNA, 120 bp, synthetic construct; identical to SEQ ID NO: 45094
  source 1..120: mol_type = other DNA

SEQ ID NO: 75049 - DNA, 120 bp, synthetic construct; identical to SEQ ID NO: 45095
  source 1..120: mol_type = other DNA

SEQ ID NO: 75050 - DNA, 120 bp, synthetic construct; identical to SEQ ID NO: 12728
  source 1..120: mol_type = other DNA

SEQ ID NO: 75051 - DNA, 120 bp, synthetic construct; identical to SEQ ID NO: 45097
  source 1..120: mol_type = other DNA

SEQ ID NO: 75052 - DNA, 120 bp, synthetic construct; identical to SEQ ID NO: 45098
  source 1..120: mol_type = other DNA

SEQ ID NO: 75053 - DNA, 120 bp, synthetic construct; identical to SEQ ID NO: 45099
  source 1..120: mol_type = other DNA

SEQ ID NO: 75054 - DNA, 120 bp, synthetic construct; identical to SEQ ID NO: 45100
  source 1..120: mol_type = other DNA

SEQ ID NO: 75055 - DNA, 120 bp, synthetic construct; identical to SEQ ID NO: 12729
  source 1..120: mol_type = other DNA

SEQ ID NO: 75056 - DNA, 120 bp, synthetic construct; identical to SEQ ID NO: 45102
  source 1..120: mol_type = other DNA

SEQ ID NO: 75057 - DNA, 120 bp, synthetic construct; identical to SEQ ID NO: 45103
  source 1..120: mol_type = other DNA

SEQ ID NO: 75058 - DNA, 120 bp, synthetic construct; identical to SEQ ID NO: 45104
  source 1..120: mol_type = other DNA

SEQ ID NO: 75059 - DNA, 120 bp, synthetic construct; identical to SEQ ID NO: 12730
  source 1..120: mol_type = other DNA

SEQ ID NO: 75060 - DNA, 120 bp, synthetic construct; identical to SEQ ID NO: 45106
  source 1..120: mol_type = other DNA

SEQ ID NO: 75061 - DNA, 120 bp, synthetic construct; identical to SEQ ID NO: 45107
  source 1..120: mol_type = other DNA

SEQ ID NO: 75062 - DNA, 120 bp, synthetic construct; identical to SEQ ID NO: 45108
  source 1..120: mol_type = other DNA

SEQ ID NO: 75063 - DNA, 120 bp, synthetic construct; identical to SEQ ID NO: 12731
  source 1..120: mol_type = other DNA

SEQ ID NO: 75064 - DNA, 120 bp, synthetic construct; identical to SEQ ID NO: 45110
  source 1..120: mol_type = other DNA

SEQ ID NO: 75065 - DNA, 120 bp, synthetic construct; identical to SEQ ID NO: 45111
  source 1..120: mol_type = other DNA

SEQ ID NO: 75066 - DNA, 120 bp, synthetic construct; identical to SEQ ID NO: 45112
  source 1..120: mol_type = other DNA

SEQ ID NO: 75067 - DNA, 120 bp, synthetic construct; identical to SEQ ID NO: 12732
  source 1..120: mol_type = other DNA

SEQ ID NO: 75068 - DNA, 120 bp, synthetic construct; identical to SEQ ID NO: 45114
  source 1..120: mol_type = other DNA

SEQ ID NO: 75069 - DNA, 120 bp, synthetic construct; identical to SEQ ID NO: 45115
  source 1..120: mol_type = other DNA

SEQ ID NO: 75070 - DNA, 120 bp, synthetic construct; identical to SEQ ID NO: 12733
  source 1..120: mol_type = other DNA

SEQ ID NO: 75071 - DNA, 120 bp, synthetic construct; identical to SEQ ID NO: 45117
  source 1..120: mol_type = other DNA

SEQ ID NO: 75072 - DNA, 120 bp, synthetic construct; identical to SEQ ID NO: 45118
  source 1..120: mol_type = other DNA

SEQ ID NO: 75073 - DNA, 120 bp, synthetic construct; identical to SEQ ID NO: 45119
  source 1..120: mol_type = other DNA

SEQ ID NO: 75074 - DNA, 120 bp, synthetic construct; identical to SEQ ID NO: 12734
  source 1..120: mol_type = other DNA

SEQ ID NO: 75075 - DNA, 120 bp, synthetic construct; identical to SEQ ID NO: 45121
  source 1..120: mol_type = other DNA

SEQ ID NO: 75076 - DNA, 120 bp, synthetic construct; identical to SEQ ID NO: 45122
  source 1..120: mol_type = other DNA

SEQ ID NO: 75077 - DNA, 120 bp, synthetic construct; identical to SEQ ID NO: 45123
  source 1..120: mol_type = other DNA

SEQ ID NO: 75078 - DNA, 120 bp, synthetic construct; identical to SEQ ID NO: 45124
  source 1..120: mol_type = other DNA

SEQ ID NO: 75079 - DNA, 120 bp, synthetic construct; identical to SEQ ID NO: 12735
  source 1..120: mol_type = other DNA

SEQ ID NO: 75080 - DNA, 120 bp, synthetic construct; identical to SEQ ID NO: 45126
  source 1..120: mol_type = other DNA

SEQ ID NO: 75081 - DNA, 120 bp, synthetic construct; identical to SEQ ID NO: 45127
  source 1..120: mol_type = other DNA

SEQ ID NO: 75082 - DNA, 120 bp, synthetic construct; identical to SEQ ID NO: 12736
  source 1..120: mol_type = other DNA

SEQ ID NO: 75083 - DNA, 120 bp, synthetic construct; identical to SEQ ID NO: 45129
  source 1..120: mol_type = other DNA

SEQ ID NO: 75084 - DNA, 120 bp, synthetic construct; identical to SEQ ID NO: 45130
  source 1..120: mol_type = other DNA

SEQ ID NO: 75085 - DNA, 120 bp, synthetic construct; identical to SEQ ID NO: 45131
  source 1..120: mol_type = other DNA

SEQ ID NO: 75086 - DNA, 120 bp, synthetic construct; identical to SEQ ID NO: 12737
  source 1..120: mol_type = other DNA

SEQ ID NO: 75087 - DNA, 120 bp, synthetic construct; identical to SEQ ID NO: 45133
  source 1..120: mol_type = other DNA

SEQ ID NO: 75088 - DNA, 120 bp, synthetic construct; identical to SEQ ID NO: 45134
  source 1..120: mol_type = other DNA

SEQ ID NO: 75089 - DNA, 120 bp, synthetic construct; identical to SEQ ID NO: 45135
  source 1..120: mol_type = other DNA

SEQ ID NO: 75090 - DNA, 120 bp, synthetic construct; identical to SEQ ID NO: 45136
  source 1..120: mol_type = other DNA

SEQ ID NO: 75091 - DNA, 120 bp, synthetic construct; identical to SEQ ID NO: 12738
  source 1..120: mol_type = other DNA

SEQ ID NO: 75092 - DNA, 120 bp, synthetic construct; identical to SEQ ID NO: 45138
  source 1..120: mol_type = other DNA

SEQ ID NO: 75093 - DNA, 120 bp, synthetic construct; identical to SEQ ID NO: 45139
  source 1..120: mol_type = other DNA

SEQ ID NO: 75094 - DNA, 120 bp, synthetic construct; identical to SEQ ID NO: 12739
  source 1..120: mol_type = other DNA

SEQ ID NO: 75095 - DNA, 120 bp, synthetic construct; identical to SEQ ID NO: 45141
  source 1..120: mol_type = other DNA

SEQ ID NO: 75096 - DNA, 120 bp, synthetic construct; identical to SEQ ID NO: 45142
  source 1..120: mol_type = other DNA

SEQ ID NO: 75097 - DNA, 120 bp, synthetic construct; identical to SEQ ID NO: 45143
  source 1..120: mol_type = other DNA

SEQ ID NO: 75098 - DNA, 120 bp, synthetic construct; identical to SEQ ID NO: 45144
  source 1..120: mol_type = other DNA

SEQ ID NO: 75099 - DNA, 120 bp, synthetic construct; identical to SEQ ID NO: 12740
  source 1..120: mol_type = other DNA

SEQ ID NO: 75100 - DNA, 120 bp, synthetic construct; identical to SEQ ID NO: 45146
  source 1..120: mol_type = other DNA

SEQ ID NO: 75101 - DNA, 120 bp, synthetic construct; identical to SEQ ID NO: 45147
  source 1..120: mol_type = other DNA

SEQ ID NO: 75102 - DNA, 120 bp, synthetic construct; identical to SEQ ID NO: 12741
  source 1..120: mol_type = other DNA

SEQ ID NO: 75103 - DNA, 120 bp, synthetic construct; identical to SEQ ID NO: 45149
  source 1..120: mol_type = other DNA

SEQ ID NO: 75104 - DNA, 120 bp, synthetic construct; identical to SEQ ID NO: 45150
  source 1..120: mol_type = other DNA

SEQ ID NO: 75105 - DNA, 120 bp, synthetic construct; identical to SEQ ID NO: 45151
  source 1..120: mol_type = other DNA

SEQ ID NO: 75106 - DNA, 120 bp, synthetic construct; identical to SEQ ID NO: 45152
  source 1..120: mol_type = other DNA

SEQ ID NO: 75107 - DNA, 120 bp, synthetic construct; identical to SEQ ID NO: 12742
  source 1..120: mol_type = other DNA

SEQ ID NO: 75108 - DNA, 120 bp, synthetic construct; identical to SEQ ID NO: 45154
  source 1..120: mol_type = other DNA

SEQ ID NO: 75109 - DNA, 120 bp, synthetic construct; identical to SEQ ID NO: 45155
  source 1..120: mol_type = other DNA

SEQ ID NO: 75110 - DNA, 120 bp, synthetic construct; identical to SEQ ID NO: 12743
  source 1..120: mol_type = other DNA

SEQ ID NO: 75111 - DNA, 120 bp, synthetic construct; identical to SEQ ID NO: 45157
  source 1..120: mol_type = other DNA

SEQ ID NO: 75112 - DNA, 120 bp, synthetic construct; identical to SEQ ID NO: 45158
  source 1..120: mol_type = other DNA

SEQ ID NO: 75113 - DNA, 120 bp, synthetic construct; identical to SEQ ID NO: 45159
  source 1..120: mol_type = other DNA

SEQ ID NO: 75114 - DNA, 120 bp, synthetic construct; identical to SEQ ID NO: 12744
  source 1..120: mol_type = other DNA

SEQ ID NO: 75115 - DNA, 120 bp, synthetic construct; identical to SEQ ID NO: 45161
  source 1..120: mol_type = other DNA

SEQ ID NO: 75116 - DNA, 120 bp, synthetic construct; identical to SEQ ID NO: 45162
  source 1..120: mol_type = other DNA

SEQ ID NO: 75117 - DNA, 120 bp, synthetic construct; identical to SEQ ID NO: 45163
  source 1..120: mol_type = other DNA

SEQ ID NO: 75118 - DNA, 120 bp, synthetic construct; identical to SEQ ID NO: 45164
  source 1..120: mol_type = other DNA

SEQ ID NO: 75119 - DNA, 120 bp, synthetic construct; identical to SEQ ID NO: 12745
  source 1..120: mol_type = other DNA

SEQ ID NO: 75120 - DNA, 120 bp, synthetic construct; identical to SEQ ID NO: 45166
  source 1..120: mol_type = other DNA

SEQ ID NO: 75121 - DNA, 120 bp, synthetic construct; identical to SEQ ID NO: 45167
  source 1..120: mol_type = other DNA

SEQ ID NO: 75122 - DNA, 120 bp, synthetic construct; identical to SEQ ID NO: 12746
  source 1..120: mol_type = other DNA

SEQ ID NO: 75123 - DNA, 120 bp, synthetic construct; identical to SEQ ID NO: 45169
  source 1..120: mol_type = other DNA

SEQ ID NO: 75124 - DNA, 120 bp, synthetic construct; identical to SEQ ID NO: 45170
  source 1..120: mol_type = other DNA

SEQ ID NO: 75125 - DNA, 120 bp, synthetic construct; identical to SEQ ID NO: 45171
  source 1..120: mol_type = other DNA

SEQ ID NO: 75126 - DNA, 120 bp, synthetic construct; identical to SEQ ID NO: 45172
  source 1..120: mol_type = other DNA

SEQ ID NO: 75127 - DNA, 120 bp, synthetic construct; identical to SEQ ID NO: 12747
  source 1..120: mol_type = other DNA

SEQ ID NO: 75128 - DNA, 120 bp, synthetic construct; identical to SEQ ID NO: 45174
  source 1..120: mol_type = other DNA

SEQ ID NO: 75129 - DNA, 120 bp, synthetic construct; identical to SEQ ID NO: 45175
  source 1..120: mol_type = other DNA

SEQ ID NO: 75130 - DNA, 120 bp, synthetic construct; identical to SEQ ID NO: 12748
  source 1..120: mol_type = other DNA

SEQ ID NO: 75131 - DNA, 120 bp, synthetic construct; identical to SEQ ID NO: 45177
  source 1..120: mol_type = other DNA

SEQ ID NO: 75132 - DNA, 120 bp, synthetic construct; identical to SEQ ID NO: 12749
  source 1..120: mol_type = other DNA

SEQ ID NO: 75133 - DNA, 120 bp, synthetic construct; identical to SEQ ID NO: 45179
  source 1..120: mol_type = other DNA

SEQ ID NO: 75134 - DNA, 120 bp, synthetic construct; identical to SEQ ID NO: 45180
  source 1..120: mol_type = other DNA

SEQ ID NO: 75135 - DNA, 120 bp, synthetic construct; identical to SEQ ID NO: 12750
  source 1..120: mol_type = other DNA

SEQ ID NO: 75136 - DNA, 120 bp, synthetic construct; identical to SEQ ID NO: 45182
  source 1..120: mol_type = other DNA

SEQ ID NO: 75137 - DNA, 120 bp, synthetic construct; identical to SEQ ID NO: 12751
  source 1..120: mol_type = other DNA

SEQ ID NO: 75138 - DNA, 120 bp, synthetic construct; identical to SEQ ID NO: 45184
  source 1..120: mol_type = other DNA

SEQ ID NO: 75139 - DNA, 120 bp, synthetic construct; identical to SEQ ID NO: 45185
  source 1..120: mol_type = other DNA

SEQ ID NO: 75140 - DNA, 120 bp, synthetic construct; identical to SEQ ID NO: 45186
  source 1..120: mol_type = other DNA

SEQ ID NO: 75141 - DNA, 120 bp, synthetic construct; identical to SEQ ID NO: 12752
  source 1..120: mol_type = other DNA

SEQ ID NO: 75142 - DNA, 120 bp, synthetic construct; identical to SEQ ID NO: 45188
  source 1..120: mol_type = other DNA

SEQ ID NO: 75143 - DNA, 120 bp, synthetic construct; identical to SEQ ID NO: 45189
  source 1..120: mol_type = other DNA

SEQ ID NO: 75144 - DNA, 120 bp, synthetic construct; identical to SEQ ID NO: 45190
  source 1..120: mol_type = other DNA

SEQ ID NO: 75145 - DNA, 120 bp, synthetic construct; identical to SEQ ID NO: 12753
  source 1..120: mol_type = other DNA

SEQ ID NO: 75146 - DNA, 120 bp, synthetic construct; identical to SEQ ID NO: 45192
  source 1..120: mol_type = other DNA

SEQ ID NO: 75147 - DNA, 120 bp, synthetic construct; identical to SEQ ID NO: 45193
  source 1..120: mol_type = other DNA

SEQ ID NO: 75148 - DNA, 120 bp, synthetic construct; identical to SEQ ID NO: 12754
  source 1..120: mol_type = other DNA

SEQ ID NO: 75149 - DNA, 120 bp, synthetic construct; identical to SEQ ID NO: 45195
  source 1..120: mol_type = other DNA

SEQ ID NO: 75150 - DNA, 120 bp, synthetic construct; identical to SEQ ID NO: 45196
  source 1..120: mol_type = other DNA

SEQ ID NO: 75151 - DNA, 120 bp, synthetic construct; identical to SEQ ID NO: 45197
  source 1..120: mol_type = other DNA

SEQ ID NO: 75152 - DNA, 120 bp, synthetic construct; identical to SEQ ID NO: 12755
  source 1..120: mol_type = other DNA

SEQ ID NO: 75153 - DNA, 120 bp, synthetic construct; identical to SEQ ID NO: 45199
  source 1..120: mol_type = other DNA

SEQ ID NO: 75154 - DNA, 120 bp, synthetic construct; identical to SEQ ID NO: 45200
  source 1..120: mol_type = other DNA

SEQ ID NO: 75155 - DNA, 120 bp, synthetic construct; identical to SEQ ID NO: 45201
  source 1..120: mol_type = other DNA

SEQ ID NO: 75156 - DNA, 120 bp, synthetic construct; identical to SEQ ID NO: 45202
  source 1..120: mol_type = other DNA

SEQ ID NO: 75157 - DNA, 120 bp, synthetic construct; identical to SEQ ID NO: 12756
  source 1..120: mol_type = other DNA

SEQ ID NO: 75158 - DNA, 120 bp, synthetic construct; identical to SEQ ID NO: 45204
  source 1..120: mol_type = other DNA

SEQ ID NO: 75159 - DNA, 120 bp, synthetic construct; identical to SEQ ID NO: 45205
  source 1..120: mol_type = other DNA

SEQ ID NO: 75160 - DNA, 120 bp, synthetic construct; identical to SEQ ID NO: 45206
  source 1..120: mol_type = other DNA

SEQ ID NO: 75161 - DNA, 120 bp, synthetic construct; identical to SEQ ID NO: 12757
  source 1..120: mol_type = other DNA

SEQ ID NO: 75162 - DNA, 120 bp, synthetic construct; identical to SEQ ID NO: 45208
  source 1..120: mol_type = other DNA

SEQ ID NO: 75163 - DNA, 120 bp, synthetic construct; identical to SEQ ID NO: 45209
  source 1..120: mol_type = other DNA

SEQ ID NO: 75164 - DNA, 120 bp, synthetic construct; identical to SEQ ID NO: 12758
  source 1..120: mol_type = other DNA

SEQ ID NO: 75165 - DNA, 120 bp, synthetic construct; identical to SEQ ID NO: 45211
  source 1..120: mol_type = other DNA

SEQ ID NO: 75166 - DNA, 120 bp, synthetic construct; identical to SEQ ID NO: 45212
  source 1..120: mol_type = other DNA

SEQ ID NO: 75167 - DNA, 120 bp, synthetic construct; identical to SEQ ID NO: 45213
  source 1..120: mol_type = other DNA

SEQ ID NO: 75168 - DNA, 120 bp, synthetic construct; identical to SEQ ID NO: 12759
  source 1..120: mol_type = other DNA

SEQ ID NO: 75169 - DNA, 120 bp, synthetic construct; identical to SEQ ID NO: 45215
  source 1..120: mol_type = other DNA

SEQ ID NO: 75170 - DNA, 120 bp, synthetic construct; identical to SEQ ID NO: 45216
  source 1..120: mol_type = other DNA

SEQ ID NO: 75171 - DNA, 120 bp, synthetic construct; identical to SEQ ID NO: 45217
  source 1..120: mol_type = other DNA

SEQ ID NO: 75172 - DNA, 120 bp, synthetic construct; identical to SEQ ID NO: 12760
  source 1..120: mol_type = other DNA

SEQ ID NO: 75173 - DNA, 120 bp, synthetic construct; identical to SEQ ID NO: 45219
  source 1..120: mol_type = other DNA

SEQ ID NO: 75174 - DNA, 120 bp, synthetic construct; identical to SEQ ID NO: 45220
  source 1..120: mol_type = other DNA

SEQ ID NO: 75175 - DNA, 120 bp, synthetic construct; identical to SEQ ID NO: 45221
  source 1..120: mol_type = other DNA

SEQ ID NO: 75176 - DNA, 120 bp, synthetic construct; identical to SEQ ID NO: 45222
  source 1..120: mol_type = other DNA

SEQ ID NO: 75177 - DNA, 120 bp, synthetic construct; identical to SEQ ID NO: 12761
  source 1..120: mol_type = other DNA

SEQ ID NO: 75178 - DNA, 120 bp, synthetic construct; identical to SEQ ID NO: 45224
  source 1..120: mol_type = other DNA

SEQ ID NO: 75179 - DNA, 120 bp, synthetic construct; identical to SEQ ID NO: 45225
  source 1..120: mol_type = other DNA

SEQ ID NO: 75180 - DNA, 120 bp, synthetic construct; identical to SEQ ID NO: 45226
  source 1..120: mol_type = other DNA

SEQ ID NO: 75181 - DNA, 120 bp, synthetic construct; identical to SEQ ID NO: 12762
  source 1..120: mol_type = other DNA

SEQ ID NO: 75182 - DNA, 120 bp, synthetic construct; identical to SEQ ID NO: 45228
  source 1..120: mol_type = other DNA

SEQ ID NO: 75183 - DNA, 120 bp, synthetic construct; identical to SEQ ID NO: 45229
  source 1..120: mol_type = other DNA

SEQ ID NO: 75184 - DNA, 120 bp, synthetic construct; identical to SEQ ID NO: 12763
  source 1..120: mol_type = other DNA

SEQ ID NO: 75185 - DNA, 120 bp, synthetic construct; identical to SEQ ID NO: 45231
  source 1..120: mol_type = other DNA

SEQ ID NO: 75186 - DNA, 120 bp, synthetic construct; identical to SEQ ID NO: 45232
  source 1..120: mol_type = other DNA

SEQ ID NO: 75187 - DNA, 120 bp, synthetic construct; identical to SEQ ID NO: 45233
  source 1..120: mol_type = other DNA

SEQ ID NO: 75188 - DNA, 120 bp, synthetic construct; identical to SEQ ID NO: 45234
  source 1..120: mol_type = other DNA

SEQ ID NO: 75189 - DNA, 120 bp, synthetic construct; identical to SEQ ID NO: 12764
  source 1..120: mol_type = other DNA

SEQ ID NO: 75190 - DNA, 120 bp, synthetic construct; identical to SEQ ID NO: 45236
  source 1..120: mol_type = other DNA

SEQ ID NO: 75191 - DNA, 120 bp, synthetic construct; identical to SEQ ID NO: 45237
  source 1..120: mol_type = other DNA

SEQ ID NO: 75192 - DNA, 120 bp, synthetic construct; identical to SEQ ID NO: 45238
  source 1..120: mol_type = other DNA

SEQ ID NO: 75193 - DNA, 120 bp, synthetic construct; identical to SEQ ID NO: 12765
  source 1..120: mol_type = other DNA

SEQ ID NO: 75194 - DNA, 120 bp, synthetic construct; identical to SEQ ID NO: 45240
  source 1..120: mol_type = other DNA

SEQ ID NO: 75195 - DNA, 120 bp, synthetic construct; identical to SEQ ID NO: 45241
  source 1..120: mol_type = other DNA

SEQ ID NO: 75196 - DNA, 120 bp, synthetic construct; identical to SEQ ID NO: 12766
  source 1..120: mol_type = other DNA

SEQ ID NO: 75197 - DNA, 120 bp, synthetic construct; identical to SEQ ID NO: 45243
  source 1..120: mol_type = other DNA

SEQ ID NO: 75198 - DNA, 120 bp, synthetic construct; identical to SEQ ID NO: 45244
  source 1..120: mol_type = other DNA

SEQ ID NO: 75199 - DNA, 120 bp, synthetic construct; identical to SEQ ID NO: 45245
  source 1..120: mol_type = other DNA

SEQ ID NO: 75200 - DNA, 120 bp, synthetic construct; identical to SEQ ID NO: 12767
  source 1..120: mol_type = other DNA

SEQ ID NO: 75201 - DNA, 120 bp, synthetic construct; identical to SEQ ID NO: 45247
  source 1..120: mol_type = other DNA

SEQ ID NO: 75202 - DNA, 120 bp, synthetic construct; identical to SEQ ID NO: 45248
  source 1..120: mol_type = other DNA

SEQ ID NO: 75203 - DNA, 120 bp, synthetic construct; identical to SEQ ID NO: 45249
  source 1..120: mol_type = other DNA

SEQ ID NO: 75204 - DNA, 120 bp, synthetic construct; identical to SEQ ID NO: 12768
  source 1..120: mol_type = other DNA

SEQ ID NO: 75205 - DNA, 120 bp, synthetic construct; identical to SEQ ID NO: 45251
  source 1..120: mol_type = other DNA

SEQ ID NO: 75206 - DNA, 120 bp, synthetic construct; identical to SEQ ID NO: 45252
  source 1..120: mol_type = other DNA

SEQ ID NO: 75207 - DNA, 120 bp, synthetic construct; identical to SEQ ID NO: 12769
  source 1..120: mol_type = other DNA

SEQ ID NO: 75208 - DNA, 120 bp, synthetic construct; identical to SEQ ID NO: 45254
  source 1..120: mol_type = other DNA

SEQ ID NO: 75209 - DNA, 120 bp, synthetic construct; identical to SEQ ID NO: 12770
  source 1..120: mol_type = other DNA

SEQ ID NO: 75210 - DNA, 120 bp, synthetic construct; identical to SEQ ID NO: 45256
  source 1..120: mol_type = other DNA

SEQ ID NO: 75211 - DNA, 120 bp, synthetic construct; identical to SEQ ID NO: 45257
  source 1..120: mol_type = other DNA

SEQ ID NO: 75212 - DNA, 120 bp, synthetic construct; identical to SEQ ID NO: 12771
  source 1..120: mol_type = other DNA

SEQ ID NO: 75213 - DNA, 120 bp, synthetic construct; identical to SEQ ID NO: 45259
  source 1..120: mol_type = other DNA

SEQ ID NO: 75214 - DNA, 120 bp, synthetic construct; identical to SEQ ID NO: 12772
  source 1..120: mol_type = other DNA

SEQ ID NO: 75215 - DNA, 120 bp, synthetic construct; identical to SEQ ID NO: 45261
  source 1..120: mol_type = other DNA

SEQ ID NO: 75216 - DNA, 120 bp, synthetic construct; identical to SEQ ID NO: 45262
  source 1..120: mol_type = other DNA

SEQ ID NO: 75217 - DNA, 120 bp, synthetic construct; identical to SEQ ID NO: 12773
  source 1..120: mol_type = other DNA

SEQ ID NO: 75218 - DNA, 120 bp, synthetic construct; identical to SEQ ID NO: 45264
  source 1..120: mol_type = other DNA

SEQ ID NO: 75219 - DNA, 120 bp, synthetic construct; identical to SEQ ID NO: 45265
  source 1..120: mol_type = other DNA

SEQ ID NO: 75220 - DNA, 120 bp, synthetic construct; identical to SEQ ID NO: 45266
  source 1..120: mol_type = other DNA

SEQ ID NO: 75221 - DNA, 120 bp, synthetic construct; identical to SEQ ID NO: 12774
  source 1..120: mol_type = other DNA

SEQ ID NO: 75222 - DNA, 120 bp, synthetic construct; identical to SEQ ID NO: 45268
  source 1..120: mol_type = other DNA

SEQ ID NO: 75223 - DNA, 120 bp, synthetic construct; identical to SEQ ID NO: 45269
  source 1..120: mol_type = other DNA

SEQ ID NO: 75224 - DNA, 120 bp, synthetic construct; identical to SEQ ID NO: 12775
  source 1..120: mol_type = other DNA

SEQ ID NO: 75225 - DNA, 120 bp, synthetic construct; identical to SEQ ID NO: 45271
  source 1..120: mol_type = other DNA

SEQ ID NO: 75226 - DNA, 120 bp, synthetic construct; identical to SEQ ID NO: 45272
  source 1..120: mol_type = other DNA

SEQ ID NO: 75227 - DNA, 120 bp, synthetic construct; identical to SEQ ID NO: 45273
  source 1..120: mol_type = other DNA

SEQ ID NO: 75228 - DNA, 120 bp, synthetic construct; identical to SEQ ID NO: 12776
  source 1..120: mol_type = other DNA

SEQ ID NO: 75229 - DNA, 120 bp, synthetic construct; identical to SEQ ID NO: 45275
  source 1..120: mol_type = other DNA

SEQ ID NO: 75230 - DNA, 120 bp, synthetic construct; identical to SEQ ID NO: 45276
  source 1..120: mol_type = other DNA

SEQ ID NO: 75231 - DNA, 120 bp, synthetic construct; identical to SEQ ID NO: 45277
  source 1..120: mol_type = other DNA

SEQ ID NO: 75232 - DNA, 120 bp, synthetic construct; identical to SEQ ID NO: 12777
  source 1..120: mol_type = other DNA

SEQ ID NO: 75233 - DNA, 120 bp, synthetic construct; identical to SEQ ID NO: 45279
  source 1..120: mol_type = other DNA

SEQ ID NO: 75234 - DNA, 120 bp, synthetic construct; identical to SEQ ID NO: 45280
  source 1..120: mol_type = other DNA

SEQ ID NO: 75235 - DNA, 120 bp, synthetic construct; identical to SEQ ID NO: 45281
  source 1..120: mol_type = other DNA

SEQ ID NO: 75236 - DNA, 120 bp, synthetic construct; identical to SEQ ID NO: 45282
  source 1..120: mol_type = other DNA

SEQ ID NO: 75237 - DNA, 120 bp, synthetic construct; identical to SEQ ID NO: 12778
  source 1..120: mol_type = other DNA

SEQ ID NO: 75238 - DNA, 120 bp, synthetic construct; identical to SEQ ID NO: 45284
  source 1..120: mol_type = other DNA

SEQ ID NO: 75239 - DNA, 120 bp, synthetic construct; identical to SEQ ID NO: 45285
  source 1..120: mol_type = other DNA

SEQ ID NO: 75240 - DNA, 120 bp, synthetic construct; identical to SEQ ID NO: 12779
  source 1..120: mol_type = other DNA

SEQ ID NO: 75241 - DNA, 120 bp, synthetic construct; identical to SEQ ID NO: 45287
  source 1..120: mol_type = other DNA

SEQ ID NO: 75242 - DNA, 120 bp, synthetic construct; identical to SEQ ID NO: 45288
  source 1..120: mol_type = other DNA

SEQ ID NO: 75243 - DNA, 120 bp, synthetic construct; identical to SEQ ID NO: 45289
  source 1..120: mol_type = other DNA

SEQ ID NO: 75244 - DNA, 120 bp, synthetic construct; identical to SEQ ID NO: 12780
  source 1..120: mol_type = other DNA

SEQ ID NO: 75245 - DNA, 120 bp, synthetic construct; identical to SEQ ID NO: 45291
  source 1..120: mol_type = other DNA

SEQ ID NO: 75246 - DNA, 120 bp, synthetic construct; identical to SEQ ID NO: 45292
  source 1..120: mol_type = other DNA

SEQ ID NO: 75247 - DNA, 120 bp, synthetic construct; identical to SEQ ID NO: 5401
  source 1..120: mol_type = other DNA

SEQ ID NO: 75248 - DNA, 120 bp, synthetic construct; identical to SEQ ID NO: 12781
  source 1..120: mol_type = other DNA

SEQ ID NO: 75249 - DNA, 120 bp, synthetic construct; identical to SEQ ID NO: 45295
  source 1..120: mol_type = other DNA

SEQ ID NO: 75250 - DNA, 120 bp, synthetic construct; identical to SEQ ID NO: 45296
  source 1..120: mol_type = other DNA

SEQ ID NO: 75251 - DNA, 120 bp, synthetic construct; identical to SEQ ID NO: 45297
  source 1..120: mol_type = other DNA

SEQ ID NO: 75252 - DNA, 120 bp, synthetic construct; identical to SEQ ID NO: 12782
  source 1..120: mol_type = other DNA

SEQ ID NO: 75253 - DNA, 120 bp, synthetic construct; identical to SEQ ID NO: 45299
  source 1..120: mol_type = other DNA

SEQ ID NO: 75254 - DNA, 120 bp, synthetic construct; identical to SEQ ID NO: 45300
  source 1..120: mol_type = other DNA

SEQ ID NO: 75255 - DNA, 120 bp, synthetic construct; identical to SEQ ID NO: 12783
  source 1..120: mol_type = other DNA

SEQ ID NO: 75256 - DNA, 120 bp, synthetic construct; identical to SEQ ID NO: 45302
  source 1..120: mol_type = other DNA

SEQ ID NO: 75257 - DNA, 120 bp, synthetic construct; identical to SEQ ID NO: 5403
  source 1..120: mol_type = other DNA

SEQ ID NO: 75258 - DNA, 120 bp, synthetic construct; identical to SEQ ID NO: 45304
  source 1..120: mol_type = other DNA

SEQ ID NO: 75259 - DNA, 120 bp, synthetic construct; identical to SEQ ID NO: 45305
  source 1..120: mol_type = other DNA

SEQ ID NO: 75260 - DNA, 120 bp, synthetic construct; identical to SEQ ID NO: 12785
  source 1..120: mol_type = other DNA

SEQ ID NO: 75261 - DNA, 120 bp, synthetic construct; identical to SEQ ID NO: 45307
  source 1..120: mol_type = other DNA

SEQ ID NO: 75262 - DNA, 120 bp, synthetic construct; identical to SEQ ID NO: 45308
  source 1..120: mol_type = other DNA

SEQ ID NO: 75263 - DNA, 120 bp, synthetic construct; identical to SEQ ID NO: 45309
  source 1..120: mol_type = other DNA

SEQ ID NO: 75264 - DNA, 120 bp, synthetic construct; identical to SEQ ID NO: 12786
  source 1..120: mol_type = other DNA

SEQ ID NO: 75265 - DNA, 120 bp, synthetic construct; identical to SEQ ID NO: 45311
  source 1..120: mol_type = other DNA

SEQ ID NO: 75266 - DNA, 120 bp, synthetic construct; identical to SEQ ID NO: 45312
  source 1..120: mol_type = other DNA

SEQ ID NO: 75267 - DNA, 120 bp, synthetic construct; identical to SEQ ID NO: 45313
  source 1..120: mol_type = other DNA

SEQ ID NO: 75268 - DNA, 120 bp, synthetic construct; identical to SEQ ID NO: 45314
  source 1..120: mol_type = other DNA

SEQ ID NO: 75269 - DNA, 120 bp, synthetic construct; identical to SEQ ID NO: 12787
  source 1..120: mol_type = other DNA

SEQ ID NO: 75270 - DNA, 120 bp, synthetic construct; identical to SEQ ID NO: 45316
  source 1..120: mol_type = other DNA

SEQ ID NO: 75271 - DNA, 120 bp, synthetic construct; identical to SEQ ID NO: 45317
  source 1..120: mol_type = other DNA

SEQ ID NO: 75272 - DNA, 120 bp, synthetic construct; identical to SEQ ID NO: 12788
  source 1..120: mol_type = other DNA

SEQ ID NO: 75273 - DNA, 120 bp, synthetic construct; identical to SEQ ID NO: 45319
  source 1..120: mol_type = other DNA

SEQ ID NO: 75274 - DNA, 120 bp, synthetic construct; identical to SEQ ID NO: 45320
  source 1..120: mol_type = other DNA

SEQ ID NO: 75275 - DNA, 120 bp, synthetic construct; identical to SEQ ID NO: 45321
  source 1..120: mol_type = other DNA

SEQ ID NO: 75276 - DNA, 120 bp, synthetic construct; identical to SEQ ID NO: 12789
  source 1..120: mol_type = other DNA

SEQ ID NO: 75277 - DNA, 120 bp, synthetic construct; identical to SEQ ID NO: 45323
  source 1..120: mol_type = other DNA

SEQ ID NO: 75278 - DNA, 120 bp, synthetic construct; identical to SEQ ID NO: 45324
  source 1..120: mol_type = other DNA

SEQ ID NO: 75279 - DNA, 120 bp, synthetic construct; identical to SEQ ID NO: 45325
  source 1..120: mol_type = other DNA

SEQ ID NO: 75280 - DNA, 120 bp, synthetic construct; identical to SEQ ID NO: 45326
  source 1..120: mol_type = other DNA

SEQ ID NO: 75281 - DNA, 120 bp, synthetic construct; identical to SEQ ID NO: 12790
  source 1..120: mol_type = other DNA

SEQ ID NO: 75282 - DNA, 120 bp, synthetic construct; identical to SEQ ID NO: 45328
  source 1..120: mol_type = other DNA

SEQ ID NO: 75283 - DNA, 120 bp, synthetic construct; identical to SEQ ID NO: 45329
  source 1..120: mol_type = other DNA

SEQ ID NO: 75284 - DNA, 120 bp, synthetic construct; identical to SEQ ID NO: 12791
  source 1..120: mol_type = other DNA

SEQ ID NO: 75285 - DNA, 120 bp, synthetic construct; identical to SEQ ID NO: 45331
  source 1..120: mol_type = other DNA

SEQ ID NO: 75286 - DNA, 120 bp, synthetic construct; identical to SEQ ID NO: 45332
  source 1..120: mol_type = other DNA

SEQ ID NO: 75287 - DNA, 120 bp, synthetic construct; identical to SEQ ID NO: 45333
  source 1..120: mol_type = other DNA

SEQ ID NO: 75288 - DNA, 120 bp, synthetic construct; identical to SEQ ID NO: 12792
  source 1..120: mol_type = other DNA

SEQ ID NO: 75289 - DNA, 120 bp, synthetic construct; identical to SEQ ID NO: 45335
  source 1..120: mol_type = other DNA

SEQ ID NO: 75290 - DNA, 120 bp, synthetic construct; identical to SEQ ID NO: 45336
  source 1..120: mol_type = other DNA

SEQ ID NO: 75291 - DNA, 120 bp, synthetic construct; identical to SEQ ID NO: 45337
  source 1..120: mol_type = other DNA

SEQ ID NO: 75292 - DNA, 120 bp, synthetic construct; identical to SEQ ID NO: 45338
  source 1..120: mol_type = other DNA

SEQ ID NO: 75293 - DNA, 120 bp, synthetic construct; identical to SEQ ID NO: 12793
  source 1..120: mol_type = other DNA

SEQ ID NO: 75294 - DNA, 120 bp, synthetic construct; identical to SEQ ID NO: 45340
  source 1..120: mol_type = other DNA

SEQ ID NO: 75295 - DNA, 120 bp, synthetic construct; identical to SEQ ID NO: 45341
  source 1..120: mol_type = other DNA

SEQ ID NO: 75296 - DNA, 120 bp, synthetic construct; identical to SEQ ID NO: 5412
  source 1..120: mol_type = other DNA

SEQ ID NO: 75297 - DNA, 120 bp, synthetic construct; identical to SEQ ID NO: 12794
  source 1..120: mol_type = other DNA

SEQ ID NO: 75298 - DNA, 120 bp, synthetic construct; identical to SEQ ID NO: 45344
  source 1..120: mol_type = other DNA

SEQ ID NO: 75299 - DNA, 120 bp, synthetic construct; identical to SEQ ID NO: 45345
  source 1..120: mol_type = other DNA

SEQ ID NO: 75300 - DNA, 120 bp, synthetic construct; identical to SEQ ID NO: 12795
  source 1..120: mol_type = other DNA

SEQ ID NO: 75301 - DNA, 120 bp, synthetic construct; identical to SEQ ID NO: 45347
  source 1..120: mol_type = other DNA

SEQ ID NO: 75302 - DNA, 120 bp, synthetic construct; identical to SEQ ID NO: 45348
  source 1..120: mol_type = other DNA

SEQ ID NO: 75303 - DNA, 120 bp, synthetic construct; identical to SEQ ID NO: 45349
  source 1..120: mol_type = other DNA

SEQ ID NO: 75304 - DNA, 120 bp, synthetic construct; identical to SEQ ID NO: 5414
  source 1..120: mol_type = other DNA

SEQ ID NO: 75305 - DNA, 120 bp, synthetic construct; identical to SEQ ID NO: 45351
  source 1..120: mol_type = other DNA

SEQ ID NO: 75306 - DNA, 120 bp, synthetic construct; identical to SEQ ID NO: 45352
  source 1..120: mol_type = other DNA

SEQ ID NO: 75307 - DNA, 120 bp, synthetic construct; identical to SEQ ID NO: 45353
  source 1..120: mol_type = other DNA

SEQ ID NO: 75308 - DNA, 120 bp, synthetic construct; identical to SEQ ID NO: 12797
  source 1..120: mol_type = other DNA

SEQ ID NO: 75309 - DNA, 120 bp, synthetic construct; identical to SEQ ID NO: 45355
  source 1..120: mol_type = other DNA

SEQ ID NO: 75310 - DNA, 120 bp, synthetic construct; identical to SEQ ID NO: 45356
  source 1..120: mol_type = other DNA

SEQ ID NO: 75311 - DNA, 120 bp, synthetic construct; identical to SEQ ID NO: 45357
  source 1..120: mol_type = other DNA

SEQ ID NO: 75312 - DNA, 120 bp, synthetic construct; identical to SEQ ID NO: 12798
  source 1..120: mol_type = other DNA

SEQ ID NO: 75313 - DNA, 120 bp, synthetic construct; identical to SEQ ID NO: 45359
  source 1..120: mol_type = other DNA

SEQ ID NO: 75314 - DNA, 120 bp, synthetic construct; identical to SEQ ID NO: 45360
  source 1..120: mol_type = other DNA

SEQ ID NO: 75315 - DNA, 120 bp, synthetic construct; identical to SEQ ID NO: 45361
  source 1..120: mol_type = other DNA

SEQ ID NO: 75316 - DNA, 120 bp, synthetic construct; identical to SEQ ID NO: 45362
  source 1..120: mol_type = other DNA

SEQ ID NO: 75317 - DNA, 120 bp, synthetic construct; identical to SEQ ID NO: 12799
  source 1..120: mol_type = other DNA

SEQ ID NO: 75318 - DNA, 120 bp, synthetic construct; identical to SEQ ID NO: 45364
  source 1..120: mol_type = other DNA

SEQ ID NO: 75319 - DNA, 120 bp, synthetic construct; identical to SEQ ID NO: 45365
  source 1..120: mol_type = other DNA

SEQ ID NO: 75320 - DNA, 120 bp, synthetic construct; identical to SEQ ID NO: 45366
  source 1..120: mol_type = other DNA

SEQ ID NO: 75321 - DNA, 120 bp, synthetic construct; identical to SEQ ID NO: 12800
  source 1..120: mol_type = other DNA

SEQ ID NO: 75322 - DNA, 120 bp, synthetic construct; identical to SEQ ID NO: 45368
  source 1..120: mol_type = other DNA

SEQ ID NO: 75323 - DNA, 120 bp, synthetic construct; identical to SEQ ID NO: 45369
  source 1..120: mol_type = other DNA

SEQ ID NO: 75324 - DNA, 120 bp, synthetic construct; identical to SEQ ID NO: 5419
  source 1..120: mol_type = other DNA

SEQ ID NO: 75325 - DNA, 120 bp, synthetic construct; identical to SEQ ID NO: 45371
  source 1..120: mol_type = other DNA

SEQ ID NO: 75326 - DNA, 120 bp, synthetic construct; identical to SEQ ID NO: 45372
  source 1..120: mol_type = other DNA

SEQ ID NO: 75327 - DNA, 120 bp, synthetic construct; identical to SEQ ID NO: 45373
  source 1..120: mol_type = other DNA

SEQ ID NO: 75328 - DNA, 120 bp, synthetic construct; identical to SEQ ID NO: 12802
  source 1..120: mol_type = other DNA

SEQ ID NO: 75329 - DNA, 120 bp, synthetic construct; identical to SEQ ID NO: 45375
  source 1..120: mol_type = other DNA

SEQ ID NO: 75330 - DNA, 120 bp, synthetic construct; identical to SEQ ID NO: 45376
  source 1..120: mol_type = other DNA

SEQ ID NO: 75331 - DNA, 120 bp, synthetic construct; identical to SEQ ID NO: 45377
  source 1..120: mol_type = other DNA

SEQ ID NO: 75332 - DNA, 120 bp, synthetic construct; identical to SEQ ID NO: 12803
  source 1..120: mol_type = other DNA

SEQ ID NO: 75333 - DNA, 120 bp, synthetic construct; identical to SEQ ID NO: 45379
  source 1..120: mol_type = other DNA

SEQ ID NO: 75334 - DNA, 120 bp, synthetic construct; identical to SEQ ID NO: 45380
  source 1..120: mol_type = other DNA

SEQ ID NO: 75335 - DNA, 120 bp, synthetic construct; identical to SEQ ID NO: 45381
  source 1..120: mol_type = other DNA

SEQ ID NO: 75336 - DNA, 120 bp, synthetic construct; identical to SEQ ID NO: 12804
  source 1..120: mol_type = other DNA

SEQ ID NO: 75337 - DNA, 120 bp, synthetic construct; identical to SEQ ID NO: 45383
  source 1..120: mol_type = other DNA

SEQ ID NO: 75338 - DNA, 120 bp, synthetic construct; identical to SEQ ID NO: 45384
  source 1..120: mol_type = other DNA

SEQ ID NO: 75339 - DNA, 120 bp, synthetic construct; identical to SEQ ID NO: 12805
  source 1..120: mol_type = other DNA

SEQ ID NO: 75340 - DNA, 120 bp, synthetic construct; identical to SEQ ID NO: 45386
  source 1..120: mol_type = other DNA

SEQ ID NO: 75341 - DNA, 120 bp, synthetic construct; identical to SEQ ID NO: 45387
  source 1..120: mol_type = other DNA

SEQ ID NO: 75342 - DNA, 120 bp, synthetic construct; identical to SEQ ID NO: 45388
  source 1..120: mol_type = other DNA

SEQ ID NO: 75343 - DNA, 120 bp, synthetic construct; identical to SEQ ID NO: 12806
  source 1..120: mol_type = other DNA

SEQ ID NO: 75344 - DNA, 120 bp, synthetic construct; identical to SEQ ID NO: 45390
  source 1..120: mol_type = other DNA

SEQ ID NO: 75345 - DNA, 120 bp, synthetic construct; identical to SEQ ID NO: 45391
  source 1..120: mol_type = other DNA

SEQ ID NO: 75346 - DNA, 120 bp, synthetic construct; identical to SEQ ID NO: 45392
  source 1..120: mol_type = other DNA

SEQ ID NO: 75347 - DNA, 120 bp, synthetic construct; identical to SEQ ID NO: 45393
  source 1..120: mol_type = other DNA

SEQ ID NO: 75348 - DNA, 120 bp, synthetic construct; identical to SEQ ID NO: 12807
  source 1..120: mol_type = other DNA

SEQ ID NO: 75349 - DNA, 120 bp, synthetic construct; identical to SEQ ID NO: 45395
  source 1..120: mol_type = other DNA

SEQ ID NO: 75350 - DNA, 120 bp, synthetic construct; identical to SEQ ID NO: 45396
  source 1..120: mol_type = other DNA

SEQ ID NO: 75351 - DNA, 120 bp, synthetic construct; identical to SEQ ID NO: 12808
  source 1..120: mol_type = other DNA

SEQ ID NO: 75352 - DNA, 120 bp, synthetic construct; identical to SEQ ID NO: 45398
  source 1..120: mol_type = other DNA

SEQ ID NO: 75353 - DNA, 120 bp, synthetic construct; identical to SEQ ID NO: 45399
  source 1..120: mol_type = other DNA

SEQ ID NO: 75354 - DNA, 120 bp, synthetic construct; identical to SEQ ID NO: 45400
  source 1..120: mol_type = other DNA

SEQ ID NO: 75355 - DNA, 120 bp, synthetic construct; identical to SEQ ID NO: 12809
  source 1..120: mol_type = other DNA

SEQ ID NO: 75356 - DNA, 120 bp, synthetic construct; identical to SEQ ID NO: 45402
  source 1..120: mol_type = other DNA

SEQ ID NO: 75357 - DNA, 120 bp, synthetic construct; identical to SEQ ID NO: 45403
  source 1..120: mol_type = other DNA

SEQ ID NO: 75358 - DNA, 120 bp, synthetic construct; identical to SEQ ID NO: 12810
  source 1..120: mol_type = other DNA

SEQ ID NO: 75359 - DNA, 120 bp, synthetic construct; identical to SEQ ID NO: 45405
  source 1..120: mol_type = other DNA

SEQ ID NO: 75360 - DNA, 120 bp, synthetic construct; identical to SEQ ID NO: 45406
  source 1..120: mol_type = other DNA

SEQ ID NO: 75361 - DNA, 120 bp, synthetic construct; identical to SEQ ID NO: 45407
  source 1..120: mol_type = other DNA

SEQ ID NO: 75362 - DNA, 120 bp, synthetic construct; identical to SEQ ID NO: 45408
  source 1..120: mol_type = other DNA

SEQ ID NO: 75363 - DNA, 120 bp, synthetic construct; identical to SEQ ID NO: 12811
  source 1..120: mol_type = other DNA

SEQ ID NO: 75364 - DNA, 120 bp, synthetic construct; identical to SEQ ID NO: 45410
  source 1..120: mol_type = other DNA

SEQ ID NO: 75365 - DNA, 120 bp, synthetic construct; identical to SEQ ID NO: 45411
  source 1..120: mol_type = other DNA

SEQ ID NO: 75366 - DNA, 120 bp, synthetic construct; identical to SEQ ID NO: 12812
  source 1..120: mol_type = other DNA

SEQ ID NO: 75367 - DNA, 120 bp, synthetic construct; identical to SEQ ID NO: 45413
  source 1..120: mol_type = other DNA

SEQ ID NO: 75368 - DNA, 120 bp, synthetic construct; identical to SEQ ID NO: 12813
  source 1..120: mol_type = other DNA

SEQ ID NO: 75369 - DNA, 120 bp, synthetic construct; identical to SEQ ID NO: 45415
  source 1..120: mol_type = other DNA

SEQ ID NO: 75370 - DNA, 120 bp, synthetic construct; identical to SEQ ID NO: 45416
  source 1..120: mol_type = other DNA

SEQ ID NO: 75371 - DNA, 120 bp, synthetic construct; identical to SEQ ID NO: 12814
  source 1..120: mol_type = other DNA

SEQ ID NO: 75372 - DNA, 120 bp, synthetic construct; identical to SEQ ID NO: 45418
  source 1..120: mol_type = other DNA

SEQ ID NO: 75373 - DNA, 120 bp, synthetic construct; identical to SEQ ID NO: 45419
  source 1..120: mol_type = other DNA

SEQ ID NO: 75374 - DNA, 120 bp, synthetic construct; identical to SEQ ID NO: 12815
  source 1..120: mol_type = other DNA

SEQ ID NO: 75375 - DNA, 120 bp, synthetic construct; identical to SEQ ID NO: 45421
  source 1..120: mol_type = other DNA

SEQ ID NO: 75376 - DNA, 120 bp, synthetic construct; identical to SEQ ID NO: 45422
  source 1..120: mol_type = other DNA

SEQ ID NO: 75377 - DNA, 120 bp, synthetic construct; identical to SEQ ID NO: 45423
  source 1..120: mol_type = other DNA

SEQ ID NO: 75378 - DNA, 120 bp, synthetic construct; identical to SEQ ID NO: 45424
  source 1..120: mol_type = other DNA

SEQ ID NO: 75379 - DNA, 120 bp, synthetic construct; identical to SEQ ID NO: 12816
  source 1..120: mol_type = other DNA

SEQ ID NO: 75380 - DNA, 120 bp, synthetic construct; identical to SEQ ID NO: 45426
  source 1..120: mol_type = other DNA

SEQ ID NO: 75381 - DNA, 120 bp, synthetic construct; identical to SEQ ID NO: 45427
  source 1..120: mol_type = other DNA

SEQ ID NO: 75382 - DNA, 120 bp, synthetic construct; identical to SEQ ID NO: 45428
  source 1..120: mol_type = other DNA

SEQ ID NO: 75383 - DNA, 120 bp, synthetic construct; identical to SEQ ID NO: 12817
  source 1..120: mol_type = other DNA

SEQ ID NO: 75384 - DNA, 120 bp, synthetic construct; identical to SEQ ID NO: 45430
  source 1..120: mol_type = other DNA

SEQ ID NO: 75385 - DNA, 120 bp, synthetic construct; identical to SEQ ID NO: 45431
  source 1..120: mol_type = other DNA

SEQ ID NO: 75386 - DNA, 120 bp, synthetic construct; identical to SEQ ID NO: 45432
  source 1..120: mol_type = other DNA

SEQ ID NO: 75387 - DNA, 120 bp, synthetic construct; identical to SEQ ID NO: 12818
  source 1..120: mol_type = other DNA

SEQ ID NO: 75388 - DNA, 120 bp, synthetic construct; identical to SEQ ID NO: 45434
  source 1..120: mol_type = other DNA

SEQ ID NO: 75389 - DNA, 120 bp, synthetic construct; identical to SEQ ID NO: 45435
  source 1..120: mol_type = other DNA

SEQ ID NO: 75390 - DNA, 120 bp, synthetic construct; identical to SEQ ID NO: 12819
  source 1..120: mol_type = other DNA

SEQ ID NO: 75391 - DNA, 120 bp, synthetic construct; identical to SEQ ID NO: 45437
  source 1..120: mol_type = other DNA

SEQ ID NO: 75392 - DNA, 120 bp, synthetic construct; identical to SEQ ID NO: 45438
  source 1..120: mol_type = other DNA

SEQ ID NO: 75393 - DNA, 120 bp, synthetic construct; identical to SEQ ID NO: 45439
  source 1..120: mol_type = other DNA

SEQ ID NO: 75394 - DNA, 120 bp, synthetic construct; identical to SEQ ID NO: 45440
  source 1..120: mol_type = other DNA

SEQ ID NO: 75395 - DNA, 120 bp, synthetic construct; identical to SEQ ID NO: 12820
  source 1..120: mol_type = other DNA

SEQ ID NO: 75396 - DNA, 120 bp, synthetic construct; identical to SEQ ID NO: 45442
  source 1..120: mol_type = other DNA

SEQ ID NO: 75397 - DNA, 120 bp, synthetic construct; identical to SEQ ID NO: 45443
  source 1..120: mol_type = other DNA

SEQ ID NO: 75398 - DNA, 120 bp, synthetic construct; identical to SEQ ID NO: 12821
  source 1..120: mol_type = other DNA

SEQ ID NO: 75399 - DNA, 120 bp, synthetic construct; identical to SEQ ID NO: 45445
  source 1..120: mol_type = other DNA

SEQ ID NO: 75400 - DNA, 120 bp, synthetic construct; identical to SEQ ID NO: 45446
  source 1..120: mol_type = other DNA

SEQ ID NO: 75401 - DNA, 120 bp, synthetic construct; identical to SEQ ID NO: 45447
  source 1..120: mol_type = other DNA

SEQ ID NO: 75402 - DNA, 120 bp, synthetic construct; identical to SEQ ID NO: 12822
  source 1..120: mol_type = other DNA

SEQ ID NO: 75403 - DNA, 120 bp, synthetic construct; identical to SEQ ID NO: 45449
  source 1..120: mol_type = other DNA

SEQ ID NO: 75404 - DNA, 120 bp, synthetic construct; identical to SEQ ID NO: 45450
  source 1..120: mol_type = other DNA

SEQ ID NO: 75405 - DNA, 120 bp, synthetic construct; identical to SEQ ID NO: 45451
  source 1..120: mol_type = other DNA

SEQ ID NO: 75406 - DNA, 120 bp, synthetic construct; identical to SEQ ID NO: 12823
  source 1..120: mol_type = other DNA

SEQ ID NO: 75407 - DNA, 120 bp, synthetic construct; identical to SEQ ID NO: 45453
  source 1..120: mol_type = other DNA

SEQ ID NO: 75408 - DNA, 120 bp, synthetic construct; identical to SEQ ID NO: 45454
  source 1..120: mol_type = other DNA

SEQ ID NO: 75409 - DNA, 120 bp, synthetic construct; identical to SEQ ID NO: 45455
  source 1..120: mol_type = other DNA

SEQ ID NO: 75410 - DNA, 120 bp, synthetic construct; identical to SEQ ID NO: 12824
  source 1..120: mol_type = other DNA

SEQ ID NO: 75411 - DNA, 120 bp, synthetic construct; identical to SEQ ID NO: 45457
  source 1..120: mol_type = other DNA

SEQ ID NO: 75412 - DNA, 120 bp, synthetic construct; identical to SEQ ID NO: 45458
  source 1..120: mol_type = other DNA

SEQ ID NO: 75413 - DNA, 120 bp, synthetic construct; identical to SEQ ID NO: 45459
  source 1..120: mol_type = other DNA

SEQ ID NO: 75414 - DNA, 120 bp, synthetic construct; identical to SEQ ID NO: 45460
  source 1..120: mol_type = other DNA

SEQ ID NO: 75415 - DNA, 120 bp, synthetic construct; identical to SEQ ID NO: 12825
  source 1..120: mol_type = other DNA

SEQ ID NO: 75416 - DNA, 120 bp, synthetic construct; identical to SEQ ID NO: 45462
  source 1..120: mol_type = other DNA

SEQ ID NO: 75417 - DNA, 120 bp, synthetic construct; identical to SEQ ID NO: 45463
  source 1..120: mol_type = other DNA

SEQ ID NO: 75418 - DNA, 120 bp, synthetic construct; identical to SEQ ID NO: 12826
  source 1..120: mol_type = other DNA

SEQ ID NO: 75419 - DNA, 120 bp, synthetic construct; identical to SEQ ID NO: 45465
  source 1..120: mol_type = other DNA

SEQ ID NO: 75420 - DNA, 120 bp, synthetic construct; identical to SEQ ID NO: 45466
  source 1..120: mol_type = other DNA

SEQ ID NO: 75421 - DNA, 120 bp, synthetic construct; identical to SEQ ID NO: 45467
  source 1..120: mol_type = other DNA

SEQ ID NO: 75422 - DNA, 120 bp, synthetic construct; identical to SEQ ID NO: 45468
  source 1..120: mol_type = other DNA

SEQ ID NO: 75423 - DNA, 120 bp, synthetic construct; identical to SEQ ID NO: 12827
  source 1..120: mol_type = other DNA

SEQ ID NO: 75424 - DNA, 120 bp, synthetic construct; identical to SEQ ID NO: 45470
  source 1..120: mol_type = other DNA

SEQ ID NO: 75425 - DNA, 120 bp, synthetic construct; identical to SEQ ID NO: 45471
  source 1..120: mol_type = other DNA

SEQ ID NO: 75426 - DNA, 120 bp, synthetic construct; identical to SEQ ID NO: 45472
  source 1..120: mol_type = other DNA

SEQ ID NO: 75427 - DNA, 120 bp, synthetic construct; identical to SEQ ID NO: 12828
  source 1..120: mol_type = other DNA

SEQ ID NO: 75428 - DNA, 120 bp, synthetic construct; identical to SEQ ID NO: 45474
  source 1..120: mol_type = other DNA

SEQ ID NO: 75429 - DNA, 120 bp, synthetic construct; identical to SEQ ID NO: 45475
  source 1..120: mol_type = other DNA

SEQ ID NO: 75430 - DNA, 120 bp, synthetic construct; identical to SEQ ID NO: 12829
  source 1..120: mol_type = other DNA

SEQ ID NO: 75431 - DNA, 120 bp, synthetic construct; identical to SEQ ID NO: 45477
  source 1..120: mol_type = other DNA

SEQ ID NO: 75432 - DNA, 120 bp, synthetic construct; identical to SEQ ID NO: 45478
  source 1..120: mol_type = other DNA

SEQ ID NO: 75433 - DNA, 120 bp, synthetic construct; identical to SEQ ID NO: 45479
  source 1..120: mol_type = other DNA

SEQ ID NO: 75434 - DNA, 120 bp, synthetic construct; identical to SEQ ID NO: 12830
  source 1..120: mol_type = other DNA

SEQ ID NO: 75435 - DNA, 120 bp, synthetic construct; identical to SEQ ID NO: 45481
  source 1..120: mol_type = other DNA

SEQ ID NO: 75436 - DNA, 120 bp, synthetic construct; identical to SEQ ID NO: 45482
  source 1..120: mol_type = other DNA

SEQ ID NO: 75437 - DNA, 120 bp, synthetic construct; identical to SEQ ID NO: 45483
  source 1..120: mol_type = other DNA

SEQ ID NO: 75438 - DNA, 120 bp, synthetic construct; identical to SEQ ID NO: 12831
  source 1..120: mol_type = other DNA

SEQ ID NO: 75439 - DNA, 120 bp, synthetic construct; identical to SEQ ID NO: 45485
  source 1..120: mol_type = other DNA

SEQ ID NO: 75440 - DNA, 120 bp, synthetic construct; identical to SEQ ID NO: 45486
  source 1..120: mol_type = other DNA

SEQ ID NO: 75441 - DNA, 120 bp, synthetic construct; identical to SEQ ID NO: 45487
  source 1..120: mol_type = other DNA

SEQ ID NO: 75442 - DNA, 120 bp, synthetic construct; identical to SEQ ID NO: 45488
  source 1..120: mol_type = other DNA

SEQ ID NO: 75443 - DNA, 120 bp, synthetic construct; identical to SEQ ID NO: 12832
  source 1..120: mol_type = other DNA

SEQ ID NO: 75444 - DNA, 120 bp, synthetic construct; identical to SEQ ID NO: 45490
  source 1..120: mol_type = other DNA

SEQ ID NO: 75445 - DNA, 120 bp, synthetic construct; identical to SEQ ID NO: 5447
  source 1..120: mol_type = other DNA

SEQ ID NO: 75446 - DNA, 120 bp, synthetic construct; identical to SEQ ID NO: 12833
  source 1..120: mol_type = other DNA

SEQ ID NO: 75447 - DNA, 120 bp, synthetic construct; identical to SEQ ID NO: 45493
  source 1..120: mol_type = other DNA

SEQ ID NO: 75448 - DNA, 120 bp, synthetic construct; identical to SEQ ID NO: 45494
  source 1..120: mol_type = other DNA

SEQ ID NO: 75449 - DNA, 120 bp, synthetic construct; identical to SEQ ID NO: 45495
  source 1..120: mol_type = other DNA

SEQ ID NO: 75450 - DNA, 120 bp, synthetic construct; identical to SEQ ID NO: 12834
  source 1..120: mol_type = other DNA

SEQ ID NO: 75451 - DNA, 120 bp, synthetic construct; identical to SEQ ID NO: 45497
  source 1..120: mol_type = other DNA

SEQ ID NO: 75452 - DNA, 120 bp, synthetic construct; identical to SEQ ID NO: 45498
  source 1..120: mol_type = other DNA

SEQ ID NO: 75453 - DNA, 120 bp, synthetic construct; identical to SEQ ID NO: 45499
  source 1..120: mol_type = other DNA

SEQ ID NO: 75454 - DNA, 120 bp, synthetic construct; identical to SEQ ID NO: 45500
  source 1..120: mol_type = other DNA

SEQ ID NO: 75455 - DNA, 120 bp, synthetic construct; identical to SEQ ID NO: 12835
  source 1..120: mol_type = other DNA

SEQ ID NO: 75456 - DNA, 120 bp, synthetic construct; identical to SEQ ID NO: 45502
  source 1..120: mol_type = other DNA

SEQ ID NO: 75457 - DNA, 120 bp, synthetic construct; identical to SEQ ID NO: 45503
  source 1..120: mol_type = other DNA

SEQ ID NO: 75458 - DNA, 120 bp, synthetic construct; identical to SEQ ID NO: 12836
  source 1..120: mol_type = other DNA

SEQ ID NO: 75459 - DNA, 120 bp, synthetic construct; identical to SEQ ID NO: 45505
  source 1..120: mol_type = other DNA

SEQ ID NO: 75460 - DNA, 120 bp, synthetic construct; identical to SEQ ID NO: 45506
  source 1..120: mol_type = other DNA

SEQ ID NO: 75461 - DNA, 120 bp, synthetic construct; identical to SEQ ID NO: 45507
  source 1..120: mol_type = other DNA

SEQ ID NO: 75462 - DNA, 120 bp, synthetic construct; identical to SEQ ID NO: 45508
  source 1..120: mol_type = other DNA

SEQ ID NO: 75463 - DNA, 120 bp, synthetic construct; identical to SEQ ID NO: 12837
  source 1..120: mol_type = other DNA

SEQ ID NO: 75464 - DNA, 120 bp, synthetic construct; identical to SEQ ID NO: 45510
  source 1..120: mol_type = other DNA

SEQ ID NO: 75465 - DNA, 120 bp, synthetic construct; identical to SEQ ID NO: 45511
  source 1..120: mol_type = other DNA

SEQ ID NO: 75466 - DNA, 120 bp, synthetic construct; identical to SEQ ID NO: 12838
  source 1..120: mol_type = other DNA

SEQ ID NO: 75467 - DNA, 120 bp, synthetic construct; identical to SEQ ID NO: 45513
  source 1..120: mol_type = other DNA

SEQ ID NO: 75468 - DNA, 120 bp, synthetic construct; identical to SEQ ID NO: 45514
  source 1..120: mol_type = other DNA

SEQ ID NO: 75469 - DNA, 120 bp, synthetic construct; identical to SEQ ID NO: 45515
  source 1..120: mol_type = other DNA

SEQ ID NO: 75470 - DNA, 120 bp, synthetic construct; identical to SEQ ID NO: 12839
  source 1..120: mol_type = other DNA

SEQ ID NO: 75471 - DNA, 120 bp, synthetic construct; identical to SEQ ID NO: 45517
  source 1..120: mol_type = other DNA

SEQ ID NO: 75472 - DNA, 120 bp, synthetic construct; identical to SEQ ID NO: 45518
  source 1..120: mol_type = other DNA

SEQ ID NO: 75473 - DNA, 120 bp, synthetic construct; identical to SEQ ID NO: 45519
  source 1..120: mol_type = other DNA

SEQ ID NO: 75474 - DNA, 120 bp, synthetic construct; identical to SEQ ID NO: 12840
  source 1..120: mol_type = other DNA

SEQ ID NO: 75475 - DNA, 120 bp, synthetic construct; identical to SEQ ID NO: 45521
  source 1..120: mol_type = other DNA

SEQ ID NO: 75476 - DNA, 120 bp, synthetic construct; identical to SEQ ID NO: 45522
  source 1..120: mol_type = other DNA

SEQ ID NO: 75477 - DNA, 120 bp, synthetic construct; identical to SEQ ID NO: 45523
  source 1..120: mol_type = other DNA

SEQ ID NO: 75478 - DNA, 120 bp, synthetic construct; identical to SEQ ID NO: 45524
  source 1..120: mol_type = other DNA

SEQ ID NO: 75479 - DNA, 120 bp, synthetic construct; identical to SEQ ID NO: 12841
  source 1..120: mol_type = other DNA

SEQ ID NO: 75480 - DNA, 120 bp, synthetic construct; identical to SEQ ID NO: 45526
  source 1..120: mol_type = other DNA

SEQ ID NO: 75481 - DNA, 120 bp, synthetic construct; identical to SEQ ID NO: 45527
  source 1..120: mol_type = other DNA

SEQ ID NO: 75482 - DNA, 120 bp, synthetic construct; identical to SEQ ID NO: 12842
  source 1..120: mol_type = other DNA

SEQ ID NO: 75483 - DNA, 120 bp, synthetic construct; identical to SEQ ID NO: 45529
  source 1..120: mol_type = other DNA

SEQ ID NO: 75484 - DNA, 120 bp, synthetic construct; identical to SEQ ID NO: 45530
  source 1..120: mol_type = other DNA

SEQ ID NO: 75485 - DNA, 120 bp, synthetic construct; identical to SEQ ID NO: 45531
  source 1..120: mol_type = other DNA

SEQ ID NO: 75486 - DNA, 120 bp, synthetic construct; identical to SEQ ID NO: 12843
  source 1..120: mol_type = other DNA

SEQ ID NO: 75487 - DNA, 120 bp, synthetic construct; identical to SEQ ID NO: 45533
  source 1..120: mol_type = other DNA

SEQ ID NO: 75488 - DNA, 120 bp, synthetic construct; identical to SEQ ID NO: 45534
  source 1..120: mol_type = other DNA

SEQ ID NO: 75489 - DNA, 120 bp, synthetic construct; identical to SEQ ID NO: 45535
  source 1..120: mol_type = other DNA

SEQ ID NO: 75490 - DNA, 120 bp, synthetic construct; identical to SEQ ID NO: 12844
  source 1..120: mol_type = other DNA

SEQ ID NO: 75491 - DNA, 120 bp, synthetic construct; identical to SEQ ID NO: 45537
  source 1..120: mol_type = other DNA

SEQ ID NO: 75492 - DNA, 120 bp, synthetic construct; identical to SEQ ID NO: 45538
  source 1..120: mol_type = other DNA

SEQ ID NO: 75493 - DNA, 120 bp, synthetic construct; identical to SEQ ID NO: 45539
  source 1..120: mol_type = other DNA

SEQ ID NO: 75494 - DNA, 120 bp, synthetic construct; identical to SEQ ID NO: 12845
  source 1..120: mol_type = other DNA

SEQ ID NO: 75495 - DNA, 120 bp, synthetic construct; identical to SEQ ID NO: 45541
  source 1..120: mol_type = other DNA

SEQ ID NO: 75496 - DNA, 120 bp, synthetic construct; identical to SEQ ID NO: 45542
  source 1..120: mol_type = other DNA

SEQ ID NO: 75497 - DNA, 120 bp, synthetic construct; identical to SEQ ID NO: 45543
  source 1..120: mol_type = other DNA

SEQ ID NO: 75498 - DNA, 120 bp, synthetic construct; identical to SEQ ID NO: 12846
  source 1..120: mol_type = other DNA

SEQ ID NO: 75499 - DNA, 120 bp, synthetic construct; identical to SEQ ID NO: 45545
  source 1..120: mol_type = other DNA

SEQ ID NO: 75500 - DNA, 120 bp, synthetic construct; identical to SEQ ID NO: 45546
  source 1..120: mol_type = other DNA

SEQ ID NO: 75501 - DNA, 120 bp, synthetic construct; identical to SEQ ID NO: 45547
  source 1..120: mol_type = other DNA

SEQ ID NO: 75502 - DNA, 120 bp, synthetic construct; identical to SEQ ID NO: 45548
  source 1..120: mol_type = other DNA

SEQ ID NO: 75503 - DNA, 120 bp, synthetic construct; identical to SEQ ID NO: 12847
  source 1..120: mol_type = other DNA

SEQ ID NO: 75504 - DNA, 120 bp, synthetic construct; identical to SEQ ID NO: 45550
  source 1..120: mol_type = other DNA

SEQ ID NO: 75505 - DNA, 120 bp, synthetic construct; identical to SEQ ID NO: 45551
  source 1..120: mol_type = other DNA

SEQ ID NO: 75506 - DNA, 120 bp, synthetic construct; identical to SEQ ID NO: 45552
  source 1..120: mol_type = other DNA

SEQ ID NO: 75507 - DNA, 120 bp, synthetic construct; identical to SEQ ID NO: 12848
  source 1..120: mol_type = other DNA

SEQ ID NO: 75508 - DNA, 120 bp, synthetic construct; identical to SEQ ID NO: 45554
  source 1..120: mol_type = other DNA

SEQ ID NO: 75509 - DNA, 120 bp, synthetic construct; identical to SEQ ID NO: 45555
  source 1..120: mol_type = other DNA

SEQ ID NO: 75510 - DNA, 120 bp, synthetic construct; identical to SEQ ID NO: 12849
  source 1..120: mol_type = other DNA

SEQ ID NO: 75511 - DNA, 120 bp, synthetic construct; identical to SEQ ID NO: 45557
  source 1..120: mol_type = other DNA

SEQ ID NO: 75512 - DNA, 120 bp, synthetic construct; identical to SEQ ID NO: 45558
  source 1..120: mol_type = other DNA

SEQ ID NO: 75513 - DNA, 120 bp, synthetic construct; identical to SEQ ID NO: 45559
  source 1..120: mol_type = other DNA

SEQ ID NO: 75514 - DNA, 120 bp, synthetic construct; identical to SEQ ID NO: 45560
  source 1..120: mol_type = other DNA

SEQ ID NO: 75515 - DNA, 120 bp, synthetic construct; identical to SEQ ID NO: 12850
  source 1..120: mol_type = other DNA

SEQ ID NO: 75516 - DNA, 120 bp, synthetic construct; identical to SEQ ID NO: 45562
  source 1..120: mol_type = other DNA

SEQ ID NO: 75517 - DNA, 120 bp, synthetic construct; identical to SEQ ID NO: 45563
  source 1..120: mol_type = other DNA

SEQ ID NO: 75518 - DNA, 120 bp, synthetic construct; identical to SEQ ID NO: 45564
  source 1..120: mol_type = other DNA

SEQ ID NO: 75519 - DNA, 120 bp, synthetic construct; identical to SEQ ID NO: 45565
  source 1..120: mol_type = other DNA

SEQ ID NO: 75520 - DNA, 120 bp, synthetic construct; identical to SEQ ID NO: 12851
  source 1..120: mol_type = other DNA

SEQ ID NO: 75521 - DNA, 120 bp, synthetic construct; identical to SEQ ID NO: 45567
  source 1..120: mol_type = other DNA

SEQ ID NO: 75522 - DNA, 120 bp, synthetic construct; identical to SEQ ID NO: 45568
  source 1..120: mol_type = other DNA

SEQ ID NO: 75523 - DNA, 120 bp, synthetic construct; identical to SEQ ID NO: 12852
  source 1..120: mol_type = other DNA

SEQ ID NO: 75524 - DNA, 120 bp, synthetic construct; identical to SEQ ID NO: 45570
  source 1..120: mol_type = other DNA

SEQ ID NO: 75525 - DNA, 120 bp, synthetic construct; identical to SEQ ID NO: 45571
  source 1..120: mol_type = other DNA

SEQ ID NO: 75526 - DNA, 120 bp, synthetic construct; identical to SEQ ID NO: 45572
  source 1..120: mol_type = other DNA

SEQ ID NO: 75527 - DNA, 120 bp, synthetic construct; identical to SEQ ID NO: 12853
  source 1..120: mol_type = other DNA

SEQ ID NO: 75528 - DNA, 120 bp, synthetic construct; identical to SEQ ID NO: 45574
  source 1..120: mol_type = other DNA

SEQ ID NO: 75529 - DNA, 120 bp, synthetic construct; identical to SEQ ID NO: 45575
  source 1..120: mol_type = other DNA

SEQ ID NO: 75530 - DNA, 120 bp, synthetic construct; identical to SEQ ID NO: 45576
  source 1..120: mol_type = other DNA

SEQ ID NO: 75531 - DNA, 120 bp, synthetic construct; identical to SEQ ID NO: 12854
  source 1..120: mol_type = other DNA

SEQ ID NO: 75532 - DNA, 120 bp, synthetic construct; identical to SEQ ID NO: 45578
  source 1..120: mol_type = other DNA

SEQ ID NO: 75533 - DNA, 120 bp, synthetic construct; identical to SEQ ID NO: 45579
  source 1..120: mol_type = other DNA

SEQ ID NO: 75534 - DNA, 120 bp, synthetic construct; identical to SEQ ID NO: 45580
  source 1..120: mol_type = other DNA

SEQ ID NO: 75535 - DNA, 120 bp, synthetic construct; identical to SEQ ID NO: 12855
  source 1..120: mol_type = other DNA

SEQ ID NO: 75536 - DNA, 120 bp, synthetic construct; identical to SEQ ID NO: 45582
  source 1..120: mol_type = other DNA

SEQ ID NO: 75537 - DNA, 120 bp, synthetic construct; identical to SEQ ID NO: 45583
  source 1..120: mol_type = other DNA

SEQ ID NO: 75538 - DNA, 120 bp, synthetic construct; identical to SEQ ID NO: 45584
  source 1..120: mol_type = other DNA

SEQ ID NO: 75539 - DNA, 120 bp, synthetic construct; identical to SEQ ID NO: 12856
  source 1..120: mol_type = other DNA

SEQ ID NO: 75540 - DNA, 120 bp, synthetic construct; identical to SEQ ID NO: 45586
  source 1..120: mol_type = other DNA

SEQ ID NO: 75541 - DNA, 120 bp, synthetic construct; identical to SEQ ID NO: 45587
  source 1..120: mol_type = other DNA

SEQ ID NO: 75542 - DNA, 120 bp, synthetic construct; identical to SEQ ID NO: 45588
  source 1..120: mol_type = other DNA

SEQ ID NO: 75543 - DNA, 120 bp, synthetic construct; identical to SEQ ID NO: 45589
  source 1..120: mol_type = other DNA

SEQ ID NO: 75544 - DNA, 120 bp, synthetic construct; identical to SEQ ID NO: 12857
  source 1..120: mol_type = other DNA

SEQ ID NO: 75545 - DNA, 120 bp, synthetic construct; identical to SEQ ID NO: 45591
  source 1..120: mol_type = other DNA

SEQ ID NO: 75546 - DNA, 120 bp, synthetic construct; identical to SEQ ID NO: 45592
  source 1..120: mol_type = other DNA

SEQ ID NO: 75547 - DNA, 120 bp, synthetic construct; identical to SEQ ID NO: 45593
  source 1..120: mol_type = other DNA

SEQ ID NO: 75548 - DNA, 120 bp, synthetic construct; identical to SEQ ID NO: 12858
  source 1..120: mol_type = other DNA

SEQ ID NO: 75549 - DNA, 120 bp, synthetic construct; identical to SEQ ID NO: 45595
  source 1..120: mol_type = other DNA

SEQ ID NO: 75550 - DNA, 120 bp, synthetic construct; identical to SEQ ID NO: 45596
  source 1..120: mol_type = other DNA

SEQ ID NO: 75551 - DNA, 120 bp, synthetic construct; identical to SEQ ID NO: 45597
  source 1..120: mol_type = other DNA

SEQ ID NO: 75552 - DNA, 120 bp, synthetic construct; identical to SEQ ID NO: 12859
  source 1..120: mol_type = other DNA

SEQ ID NO: 75553 - DNA, 120 bp, synthetic construct; identical to SEQ ID NO: 45599
  source 1..120: mol_type = other DNA

SEQ ID NO: 75554 - DNA, 120 bp, synthetic construct; identical to SEQ ID NO: 45600
  source 1..120: mol_type = other DNA

SEQ ID NO: 75555 - DNA, 120 bp, synthetic construct; identical to SEQ ID NO: 12860
  source 1..120: mol_type = other DNA

SEQ ID NO: 75556 - DNA, 120 bp, synthetic construct; identical to SEQ ID NO: 45602
  source 1..120: mol_type = other DNA

SEQ ID NO: 75557 - DNA, 120 bp, synthetic construct; identical to SEQ ID NO: 45603
  source 1..120: mol_type = other DNA

SEQ ID NO: 75558 - DNA, 120 bp, synthetic construct; identical to SEQ ID NO: 45604
  source 1..120: mol_type = other DNA

SEQ ID NO: 75559 - DNA, 120 bp, synthetic construct; identical to SEQ ID NO: 45605
  source 1..120: mol_type = other DNA

SEQ ID NO: 75560 - DNA, 120 bp, synthetic construct; identical to SEQ ID NO: 12861
  source 1..120: mol_type = other DNA

SEQ ID NO: 75561 - DNA, 120 bp, synthetic construct; identical to SEQ ID NO: 45607
  source 1..120: mol_type = other DNA

SEQ ID NO: 75562 - DNA, 120 bp, synthetic construct; identical to SEQ ID NO: 45608
  source 1..120: mol_type = other DNA

SEQ ID NO: 75563 - DNA, 120 bp, synthetic construct; identical to SEQ ID NO: 45609
  source 1..120: mol_type = other DNA

SEQ ID NO: 75564 - DNA, 120 bp, synthetic construct; identical to SEQ ID NO: 12862
  source 1..120: mol_type = other DNA

SEQ ID NO: 75565 - DNA, 120 bp, synthetic construct; identical to SEQ ID NO: 45611
  source 1..120: mol_type = other DNA

SEQ ID NO: 75566 - DNA, 120 bp, synthetic construct; identical to SEQ ID NO: 45612
  source 1..120: mol_type = other DNA

SEQ ID NO: 75567 - DNA, 120 bp, synthetic construct; identical to SEQ ID NO: 45613
  source 1..120: mol_type = other DNA

SEQ ID NO: 75568 - DNA, 120 bp, synthetic construct; identical to SEQ ID NO: 12863
  source 1..120: mol_type = other DNA

SEQ ID NO: 75569 - DNA, 120 bp, synthetic construct; identical to SEQ ID NO: 12864
  source 1..120: mol_type = other DNA

SEQ ID NO: 75570 - DNA, 120 bp, synthetic construct; identical to SEQ ID NO: 45616
  source 1..120: mol_type = other DNA

SEQ ID NO: 75571 - DNA, 120 bp, synthetic construct; identical to SEQ ID NO: 45617
  source 1..120: mol_type = other DNA

SEQ ID NO: 75572 - DNA, 120 bp, synthetic construct; identical to SEQ ID NO: 45618
  source 1..120: mol_type = other DNA

SEQ ID NO: 75573 - DNA, 120 bp, synthetic construct; identical to SEQ ID NO: 12865
  source 1..120: mol_type = other DNA

SEQ ID NO: 75574 - DNA, 120 bp, synthetic construct; identical to SEQ ID NO: 12866
  source 1..120: mol_type = other DNA

SEQ ID NO: 75575 - DNA, 120 bp, synthetic construct; identical to SEQ ID NO: 45621
  source 1..120: mol_type = other DNA

SEQ ID NO: 75576 - DNA, 120 bp, synthetic construct; identical to SEQ ID NO: 45622
  source 1..120: mol_type = other DNA

SEQ ID NO: 75577 - DNA, 120 bp, synthetic construct; identical to SEQ ID NO: 45623
  source 1..120: mol_type = other DNA

SEQ ID NO: 75578 - DNA, 120 bp, synthetic construct; identical to SEQ ID NO: 45624
  source 1..120: mol_type = other DNA

SEQ ID NO: 75579 - DNA, 120 bp, synthetic construct; identical to SEQ ID NO: 12867
  source 1..120: mol_type = other DNA

SEQ ID NO: 75580 - DNA, 120 bp, synthetic construct; identical to SEQ ID NO: 45626
  source 1..120: mol_type = other DNA

SEQ ID NO: 75581 - DNA, 120 bp, synthetic construct; identical to SEQ ID NO: 45627
  source 1..120: mol_type = other DNA

SEQ ID NO: 75582 - DNA, 120 bp, synthetic construct; identical to SEQ ID NO: 12868
  source 1..120: mol_type = other DNA

SEQ ID NO: 75583 - DNA, 120 bp, synthetic construct; identical to SEQ ID NO: 45629
  source 1..120: mol_type = other DNA

SEQ ID NO: 75584 - DNA, 120 bp, synthetic construct; identical to SEQ ID NO: 45630
  source 1..120: mol_type = other DNA

SEQ ID NO: 75585 - DNA, 120 bp, synthetic construct; identical to SEQ ID NO: 45631
  source 1..120: mol_type = other DNA

SEQ ID NO: 75586 - DNA, 120 bp, synthetic construct; identical to SEQ ID NO: 45632
  source 1..120: mol_type = other DNA

SEQ ID NO: 75587 - DNA, 120 bp, synthetic construct; identical to SEQ ID NO: 12869
  source 1..120: mol_type = other DNA

SEQ ID NO: 75588 - DNA, 120 bp, synthetic construct; identical to SEQ ID NO: 45634
  source 1..120: mol_type = other DNA

SEQ ID NO: 75589 - DNA, 120 bp, synthetic construct; identical to SEQ ID NO: 45635
  source 1..120: mol_type = other DNA

SEQ ID NO: 75590 - DNA, 120 bp, synthetic construct; identical to SEQ ID NO: 12870
  source 1..120: mol_type = other DNA

SEQ ID NO: 75591 - DNA, 120 bp, synthetic construct; identical to SEQ ID NO: 45637
  source 1..120: mol_type = other DNA

SEQ ID NO: 75592 - DNA, 120 bp, synthetic construct; identical to SEQ ID NO: 45638
  source 1..120: mol_type = other DNA

SEQ ID NO: 75593 - DNA, 120 bp, synthetic construct; identical to SEQ ID NO: 45639
  source 1..120: mol_type = other DNA

SEQ ID NO: 75594 - DNA, 120 bp, synthetic construct; identical to SEQ ID NO: 12871
  source 1..120: mol_type = other DNA

SEQ ID NO: 75595 - DNA, 120 bp, synthetic construct; identical to SEQ ID NO: 45641
  source 1..120: mol_type = other DNA

SEQ ID NO: 75596 - DNA, 120 bp, synthetic construct; identical to SEQ ID NO: 45642
  source 1..120: mol_type = other DNA

SEQ ID NO: 75597 - DNA, 120 bp, synthetic construct; identical to SEQ ID NO: 45643
  source 1..120: mol_type = other DNA

SEQ ID NO: 75598 - DNA, 120 bp, synthetic construct; identical to SEQ ID NO: 12872
  source 1..120: mol_type = other DNA

SEQ ID NO: 75599 - DNA, 120 bp, synthetic construct; identical to SEQ ID NO: 45645
  source 1..120: mol_type = other DNA

SEQ ID NO: 75600 - DNA, 120 bp, synthetic construct; identical to SEQ ID NO: 45646
  source 1..120: mol_type = other DNA

SEQ ID NO: 75601 - DNA, 120 bp, synthetic construct; identical to SEQ ID NO: 45647
  source 1..120: mol_type = other DNA

SEQ ID NO: 75602 - DNA, 120 bp, synthetic construct; identical to SEQ ID NO: 12873
  source 1..120: mol_type = other DNA

SEQ ID NO: 75603 - DNA, 120 bp, synthetic construct; identical to SEQ ID NO: 45649
  source 1..120: mol_type = other DNA

SEQ ID NO: 75604 - DNA, 120 bp, synthetic construct; identical to SEQ ID NO: 45650
  source 1..120: mol_type = other DNA

SEQ ID NO: 75605 - DNA, 120 bp, synthetic construct; identical to SEQ ID NO: 45651
  source 1..120: mol_type = other DNA

SEQ ID NO: 75606 - DNA, 120 bp, synthetic construct; identical to SEQ ID NO: 12874
  source 1..120: mol_type = other DNA

SEQ ID NO: 75607 - DNA, 120 bp, synthetic construct; identical to SEQ ID NO: 45653
  source 1..120: mol_type = other DNA

SEQ ID NO: 75608 - DNA, 120 bp, synthetic construct; identical to SEQ ID NO: 45654
  source 1..120: mol_type = other DNA

SEQ ID NO: 75609 - DNA, 120 bp, synthetic construct; identical to SEQ ID NO: 45655
  source 1..120: mol_type = other DNA

SEQ ID NO: 75610 - DNA, 120 bp, synthetic construct; identical to SEQ ID NO: 12875
  source 1..120: mol_type = other DNA

SEQ ID NO: 75611 - DNA, 120 bp, synthetic construct; identical to SEQ ID NO: 45657
  source 1..120: mol_type = other DNA

SEQ ID NO: 75612 - DNA, 120 bp, synthetic construct; identical to SEQ ID NO: 45658
  source 1..120: mol_type = other DNA

SEQ ID NO: 75613 - DNA, 120 bp, synthetic construct; identical to SEQ ID NO: 45659
  source 1..120: mol_type = other DNA

SEQ ID NO: 75614 - DNA, 120 bp, synthetic construct; identical to SEQ ID NO: 45660
  source 1..120: mol_type = other DNA

SEQ ID NO: 75615 - DNA, 120 bp, synthetic construct; identical to SEQ ID NO: 12876
  source 1..120: mol_type = other DNA

SEQ ID NO: 75616 - DNA, 120 bp, synthetic construct; identical to SEQ ID NO: 45662
  source 1..120: mol_type = other DNA

SEQ ID NO: 75617 - DNA, 120 bp, synthetic construct; identical to SEQ ID NO: 45663
  source 1..120: mol_type = other DNA

SEQ ID NO: 75618 - DNA, 120 bp, synthetic construct; identical to SEQ ID NO: 45664
  source 1..120: mol_type = other DNA

SEQ ID NO: 75619 - DNA, 120 bp, synthetic construct; identical to SEQ ID NO: 12877
  source 1..120: mol_type = other DNA

SEQ ID NO: 75620 - DNA, 120 bp, synthetic construct; identical to SEQ ID NO: 45666
  source 1..120: mol_type = other DNA

SEQ ID NO: 75621 - DNA, 120 bp, synthetic construct; identical to SEQ ID NO: 45667
  source 1..120: mol_type = other DNA

SEQ ID NO: 75622 - DNA, 120 bp, synthetic construct; identical to SEQ ID NO: 45668
  source 1..120: mol_type = other DNA

SEQ ID NO: 75623 - DNA, 120 bp, synthetic construct; identical to SEQ ID NO: 12878
  source 1..120: mol_type = other DNA

SEQ ID NO: 75624 - DNA, 120 bp, synthetic construct; identical to SEQ ID NO: 45670
  source 1..120: mol_type = other DNA

SEQ ID NO: 75625 - DNA, 120 bp, synthetic construct; identical to SEQ ID NO: 45671
  source 1..120: mol_type = other DNA

SEQ ID NO: 75626 - DNA, 120 bp, synthetic construct; identical to SEQ ID NO: 12879
  source 1..120: mol_type = other DNA

SEQ ID NO: 75627 - DNA, 120 bp, synthetic construct; identical to SEQ ID NO: 45673
  source 1..120: mol_type = other DNA

SEQ ID NO: 75628 - DNA, 120 bp, synthetic construct; identical to SEQ ID NO: 45674
  source 1..120: mol_type = other DNA

SEQ ID NO: 75629 - DNA, 120 bp, synthetic construct; identical to SEQ ID NO: 45675
  source 1..120: mol_type = other DNA

SEQ ID NO: 75630 - DNA, 120 bp, synthetic construct; identical to SEQ ID NO: 45676
  source 1..120: mol_type = other DNA

SEQ ID NO: 75631 - DNA, 120 bp, synthetic construct; identical to SEQ ID NO: 12880
  source 1..120: mol_type = other DNA

SEQ ID NO: 75632 - DNA, 120 bp, synthetic construct; identical to SEQ ID NO: 45678
  source 1..120: mol_type = other DNA

SEQ ID NO: 75633 - DNA, 120 bp, synthetic construct; identical to SEQ ID NO: 45679
  source 1..120: mol_type = other DNA

SEQ ID NO: 75634 - DNA, 120 bp, synthetic construct; identical to SEQ ID NO: 45680
  source 1..120: mol_type = other DNA

SEQ ID NO: 75635 - DNA, 120 bp, synthetic construct; identical to SEQ ID NO: 12881
  source 1..120: mol_type = other DNA

SEQ ID NO: 75636 - DNA, 120 bp, synthetic construct; identical to SEQ ID NO: 45682
  source 1..120: mol_type = other DNA

SEQ ID NO: 75637 - DNA, 120 bp, synthetic construct; identical to SEQ ID NO: 45683
  source 1..120: mol_type = other DNA

SEQ ID NO: 75638 - DNA, 120 bp, synthetic construct; identical to SEQ ID NO: 45684
  source 1..120: mol_type = other DNA

SEQ ID NO: 75639 - DNA, 120 bp, synthetic construct; identical to SEQ ID NO: 45685
  source 1..120: mol_type = other DNA

SEQ ID NO: 75640 - DNA, 120 bp, synthetic construct; identical to SEQ ID NO: 12882
  source 1..120: mol_type = other DNA

SEQ ID NO: 75641 - DNA, 120 bp, synthetic construct; identical to SEQ ID NO: 45687
  source 1..120: mol_type = other DNA

SEQ ID NO: 75642 - DNA, 120 bp, synthetic construct; identical to SEQ ID NO: 45688
  source 1..120: mol_type = other DNA

SEQ ID NO: 75643 - DNA, 120 bp, synthetic construct; identical to SEQ ID NO: 45689
  source 1..120: mol_type = other DNA

SEQ ID NO: 75644 - DNA, 120 bp, synthetic construct; identical to SEQ ID NO: 12883
  source 1..120: mol_type = other DNA

SEQ ID NO: 75645 - DNA, 120 bp, synthetic construct; identical to SEQ ID NO: 45691
  source 1..120: mol_type = other DNA

SEQ ID NO: 75646 - DNA, 120 bp, synthetic construct; identical to SEQ ID NO: 45692
  source 1..120: mol_type = other DNA

SEQ ID NO: 75647 - DNA, 120 bp, synthetic construct; identical to SEQ ID NO: 12884
  source 1..120: mol_type = other DNA

SEQ ID NO: 75648 - DNA, 120 bp, synthetic construct; identical to SEQ ID NO: 45694
  source 1..120: mol_type = other DNA

SEQ ID NO: 75649 - DNA, 120 bp, synthetic construct; identical to SEQ ID NO: 45695
  source 1..120: mol_type = other DNA

SEQ ID NO: 75650 - DNA, 120 bp, synthetic construct; identical to SEQ ID NO: 45696
  source 1..120: mol_type = other DNA

SEQ ID NO: 75651 - DNA, 120 bp, synthetic construct; identical to SEQ ID NO: 45697
  source 1..120: mol_type = other DNA

SEQ ID NO: 75652 - DNA, 120 bp, synthetic construct; identical to SEQ ID NO: 12885
  source 1..120: mol_type = other DNA

SEQ ID NO: 75653 - DNA, 120 bp, synthetic construct; identical to SEQ ID NO: 45699
  source 1..120: mol_type = other DNA

SEQ ID NO: 75654 - DNA, 120 bp, synthetic construct; identical to SEQ ID NO: 45700
  source 1..120: mol_type = other DNA

SEQ ID NO: 75655 - DNA, 120 bp, synthetic construct; identical to SEQ ID NO: 12886
  source 1..120: mol_type = other DNA

SEQ ID NO: 75656 - DNA, 120 bp, synthetic construct; identical to SEQ ID NO: 45702
  source 1..120: mol_type = other DNA

SEQ ID NO: 75657 - DNA, 120 bp, synthetic construct; identical to SEQ ID NO: 45703
  source 1..120: mol_type = other DNA

SEQ ID NO: 75658 - DNA, 120 bp, synthetic construct; identical to SEQ ID NO: 45704
  source 1..120: mol_type = other DNA

SEQ ID NO: 75659 - DNA, 120 bp, synthetic construct; identical to SEQ ID NO: 12887
  source 1..120: mol_type = other DNA

SEQ ID NO: 75660 - DNA, 120 bp, synthetic construct; identical to SEQ ID NO: 45706
  source 1..120: mol_type = other DNA

SEQ ID NO: 75661 - DNA, 120 bp, synthetic construct; identical to SEQ ID NO: 45707
  source 1..120: mol_type = other DNA

SEQ ID NO: 75662 - DNA, 120 bp, synthetic construct; identical to SEQ ID NO: 45708
  source 1..120: mol_type = other DNA

SEQ ID NO: 75663 - DNA, 120 bp, synthetic construct; identical to SEQ ID NO: 12888
  source 1..120: mol_type = other DNA

SEQ ID NO: 75664 - DNA, 120 bp, synthetic construct; identical to SEQ ID NO: 45710
  source 1..120: mol_type = other DNA

SEQ ID NO: 75665 - DNA, 120 bp, synthetic construct; identical to SEQ ID NO: 45711
  source 1..120: mol_type = other DNA

SEQ ID NO: 75666 - DNA, 120 bp, synthetic construct; identical to SEQ ID NO: 45712
  source 1..120: mol_type = other DNA

SEQ ID NO: 75667 - DNA, 120 bp, synthetic construct; identical to SEQ ID NO: 12889
  source 1..120: mol_type = other DNA

SEQ ID NO: 75668 - DNA, 120 bp, synthetic construct; identical to SEQ ID NO: 45714
  source 1..120: mol_type = other DNA

SEQ ID NO: 75669 - DNA, 120 bp, synthetic construct; identical to SEQ ID NO: 45715
  source 1..120: mol_type = other DNA

SEQ ID NO: 75670 - DNA, 120 bp, synthetic construct; identical to SEQ ID NO: 45716
  source 1..120: mol_type = other DNA

SEQ ID NO: 75671 - DNA, 120 bp, synthetic construct; identical to SEQ ID NO: 12890
  source 1..120: mol_type = other DNA

SEQ ID NO: 75672 - DNA, 120 bp, synthetic construct; identical to SEQ ID NO: 45718
  source 1..120: mol_type = other DNA

SEQ ID NO: 75673 - DNA, 120 bp, synthetic construct; identical to SEQ ID NO: 45719
  source 1..120: mol_type = other DNA

SEQ ID NO: 75674 - DNA, 120 bp, synthetic construct; identical to SEQ ID NO: 45720
  source 1..120: mol_type = other DNA

SEQ ID NO: 75675 - DNA, 120 bp, synthetic construct; identical to SEQ ID NO: 12891
  source 1..120: mol_type = other DNA

SEQ ID NO: 75676 - DNA, 120 bp, synthetic construct; identical to SEQ ID NO: 45722
  source 1..120: mol_type = other DNA

SEQ ID NO: 75677 - DNA, 120 bp, synthetic construct; identical to SEQ ID NO: 45723
  source 1..120: mol_type = other DNA

SEQ ID NO: 75678 - DNA, 120 bp, synthetic construct; identical to SEQ ID NO: 45724
  source 1..120: mol_type = other DNA

SEQ ID NO: 75679 - DNA, 120 bp, synthetic construct; identical to SEQ ID NO: 45725
  source 1..120: mol_type = other DNA

SEQ ID NO: 75680 - DNA, 120 bp, synthetic construct; identical to SEQ ID NO: 12892
  source 1..120: mol_type = other DNA

SEQ ID NO: 75681 - DNA, 120 bp, synthetic construct; identical to SEQ ID NO: 45727
  source 1..120: mol_type = other DNA

SEQ ID NO: 75682 - DNA, 120 bp, synthetic construct; identical to SEQ ID NO: 45728
  source 1..120: mol_type = other DNA

SEQ ID NO: 75683 - DNA, 120 bp, synthetic construct; identical to SEQ ID NO: 45729
  source 1..120: mol_type = other DNA

SEQ ID NO: 75684 - DNA, 120 bp, synthetic construct; identical to SEQ ID NO: 12893
  source 1..120: mol_type = other DNA

SEQ ID NO: 75685 - DNA, 120 bp, synthetic construct; identical to SEQ ID NO: 45731
  source 1..120: mol_type = other DNA

SEQ ID NO: 75686 - DNA, 120 bp, synthetic construct; identical to SEQ ID NO: 45732
  source 1..120: mol_type = other DNA

SEQ ID NO: 75687 - DNA, 120 bp, synthetic construct; identical to SEQ ID NO: 12894
  source 1..120: mol_type = other DNA

SEQ ID NO: 75688 - DNA, 120 bp, synthetic construct; identical to SEQ ID NO: 45734
  source 1..120: mol_type = other DNA

SEQ ID NO: 75689 - DNA, 120 bp, synthetic construct; identical to SEQ ID NO: 45735
  source 1..120: mol_type = other DNA

SEQ ID NO: 75690 - DNA, 120 bp, synthetic construct; identical to SEQ ID NO: 45736
  source 1..120: mol_type = other DNA

SEQ ID NO: 75691 - DNA, 120 bp, synthetic construct; identical to SEQ ID NO: 45737
  source 1..120: mol_type = other DNA

SEQ ID NO: 75692 - DNA, 120 bp, synthetic construct; identical to SEQ ID NO: 12895
  source 1..120: mol_type = other DNA

SEQ ID NO: 75693 - DNA, 120 bp, synthetic construct; identical to SEQ ID NO: 45739
  source 1..120: mol_type = other DNA

SEQ ID NO: 75694 - DNA, 120 bp, synthetic construct; identical to SEQ ID NO: 45740
  source 1..120: mol_type = other DNA

SEQ ID NO: 75695 - DNA, 120 bp, synthetic construct; identical to SEQ ID NO: 12896
  source 1..120: mol_type = other DNA

SEQ ID NO: 75696 - DNA, 120 bp, synthetic construct; identical to SEQ ID NO: 45742
  source 1..120: mol_type = other DNA

SEQ ID NO: 75697 - DNA, 120 bp, synthetic construct; identical to SEQ ID NO: 45743
  source 1..120: mol_type = other DNA

SEQ ID NO: 75698 - DNA, 120 bp, synthetic construct; identical to SEQ ID NO: 45744
  source 1..120: mol_type = other DNA

SEQ ID NO: 75699 - DNA, 120 bp, synthetic construct; identical to SEQ ID NO: 45745
  source 1..120: mol_type = other DNA

SEQ ID NO: 75700 - DNA, 120 bp, synthetic construct; identical to SEQ ID NO: 12897
  source 1..120: mol_type = other DNA

SEQ ID NO: 75701 - DNA, 120 bp, synthetic construct; identical to SEQ ID NO: 45747
  source 1..120: mol_type = other DNA

SEQ ID NO: 75702 - DNA, 120 bp, synthetic construct; identical to SEQ ID NO: 45748
  source 1..120: mol_type = other DNA

SEQ ID NO: 75703 - DNA, 120 bp, synthetic construct; identical to SEQ ID NO: 45749
  source 1..120: mol_type = other DNA

SEQ ID NO: 75704 - DNA, 120 bp, synthetic construct; identical to SEQ ID NO: 12898
  source 1..120: mol_type = other DNA

SEQ ID NO: 75705 - DNA, 120 bp, synthetic construct; identical to SEQ ID NO: 45751
  source 1..120: mol_type = other DNA

SEQ ID NO: 75706 - DNA, 120 bp, synthetic construct; identical to SEQ ID NO: 45752
  source 1..120: mol_type = other DNA

SEQ ID NO: 75707 - DNA, 120 bp, synthetic construct; identical to SEQ ID NO: 45753
  source 1..120: mol_type = other DNA

SEQ ID NO: 75708 - DNA, 120 bp, synthetic construct; identical to SEQ ID NO: 12899
  source 1..120: mol_type = other DNA

SEQ ID NO: 75709 - DNA, 120 bp, synthetic construct; identical to SEQ ID NO: 45755
  source 1..120: mol_type = other DNA

SEQ ID NO: 75710 - DNA, 120 bp, synthetic construct; identical to SEQ ID NO: 45756
  source 1..120: mol_type = other DNA

SEQ ID NO: 75711 - DNA, 120 bp, synthetic construct; identical to SEQ ID NO: 45757
  source 1..120: mol_type = other DNA

SEQ ID NO: 75712 - DNA, 120 bp, synthetic construct; identical to SEQ ID NO: 12900
  source 1..120: mol_type = other DNA

SEQ ID NO: 75713 - DNA, 120 bp, synthetic construct; identical to SEQ ID NO: 12901
  source 1..120: mol_type = other DNA

SEQ ID NO: 75714 - DNA, 120 bp, synthetic construct; identical to SEQ ID NO: 45760
  source 1..120: mol_type = other DNA

SEQ ID NO: 75715 - DNA, 120 bp, synthetic construct; identical to SEQ ID NO: 45761
  source 1..120: mol_type = other DNA

SEQ ID NO: 75716 - DNA, 120 bp, synthetic construct; identical to SEQ ID NO: 5510
  source 1..120: mol_type = other DNA

SEQ ID NO: 75717 - DNA, 120 bp, synthetic construct; identical to SEQ ID NO: 12902
  source 1..120: mol_type = other DNA

SEQ ID NO: 75718 - DNA, 120 bp, synthetic construct; identical to SEQ ID NO: 45764
  source 1..120: mol_type = other DNA

SEQ ID NO: 75719 - DNA, 120 bp, synthetic construct; identical to SEQ ID NO: 45765
  source 1..120: mol_type = other DNA

SEQ ID NO: 75720 - DNA, 120 bp, synthetic construct; identical to SEQ ID NO: 45766
  source 1..120: mol_type = other DNA

SEQ ID NO: 75721 - DNA, 120 bp, synthetic construct; identical to SEQ ID NO: 12903
  source 1..120: mol_type = other DNA

SEQ ID NO: 75722 - DNA, 120 bp, synthetic construct; identical to SEQ ID NO: 45768
  source 1..120: mol_type = other DNA

SEQ ID NO: 75723 - DNA, 120 bp, synthetic construct; identical to SEQ ID NO: 45769
  source 1..120: mol_type = other DNA

SEQ ID NO: 75724 - DNA, 120 bp, synthetic construct; identical to SEQ ID NO: 45770
  source 1..120: mol_type = other DNA

SEQ ID NO: 75725 - DNA, 120 bp, synthetic construct; identical to SEQ ID NO: 12904
  source 1..120: mol_type = other DNA

SEQ ID NO: 75726 - DNA, 120 bp, synthetic construct; identical to SEQ ID NO: 45772
  source 1..120: mol_type = other DNA

SEQ ID NO: 75727 - DNA, 120 bp, synthetic construct; identical to SEQ ID NO: 45773
  source 1..120: mol_type = other DNA

SEQ ID NO: 75728 - DNA, 120 bp, synthetic construct; identical to SEQ ID NO: 45774
  source 1..120: mol_type = other DNA

SEQ ID NO: 75729 - DNA, 120 bp, synthetic construct; identical to SEQ ID NO: 45775
  source 1..120: mol_type = other DNA

SEQ ID NO: 75730 - DNA, 120 bp, synthetic construct; identical to SEQ ID NO: 12905
  source 1..120: mol_type = other DNA

SEQ ID NO: 75731 - DNA, 120 bp, synthetic construct; identical to SEQ ID NO: 45777
  source 1..120: mol_type = other DNA

SEQ ID NO: 75732 - DNA, 120 bp, synthetic construct; identical to SEQ ID NO: 45778
  source 1..120: mol_type = other DNA

SEQ ID NO: 75733 - DNA, 120 bp, synthetic construct; identical to SEQ ID NO: 45779
  source 1..120: mol_type = other DNA

SEQ ID NO: 75734 - DNA, 120 bp, synthetic construct; identical to SEQ ID NO: 12906
  source 1..120: mol_type = other DNA

SEQ ID NO: 75735 - DNA, 120 bp, synthetic construct; identical to SEQ ID NO: 45781
  source 1..120: mol_type = other DNA

SEQ ID NO: 75736 - DNA, 120 bp, synthetic construct; identical to SEQ ID NO: 45782
  source 1..120: mol_type = other DNA

SEQ ID NO: 75737 - DNA, 120 bp, synthetic construct; identical to SEQ ID NO: 12907
  source 1..120: mol_type = other DNA

SEQ ID NO: 75738 - DNA, 120 bp, synthetic construct; identical to SEQ ID NO: 45784
  source 1..120: mol_type = other DNA

SEQ ID NO: 75739 - DNA, 120 bp, synthetic construct; identical to SEQ ID NO: 45785
  source 1..120: mol_type = other DNA

SEQ ID NO: 75740 - DNA, 120 bp, synthetic construct; identical to SEQ ID NO: 45786
  source 1..120: mol_type = other DNA

SEQ ID NO: 75741 - DNA, 120 bp, synthetic construct; identical to SEQ ID NO: 45787
  source 1..120: mol_type = other DNA

SEQ ID NO: 75742 - DNA, 120 bp, synthetic construct; identical to SEQ ID NO: 12908
  source 1..120: mol_type = other DNA

SEQ ID NO: 75743 - DNA, 120 bp, synthetic construct; identical to SEQ ID NO: 45789
  source 1..120: mol_type = other DNA

SEQ ID NO: 75744 - DNA, 120 bp, synthetic construct; identical to SEQ ID NO: 45790
  source 1..120: mol_type = other DNA

SEQ ID NO: 75745 - DNA, 120 bp, synthetic construct; identical to SEQ ID NO: 12909
  source 1..120: mol_type = other DNA

SEQ ID NO: 75746 - DNA, 120 bp, synthetic construct; identical to SEQ ID NO: 45792
  source 1..120: mol_type = other DNA

SEQ ID NO: 75747 - DNA, 120 bp, synthetic construct; identical to SEQ ID NO: 45793
  source 1..120: mol_type = other DNA

SEQ ID NO: 75748 - DNA, 120 bp, synthetic construct; identical to SEQ ID NO: 45794
  source 1..120: mol_type = other DNA

SEQ ID NO: 75749 - DNA, 120 bp, synthetic construct; identical to SEQ ID NO: 45795
  source 1..120: mol_type = other DNA

SEQ ID NO: 75750 - DNA, 120 bp, synthetic construct; identical to SEQ ID NO: 12910
  source 1..120: mol_type = other DNA

SEQ ID NO: 75751 - DNA, 120 bp, synthetic construct; identical to SEQ ID NO: 45797
  source 1..120: mol_type = other DNA

SEQ ID NO: 75752 - DNA, 120 bp, synthetic construct; identical to SEQ ID NO: 45798
  source 1..120: mol_type = other DNA

SEQ ID NO: 75753 - DNA, 120 bp, synthetic construct; identical to SEQ ID NO: 12911
  source 1..120: mol_type = other DNA

SEQ ID NO: 75754 - DNA, 120 bp, synthetic construct; identical to SEQ ID NO: 45800
  source 1..120: mol_type = other DNA

SEQ ID NO: 75755 - DNA, 120 bp, synthetic construct; identical to SEQ ID NO: 45801
  source 1..120: mol_type = other DNA

SEQ ID NO: 75756 - DNA, 120 bp, synthetic construct; identical to SEQ ID NO: 45802
  source 1..120: mol_type = other DNA

SEQ ID NO: 75757 - DNA, 120 bp, synthetic construct; identical to SEQ ID NO: 12912
  source 1..120: mol_type = other DNA

SEQ ID NO: 75758 - DNA, 120 bp, synthetic construct; identical to SEQ ID NO: 45804
  source 1..120: mol_type = other DNA

SEQ ID NO: 75759 - DNA, 120 bp, synthetic construct; identical to SEQ ID NO: 45805
  source 1..120: mol_type = other DNA

SEQ ID NO: 75760 - DNA, 120 bp, synthetic construct; identical to SEQ ID NO: 45806
  source 1..120: mol_type = other DNA

SEQ ID NO: 75761 - DNA, 120 bp, synthetic construct; identical to SEQ ID NO: 12913
  source 1..120: mol_type = other DNA

SEQ ID NO: 75762 - DNA, 120 bp, synthetic construct; identical to SEQ ID NO: 45808
  source 1..120: mol_type = other DNA

SEQ ID NO: 75763 - DNA, 120 bp, synthetic construct; identical to SEQ ID NO: 45809
  source 1..120: mol_type = other DNA

SEQ ID NO: 75764 - DNA, 120 bp, synthetic construct; identical to SEQ ID NO: 45810
  source 1..120: mol_type = other DNA

SEQ ID NO: 75765 - DNA, 120 bp, synthetic construct; identical to SEQ ID NO: 12914
  source 1..120: mol_type = other DNA

SEQ ID NO: 75766 - DNA, 120 bp, synthetic construct; identical to SEQ ID NO: 45812
  source 1..120: mol_type = other DNA

SEQ ID NO: 75767 - DNA, 120 bp, synthetic construct; identical to SEQ ID NO: 5522
  source 1..120: mol_type = other DNA

SEQ ID NO: 75768 - DNA, 120 bp, synthetic construct; identical to SEQ ID NO: 45814
  source 1..120: mol_type = other DNA

SEQ ID NO: 75769 - DNA, 120 bp, synthetic construct; identical to SEQ ID NO: 12915
  source 1..120: mol_type = other DNA

SEQ ID NO: 75770 - DNA, 120 bp, synthetic construct; identical to SEQ ID NO: 45816
  source 1..120: mol_type = other DNA

SEQ ID NO: 75771 - DNA, 120 bp, synthetic construct; identical to SEQ ID NO: 45817
  source 1..120: mol_type = other DNA

SEQ ID NO: 75772 - DNA, 120 bp, synthetic construct; identical to SEQ ID NO: 45818
  source 1..120: mol_type = other DNA

SEQ ID NO: 75773 - DNA, 120 bp, synthetic construct; identical to SEQ ID NO: 45819
  source 1..120: mol_type = other DNA

SEQ ID NO: 75774 - DNA, 120 bp, synthetic construct; identical to SEQ ID NO: 12916
  source 1..120: mol_type = other DNA

SEQ ID NO: 75775 - DNA, 120 bp, synthetic construct; identical to SEQ ID NO: 45821
  source 1..120: mol_type = other DNA

SEQ ID NO: 75776 - DNA, 120 bp, synthetic construct; identical to SEQ ID NO: 45822
  source 1..120: mol_type = other DNA

SEQ ID NO: 75777 - DNA, 120 bp, synthetic construct; identical to SEQ ID NO: 45823
  source 1..120: mol_type = other DNA

SEQ ID NO: 75778 - DNA, 120 bp, synthetic construct; identical to SEQ ID NO: 12917
  source 1..120: mol_type = other DNA

SEQ ID NO: 75779 - DNA, 120 bp, synthetic construct; identical to SEQ ID NO: 45825
  source 1..120: mol_type = other DNA

SEQ ID NO: 75780 - DNA, 120 bp, synthetic construct; identical to SEQ ID NO: 45826
  source 1..120: mol_type = other DNA

SEQ ID NO: 75781 - DNA, 120 bp, synthetic construct; identical to SEQ ID NO: 45827
  source 1..120: mol_type = other DNA

SEQ ID NO: 75782 - DNA, 120 bp, synthetic construct; identical to SEQ ID NO: 12918
  source 1..120: mol_type = other DNA

SEQ ID NO: 75783 - DNA, 120 bp, synthetic construct; identical to SEQ ID NO: 45829
  source 1..120: mol_type = other DNA

SEQ ID NO: 75784 - DNA, 120 bp, synthetic construct; identical to SEQ ID NO: 45830
  source 1..120: mol_type = other DNA

SEQ ID NO: 75785 - DNA, 120 bp, synthetic construct; identical to SEQ ID NO: 45831
  source 1..120: mol_type = other DNA

SEQ ID NO: 75786 - DNA, 120 bp, synthetic construct; identical to SEQ ID NO: 45832
  source 1..120: mol_type = other DNA

SEQ ID NO: 75787 - DNA, 120 bp, synthetic construct; identical to SEQ ID NO: 12919
  source 1..120: mol_type = other DNA

SEQ ID NO: 75788 - DNA, 120 bp, synthetic construct; identical to SEQ ID NO: 45834
  source 1..120: mol_type = other DNA

SEQ ID NO: 75789 - DNA, 120 bp, synthetic construct; identical to SEQ ID NO: 45835
  source 1..120: mol_type = other DNA

SEQ ID NO: 75790 - DNA, 120 bp, synthetic construct; identical to SEQ ID NO: 45836
  source 1..120: mol_type = other DNA

SEQ ID NO: 75791 - DNA, 120 bp, synthetic construct; identical to SEQ ID NO: 12920
  source 1..120: mol_type = other DNA

SEQ ID NO: 75792 - DNA, 120 bp, synthetic construct; identical to SEQ ID NO: 45838
  source 1..120: mol_type = other DNA

SEQ ID NO: 75793 - DNA, 120 bp, synthetic construct; identical to SEQ ID NO: 45839
  source 1..120: mol_type = other DNA

SEQ ID NO: 75794 - DNA, 120 bp, synthetic construct; identical to SEQ ID NO: 45840
  source 1..120: mol_type = other DNA

SEQ ID NO: 75795 - DNA, 120 bp, synthetic construct; identical to SEQ ID NO: 12921
  source 1..120: mol_type = other DNA

SEQ ID NO: 75796 - DNA, 120 bp, synthetic construct; identical to SEQ ID NO: 45842
  source 1..120: mol_type = other DNA

SEQ ID NO: 75797 - DNA, 120 bp, synthetic construct; identical to SEQ ID NO: 45843
  source 1..120: mol_type = other DNA

SEQ ID NO: 75798 - DNA, 120 bp, synthetic construct; identical to SEQ ID NO: 45844
  source 1..120: mol_type = other DNA

SEQ ID NO: 75799 - DNA, 120 bp, synthetic construct; identical to SEQ ID NO: 12922
  source 1..120: mol_type = other DNA

SEQ ID NO: 75800 - DNA, 120 bp, synthetic construct; identical to SEQ ID NO: 45846
  source 1..120: mol_type = other DNA

SEQ ID NO: 75801 - DNA, 120 bp, synthetic construct; identical to SEQ ID NO: 45847
  source 1..120: mol_type = other DNA

SEQ ID NO: 75802 - DNA, 120 bp, synthetic construct; identical to SEQ ID NO: 12923
  source 1..120: mol_type = other DNA

SEQ ID NO: 75803 - DNA, 120 bp, synthetic construct; identical to SEQ ID NO: 45849
  source 1..120: mol_type = other DNA

SEQ ID NO: 75804 - DNA, 120 bp, synthetic construct; identical to SEQ ID NO: 45850
  source 1..120: mol_type = other DNA

SEQ ID NO: 75805 - DNA, 120 bp, synthetic construct; identical to SEQ ID NO: 45851
  source 1..120: mol_type = other DNA

SEQ ID NO: 75806 - DNA, 120 bp, synthetic construct; identical to SEQ ID NO: 45852
  source 1..120: mol_type = other DNA

SEQ ID NO: 75807 - DNA, 120 bp, synthetic construct; identical to SEQ ID NO: 12924
  source 1..120: mol_type = other DNA

SEQ ID NO: 75808 - DNA, 120 bp, synthetic construct; identical to SEQ ID NO: 45854
  source 1..120: mol_type = other DNA

SEQ ID NO: 75809 - DNA, 120 bp, synthetic construct; identical to SEQ ID NO: 45855
  source 1..120: mol_type = other DNA

SEQ ID NO: 75810 - DNA, 120 bp, synthetic construct; identical to SEQ ID NO: 12925
  source 1..120: mol_type = other DNA

SEQ ID NO: 75811 - DNA, 120 bp, synthetic construct; identical to SEQ ID NO: 45857
  source 1..120: mol_type = other DNA

SEQ ID NO: 75812 - DNA, 120 bp, synthetic construct; identical to SEQ ID NO: 45858
  source 1..120: mol_type = other DNA

SEQ ID NO: 75813 - DNA, 120 bp, synthetic construct; identical to SEQ ID NO: 5532
  source 1..120: mol_type = other DNA

SEQ ID NO: 75814 - DNA, 120 bp, synthetic construct; identical to SEQ ID NO: 12926
  source 1..120: mol_type = other DNA

SEQ ID NO: 75815 - DNA, 120 bp, synthetic construct; identical to SEQ ID NO: 45861
  source 1..120: mol_type = other DNA

SEQ ID NO: 75816 - DNA, 120 bp, synthetic construct; identical to SEQ ID NO: 45862
  source 1..120: mol_type = other DNA

SEQ ID NO: 75817 - DNA, 120 bp, synthetic construct; identical to SEQ ID NO: 45863
  source 1..120: mol_type = other DNA

SEQ ID NO: 75818 - DNA, 120 bp, synthetic construct; identical to SEQ ID NO: 45864
  source 1..120: mol_type = other DNA

SEQ ID NO: 75819 - DNA, 120 bp, synthetic construct; identical to SEQ ID NO: 12927
  source 1..120: mol_type = other DNA

SEQ ID NO: 75820 - DNA, 120 bp, synthetic construct; identical to SEQ ID NO: 45866
  source 1..120: mol_type = other DNA

SEQ ID NO: 75821 - DNA, 120 bp, synthetic construct; identical to SEQ ID NO: 45867
  source 1..120: mol_type = other DNA

SEQ ID NO: 75822 - DNA, 120 bp, synthetic construct; identical to SEQ ID NO: 12928
  source 1..120: mol_type = other DNA

SEQ ID NO: 75823 - DNA, 120 bp, synthetic construct; identical to SEQ ID NO: 45869
  source 1..120: mol_type = other DNA

SEQ ID NO: 75824 - DNA, 120 bp, synthetic construct; identical to SEQ ID NO: 45870
  source 1..120: mol_type = other DNA

SEQ ID NO: 75825 - DNA, 120 bp, synthetic construct; identical to SEQ ID NO: 45871
  source 1..120: mol_type = other DNA

SEQ ID NO: 75826 - DNA, 120 bp, synthetic construct; identical to SEQ ID NO: 45872
  source 1..120: mol_type = other DNA

SEQ ID NO: 75827 - DNA, 120 bp, synthetic construct; identical to SEQ ID NO: 12929
  source 1..120: mol_type = other DNA

SEQ ID NO: 75828 - DNA, 120 bp, synthetic construct; identical to SEQ ID NO: 45874
  source 1..120: mol_type = other DNA

SEQ ID NO: 75829 - DNA, 120 bp, synthetic construct; identical to SEQ ID NO: 45875
  source 1..120: mol_type = other DNA

SEQ ID NO: 75830 - DNA, 120 bp, synthetic construct; identical to SEQ ID NO: 12930
  source 1..120: mol_type = other DNA

SEQ ID NO: 75831 - DNA, 120 bp, synthetic construct; identical to SEQ ID NO: 45877
  source 1..120: mol_type = other DNA

SEQ ID NO: 75832 - DNA, 120 bp, synthetic construct; identical to SEQ ID NO: 45878
  source 1..120: mol_type = other DNA

SEQ ID NO: 75833 - DNA, 120 bp, synthetic construct; identical to SEQ ID NO: 45879
  source 1..120: mol_type = other DNA

SEQ ID NO: 75834 - DNA, 120 bp, synthetic construct; identical to SEQ ID NO: 45880
  source 1..120: mol_type = other DNA

SEQ ID NO: 75835 - DNA, 120 bp, synthetic construct; identical to SEQ ID NO: 12931
  source 1..120: mol_type = other DNA

SEQ ID NO: 75836 - DNA, 120 bp, synthetic construct; identical to SEQ ID NO: 45882
  source 1..120: mol_type = other DNA

SEQ ID NO: 75837 - DNA, 120 bp, synthetic construct; identical to SEQ ID NO: 45883
  source 1..120: mol_type = other DNA

SEQ ID NO: 75838 - DNA, 120 bp, synthetic construct; identical to SEQ ID NO: 45884
  source 1..120: mol_type = other DNA

SEQ ID NO: 75839 - DNA, 120 bp, synthetic construct; identical to SEQ ID NO: 12932
  source 1..120: mol_type = other DNA

SEQ ID NO: 75840 - DNA, 120 bp, synthetic construct; identical to SEQ ID NO: 45886
  source 1..120: mol_type = other DNA

SEQ ID NO: 75841 - DNA, 120 bp, synthetic construct; identical to SEQ ID NO: 45887
  source 1..120: mol_type = other DNA

SEQ ID NO: 75842 - DNA, 120 bp, synthetic construct; identical to SEQ ID NO: 45888
  source 1..120: mol_type = other DNA

SEQ ID NO: 75843 - DNA, 120 bp, synthetic construct; identical to SEQ ID NO: 12933
  source 1..120: mol_type = other DNA

SEQ ID NO: 75844 - DNA, 120 bp, synthetic construct; identical to SEQ ID NO: 45890
  source 1..120: mol_type = other DNA

SEQ ID NO: 75845 - DNA, 120 bp, synthetic construct; identical to SEQ ID NO: 45891
  source 1..120: mol_type = other DNA

SEQ ID NO: 75846 - DNA, 120 bp, synthetic construct; identical to SEQ ID NO: 45892
  source 1..120: mol_type = other DNA

SEQ ID NO: 75847 - DNA, 120 bp, synthetic construct; identical to SEQ ID NO: 45893
  source 1..120: mol_type = other DNA

SEQ ID NO: 75848 - DNA, 120 bp, synthetic construct; identical to SEQ ID NO: 12934
  source 1..120: mol_type = other DNA

SEQ ID NO: 75849 - DNA, 120 bp, synthetic construct; identical to SEQ ID NO: 45895
  source 1..120: mol_type = other DNA

SEQ ID NO: 75850 - DNA, 120 bp, synthetic construct; identical to SEQ ID NO: 45896
  source 1..120: mol_type = other DNA

SEQ ID NO: 75851 - DNA, 120 bp, synthetic construct; identical to SEQ ID NO: 12935
  source 1..120: mol_type = other DNA

SEQ ID NO: 75852 - DNA, 120 bp, synthetic construct; identical to SEQ ID NO: 45898
  source 1..120: mol_type = other DNA

SEQ ID NO: 75853 - DNA, 120 bp, synthetic construct; identical to SEQ ID NO: 45899
  source 1..120: mol_type = other DNA

SEQ ID NO: 75854 - DNA, 120 bp, synthetic construct; identical to SEQ ID NO: 45900
  source 1..120: mol_type = other DNA

SEQ ID NO: 75855 - DNA, 120 bp, synthetic construct; identical to SEQ ID NO: 45901
  source 1..120: mol_type = other DNA

SEQ ID NO: 75856 - DNA, 120 bp, synthetic construct; identical to SEQ ID NO: 12936
  source 1..120: mol_type = other DNA

SEQ ID NO: 75857 - DNA, 120 bp, synthetic construct; identical to SEQ ID NO: 45903
  source 1..120: mol_type = other DNA

SEQ ID NO: 75858 - DNA, 120 bp, synthetic construct; identical to SEQ ID NO: 45904
  source 1..120: mol_type = other DNA

SEQ ID NO: 75859 - DNA, 120 bp, synthetic construct; identical to SEQ ID NO: 45905
  source 1..120: mol_type = other DNA

SEQ ID NO: 75860 - DNA, 120 bp, synthetic construct; identical to SEQ ID NO: 12937
  source 1..120: mol_type = other DNA

SEQ ID NO: 75861 - DNA, 120 bp, synthetic construct; identical to SEQ ID NO: 45907
  source 1..120: mol_type = other DNA

SEQ ID NO: 75862 - DNA, 120 bp, synthetic construct; identical to SEQ ID NO: 45908
  source 1..120: mol_type = other DNA

SEQ ID NO: 75863 - DNA, 120 bp, synthetic construct; identical to SEQ ID NO: 45909
  source 1..120: mol_type = other DNA

SEQ ID NO: 75864 - DNA, 120 bp, synthetic construct; identical to SEQ ID NO: 12938
  source 1..120: mol_type = other DNA

SEQ ID NO: 75865 - DNA, 120 bp, synthetic construct; identical to SEQ ID NO: 45911
  source 1..120: mol_type = other DNA

SEQ ID NO: 75866 - DNA, 120 bp, synthetic construct; identical to SEQ ID NO: 45912
  source 1..120: mol_type = other DNA

SEQ ID NO: 75867 - DNA, 120 bp, synthetic construct; identical to SEQ ID NO: 12939
  source 1..120: mol_type = other DNA

SEQ ID NO: 75868 - DNA, 120 bp, synthetic construct; identical to SEQ ID NO: 45914
  source 1..120: mol_type = other DNA

SEQ ID NO: 75869 - DNA, 120 bp, synthetic construct; identical to SEQ ID NO: 45915
  source 1..120: mol_type = other DNA

SEQ ID NO: 75870 - DNA, 120 bp, synthetic construct; identical to SEQ ID NO: 45916
  source 1..120: mol_type = other DNA

SEQ ID NO: 75871 - DNA, 120 bp, synthetic construct; identical to SEQ ID NO: 12940
  source 1..120: mol_type = other DNA

SEQ ID NO: 75872 - DNA, 120 bp, synthetic construct; identical to SEQ ID NO: 45918
  source 1..120: mol_type = other DNA

SEQ ID NO: 75873 - DNA, 120 bp, synthetic construct; identical to SEQ ID NO: 45919
  source 1..120: mol_type = other DNA

SEQ ID NO: 75874 - DNA, 120 bp, synthetic construct; identical to SEQ ID NO: 45920
  source 1..120: mol_type = other DNA

SEQ ID NO: 75875 - DNA, 120 bp, synthetic construct; identical to SEQ ID NO: 12941
  source 1..120: mol_type = other DNA

SEQ ID NO: 75876 - DNA, 120 bp, synthetic construct; identical to SEQ ID NO: 45922
  source 1..120: mol_type = other DNA

SEQ ID NO: 75877 - DNA, 120 bp, synthetic construct; identical to SEQ ID NO: 45923
  source 1..120: mol_type = other DNA

SEQ ID NO: 75878 - DNA, 120 bp, synthetic construct; identical to SEQ ID NO: 45924
  source 1..120: mol_type = other DNA

SEQ ID NO: 75879 - DNA, 120 bp, synthetic construct; identical to SEQ ID NO: 45925
  source 1..120: mol_type = other DNA

SEQ ID NO: 75880 - DNA, 120 bp, synthetic construct; identical to SEQ ID NO: 12942
  source 1..120: mol_type = other DNA

SEQ ID NO: 75881 - DNA, 120 bp, synthetic construct; identical to SEQ ID NO: 45927
  source 1..120: mol_type = other DNA

SEQ ID NO: 75882 - DNA, 120 bp, synthetic construct; identical to SEQ ID NO: 45928
  source 1..120: mol_type = other DNA

SEQ ID NO: 75883 - DNA, 120 bp, synthetic construct; identical to SEQ ID NO: 12943
  source 1..120: mol_type = other DNA

SEQ ID NO: 75884 - DNA, 120 bp, synthetic construct; identical to SEQ ID NO: 45930
  source 1..120: mol_type = other DNA

SEQ ID NO: 75885 - DNA, 120 bp, synthetic construct; identical to SEQ ID NO: 45931
  source 1..120: mol_type = other DNA

SEQ ID NO: 75886 - DNA, 120 bp, synthetic construct; identical to SEQ ID NO: 45932
  source 1..120: mol_type = other DNA

SEQ ID NO: 75887 - DNA, 120 bp, synthetic construct; identical to SEQ ID NO: 45933
  source 1..120: mol_type = other DNA

SEQ ID NO: 75888 - DNA, 120 bp, synthetic construct; identical to SEQ ID NO: 12944
  source 1..120: mol_type = other DNA

SEQ ID NO: 75889 - DNA, 120 bp, synthetic construct; identical to SEQ ID NO: 45935
  source 1..120: mol_type = other DNA

SEQ ID NO: 75890 - DNA, 120 bp, synthetic construct; identical to SEQ ID NO: 45936
  source 1..120: mol_type = other DNA

SEQ ID NO: 75891 - DNA, 120 bp, synthetic construct; identical to SEQ ID NO: 45937
  source 1..120: mol_type = other DNA

SEQ ID NO: 75892 - DNA, 120 bp, synthetic construct; identical to SEQ ID NO: 12945
  source 1..120: mol_type = other DNA

SEQ ID NO: 75893 - DNA, 120 bp, synthetic construct; identical to SEQ ID NO: 45939
  source 1..120: mol_type = other DNA

SEQ ID NO: 75894 - DNA, 120 bp, synthetic construct; identical to SEQ ID NO: 45940
  source 1..120: mol_type = other DNA

SEQ ID NO: 75895 - DNA, 120 bp, synthetic construct; identical to SEQ ID NO: 12946
  source 1..120: mol_type = other DNA

SEQ ID NO: 75896 - DNA, 120 bp, synthetic construct; identical to SEQ ID NO: 45942
  source 1..120: mol_type = other DNA

SEQ ID NO: 75897 - DNA, 120 bp, synthetic construct; identical to SEQ ID NO: 45943
  source 1..120: mol_type = other DNA

SEQ ID NO: 75898 - DNA, 120 bp, synthetic construct; identical to SEQ ID NO: 45944
  source 1..120: mol_type = other DNA

SEQ ID NO: 75899 - DNA, 120 bp, synthetic construct; identical to SEQ ID NO: 45945
  source 1..120: mol_type = other DNA

SEQ ID NO: 75900 - DNA, 120 bp, synthetic construct; identical to SEQ ID NO: 12947
  source 1..120: mol_type = other DNA

SEQ ID NO: 75901 - DNA, 120 bp, synthetic construct; identical to SEQ ID NO: 45947
  source 1..120: mol_type = other DNA

SEQ ID NO: 75902 - DNA, 120 bp, synthetic construct; identical to SEQ ID NO: 45948
  source 1..120: mol_type = other DNA

SEQ ID NO: 75903 - DNA, 120 bp, synthetic construct; identical to SEQ ID NO: 12948
  source 1..120: mol_type = other DNA

SEQ ID NO: 75904 - DNA, 120 bp, synthetic construct; identical to SEQ ID NO: 45950
  source 1..120: mol_type = other DNA

SEQ ID NO: 75905 - DNA, 120 bp, synthetic construct; identical to SEQ ID NO: 45951
  source 1..120: mol_type = other DNA

SEQ ID NO: 75906 - DNA, 120 bp, synthetic construct; identical to SEQ ID NO: 45952
  source 1..120: mol_type = other DNA

SEQ ID NO: 75907 - DNA, 120 bp, synthetic construct; identical to SEQ ID NO: 12949
  source 1..120: mol_type = other DNA

SEQ ID NO: 75908 - DNA, 120 bp, synthetic construct; identical to SEQ ID NO: 45954
  source 1..120: mol_type = other DNA

SEQ ID NO: 75909 - DNA, 120 bp, synthetic construct; identical to SEQ ID NO: 45955
  source 1..120: mol_type = other DNA

SEQ ID NO: 75910 - DNA, 120 bp, synthetic construct; identical to SEQ ID NO: 45956
  source 1..120: mol_type = other DNA

SEQ ID NO: 75911 - DNA, 120 bp, synthetic construct; identical to SEQ ID NO: 45957
  source 1..120: mol_type = other DNA

SEQ ID NO: 75912 - DNA, 120 bp, synthetic construct; identical to SEQ ID NO: 12950
  source 1..120: mol_type = other DNA

SEQ ID NO: 75913 - DNA, 120 bp, synthetic construct; identical to SEQ ID NO: 45959
  source 1..120: mol_type = other DNA

SEQ ID NO: 75914 - DNA, 120 bp, synthetic construct; identical to SEQ ID NO: 45960
  source 1..120: mol_type = other DNA

SEQ ID NO: 75915 - DNA, 120 bp, synthetic construct; identical to SEQ ID NO: 12951
  source 1..120: mol_type = other DNA

SEQ ID NO: 75916 - DNA, 120 bp, synthetic construct; identical to SEQ ID NO: 45962
  source 1..120: mol_type = other DNA

SEQ ID NO: 75917 - DNA, 120 bp, synthetic construct; identical to SEQ ID NO: 45963
  source 1..120: mol_type = other DNA

SEQ ID NO: 75918 - DNA, 120 bp, synthetic construct; identical to SEQ ID NO: 45964
  source 1..120: mol_type = other DNA

SEQ ID NO: 75919 - DNA, 120 bp, synthetic construct; identical to SEQ ID NO: 45965
  source 1..120: mol_type = other DNA

SEQ ID NO: 75920 - DNA, 120 bp, synthetic construct; identical to SEQ ID NO: 12952
  source 1..120: mol_type = other DNA

SEQ ID NO: 75921 - DNA, 120 bp, synthetic construct; identical to SEQ ID NO: 45967
  source 1..120: mol_type = other DNA

SEQ ID NO: 75922 - DNA, 120 bp, synthetic construct; identical to SEQ ID NO: 45968
  source 1..120: mol_type = other DNA

SEQ ID NO: 75923 - DNA, 120 bp, synthetic construct; identical to SEQ ID NO: 12953
  source 1..120: mol_type = other DNA

SEQ ID NO: 75924 - DNA, 120 bp, synthetic construct; identical to SEQ ID NO: 45970
  source 1..120: mol_type = other DNA

SEQ ID NO: 75925 - DNA, 120 bp, synthetic construct; identical to SEQ ID NO: 45971
  source 1..120: mol_type = other DNA

SEQ ID NO: 75926 - DNA, 120 bp, synthetic construct; identical to SEQ ID NO: 45972
  source 1..120: mol_type = other DNA

SEQ ID NO: 75927 - DNA, 120 bp, synthetic construct; identical to SEQ ID NO: 45973
  source 1..120: mol_type = other DNA

SEQ ID NO: 75928 - DNA, 120 bp, synthetic construct; identical to SEQ ID NO: 12954
  source 1..120: mol_type = other DNA

SEQ ID NO: 75929 - DNA, 120 bp, synthetic construct; identical to SEQ ID NO: 45975
  source 1..120: mol_type = other DNA

SEQ ID NO: 75930 - DNA, 120 bp, synthetic construct; identical to SEQ ID NO: 45976
  source 1..120: mol_type = other DNA

SEQ ID NO: 75931 - DNA, 120 bp, synthetic construct; identical to SEQ ID NO: 45977
  source 1..120: mol_type = other DNA

SEQ ID NO: 75932 - DNA, 120 bp, synthetic construct; identical to SEQ ID NO: 12955
  source 1..120: mol_type = other DNA

SEQ ID NO: 75933 - DNA, 120 bp, synthetic construct; identical to SEQ ID NO: 45979
  source 1..120: mol_type = other DNA

SEQ ID NO: 75934 - DNA, 120 bp, synthetic construct; identical to SEQ ID NO: 45980
  source 1..120: mol_type = other DNA

SEQ ID NO: 75935 - DNA, 120 bp, synthetic construct; identical to SEQ ID NO: 45981
  source 1..120: mol_type = other DNA

SEQ ID NO: 75936 - DNA, 120 bp, synthetic construct; identical to SEQ ID NO: 12956
  source 1..120: mol_type = other DNA

SEQ ID NO: 75937 - DNA, 120 bp, synthetic construct; identical to SEQ ID NO: 45983
  source 1..120: mol_type = other DNA

SEQ ID NO: 75938 - DNA, 120 bp, synthetic construct; identical to SEQ ID NO: 45984
  source 1..120: mol_type = other DNA

SEQ ID NO: 75939 - DNA, 120 bp, synthetic construct; identical to SEQ ID NO: 12957
  source 1..120: mol_type = other DNA

SEQ ID NO: 75940 - DNA, 120 bp, synthetic construct; identical to SEQ ID NO: 45986
  source 1..120: mol_type = other DNA

SEQ ID NO: 75941 - DNA, 120 bp, synthetic construct; identical to SEQ ID NO: 45987
  source 1..120: mol_type = other DNA

SEQ ID NO: 75942 - DNA, 120 bp, synthetic construct; identical to SEQ ID NO: 45988
  source 1..120: mol_type = other DNA

SEQ ID NO: 75943 - DNA, 120 bp, synthetic construct; identical to SEQ ID NO: 12958
  source 1..120: mol_type = other DNA

SEQ ID NO: 75944 - DNA, 120 bp, synthetic construct; identical to SEQ ID NO: 45990
  source 1..120: mol_type = other DNA

SEQ ID NO: 75945 - DNA, 120 bp, synthetic construct; identical to SEQ ID NO: 45991
  source 1..120: mol_type = other DNA

SEQ ID NO: 75946 - DNA, 120 bp, synthetic construct; identical to SEQ ID NO: 45992
  source 1..120: mol_type = other DNA

SEQ ID NO: 75947 - DNA, 120 bp, synthetic construct; identical to SEQ ID NO: 12959
  source 1..120: mol_type = other DNA

SEQ ID NO: 75948 - DNA, 120 bp, synthetic construct; identical to SEQ ID NO: 45994
  source 1..120: mol_type = other DNA

SEQ ID NO: 75949 - DNA, 120 bp, synthetic construct; identical to SEQ ID NO: 45995
  source 1..120: mol_type = other DNA

SEQ ID NO: 75950 - DNA, 120 bp, synthetic construct; identical to SEQ ID NO: 45996
  source 1..120: mol_type = other DNA

SEQ ID NO: 75951 - DNA, 120 bp, synthetic construct; identical to SEQ ID NO: 45997
  source 1..120: mol_type = other DNA

SEQ ID NO: 75952 - DNA, 120 bp, synthetic construct; identical to SEQ ID NO: 12960
  source 1..120: mol_type = other DNA

SEQ ID NO: 75953 - DNA, 120 bp, synthetic construct; identical to SEQ ID NO: 45999
  source 1..120: mol_type = other DNA

SEQ ID NO: 75954 - DNA, 120 bp, synthetic construct; identical to SEQ ID NO: 46000
  source 1..120: mol_type = other DNA

SEQ ID NO: 75955 - DNA, 120 bp, synthetic construct; identical to SEQ ID NO: 12961
  source 1..120: mol_type = other DNA

SEQ ID NO: 75956 - DNA, 120 bp, synthetic construct; identical to SEQ ID NO: 46002
  source 1..120: mol_type = other DNA

SEQ ID NO: 75957 - DNA, 120 bp, synthetic construct; identical to SEQ ID NO: 46003
  source 1..120: mol_type = other DNA

SEQ ID NO: 75958 - DNA, 120 bp, synthetic construct; identical to SEQ ID NO: 46004
  source 1..120: mol_type = other DNA

SEQ ID NO: 75959 - DNA, 120 bp, synthetic construct; identical to SEQ ID NO: 46005
  source 1..120: mol_type = other DNA

SEQ ID NO: 75960 - DNA, 120 bp, synthetic construct; identical to SEQ ID NO: 12962
  source 1..120: mol_type = other DNA

SEQ ID NO: 75961 - DNA, 120 bp, synthetic construct; identical to SEQ ID NO: 46007
  source 1..120: mol_type = other DNA

SEQ ID NO: 75962 - DNA, 120 bp, synthetic construct; identical to SEQ ID NO: 46008
  source 1..120: mol_type = other DNA

SEQ ID NO: 75963 - DNA, 120 bp, synthetic construct; identical to SEQ ID NO: 12963
  source 1..120: mol_type = other DNA

SEQ ID NO: 75964 - DNA, 120 bp, synthetic construct; identical to SEQ ID NO: 46010
  source 1..120: mol_type = other DNA

SEQ ID NO: 75965 - DNA, 120 bp, synthetic construct; identical to SEQ ID NO: 46011
  source 1..120: mol_type = other DNA

SEQ ID NO: 75966 - DNA, 120 bp, synthetic construct; identical to SEQ ID NO: 46012
  source 1..120: mol_type = other DNA

SEQ ID NO: 75967 - DNA, 120 bp, synthetic construct; identical to SEQ ID NO: 46013
  source 1..120: mol_type = other DNA

SEQ ID NO: 75968 - DNA, 120 bp, synthetic construct; identical to SEQ ID NO: 12964
  source 1..120: mol_type = other DNA

SEQ ID NO: 75969 - DNA, 120 bp, synthetic construct; identical to SEQ ID NO: 46015
  source 1..120: mol_type = other DNA

SEQ ID NO: 75970 - DNA, 120 bp, synthetic construct; identical to SEQ ID NO: 46016
  source 1..120: mol_type = other DNA

SEQ ID NO: 75971 - DNA, 120 bp, synthetic construct; identical to SEQ ID NO: 46017
  source 1..120: mol_type = other DNA

SEQ ID NO: 75972 - DNA, 120 bp, synthetic construct; identical to SEQ ID NO: 12965
  source 1..120: mol_type = other DNA

SEQ ID NO: 75973 - DNA, 120 bp, synthetic construct; identical to SEQ ID NO: 46019
  source 1..120: mol_type = other DNA

SEQ ID NO: 75974 - DNA, 120 bp, synthetic construct; identical to SEQ ID NO: 46020
  source 1..120: mol_type = other DNA

SEQ ID NO: 75975 - DNA, 120 bp, synthetic construct; identical to SEQ ID NO: 12966
  source 1..120: mol_type = other DNA

SEQ ID NO: 75976 - DNA, 120 bp, synthetic construct; identical to SEQ ID NO: 46022
  source 1..120: mol_type = other DNA

SEQ ID NO: 75977 - DNA, 120 bp, synthetic construct; identical to SEQ ID NO: 46023
  source 1..120: mol_type = other DNA

SEQ ID NO: 75978 - DNA, 120 bp, synthetic construct; identical to SEQ ID NO: 46024
  source 1..120: mol_type = other DNA

SEQ ID NO: 75979 - DNA, 120 bp, synthetic construct; identical to SEQ ID NO: 12967
  source 1..120: mol_type = other DNA

SEQ ID NO: 75980 - DNA, 120 bp, synthetic construct; identical to SEQ ID NO: 46026
  source 1..120: mol_type = other DNA

SEQ ID NO: 75981 - DNA, 120 bp, synthetic construct; identical to SEQ ID NO: 46027
  source 1..120: mol_type = other DNA

SEQ ID NO: 75982 - DNA, 120 bp, synthetic construct; identical to SEQ ID NO: 46028
  source 1..120: mol_type = other DNA

SEQ ID NO: 75983 - DNA, 120 bp, synthetic construct; identical to SEQ ID NO: 12968
  source 1..120: mol_type = other DNA

SEQ ID NO: 75984 - DNA, 120 bp, synthetic construct; identical to SEQ ID NO: 46030
  source 1..120: mol_type = other DNA

SEQ ID NO: 75985 - DNA, 120 bp, synthetic construct; identical to SEQ ID NO: 46031
  source 1..120: mol_type = other DNA

SEQ ID NO: 75986 - DNA, 120 bp, synthetic construct; identical to SEQ ID NO: 46032
  source 1..120: mol_type = other DNA

SEQ ID NO: 75987 - DNA, 120 bp, synthetic construct; identical to SEQ ID NO: 12969
  source 1..120: mol_type = other DNA

SEQ ID NO: 75988 - DNA, 120 bp, synthetic construct; identical to SEQ ID NO: 46034
  source 1..120: mol_type = other DNA

SEQ ID NO: 75989 - DNA, 120 bp, synthetic construct; identical to SEQ ID NO: 46035
  source 1..120: mol_type = other DNA

SEQ ID NO: 75990 - DNA, 120 bp, synthetic construct; identical to SEQ ID NO: 46036
  source 1..120: mol_type = other DNA

SEQ ID NO: 75991 - DNA, 120 bp, synthetic construct; identical to SEQ ID NO: 46037
  source 1..120: mol_type = other DNA

SEQ ID NO: 75992 - DNA, 120 bp, synthetic construct; identical to SEQ ID NO: 12970
  source 1..120: mol_type = other DNA

SEQ ID NO: 75993 - DNA, 120 bp, synthetic construct; identical to SEQ ID NO: 46039
  source 1..120: mol_type = other DNA

SEQ ID NO: 75994 - DNA, 120 bp, synthetic construct; identical to SEQ ID NO: 46040
  source 1..120: mol_type = other DNA

SEQ ID NO: 75995 - DNA, 120 bp, synthetic construct; identical to SEQ ID NO: 12971
  source 1..120: mol_type = other DNA

SEQ ID NO: 75996 - DNA, 120 bp, synthetic construct; identical to SEQ ID NO: 46042
  source 1..120: mol_type = other DNA

SEQ ID NO: 75997 - DNA, 120 bp, synthetic construct; identical to SEQ ID NO: 46043
  source 1..120: mol_type = other DNA

SEQ ID NO: 75998 - DNA, 120 bp, synthetic construct; identical to SEQ ID NO: 46044
  source 1..120: mol_type = other DNA

SEQ ID NO: 75999 - DNA, 120 bp, synthetic construct; identical to SEQ ID NO: 12972
  source 1..120: mol_type = other DNA

SEQ ID NO: 76000 - DNA, 120 bp, synthetic construct; identical to SEQ ID NO: 46046
  source 1..120: mol_type = other DNA

SEQ ID NO: 76001 - DNA, 120 bp, synthetic construct; identical to SEQ ID NO: 46047
  source 1..120: mol_type = other DNA

SEQ ID NO: 76002 - DNA, 120 bp, synthetic construct; identical to SEQ ID NO: 46048
  source 1..120: mol_type = other DNA

SEQ ID NO: 76003 - DNA, 120 bp, synthetic construct; identical to SEQ ID NO: 12973
  source 1..120: mol_type = other DNA

SEQ ID NO: 76004 - DNA, 120 bp, synthetic construct; identical to SEQ ID NO: 46050
  source 1..120: mol_type = other DNA

SEQ ID NO: 76005 - DNA, 120 bp, synthetic construct; identical to SEQ ID NO: 46051
  source 1..120: mol_type = other DNA

SEQ ID NO: 76006 - DNA, 120 bp, synthetic construct; identical to SEQ ID NO: 46052
  source 1..120: mol_type = other DNA

SEQ ID NO: 76007 - DNA, 120 bp, synthetic construct; identical to SEQ ID NO: 46053
  source 1..120: mol_type = other DNA

SEQ ID NO: 76008 - DNA, 120 bp, synthetic construct; identical to SEQ ID NO: 12974
  source 1..120: mol_type = other DNA

SEQ ID NO: 76009 - DNA, 120 bp, synthetic construct; identical to SEQ ID NO: 46055
  source 1..120: mol_type = other DNA

SEQ ID NO: 76010 - DNA, 120 bp, synthetic construct; identical to SEQ ID NO: 46056
  source 1..120: mol_type = other DNA

SEQ ID NO: 76011 - DNA, 120 bp, synthetic construct; identical to SEQ ID NO: 46057
  source 1..120: mol_type = other DNA

SEQ ID NO: 76012 - DNA, 120 bp, synthetic construct; identical to SEQ ID NO: 12975
  source 1..120: mol_type = other DNA

SEQ ID NO: 76013 - DNA, 120 bp, synthetic construct; identical to SEQ ID NO: 46059
  source 1..120: mol_type = other DNA

SEQ ID NO: 76014 - DNA, 120 bp, synthetic construct; identical to SEQ ID NO: 46060
  source 1..120: mol_type = other DNA

SEQ ID NO: 76015 - DNA, 120 bp, synthetic construct; identical to SEQ ID NO: 12976
  source 1..120: mol_type = other DNA

SEQ ID NO: 76016 - DNA, 120 bp, synthetic construct; identical to SEQ ID NO: 46062
  source 1..120: mol_type = other DNA

SEQ ID NO: 76017 - DNA, 120 bp, synthetic construct; identical to SEQ ID NO: 46063
  source 1..120: mol_type = other DNA

SEQ ID NO: 76018 - DNA, 120 bp, synthetic construct; identical to SEQ ID NO: 46064
  source 1..120: mol_type = other DNA

SEQ ID NO: 76019 - DNA, 120 bp, synthetic construct; identical to SEQ ID NO: 12977
  source 1..120: mol_type = other DNA

SEQ ID NO: 76020 - DNA, 120 bp, synthetic construct; identical to SEQ ID NO: 46066
  source 1..120: mol_type = other DNA

SEQ ID NO: 76021 - DNA, 120 bp, synthetic construct; identical to SEQ ID NO: 46067
  source 1..120: mol_type = other DNA

SEQ ID NO: 76022 - DNA, 120 bp, synthetic construct; identical to SEQ ID NO: 46068
  source 1..120: mol_type = other DNA

SEQ ID NO: 76023 - DNA, 120 bp, synthetic construct; identical to SEQ ID NO: 12978
  source 1..120: mol_type = other DNA

SEQ ID NO: 76024 - DNA, 120 bp, synthetic construct; identical to SEQ ID NO: 46070
  source 1..120: mol_type = other DNA

SEQ ID NO: 76025 - DNA, 120 bp, synthetic construct; identical to SEQ ID NO: 46071
  source 1..120: mol_type = other DNA

SEQ ID NO: 76026 - DNA, 120 bp, synthetic construct; identical to SEQ ID NO: 46072
  source 1..120: mol_type = other DNA

SEQ ID NO: 76027 - DNA, 120 bp, synthetic construct; identical to SEQ ID NO: 12979
  source 1..120: mol_type = other DNA

SEQ ID NO: 76028 - DNA, 120 bp, synthetic construct; identical to SEQ ID NO: 46074
  source 1..120: mol_type = other DNA

SEQ ID NO: 76029 - DNA, 120 bp, synthetic construct; identical to SEQ ID NO: 46075
  source 1..120: mol_type = other DNA

SEQ ID NO: 76030 - DNA, 120 bp, synthetic construct; identical to SEQ ID NO: 46076
  source 1..120: mol_type = other DNA

SEQ ID NO: 76031 - DNA, 120 bp, synthetic construct; identical to SEQ ID NO: 46077
  source 1..120: mol_type = other DNA

SEQ ID NO: 76032 - DNA, 120 bp, synthetic construct; identical to SEQ ID NO: 12980
  source 1..120: mol_type = other DNA

SEQ ID NO: 76033 - DNA, 120 bp, synthetic construct; identical to SEQ ID NO: 46079
  source 1..120: mol_type = other DNA

SEQ ID NO: 76034 - DNA, 120 bp, synthetic construct; identical to SEQ ID NO: 46080
  source 1..120: mol_type = other DNA

SEQ ID NO: 76035 - DNA, 120 bp, synthetic construct; identical to SEQ ID NO: 12981
  source 1..120: mol_type = other DNA

SEQ ID NO: 76036 - DNA, 120 bp, synthetic construct; identical to SEQ ID NO: 46082
  source 1..120: mol_type = other DNA

SEQ ID NO: 76037 - DNA, 120 bp, synthetic construct; identical to SEQ ID NO: 46083
  source 1..120: mol_type = other DNA

SEQ ID NO: 76038 - DNA, 120 bp, synthetic construct; identical to SEQ ID NO: 46084
  source 1..120: mol_type = other DNA

SEQ ID NO: 76039 - DNA, 120 bp, synthetic construct; identical to SEQ ID NO: 46085
  source 1..120: mol_type = other DNA

SEQ ID NO: 76040 - DNA, 120 bp, synthetic construct; identical to SEQ ID NO: 12982
  source 1..120: mol_type = other DNA

SEQ ID NO: 76041 - DNA, 120 bp, synthetic construct; identical to SEQ ID NO: 46087
  source 1..120: mol_type = other DNA

SEQ ID NO: 76042 - DNA, 120 bp, synthetic construct; identical to SEQ ID NO: 46088
  source 1..120: mol_type = other DNA

SEQ ID NO: 76043 - DNA, 120 bp, synthetic construct; identical to SEQ ID NO: 46089
  source 1..120: mol_type = other DNA

SEQ ID NO: 76044 - DNA, 120 bp, synthetic construct; identical to SEQ ID NO: 12983
  source 1..120: mol_type = other DNA

SEQ ID NO: 76045 - DNA, 120 bp, synthetic construct; identical to SEQ ID NO: 46091
  source 1..120: mol_type = other DNA

SEQ ID NO: 76046 - DNA, 120 bp, synthetic construct; identical to SEQ ID NO: 46092
  source 1..120: mol_type = other DNA

SEQ ID NO: 76047 - DNA, 120 bp, synthetic construct; identical to SEQ ID NO: 12984
  source 1..120: mol_type = other DNA

SEQ ID NO: 76048 - DNA, 120 bp, synthetic construct; identical to SEQ ID NO: 46094
  source 1..120: mol_type = other DNA

SEQ ID NO: 76049 - DNA, 120 bp, synthetic construct; identical to SEQ ID NO: 46095
  source 1..120: mol_type = other DNA

SEQ ID NO: 76050 - DNA, 120 bp, synthetic construct; identical to SEQ ID NO: 46096
  source 1..120: mol_type = other DNA

SEQ ID NO: 76051 - DNA, 120 bp, synthetic construct; identical to SEQ ID NO: 12985
  source 1..120: mol_type = other DNA

SEQ ID NO: 76052 - DNA, 120 bp, synthetic construct; identical to SEQ ID NO: 46098
  source 1..120: mol_type = other DNA

SEQ ID NO: 76053 - DNA, 120 bp, synthetic construct; identical to SEQ ID NO: 46099
  source 1..120: mol_type = other DNA

SEQ ID NO: 76054 - DNA, 120 bp, synthetic construct; identical to SEQ ID NO: 46100
  source 1..120: mol_type = other DNA

SEQ ID NO: 76055 - DNA, 120 bp, synthetic construct; identical to SEQ ID NO: 12986
  source 1..120: mol_type = other DNA

SEQ ID NO: 76056 - DNA, 120 bp, synthetic construct; identical to SEQ ID NO: 46102
  source 1..120: mol_type = other DNA

SEQ ID NO: 76057 - DNA, 120 bp, synthetic construct; identical to SEQ ID NO: 46103
  source 1..120: mol_type = other DNA

SEQ ID NO: 76058 - DNA, 120 bp, synthetic construct; identical to SEQ ID NO: 46104
  source 1..120: mol_type = other DNA

SEQ ID NO: 76059 - DNA, 120 bp, synthetic construct; identical to SEQ ID NO: 12987
  source 1..120: mol_type = other DNA

SEQ ID NO: 76060 - DNA, 120 bp, synthetic construct; identical to SEQ ID NO: 46106
  source 1..120: mol_type = other DNA

SEQ ID NO: 76061 - DNA, 120 bp, synthetic construct; identical to SEQ ID NO: 46107
  source 1..120: mol_type = other DNA

SEQ ID NO: 76062 - DNA, 120 bp, synthetic construct; identical to SEQ ID NO: 46108
  source 1..120: mol_type = other DNA

SEQ ID NO: 76063 - DNA, 120 bp, synthetic construct; identical to SEQ ID NO: 12988
  source 1..120: mol_type = other DNA

SEQ ID NO: 76064 - DNA, 120 bp, synthetic construct; identical to SEQ ID NO: 46110
  source 1..120: mol_type = other DNA

SEQ ID NO: 76065 - DNA, 120 bp, synthetic construct; identical to SEQ ID NO: 46111
  source 1..120: mol_type = other DNA

SEQ ID NO: 76066 - DNA, 120 bp, synthetic construct; identical to SEQ ID NO: 46112
  source 1..120: mol_type = other DNA

SEQ ID NO: 76067 - DNA, 120 bp, synthetic construct; identical to SEQ ID NO: 46113
  source 1..120: mol_type = other DNA

SEQ ID NO: 76068 - DNA, 120 bp, synthetic construct; identical to SEQ ID NO: 12989
  source 1..120: mol_type = other DNA

SEQ ID NO: 76069 - DNA, 120 bp, synthetic construct; identical to SEQ ID NO: 46115
  source 1..120: mol_type = other DNA

SEQ ID NO: 76070 - DNA, 120 bp, synthetic construct; identical to SEQ ID NO: 46116
  source 1..120: mol_type = other DNA

SEQ ID NO: 76071 - DNA, 120 bp, synthetic construct; identical to SEQ ID NO: 46117
  source 1..120: mol_type = other DNA

SEQ ID NO: 76072 - DNA, 120 bp, synthetic construct; identical to SEQ ID NO: 5592
  source 1..120: mol_type = other DNA

SEQ ID NO: 76073 - DNA, 120 bp, synthetic construct; identical to SEQ ID NO: 46119
  source 1..120: mol_type = other DNA

SEQ ID NO: 76074 - DNA, 120 bp, synthetic construct; identical to SEQ ID NO: 46120
  source 1..120: mol_type = other DNA

SEQ ID NO: 76075 - DNA, 120 bp, synthetic construct; identical to SEQ ID NO: 12991
  source 1..120: mol_type = other DNA

SEQ ID NO: 76076 - DNA, 120 bp, synthetic construct; identical to SEQ ID NO: 46122
  source 1..120: mol_type = other DNA

SEQ ID NO: 76077 - DNA, 120 bp, synthetic construct; identical to SEQ ID NO: 46123
  source 1..120: mol_type = other DNA

SEQ ID NO: 76078 - DNA, 120 bp, synthetic construct; identical to SEQ ID NO: 46124
  source 1..120: mol_type = other DNA

SEQ ID NO: 76079 - DNA, 120 bp, synthetic construct; identical to SEQ ID NO: 46125
  source 1..120: mol_type = other DNA

SEQ ID NO: 76080 - DNA, 120 bp, synthetic construct; identical to SEQ ID NO: 12992
  source 1..120: mol_type = other DNA

SEQ ID NO: 76081 - DNA, 120 bp, synthetic construct; identical to SEQ ID NO: 46127
  source 1..120: mol_type = other DNA

SEQ ID NO: 76082 - DNA, 120 bp, synthetic construct; identical to SEQ ID NO: 46128
  source 1..120: mol_type = other DNA

SEQ ID NO: 76083 - DNA, 120 bp, synthetic construct; identical to SEQ ID NO: 12993
  source 1..120: mol_type = other DNA

SEQ ID NO: 76084 - DNA, 120 bp, synthetic construct; identical to SEQ ID NO: 46130
  source 1..120: mol_type = other DNA

SEQ ID NO: 76085 - DNA, 120 bp, synthetic construct; identical to SEQ ID NO: 46131
  source 1..120: mol_type = other DNA

SEQ ID NO: 76086 - DNA, 120 bp, synthetic construct; identical to SEQ ID NO: 46132
  source 1..120: mol_type = other DNA

SEQ ID NO: 76087 - DNA, 120 bp, synthetic construct; identical to SEQ ID NO: 12994
  source 1..120: mol_type = other DNA

SEQ ID NO: 76088 - DNA, 120 bp, synthetic construct; identical to SEQ ID NO: 46134
  source 1..120: mol_type = other DNA

SEQ ID NO: 76089 - DNA, 120 bp, synthetic construct; identical to SEQ ID NO: 46135
  source 1..120: mol_type = other DNA

SEQ ID NO: 76090 - DNA, 120 bp, synthetic construct; identical to SEQ ID NO: 46136
  source 1..120: mol_type = other DNA

SEQ ID NO: 76091 - DNA, 120 bp, synthetic construct; identical to SEQ ID NO: 46137
  source 1..120: mol_type = other DNA

SEQ ID NO: 76092 - DNA, 120 bp, synthetic construct; identical to SEQ ID NO: 12995
  source 1..120: mol_type = other DNA

SEQ ID NO: 76093 - DNA, 120 bp, synthetic construct; identical to SEQ ID NO: 46139
  source 1..120: mol_type = other DNA

SEQ ID NO: 76094 - DNA, 120 bp, synthetic construct; identical to SEQ ID NO: 46140
  source 1..120: mol_type = other DNA

SEQ ID NO: 76095 - DNA, 120 bp, synthetic construct; identical to SEQ ID NO: 46141
  source 1..120: mol_type = other DNA

SEQ ID NO: 76096 - DNA, 120 bp, synthetic construct; identical to SEQ ID NO: 12996
  source 1..120: mol_type = other DNA

SEQ ID NO: 76097 - DNA, 120 bp, synthetic construct; identical to SEQ ID NO: 46143
  source 1..120: mol_type = other DNA

SEQ ID NO: 76098 - DNA, 120 bp, synthetic construct; identical to SEQ ID NO: 46144
  source 1..120: mol_type = other DNA

SEQ ID NO: 76099 - DNA, 120 bp, synthetic construct; identical to SEQ ID NO: 46145
  source 1..120: mol_type = other DNA

SEQ ID NO: 76100 - DNA, 120 bp, synthetic construct; identical to SEQ ID NO: 46146
  source 1..120: mol_type = other DNA

SEQ ID NO: 76101 - DNA, 120 bp, synthetic construct; identical to SEQ ID NO: 12997
  source 1..120: mol_type = other DNA

SEQ ID NO: 76102 - DNA, 120 bp, synthetic construct; identical to SEQ ID NO: 46148
  source 1..120: mol_type = other DNA

SEQ ID NO: 76103 - DNA, 120 bp, synthetic construct; identical to SEQ ID NO: 46149
  source 1..120: mol_type = other DNA

SEQ ID NO: 76104 - DNA, 120 bp, synthetic construct; identical to SEQ ID NO: 12998
  source 1..120: mol_type = other DNA

SEQ ID NO: 76105 - DNA, 120 bp, synthetic construct; identical to SEQ ID NO: 46151
  source 1..120: mol_type = other DNA

SEQ ID NO: 76106 - DNA, 120 bp, synthetic construct; identical to SEQ ID NO: 46152
  source 1..120: mol_type = other DNA

SEQ ID NO: 76107 - DNA, 120 bp, synthetic construct; identical to SEQ ID NO: 46153
  source 1..120: mol_type = other DNA

SEQ ID NO: 76108 - DNA, 120 bp, synthetic construct; identical to SEQ ID NO: 5600
  source 1..120: mol_type = other DNA

SEQ ID NO: 76109 - DNA, 120 bp, synthetic construct; identical to SEQ ID NO: 46155
  source 1..120: mol_type = other DNA

SEQ ID NO: 76110 - DNA, 120 bp, synthetic construct; identical to SEQ ID NO: 46156
  source 1..120: mol_type = other DNA

SEQ ID NO: 76111 - DNA, 120 bp, synthetic construct; identical to SEQ ID NO: 46157
  source 1..120: mol_type = other DNA

SEQ ID NO: 76112 - DNA, 120 bp, synthetic construct; identical to SEQ ID NO: 46158
  source 1..120: mol_type = other DNA

SEQ ID NO: 76113 - DNA, 120 bp, synthetic construct; identical to SEQ ID NO: 13000
  source 1..120: mol_type = other DNA

SEQ ID NO: 76114 - DNA, 120 bp, synthetic construct; identical to SEQ ID NO: 46160
  source 1..120: mol_type = other DNA

SEQ ID NO: 76115 - DNA, 120 bp, synthetic construct; identical to SEQ ID NO: 46161
  source 1..120: mol_type = other DNA

SEQ ID NO: 76116 - DNA, 120 bp, synthetic construct; identical to SEQ ID NO: 13001
  source 1..120: mol_type = other DNA

SEQ ID NO: 76117 - DNA, 120 bp, synthetic construct; identical to SEQ ID NO: 46163
  source 1..120: mol_type = other DNA

SEQ ID NO: 76118 - DNA, 120 bp, synthetic construct; identical to SEQ ID NO: 46164
  source 1..120: mol_type = other DNA

SEQ ID NO: 76119 - DNA, 120 bp, synthetic construct; identical to SEQ ID NO: 46165
  source 1..120: mol_type = other DNA

SEQ ID NO: 76120 - DNA, 120 bp, synthetic construct; identical to SEQ ID NO: 13002
  source 1..120: mol_type = other DNA

SEQ ID NO: 76121 - DNA, 120 bp, synthetic construct; identical to SEQ ID NO: 46167
  source 1..120: mol_type = other DNA

SEQ ID NO: 76122 - DNA, 120 bp, synthetic construct; identical to SEQ ID NO: 46168
  source 1..120: mol_type = other DNA

SEQ ID NO: 76123 - DNA, 120 bp, synthetic construct; identical to SEQ ID NO: 46169
  source 1..120: mol_type = other DNA

SEQ ID NO: 76124 - DNA, 120 bp, synthetic construct; identical to SEQ ID NO: 13003
  source 1..120: mol_type = other DNA

SEQ ID NO: 76125 - DNA, 120 bp, synthetic construct; identical to SEQ ID NO: 46171
  source 1..120: mol_type = other DNA

SEQ ID NO: 76126 - DNA, 120 bp, synthetic construct; identical to SEQ ID NO: 46172
  source 1..120: mol_type = other DNA

SEQ ID NO: 76127 - DNA, 120 bp, synthetic construct; identical to SEQ ID NO: 46173
  source 1..120: mol_type = other DNA

SEQ ID NO: 76128 - DNA, 120 bp, synthetic construct; identical to SEQ ID NO: 46174
  source 1..120: mol_type = other DNA

SEQ ID NO: 76129 - DNA, 120 bp, synthetic construct; identical to SEQ ID NO: 13004
  source 1..120: mol_type = other DNA

SEQ ID NO: 76130 - DNA, 120 bp, synthetic construct; identical to SEQ ID NO: 46176
  source 1..120: mol_type = other DNA

SEQ ID NO: 76131 - DNA, 120 bp, synthetic construct; identical to SEQ ID NO: 46177
  source 1..120: mol_type = other DNA

SEQ ID NO: 76132 - DNA, 120 bp, synthetic construct; identical to SEQ ID NO: 46178
  source 1..120: mol_type = other DNA

SEQ ID NO: 76133 - DNA, 120 bp, synthetic construct; identical to SEQ ID NO: 13005
  source 1..120: mol_type = other DNA

SEQ ID NO: 76134 - DNA, 120 bp, synthetic construct; identical to SEQ ID NO: 46180
  source 1..120: mol_type = other DNA

SEQ ID NO: 76135 - DNA, 120 bp, synthetic construct; identical to SEQ ID NO: 46181
  source 1..120: mol_type = other DNA

SEQ ID NO: 76136 - DNA, 120 bp, synthetic construct; identical to SEQ ID NO: 13006
  source 1..120: mol_type = other DNA

SEQ ID NO: 76137 - DNA, 120 bp, synthetic construct; identical to SEQ ID NO: 46183
  source 1..120: mol_type = other DNA

SEQ ID NO: 76138 - DNA, 120 bp, synthetic construct; identical to SEQ ID NO: 46184
  source 1..120: mol_type = other DNA

SEQ ID NO: 76139 - DNA, 120 bp, synthetic construct; identical to SEQ ID NO: 46185
  source 1..120: mol_type = other DNA

SEQ ID NO: 76140 - DNA, 120 bp, synthetic construct; identical to SEQ ID NO: 13007
  source 1..120: mol_type = other DNA

SEQ ID NO: 76141 - DNA, 120 bp, synthetic construct; identical to SEQ ID NO: 46187
  source 1..120: mol_type = other DNA

SEQ ID NO: 76142 - DNA, 120 bp, synthetic construct; identical to SEQ ID NO: 46188
  source 1..120: mol_type = other DNA

SEQ ID NO: 76143 - DNA, 120 bp, synthetic construct; identical to SEQ ID NO: 46189
  source 1..120: mol_type = other DNA

SEQ ID NO: 76144 - DNA, 120 bp, synthetic construct; identical to SEQ ID NO: 46190
  source 1..120: mol_type = other DNA

SEQ ID NO: 76145 - DNA, 120 bp, synthetic construct; identical to SEQ ID NO: 13008
  source 1..120: mol_type = other DNA

SEQ ID NO: 76146 - DNA, 120 bp, synthetic construct; identical to SEQ ID NO: 46192
  source 1..120: mol_type = other DNA

SEQ ID NO: 76147 - DNA, 120 bp, synthetic construct; identical to SEQ ID NO: 46193
  source 1..120: mol_type = other DNA

SEQ ID NO: 76148 - DNA, 120 bp, synthetic construct; identical to SEQ ID NO: 46194
  source 1..120: mol_type = other DNA

SEQ ID NO: 76149 - DNA, 120 bp, synthetic construct; identical to SEQ ID NO: 13009
  source 1..120: mol_type = other DNA

SEQ ID NO: 76150 - DNA, 120 bp, synthetic construct; identical to SEQ ID NO: 46196
  source 1..120: mol_type = other DNA

SEQ ID NO: 76151 - DNA, 120 bp, synthetic construct; identical to SEQ ID NO: 13010
  source 1..120: mol_type = other DNA

SEQ ID NO: 76152 - DNA, 120 bp, synthetic construct; identical to SEQ ID NO: 46198
  source 1..120: mol_type = other DNA

SEQ ID NO: 76153 - DNA, 120 bp, synthetic construct; identical to SEQ ID NO: 46199
  source 1..120: mol_type = other DNA

SEQ ID NO: 76154 - DNA, 120 bp, synthetic construct; identical to SEQ ID NO: 46200
  source 1..120: mol_type = other DNA

SEQ ID NO: 76155 - DNA, 120 bp, synthetic construct; identical to SEQ ID NO: 13011
  source 1..120: mol_type = other DNA

SEQ ID NO: 76156 - DNA, 120 bp, synthetic construct; identical to SEQ ID NO: 46202
  source 1..120: mol_type = other DNA

SEQ ID NO: 76157 - DNA, 120 bp, synthetic construct; identical to SEQ ID NO: 46203
  source 1..120: mol_type = other DNA

SEQ ID NO: 76158 - DNA, 120 bp, synthetic construct; identical to SEQ ID NO: 46204
  source 1..120: mol_type = other DNA

SEQ ID NO: 76159 - DNA, 120 bp, synthetic construct; identical to SEQ ID NO: 46205
  source 1..120: mol_type = other DNA

SEQ ID NO: 76160 - DNA, 120 bp, synthetic construct; identical to SEQ ID NO: 13012
  source 1..120: mol_type = other DNA

SEQ ID NO: 76161 - DNA, 120 bp, synthetic construct; identical to SEQ ID NO: 46207
  source 1..120: mol_type = other DNA

SEQ ID NO: 76162 - DNA, 120 bp, synthetic construct; identical to SEQ ID NO: 46208
  source 1..120: mol_type = other DNA

SEQ ID NO: 76163 - DNA, 120 bp, synthetic construct; identical to SEQ ID NO: 13013
  source 1..120: mol_type = other DNA

SEQ ID NO: 76164 - DNA, 120 bp, synthetic construct; identical to SEQ ID NO: 46210
  source 1..120: mol_type = other DNA

SEQ ID NO: 76165 - DNA, 120 bp, synthetic construct; identical to SEQ ID NO: 46211
  source 1..120: mol_type = other DNA

SEQ ID NO: 76166 - DNA, 120 bp, synthetic construct; identical to SEQ ID NO: 46212
  source 1..120: mol_type = other DNA

SEQ ID NO: 76167 - DNA, 120 bp, synthetic construct; identical to SEQ ID NO: 5614
  source 1..120: mol_type = other DNA

SEQ ID NO: 76168 - DNA, 120 bp, synthetic construct; identical to SEQ ID NO: 46214
  source 1..120: mol_type = other DNA

SEQ ID NO: 76169 - DNA, 120 bp, synthetic construct; identical to SEQ ID NO: 46215
  source 1..120: mol_type = other DNA

SEQ ID NO: 76170 - DNA, 120 bp, synthetic construct; identical to SEQ ID NO: 46216
  source 1..120: mol_type = other DNA

SEQ ID NO: 76171 - DNA, 120 bp, synthetic construct; identical to SEQ ID NO: 13015
  source 1..120: mol_type = other DNA

SEQ ID NO: 76172 - DNA, 120 bp, synthetic construct; identical to SEQ ID NO: 46218
  source 1..120: mol_type = other DNA

SEQ ID NO: 76173 - DNA, 120 bp, synthetic construct; identical to SEQ ID NO: 46219
  source 1..120: mol_type = other DNA

SEQ ID NO: 76174 - DNA, 120 bp, synthetic construct; identical to SEQ ID NO: 46220
  source 1..120: mol_type = other DNA

SEQ ID NO: 76175 - DNA, 120 bp, synthetic construct; identical to SEQ ID NO: 46221
  source 1..120: mol_type = other DNA

SEQ ID NO: 76176 - DNA, 120 bp, synthetic construct; identical to SEQ ID NO: 5616
  source 1..120: mol_type = other DNA

SEQ ID NO: 76177 - DNA, 120 bp, synthetic construct; identical to SEQ ID NO: 46223
  source 1..120: mol_type = other DNA

SEQ ID NO: 76178 - DNA, 120 bp, synthetic construct; identical to SEQ ID NO: 46224
  source 1..120: mol_type = other DNA

SEQ ID NO: 76179 - DNA, 120 bp, synthetic construct; identical to SEQ ID NO: 13017
  source 1..120: mol_type = other DNA

SEQ ID NO: 76180 - DNA, 120 bp, synthetic construct; identical to SEQ ID NO: 46226
  source 1..120: mol_type = other DNA

SEQ ID NO: 76181 - DNA, 120 bp, synthetic construct; identical to SEQ ID NO: 46227
  source 1..120: mol_type = other DNA

SEQ ID NO: 76182 - DNA, 120 bp, synthetic construct; identical to SEQ ID NO: 46228
  source 1..120: mol_type = other DNA

SEQ ID NO: 76183 - DNA, 120 bp, synthetic construct; identical to SEQ ID NO: 13018
  source 1..120: mol_type = other DNA

SEQ ID NO: 76184 - DNA, 120 bp, synthetic construct; identical to SEQ ID NO: 46230
  source 1..120: mol_type = other DNA

SEQ ID NO: 76185 - DNA, 120 bp, synthetic construct; identical to SEQ ID NO: 46231
  source 1..120: mol_type = other DNA

SEQ ID NO: 76186 - DNA, 120 bp, synthetic construct; identical to SEQ ID NO: 46232
  source 1..120: mol_type = other DNA

SEQ ID NO: 76187 - DNA, 120 bp, synthetic construct; identical to SEQ ID NO: 46233
  source 1..120: mol_type = other DNA

SEQ ID NO: 76188 - DNA, 120 bp, synthetic construct; identical to SEQ ID NO: 13019
  source 1..120: mol_type = other DNA

SEQ ID NO: 76189 - DNA, 120 bp, synthetic construct; identical to SEQ ID NO: 46235
  source 1..120: mol_type = other DNA

SEQ ID NO: 76190 - DNA, 120 bp, synthetic construct; identical to SEQ ID NO: 46236
  source 1..120: mol_type = other DNA

SEQ ID NO: 76191 - DNA, 120 bp, synthetic construct; identical to SEQ ID NO: 46237
  source 1..120: mol_type = other DNA

SEQ ID NO: 76192 - DNA, 120 bp, synthetic construct; identical to SEQ ID NO: 46238
  source 1..120: mol_type = other DNA

SEQ ID NO: 76193 - DNA, 120 bp, synthetic construct; identical to SEQ ID NO: 13020
  source 1..120: mol_type = other DNA

SEQ ID NO: 76194 - DNA, 120 bp, synthetic construct; identical to SEQ ID NO: 46240
  source 1..120: mol_type = other DNA

SEQ ID NO: 76195 - DNA, 120 bp, synthetic construct; identical to SEQ ID NO: 46241
  source 1..120: mol_type = other DNA

SEQ ID NO: 76196 - DNA, 120 bp, synthetic construct; identical to SEQ ID NO: 46242
  source 1..120: mol_type = other DNA

SEQ ID NO: 76197 - DNA, 120 bp, synthetic construct; identical to SEQ ID NO: 13021
  source 1..120: mol_type = other DNA

SEQ ID NO: 76198 - DNA, 120 bp, synthetic construct; identical to SEQ ID NO: 46244
  source 1..120: mol_type = other DNA

SEQ ID NO: 76199 - DNA, 120 bp, synthetic construct; identical to SEQ ID NO: 46245
  source 1..120: mol_type = other DNA

SEQ ID NO: 76200 - DNA, 120 bp, synthetic construct; identical to SEQ ID NO: 13022
  source 1..120: mol_type = other DNA

SEQ ID NO: 76201 - DNA, 120 bp, synthetic construct; identical to SEQ ID NO: 46247
  source 1..120: mol_type = other DNA

SEQ ID NO: 76202 - DNA, 120 bp, synthetic construct; identical to SEQ ID NO: 46248
  source 1..120: mol_type = other DNA

SEQ ID NO: 76203 - DNA, 120 bp, synthetic construct; identical to SEQ ID NO: 46249
  source 1..120: mol_type = other DNA

SEQ ID NO: 76204 - DNA, 120 bp, synthetic construct; identical to SEQ ID NO: 46250
  source 1..120: mol_type = other DNA

SEQ ID NO: 76205 - DNA, 120 bp, synthetic construct; identical to SEQ ID NO: 13023
  source 1..120: mol_type = other DNA

SEQ ID NO: 76206 - DNA, 120 bp, synthetic construct; identical to SEQ ID NO: 46252
  source 1..120: mol_type = other DNA

SEQ ID NO: 76207 - DNA, 120 bp, synthetic construct; identical to SEQ ID NO: 46253
  source 1..120: mol_type = other DNA

SEQ ID NO: 76208 - DNA, 120 bp, synthetic construct; identical to SEQ ID NO: 13024
  source 1..120: mol_type = other DNA

SEQ ID NO: 76209 - DNA, 120 bp, synthetic construct; identical to SEQ ID NO: 46255
  source 1..120: mol_type = other DNA

SEQ ID NO: 76210 - DNA, 120 bp, synthetic construct; identical to SEQ ID NO: 46256
  source 1..120: mol_type = other DNA

SEQ ID NO: 76211 - DNA, 120 bp, synthetic construct; identical to SEQ ID NO: 46257
  source 1..120: mol_type = other DNA

SEQ ID NO: 76212 - DNA, 120 bp, synthetic construct; identical to SEQ ID NO: 46258
  source 1..120: mol_type = other DNA

SEQ ID NO: 76213 - DNA, 120 bp, synthetic construct; identical to SEQ ID NO: 13025
  source 1..120: mol_type = other DNA

SEQ ID NO: 76214 - DNA, 120 bp, synthetic construct; identical to SEQ ID NO: 46260
  source 1..120: mol_type = other DNA

SEQ ID NO: 76215 - DNA, 120 bp, synthetic construct; identical to SEQ ID NO: 46261
  source 1..120: mol_type = other DNA

SEQ ID NO: 76216 - DNA, 120 bp, synthetic construct; identical to SEQ ID NO: 13026
  source 1..120: mol_type = other DNA

SEQ ID NO: 76217 - DNA, 120 bp, synthetic construct; identical to SEQ ID NO: 46263
  source 1..120: mol_type = other DNA

SEQ ID NO: 76218 - DNA, 120 bp, synthetic construct; identical to SEQ ID NO: 46264
  source 1..120: mol_type = other DNA

SEQ ID NO: 76219 - DNA, 120 bp, synthetic construct; identical to SEQ ID NO: 46265
  source 1..120: mol_type = other DNA

SEQ ID NO: 76220 - DNA, 120 bp, synthetic construct; identical to SEQ ID NO: 46266
  source 1..120: mol_type = other DNA

SEQ ID NO: 76221 - DNA, 120 bp, synthetic construct; identical to SEQ ID NO: 13027
  source 1..120: mol_type = other DNA

SEQ ID NO: 76222 - DNA, 120 bp, synthetic construct; identical to SEQ ID NO: 46268
  source 1..120: mol_type = other DNA

SEQ ID NO: 76223 - DNA, 120 bp, synthetic construct; identical to SEQ ID NO: 46269
  source 1..120: mol_type = other DNA

SEQ ID NO: 76224 - DNA, 120 bp, synthetic construct; identical to SEQ ID NO: 13028
  source 1..120: mol_type = other DNA

SEQ ID NO: 76225 - DNA, 120 bp, synthetic construct; identical to SEQ ID NO: 46271
  source 1..120: mol_type = other DNA

SEQ ID NO: 76226 - DNA, 120 bp, synthetic construct; identical to SEQ ID NO: 46272
  source 1..120: mol_type = other DNA

SEQ ID NO: 76227 - DNA, 120 bp, synthetic construct; identical to SEQ ID NO: 46273
  source 1..120: mol_type = other DNA

SEQ ID NO: 76228 - DNA, 120 bp, synthetic construct; identical to SEQ ID NO: 46274
  source 1..120: mol_type = other DNA

SEQ ID NO: 76229 - DNA, 120 bp, synthetic construct; identical to SEQ ID NO: 13029
  source 1..120: mol_type = other DNA

SEQ ID NO: 76230 - DNA, 120 bp, synthetic construct; identical to SEQ ID NO: 46276
  source 1..120: mol_type = other DNA

SEQ ID NO: 76231 - DNA, 120 bp, synthetic construct; identical to SEQ ID NO: 46277
  source 1..120: mol_type = other DNA

SEQ ID NO: 76232 - DNA, 120 bp, synthetic construct; identical to SEQ ID NO: 13030
  source 1..120: mol_type = other DNA

SEQ ID NO: 76233 - DNA, 120 bp, synthetic construct; identical to SEQ ID NO: 46279
  source 1..120: mol_type = other DNA

SEQ ID NO: 76234 - DNA, 120 bp, synthetic construct; identical to SEQ ID NO: 46280
  source 1..120: mol_type = other DNA

SEQ ID NO: 76235 - DNA, 120 bp, synthetic construct; identical to SEQ ID NO: 46281
  source 1..120: mol_type = other DNA

SEQ ID NO: 76236 - DNA, 120 bp, synthetic construct; identical to SEQ ID NO: 46282
  source 1..120: mol_type = other DNA

SEQ ID NO: 76237 - DNA, 120 bp, synthetic construct; identical to SEQ ID NO: 13031
  source 1..120: mol_type = other DNA

SEQ ID NO: 76238 - DNA, 120 bp, synthetic construct; identical to SEQ ID NO: 46284
  source 1..120: mol_type = other DNA

SEQ ID NO: 76239 - DNA, 120 bp, synthetic construct; identical to SEQ ID NO: 46285
  source 1..120: mol_type = other DNA

SEQ ID NO: 76240 - DNA, 120 bp, synthetic construct; identical to SEQ ID NO: 13032
  source 1..120: mol_type = other DNA

SEQ ID NO: 76241 - DNA, 120 bp, synthetic construct; identical to SEQ ID NO: 46287
  source 1..120: mol_type = other DNA

SEQ ID NO: 76242 - DNA, 120 bp, synthetic construct; identical to SEQ ID NO: 46288
  source 1..120: mol_type = other DNA

SEQ ID NO: 76243 - DNA, 120 bp, synthetic construct; identical to SEQ ID NO: 46289
  source 1..120: mol_type = other DNA

SEQ ID NO: 76244 - DNA, 120 bp, synthetic construct; identical to SEQ ID NO: 13033
  source 1..120: mol_type = other DNA

SEQ ID NO: 76245 - DNA, 120 bp, synthetic construct; identical to SEQ ID NO: 46291
  source 1..120: mol_type = other DNA

SEQ ID NO: 76246 - DNA, 120 bp, synthetic construct; identical to SEQ ID NO: 46292
  source 1..120: mol_type = other DNA

SEQ ID NO: 76247 - DNA, 120 bp, synthetic construct; identical to SEQ ID NO: 46293
  source 1..120: mol_type = other DNA

SEQ ID NO: 76248 - DNA, 120 bp, synthetic construct; identical to SEQ ID NO: 46294
  source 1..120: mol_type = other DNA

SEQ ID NO: 76249 - DNA, 120 bp, synthetic construct; identical to SEQ ID NO: 13034
  source 1..120: mol_type = other DNA

SEQ ID NO: 76250 - DNA, 120 bp, synthetic construct; identical to SEQ ID NO: 46296
  source 1..120: mol_type = other DNA

SEQ ID NO: 76251 - DNA, 120 bp, synthetic construct; identical to SEQ ID NO: 46297
  source 1..120: mol_type = other DNA

SEQ ID NO: 76252 - DNA, 120 bp, synthetic construct; identical to SEQ ID NO: 46298
  source 1..120: mol_type = other DNA

SEQ ID NO: 76253 - DNA, 120 bp, synthetic construct; identical to SEQ ID NO: 13035
  source 1..120: mol_type = other DNA

SEQ ID NO: 76254 - DNA, 120 bp, synthetic construct; identical to SEQ ID NO: 46300
  source 1..120: mol_type = other DNA

SEQ ID NO: 76255 - DNA, 120 bp, synthetic construct; identical to SEQ ID NO: 46301
  source 1..120: mol_type = other DNA

SEQ ID NO: 76256 - DNA, 120 bp, synthetic construct; identical to SEQ ID NO: 13036
  source 1..120: mol_type = other DNA

SEQ ID NO: 76257 - DNA, 120 bp, synthetic construct; identical to SEQ ID NO: 46303
  source 1..120: mol_type = other DNA

SEQ ID NO: 76258 - DNA, 120 bp, synthetic construct; identical to SEQ ID NO: 46304
  source 1..120: mol_type = other DNA

SEQ ID NO: 76259 - DNA, 120 bp, synthetic construct; identical to SEQ ID NO: 46305
  source 1..120: mol_type = other DNA

SEQ ID NO: 76260 - DNA, 120 bp, synthetic construct; identical to SEQ ID NO: 46306
  source 1..120: mol_type = other DNA

SEQ ID NO: 76261 - DNA, 120 bp, synthetic construct; identical to SEQ ID NO: 13037
  source 1..120: mol_type = other DNA

SEQ ID NO: 76262 - DNA, 120 bp, synthetic construct; identical to SEQ ID NO: 46308
  source 1..120: mol_type = other DNA

SEQ ID NO: 76263 - DNA, 120 bp, synthetic construct; identical to SEQ ID NO: 46309
  source 1..120: mol_type = other DNA

SEQ ID NO: 76264 - DNA, 120 bp, synthetic construct; identical to SEQ ID NO: 13038
  source 1..120: mol_type = other DNA

SEQ ID NO: 76265 - DNA, 120 bp, synthetic construct; identical to SEQ ID NO: 46311
  source 1..120: mol_type = other DNA

SEQ ID NO: 76266 - DNA, 120 bp, synthetic construct; identical to SEQ ID NO: 46312
  source 1..120: mol_type = other DNA

SEQ ID NO: 76267 - DNA, 120 bp, synthetic construct; identical to SEQ ID NO: 46313
  source 1..120: mol_type = other DNA

SEQ ID NO: 76268 - DNA, 120 bp, synthetic construct; identical to SEQ ID NO: 46314
  source 1..120: mol_type = other DNA

SEQ ID NO: 76269 - DNA, 120 bp, synthetic construct; identical to SEQ ID NO: 13039
  source 1..120: mol_type = other DNA

SEQ ID NO: 76270 - DNA, 120 bp, synthetic construct; identical to SEQ ID NO: 46316
  source 1..120: mol_type = other DNA

SEQ ID NO: 76271 - DNA, 120 bp, synthetic construct; identical to SEQ ID NO: 46317
  source 1..120: mol_type = other DNA

SEQ ID NO: 76272 - DNA, 120 bp, synthetic construct; identical to SEQ ID NO: 46318
  source 1..120: mol_type = other DNA

SEQ ID NO: 76273 - DNA, 120 bp, synthetic construct; identical to SEQ ID NO: 13040
  source 1..120: mol_type = other DNA

SEQ ID NO: 76274 - DNA, 120 bp, synthetic construct; identical to SEQ ID NO: 46320
  source 1..120: mol_type = other DNA

SEQ ID NO: 76275 - DNA, 120 bp, synthetic construct; identical to SEQ ID NO: 46321
  source 1..120: mol_type = other DNA

SEQ ID NO: 76276 - DNA, 120 bp, synthetic construct; identical to SEQ ID NO: 46322
  source 1..120: mol_type = other DNA

SEQ ID NO: 76277 - DNA, 120 bp, synthetic construct; identical to SEQ ID NO: 13041
  source 1..120: mol_type = other DNA

SEQ ID NO: 76278 - DNA, 120 bp, synthetic construct; identical to SEQ ID NO: 46324
  source 1..120: mol_type = other DNA

SEQ ID NO: 76279 - DNA, 120 bp, synthetic construct; identical to SEQ ID NO: 46325
  source 1..120: mol_type = other DNA

SEQ ID NO: 76280 - DNA, 120 bp, synthetic construct; identical to SEQ ID NO: 46326
  source 1..120: mol_type = other DNA

SEQ ID NO: 76281 - DNA, 120 bp, synthetic construct; identical to SEQ ID NO: 13042
  source 1..120: mol_type = other DNA

SEQ ID NO: 76282 - DNA, 120 bp, synthetic construct; identical to SEQ ID NO: 46328
  source 1..120: mol_type = other DNA

SEQ ID NO: 76283 - DNA, 120 bp, synthetic construct; identical to SEQ ID NO: 46329
  source 1..120: mol_type = other DNA

SEQ ID NO: 76284 - DNA, 120 bp, synthetic construct; identical to SEQ ID NO: 13043
  source 1..120: mol_type = other DNA

SEQ ID NO: 76285 - DNA, 120 bp, synthetic construct; identical to SEQ ID NO: 46331
  source 1..120: mol_type = other DNA

SEQ ID NO: 76286 - DNA, 120 bp, synthetic construct; identical to SEQ ID NO: 46332
  source 1..120: mol_type = other DNA

SEQ ID NO: 76287 - DNA, 120 bp, synthetic construct; identical to SEQ ID NO: 46333
  source 1..120: mol_type = other DNA

SEQ ID NO: 76288 - DNA, 120 bp, synthetic construct; identical to SEQ ID NO: 13044
  source 1..120: mol_type = other DNA

SEQ ID NO: 76289 - DNA, 120 bp, synthetic construct; identical to SEQ ID NO: 46335
  source 1..120: mol_type = other DNA

SEQ ID NO: 76290 - DNA, 120 bp, synthetic construct; identical to SEQ ID NO: 46336
  source 1..120: mol_type = other DNA

SEQ ID NO: 76291 - DNA, 120 bp, synthetic construct; identical to SEQ ID NO: 46337
  source 1..120: mol_type = other DNA

SEQ ID NO: 76292 - DNA, 120 bp, synthetic construct; identical to SEQ ID NO: 13045
  source 1..120: mol_type = other DNA

SEQ ID NO: 76293 - DNA, 120 bp, synthetic construct; identical to SEQ ID NO: 46339
  source 1..120: mol_type = other DNA

SEQ ID NO: 76294 - DNA, 120 bp, synthetic construct; identical to SEQ ID NO: 46340
  source 1..120: mol_type = other DNA

SEQ ID NO: 76295 - DNA, 120 bp, synthetic construct; identical to SEQ ID NO: 46341
  source 1..120: mol_type = other DNA

SEQ ID NO: 76296 - DNA, 120 bp, synthetic construct; identical to SEQ ID NO: 13046
  source 1..120: mol_type = other DNA

SEQ ID NO: 76297 - DNA, 120 bp, synthetic construct; identical to SEQ ID NO: 46343
  source 1..120: mol_type = other DNA

SEQ ID NO: 76298 - DNA, 120 bp, synthetic construct; identical to SEQ ID NO: 46344
  source 1..120: mol_type = other DNA

SEQ ID NO: 76299 - DNA, 120 bp, synthetic construct; identical to SEQ ID NO: 46345
  source 1..120: mol_type = other DNA

SEQ ID NO: 76300 - DNA, 120 bp, synthetic construct; identical to SEQ ID NO: 13047
  source 1..120: mol_type = other DNA

SEQ ID NO: 76301 - DNA, 120 bp, synthetic construct; identical to SEQ ID NO: 46347
  source 1..120: mol_type = other DNA

SEQ ID NO: 76302 - DNA, 120 bp, synthetic construct; identical to SEQ ID NO: 46348
  source 1..120: mol_type = other DNA

SEQ ID NO: 76303 - DNA, 120 bp, synthetic construct; identical to SEQ ID NO: 13048
  source 1..120: mol_type = other DNA

SEQ ID NO: 76304 - DNA, 120 bp, synthetic construct; identical to SEQ ID NO: 46350
  source 1..120: mol_type = other DNA

SEQ ID NO: 76305 - DNA, 120 bp, synthetic construct; identical to SEQ ID NO: 46351
  source 1..120: mol_type = other DNA

SEQ ID NO: 76306 - DNA, 120 bp, synthetic construct; identical to SEQ ID NO: 46352
  source 1..120: mol_type = other DNA

SEQ ID NO: 76307 - DNA, 120 bp, synthetic construct; identical to SEQ ID NO: 13049
  source 1..120: mol_type = other DNA

SEQ ID NO: 76308 - DNA, 120 bp, synthetic construct; identical to SEQ ID NO: 46354
  source 1..120: mol_type = other DNA

SEQ ID NO: 76309 - DNA, 120 bp, synthetic construct; identical to SEQ ID NO: 46355
  source 1..120: mol_type = other DNA

SEQ ID NO: 76310 - DNA, 120 bp, synthetic construct; identical to SEQ ID NO: 46356
  source 1..120: mol_type = other DNA

SEQ ID NO: 76311 - DNA, 120 bp, synthetic construct; identical to SEQ ID NO: 46357
  source 1..120: mol_type = other DNA

SEQ ID NO: 76312 - DNA, 120 bp, synthetic construct; identical to SEQ ID NO: 13050
  source 1..120: mol_type = other DNA

SEQ ID NO: 76313 - DNA, 120 bp, synthetic construct; identical to SEQ ID NO: 46359
  source 1..120: mol_type = other DNA

SEQ ID NO: 76314 - DNA, 120 bp, synthetic construct; identical to SEQ ID NO: 46360
  source 1..120: mol_type = other DNA

SEQ ID NO: 76315 - DNA, 120 bp, synthetic construct; identical to SEQ ID NO: 13051
  source 1..120: mol_type = other DNA

SEQ ID NO: 76316 - DNA, 120 bp, synthetic construct; identical to SEQ ID NO: 46362
  source 1..120: mol_type = other DNA

SEQ ID NO: 76317 - DNA, 120 bp, synthetic construct; identical to SEQ ID NO: 46363
  source 1..120: mol_type = other DNA

SEQ ID NO: 76318 - DNA, 120 bp, synthetic construct; identical to SEQ ID NO: 46364
  source 1..120: mol_type = other DNA

SEQ ID NO: 76319 - DNA, 120 bp, synthetic construct; identical to SEQ ID NO: 13052
  source 1..120: mol_type = other DNA

SEQ ID NO: 76320 - DNA, 120 bp, synthetic construct; identical to SEQ ID NO: 46366
  source 1..120: mol_type = other DNA

SEQ ID NO: 76321 - DNA, 120 bp, synthetic construct; identical to SEQ ID NO: 46367
  source 1..120: mol_type = other DNA

SEQ ID NO: 76322 - DNA, 120 bp, synthetic construct; identical to SEQ ID NO: 46368
  source 1..120: mol_type = other DNA

SEQ ID NO: 76323 - DNA, 120 bp, synthetic construct; identical to SEQ ID NO: 13053
  source 1..120: mol_type = other DNA

SEQ ID NO: 76324 - DNA, 120 bp, synthetic construct; identical to SEQ ID NO: 46370
  source 1..120: mol_type = other DNA

SEQ ID NO: 76325 - DNA, 120 bp, synthetic construct; identical to SEQ ID NO: 46371
  source 1..120: mol_type = other DNA

SEQ ID NO: 76326 - DNA, 120 bp, synthetic construct; identical to SEQ ID NO: 46372
  source 1..120: mol_type = other DNA

SEQ ID NO: 76327 - DNA, 120 bp, synthetic construct; identical to SEQ ID NO: 13054
  source 1..120: mol_type = other DNA

SEQ ID NO: 76328 - DNA, 120 bp, synthetic construct; identical to SEQ ID NO: 46374
  source 1..120: mol_type = other DNA

SEQ ID NO: 76329 - DNA, 120 bp, synthetic construct; identical to SEQ ID NO: 46375
  source 1..120: mol_type = other DNA

SEQ ID NO: 76330 - DNA, 120 bp, synthetic construct; identical to SEQ ID NO: 46376
  source 1..120: mol_type = other DNA

SEQ ID NO: 76331 - DNA, 120 bp, synthetic construct; identical to SEQ ID NO: 46377
  source 1..120: mol_type = other DNA

SEQ ID NO: 76332 - DNA, 120 bp, synthetic construct; identical to SEQ ID NO: 13055
  source 1..120: mol_type = other DNA

SEQ ID NO: 76333 - DNA, 120 bp, synthetic construct; identical to SEQ ID NO: 46379
  source 1..120: mol_type = other DNA

SEQ ID NO: 76334 - DNA, 120 bp, synthetic construct; identical to SEQ ID NO: 46380
  source 1..120: mol_type = other DNA

SEQ ID NO: 76335 - DNA, 120 bp, synthetic construct; identical to SEQ ID NO: 46381
  source 1..120: mol_type = other DNA

SEQ ID NO: 76336 - DNA, 120 bp, synthetic construct; identical to SEQ ID NO: 46382
  source 1..120: mol_type = other DNA

SEQ ID NO: 76337 - DNA, 120 bp, synthetic construct; identical to SEQ ID NO: 13056
  source 1..120: mol_type = other DNA

SEQ ID NO: 76338 - DNA, 120 bp, synthetic construct; identical to SEQ ID NO: 46384
  source 1..120: mol_type = other DNA

SEQ ID NO: 76339 - DNA, 120 bp, synthetic construct; identical to SEQ ID NO: 46385
  source 1..120: mol_type = other DNA

SEQ ID NO: 76340 - DNA, 120 bp, synthetic construct; identical to SEQ ID NO: 13057
  source 1..120: mol_type = other DNA

SEQ ID NO: 76341 - DNA, 120 bp, synthetic construct; identical to SEQ ID NO: 46387
  source 1..120: mol_type = other DNA

SEQ ID NO: 76342 - DNA, 120 bp, synthetic construct; identical to SEQ ID NO: 46388
  source 1..120: mol_type = other DNA

SEQ ID NO: 76343 - DNA, 120 bp, synthetic construct; identical to SEQ ID NO: 46389
  source 1..120: mol_type = other DNA

SEQ ID NO: 76344 - DNA, 120 bp, synthetic construct; identical to SEQ ID NO: 13058
  source 1..120: mol_type = other DNA

SEQ ID NO: 76345 - DNA, 120 bp, synthetic construct; identical to SEQ ID NO: 46391
  source 1..120: mol_type = other DNA

SEQ ID NO: 76346 - DNA, 120 bp, synthetic construct; identical to SEQ ID NO: 46392
  source 1..120: mol_type = other DNA

SEQ ID NO: 76347 - DNA, 120 bp, synthetic construct; identical to SEQ ID NO: 46393
  source 1..120: mol_type = other DNA

SEQ ID NO: 76348 - DNA, 120 bp, synthetic construct; identical to SEQ ID NO: 46394
  source 1..120: mol_type = other DNA

SEQ ID NO: 76349 - DNA, 120 bp, synthetic construct; identical to SEQ ID NO: 13059
  source 1..120: mol_type = other DNA

SEQ ID NO: 76350 - DNA, 120 bp, synthetic construct; identical to SEQ ID NO: 46396
  source 1..120: mol_type = other DNA

SEQ ID NO: 76351 - DNA, 120 bp, synthetic construct; identical to SEQ ID NO: 46397
  source 1..120: mol_type = other DNA

SEQ ID NO: 76352 - DNA, 120 bp, synthetic construct; identical to SEQ ID NO: 13060
  source 1..120: mol_type = other DNA

SEQ ID NO: 76353 - DNA, 120 bp, synthetic construct; identical to SEQ ID NO: 46399
  source 1..120: mol_type = other DNA

SEQ ID NO: 76354 - DNA, 120 bp, synthetic construct; identical to SEQ ID NO: 46400
  source 1..120: mol_type = other DNA

SEQ ID NO: 76355 - DNA, 120 bp, synthetic construct; identical to SEQ ID NO: 46401
  source 1..120: mol_type = other DNA

SEQ ID NO: 76356 - DNA, 120 bp, synthetic construct; identical to SEQ ID NO: 13061
  source 1..120: mol_type = other DNA

SEQ ID NO: 76357 - DNA, 120 bp, synthetic construct; identical to SEQ ID NO: 46403
  source 1..120: mol_type = other DNA

SEQ ID NO: 76358 - DNA, 120 bp, synthetic construct; identical to SEQ ID NO: 46404
  source 1..120: mol_type = other DNA

SEQ ID NO: 76359 - DNA, 120 bp, synthetic construct; identical to SEQ ID NO: 46405
  source 1..120: mol_type = other DNA

SEQ ID NO: 76360 - DNA, 120 bp, synthetic construct; identical to SEQ ID NO: 13062
  source 1..120: mol_type = other DNA

SEQ ID NO: 76361 - DNA, 120 bp, synthetic construct; identical to SEQ ID NO: 46407
  source 1..120: mol_type = other DNA

SEQ ID NO: 76362 - DNA, 120 bp, synthetic construct; identical to SEQ ID NO: 46408
  source 1..120: mol_type = other DNA

SEQ ID NO: 76363 - DNA, 120 bp, synthetic construct; identical to SEQ ID NO: 13063
  source 1..120: mol_type = other DNA

SEQ ID NO: 76364 - DNA, 120 bp, synthetic construct; identical to SEQ ID NO: 46410
  source 1..120: mol_type = other DNA

SEQ ID NO: 76365 - DNA, 120 bp, synthetic construct; identical to SEQ ID NO: 46411
  source 1..120: mol_type = other DNA

SEQ ID NO: 76366 - DNA, 120 bp, synthetic construct; identical to SEQ ID NO: 46412
  source 1..120: mol_type = other DNA

SEQ ID NO: 76367 - DNA, 120 bp, synthetic construct; identical to SEQ ID NO: 13064
  source 1..120: mol_type = other DNA

SEQ ID NO: 76368 - DNA, 120 bp, synthetic construct; identical to SEQ ID NO: 46414
  source 1..120: mol_type = other DNA

SEQ ID NO: 76369 - DNA, 120 bp, synthetic construct; identical to SEQ ID NO: 46415
  source 1..120: mol_type = other DNA

SEQ ID NO: 76370 - DNA, 120 bp, synthetic construct; identical to SEQ ID NO: 46416
  source 1..120: mol_type = other DNA

SEQ ID NO: 76371 - DNA, 120 bp, synthetic construct; identical to SEQ ID NO: 46417
  source 1..120: mol_type = other DNA

SEQ ID NO: 76372 - DNA, 120 bp, synthetic construct; identical to SEQ ID NO: 5662
  source 1..120: mol_type = other DNA

SEQ ID NO: 76373 - DNA, 120 bp, synthetic construct; identical to SEQ ID NO: 46419
  source 1..120: mol_type = other DNA

SEQ ID NO: 76374 - DNA, 120 bp, synthetic construct; identical to SEQ ID NO: 46420
  source 1..120: mol_type = other DNA

SEQ ID NO: 76375 - DNA, 120 bp, synthetic construct; identical to SEQ ID NO: 13066
  source 1..120: mol_type = other DNA

SEQ ID NO: 76376 - DNA, 120 bp, synthetic construct; identical to SEQ ID NO: 46422
  source 1..120: mol_type = other DNA

SEQ ID NO: 76377 - DNA, 120 bp, synthetic construct; identical to SEQ ID NO: 46423
  source 1..120: mol_type = other DNA

SEQ ID NO: 76378 - DNA, 120 bp, synthetic construct; identical to SEQ ID NO: 46424
  source 1..120: mol_type = other DNA

SEQ ID NO: 76379 - DNA, 120 bp, synthetic construct; identical to SEQ ID NO: 13067
  source 1..120: mol_type = other DNA

SEQ ID NO: 76380 - DNA, 120 bp, synthetic construct; identical to SEQ ID NO: 46426
  source 1..120: mol_type = other DNA

SEQ ID NO: 76381 - DNA, 120 bp, synthetic construct; identical to SEQ ID NO: 46427
  source 1..120: mol_type = other DNA

SEQ ID NO: 76382 - DNA, 120 bp, synthetic construct; identical to SEQ ID NO: 46428
  source 1..120: mol_type = other DNA

SEQ ID NO: 76383 - DNA, 120 bp, synthetic construct; identical to SEQ ID NO: 13068
  source 1..120: mol_type = other DNA

SEQ ID NO: 76384 - DNA, 120 bp, synthetic construct; identical to SEQ ID NO: 46430
  source 1..120: mol_type = other DNA

SEQ ID NO: 76385 - DNA, 120 bp, synthetic construct; identical to SEQ ID NO: 46431
  source 1..120: mol_type = other DNA

SEQ ID NO: 76386 - DNA, 120 bp, synthetic construct; identical to SEQ ID NO: 46432
  source 1..120: mol_type = other DNA

SEQ ID NO: 76387 - DNA, 120 bp, synthetic construct; identical to SEQ ID NO: 13069
  source 1..120: mol_type = other DNA

SEQ ID NO: 76388 - DNA, 120 bp, synthetic construct; identical to SEQ ID NO: 46434
  source 1..120: mol_type = other DNA

SEQ ID NO: 76389 - DNA, 120 bp, synthetic construct; identical to SEQ ID NO: 46435
  source 1..120: mol_type = other DNA

SEQ ID NO: 76390 - DNA, 120 bp, synthetic construct; identical to SEQ ID NO: 46436
  source 1..120: mol_type = other DNA

SEQ ID NO: 76391 - DNA, 120 bp, synthetic construct; identical to SEQ ID NO: 13070
  source 1..120: mol_type = other DNA

SEQ ID NO: 76392 - DNA, 120 bp, synthetic construct; identical to SEQ ID NO: 46438
  source 1..120: mol_type = other DNA

SEQ ID NO: 76393 - DNA, 120 bp, synthetic construct; identical to SEQ ID NO: 46439
  source 1..120: mol_type = other DNA

SEQ ID NO: 76394 - DNA, 120 bp, synthetic construct; identical to SEQ ID NO: 46440
  source 1..120: mol_type = other DNA

SEQ ID NO: 76395 - DNA, 120 bp, synthetic construct; identical to SEQ ID NO: 13071
  source 1..120: mol_type = other DNA

SEQ ID NO: 76396 - DNA, 120 bp, synthetic construct; identical to SEQ ID NO: 46442
  source 1..120: mol_type = other DNA

SEQ ID NO: 76397 - DNA, 120 bp, synthetic construct; identical to SEQ ID NO: 46443
  source 1..120: mol_type = other DNA

SEQ ID NO: 76398 - DNA, 120 bp, synthetic construct; identical to SEQ ID NO: 46444
  source 1..120: mol_type = other DNA

SEQ ID NO: 76399 - DNA, 120 bp, synthetic construct; identical to SEQ ID NO: 13072
  source 1..120: mol_type = other DNA

SEQ ID NO: 76400 - DNA, 120 bp, synthetic construct; identical to SEQ ID NO: 46446
  source 1..120: mol_type = other DNA

SEQ ID NO: 76401 - DNA, 120 bp, synthetic construct; identical to SEQ ID NO: 46447
  source 1..120: mol_type = other DNA

SEQ ID NO: 76402 - DNA, 120 bp, synthetic construct; identical to SEQ ID NO: 46448
  source 1..120: mol_type = other DNA

SEQ ID NO: 76403 - DNA, 120 bp, synthetic construct; identical to SEQ ID NO: 13073
  source 1..120: mol_type = other DNA

SEQ ID NO: 76404 - DNA, 120 bp, synthetic construct; identical to SEQ ID NO: 46450
  source 1..120: mol_type = other DNA

SEQ ID NO: 76405 - DNA, 120 bp, synthetic construct; identical to SEQ ID NO: 46451
  source 1..120: mol_type = other DNA

SEQ ID NO: 76406 - DNA, 120 bp, synthetic construct; identical to SEQ ID NO: 46452
  source 1..120: mol_type = other DNA

SEQ ID NO: 76407 - DNA, 120 bp, synthetic construct; identical to SEQ ID NO: 13074
  source 1..120: mol_type = other DNA

SEQ ID NO: 76408 - DNA, 120 bp, synthetic construct; identical to SEQ ID NO: 46454
  source 1..120: mol_type = other DNA

SEQ ID NO: 76409 - DNA, 120 bp, synthetic construct; identical to SEQ ID NO: 46455
  source 1..120: mol_type = other DNA

SEQ ID NO: 76410 - DNA, 120 bp, synthetic construct; identical to SEQ ID NO: 46456
  source 1..120: mol_type = other DNA

SEQ ID NO: 76411 - DNA, 120 bp, synthetic construct; identical to SEQ ID NO: 46457
  source 1..120: mol_type = other DNA

SEQ ID NO: 76412 - DNA, 120 bp, synthetic construct; identical to SEQ ID NO: 13075
  source 1..120: mol_type = other DNA

SEQ ID NO: 76413 - DNA, 120 bp, synthetic construct; identical to SEQ ID NO: 46459
  source 1..120: mol_type = other DNA

SEQ ID NO: 76414 - DNA, 120 bp, synthetic construct; identical to SEQ ID NO: 46460
  source 1..120: mol_type = other DNA

SEQ ID NO: 76415 - DNA, 120 bp, synthetic construct; identical to SEQ ID NO: 13076
  source 1..120: mol_type = other DNA

SEQ ID NO: 76416 - DNA, 120 bp, synthetic construct; identical to SEQ ID NO: 46462
  source 1..120: mol_type = other DNA

SEQ ID NO: 76417 - DNA, 120 bp, synthetic construct; identical to SEQ ID NO: 46463
  source 1..120: mol_type = other DNA

SEQ ID NO: 76418 - DNA, 120 bp, synthetic construct; identical to SEQ ID NO: 46464
  source 1..120: mol_type = other DNA

SEQ ID NO: 76419 - DNA, 120 bp, synthetic construct; identical to SEQ ID NO: 46465
  source 1..120: mol_type = other DNA

SEQ ID NO: 76420 - DNA, 120 bp, synthetic construct; identical to SEQ ID NO: 13077
  source 1..120: mol_type = other DNA

SEQ ID NO: 76421 - DNA, 120 bp, synthetic construct; identical to SEQ ID NO: 46467
  source 1..120: mol_type = other DNA

SEQ ID NO: 76422 - DNA, 120 bp, synthetic construct; identical to SEQ ID NO: 46468
  source 1..120: mol_type = other DNA

SEQ ID NO: 76423 - DNA, 120 bp, synthetic construct; identical to SEQ ID NO: 46469
  source 1..120: mol_type = other DNA

SEQ ID NO: 76424 - DNA, 120 bp, synthetic construct; identical to SEQ ID NO: 13078
  source 1..120: mol_type = other DNA

SEQ ID NO: 76425 - DNA, 120 bp, synthetic construct; identical to SEQ ID NO: 46471
  source 1..120: mol_type = other DNA

SEQ ID NO: 76426 - DNA, 120 bp, synthetic construct; identical to SEQ ID NO: 46472
  source 1..120: mol_type = other DNA

SEQ ID NO: 76427 - DNA, 120 bp, synthetic construct; identical to SEQ ID NO: 13079
  source 1..120: mol_type = other DNA

SEQ ID NO: 76428 - DNA, 120 bp, synthetic construct; identical to SEQ ID NO: 46474
  source 1..120: mol_type = other DNA

SEQ ID NO: 76429 - DNA, 120 bp, synthetic construct; identical to SEQ ID NO: 46475
  source 1..120: mol_type = other DNA

SEQ ID NO: 76430 - DNA, 120 bp, synthetic construct; identical to SEQ ID NO: 46476
  source 1..120: mol_type = other DNA

SEQ ID NO: 76431 - DNA, 120 bp, synthetic construct; identical to SEQ ID NO: 46477
  source 1..120: mol_type = other DNA

SEQ ID NO: 76432 - DNA, 120 bp, synthetic construct; identical to SEQ ID NO: 13080
  source 1..120: mol_type = other DNA

SEQ ID NO: 76433 - DNA, 120 bp, synthetic construct; identical to SEQ ID NO: 46479
  source 1..120: mol_type = other DNA

SEQ ID NO: 76434 - DNA, 120 bp, synthetic construct; identical to SEQ ID NO: 46480
  source 1..120: mol_type = other DNA

SEQ ID NO: 76435 - DNA, 120 bp, synthetic construct; identical to SEQ ID NO: 13081
  source 1..120: mol_type = other DNA

SEQ ID NO: 76436 - DNA, 120 bp, synthetic construct; identical to SEQ ID NO: 46482
  source 1..120: mol_type = other DNA

SEQ ID NO: 76437 - DNA, 120 bp, synthetic construct; identical to SEQ ID NO: 46483
  source 1..120: mol_type = other DNA

SEQ ID NO: 76438 - DNA, 120 bp, synthetic construct; identical to SEQ ID NO: 46484
  source 1..120: mol_type = other DNA

SEQ ID NO: 76439 - DNA, 120 bp, synthetic construct; identical to SEQ ID NO: 13082
  source 1..120: mol_type = other DNA

SEQ ID NO: 76440 - DNA, 120 bp, synthetic construct; identical to SEQ ID NO: 46486
  source 1..120: mol_type = other DNA

SEQ ID NO: 76441 - DNA, 120 bp, synthetic construct; identical to SEQ ID NO: 46487
  source 1..120: mol_type = other DNA

SEQ ID NO: 76442 - DNA, 120 bp, synthetic construct; identical to SEQ ID NO: 46488
  source 1..120: mol_type = other DNA

SEQ ID NO: 76443 - DNA, 120 bp, synthetic construct; identical to SEQ ID NO: 13083
  source 1..120: mol_type = other DNA

SEQ ID NO: 76444 - DNA, 120 bp, synthetic construct; identical to SEQ ID NO: 46490
  source 1..120: mol_type = other DNA

SEQ ID NO: 76445 - DNA, 120 bp, synthetic construct; identical to SEQ ID NO: 46491
  source 1..120: mol_type = other DNA

SEQ ID NO: 76446 - DNA, 120 bp, synthetic construct; identical to SEQ ID NO: 46492
  source 1..120: mol_type = other DNA

SEQ ID NO: 76447 - DNA, 120 bp, synthetic construct; identical to SEQ ID NO: 46493
  source 1..120: mol_type = other DNA

SEQ ID NO: 76448 - DNA, 120 bp, synthetic construct; identical to SEQ ID NO: 13084
  source 1..120: mol_type = other DNA

SEQ ID NO: 76449 - DNA, 120 bp, synthetic construct; identical to SEQ ID NO: 46495
  source 1..120: mol_type = other DNA

SEQ ID NO: 76450 - DNA, 120 bp, synthetic construct; identical to SEQ ID NO: 46496
  source 1..120: mol_type = other DNA

SEQ ID NO: 76451 - DNA, 120 bp, synthetic construct; identical to SEQ ID NO: 13085
  source 1..120: mol_type = other DNA

SEQ ID NO: 76452 - DNA, 120 bp, synthetic construct; identical to SEQ ID NO: 46498
  source 1..120: mol_type = other DNA

SEQ ID NO: 76453 - DNA, 120 bp, synthetic construct; identical to SEQ ID NO: 46499
  source 1..120: mol_type = other DNA

SEQ ID NO: 76454 - DNA, 120 bp, synthetic construct; identical to SEQ ID NO: 46500
  source 1..120: mol_type = other DNA

SEQ ID NO: 76455 - DNA, 120 bp, synthetic construct; identical to SEQ ID NO: 13086
  source 1..120: mol_type = other DNA

SEQ ID NO: 76456 - DNA, 120 bp, synthetic construct; identical to SEQ ID NO: 46502
  source 1..120: mol_type = other DNA

SEQ ID NO: 76457 - DNA, 120 bp, synthetic construct; identical to SEQ ID NO: 46503
  source 1..120: mol_type = other DNA

SEQ ID NO: 76458 - DNA, 120 bp, synthetic construct; identical to SEQ ID NO: 46504
  source 1..120: mol_type = other DNA

SEQ ID NO: 76459 - DNA, 120 bp, synthetic construct; identical to SEQ ID NO: 13087
  source 1..120: mol_type = other DNA

SEQ ID NO: 76460 - DNA, 120 bp, synthetic construct; identical to SEQ ID NO: 46506
  source 1..120: mol_type = other DNA

SEQ ID NO: 76461 - DNA, 120 bp, synthetic construct; identical to SEQ ID NO: 46507
  source 1..120: mol_type = other DNA

SEQ ID NO: 76462 - DNA, 120 bp, synthetic construct; identical to SEQ ID NO: 46508
  source 1..120: mol_type = other DNA

SEQ ID NO: 76463 - DNA, 120 bp, synthetic construct; identical to SEQ ID NO: 46509
  source 1..120: mol_type = other DNA

SEQ ID NO: 76464 - DNA, 120 bp, synthetic construct; identical to SEQ ID NO: 13088
  source 1..120: mol_type = other DNA

SEQ ID NO: 76465 - DNA, 120 bp, synthetic construct; identical to SEQ ID NO: 46511
  source 1..120: mol_type = other DNA

SEQ ID NO: 76466 - DNA, 120 bp, synthetic construct; identical to SEQ ID NO: 46512
  source 1..120: mol_type = other DNA

SEQ ID NO: 76467 - DNA, 120 bp, synthetic construct; identical to SEQ ID NO: 46513
  source 1..120: mol_type = other DNA

SEQ ID NO: 76468 - DNA, 120 bp, synthetic construct; identical to SEQ ID NO: 13089
  source 1..120: mol_type = other DNA

SEQ ID NO: 76469 - DNA, 120 bp, synthetic construct; identical to SEQ ID NO: 46515
  source 1..120: mol_type = other DNA

SEQ ID NO: 76470 - DNA, 120 bp, synthetic construct; identical to SEQ ID NO: 46516
  source 1..120: mol_type = other DNA

SEQ ID NO: 76471 - DNA, 120 bp, synthetic construct; identical to SEQ ID NO: 46517
  source 1..120: mol_type = other DNA

SEQ ID NO: 76472 - DNA, 120 bp, synthetic construct; identical to SEQ ID NO: 13090
  source 1..120: mol_type = other DNA

SEQ ID NO: 76473 - DNA, 120 bp, synthetic construct; identical to SEQ ID NO: 46519
  source 1..120: mol_type = other DNA

SEQ ID NO: 76474 - DNA, 120 bp, synthetic construct; identical to SEQ ID NO: 46520
  source 1..120: mol_type = other DNA

SEQ ID NO: 76475 - DNA, 120 bp, synthetic construct; identical to SEQ ID NO: 46521
  source 1..120: mol_type = other DNA

SEQ ID NO: 76476 - DNA, 120 bp, synthetic construct; identical to SEQ ID NO: 13091
  source 1..120: mol_type = other DNA

SEQ ID NO: 76477 - DNA, 120 bp, synthetic construct; identical to SEQ ID NO: 46523
  source 1..120: mol_type = other DNA

SEQ ID NO: 76478 - DNA, 120 bp, synthetic construct; identical to SEQ ID NO: 46524
  source 1..120: mol_type = other DNA

SEQ ID NO: 76479 - DNA, 120 bp, synthetic construct; identical to SEQ ID NO: 46525
  source 1..120: mol_type = other DNA

SEQ ID NO: 76480 - DNA, 120 bp, synthetic construct; identical to SEQ ID NO: 13092
  source 1..120: mol_type = other DNA

SEQ ID NO: 76481 - DNA, 120 bp, synthetic construct; identical to SEQ ID NO: 46527
  source 1..120: mol_type = other DNA

SEQ ID NO: 76482 - DNA, 120 bp, synthetic construct; identical to SEQ ID NO: 46528
  source 1..120: mol_type = other DNA

SEQ ID NO: 76483 - DNA, 120 bp, synthetic construct; identical to SEQ ID NO: 46529
  source 1..120: mol_type = other DNA

SEQ ID NO: 76484 - DNA, 120 bp, synthetic construct; identical to SEQ ID NO: 13093
  source 1..120: mol_type = other DNA

SEQ ID NO: 76485 - DNA, 120 bp, synthetic construct; identical to SEQ ID NO: 46531
  source 1..120: mol_type = other DNA

SEQ ID NO: 76486 - DNA, 120 bp, synthetic construct; identical to SEQ ID NO: 46532
  source 1..120: mol_type = other DNA

SEQ ID NO: 76487 - DNA, 120 bp, synthetic construct; identical to SEQ ID NO: 46533
  source 1..120: mol_type = other DNA

SEQ ID NO: 76488 - DNA, 120 bp, synthetic construct; identical to SEQ ID NO: 13094
  source 1..120: mol_type = other DNA

SEQ ID NO: 76489 - DNA, 120 bp, synthetic construct; identical to SEQ ID NO: 46535
  source 1..120: mol_type = other DNA

SEQ ID NO: 76490 - DNA, 120 bp, synthetic construct; identical to SEQ ID NO: 46536
  source 1..120: mol_type = other DNA

SEQ ID NO: 76491 - DNA, 120 bp, synthetic construct; identical to SEQ ID NO: 46537
  source 1..120: mol_type = other DNA

SEQ ID NO: 76492 - DNA, 120 bp, synthetic construct; identical to SEQ ID NO: 13095
  source 1..120: mol_type = other DNA

SEQ ID NO: 76493 - DNA, 120 bp, synthetic construct; identical to SEQ ID NO: 46539
  source 1..120: mol_type = other DNA

SEQ ID NO: 76494 - DNA, 120 bp, synthetic construct; identical to SEQ ID NO: 46540
  source 1..120: mol_type = other DNA

SEQ ID NO: 76495 - DNA, 120 bp, synthetic construct; identical to SEQ ID NO: 46541
  source 1..120: mol_type = other DNA

SEQ ID NO: 76496 - DNA, 120 bp, synthetic construct; identical to SEQ ID NO: 13096
  source 1..120: mol_type = other DNA

SEQ ID NO: 76497 - DNA, 120 bp, synthetic construct; identical to SEQ ID NO: 46543
  source 1..120: mol_type = other DNA

SEQ ID NO: 76498 - DNA, 120 bp, synthetic construct; identical to SEQ ID NO: 46544
  source 1..120: mol_type = other DNA

SEQ ID NO: 76499 - DNA, 120 bp, synthetic construct; identical to SEQ ID NO: 46545
  source 1..120: mol_type = other DNA

SEQ ID NO: 76500 - DNA, 120 bp, synthetic construct; identical to SEQ ID NO: 13097
  source 1..120: mol_type = other DNA

SEQ ID NO: 76501 - DNA, 120 bp, synthetic construct; identical to SEQ ID NO: 46547
  source 1..120: mol_type = other DNA

SEQ ID NO: 76502 - DNA, 120 bp, synthetic construct; identical to SEQ ID NO: 46548
  source 1..120: mol_type = other DNA

SEQ ID NO: 76503 - DNA, 120 bp, synthetic construct; identical to SEQ ID NO: 46549
  source 1..120: mol_type = other DNA

SEQ ID NO: 76504 - DNA, 120 bp, synthetic construct; identical to SEQ ID NO: 46550
  source 1..120: mol_type = other DNA

SEQ ID NO: 76505 - DNA, 120 bp, synthetic construct; identical to SEQ ID NO: 13098
  source 1..120: mol_type = other DNA

SEQ ID NO: 76506 - DNA, 120 bp, synthetic construct; identical to SEQ ID NO: 46552
  source 1..120: mol_type = other DNA

SEQ ID NO: 76507 - DNA, 120 bp, synthetic construct; identical to SEQ ID NO: 46553
  source 1..120: mol_type = other DNA

SEQ ID NO: 76508 - DNA, 120 bp, synthetic construct; identical to SEQ ID NO: 13099
  source 1..120: mol_type = other DNA

SEQ ID NO: 76509 - DNA, 120 bp, synthetic construct; identical to SEQ ID NO: 46555
  source 1..120: mol_type = other DNA

SEQ ID NO: 76510 - DNA, 120 bp, synthetic construct; identical to SEQ ID NO: 46556
  source 1..120: mol_type = other DNA

SEQ ID NO: 76511 - DNA, 120 bp, synthetic construct; identical to SEQ ID NO: 46557
  source 1..120: mol_type = other DNA

SEQ ID NO: 76512 - DNA, 120 bp, synthetic construct; identical to SEQ ID NO: 46558
  source 1..120: mol_type = other DNA

SEQ ID NO: 76513 - DNA, 120 bp, synthetic construct; identical to SEQ ID NO: 13100
  source 1..120: mol_type = other DNA

SEQ ID NO: 76514 - DNA, 120 bp, synthetic construct; identical to SEQ ID NO: 46560
  source 1..120: mol_type = other DNA

SEQ ID NO: 76515 - DNA, 120 bp, synthetic construct; identical to SEQ ID NO: 46561
  source 1..120: mol_type = other DNA

SEQ ID NO: 76516 - DNA, 120 bp, synthetic construct; identical to SEQ ID NO: 46562
  source 1..120: mol_type = other DNA

SEQ ID NO: 76517 - DNA, 120 bp, synthetic construct; identical to SEQ ID NO: 13101
  source 1..120: mol_type = other DNA

SEQ ID NO: 76518 - DNA, 120 bp, synthetic construct; identical to SEQ ID NO: 46564
  source 1..120: mol_type = other DNA

SEQ ID NO: 76519 - DNA, 120 bp, synthetic construct; identical to SEQ ID NO: 46565
  source 1..120: mol_type = other DNA

SEQ ID NO: 76520 - DNA, 120 bp, synthetic construct; identical to SEQ ID NO: 46566
  source 1..120: mol_type = other DNA

SEQ ID NO: 76521 - DNA, 120 bp, synthetic construct; identical to SEQ ID NO: 13102
  source 1..120: mol_type = other DNA

SEQ ID NO: 76522 - DNA, 120 bp, synthetic construct; identical to SEQ ID NO: 46568
  source 1..120: mol_type = other DNA

SEQ ID NO: 76523 - DNA, 120 bp, synthetic construct; identical to SEQ ID NO: 46569
  source 1..120: mol_type = other DNA

SEQ ID NO: 76524 - DNA, 120 bp, synthetic construct; identical to SEQ ID NO: 46570
  source 1..120: mol_type = other DNA

SEQ ID NO: 76525 - DNA, 120 bp, synthetic construct; identical to SEQ ID NO: 13103
  source 1..120: mol_type = other DNA

SEQ ID NO: 76526 - DNA, 120 bp, synthetic construct; identical to SEQ ID NO: 46572
  source 1..120: mol_type = other DNA

SEQ ID NO: 76527 - DNA, 120 bp, synthetic construct; identical to SEQ ID NO: 46573
  source 1..120: mol_type = other DNA

SEQ ID NO: 76528 - DNA, 120 bp, synthetic construct; identical to SEQ ID NO: 13104
  source 1..120: mol_type = other DNA

SEQ ID NO: 76529 - DNA, 120 bp, synthetic construct; identical to SEQ ID NO: 46575
  source 1..120: mol_type = other DNA

SEQ ID NO: 76530 - DNA, 120 bp, synthetic construct; identical to SEQ ID NO: 46576
  source 1..120: mol_type = other DNA

SEQ ID NO: 76531 - DNA, 120 bp, synthetic construct; identical to SEQ ID NO: 46577
  source 1..120: mol_type = other DNA

SEQ ID NO: 76532 - DNA, 120 bp, synthetic construct; identical to SEQ ID NO: 13105
  source 1..120: mol_type = other DNA

SEQ ID NO: 76533 - DNA, 120 bp, synthetic construct; identical to SEQ ID NO: 46579
  source 1..120: mol_type = other DNA

SEQ ID NO: 76534 - DNA, 120 bp, synthetic construct; identical to SEQ ID NO: 46580
  source 1..120: mol_type = other DNA

SEQ ID NO: 76535 - DNA, 120 bp, synthetic construct; identical to SEQ ID NO: 13106
  source 1..120: mol_type = other DNA

SEQ ID NO: 76536 - DNA, 120 bp, synthetic construct; identical to SEQ ID NO: 46582
  source 1..120: mol_type = other DNA

SEQ ID NO: 76537 - DNA, 120 bp, synthetic construct; identical to SEQ ID NO: 46583
  source 1..120: mol_type = other DNA

SEQ ID NO: 76538 - DNA, 120 bp, synthetic construct; identical to SEQ ID NO: 46584
  source 1..120: mol_type = other DNA

SEQ ID NO: 76539 - DNA, 120 bp, synthetic construct; identical to SEQ ID NO: 13107
  source 1..120: mol_type = other DNA

SEQ ID NO: 76540 - DNA, 120 bp, synthetic construct; identical to SEQ ID NO: 46586
  source 1..120: mol_type = other DNA

SEQ ID NO: 76541 - DNA, 120 bp, synthetic construct; identical to SEQ ID NO: 46587
  source 1..120: mol_type = other DNA

SEQ ID NO: 76542 - DNA, 120 bp, synthetic construct; identical to SEQ ID NO: 46588
  source 1..120: mol_type = other DNA

SEQ ID NO: 76543 - DNA, 120 bp, synthetic construct; identical to SEQ ID NO: 13108
  source 1..120: mol_type = other DNA

SEQ ID NO: 76544 - DNA, 120 bp, synthetic construct; identical to SEQ ID NO: 46590
  source 1..120: mol_type = other DNA

SEQ ID NO: 76545 - DNA, 120 bp, synthetic construct; identical to SEQ ID NO: 46591
  source 1..120: mol_type = other DNA

SEQ ID NO: 76546 - DNA, 120 bp, synthetic construct; identical to SEQ ID NO: 46592
  source 1..120: mol_type = other DNA

SEQ ID NO: 76547 - DNA, 120 bp, synthetic construct; identical to SEQ ID NO: 46593
  source 1..120: mol_type = other DNA

SEQ ID NO: 76548 - DNA, 120 bp, synthetic construct; identical to SEQ ID NO: 13109
  source 1..120: mol_type = other DNA

SEQ ID NO: 76549 - DNA, 120 bp, synthetic construct; identical to SEQ ID NO: 46595
  source 1..120: mol_type = other DNA

SEQ ID NO: 76550 - DNA, 120 bp, synthetic construct; identical to SEQ ID NO: 46596
  source 1..120: mol_type = other DNA

SEQ ID NO: 76551 - DNA, 120 bp, synthetic construct; identical to SEQ ID NO: 46597
  source 1..120: mol_type = other DNA

SEQ ID NO: 76552 - DNA, 120 bp, synthetic construct; identical to SEQ ID NO: 13110
  source 1..120: mol_type = other DNA

SEQ ID NO: 76553 - DNA, 120 bp, synthetic construct; identical to SEQ ID NO: 46599
  source 1..120: mol_type = other DNA

SEQ ID NO: 76554 - DNA, 120 bp, synthetic construct; identical to SEQ ID NO: 46600
  source 1..120: mol_type = other DNA

SEQ ID NO: 76555 - DNA, 120 bp, synthetic construct; identical to SEQ ID NO: 46601
  source 1..120: mol_type = other DNA

SEQ ID NO: 76556 - DNA, 120 bp, synthetic construct; identical to SEQ ID NO: 13111
  source 1..120: mol_type = other DNA

SEQ ID NO: 76557 - DNA, 120 bp, synthetic construct; identical to SEQ ID NO: 46603
  source 1..120: mol_type = other DNA

SEQ ID NO: 76558 - DNA, 120 bp, synthetic construct; identical to SEQ ID NO: 46604
  source 1..120: mol_type = other DNA

SEQ ID NO: 76559 - DNA, 120 bp, synthetic construct; identical to SEQ ID NO: 46605
  source 1..120: mol_type = other DNA

SEQ ID NO: 76560 - DNA, 120 bp, synthetic construct; identical to SEQ ID NO: 13112
  source 1..120: mol_type = other DNA

SEQ ID NO: 76561 - DNA, 120 bp, synthetic construct; identical to SEQ ID NO: 46607
  source 1..120: mol_type = other DNA

SEQ ID NO: 76562 - DNA, 120 bp, synthetic construct; identical to SEQ ID NO: 46608
  source 1..120: mol_type = other DNA

SEQ ID NO: 76563 - DNA, 120 bp, synthetic construct; identical to SEQ ID NO: 46609
  source 1..120: mol_type = other DNA

SEQ ID NO: 76564 - DNA, 120 bp, synthetic construct; identical to SEQ ID NO: 13113
  source 1..120: mol_type = other DNA

SEQ ID NO: 76565 - DNA, 120 bp, synthetic construct; identical to SEQ ID NO: 46611
  source 1..120: mol_type = other DNA

SEQ ID NO: 76566 - DNA, 120 bp, synthetic construct; identical to SEQ ID NO: 46612
  source 1..120: mol_type = other DNA

SEQ ID NO: 76567 - DNA, 120 bp, synthetic construct; identical to SEQ ID NO: 13114
  source 1..120: mol_type = other DNA

SEQ ID NO: 76568 - DNA, 120 bp, synthetic construct; identical to SEQ ID NO: 46614
  source 1..120: mol_type = other DNA

SEQ ID NO: 76569 - DNA, 120 bp, synthetic construct; identical to SEQ ID NO: 46615
  source 1..120: mol_type = other DNA

SEQ ID NO: 76570 - DNA, 120 bp, synthetic construct; identical to SEQ ID NO: 46616
  source 1..120: mol_type = other DNA

SEQ ID NO: 76571 - DNA, 120 bp, synthetic construct; identical to SEQ ID NO: 13115
  source 1..120: mol_type = other DNA

SEQ ID NO: 76572 - DNA, 120 bp, synthetic construct; identical to SEQ ID NO: 46618
  source 1..120: mol_type = other DNA

SEQ ID NO: 76573 - DNA, 120 bp, synthetic construct; identical to SEQ ID NO: 46619
  source 1..120: mol_type = other DNA

SEQ ID NO: 76574 - DNA, 120 bp, synthetic construct; identical to SEQ ID NO: 46620
  source 1..120: mol_type = other DNA

SEQ ID NO: 76575 - DNA, 120 bp, synthetic construct; identical to SEQ ID NO: 13116
  source 1..120: mol_type = other DNA

SEQ ID NO: 76576 - DNA, 120 bp, synthetic construct; identical to SEQ ID NO: 46622
  source 1..120: mol_type = other DNA

SEQ ID NO: 76577 - DNA, 120 bp, synthetic construct; identical to SEQ ID NO: 46623
  source 1..120: mol_type = other DNA

SEQ ID NO: 76578 - DNA, 120 bp, synthetic construct; identical to SEQ ID NO: 46624
  source 1..120: mol_type = other DNA

SEQ ID NO: 76579 - DNA, 120 bp, synthetic construct; identical to SEQ ID NO: 13117
  source 1..120: mol_type = other DNA

SEQ ID NO: 76580 - DNA, 120 bp, synthetic construct; identical to SEQ ID NO: 46626
  source 1..120: mol_type = other DNA

SEQ ID NO: 76581 - DNA, 120 bp, synthetic construct; identical to SEQ ID NO: 46627
  source 1..120: mol_type = other DNA

SEQ ID NO: 76582 - DNA, 120 bp, synthetic construct; identical to SEQ ID NO: 46628
  source 1..120: mol_type = other DNA

SEQ ID NO: 76583 - DNA, 120 bp, synthetic construct; identical to SEQ ID NO: 46629
  source 1..120: mol_type = other DNA

SEQ ID NO: 76584 - DNA, 120 bp, synthetic construct; identical to SEQ ID NO: 13118
  source 1..120: mol_type = other DNA

SEQ ID NO: 76585 - DNA, 120 bp, synthetic construct; identical to SEQ ID NO: 46631
  source 1..120: mol_type = other DNA

SEQ ID NO: 76586 - DNA, 120 bp, synthetic construct; identical to SEQ ID NO: 46632
  source 1..120: mol_type = other DNA

SEQ ID NO: 76587 - DNA, 120 bp, synthetic construct; identical to SEQ ID NO: 46633
  source 1..120: mol_type = other DNA

SEQ ID NO: 76588 - DNA, 120 bp, synthetic construct; identical to SEQ ID NO: 13119
  source 1..120: mol_type = other DNA

SEQ ID NO: 76589 - DNA, 120 bp, synthetic construct; identical to SEQ ID NO: 46635
  source 1..120: mol_type = other DNA

SEQ ID NO: 76590 - DNA, 120 bp, synthetic construct; identical to SEQ ID NO: 46636
  source 1..120: mol_type = other DNA

SEQ ID NO: 76591 - DNA, 120 bp, synthetic construct; identical to SEQ ID NO: 46637
  source 1..120: mol_type = other DNA

SEQ ID NO: 76592 - DNA, 120 bp, synthetic construct; identical to SEQ ID NO: 13120
  source 1..120: mol_type = other DNA

SEQ ID NO: 76593 - DNA, 120 bp, synthetic construct; identical to SEQ ID NO: 46639
  source 1..120: mol_type = other DNA

SEQ ID NO: 76594 - DNA, 120 bp, synthetic construct; identical to SEQ ID NO: 46640
  source 1..120: mol_type = other DNA

SEQ ID NO: 76595 - DNA, 120 bp, synthetic construct; identical to SEQ ID NO: 13121
  source 1..120: mol_type = other DNA

SEQ ID NO: 76596 - DNA, 120 bp, synthetic construct; identical to SEQ ID NO: 46642
  source 1..120: mol_type = other DNA

SEQ ID NO: 76597 - DNA, 120 bp, synthetic construct; identical to SEQ ID NO: 46643
  source 1..120: mol_type = other DNA

SEQ ID NO: 76598 - DNA, 120 bp, synthetic construct; identical to SEQ ID NO: 46644
  source 1..120: mol_type = other DNA

SEQ ID NO: 76599 - DNA, 120 bp, synthetic construct; identical to SEQ ID NO: 46645
  source 1..120: mol_type = other DNA

SEQ ID NO: 76600 - DNA, 120 bp, synthetic construct; identical to SEQ ID NO: 13122
  source 1..120: mol_type = other DNA

SEQ ID NO: 76601 - DNA, 120 bp, synthetic construct; identical to SEQ ID NO: 46647
  source 1..120: mol_type = other DNA

SEQ ID NO: 76602 - DNA, 120 bp, synthetic construct; identical to SEQ ID NO: 46648
  source 1..120: mol_type = other DNA

SEQ ID NO: 76603 - DNA, 120 bp, synthetic construct; identical to SEQ ID NO: 13123
  source 1..120: mol_type = other DNA

SEQ ID NO: 76604 - DNA, 120 bp, synthetic construct; identical to SEQ ID NO: 46650
  source 1..120: mol_type = other DNA

SEQ ID NO: 76605 - DNA, 120 bp, synthetic construct; identical to SEQ ID NO: 46651
  source 1..120: mol_type = other DNA

SEQ ID NO: 76606 - DNA, 120 bp, synthetic construct; identical to SEQ ID NO: 46652
  source 1..120: mol_type = other DNA

SEQ ID NO: 76607 - DNA, 120 bp, synthetic construct; identical to SEQ ID NO: 46653
  source 1..120: mol_type = other DNA

SEQ ID NO: 76608 - DNA, 120 bp, synthetic construct; identical to SEQ ID NO: 13124
  source 1..120: mol_type = other DNA

SEQ ID NO: 76609 - DNA, 120 bp, synthetic construct; identical to SEQ ID NO: 46655
  source 1..120: mol_type = other DNA

SEQ ID NO: 76610 - DNA, 120 bp, synthetic construct; identical to SEQ ID NO: 13125
  source 1..120: mol_type = other DNA

SEQ ID NO: 76611 - DNA, 120 bp, synthetic construct; identical to SEQ ID NO: 46657
  source 1..120: mol_type = other DNA

SEQ ID NO: 76612 - DNA, 120 bp, synthetic construct; identical to SEQ ID NO: 46658
  source 1..120: mol_type = other DNA

SEQ ID NO: 76613 - DNA, 120 bp, synthetic construct; identical to SEQ ID NO: 46659
  source 1..120: mol_type = other DNA

SEQ ID NO: 76614 - DNA, 120 bp, synthetic construct; identical to SEQ ID NO: 13126
  source 1..120: mol_type = other DNA

SEQ ID NO: 76615 - DNA, 120 bp, synthetic construct; identical to SEQ ID NO: 46661
  source 1..120: mol_type = other DNA

SEQ ID NO: 76616 - DNA, 120 bp, synthetic construct; identical to SEQ ID NO: 46662
  source 1..120: mol_type = other DNA

SEQ ID NO: 76617 - DNA, 120 bp, synthetic construct; identical to SEQ ID NO: 5717
  source 1..120: mol_type = other DNA

SEQ ID NO: 76618 - DNA, 120 bp, synthetic construct; identical to SEQ ID NO: 46664
  source 1..120: mol_type = other DNA

SEQ ID NO: 76619 - DNA, 120 bp, synthetic construct; identical to SEQ ID NO: 46665
  source 1..120: mol_type = other DNA

SEQ ID NO: 76620 - DNA, 120 bp, synthetic construct; identical to SEQ ID NO: 13127
  source 1..120: mol_type = other DNA

SEQ ID NO: 76621 - DNA, 120 bp, synthetic construct; identical to SEQ ID NO: 46667
  source 1..120: mol_type = other DNA

SEQ ID NO: 76622 - DNA, 120 bp, synthetic construct; identical to SEQ ID NO: 46668
  source 1..120: mol_type = other DNA

SEQ ID NO: 76623 - DNA, 120 bp, synthetic construct; identical to SEQ ID NO: 46669
  source 1..120: mol_type = other DNA

SEQ ID NO: 76624 - DNA, 120 bp, synthetic construct; identical to SEQ ID NO: 46670
  source 1..120: mol_type = other DNA

SEQ ID NO: 76625 - DNA, 120 bp, synthetic construct; identical to SEQ ID NO: 13128
  source 1..120: mol_type = other DNA

SEQ ID NO: 76626 - DNA, 120 bp, synthetic construct; identical to SEQ ID NO: 46672
  source 1..120: mol_type = other DNA

SEQ ID NO: 76627 - DNA, 120 bp, synthetic construct; identical to SEQ ID NO: 46673
  source 1..120: mol_type = other DNA

SEQ ID NO: 76628 - DNA, 120 bp, synthetic construct; identical to SEQ ID NO: 46674
  source 1..120: mol_type = other DNA

SEQ ID NO: 76629 - DNA, 120 bp, synthetic construct; identical to SEQ ID NO: 13129
  source 1..120: mol_type = other DNA

SEQ ID NO: 76630 - DNA, 120 bp, synthetic construct; identical to SEQ ID NO: 46676
  source 1..120: mol_type = other DNA

SEQ ID NO: 76631 - DNA, 120 bp, synthetic construct; identical to SEQ ID NO: 46677
  source 1..120: mol_type = other DNA

SEQ ID NO: 76632 - DNA, 120 bp, synthetic construct; identical to SEQ ID NO: 13130
  source 1..120: mol_type = other DNA

SEQ ID NO: 76633 - DNA, 120 bp, synthetic construct; identical to SEQ ID NO: 46679
  source 1..120: mol_type = other DNA

SEQ ID NO: 76634 - DNA, 120 bp, synthetic construct; identical to SEQ ID NO: 46680
  source 1..120: mol_type = other DNA

SEQ ID NO: 76635 - DNA, 120 bp, synthetic construct; identical to SEQ ID NO: 46681
  source 1..120: mol_type = other DNA

SEQ ID NO: 76636 - DNA, 120 bp, synthetic construct; identical to SEQ ID NO: 13131
  source 1..120: mol_type = other DNA

SEQ ID NO: 76637 - DNA, 120 bp, synthetic construct; identical to SEQ ID NO: 46683
  source 1..120: mol_type = other DNA

SEQ ID NO: 76638 - DNA, 120 bp, synthetic construct; identical to SEQ ID NO: 46684
  source 1..120: mol_type = other DNA

SEQ ID NO: 76639 - DNA, 120 bp, synthetic construct; identical to SEQ ID NO: 46685
  source 1..120: mol_type = other DNA

SEQ ID NO: 76640 - DNA, 120 bp, synthetic construct; identical to SEQ ID NO: 46686
  source 1..120: mol_type = other DNA

SEQ ID NO: 76641 - DNA, 120 bp, synthetic construct; identical to SEQ ID NO: 13132
  source 1..120: mol_type = other DNA

SEQ ID NO: 76642 - DNA, 120 bp, synthetic construct; identical to SEQ ID NO: 46688
  source 1..120: mol_type = other DNA

SEQ ID NO: 76643 - DNA, 120 bp, synthetic construct; identical to SEQ ID NO: 46689
  source 1..120: mol_type = other DNA

SEQ ID NO: 76644 - DNA, 120 bp, synthetic construct; identical to SEQ ID NO: 46690
  source 1..120: mol_type = other DNA

SEQ ID NO: 76645 - DNA, 120 bp, synthetic construct; identical to SEQ ID NO: 46691
  source 1..120: mol_type = other DNA

SEQ ID NO: 76646 - DNA, 120 bp, synthetic construct; identical to SEQ ID NO: 13133
  source 1..120: mol_type = other DNA

SEQ ID NO: 76647 - DNA, 120 bp, synthetic construct; identical to SEQ ID NO: 46693
  source 1..120: mol_type = other DNA

SEQ ID NO: 76648 - DNA, 120 bp, synthetic construct; identical to SEQ ID NO: 46694
  source 1..120: mol_type = other DNA

SEQ ID NO: 76649 - DNA, 120 bp, synthetic construct; identical to SEQ ID NO: 46695
  source 1..120: mol_type = other DNA

SEQ ID NO: 76650 - DNA, 120 bp, synthetic construct; identical to SEQ ID NO: 13134
  source 1..120: mol_type = other DNA

SEQ ID NO: 76651 - DNA, 120 bp, synthetic construct; identical to SEQ ID NO: 46697
  source 1..120: mol_type = other DNA

SEQ ID NO: 76652 - DNA, 120 bp, synthetic construct; identical to SEQ ID NO: 46698
  source 1..120: mol_type = other DNA

SEQ ID NO: 76653 - DNA, 120 bp, synthetic construct; identical to SEQ ID NO: 46699
  source 1..120: mol_type = other DNA

SEQ ID NO: 76654 - DNA, 120 bp, synthetic construct; identical to SEQ ID NO: 13135
  source 1..120: mol_type = other DNA

SEQ ID NO: 76655 - DNA, 120 bp, synthetic construct; identical to SEQ ID NO: 46701
  source 1..120: mol_type = other DNA

SEQ ID NO: 76656 - DNA, 120 bp, synthetic construct; identical to SEQ ID NO: 46702
  source 1..120: mol_type = other DNA

SEQ ID NO: 76657 - DNA, 120 bp, synthetic construct; identical to SEQ ID NO: 46703
  source 1..120: mol_type = other DNA

SEQ ID NO: 76658 - DNA, 120 bp, synthetic construct; identical to SEQ ID NO: 46704
  source 1..120: mol_type = other DNA

SEQ ID NO: 76659 - DNA, 120 bp, synthetic construct; identical to SEQ ID NO: 13136
  source 1..120: mol_type = other DNA

SEQ ID NO: 76660 - DNA, 120 bp, synthetic construct; identical to SEQ ID NO: 46706
  source 1..120: mol_type = other DNA

SEQ ID NO: 76661 - DNA, 120 bp, synthetic construct; identical to SEQ ID NO: 46707
  source 1..120: mol_type = other DNA

SEQ ID NO: 76662 - DNA, 120 bp, synthetic construct; identical to SEQ ID NO: 46708
  source 1..120: mol_type = other DNA

SEQ ID NO: 76663 - DNA, 120 bp, synthetic construct; identical to SEQ ID NO: 13137
  source 1..120: mol_type = other DNA

SEQ ID NO: 76664 - DNA, 120 bp, synthetic construct; identical to SEQ ID NO: 46710
  source 1..120: mol_type = other DNA

SEQ ID NO: 76665 - DNA, 120 bp, synthetic construct; identical to SEQ ID NO: 46711
  source 1..120: mol_type = other DNA

SEQ ID NO: 76666 - DNA, 120 bp, synthetic construct; identical to SEQ ID NO: 46712
  source 1..120: mol_type = other DNA

SEQ ID NO: 76667 - DNA, 120 bp, synthetic construct; identical to SEQ ID NO: 13138
  source 1..120: mol_type = other DNA

SEQ ID NO: 76668 - DNA, 120 bp, synthetic construct; identical to SEQ ID NO: 46714
  source 1..120: mol_type = other DNA

SEQ ID NO: 76669 - DNA, 120 bp, synthetic construct; identical to SEQ ID NO: 46715
  source 1..120: mol_type = other DNA

SEQ ID NO: 76670 - DNA, 120 bp, synthetic construct; identical to SEQ ID NO: 46716
  source 1..120: mol_type = other DNA

SEQ ID NO: 76671 - DNA, 120 bp, synthetic construct; identical to SEQ ID NO: 13139
  source 1..120: mol_type = other DNA

SEQ ID NO: 76672 - DNA, 120 bp, synthetic construct; identical to SEQ ID NO: 46718
  source 1..120: mol_type = other DNA

SEQ ID NO: 76673 - DNA, 120 bp, synthetic construct; identical to SEQ ID NO: 46719
  source 1..120: mol_type = other DNA

SEQ ID NO: 76674 - DNA, 120 bp, synthetic construct; identical to SEQ ID NO: 46720
  source 1..120: mol_type = other DNA

SEQ ID NO: 76675 - DNA, 120 bp, synthetic construct; identical to SEQ ID NO: 13140
  source 1..120: mol_type = other DNA

SEQ ID NO: 76676 - DNA, 120 bp, synthetic construct; identical to SEQ ID NO: 46722
  source 1..120: mol_type = other DNA

SEQ ID NO: 76677 - DNA, 120 bp, synthetic construct; identical to SEQ ID NO: 46723
  source 1..120: mol_type = other DNA

SEQ ID NO: 76678 - DNA, 120 bp, synthetic construct; identical to SEQ ID NO: 13141
  source 1..120: mol_type = other DNA

SEQ ID NO: 76679 - DNA, 120 bp, synthetic construct; identical to SEQ ID NO: 46725
  source 1..120: mol_type = other DNA

SEQ ID NO: 76680 - DNA, 120 bp, synthetic construct; identical to SEQ ID NO: 46726
  source 1..120: mol_type = other DNA

SEQ ID NO: 76681 - DNA, 120 bp, synthetic construct; identical to SEQ ID NO: 46727
  source 1..120: mol_type = other DNA

SEQ ID NO: 76682 - DNA, 120 bp, synthetic construct; identical to SEQ ID NO: 46728
  source 1..120: mol_type = other DNA

SEQ ID NO: 76683 - DNA, 120 bp, synthetic construct; identical to SEQ ID NO: 13142
  source 1..120: mol_type = other DNA

SEQ ID NO: 76684 - DNA, 120 bp, synthetic construct; identical to SEQ ID NO: 46730
  source 1..120: mol_type = other DNA

SEQ ID NO: 76685 - DNA, 120 bp, synthetic construct; identical to SEQ ID NO: 46731
  source 1..120: mol_type = other DNA

SEQ ID NO: 76686 - DNA, 120 bp, synthetic construct; identical to SEQ ID NO: 46732
  source 1..120: mol_type = other DNA

SEQ ID NO: 76687 - DNA, 120 bp, synthetic construct; identical to SEQ ID NO: 13143
  source 1..120: mol_type = other DNA

SEQ ID NO: 76688 - DNA, 120 bp, synthetic construct; identical to SEQ ID NO: 46734
  source 1..120: mol_type = other DNA

SEQ ID NO: 76689 - DNA, 120 bp, synthetic construct; identical to SEQ ID NO: 46735
  source 1..120: mol_type = other DNA

SEQ ID NO: 76690 - DNA, 120 bp, synthetic construct; identical to SEQ ID NO: 13144
  source 1..120: mol_type = other DNA

SEQ ID NO: 76691 - DNA, 120 bp, synthetic construct; identical to SEQ ID NO: 46737
  source 1..120: mol_type = other DNA

SEQ ID NO: 76692 - DNA, 120 bp, synthetic construct; identical to SEQ ID NO: 46738
  source 1..120: mol_type = other DNA

SEQ ID NO: 76693 - DNA, 120 bp, synthetic construct; identical to SEQ ID NO: 46739
  source 1..120: mol_type = other DNA

SEQ ID NO: 76694 - DNA, 120 bp, synthetic construct; identical to SEQ ID NO: 13145
  source 1..120: mol_type = other DNA

SEQ ID NO: 76695 - DNA, 120 bp, synthetic construct; identical to SEQ ID NO: 46741
  source 1..120: mol_type = other DNA

SEQ ID NO: 76696 - DNA, 120 bp, synthetic construct; identical to SEQ ID NO: 46742
  source 1..120: mol_type = other DNA

SEQ ID NO: 76697 - DNA, 120 bp, synthetic construct; identical to SEQ ID NO: 46743
  source 1..120: mol_type = other DNA

SEQ ID NO: 76698 - DNA, 120 bp, synthetic construct; identical to SEQ ID NO: 46744
  source 1..120: mol_type = other DNA

SEQ ID NO: 76699 - DNA, 120 bp, synthetic construct; identical to SEQ ID NO: 13146
  source 1..120: mol_type = other DNA

SEQ ID NO: 76700 - DNA, 120 bp, synthetic construct; identical to SEQ ID NO: 46746
  source 1..120: mol_type = other DNA

SEQ ID NO: 76701 - DNA, 120 bp, synthetic construct; identical to SEQ ID NO: 46747
  source 1..120: mol_type = other DNA

SEQ ID NO: 76702 - DNA, 120 bp, synthetic construct; identical to SEQ ID NO: 13147
  source 1..120: mol_type = other DNA

SEQ ID NO: 76703 - DNA, 120 bp, synthetic construct; identical to SEQ ID NO: 46749
  source 1..120: mol_type = other DNA

SEQ ID NO: 76704 - DNA, 120 bp, synthetic construct; identical to SEQ ID NO: 46750
  source 1..120: mol_type = other DNA

SEQ ID NO: 76705 - DNA, 120 bp, synthetic construct; identical to SEQ ID NO: 46751
  source 1..120: mol_type = other DNA

SEQ ID NO: 76706 - DNA, 120 bp, synthetic construct; identical to SEQ ID NO: 13148
  source 1..120: mol_type = other DNA

SEQ ID NO: 76707 - DNA, 120 bp, synthetic construct; identical to SEQ ID NO: 46753
  source 1..120: mol_type = other DNA

SEQ ID NO: 76708 - DNA, 120 bp, synthetic construct; identical to SEQ ID NO: 46754
  source 1..120: mol_type = other DNA

SEQ ID NO: 76709 - DNA, 120 bp, synthetic construct; identical to SEQ ID NO: 46755
  source 1..120: mol_type = other DNA

SEQ ID NO: 76710 - DNA, 120 bp, synthetic construct; identical to SEQ ID NO: 13149
  source 1..120: mol_type = other DNA

SEQ ID NO: 76711 - DNA, 120 bp, synthetic construct; identical to SEQ ID NO: 46757
  source 1..120: mol_type = other DNA

SEQ ID NO: 76712 - DNA, 120 bp, synthetic construct; identical to SEQ ID NO: 46758
  source 1..120: mol_type = other DNA

SEQ ID NO: 76713 - DNA, 120 bp, synthetic construct; identical to SEQ ID NO: 46759
  source 1..120: mol_type = other DNA

SEQ ID NO: 76714 - DNA, 120 bp, synthetic construct; identical to SEQ ID NO: 46760
  source 1..120: mol_type = other DNA

SEQ ID NO: 76715 - DNA, 120 bp, synthetic construct; identical to SEQ ID NO: 13150
  source 1..120: mol_type = other DNA

SEQ ID NO: 76716 - DNA, 120 bp, synthetic construct; identical to SEQ ID NO: 46762
  source 1..120: mol_type = other DNA

SEQ ID NO: 76717 - DNA, 120 bp, synthetic construct; identical to SEQ ID NO: 46763
  source 1..120: mol_type = other DNA

SEQ ID NO: 76718 - DNA, 120 bp, synthetic construct; identical to SEQ ID NO: 46764
  source 1..120: mol_type = other DNA

SEQ ID NO: 76719 - DNA, 120 bp, synthetic construct; identical to SEQ ID NO: 13151
  source 1..120: mol_type = other DNA

SEQ ID NO: 76720 - DNA, 120 bp, synthetic construct; identical to SEQ ID NO: 46766
  source 1..120: mol_type = other DNA

SEQ ID NO: 76721 - DNA, 120 bp, synthetic construct; identical to SEQ ID NO: 46767
  source 1..120: mol_type = other DNA

SEQ ID NO: 76722 - DNA, 120 bp, synthetic construct; identical to SEQ ID NO: 46768
  source 1..120: mol_type = other DNA

SEQ ID NO: 76723 - DNA, 120 bp, synthetic construct; identical to SEQ ID NO: 13152
  source 1..120: mol_type = other DNA

SEQ ID NO: 76724 - DNA, 120 bp, synthetic construct; identical to SEQ ID NO: 46770
  source 1..120: mol_type = other DNA

SEQ ID NO: 76725 - DNA, 120 bp, synthetic construct; identical to SEQ ID NO: 46771
  source 1..120: mol_type = other DNA

SEQ ID NO: 76726 - DNA, 120 bp, synthetic construct; identical to SEQ ID NO: 46772
  source 1..120: mol_type = other DNA

SEQ ID NO: 76727 - DNA, 120 bp, synthetic construct; identical to SEQ ID NO: 13153
  source 1..120: mol_type = other DNA

SEQ ID NO: 76728 - DNA, 120 bp, synthetic construct; identical to SEQ ID NO: 46774
  source 1..120: mol_type = other DNA

SEQ ID NO: 76729 - DNA, 120 bp, synthetic construct; identical to SEQ ID NO: 46775
  source 1..120: mol_type = other DNA

SEQ ID NO: 76730 - DNA, 120 bp, synthetic construct; identical to SEQ ID NO: 46776
  source 1..120: mol_type = other DNA

SEQ ID NO: 76731 - DNA, 120 bp, synthetic construct; identical to SEQ ID NO: 13154
  source 1..120: mol_type = other DNA

SEQ ID NO: 76732 - DNA, 120 bp, synthetic construct; identical to SEQ ID NO: 46778
  source 1..120: mol_type = other DNA

SEQ ID NO: 76733 - DNA, 120 bp, synthetic construct; identical to SEQ ID NO: 46779
  source 1..120: mol_type = other DNA

SEQ ID NO: 76734 - DNA, 120 bp, synthetic construct; identical to SEQ ID NO: 13155
  source 1..120: mol_type = other DNA

SEQ ID NO: 76735 - DNA, 120 bp, synthetic construct; identical to SEQ ID NO: 46781
  source 1..120: mol_type = other DNA

SEQ ID NO: 76736 - DNA, 120 bp, synthetic construct; identical to SEQ ID NO: 46782
  source 1..120: mol_type = other DNA

SEQ ID NO: 76737 - DNA, 120 bp, synthetic construct; identical to SEQ ID NO: 46783
  source 1..120: mol_type = other DNA

SEQ ID NO: 76738 - DNA, 120 bp, synthetic construct; identical to SEQ ID NO: 46784
  source 1..120: mol_type = other DNA

SEQ ID NO: 76739 - DNA, 120 bp, synthetic construct; identical to SEQ ID NO: 13156
  source 1..120: mol_type = other DNA

SEQ ID NO: 76740 - DNA, 120 bp, synthetic construct; identical to SEQ ID NO: 46786
  source 1..120: mol_type = other DNA

SEQ ID NO: 76741 - DNA, 120 bp, synthetic construct; identical to SEQ ID NO: 46787
  source 1..120: mol_type = other DNA

SEQ ID NO: 76742 - DNA, 120 bp, synthetic construct; identical to SEQ ID NO: 13157
  source 1..120: mol_type = other DNA

SEQ ID NO: 76743 - DNA, 120 bp, synthetic construct; identical to SEQ ID NO: 46789
  source 1..120: mol_type = other DNA

SEQ ID NO: 76744 - DNA, 120 bp, synthetic construct; identical to SEQ ID NO: 46790
  source 1..120: mol_type = other DNA

SEQ ID NO: 76745 - DNA, 120 bp, synthetic construct; identical to SEQ ID NO: 46791
  source 1..120: mol_type = other DNA

SEQ ID NO: 76746 - DNA, 120 bp, synthetic construct; identical to SEQ ID NO: 13158
  source 1..120: mol_type = other DNA

SEQ ID NO: 76747 - DNA, 120 bp, synthetic construct; identical to SEQ ID NO: 46793
  source 1..120: mol_type = other DNA

SEQ ID NO: 76748 - DNA, 120 bp, synthetic construct; identical to SEQ ID NO: 46794
  source 1..120: mol_type = other DNA

SEQ ID NO: 76749 - DNA, 120 bp, synthetic construct; identical to SEQ ID NO: 46795
  source 1..120: mol_type = other DNA

SEQ ID NO: 76750 - DNA, 120 bp, synthetic construct; identical to SEQ ID NO: 13159
  source 1..120: mol_type = other DNA

SEQ ID NO: 76751 - DNA, 120 bp, synthetic construct; identical to SEQ ID NO: 13160
  source 1..120: mol_type = other DNA

SEQ ID NO: 76752 - DNA, 120 bp, synthetic construct; identical to SEQ ID NO: 46798
  source 1..120: mol_type = other DNA

SEQ ID NO: 76753 - DNA, 120 bp, synthetic construct; identical to SEQ ID NO: 46799
  source 1..120: mol_type = other DNA

SEQ ID NO: 76754 - DNA, 120 bp, synthetic construct; identical to SEQ ID NO: 46800
  source 1..120: mol_type = other DNA

SEQ ID NO: 76755 - DNA, 120 bp, synthetic construct; identical to SEQ ID NO: 13161
  source 1..120: mol_type = other DNA

SEQ ID NO: 76756 - DNA, 120 bp, synthetic construct; identical to SEQ ID NO: 46802
  source 1..120: mol_type = other DNA

SEQ ID NO: 76757 - DNA, 120 bp, synthetic construct; identical to SEQ ID NO: 46803
  source 1..120: mol_type = other DNA

SEQ ID NO: 76758 - DNA, 120 bp, synthetic construct; identical to SEQ ID NO: 46804
  source 1..120: mol_type = other DNA

SEQ ID NO: 76759 - DNA, 120 bp, synthetic construct; identical to SEQ ID NO: 46805
  source 1..120: mol_type = other DNA

SEQ ID NO: 76760 - DNA, 120 bp, synthetic construct; identical to SEQ ID NO: 13162
  source 1..120: mol_type = other DNA

SEQ ID NO: 76761 - DNA, 120 bp, synthetic construct; identical to SEQ ID NO: 46807
  source 1..120: mol_type = other DNA

SEQ ID NO: 76762 - DNA, 120 bp, synthetic construct; identical to SEQ ID NO: 46808
  source 1..120: mol_type = other DNA

SEQ ID NO: 76763 - DNA, 120 bp, synthetic construct; identical to SEQ ID NO: 46809
  source 1..120: mol_type = other DNA

SEQ ID NO: 76764 - DNA, 120 bp, synthetic construct; identical to SEQ ID NO: 13163
  source 1..120: mol_type = other DNA

SEQ ID NO: 76765 - DNA, 120 bp, synthetic construct; identical to SEQ ID NO: 46811
  source 1..120: mol_type = other DNA

SEQ ID NO: 76766 - DNA, 120 bp, synthetic construct; identical to SEQ ID NO: 46812
  source 1..120: mol_type = other DNA

SEQ ID NO: 76767 - DNA, 120 bp, synthetic construct; identical to SEQ ID NO: 13164
  source 1..120: mol_type = other DNA

SEQ ID NO: 76768 - DNA, 120 bp, synthetic construct; identical to SEQ ID NO: 46814
  source 1..120: mol_type = other DNA

SEQ ID NO: 76769 - DNA, 120 bp, synthetic construct; identical to SEQ ID NO: 46815
  source 1..120: mol_type = other DNA

SEQ ID NO: 76770 - DNA, 120 bp, synthetic construct; identical to SEQ ID NO: 46816
  source 1..120: mol_type = other DNA

SEQ ID NO: 76771 - DNA, 120 bp, synthetic construct; identical to SEQ ID NO: 13165
  source 1..120: mol_type = other DNA

SEQ ID NO: 76772 - DNA, 120 bp, synthetic construct; identical to SEQ ID NO: 46818
  source 1..120: mol_type = other DNA

SEQ ID NO: 76773 - DNA, 120 bp, synthetic construct; identical to SEQ ID NO: 46819
  source 1..120: mol_type = other DNA

SEQ ID NO: 76774 - DNA, 120 bp, synthetic construct; identical to SEQ ID NO: 46820
  source 1..120: mol_type = other DNA

SEQ ID NO: 76775 - DNA, 120 bp, synthetic construct; identical to SEQ ID NO: 13166
  source 1..120: mol_type = other DNA

SEQ ID NO: 76776 - DNA, 120 bp, synthetic construct; identical to SEQ ID NO: 46822
  source 1..120: mol_type = other DNA

SEQ ID NO: 76777 - DNA, 120 bp, synthetic construct; identical to SEQ ID NO: 46823
  source 1..120: mol_type = other DNA

SEQ ID NO: 76778 - DNA, 120 bp, synthetic construct; identical to SEQ ID NO: 46824
  source 1..120: mol_type = other DNA

SEQ ID NO: 76779 - DNA, 120 bp, synthetic construct; identical to SEQ ID NO: 13167
  source 1..120: mol_type = other DNA

SEQ ID NO: 76780 - DNA, 120 bp, synthetic construct; identical to SEQ ID NO: 46826
  source 1..120: mol_type = other DNA

SEQ ID NO: 76781 - DNA, 120 bp, synthetic construct; identical to SEQ ID NO: 46827
  source 1..120: mol_type = other DNA

SEQ ID NO: 76782 - DNA, 120 bp, synthetic construct; identical to SEQ ID NO: 46828
  source 1..120: mol_type = other DNA

SEQ ID NO: 76783 - DNA, 120 bp, synthetic construct; identical to SEQ ID NO: 46829
  source 1..120: mol_type = other DNA

SEQ ID NO: 76784 - DNA, 120 bp, synthetic construct; identical to SEQ ID NO: 13168
  source 1..120: mol_type = other DNA

SEQ ID NO: 76785 - DNA, 120 bp, synthetic construct; identical to SEQ ID NO: 46831
  source 1..120: mol_type = other DNA

SEQ ID NO: 76786 - DNA, 120 bp, synthetic construct; identical to SEQ ID NO: 46832
  source 1..120: mol_type = other DNA

SEQ ID NO: 76787 - DNA, 120 bp, synthetic construct; identical to SEQ ID NO: 46833
  source 1..120: mol_type = other DNA

SEQ ID NO: 76788 - DNA, 120 bp, synthetic construct; identical to SEQ ID NO: 46834
  source 1..120: mol_type = other DNA

SEQ ID NO: 76789 - DNA, 120 bp, synthetic construct; identical to SEQ ID NO: 13169
  source 1..120: mol_type = other DNA

SEQ ID NO: 76790 - DNA, 120 bp, synthetic construct; identical to SEQ ID NO: 46836
  source 1..120: mol_type = other DNA

SEQ ID NO: 76791 - DNA, 120 bp, synthetic construct; identical to SEQ ID NO: 46837
  source 1..120: mol_type = other DNA

SEQ ID NO: 76792 - DNA, 120 bp, synthetic construct; identical to SEQ ID NO: 46838
  source 1..120: mol_type = other DNA

SEQ ID NO: 76793 - DNA, 120 bp, synthetic construct; identical to SEQ ID NO: 13170
  source 1..120: mol_type = other DNA

SEQ ID NO: 76794 - DNA, 120 bp, synthetic construct; identical to SEQ ID NO: 46840
  source 1..120: mol_type = other DNA

SEQ ID NO: 76795 - DNA, 120 bp, synthetic construct; identical to SEQ ID NO: 46841
  source 1..120: mol_type = other DNA

SEQ ID NO: 76796 - DNA, 120 bp, synthetic construct; identical to SEQ ID NO: 13171
  source 1..120: mol_type = other DNA

SEQ ID NO: 76797 - DNA, 120 bp, synthetic construct; identical to SEQ ID NO: 46843
  source 1..120: mol_type = other DNA

SEQ ID NO: 76798 - DNA, 120 bp, synthetic construct; identical to SEQ ID NO: 46844
  source 1..120: mol_type = other DNA

SEQ ID NO: 76799 - DNA, 120 bp, synthetic construct; identical to SEQ ID NO: 46845
  source 1..120: mol_type = other DNA

SEQ ID NO: 76800 - DNA, 120 bp, synthetic construct; identical to SEQ ID NO: 13172
  source 1..120: mol_type = other DNA

SEQ ID NO: 76801 - DNA, 120 bp, synthetic construct; identical to SEQ ID NO: 46847
  source 1..120: mol_type = other DNA

SEQ ID NO: 76802 - DNA, 120 bp, synthetic construct; identical to SEQ ID NO: 46848
  source 1..120: mol_type = other DNA

SEQ ID NO: 76803 - DNA, 120 bp, synthetic construct; identical to SEQ ID NO: 46849
  source 1..120: mol_type = other DNA

SEQ ID NO: 76804 - DNA, 120 bp, synthetic construct; identical to SEQ ID NO: 13173
  source 1..120: mol_type = other DNA

SEQ ID NO: 76805 - DNA, 120 bp, synthetic construct; identical to SEQ ID NO: 46851
  source 1..120: mol_type = other DNA

SEQ ID NO: 76806 - DNA, 120 bp, synthetic construct; identical to SEQ ID NO: 46852
  source 1..120: mol_type = other DNA

SEQ ID NO: 76807 - DNA, 120 bp, synthetic construct; identical to SEQ ID NO: 46853
  source 1..120: mol_type = other DNA

SEQ ID NO: 76808 - DNA, 120 bp, synthetic construct; identical to SEQ ID NO: 46854
  source 1..120: mol_type = other DNA

SEQ ID NO: 76809 - DNA, 120 bp, synthetic construct; identical to SEQ ID NO: 13174
  source 1..120: mol_type = other DNA

SEQ ID NO: 76810 - DNA, 120 bp, synthetic construct; identical to SEQ ID NO: 46856
  source 1..120: mol_type = other DNA

SEQ ID NO: 76811 - DNA, 120 bp, synthetic construct; identical to SEQ ID NO: 46857
  source 1..120: mol_type = other DNA

SEQ ID NO: 76812 - DNA, 120 bp, synthetic construct; identical to SEQ ID NO: 46858
  source 1..120: mol_type = other DNA

SEQ ID NO: 76813 - DNA, 120 bp, synthetic construct; identical to SEQ ID NO: 13175
  source 1..120: mol_type = other DNA

SEQ ID NO: 76814 - DNA, 120 bp, synthetic construct; identical to SEQ ID NO: 46860
  source 1..120: mol_type = other DNA

SEQ ID NO: 76815 - DNA, 120 bp, synthetic construct; identical to SEQ ID NO: 46861
  source 1..120: mol_type = other DNA

SEQ ID NO: 76816 - DNA, 120 bp, synthetic construct; identical to SEQ ID NO: 46862
  source 1..120: mol_type = other DNA

SEQ ID NO: 76817 - DNA, 120 bp, synthetic construct; identical to SEQ ID NO: 13176
  source 1..120: mol_type = other DNA

SEQ ID NO: 76818 - DNA, 120 bp, synthetic construct; identical to SEQ ID NO: 46864
  source 1..120: mol_type = other DNA

SEQ ID NO: 76819 - DNA, 120 bp, synthetic construct; identical to SEQ ID NO: 46865
  source 1..120: mol_type = other DNA

SEQ ID NO: 76820 - DNA, 120 bp, synthetic construct; identical to SEQ ID NO: 46866
  source 1..120: mol_type = other DNA

SEQ ID NO: 76821 - DNA, 120 bp, synthetic construct; identical to SEQ ID NO: 46867
  source 1..120: mol_type = other DNA

SEQ ID NO: 76822 - DNA, 120 bp, synthetic construct; identical to SEQ ID NO: 13177
  source 1..120: mol_type = other DNA

SEQ ID NO: 76823 - DNA, 120 bp, synthetic construct; identical to SEQ ID NO: 46869
  source 1..120: mol_type = other DNA

SEQ ID NO: 76824 - DNA, 120 bp, synthetic construct; identical to SEQ ID NO: 46870
  source 1..120: mol_type = other DNA

SEQ ID NO: 76825 - DNA, 120 bp, synthetic construct; identical to SEQ ID NO: 13178
  source 1..120: mol_type = other DNA

SEQ ID NO: 76826 - DNA, 120 bp, synthetic construct; identical to SEQ ID NO: 46872
  source 1..120: mol_type = other DNA

SEQ ID NO: 76827 - DNA, 120 bp, synthetic construct; identical to SEQ ID NO: 46873
  source 1..120: mol_type = other DNA

SEQ ID NO: 76828 - DNA, 120 bp, synthetic construct; identical to SEQ ID NO: 46874
  source 1..120: mol_type = other DNA

SEQ ID NO: 76829 - DNA, 120 bp, synthetic construct; identical to SEQ ID NO: 13179
  source 1..120: mol_type = other DNA

SEQ ID NO: 76830 - DNA, 120 bp, synthetic construct; identical to SEQ ID NO: 46876
  source 1..120: mol_type = other DNA

SEQ ID NO: 76831 - DNA, 120 bp, synthetic construct; identical to SEQ ID NO: 46877
  source 1..120: mol_type = other DNA

SEQ ID NO: 76832 - DNA, 120 bp, synthetic construct; identical to SEQ ID NO: 46878
  source 1..120: mol_type = other DNA

SEQ ID NO: 76833 - DNA, 120 bp, synthetic construct; identical to SEQ ID NO: 13180
  source 1..120: mol_type = other DNA

SEQ ID NO: 76834 - DNA, 120 bp, synthetic construct; identical to SEQ ID NO: 46880
  source 1..120: mol_type = other DNA

SEQ ID NO: 76835 - DNA, 120 bp, synthetic construct; identical to SEQ ID NO: 46881
  source 1..120: mol_type = other DNA

SEQ ID NO: 76836 - DNA, 120 bp, synthetic construct; identical to SEQ ID NO: 46882
  source 1..120: mol_type = other DNA

SEQ ID NO: 76837 - DNA, 120 bp, synthetic construct; identical to SEQ ID NO: 46883
  source 1..120: mol_type = other DNA

SEQ ID NO: 76838 - DNA, 120 bp, synthetic construct; identical to SEQ ID NO: 13181
  source 1..120: mol_type = other DNA

SEQ ID NO: 76839 - DNA, 120 bp, synthetic construct; identical to SEQ ID NO: 46885
  source 1..120: mol_type = other DNA

SEQ ID NO: 76840 - DNA, 120 bp, synthetic construct; identical to SEQ ID NO: 46886
  source 1..120: mol_type = other DNA

SEQ ID NO: 76841 - DNA, 120 bp, synthetic construct; identical to SEQ ID NO: 13182
  source 1..120: mol_type = other DNA

SEQ ID NO: 76842 - DNA, 120 bp, synthetic construct; identical to SEQ ID NO: 46888
  source 1..120: mol_type = other DNA

SEQ ID NO: 76843 - DNA, 120 bp, synthetic construct; identical to SEQ ID NO: 46889
  source 1..120: mol_type = other DNA

SEQ ID NO: 76844 - DNA, 120 bp, synthetic construct; identical to SEQ ID NO: 46890
  source 1..120: mol_type = other DNA

SEQ ID NO: 76845 - DNA, 120 bp, synthetic construct; identical to SEQ ID NO: 13183
  source 1..120: mol_type = other DNA

SEQ ID NO: 76846 - DNA, 120 bp, synthetic construct; identical to SEQ ID NO: 46892
  source 1..120: mol_type = other DNA

SEQ ID NO: 76847 - DNA, 120 bp, synthetic construct; identical to SEQ ID NO: 46893
  source 1..120: mol_type = other DNA

SEQ ID NO: 76848 - DNA, 120 bp, synthetic construct; identical to SEQ ID NO: 46894
  source 1..120: mol_type = other DNA

SEQ ID NO: 76849 - DNA, 120 bp, synthetic construct; identical to SEQ ID NO: 46895
  source 1..120: mol_type = other DNA

SEQ ID NO: 76850 - DNA, 120 bp, synthetic construct; identical to SEQ ID NO: 13184
  source 1..120: mol_type = other DNA

SEQ ID NO: 76851 - DNA, 120 bp, synthetic construct; identical to SEQ ID NO: 46897
  source 1..120: mol_type = other DNA

SEQ ID NO: 76852 - DNA, 120 bp, synthetic construct; identical to SEQ ID NO: 46898
  source 1..120: mol_type = other DNA

SEQ ID NO: 76853 - DNA, 120 bp, synthetic construct; identical to SEQ ID NO: 13185
  source 1..120: mol_type = other DNA

SEQ ID NO: 76854 - DNA, 120 bp, synthetic construct; identical to SEQ ID NO: 46900
  source 1..120: mol_type = other DNA

SEQ ID NO: 76855 - DNA, 120 bp, synthetic construct; identical to SEQ ID NO: 46901
  source 1..120: mol_type = other DNA

SEQ ID NO: 76856 - DNA, 120 bp, synthetic construct; identical to SEQ ID NO: 46902
  source 1..120: mol_type = other DNA

SEQ ID NO: 76857 - DNA, 120 bp, synthetic construct; identical to SEQ ID NO: 13186
  source 1..120: mol_type = other DNA

SEQ ID NO: 76858 - DNA, 120 bp, synthetic construct; identical to SEQ ID NO: 46904
  source 1..120: mol_type = other DNA

SEQ ID NO: 76859 - DNA, 120 bp, synthetic construct; identical to SEQ ID NO: 46905
  source 1..120: mol_type = other DNA

SEQ ID NO: 76860 - DNA, 120 bp, synthetic construct; identical to SEQ ID NO: 46906
  source 1..120: mol_type = other DNA

SEQ ID NO: 76861 - DNA, 120 bp, synthetic construct; identical to SEQ ID NO: 13187
  source 1..120: mol_type = other DNA

SEQ ID NO: 76862 - DNA, 120 bp, synthetic construct; identical to SEQ ID NO: 46908
  source 1..120: mol_type = other DNA

SEQ ID NO: 76863 - DNA, 120 bp, synthetic construct; identical to SEQ ID NO: 46909
  source 1..120: mol_type = other DNA

SEQ ID NO: 76864 - DNA, 120 bp, synthetic construct; identical to SEQ ID NO: 46910
  source 1..120: mol_type = other DNA

SEQ ID NO: 76865 - DNA, 120 bp, synthetic construct; identical to SEQ ID NO: 46911
  source 1..120: mol_type = other DNA

SEQ ID NO: 76866 - DNA, 120 bp, synthetic construct; identical to SEQ ID NO: 13188
  source 1..120: mol_type = other DNA

SEQ ID NO: 76867 - DNA, 120 bp, synthetic construct; identical to SEQ ID NO: 46913
  source 1..120: mol_type = other DNA

SEQ ID NO: 76868 - DNA, 120 bp, synthetic construct; identical to SEQ ID NO: 46914
  source 1..120: mol_type = other DNA

SEQ ID NO: 76869 - DNA, 120 bp, synthetic construct; identical to SEQ ID NO: 46915
  source 1..120: mol_type = other DNA

SEQ ID NO: 76870 - DNA, 120 bp, synthetic construct; identical to SEQ ID NO: 13189
  source 1..120: mol_type = other DNA

SEQ ID NO: 76871 - DNA, 120 bp, synthetic construct; identical to SEQ ID NO: 46917
  source 1..120: mol_type = other DNA

SEQ ID NO: 76872 - DNA, 120 bp, synthetic construct; identical to SEQ ID NO: 46918
  source 1..120: mol_type = other DNA

SEQ ID NO: 76873 - DNA, 120 bp, synthetic construct; identical to SEQ ID NO: 13190
  source 1..120: mol_type = other DNA

SEQ ID NO: 76874 - DNA, 120 bp, synthetic construct; identical to SEQ ID NO: 46920
  source 1..120: mol_type = other DNA

SEQ ID NO: 76875 - DNA, 120 bp, synthetic construct; identical to SEQ ID NO: 46921
  source 1..120: mol_type = other DNA

SEQ ID NO: 76876 - DNA, 120 bp, synthetic construct; identical to SEQ ID NO: 46922
  source 1..120: mol_type = other DNA

SEQ ID NO: 76877 - DNA, 120 bp, synthetic construct; identical to SEQ ID NO: 46923
  source 1..120: mol_type = other DNA

SEQ ID NO: 76878 - DNA, 120 bp, synthetic construct; identical to SEQ ID NO: 13191
  source 1..120: mol_type = other DNA

SEQ ID NO: 76879 - DNA, 120 bp, synthetic construct; identical to SEQ ID NO: 46925
  source 1..120: mol_type = other DNA

SEQ ID NO: 76880 - DNA, 120 bp, synthetic construct; identical to SEQ ID NO: 46926
  source 1..120: mol_type = other DNA

SEQ ID NO: 76881 - DNA, 120 bp, synthetic construct; identical to SEQ ID NO: 46927
  source 1..120: mol_type = other DNA

SEQ ID NO: 76882 - DNA, 120 bp, synthetic construct; identical to SEQ ID NO: 13192
  source 1..120: mol_type = other DNA

SEQ ID NO: 76883 - DNA, 120 bp, synthetic construct; identical to SEQ ID NO: 46929
  source 1..120: mol_type = other DNA

SEQ ID NO: 76884 - DNA, 120 bp, synthetic construct; identical to SEQ ID NO: 46930
  source 1..120: mol_type = other DNA

SEQ ID NO: 76885 - DNA, 120 bp, synthetic construct; identical to SEQ ID NO: 46931
  source 1..120: mol_type = other DNA

SEQ ID NO: 76886 - DNA, 120 bp, synthetic construct; identical to SEQ ID NO: 13193
  source 1..120: mol_type = other DNA

SEQ ID NO: 76887 - DNA, 120 bp, synthetic construct; identical to SEQ ID NO: 46933
  source 1..120: mol_type = other DNA

SEQ ID NO: 76888 - DNA, 120 bp, synthetic construct; identical to SEQ ID NO: 46934
  source 1..120: mol_type = other DNA

SEQ ID NO: 76889 - DNA, 120 bp, synthetic construct; identical to SEQ ID NO: 13194
  source 1..120: mol_type = other DNA

SEQ ID NO: 76890 - DNA, 120 bp, synthetic construct; identical to SEQ ID NO: 46936
  source 1..120: mol_type = other DNA

SEQ ID NO: 76891 - DNA, 120 bp, synthetic construct; identical to SEQ ID NO: 46937
  source 1..120: mol_type = other DNA

SEQ ID NO: 76892 - DNA, 120 bp, synthetic construct; identical to SEQ ID NO: 46938
  source 1..120: mol_type = other DNA

SEQ ID NO: 76893 - DNA, 120 bp, synthetic construct; identical to SEQ ID NO: 13195
  source 1..120: mol_type = other DNA

SEQ ID NO: 76894 - DNA, 120 bp, synthetic construct; identical to SEQ ID NO: 46940
  source 1..120: mol_type = other DNA

SEQ ID NO: 76895 - DNA, 120 bp, synthetic construct; identical to SEQ ID NO: 46941
  source 1..120: mol_type = other DNA

SEQ ID NO: 76896 - DNA, 120 bp, synthetic construct; identical to SEQ ID NO: 46942
  source 1..120: mol_type = other DNA

SEQ ID NO: 76897 - DNA, 120 bp, synthetic construct; identical to SEQ ID NO: 13196
  source 1..120: mol_type = other DNA

SEQ ID NO: 76898 - DNA, 120 bp, synthetic construct; identical to SEQ ID NO: 46944
  source 1..120: mol_type = other DNA

SEQ ID NO: 76899 - DNA, 120 bp, synthetic construct; identical to SEQ ID NO: 46945
  source 1..120: mol_type = other DNA

SEQ ID NO: 76900 - DNA, 120 bp, synthetic construct; identical to SEQ ID NO: 46946
  source 1..120: mol_type = other DNA

SEQ ID NO: 76901 - DNA, 120 bp, synthetic construct; identical to SEQ ID NO: 13197
  source 1..120: mol_type = other DNA

SEQ ID NO: 76902 - DNA, 120 bp, synthetic construct; identical to SEQ ID NO: 46948
  source 1..120: mol_type = other DNA

SEQ ID NO: 76903 - DNA, 120 bp, synthetic construct; identical to SEQ ID NO: 46949
  source 1..120: mol_type = other DNA

SEQ ID NO: 76904 - DNA, 120 bp, synthetic construct; identical to SEQ ID NO: 46950
  source 1..120: mol_type = other DNA

SEQ ID NO: 76905 - DNA, 120 bp, synthetic construct; identical to SEQ ID NO: 13198
  source 1..120: mol_type = other DNA

SEQ ID NO: 76906 - DNA, 120 bp, synthetic construct; identical to SEQ ID NO: 46952
  source 1..120: mol_type = other DNA

SEQ ID NO: 76907 - DNA, 120 bp, synthetic construct; identical to SEQ ID NO: 46953
  source 1..120: mol_type = other DNA

SEQ ID NO: 76908 - DNA, 120 bp, synthetic construct; identical to SEQ ID NO: 46954
  source 1..120: mol_type = other DNA

SEQ ID NO: 76909 - DNA, 120 bp, synthetic construct; identical to SEQ ID NO: 46955
  source 1..120: mol_type = other DNA

SEQ ID NO: 76910 - DNA, 120 bp, synthetic construct; identical to SEQ ID NO: 13199
  source 1..120: mol_type = other DNA

SEQ ID NO: 76911 - DNA, 120 bp, synthetic construct; identical to SEQ ID NO: 46957
  source 1..120: mol_type = other DNA

SEQ ID NO: 76912 - DNA, 120 bp, synthetic construct; identical to SEQ ID NO: 46958
  source 1..120: mol_type = other DNA

SEQ ID NO: 76913 - DNA, 120 bp, synthetic construct; identical to SEQ ID NO: 13200
  source 1..120: mol_type = other DNA

SEQ ID NO: 76914 - DNA, 120 bp, synthetic construct; identical to SEQ ID NO: 46960
  source 1..120: mol_type = other DNA

SEQ ID NO: 76915 - DNA, 120 bp, synthetic construct; identical to SEQ ID NO: 46961
  source 1..120: mol_type = other DNA

SEQ ID NO: 76916 - DNA, 120 bp, synthetic construct; identical to SEQ ID NO: 46962
  source 1..120: mol_type = other DNA

SEQ ID NO: 76917 - DNA, 120 bp, synthetic construct; identical to SEQ ID NO: 13201
  source 1..120: mol_type = other DNA

SEQ ID NO: 76918 - DNA, 120 bp, synthetic construct; identical to SEQ ID NO: 46964
  source 1..120: mol_type = other DNA

SEQ ID NO: 76919 - DNA, 120 bp, synthetic construct; identical to SEQ ID NO: 46965
  source 1..120: mol_type = other DNA

SEQ ID NO: 76920 - DNA, 120 bp, synthetic construct; identical to SEQ ID NO: 46966
  source 1..120: mol_type = other DNA

SEQ ID NO: 76921 - DNA, 120 bp, synthetic construct; identical to SEQ ID NO: 46967
  source 1..120: mol_type = other DNA

SEQ ID NO: 76922 - DNA, 120 bp, synthetic construct; identical to SEQ ID NO: 13202
  source 1..120: mol_type = other DNA

SEQ ID NO: 76923 - DNA, 120 bp, synthetic construct; identical to SEQ ID NO: 46969
  source 1..120: mol_type = other DNA

SEQ ID NO: 76924 - DNA, 120 bp, synthetic construct; identical to SEQ ID NO: 46970
  source 1..120: mol_type = other DNA

SEQ ID NO: 76925 - DNA, 120 bp, synthetic construct; identical to SEQ ID NO: 46971
  source 1..120: mol_type = other DNA

SEQ ID NO: 76926 - DNA, 120 bp, synthetic construct; identical to SEQ ID NO: 13203
  source 1..120: mol_type = other DNA

SEQ ID NO: 76927 - DNA, 120 bp, synthetic construct; identical to SEQ ID NO: 46973
  source 1..120: mol_type = other DNA

SEQ ID NO: 76928 - DNA, 120 bp, synthetic construct; identical to SEQ ID NO: 46974
  source 1..120: mol_type = other DNA

SEQ ID NO: 76929 - DNA, 120 bp, synthetic construct; identical to SEQ ID NO: 46975
  source 1..120: mol_type = other DNA

SEQ ID NO: 76930 - DNA, 120 bp, synthetic construct; identical to SEQ ID NO: 13204
  source 1..120: mol_type = other DNA

SEQ ID NO: 76931 - DNA, 120 bp, synthetic construct; identical to SEQ ID NO: 46977
  source 1..120: mol_type = other DNA

SEQ ID NO: 76932 - DNA, 120 bp, synthetic construct; identical to SEQ ID NO: 46978
  source 1..120: mol_type = other DNA

SEQ ID NO: 76933 - DNA, 120 bp, synthetic construct; identical to SEQ ID NO: 13205
  source 1..120: mol_type = other DNA

SEQ ID NO: 76934 - DNA, 120 bp, synthetic construct; identical to SEQ ID NO: 46980
  source 1..120: mol_type = other DNA

SEQ ID NO: 76935 - DNA, 120 bp, synthetic construct; identical to SEQ ID NO: 46981
  source 1..120: mol_type = other DNA

SEQ ID NO: 76936 - DNA, 120 bp, synthetic construct; identical to SEQ ID NO: 46982
  source 1..120: mol_type = other DNA

SEQ ID NO: 76937 - DNA, 120 bp, synthetic construct; identical to SEQ ID NO: 13206
  source 1..120: mol_type = other DNA

SEQ ID NO: 76938 - DNA, 120 bp, synthetic construct; identical to SEQ ID NO: 46984
  source 1..120: mol_type = other DNA

SEQ ID NO: 76939 - DNA, 120 bp, synthetic construct; identical to SEQ ID NO: 46985
  source 1..120: mol_type = other DNA

SEQ ID NO: 76940 - DNA, 120 bp, synthetic construct; identical to SEQ ID NO: 46986
  source 1..120: mol_type = other DNA

SEQ ID NO: 76941 - DNA, 120 bp, synthetic construct; identical to SEQ ID NO: 46987
  source 1..120: mol_type = other DNA

SEQ ID NO: 76942 - DNA, 120 bp, synthetic construct; identical to SEQ ID NO: 13207
  source 1..120: mol_type = other DNA

SEQ ID NO: 76943 - DNA, 120 bp, synthetic construct; identical to SEQ ID NO: 46989
  source 1..120: mol_type = other DNA

SEQ ID NO: 76944 - DNA, 120 bp, synthetic construct; identical to SEQ ID NO: 46990
  source 1..120: mol_type = other DNA

SEQ ID NO: 76945 - DNA, 120 bp, synthetic construct; identical to SEQ ID NO: 46991
  source 1..120: mol_type = other DNA

SEQ ID NO: 76946 - DNA, 120 bp, synthetic construct; identical to SEQ ID NO: 13208
  source 1..120: mol_type = other DNA

SEQ ID NO: 76947 - DNA, 120 bp, synthetic construct; identical to SEQ ID NO: 46993
  source 1..120: mol_type = other DNA

SEQ ID NO: 76948 - DNA, 120 bp, synthetic construct; identical to SEQ ID NO: 46994
  source 1..120: mol_type = other DNA

SEQ ID NO: 76949 - DNA, 120 bp, synthetic construct; identical to SEQ ID NO: 13209
  source 1..120: mol_type = other DNA

SEQ ID NO: 76950 - DNA, 120 bp, synthetic construct; identical to SEQ ID NO: 46996
  source 1..120: mol_type = other DNA

SEQ ID NO: 76951 - DNA, 120 bp, synthetic construct; identical to SEQ ID NO: 46997
  source 1..120: mol_type = other DNA

SEQ ID NO: 76952 - DNA, 120 bp, synthetic construct; identical to SEQ ID NO: 46998
  source 1..120: mol_type = other DNA

SEQ ID NO: 76953 - DNA, 120 bp, synthetic construct; identical to SEQ ID NO: 13210
  source 1..120: mol_type = other DNA

SEQ ID NO: 76954 - DNA, 120 bp, synthetic construct; identical to SEQ ID NO: 47000
  source 1..120: mol_type = other DNA

SEQ ID NO: 76955 - DNA, 120 bp, synthetic construct; identical to SEQ ID NO: 47001
  source 1..120: mol_type = other DNA

SEQ ID NO: 76956 - DNA, 120 bp, synthetic construct; identical to SEQ ID NO: 47002
  source 1..120: mol_type = other DNA

SEQ ID NO: 76957 - DNA, 120 bp, synthetic construct; identical to SEQ ID NO: 47003
  source 1..120: mol_type = other DNA

SEQ ID NO: 76958 - DNA, 120 bp, synthetic construct; identical to SEQ ID NO: 13211
  source 1..120: mol_type = other DNA

SEQ ID NO: 76959 - DNA, 120 bp, synthetic construct; identical to SEQ ID NO: 47005
  source 1..120: mol_type = other DNA

SEQ ID NO: 76960 - DNA, 120 bp, synthetic construct; identical to SEQ ID NO: 47006
  source 1..120: mol_type = other DNA

SEQ ID NO: 76961 - DNA, 120 bp, synthetic construct; identical to SEQ ID NO: 13212
  source 1..120: mol_type = other DNA

SEQ ID NO: 76962 - DNA, 120 bp, synthetic construct; identical to SEQ ID NO: 47008
  source 1..120: mol_type = other DNA

SEQ ID NO: 76963 - DNA, 120 bp, synthetic construct; identical to SEQ ID NO: 47009
  source 1..120: mol_type = other DNA

SEQ ID NO: 76964 - DNA, 120 bp, synthetic construct; identical to SEQ ID NO: 47010
  source 1..120: mol_type = other DNA

SEQ ID NO: 76965 - DNA, 120 bp, synthetic construct; identical to SEQ ID NO: 13213
  source 1..120: mol_type = other DNA

SEQ ID NO: 76966 - DNA, 120 bp, synthetic construct; identical to SEQ ID NO: 47012
  source 1..120: mol_type = other DNA

SEQ ID NO: 76967 - DNA, 120 bp, synthetic construct; identical to SEQ ID NO: 47013
  source 1..120: mol_type = other DNA

SEQ ID NO: 76968 - DNA, 120 bp, synthetic construct; identical to SEQ ID NO: 47014
  source 1..120: mol_type = other DNA

SEQ ID NO: 76969 - DNA, 120 bp, synthetic construct; identical to SEQ ID NO: 13214
  source 1..120: mol_type = other DNA

SEQ ID NO: 76970 - DNA, 120 bp, synthetic construct; identical to SEQ ID NO: 47016
  source 1..120: mol_type = other DNA

SEQ ID NO: 76971 - DNA, 120 bp, synthetic construct; identical to SEQ ID NO: 47017
  source 1..120: mol_type = other DNA

SEQ ID NO: 76972 - DNA, 120 bp, synthetic construct; identical to SEQ ID NO: 47018
  source 1..120: mol_type = other DNA

SEQ ID NO: 76973 - DNA, 120 bp, synthetic construct; identical to SEQ ID NO: 13215
  source 1..120: mol_type = other DNA

SEQ ID NO: 76974 - DNA, 120 bp, synthetic construct; identical to SEQ ID NO: 47020
  source 1..120: mol_type = other DNA

SEQ ID NO: 76975 - DNA, 120 bp, synthetic construct; identical to SEQ ID NO: 47021
  source 1..120: mol_type = other DNA

SEQ ID NO: 76976 - DNA, 120 bp, synthetic construct; identical to SEQ ID NO: 13216
  source 1..120: mol_type = other DNA

SEQ ID NO: 76977 - DNA, 120 bp, synthetic construct; identical to SEQ ID NO: 47023
  source 1..120: mol_type = other DNA

SEQ ID NO: 76978 - DNA, 120 bp, synthetic construct; identical to SEQ ID NO: 47024
  source 1..120: mol_type = other DNA

SEQ ID NO: 76979 - DNA, 120 bp, synthetic construct; identical to SEQ ID NO: 13217
  source 1..120: mol_type = other DNA

SEQ ID NO: 76980 - DNA, 120 bp, synthetic construct; identical to SEQ ID NO: 47026
  source 1..120: mol_type = other DNA

SEQ ID NO: 76981 - DNA, 120 bp, synthetic construct; identical to SEQ ID NO: 47027
  source 1..120: mol_type = other DNA

SEQ ID NO: 76982 - DNA, 120 bp, synthetic construct; identical to SEQ ID NO: 47028
  source 1..120: mol_type = other DNA

SEQ ID NO: 76983 - DNA, 120 bp, synthetic construct; identical to SEQ ID NO: 47029
  source 1..120: mol_type = other DNA

SEQ ID NO: 76984 - DNA, 120 bp, synthetic construct; identical to SEQ ID NO: 13218
  source 1..120: mol_type = other DNA

SEQ ID NO: 76985 - DNA, 120 bp, synthetic construct; identical to SEQ ID NO: 47031
  source 1..120: mol_type = other DNA

SEQ ID NO: 76986 - DNA, 120 bp, synthetic construct; identical to SEQ ID NO: 47032
  source 1..120: mol_type = other DNA

SEQ ID NO: 76987 - DNA, 120 bp, synthetic construct; identical to SEQ ID NO: 47033
  source 1..120: mol_type = other DNA

SEQ ID NO: 76988 - DNA, 120 bp, synthetic construct; identical to SEQ ID NO: 13219
  source 1..120: mol_type = other DNA

SEQ ID NO: 76989 - DNA, 120 bp, synthetic construct; identical to SEQ ID NO: 47035
  source 1..120: mol_type = other DNA

SEQ ID NO: 76990 - DNA, 120 bp, synthetic construct; identical to SEQ ID NO: 47036
  source 1..120: mol_type = other DNA

SEQ ID NO: 76991 - DNA, 120 bp, synthetic construct; identical to SEQ ID NO: 47037
  source 1..120: mol_type = other DNA

SEQ ID NO: 76992 - DNA, 120 bp, synthetic construct; identical to SEQ ID NO: 13220
  source 1..120: mol_type = other DNA

SEQ ID NO: 76993 - DNA, 120 bp, synthetic construct; identical to SEQ ID NO: 47039
  source 1..120: mol_type = other DNA

SEQ ID NO: 76994 - DNA, 120 bp, synthetic construct; identical to SEQ ID NO: 47040
  source 1..120: mol_type = other DNA

SEQ ID NO: 76995 - DNA, 120 bp, synthetic construct; identical to SEQ ID NO: 47041
  source 1..120: mol_type = other DNA

SEQ ID NO: 76996 - DNA, 120 bp, synthetic construct; identical to SEQ ID NO: 13221
  source 1..120: mol_type = other DNA

SEQ ID NO: 76997 - DNA, 120 bp, synthetic construct; identical to SEQ ID NO: 47043
  source 1..120: mol_type = other DNA

SEQ ID NO: 76998 - DNA, 120 bp, synthetic construct; identical to SEQ ID NO: 47044
  source 1..120: mol_type = other DNA

SEQ ID NO: 76999 - DNA, 120 bp, synthetic construct; identical to SEQ ID NO: 47045
  source 1..120: mol_type = other DNA

SEQ ID NO: 77000 - DNA, 120 bp, synthetic construct; identical to SEQ ID NO: 13222
  source 1..120: mol_type = other DNA

SEQ ID NO: 77001 - DNA, 120 bp, synthetic construct; identical to SEQ ID NO: 47047
  source 1..120: mol_type = other DNA

SEQ ID NO: 77002 - DNA, 120 bp, synthetic construct; identical to SEQ ID NO: 47048
  source 1..120: mol_type = other DNA

SEQ ID NO: 77003 - DNA, 120 bp, synthetic construct; identical to SEQ ID NO: 13223
  source 1..120: mol_type = other DNA

SEQ ID NO: 77004 - DNA, 120 bp, synthetic construct; identical to SEQ ID NO: 47050
  source 1..120: mol_type = other DNA

SEQ ID NO: 77005 - DNA, 120 bp, synthetic construct; identical to SEQ ID NO: 47051
  source 1..120: mol_type = other DNA

SEQ ID NO: 77006 - DNA, 120 bp, synthetic construct; identical to SEQ ID NO: 47052
  source 1..120: mol_type = other DNA

SEQ ID NO: 77007 - DNA, 120 bp, synthetic construct; identical to SEQ ID NO: 47053
  source 1..120: mol_type = other DNA

SEQ ID NO: 77008 - DNA, 120 bp, synthetic construct; identical to SEQ ID NO: 13224
  source 1..120: mol_type = other DNA

SEQ ID NO: 77009 - DNA, 120 bp, synthetic construct; identical to SEQ ID NO: 47055
  source 1..120: mol_type = other DNA

SEQ ID NO: 77010 - DNA, 120 bp, synthetic construct; identical to SEQ ID NO: 47056
  source 1..120: mol_type = other DNA

SEQ ID NO: 77011 - DNA, 120 bp, synthetic construct; identical to SEQ ID NO: 13225
  source 1..120: mol_type = other DNA

SEQ ID NO: 77012 - DNA, 120 bp, synthetic construct; identical to SEQ ID NO: 47058
  source 1..120: mol_type = other DNA

SEQ ID NO: 77013 - DNA, 120 bp, synthetic construct; identical to SEQ ID NO: 47059
  source 1..120: mol_type = other DNA

SEQ ID NO: 77014 - DNA, 120 bp, synthetic construct; identical to SEQ ID NO: 13226
  source 1..120: mol_type = other DNA

SEQ ID NO: 77015 - DNA, 120 bp, synthetic construct; identical to SEQ ID NO: 47061
  source 1..120: mol_type = other DNA

SEQ ID NO: 77016 - DNA, 120 bp, synthetic construct; identical to SEQ ID NO: 47062
  source 1..120: mol_type = other DNA

SEQ ID NO: 77017 - DNA, 120 bp, synthetic construct; identical to SEQ ID NO: 13227
  source 1..120: mol_type = other DNA

SEQ ID NO: 77018 - DNA, 120 bp, synthetic construct; identical to SEQ ID NO: 47064
  source 1..120: mol_type = other DNA

SEQ ID NO: 77019 - DNA, 120 bp, synthetic construct; identical to SEQ ID NO: 47065
  source 1..120: mol_type = other DNA

SEQ ID NO: 77020 - DNA, 120 bp, synthetic construct; identical to SEQ ID NO: 13228
  source 1..120: mol_type = other DNA

SEQ ID NO: 77021 - DNA, 120 bp, synthetic construct; identical to SEQ ID NO: 47067
  source 1..120: mol_type = other DNA

SEQ ID NO: 77022 - DNA, 120 bp, synthetic construct; identical to SEQ ID NO: 47068
  source 1..120: mol_type = other DNA

SEQ ID NO: 77023 - DNA, 120 bp, synthetic construct; identical to SEQ ID NO: 47069
  source 1..120: mol_type = other DNA

SEQ ID NO: 77024 - DNA, 120 bp, synthetic construct; identical to SEQ ID NO: 47070
  source 1..120: mol_type = other DNA

SEQ ID NO: 77025 - DNA, 120 bp, synthetic construct; identical to SEQ ID NO: 13229
  source 1..120: mol_type = other DNA

SEQ ID NO: 77026 - DNA, 120 bp, synthetic construct; identical to SEQ ID NO: 47072
  source 1..120: mol_type = other DNA

SEQ ID NO: 77027 - DNA, 120 bp, synthetic construct; identical to SEQ ID NO: 47073
  source 1..120: mol_type = other DNA

SEQ ID NO: 77028 - DNA, 120 bp, synthetic construct; identical to SEQ ID NO: 47074
  source 1..120: mol_type = other DNA

SEQ ID NO: 77029 - DNA, 120 bp, synthetic construct; identical to SEQ ID NO: 13230
  source 1..120: mol_type = other DNA

SEQ ID NO: 77030 - DNA, 120 bp, synthetic construct; identical to SEQ ID NO: 47076
  source 1..120: mol_type = other DNA

SEQ ID NO: 77031 - DNA, 120 bp, synthetic construct; identical to SEQ ID NO: 47077
  source 1..120: mol_type = other DNA

SEQ ID NO: 77032 - DNA, 120 bp, synthetic construct; identical to SEQ ID NO: 47078
  source 1..120: mol_type = other DNA

SEQ ID NO: 77033 - DNA, 120 bp, synthetic construct; identical to SEQ ID NO: 13231
  source 1..120: mol_type = other DNA

SEQ ID NO: 77034 - DNA, 120 bp, synthetic construct; identical to SEQ ID NO: 47080
  source 1..120: mol_type = other DNA

SEQ ID NO: 77035 - DNA, 120 bp, synthetic construct; identical to SEQ ID NO: 47081
  source 1..120: mol_type = other DNA

SEQ ID NO: 77036 - DNA, 120 bp, synthetic construct; identical to SEQ ID NO: 13232
  source 1..120: mol_type = other DNA

SEQ ID NO: 77037 - DNA, 120 bp, synthetic construct; identical to SEQ ID NO: 47083
  source 1..120: mol_type = other DNA

SEQ ID NO: 77038 - DNA, 120 bp, synthetic construct; identical to SEQ ID NO: 47084
  source 1..120: mol_type = other DNA

SEQ ID NO: 77039 - DNA, 120 bp, synthetic construct; identical to SEQ ID NO: 47085
  source 1..120: mol_type = other DNA

SEQ ID NO: 77040 - DNA, 120 bp, synthetic construct; identical to SEQ ID NO: 13233
  source 1..120: mol_type = other DNA

SEQ ID NO: 77041 - DNA, 120 bp, synthetic construct; identical to SEQ ID NO: 47087
  source 1..120: mol_type = other DNA

SEQ ID NO: 77042 - DNA, 120 bp, synthetic construct; identical to SEQ ID NO: 47088
  source 1..120: mol_type = other DNA

SEQ ID NO: 77043 - DNA, 120 bp, synthetic construct; identical to SEQ ID NO: 47089
  source 1..120: mol_type = other DNA

SEQ ID NO: 77044 - DNA, 120 bp, synthetic construct; identical to SEQ ID NO: 13234
  source 1..120: mol_type = other DNA

SEQ ID NO: 77045 - DNA, 120 bp, synthetic construct; identical to SEQ ID NO: 47091
  source 1..120: mol_type = other DNA

SEQ ID NO: 77046 - DNA, 120 bp, synthetic construct; identical to SEQ ID NO: 47092
  source 1..120: mol_type = other DNA

SEQ ID NO: 77047 - DNA, 120 bp, synthetic construct; identical to SEQ ID NO: 47093
  source 1..120: mol_type = other DNA

SEQ ID NO: 77048 - DNA, 120 bp, synthetic construct; identical to SEQ ID NO: 13235
  source 1..120: mol_type = other DNA

SEQ ID NO: 77049 - DNA, 120 bp, synthetic construct; identical to SEQ ID NO: 47095
  source 1..120: mol_type = other DNA

SEQ ID NO: 77050 - DNA, 120 bp, synthetic construct; identical to SEQ ID NO: 47096
  source 1..120: mol_type = other DNA

SEQ ID NO: 77051 - DNA, 120 bp, synthetic construct; identical to SEQ ID NO: 47097
  source 1..120: mol_type = other DNA

SEQ ID NO: 77052 - DNA, 120 bp, synthetic construct; identical to SEQ ID NO: 13236
  source 1..120: mol_type = other DNA

SEQ ID NO: 77053 - DNA, 120 bp, synthetic construct; identical to SEQ ID NO: 47099
  source 1..120: mol_type = other DNA

SEQ ID NO: 77054 - DNA, 120 bp, synthetic construct; identical to SEQ ID NO: 47100
  source 1..120: mol_type = other DNA

SEQ ID NO: 77055 - DNA, 120 bp, synthetic construct; identical to SEQ ID NO: 47101
  source 1..120: mol_type = other DNA

SEQ ID NO: 77056 - DNA, 120 bp, synthetic construct; identical to SEQ ID NO: 47102
  source 1..120: mol_type = other DNA

SEQ ID NO: 77057 - DNA, 120 bp, synthetic construct; identical to SEQ ID NO: 13237
  source 1..120: mol_type = other DNA

SEQ ID NO: 77058 - DNA, 120 bp, synthetic construct; identical to SEQ ID NO: 47104
  source 1..120: mol_type = other DNA

SEQ ID NO: 77059 - DNA, 120 bp, synthetic construct; identical to SEQ ID NO: 47105
  source 1..120: mol_type = other DNA

SEQ ID NO: 77060 - DNA, 120 bp, synthetic construct; identical to SEQ ID NO: 47106
  source 1..120: mol_type = other DNA

SEQ ID NO: 77061 - DNA, 120 bp, synthetic construct; identical to SEQ ID NO: 13238
  source 1..120: mol_type = other DNA

SEQ ID NO: 77062 - DNA, 120 bp, synthetic construct; identical to SEQ ID NO: 47108
  source 1..120: mol_type = other DNA

SEQ ID NO: 77063 - DNA, 120 bp, synthetic construct; identical to SEQ ID NO: 47109
  source 1..120: mol_type = other DNA

SEQ ID NO: 77064 - DNA, 120 bp, synthetic construct; identical to SEQ ID NO: 13239
  source 1..120: mol_type = other DNA

SEQ ID NO: 77065 - DNA, 120 bp, synthetic construct; identical to SEQ ID NO: 47111
  source 1..120: mol_type = other DNA

SEQ ID NO: 77066 - DNA, 120 bp, synthetic construct; identical to SEQ ID NO: 47112
  source 1..120: mol_type = other DNA

SEQ ID NO: 77067 - DNA, 120 bp, synthetic construct; identical to SEQ ID NO: 47113
  source 1..120: mol_type = other DNA

SEQ ID NO: 77068 - DNA, 120 bp, synthetic construct; identical to SEQ ID NO: 47114
  source 1..120: mol_type = other DNA

SEQ ID NO: 77069 - DNA, 120 bp, synthetic construct; identical to SEQ ID NO: 13240
  source 1..120: mol_type = other DNA

SEQ ID NO: 77070 - DNA, 120 bp, synthetic construct; identical to SEQ ID NO: 47116
  source 1..120: mol_type = other DNA

SEQ ID NO: 77071 - DNA, 120 bp, synthetic construct; identical to SEQ ID NO: 47117
  source 1..120: mol_type = other DNA

SEQ ID NO: 77072 - DNA, 120 bp, synthetic construct; identical to SEQ ID NO: 47118
  source 1..120: mol_type = other DNA

SEQ ID NO: 77073 - DNA, 120 bp, synthetic construct; identical to SEQ ID NO: 13241
  source 1..120: mol_type = other DNA

SEQ ID NO: 77074 - DNA, 120 bp, synthetic construct; identical to SEQ ID NO: 47120
  source 1..120: mol_type = other DNA

SEQ ID NO: 77075 - DNA, 120 bp, synthetic construct; identical to SEQ ID NO: 47121
  source 1..120: mol_type = other DNA

SEQ ID NO: 77076 - DNA, 120 bp, synthetic construct; identical to SEQ ID NO: 47122
  source 1..120: mol_type = other DNA

SEQ ID NO: 77077 - DNA, 120 bp, synthetic construct; identical to SEQ ID NO: 13242
  source 1..120: mol_type = other DNA

SEQ ID NO: 77078 - DNA, 120 bp, synthetic construct; identical to SEQ ID NO: 47124
  source 1..120: mol_type = other DNA

SEQ ID NO: 77079 - DNA, 120 bp, synthetic construct; identical to SEQ ID NO: 47125
  source 1..120: mol_type = other DNA

SEQ ID NO: 77080 - DNA, 120 bp, synthetic construct; identical to SEQ ID NO: 47126
  source 1..120: mol_type = other DNA

SEQ ID NO: 77081 - DNA, 120 bp, synthetic construct; identical to SEQ ID NO: 13243
  source 1..120: mol_type = other DNA

SEQ ID NO: 77082 - DNA, 120 bp, synthetic construct; identical to SEQ ID NO: 47128
  source 1..120: mol_type = other DNA

SEQ ID NO: 77083 - DNA, 120 bp, synthetic construct; identical to SEQ ID NO: 47129
  source 1..120: mol_type = other DNA

SEQ ID NO: 77084 - DNA, 120 bp, synthetic construct; identical to SEQ ID NO: 47130
  source 1..120: mol_type = other DNA

SEQ ID NO: 77085 - DNA, 120 bp, synthetic construct; identical to SEQ ID NO: 13244
  source 1..120: mol_type = other DNA

SEQ ID NO: 77086 - DNA, 120 bp, synthetic construct; identical to SEQ ID NO: 47132
  source 1..120: mol_type = other DNA

SEQ ID NO: 77087 - DNA, 120 bp, synthetic construct; identical to SEQ ID NO: 47133
  source 1..120: mol_type = other DNA

SEQ ID NO: 77088 - DNA, 120 bp, synthetic construct; identical to SEQ ID NO: 47134
  source 1..120: mol_type = other DNA

SEQ ID NO: 77089 - DNA, 120 bp, synthetic construct; identical to SEQ ID NO: 13245
  source 1..120: mol_type = other DNA

SEQ ID NO: 77090 - DNA, 120 bp, synthetic construct; identical to SEQ ID NO: 47136
  source 1..120: mol_type = other DNA

SEQ ID NO: 77091 - DNA, 120 bp, synthetic construct; identical to SEQ ID NO: 47137
  source 1..120: mol_type = other DNA

SEQ ID NO: 77092 - DNA, 120 bp, synthetic construct; identical to SEQ ID NO: 13246
  source 1..120: mol_type = other DNA

SEQ ID NO: 77093 - DNA, 120 bp, synthetic construct; identical to SEQ ID NO: 47139
  source 1..120: mol_type = other DNA

SEQ ID NO: 77094 - DNA, 120 bp, synthetic construct; identical to SEQ ID NO: 47140
  source 1..120: mol_type = other DNA

SEQ ID NO: 77095 - DNA, 120 bp, synthetic construct; identical to SEQ ID NO: 47141
  source 1..120: mol_type = other DNA

SEQ ID NO: 77096 - DNA, 120 bp, synthetic construct; identical to SEQ ID NO: 13247
  source 1..120: mol_type = other DNA

SEQ ID NO: 77097 - DNA, 120 bp, synthetic construct; identical to SEQ ID NO: 47143
  source 1..120: mol_type = other DNA

SEQ ID NO: 77098 - DNA, 120 bp, synthetic construct; identical to SEQ ID NO: 47144
  source 1..120: mol_type = other DNA

SEQ ID NO: 77099 - DNA, 120 bp, synthetic construct; identical to SEQ ID NO: 47145
  source 1..120: mol_type = other DNA

SEQ ID NO: 77100 - DNA, 120 bp, synthetic construct; identical to SEQ ID NO: 47146
  source 1..120: mol_type = other DNA

SEQ ID NO: 77101 - DNA, 120 bp, synthetic construct; identical to SEQ ID NO: 13248
  source 1..120: mol_type = other DNA

SEQ ID NO: 77102 - DNA, 120 bp, synthetic construct; identical to SEQ ID NO: 47148
  source 1..120: mol_type = other DNA

SEQ ID NO: 77103 - DNA, 120 bp, synthetic construct; identical to SEQ ID NO: 47149
  source 1..120: mol_type = other DNA

SEQ ID NO: 77104 - DNA, 120 bp, synthetic construct; identical to SEQ ID NO: 47150
  source 1..120: mol_type = other DNA

SEQ ID NO: 77105 - DNA, 120 bp, synthetic construct; identical to SEQ ID NO: 13249
  source 1..120: mol_type = other DNA

SEQ ID NO: 77106 - DNA, 120 bp, synthetic construct; identical to SEQ ID NO: 47152
  source 1..120: mol_type = other DNA

SEQ ID NO: 77107 - DNA, 120 bp, synthetic construct; identical to SEQ ID NO: 47153
  source 1..120: mol_type = other DNA

SEQ ID NO: 77108 - DNA, 120 bp, synthetic construct; identical to SEQ ID NO: 13250
  source 1..120: mol_type = other DNA

SEQ ID NO: 77109 - DNA, 120 bp, synthetic construct; identical to SEQ ID NO: 47155
  source 1..120: mol_type = other DNA

SEQ ID NO: 77110 - DNA, 120 bp, synthetic construct; identical to SEQ ID NO: 47156
  source 1..120: mol_type = other DNA

SEQ ID NO: 77111 - DNA, 120 bp, synthetic construct; identical to SEQ ID NO: 47157
  source 1..120: mol_type = other DNA

SEQ ID NO: 77112 - DNA, 120 bp, synthetic construct; identical to SEQ ID NO: 13251
  source 1..120: mol_type = other DNA

SEQ ID NO: 77113 - DNA, 120 bp, synthetic construct; identical to SEQ ID NO: 47159
  source 1..120: mol_type = other DNA

SEQ ID NO: 77114 - DNA, 120 bp, synthetic construct; identical to SEQ ID NO: 47160
  source 1..120: mol_type = other DNA

SEQ ID NO: 77115 - DNA, 120 bp, synthetic construct; identical to SEQ ID NO: 47161
  source 1..120: mol_type = other DNA

SEQ ID NO: 77116 - DNA, 120 bp, synthetic construct; identical to SEQ ID NO: 47162
  source 1..120: mol_type = other DNA

SEQ ID NO: 77117 - DNA, 120 bp, synthetic construct; identical to SEQ ID NO: 13252
  source 1..120: mol_type = other DNA

SEQ ID NO: 77118 - DNA, 120 bp, synthetic construct; identical to SEQ ID NO: 47164
  source 1..120: mol_type = other DNA

SEQ ID NO: 77119 - DNA, 120 bp, synthetic construct; identical to SEQ ID NO: 47165
  source 1..120: mol_type = other DNA

SEQ ID NO: 77120 - DNA, 120 bp, synthetic construct; identical to SEQ ID NO: 47166
  source 1..120: mol_type = other DNA

SEQ ID NO: 77121 - DNA, 120 bp, synthetic construct; identical to SEQ ID NO: 13253
  source 1..120: mol_type = other DNA

SEQ ID NO: 77122 - DNA, 120 bp, synthetic construct; identical to SEQ ID NO: 47168
  source 1..120: mol_type = other DNA

SEQ ID NO: 77123 - DNA, 120 bp, synthetic construct; identical to SEQ ID NO: 47169
  source 1..120: mol_type = other DNA

SEQ ID NO: 77124 - DNA, 120 bp, synthetic construct; identical to SEQ ID NO: 47170
  source 1..120: mol_type = other DNA

SEQ ID NO: 77125 - DNA, 120 bp, synthetic construct; identical to SEQ ID NO: 47171
  source 1..120: mol_type = other DNA

SEQ ID NO: 77126 - DNA, 120 bp, synthetic construct; identical to SEQ ID NO: 13254
  source 1..120: mol_type = other DNA

SEQ ID NO: 77127 - DNA, 120 bp, synthetic construct; identical to SEQ ID NO: 47173
  source 1..120: mol_type = other DNA

SEQ ID NO: 77128 - DNA, 120 bp, synthetic construct; identical to SEQ ID NO: 47174
  source 1..120: mol_type = other DNA

SEQ ID NO: 77129 - DNA, 120 bp, synthetic construct; identical to SEQ ID NO: 47175
  source 1..120: mol_type = other DNA

SEQ ID NO: 77130 - DNA, 120 bp, synthetic construct; identical to SEQ ID NO: 13255
  source 1..120: mol_type = other DNA

SEQ ID NO: 77131 - DNA, 120 bp, synthetic construct; identical to SEQ ID NO: 47177
  source 1..120: mol_type = other DNA

SEQ ID NO: 77132 - DNA, 120 bp, synthetic construct; identical to SEQ ID NO: 47178
  source 1..120: mol_type = other DNA

SEQ ID NO: 77133 - DNA, 120 bp, synthetic construct; identical to SEQ ID NO: 13256
  source 1..120: mol_type = other DNA

SEQ ID NO: 77134 - DNA, 120 bp, synthetic construct; identical to SEQ ID NO: 47180
  source 1..120: mol_type = other DNA

SEQ ID NO: 77135 - DNA, 120 bp, synthetic construct; identical to SEQ ID NO: 47181
  source 1..120: mol_type = other DNA

SEQ ID NO: 77136 - DNA, 120 bp, synthetic construct; identical to SEQ ID NO: 47182
  source 1..120: mol_type = other DNA

SEQ ID NO: 77137 - DNA, 120 bp, synthetic construct; identical to SEQ ID NO: 47183
  source 1..120: mol_type = other DNA

SEQ ID NO: 77138 - DNA, 120 bp, synthetic construct; identical to SEQ ID NO: 13257
  source 1..120: mol_type = other DNA

SEQ ID NO: 77139 - DNA, 120 bp, synthetic construct; identical to SEQ ID NO: 47185
  source 1..120: mol_type = other DNA

SEQ ID NO: 77140 - DNA, 120 bp, synthetic construct; identical to SEQ ID NO: 47186
  source 1..120: mol_type = other DNA

SEQ ID NO: 77141 - DNA, 120 bp, synthetic construct; identical to SEQ ID NO: 47187
  source 1..120: mol_type = other DNA

SEQ ID NO: 77142 - DNA, 120 bp, synthetic construct; identical to SEQ ID NO: 13258
  source 1..120: mol_type = other DNA

SEQ ID NO: 77143 - DNA, 120 bp, synthetic construct; identical to SEQ ID NO: 47189
  source 1..120: mol_type = other DNA

SEQ ID NO: 77144 - DNA, 120 bp, synthetic construct; identical to SEQ ID NO: 47190
  source 1..120: mol_type = other DNA

SEQ ID NO: 77145 - DNA, 120 bp, synthetic construct; identical to SEQ ID NO: 13259
  source 1..120: mol_type = other DNA

SEQ ID NO: 77146 - DNA, 120 bp, synthetic construct; identical to SEQ ID NO: 47192
  source 1..120: mol_type = other DNA

SEQ ID NO: 77147 - DNA, 120 bp, synthetic construct; identical to SEQ ID NO: 47193
  source 1..120: mol_type = other DNA

SEQ ID NO: 77148 - DNA, 120 bp, synthetic construct; identical to SEQ ID NO: 47194
  source 1..120: mol_type = other DNA

SEQ ID NO: 77149 - DNA, 120 bp, synthetic construct; identical to SEQ ID NO: 47195
  source 1..120: mol_type = other DNA

SEQ ID NO: 77150 - DNA, 120 bp, synthetic construct; identical to SEQ ID NO: 13260
  source 1..120: mol_type = other DNA

SEQ ID NO: 77151 - DNA, 120 bp, synthetic construct; identical to SEQ ID NO: 47197
  source 1..120: mol_type = other DNA

SEQ ID NO: 77152 - DNA, 120 bp, synthetic construct; identical to SEQ ID NO: 47198
  source 1..120: mol_type = other DNA

SEQ ID NO: 77153 - DNA, 120 bp, synthetic construct; identical to SEQ ID NO: 13261
  source 1..120: mol_type = other DNA

SEQ ID NO: 77154 - DNA, 120 bp, synthetic construct; identical to SEQ ID NO: 47200
  source 1..120: mol_type = other DNA

SEQ ID NO: 77155 - DNA, 120 bp, synthetic construct; identical to SEQ ID NO: 47201
  source 1..120: mol_type = other DNA

SEQ ID NO: 77156 - DNA, 120 bp, synthetic construct; identical to SEQ ID NO: 47202
  source 1..120: mol_type = other DNA

SEQ ID NO: 77157 - DNA, 120 bp, synthetic construct; identical to SEQ ID NO: 47203
  source 1..120: mol_type = other DNA

SEQ ID NO: 77158 - DNA, 120 bp, synthetic construct; identical to SEQ ID NO: 13262
  source 1..120: mol_type = other DNA

SEQ ID NO: 77159 - DNA, 120 bp, synthetic construct; identical to SEQ ID NO: 47205
  source 1..120: mol_type = other DNA

SEQ ID NO: 77160 - DNA, 120 bp, synthetic construct; identical to SEQ ID NO: 47206
  source 1..120: mol_type = other DNA

SEQ ID NO: 77161 - DNA, 120 bp, synthetic construct; identical to SEQ ID NO: 47207
  source 1..120: mol_type = other DNA

SEQ ID NO: 77162 - DNA, 120 bp, synthetic construct; identical to SEQ ID NO: 13263
  source 1..120: mol_type = other DNA

SEQ ID NO: 77163 - DNA, 120 bp, synthetic construct; identical to SEQ ID NO: 47209
  source 1..120: mol_type = other DNA

SEQ ID NO: 77164 - DNA, 120 bp, synthetic construct; identical to SEQ ID NO: 5846
  source 1..120: mol_type = other DNA

SEQ ID NO: 77165 - DNA, 120 bp, synthetic construct; identical to SEQ ID NO: 47211
  source 1..120: mol_type = other DNA

SEQ ID NO: 77166 - DNA, 120 bp, synthetic construct; identical to SEQ ID NO: 13264
  source 1..120: mol_type = other DNA

SEQ ID NO: 77167 - DNA, 120 bp, synthetic construct; identical to SEQ ID NO: 47213
  source 1..120: mol_type = other DNA

SEQ ID NO: 77168 - DNA, 120 bp, synthetic construct; identical to SEQ ID NO: 47214
  source 1..120: mol_type = other DNA

SEQ ID NO: 77169 - DNA, 120 bp, synthetic construct; identical to SEQ ID NO: 47215
  source 1..120: mol_type = other DNA

SEQ ID NO: 77170 - DNA, 120 bp, synthetic construct; identical to SEQ ID NO: 13265
  source 1..120: mol_type = other DNA

SEQ ID NO: 77171 - DNA, 120 bp, synthetic construct; identical to SEQ ID NO: 47217
  source 1..120: mol_type = other DNA

SEQ ID NO: 77172 - DNA, 120 bp, synthetic construct; identical to SEQ ID NO: 47218
  source 1..120: mol_type = other DNA

SEQ ID NO: 77173 - DNA, 120 bp, synthetic construct; identical to SEQ ID NO: 13266
  source 1..120: mol_type = other DNA

SEQ ID NO: 77174 - DNA, 120 bp, synthetic construct; identical to SEQ ID NO: 47220
  source 1..120: mol_type = other DNA

SEQ ID NO: 77175 - DNA, 120 bp, synthetic construct; identical to SEQ ID NO: 47221
  source 1..120: mol_type = other DNA

SEQ ID NO: 77176 - DNA, 120 bp, synthetic construct; identical to SEQ ID NO: 47222
  source 1..120: mol_type = other DNA

SEQ ID NO: 77177 - DNA, 120 bp, synthetic construct; identical to SEQ ID NO: 47223
  source 1..120: mol_type = other DNA

SEQ ID NO: 77178 - DNA, 120 bp, synthetic construct; identical to SEQ ID NO: 13267
  source 1..120: mol_type = other DNA

SEQ ID NO: 77179 - DNA, 120 bp, synthetic construct; identical to SEQ ID NO: 47225
  source 1..120: mol_type = other DNA

SEQ ID NO: 77180 - DNA, 120 bp, synthetic construct; identical to SEQ ID NO: 47226
  source 1..120: mol_type = other DNA

SEQ ID NO: 77181 - DNA, 120 bp, synthetic construct; identical to SEQ ID NO: 13268
  source 1..120: mol_type = other DNA

SEQ ID NO: 77182 - DNA, 120 bp, synthetic construct; identical to SEQ ID NO: 47228
  source 1..120: mol_type = other DNA

SEQ ID NO: 77183 - DNA, 120 bp, synthetic construct; identical to SEQ ID NO: 47229
  source 1..120: mol_type = other DNA

SEQ ID NO: 77184 - DNA, 120 bp, synthetic construct; identical to SEQ ID NO: 47230
  source 1..120: mol_type = other DNA

SEQ ID NO: 77185 - DNA, 120 bp, synthetic construct; identical to SEQ ID NO: 13269
  source 1..120: mol_type = other DNA

SEQ ID NO: 77186 - DNA, 120 bp, synthetic construct; identical to SEQ ID NO: 47232
  source 1..120: mol_type = other DNA

SEQ ID NO: 77187 - DNA, 120 bp, synthetic construct; identical to SEQ ID NO: 47233
  source 1..120: mol_type = other DNA

SEQ ID NO: 77188 - DNA, 120 bp, synthetic construct; identical to SEQ ID NO: 47234
  source 1..120: mol_type = other DNA

SEQ ID NO: 77189 - DNA, 120 bp, synthetic construct; identical to SEQ ID NO: 13270
  source 1..120: mol_type = other DNA

SEQ ID NO: 77190 - DNA, 120 bp, synthetic construct; identical to SEQ ID NO: 47236
  source 1..120: mol_type = other DNA

SEQ ID NO: 77191 - DNA, 120 bp, synthetic construct; identical to SEQ ID NO: 47237
  source 1..120: mol_type = other DNA

SEQ ID NO: 77192 - DNA, 120 bp, synthetic construct; identical to SEQ ID NO: 47238
  source 1..120: mol_type = other DNA

SEQ ID NO: 77193 - DNA, 120 bp, synthetic construct; identical to SEQ ID NO: 47239
  source 1..120: mol_type = other DNA

SEQ ID NO: 77194 - DNA, 120 bp, synthetic construct; identical to SEQ ID NO: 13271
  source 1..120: mol_type = other DNA

SEQ ID NO: 77195 - DNA, 120 bp, synthetic construct; identical to SEQ ID NO: 47241
  source 1..120: mol_type = other DNA

SEQ ID NO: 77196 - DNA, 120 bp, synthetic construct; identical to SEQ ID NO: 47242
  source 1..120: mol_type = other DNA

SEQ ID NO: 77197 - DNA, 120 bp, synthetic construct; identical to SEQ ID NO: 47243
  source 1..120: mol_type = other DNA

SEQ ID NO: 77198 - DNA, 120 bp, synthetic construct; identical to SEQ ID NO: 13272
  source 1..120: mol_type = other DNA

SEQ ID NO: 77199 - DNA, 120 bp, synthetic construct; identical to SEQ ID NO: 47245
  source 1..120: mol_type = other DNA

SEQ ID NO: 77200 - DNA, 120 bp, synthetic construct; identical to SEQ ID NO: 47246
  source 1..120: mol_type = other DNA

SEQ ID NO: 77201 - DNA, 120 bp, synthetic construct; identical to SEQ ID NO: 13273
  source 1..120: mol_type = other DNA

SEQ ID NO: 77202 - DNA, 120 bp, synthetic construct; identical to SEQ ID NO: 47248
  source 1..120: mol_type = other DNA

SEQ ID NO: 77203 - DNA, 120 bp, synthetic construct; identical to SEQ ID NO: 47249
  source 1..120: mol_type = other DNA

SEQ ID NO: 77204 - DNA, 120 bp, synthetic construct; identical to SEQ ID NO: 13274
  source 1..120: mol_type = other DNA

SEQ ID NO: 77205 - DNA, 120 bp, synthetic construct; identical to SEQ ID NO: 47251
  source 1..120: mol_type = other DNA

SEQ ID NO: 77206 - DNA, 120 bp, synthetic construct; identical to SEQ ID NO: 47252
  source 1..120: mol_type = other DNA

SEQ ID NO: 77207 - DNA, 120 bp, synthetic construct; identical to SEQ ID NO: 47253
  source 1..120: mol_type = other DNA

SEQ ID NO: 77208 - DNA, 120 bp, synthetic construct; identical to SEQ ID NO: 13275
  source 1..120: mol_type = other DNA

SEQ ID NO: 77209 - DNA, 120 bp, synthetic construct; identical to SEQ ID NO: 47255
  source 1..120: mol_type = other DNA

SEQ ID NO: 77210 - DNA, 120 bp, synthetic construct; identical to SEQ ID NO: 47256
  source 1..120: mol_type = other DNA

SEQ ID NO: 77211 - DNA, 120 bp, synthetic construct; identical to SEQ ID NO: 47257
  source 1..120: mol_type = other DNA

SEQ ID NO: 77212 - DNA, 120 bp, synthetic construct; identical to SEQ ID NO: 47258
  source 1..120: mol_type = other DNA

SEQ ID NO: 77213 - DNA, 120 bp, synthetic construct; identical to SEQ ID NO: 13276
  source 1..120: mol_type = other DNA

SEQ ID NO: 77214 - DNA, 120 bp, synthetic construct; identical to SEQ ID NO: 47260
  source 1..120: mol_type = other DNA

SEQ ID NO: 77215 - DNA, 120 bp, synthetic construct; identical to SEQ ID NO: 47261
  source 1..120: mol_type = other DNA

SEQ ID NO: 77216 - DNA, 120 bp, synthetic construct; identical to SEQ ID NO: 47262
  source 1..120: mol_type = other DNA

SEQ ID NO: 77217 - DNA, 120 bp, synthetic construct; identical to SEQ ID NO: 13277
  source 1..120: mol_type = other DNA

SEQ ID NO: 77218 - DNA, 120 bp, synthetic construct; identical to SEQ ID NO: 47264
  source 1..120: mol_type = other DNA

SEQ ID NO: 77219 - DNA, 120 bp, synthetic construct; identical to SEQ ID NO: 47265
  source 1..120: mol_type = other DNA

SEQ ID NO: 77220 - DNA, 120 bp, synthetic construct; identical to SEQ ID NO: 13278
  source 1..120: mol_type = other DNA

SEQ ID NO: 77221 - DNA, 120 bp, synthetic construct; identical to SEQ ID NO: 47267
  source 1..120: mol_type = other DNA

SEQ ID NO: 77222 - DNA, 120 bp, synthetic construct; identical to SEQ ID NO: 47268
  source 1..120: mol_type = other DNA

SEQ ID NO: 77223 - DNA, 120 bp, synthetic construct; identical to SEQ ID NO: 47269
  source 1..120: mol_type = other DNA

SEQ ID NO: 77224 - DNA, 120 bp, synthetic construct; identical to SEQ ID NO: 47270
  source 1..120: mol_type = other DNA

SEQ ID NO: 77225 - DNA, 120 bp, synthetic construct; identical to SEQ ID NO: 13279
  source 1..120: mol_type = other DNA

SEQ ID NO: 77226 - DNA, 120 bp, synthetic construct; identical to SEQ ID NO: 47272
  source 1..120: mol_type = other DNA

SEQ ID NO: 77227 - DNA, 120 bp, synthetic construct; identical to SEQ ID NO: 47273
  source 1..120: mol_type = other DNA

SEQ ID NO: 77228 - DNA, 120 bp, synthetic construct; identical to SEQ ID NO: 13280
  source 1..120: mol_type = other DNA

SEQ ID NO: 77229 - DNA, 120 bp, synthetic construct; identical to SEQ ID NO: 47275
  source 1..120: mol_type = other DNA

SEQ ID NO: 77230 - DNA, 120 bp, synthetic construct; identical to SEQ ID NO: 47276
  source 1..120: mol_type = other DNA

SEQ ID NO: 77231 - DNA, 120 bp, synthetic construct; identical to SEQ ID NO: 47277
  source 1..120: mol_type = other DNA

SEQ ID NO: 77232 - DNA, 120 bp, synthetic construct; identical to SEQ ID NO: 13281
  source 1..120: mol_type = other DNA

SEQ ID NO: 77233 - DNA, 120 bp, synthetic construct; identical to SEQ ID NO: 47279
  source 1..120: mol_type = other DNA

SEQ ID NO: 77234 - DNA, 120 bp, synthetic construct; identical to SEQ ID NO: 47280
  source 1..120: mol_type = other DNA

SEQ ID NO: 77235 - DNA, 120 bp, synthetic construct; identical to SEQ ID NO: 47281
  source 1..120: mol_type = other DNA

SEQ ID NO: 77236 - DNA, 120 bp, synthetic construct; identical to SEQ ID NO: 47282
  source 1..120: mol_type = other DNA

SEQ ID NO: 77237 - DNA, 120 bp, synthetic construct; identical to SEQ ID NO: 13282
  source 1..120: mol_type = other DNA

SEQ ID NO: 77238 - DNA, 120 bp, synthetic construct; identical to SEQ ID NO: 47284
  source 1..120: mol_type = other DNA

SEQ ID NO: 77239 - DNA, 120 bp, synthetic construct; identical to SEQ ID NO: 47285
  source 1..120: mol_type = other DNA

SEQ ID NO: 77240 - DNA, 120 bp, synthetic construct; identical to SEQ ID NO: 13283
  source 1..120: mol_type = other DNA

SEQ ID NO: 77241 - DNA, 120 bp, synthetic construct; identical to SEQ ID NO: 47287
  source 1..120: mol_type = other DNA

SEQ ID NO: 77242 - DNA, 120 bp, synthetic construct; identical to SEQ ID NO: 47288
  source 1..120: mol_type = other DNA

SEQ ID NO: 77243 - DNA, 120 bp, synthetic construct; identical to SEQ ID NO: 47289
  source 1..120: mol_type = other DNA

SEQ ID NO: 77244 - DNA, 120 bp, synthetic construct; identical to SEQ ID NO: 47290
  source 1..120: mol_type = other DNA

SEQ ID NO: 77245 - DNA, 120 bp, synthetic construct; identical to SEQ ID NO: 13284
  source 1..120: mol_type = other DNA

SEQ ID NO: 77246 - DNA, 120 bp, synthetic construct; identical to SEQ ID NO: 47292
  source 1..120: mol_type = other DNA

SEQ ID NO: 77247 - DNA, 120 bp, synthetic construct; identical to SEQ ID NO: 47293
  source 1..120: mol_type = other DNA

SEQ ID NO: 77248 - DNA, 120 bp, synthetic construct; identical to SEQ ID NO: 13285
  source 1..120: mol_type = other DNA

SEQ ID NO: 77249 - DNA, 120 bp, synthetic construct; identical to SEQ ID NO: 47295
  source 1..120: mol_type = other DNA

SEQ ID NO: 77250 - DNA, 120 bp, synthetic construct; identical to SEQ ID NO: 47296
  source 1..120: mol_type = other DNA

SEQ ID NO: 77251 - DNA, 120 bp, synthetic construct; identical to SEQ ID NO: 47297
  source 1..120: mol_type = other DNA

SEQ ID NO: 77252 - DNA, 120 bp, synthetic construct; identical to SEQ ID NO: 13286
  source 1..120: mol_type = other DNA

SEQ ID NO: 77253 - DNA, 120 bp, synthetic construct; identical to SEQ ID NO: 47299
  source 1..120: mol_type = other DNA

SEQ ID NO: 77254 - DNA, 120 bp, synthetic construct; identical to SEQ ID NO: 47300
  source 1..120: mol_type = other DNA

SEQ ID NO: 77255 - DNA, 120 bp, synthetic construct; identical to SEQ ID NO: 47301
  source 1..120: mol_type = other DNA

SEQ ID NO: 77256 - DNA, 120 bp, synthetic construct; identical to SEQ ID NO: 47302
  source 1..120: mol_type = other DNA

SEQ ID NO: 77257 - DNA, 120 bp, synthetic construct; identical to SEQ ID NO: 13287
  source 1..120: mol_type = other DNA

SEQ ID NO: 77258 - DNA, 120 bp, synthetic construct; identical to SEQ ID NO: 47304
  source 1..120: mol_type = other DNA

SEQ ID NO: 77259 - DNA, 120 bp, synthetic construct; identical to SEQ ID NO: 47305
  source 1..120: mol_type = other DNA

SEQ ID NO: 77260 - DNA, 120 bp, synthetic construct; identical to SEQ ID NO: 13288
  source 1..120: mol_type = other DNA

SEQ ID NO: 77261 - DNA, 120 bp, synthetic construct; identical to SEQ ID NO: 47307
  source 1..120: mol_type = other DNA

SEQ ID NO: 77262 - DNA, 120 bp, synthetic construct; identical to SEQ ID NO: 47308
  source 1..120: mol_type = other DNA

SEQ ID NO: 77263 - DNA, 120 bp, synthetic construct; identical to SEQ ID NO: 47309
  source 1..120: mol_type = other DNA

SEQ ID NO: 77264 - DNA, 120 bp, synthetic construct; identical to SEQ ID NO: 13289
  source 1..120: mol_type = other DNA

SEQ ID NO: 77265 - DNA, 120 bp, synthetic construct; identical to SEQ ID NO: 47311
  source 1..120: mol_type = other DNA

SEQ ID NO: 77266 - DNA, 120 bp, synthetic construct; identical to SEQ ID NO: 47312
  source 1..120: mol_type = other DNA

SEQ ID NO: 77267 - DNA, 120 bp, synthetic construct; identical to SEQ ID NO: 47313
  source 1..120: mol_type = other DNA

SEQ ID NO: 77268 - DNA, 120 bp, synthetic construct; identical to SEQ ID NO: 47314
  source 1..120: mol_type = other DNA

SEQ ID NO: 77269 - DNA, 120 bp, synthetic construct; identical to SEQ ID NO: 13290
  source 1..120: mol_type = other DNA

SEQ ID NO: 77270 - DNA, 120 bp, synthetic construct; identical to SEQ ID NO: 47316
  source 1..120: mol_type = other DNA

SEQ ID NO: 77271 - DNA, 120 bp, synthetic construct; identical to SEQ ID NO: 47317
  source 1..120: mol_type = other DNA

SEQ ID NO: 77272 - DNA, 120 bp, synthetic construct; identical to SEQ ID NO: 47318
  source 1..120: mol_type = other DNA

SEQ ID NO: 77273 - DNA, 120 bp, synthetic construct; identical to SEQ ID NO: 5871
  source 1..120: mol_type = other DNA

SEQ ID NO: 77274 - DNA, 120 bp, synthetic construct; identical to SEQ ID NO: 47320
  source 1..120: mol_type = other DNA

SEQ ID NO: 77275 - DNA, 120 bp, synthetic construct; identical to SEQ ID NO: 47321
  source 1..120: mol_type = other DNA

SEQ ID NO: 77276 - DNA, 120 bp, synthetic construct; identical to SEQ ID NO: 47322
  source 1..120: mol_type = other DNA

SEQ ID NO: 77277 - DNA, 120 bp, synthetic construct; identical to SEQ ID NO: 13292
  source 1..120: mol_type = other DNA

SEQ ID NO: 77278 - DNA, 120 bp, synthetic construct; identical to SEQ ID NO: 47324
  source 1..120: mol_type = other DNA

SEQ ID NO: 77279 - DNA, 120 bp, synthetic construct; identical to SEQ ID NO: 47325
  source 1..120: mol_type = other DNA

SEQ ID NO: 77280 - DNA, 120 bp, synthetic construct; identical to SEQ ID NO: 47326
  source 1..120: mol_type = other DNA

SEQ ID NO: 77281 - DNA, 120 bp, synthetic construct; identical to SEQ ID NO: 13293
  source 1..120: mol_type = other DNA

SEQ ID NO: 77282 - DNA, 120 bp, synthetic construct; identical to SEQ ID NO: 47328
  source 1..120: mol_type = other DNA

SEQ ID NO: 77283 - DNA, 120 bp, synthetic construct; identical to SEQ ID NO: 47329
  source 1..120: mol_type = other DNA

SEQ ID NO: 77284 - DNA, 120 bp, synthetic construct; identical to SEQ ID NO: 47330
  source 1..120: mol_type = other DNA

SEQ ID NO: 77285 - DNA, 120 bp, synthetic construct; identical to SEQ ID NO: 13294
  source 1..120: mol_type = other DNA

SEQ ID NO: 77286 - DNA, 120 bp, synthetic construct; identical to SEQ ID NO: 47332
  source 1..120: mol_type = other DNA

SEQ ID NO: 77287 - DNA, 120 bp, synthetic construct; identical to SEQ ID NO: 47333
  source 1..120: mol_type = other DNA

SEQ ID NO: 77288 - DNA, 120 bp, synthetic construct; identical to SEQ ID NO: 47334
  source 1..120: mol_type = other DNA

SEQ ID NO: 77289 - DNA, 120 bp, synthetic construct; identical to SEQ ID NO: 13295
  source 1..120: mol_type = other DNA

SEQ ID NO: 77290 - DNA, 120 bp, synthetic construct; identical to SEQ ID NO: 47336
  source 1..120: mol_type = other DNA

SEQ ID NO: 77291 - DNA, 120 bp, synthetic construct; identical to SEQ ID NO: 47337
  source 1..120: mol_type = other DNA

SEQ ID NO: 77292 - DNA, 120 bp, synthetic construct; identical to SEQ ID NO: 13296
  source 1..120: mol_type = other DNA

SEQ ID NO: 77293 - DNA, 120 bp, synthetic construct; identical to SEQ ID NO: 47339
  source 1..120: mol_type = other DNA

SEQ ID NO: 77294 - DNA, 120 bp, synthetic construct; identical to SEQ ID NO: 47340
  source 1..120: mol_type = other DNA

SEQ ID NO: 77295 - DNA, 120 bp, synthetic construct; identical to SEQ ID NO: 47341
  source 1..120: mol_type = other DNA

SEQ ID NO: 77296 - DNA, 120 bp, synthetic construct; identical to SEQ ID NO: 47342
  source 1..120: mol_type = other DNA

SEQ ID NO: 77297 - DNA, 120 bp, synthetic construct; identical to SEQ ID NO: 13297
  source 1..120: mol_type = other DNA

SEQ ID NO: 77298 - DNA, 120 bp, synthetic construct; identical to SEQ ID NO: 47344
  source 1..120: mol_type = other DNA

SEQ ID NO: 77299 - DNA, 120 bp, synthetic construct; identical to SEQ ID NO: 47345
  source 1..120: mol_type = other DNA

SEQ ID NO: 77300 - DNA, 120 bp, synthetic construct; identical to SEQ ID NO: 47346
  source 1..120: mol_type = other DNA

SEQ ID NO: 77301 - DNA, 120 bp, synthetic construct; identical to SEQ ID NO: 13298
  source 1..120: mol_type = other DNA

SEQ ID NO: 77302 - DNA, 120 bp, synthetic construct; identical to SEQ ID NO: 47348
  source 1..120: mol_type = other DNA

SEQ ID NO: 77303 - DNA, 120 bp, synthetic construct; identical to SEQ ID NO: 47349
  source 1..120: mol_type = other DNA

SEQ ID NO: 77304 - DNA, 120 bp, synthetic construct; identical to SEQ ID NO: 47350
  source 1..120: mol_type = other DNA

SEQ ID NO: 77305 - DNA, 120 bp, synthetic construct; identical to SEQ ID NO: 13299
  source 1..120: mol_type = other DNA

SEQ ID NO: 77306 - DNA, 120 bp, synthetic construct; identical to SEQ ID NO: 47352
  source 1..120: mol_type = other DNA

SEQ ID NO: 77307 - DNA, 120 bp, synthetic construct; identical to SEQ ID NO: 47353
  source 1..120: mol_type = other DNA

SEQ ID NO: 77308 - DNA, 120 bp, synthetic construct; identical to SEQ ID NO: 47354
  source 1..120: mol_type = other DNA

SEQ ID NO: 77309 - DNA, 120 bp, synthetic construct; identical to SEQ ID NO: 13300
  source 1..120: mol_type = other DNA

SEQ ID NO: 77310 - DNA, 120 bp, synthetic construct; identical to SEQ ID NO: 47356
  source 1..120: mol_type = other DNA

SEQ ID NO: 77311 - DNA, 120 bp, synthetic construct; identical to SEQ ID NO: 47357
  source 1..120: mol_type = other DNA

SEQ ID NO: 77312 - DNA, 120 bp, synthetic construct; identical to SEQ ID NO: 13301
  source 1..120: mol_type = other DNA

SEQ ID NO: 77313 - DNA, 120 bp, synthetic construct; identical to SEQ ID NO: 47359
  source 1..120: mol_type = other DNA

SEQ ID NO: 77314 - DNA, 120 bp, synthetic construct; identical to SEQ ID NO: 47360
  source 1..120: mol_type = other DNA

SEQ ID NO: 77315 - DNA, 120 bp, synthetic construct; identical to SEQ ID NO: 47361
  source 1..120: mol_type = other DNA

SEQ ID NO: 77316 - DNA, 120 bp, synthetic construct; identical to SEQ ID NO: 47362
  source 1..120: mol_type = other DNA

SEQ ID NO: 77317 - DNA, 120 bp, synthetic construct; identical to SEQ ID NO: 13302
  source 1..120: mol_type = other DNA

SEQ ID NO: 77318 - DNA, 120 bp, synthetic construct; identical to SEQ ID NO: 47364
  source 1..120: mol_type = other DNA

SEQ ID NO: 77319 - DNA, 120 bp, synthetic construct; identical to SEQ ID NO: 47365
  source 1..120: mol_type = other DNA

SEQ ID NO: 77320 - DNA, 120 bp, synthetic construct; identical to SEQ ID NO: 13303
  source 1..120: mol_type = other DNA

SEQ ID NO: 77321 - DNA, 120 bp, synthetic construct; identical to SEQ ID NO: 47367
  source 1..120: mol_type = other DNA

SEQ ID NO: 77322 - DNA, 120 bp, synthetic construct; identical to SEQ ID NO: 47368
  source 1..120: mol_type = other DNA

SEQ ID NO: 77323 - DNA, 120 bp, synthetic construct; identical to SEQ ID NO: 47369
  source 1..120: mol_type = other DNA

SEQ ID NO: 77324 - DNA, 120 bp, synthetic construct; identical to SEQ ID NO: 47370
  source 1..120: mol_type = other DNA

SEQ ID NO: 77325 - DNA, 120 bp, synthetic construct; identical to SEQ ID NO: 13304
  source 1..120: mol_type = other DNA

SEQ ID NO: 77326 - DNA, 120 bp, synthetic construct; identical to SEQ ID NO: 47372
  source 1..120: mol_type = other DNA

SEQ ID NO: 77327 - DNA, 120 bp, synthetic construct; identical to SEQ ID NO: 47373
  source 1..120: mol_type = other DNA

SEQ ID NO: 77328 - DNA, 120 bp, synthetic construct; identical to SEQ ID NO: 13305
  source 1..120: mol_type = other DNA

SEQ ID NO: 77329 - DNA, 120 bp, synthetic construct; identical to SEQ ID NO: 47375
  source 1..120: mol_type = other DNA

SEQ ID NO: 77330 - DNA, 120 bp, synthetic construct; identical to SEQ ID NO: 47376
  source 1..120: mol_type = other DNA

SEQ ID NO: 77331 - DNA, 120 bp, synthetic construct; identical to SEQ ID NO: 47377
  source 1..120: mol_type = other DNA

SEQ ID NO: 77332 - DNA, 120 bp, synthetic construct; identical to SEQ ID NO: 47378
  source 1..120: mol_type = other DNA

SEQ ID NO: 77333 - DNA, 120 bp, synthetic construct; identical to SEQ ID NO: 13306
  source 1..120: mol_type = other DNA

SEQ ID NO: 77334 - DNA, 120 bp, synthetic construct; identical to SEQ ID NO: 47380
  source 1..120: mol_type = other DNA

SEQ ID NO: 77335 - DNA, 120 bp, synthetic construct; identical to SEQ ID NO: 47381
  source 1..120: mol_type = other DNA

SEQ ID NO: 77336 - DNA, 120 bp, synthetic construct; identical to SEQ ID NO: 13307
  source 1..120: mol_type = other DNA

SEQ ID NO: 77337 - DNA, 120 bp, synthetic construct; identical to SEQ ID NO: 47383
  source 1..120: mol_type = other DNA

SEQ ID NO: 77338 - DNA, 120 bp, synthetic construct; identical to SEQ ID NO: 47384
  source 1..120: mol_type = other DNA

SEQ ID NO: 77339 - DNA, 120 bp, synthetic construct; identical to SEQ ID NO: 47385
  source 1..120: mol_type = other DNA

SEQ ID NO: 77340 - DNA, 120 bp, synthetic construct; identical to SEQ ID NO: 47386
  source 1..120: mol_type = other DNA

SEQ ID NO: 77341 - DNA, 120 bp, synthetic construct; identical to SEQ ID NO: 13308
  source 1..120: mol_type = other DNA

SEQ ID NO: 77342 - DNA, 120 bp, synthetic construct; identical to SEQ ID NO: 47388
  source 1..120: mol_type = other DNA

SEQ ID NO: 77343 - DNA, 120 bp, synthetic construct; identical to SEQ ID NO: 47389
  source 1..120: mol_type = other DNA

SEQ ID NO: 77344 - DNA, 120 bp, synthetic construct; identical to SEQ ID NO: 13309
  source 1..120: mol_type = other DNA

SEQ ID NO: 77345 - DNA, 120 bp, synthetic construct; identical to SEQ ID NO: 47391
  source 1..120: mol_type = other DNA

SEQ ID NO: 77346 - DNA, 120 bp, synthetic construct; identical to SEQ ID NO: 47392
  source 1..120: mol_type = other DNA

SEQ ID NO: 77347 - DNA, 120 bp, synthetic construct; identical to SEQ ID NO: 47393
  source 1..120: mol_type = other DNA

SEQ ID NO: 77348 - DNA, 120 bp, synthetic construct; identical to SEQ ID NO: 13310
  source 1..120: mol_type = other DNA

SEQ ID NO: 77349 - DNA, 120 bp, synthetic construct; identical to SEQ ID NO: 13311
  source 1..120: mol_type = other DNA

SEQ ID NO: 77350 - DNA, 120 bp, synthetic construct; identical to SEQ ID NO: 47396
  source 1..120: mol_type = other DNA

SEQ ID NO: 77351 - DNA, 120 bp, synthetic construct; identical to SEQ ID NO: 5889
  source 1..120: mol_type = other DNA

SEQ ID NO: 77352 - DNA, 120 bp, synthetic construct; identical to SEQ ID NO: 47398
  source 1..120: mol_type = other DNA

SEQ ID NO: 77353 - DNA, 120 bp, synthetic construct; identical to SEQ ID NO: 47399
  source 1..120: mol_type = other DNA

SEQ ID NO: 77354 - DNA, 120 bp, synthetic construct; identical to SEQ ID NO: 13312
  source 1..120: mol_type = other DNA

SEQ ID NO: 77355 - DNA, 120 bp, synthetic construct; identical to SEQ ID NO: 47401
  source 1..120: mol_type = other DNA

SEQ ID NO: 77356 - DNA, 120 bp, synthetic construct; identical to SEQ ID NO: 47402
  source 1..120: mol_type = other DNA

SEQ ID NO: 77357 - DNA, 120 bp, synthetic construct; identical to SEQ ID NO: 47403
  source 1..120: mol_type = other DNA

SEQ ID NO: 77358 - DNA, 120 bp, synthetic construct; identical to SEQ ID NO: 47404
  source 1..120: mol_type = other DNA

SEQ ID NO: 77359 - DNA, 120 bp, synthetic construct; identical to SEQ ID NO: 13313
  source 1..120: mol_type = other DNA

SEQ ID NO: 77360 - DNA, 120 bp, synthetic construct; identical to SEQ ID NO: 47406
  source 1..120: mol_type = other DNA

SEQ ID NO: 77361 - DNA, 120 bp, synthetic construct; identical to SEQ ID NO: 47407
  source 1..120: mol_type = other DNA

SEQ ID NO: 77362 - DNA, 120 bp, synthetic construct; identical to SEQ ID NO: 13314
  source 1..120: mol_type = other DNA

SEQ ID NO: 77363 - DNA, 120 bp, synthetic construct; identical to SEQ ID NO: 47409
  source 1..120: mol_type = other DNA

SEQ ID NO: 77364 - DNA, 120 bp, synthetic construct; identical to SEQ ID NO: 47410
  source 1..120: mol_type = other DNA

SEQ ID NO: 77365 - DNA, 120 bp, synthetic construct; identical to SEQ ID NO: 47411
  source 1..120: mol_type = other DNA

SEQ ID NO: 77366 - DNA, 120 bp, synthetic construct; identical to SEQ ID NO: 13315
  source 1..120: mol_type = other DNA

SEQ ID NO: 77367 - DNA, 120 bp, synthetic construct; identical to SEQ ID NO: 47413
  source 1..120: mol_type = other DNA

SEQ ID NO: 77368 - DNA, 120 bp, synthetic construct; identical to SEQ ID NO: 47414
  source 1..120: mol_type = other DNA

SEQ ID NO: 77369 - DNA, 120 bp, synthetic construct; identical to SEQ ID NO: 47415
  source 1..120: mol_type = other DNA

SEQ ID NO: 77370 - DNA, 120 bp, synthetic construct; identical to SEQ ID NO: 47416
  source 1..120: mol_type = other DNA

SEQ ID NO: 77371 - DNA, 120 bp, synthetic construct; identical to SEQ ID NO: 13316
  source 1..120: mol_type = other DNA

SEQ ID NO: 77372 - DNA, 120 bp, synthetic construct; identical to SEQ ID NO: 47418
  source 1..120: mol_type = other DNA

SEQ ID NO: 77373 - DNA, 120 bp, synthetic construct; identical to SEQ ID NO: 47419
  source 1..120: mol_type = other DNA

SEQ ID NO: 77374 - DNA, 120 bp, synthetic construct; identical to SEQ ID NO: 47420
  source 1..120: mol_type = other DNA

SEQ ID NO: 77375 - DNA, 120 bp, synthetic construct; identical to SEQ ID NO: 13317
  source 1..120: mol_type = other DNA

SEQ ID NO: 77376 - DNA, 120 bp, synthetic construct; identical to SEQ ID NO: 47422
  source 1..120: mol_type = other DNA

SEQ ID NO: 77377 - DNA, 120 bp, synthetic construct; identical to SEQ ID NO: 47423
  source 1..120: mol_type = other DNA

SEQ ID NO: 77378 - DNA, 120 bp, synthetic construct; identical to SEQ ID NO: 13318
  source 1..120: mol_type = other DNA

SEQ ID NO: 77379 - DNA, 120 bp, synthetic construct; identical to SEQ ID NO: 47425
  source 1..120: mol_type = other DNA

SEQ ID NO: 77380 - DNA, 120 bp, synthetic construct; identical to SEQ ID NO: 13319
  source 1..120: mol_type = other DNA

SEQ ID NO: 77381 - DNA, 120 bp, synthetic construct; identical to SEQ ID NO: 47427
  source 1..120: mol_type = other DNA

SEQ ID NO: 77382 - DNA, 120 bp, synthetic construct; identical to SEQ ID NO: 47428
  source 1..120: mol_type = other DNA

SEQ ID NO: 77383 - DNA, 120 bp, synthetic construct; identical to SEQ ID NO: 47429
  source 1..120: mol_type = other DNA

SEQ ID NO: 77384 - DNA, 120 bp, synthetic construct; identical to SEQ ID NO: 13320
  source 1..120: mol_type = other DNA

SEQ ID NO: 77385 - DNA, 120 bp, synthetic construct; identical to SEQ ID NO: 47431
  source 1..120: mol_type = other DNA

SEQ ID NO: 77386 - DNA, 120 bp, synthetic construct; identical to SEQ ID NO: 13321
  source 1..120: mol_type = other DNA

SEQ ID NO: 77387 - DNA, 120 bp, synthetic construct; identical to SEQ ID NO: 47433
  source 1..120: mol_type = other DNA

SEQ ID NO: 77388 - DNA, 120 bp, synthetic construct; identical to SEQ ID NO: 47434
  source 1..120: mol_type = other DNA

SEQ ID NO: 77389 - DNA, 120 bp, synthetic construct; identical to SEQ ID NO: 47435
  source 1..120: mol_type = other DNA

SEQ ID NO: 77390 - DNA, 120 bp, synthetic construct; identical to SEQ ID NO: 13322
  source 1..120: mol_type = other DNA

SEQ ID NO: 77391 - DNA, 120 bp, synthetic construct; identical to SEQ ID NO: 47437
  source 1..120: mol_type = other DNA

SEQ ID NO: 77392 - DNA, 120 bp, synthetic construct; identical to SEQ ID NO: 47438
  source 1..120: mol_type = other DNA

SEQ ID NO: 77393 - DNA, 120 bp, synthetic construct; identical to SEQ ID NO: 47439
  source 1..120: mol_type = other DNA

SEQ ID NO: 77394 - DNA, 120 bp, synthetic construct; identical to SEQ ID NO: 5899
  source 1..120: mol_type = other DNA

SEQ ID NO: 77395 - DNA, 120 bp, synthetic construct; identical to SEQ ID NO: 47441
  source 1..120: mol_type = other DNA

SEQ ID NO: 77396 - DNA, 120 bp, synthetic construct; identical to SEQ ID NO: 47442
  source 1..120: mol_type = other DNA

SEQ ID NO: 77397 - DNA, 120 bp, synthetic construct; identical to SEQ ID NO: 47443
  source 1..120: mol_type = other DNA

SEQ ID NO: 77398 - DNA, 120 bp, synthetic construct; identical to SEQ ID NO: 47444
  source 1..120: mol_type = other DNA

SEQ ID NO: 77399 - DNA, 120 bp, synthetic construct; identical to SEQ ID NO: 13324
  source 1..120: mol_type = other DNA

SEQ ID NO: 77400 - DNA, 120 bp, synthetic construct; identical to SEQ ID NO: 47446
  source 1..120: mol_type = other DNA

SEQ ID NO: 77401 - DNA, 120 bp, synthetic construct; identical to SEQ ID NO: 47447
  source 1..120: mol_type = other DNA

SEQ ID NO: 77402 - DNA, 120 bp, synthetic construct; identical to SEQ ID NO: 13325
  source 1..120: mol_type = other DNA

SEQ ID NO: 77403 - DNA, 120 bp, synthetic construct; identical to SEQ ID NO: 47449
  source 1..120: mol_type = other DNA

SEQ ID NO: 77404 - DNA, 120 bp, synthetic construct; identical to SEQ ID NO: 47450
  source 1..120: mol_type = other DNA

SEQ ID NO: 77405 - DNA, 120 bp, synthetic construct; identical to SEQ ID NO: 47451
  source 1..120: mol_type = other DNA

SEQ ID NO: 77406 - DNA, 120 bp, synthetic construct; identical to SEQ ID NO: 13326
  source 1..120: mol_type = other DNA

SEQ ID NO: 77407 - DNA, 120 bp, synthetic construct; identical to SEQ ID NO: 47453
  source 1..120: mol_type = other DNA

SEQ ID NO: 77408 - DNA, 120 bp, synthetic construct; identical to SEQ ID NO: 47454
  source 1..120: mol_type = other DNA

SEQ ID NO: 77409 - DNA, 120 bp, synthetic construct; identical to SEQ ID NO: 47455
  source 1..120: mol_type = other DNA

SEQ ID NO: 77410 - DNA, 120 bp, synthetic construct; identical to SEQ ID NO: 13327
  source 1..120: mol_type = other DNA

SEQ ID NO: 77411 - DNA, 120 bp, synthetic construct; identical to SEQ ID NO: 47457
  source 1..120: mol_type = other DNA

SEQ ID NO: 77412 - DNA, 120 bp, synthetic construct; identical to SEQ ID NO: 47458
  source 1..120: mol_type = other DNA

SEQ ID NO: 77413 - DNA, 120 bp, synthetic construct; identical to SEQ ID NO: 47459
  source 1..120: mol_type = other DNA

SEQ ID NO: 77414 - DNA, 120 bp, synthetic construct; identical to SEQ ID NO: 47460
  source 1..120: mol_type = other DNA

SEQ ID NO: 77415 - DNA, 120 bp, synthetic construct; identical to SEQ ID NO: 13328
  source 1..120: mol_type = other DNA

SEQ ID NO: 77416 - DNA, 120 bp, synthetic construct; identical to SEQ ID NO: 47462
  source 1..120: mol_type = other DNA

SEQ ID NO: 77417 - DNA, 120 bp, synthetic construct; identical to SEQ ID NO: 47463
  source 1..120: mol_type = other DNA

SEQ ID NO: 77418 - DNA, 120 bp, synthetic construct; identical to SEQ ID NO: 13329
  source 1..120: mol_type = other DNA

SEQ ID NO: 77419 - DNA, 120 bp, synthetic construct; identical to SEQ ID NO: 47465
  source 1..120: mol_type = other DNA

SEQ ID NO: 77420 - DNA, 120 bp, synthetic construct; identical to SEQ ID NO: 47466
  source 1..120: mol_type = other DNA

SEQ ID NO: 77421 - DNA, 120 bp, synthetic construct; identical to SEQ ID NO: 47467
  source 1..120: mol_type = other DNA

SEQ ID NO: 77422 - DNA, 120 bp, synthetic construct; identical to SEQ ID NO: 47468
  source 1..120: mol_type = other DNA

SEQ ID NO: 77423 - DNA, 120 bp, synthetic construct; identical to SEQ ID NO: 13330
  source 1..120: mol_type = other DNA

SEQ ID NO: 77424 - DNA, 120 bp, synthetic construct; identical to SEQ ID NO: 47470
  source 1..120: mol_type = other DNA

SEQ ID NO: 77425 - DNA, 120 bp, synthetic construct; identical to SEQ ID NO: 47471
  source 1..120: mol_type = other DNA

SEQ ID NO: 77426 - DNA, 120 bp, synthetic construct; identical to SEQ ID NO: 47472
  source 1..120: mol_type = other DNA

SEQ ID NO: 77427 - DNA, 120 bp, synthetic construct; identical to SEQ ID NO: 13331
  source 1..120: mol_type = other DNA

SEQ ID NO: 77428 - DNA, 120 bp, synthetic construct; identical to SEQ ID NO: 47474
  source 1..120: mol_type = other DNA

SEQ ID NO: 77429 - DNA, 120 bp, synthetic construct; identical to SEQ ID NO: 47475
  source 1..120: mol_type = other DNA

SEQ ID NO: 77430 - DNA, 120 bp, synthetic construct; identical to SEQ ID NO: 47476
  source 1..120: mol_type = other DNA

SEQ ID NO: 77431 - DNA, 120 bp, synthetic construct; identical to SEQ ID NO: 47477
  source 1..120: mol_type = other DNA

SEQ ID NO: 77432 - DNA, 120 bp, synthetic construct; identical to SEQ ID NO: 13332
  source 1..120: mol_type = other DNA

SEQ ID NO: 77433 - DNA, 120 bp, synthetic construct; identical to SEQ ID NO: 47479
  source 1..120: mol_type = other DNA

SEQ ID NO: 77434 - DNA, 120 bp, synthetic construct; identical to SEQ ID NO: 47480
  source 1..120: mol_type = other DNA

SEQ ID NO: 77435 - DNA, 120 bp, synthetic construct; identical to SEQ ID NO: 13333
  source 1..120: mol_type = other DNA

SEQ ID NO: 77436 - DNA, 120 bp, synthetic construct; identical to SEQ ID NO: 47482
  source 1..120: mol_type = other DNA

SEQ ID NO: 77437 - DNA, 120 bp, synthetic construct; identical to SEQ ID NO: 47483
  source 1..120: mol_type = other DNA

SEQ ID NO: 77438 - DNA, 120 bp, synthetic construct; identical to SEQ ID NO: 47484
  source 1..120: mol_type = other DNA

SEQ ID NO: 77439 - DNA, 120 bp, synthetic construct; identical to SEQ ID NO: 47485
  source 1..120: mol_type = other DNA

SEQ ID NO: 77440 - DNA, 120 bp, synthetic construct; identical to SEQ ID NO: 13334
  source 1..120: mol_type = other DNA

SEQ ID NO: 77441 - DNA, 120 bp, synthetic construct; identical to SEQ ID NO: 47487
  source 1..120: mol_type = other DNA

SEQ ID NO: 77442 - DNA, 120 bp, synthetic construct; identical to SEQ ID NO: 47488
  source 1..120: mol_type = other DNA

SEQ ID NO: 77443 - DNA, 120 bp, synthetic construct; identical to SEQ ID NO: 47489
  source 1..120: mol_type = other DNA

SEQ ID NO: 77444 - DNA, 120 bp, synthetic construct; identical to SEQ ID NO: 13335
  source 1..120: mol_type = other DNA

SEQ ID NO: 77445 - DNA, 120 bp, synthetic construct; identical to SEQ ID NO: 47491
  source 1..120: mol_type = other DNA

SEQ ID NO: 77446 - DNA, 120 bp, synthetic construct; identical to SEQ ID NO: 47492
  source 1..120: mol_type = other DNA

SEQ ID NO: 77447 - DNA, 120 bp, synthetic construct; identical to SEQ ID NO: 5912
  source 1..120: mol_type = other DNA

SEQ ID NO: 77448 - DNA, 120 bp, synthetic construct; identical to SEQ ID NO: 47494
  source 1..120: mol_type = other DNA

SEQ ID NO: 77449 - DNA, 120 bp, synthetic construct; identical to SEQ ID NO: 47495
  source 1..120: mol_type = other DNA

SEQ ID NO: 77450 - DNA, 120 bp, synthetic construct; identical to SEQ ID NO: 47496
  source 1..120: mol_type = other DNA

SEQ ID NO: 77451 - DNA, 120 bp, synthetic construct; identical to SEQ ID NO: 13337
  source 1..120: mol_type = other DNA

SEQ ID NO: 77452 - DNA, 120 bp, synthetic construct; identical to SEQ ID NO: 47498
  source 1..120: mol_type = other DNA

SEQ ID NO: 77453 - DNA, 120 bp, synthetic construct; identical to SEQ ID NO: 47499
  source 1..120: mol_type = other DNA

SEQ ID NO: 77454 - DNA, 120 bp, synthetic construct; identical to SEQ ID NO: 47500
  source 1..120: mol_type = other DNA

SEQ ID NO: 77455 - DNA, 120 bp, synthetic construct; identical to SEQ ID NO: 13338
  source 1..120: mol_type = other DNA

SEQ ID NO: 77456 - DNA, 120 bp, synthetic construct; identical to SEQ ID NO: 47502
  source 1..120: mol_type = other DNA

SEQ ID NO: 77457 - DNA, 120 bp, synthetic construct; identical to SEQ ID NO: 47503
  source 1..120: mol_type = other DNA

SEQ ID NO: 77458 - DNA, 120 bp, synthetic construct; identical to SEQ ID NO: 47504
  source 1..120: mol_type = other DNA

SEQ ID NO: 77459 - DNA, 120 bp, synthetic construct; identical to SEQ ID NO: 47505
  source 1..120: mol_type = other DNA

SEQ ID NO: 77460 - DNA, 120 bp, synthetic construct; identical to SEQ ID NO: 13339
  source 1..120: mol_type = other DNA

SEQ ID NO: 77461 - DNA, 120 bp, synthetic construct; identical to SEQ ID NO: 47507
  source 1..120: mol_type = other DNA

SEQ ID NO: 77462 - DNA, 120 bp, synthetic construct; identical to SEQ ID NO: 47508
  source 1..120: mol_type = other DNA

SEQ ID NO: 77463 - DNA, 120 bp, synthetic construct; identical to SEQ ID NO: 47509
  source 1..120: mol_type = other DNA

SEQ ID NO: 77464 - DNA, 120 bp, synthetic construct; identical to SEQ ID NO: 13340
  source 1..120: mol_type = other DNA

SEQ ID NO: 77465 - DNA, 120 bp, synthetic construct; identical to SEQ ID NO: 47511
  source 1..120: mol_type = other DNA

SEQ ID NO: 77466 - DNA, 120 bp, synthetic construct; identical to SEQ ID NO: 47512
  source 1..120: mol_type = other DNA

SEQ ID NO: 77467 - DNA, 120 bp, synthetic construct; identical to SEQ ID NO: 13341
  source 1..120: mol_type = other DNA

SEQ ID NO: 77468 - DNA, 120 bp, synthetic construct; identical to SEQ ID NO: 47514
  source 1..120: mol_type = other DNA

SEQ ID NO: 77469 - DNA, 120 bp, synthetic construct; identical to SEQ ID NO: 47515
  source 1..120: mol_type = other DNA

SEQ ID NO: 77470 - DNA, 120 bp, synthetic construct; identical to SEQ ID NO: 47516
  source 1..120: mol_type = other DNA

SEQ ID NO: 77471 - DNA, 120 bp, synthetic construct; identical to SEQ ID NO: 47517
  source 1..120: mol_type = other DNA

SEQ ID NO: 77472 - DNA, 120 bp, synthetic construct; identical to SEQ ID NO: 13342
  source 1..120: mol_type = other DNA

SEQ ID NO: 77473 - DNA, 120 bp, synthetic construct; identical to SEQ ID NO: 47519
  source 1..120: mol_type = other DNA

SEQ ID NO: 77474 - DNA, 120 bp, synthetic construct; identical to SEQ ID NO: 47520
  source 1..120: mol_type = other DNA

SEQ ID NO: 77475 - DNA, 120 bp, synthetic construct; identical to SEQ ID NO: 47521
  source 1..120: mol_type = other DNA

SEQ ID NO: 77476 - DNA, 120 bp, synthetic construct; identical to SEQ ID NO: 13343
  source 1..120: mol_type = other DNA

SEQ ID NO: 77477 - DNA, 120 bp, synthetic construct; identical to SEQ ID NO: 47523
  source 1..120: mol_type = other DNA

SEQ ID NO: 77478 - DNA, 120 bp, synthetic construct; identical to SEQ ID NO: 47524
  source 1..120: mol_type = other DNA

SEQ ID NO: 77479 - DNA, 120 bp, synthetic construct; identical to SEQ ID NO: 47525
  source 1..120: mol_type = other DNA

SEQ ID NO: 77480 - DNA, 120 bp, synthetic construct; identical to SEQ ID NO: 13344
  source 1..120: mol_type = other DNA

SEQ ID NO: 77481 - DNA, 120 bp, synthetic construct; identical to SEQ ID NO: 47527
  source 1..120: mol_type = other DNA

SEQ ID NO: 77482 - DNA, 120 bp, synthetic construct; identical to SEQ ID NO: 47528
  source 1..120: mol_type = other DNA

SEQ ID NO: 77483 - DNA, 120 bp, synthetic construct; identical to SEQ ID NO: 47529
  source 1..120: mol_type = other DNA

SEQ ID NO: 77484 - DNA, 120 bp, synthetic construct; identical to SEQ ID NO: 13345
  source 1..120: mol_type = other DNA

SEQ ID NO: 77485 - DNA, 120 bp, synthetic construct; identical to SEQ ID NO: 47531
  source 1..120: mol_type = other DNA

SEQ ID NO: 77486 - DNA, 120 bp, synthetic construct; identical to SEQ ID NO: 47532
  source 1..120: mol_type = other DNA

SEQ ID NO: 77487 - DNA, 120 bp, synthetic construct; identical to SEQ ID NO: 47533
  source 1..120: mol_type = other DNA

SEQ ID NO: 77488 - DNA, 120 bp, synthetic construct; identical to SEQ ID NO: 13346
  source 1..120: mol_type = other DNA

SEQ ID NO: 77489 - DNA, 120 bp, synthetic construct; identical to SEQ ID NO: 47535
  source 1..120: mol_type = other DNA

SEQ ID NO: 77490 - DNA, 120 bp, synthetic construct; identical to SEQ ID NO: 47536
  source 1..120: mol_type = other DNA

SEQ ID NO: 77491 - DNA, 120 bp, synthetic construct; identical to SEQ ID NO: 47537
  source 1..120: mol_type = other DNA

SEQ ID NO: 77492 - DNA, 120 bp, synthetic construct; identical to SEQ ID NO: 13347
  source 1..120: mol_type = other DNA

SEQ ID NO: 77493 - DNA, 120 bp, synthetic construct; identical to SEQ ID NO: 47539
  source 1..120: mol_type = other DNA

SEQ ID NO: 77494 - DNA, 120 bp, synthetic construct; identical to SEQ ID NO: 47540
  source 1..120: mol_type = other DNA

SEQ ID NO: 77495 - DNA, 120 bp, synthetic construct; identical to SEQ ID NO: 13348
  source 1..120: mol_type = other DNA

SEQ ID NO: 77496 - DNA, 120 bp, synthetic construct; identical to SEQ ID NO: 47542
  source 1..120: mol_type = other DNA

SEQ ID NO: 77497 - DNA, 120 bp, synthetic construct; identical to SEQ ID NO: 47543
  source 1..120: mol_type = other DNA

SEQ ID NO: 77498 - DNA, 120 bp, synthetic construct; identical to SEQ ID NO: 47544
  source 1..120: mol_type = other DNA

SEQ ID NO: 77499 - DNA, 120 bp, synthetic construct; identical to SEQ ID NO: 47545
  source 1..120: mol_type = other DNA

SEQ ID NO: 77500 - DNA, 120 bp, synthetic construct; identical to SEQ ID NO: 13349
  source 1..120: mol_type = other DNA

SEQ ID NO: 77501 - DNA, 120 bp, synthetic construct; identical to SEQ ID NO: 47547
  source 1..120: mol_type = other DNA

SEQ ID NO: 77502 - DNA, 120 bp, synthetic construct; identical to SEQ ID NO: 47548
  source 1..120: mol_type = other DNA

SEQ ID NO: 77503 - DNA, 120 bp, synthetic construct; identical to SEQ ID NO: 47549
  source 1..120: mol_type = other DNA

SEQ ID NO: 77504 - DNA, 120 bp, synthetic construct; identical to SEQ ID NO: 13350
  source 1..120: mol_type = other DNA

SEQ ID NO: 77505 - DNA, 120 bp, synthetic construct; identical to SEQ ID NO: 47551
  source 1..120: mol_type = other DNA

SEQ ID NO: 77506 - DNA, 120 bp, synthetic construct; identical to SEQ ID NO: 13351
  source 1..120: mol_type = other DNA

SEQ ID NO: 77507 - DNA, 120 bp, synthetic construct; identical to SEQ ID NO: 47553
  source 1..120: mol_type = other DNA

SEQ ID NO: 77508 - DNA, 120 bp, synthetic construct; identical to SEQ ID NO: 47554
  source 1..120: mol_type = other DNA

SEQ ID NO: 77509 - DNA, 120 bp, synthetic construct; identical to SEQ ID NO: 13352
  source 1..120: mol_type = other DNA

SEQ ID NO: 77510 - DNA, 120 bp, synthetic construct; identical to SEQ ID NO: 47556
  source 1..120: mol_type = other DNA

SEQ ID NO: 77511 - DNA, 120 bp, synthetic construct; identical to SEQ ID NO: 5927
  source 1..120: mol_type = other DNA

SEQ ID NO: 77512 - DNA, 120 bp, synthetic construct; identical to SEQ ID NO: 47558
  source 1..120: mol_type = other DNA

SEQ ID NO: 77513 - DNA, 120 bp, synthetic construct; identical to SEQ ID NO: 47559
  source 1..120: mol_type = other DNA

SEQ ID NO: 77514 - DNA, 120 bp, synthetic construct; identical to SEQ ID NO: 47560
  source 1..120: mol_type = other DNA

SEQ ID NO: 77515 - DNA, 120 bp, synthetic construct; identical to SEQ ID NO: 13354
  source 1..120: mol_type = other DNA

SEQ ID NO: 77516 - DNA, 120 bp, synthetic construct; identical to SEQ ID NO: 5928
  source 1..120: mol_type = other DNA

SEQ ID NO: 77517 - DNA, 120 bp, synthetic construct; identical to SEQ ID NO: 13355
  source 1..120: mol_type = other DNA

SEQ ID NO: 77518 - DNA, 120 bp, synthetic construct; identical to SEQ ID NO: 13356
  source 1..120: mol_type = other DNA

SEQ ID NO: 77519 - DNA, 120 bp, synthetic construct; identical to SEQ ID NO: 47565
  source 1..120: mol_type = other DNA

SEQ ID NO: 77520 - DNA, 120 bp, synthetic construct; identical to SEQ ID NO: 5929
  source 1..120: mol_type = other DNA

SEQ ID NO: 77521 - DNA, 120 bp, synthetic construct; identical to SEQ ID NO: 13357
  source 1..120: mol_type = other DNA

SEQ ID NO: 77522 - DNA, 120 bp, synthetic construct; identical to SEQ ID NO: 47568
  source 1..120: mol_type = other DNA

SEQ ID NO: 77523 - DNA, 120 bp, synthetic construct; identical to SEQ ID NO: 47569
  source 1..120: mol_type = other DNA

SEQ ID NO: 77524 - DNA, 120 bp, synthetic construct; identical to SEQ ID NO: 13358
  source 1..120: mol_type = other DNA

SEQ ID NO: 77525 - DNA, 120 bp, synthetic construct; identical to SEQ ID NO: 47571
  source 1..120: mol_type = other DNA

SEQ ID NO: 77526 - DNA, 120 bp, synthetic construct; identical to SEQ ID NO: 47572
  source 1..120: mol_type = other DNA

SEQ ID NO: 77527 - DNA, 120 bp, synthetic construct; identical to SEQ ID NO: 47573
  source 1..120: mol_type = other DNA

SEQ ID NO: 77528 - DNA, 120 bp, synthetic construct; identical to SEQ ID NO: 13359
  source 1..120: mol_type = other DNA

SEQ ID NO: 77529 - DNA, 120 bp, synthetic construct; identical to SEQ ID NO: 47575
  source 1..120: mol_type = other DNA

SEQ ID NO: 77530 - DNA, 120 bp, synthetic construct; identical to SEQ ID NO: 13360
  source 1..120: mol_type = other DNA

SEQ ID NO: 77531 - DNA, 120 bp, synthetic construct; identical to SEQ ID NO: 47577
  source 1..120: mol_type = other DNA

SEQ ID NO: 77532 - DNA, 120 bp, synthetic construct; identical to SEQ ID NO: 47578
  source 1..120: mol_type = other DNA

SEQ ID NO: 77533 - DNA, 120 bp, synthetic construct; identical to SEQ ID NO: 47579
  source 1..120: mol_type = other DNA

SEQ ID NO: 77534 - DNA, 120 bp, synthetic construct; identical to SEQ ID NO: 13361
  source 1..120: mol_type = other DNA

SEQ ID NO: 77535 - DNA, 120 bp, synthetic construct; identical to SEQ ID NO: 47581
  source 1..120: mol_type = other DNA

SEQ ID NO: 77536 - DNA, 120 bp, synthetic construct; identical to SEQ ID NO: 47582
  source 1..120: mol_type = other DNA

SEQ ID NO: 77537 - DNA, 120 bp, synthetic construct; identical to SEQ ID NO: 47583
  source 1..120: mol_type = other DNA

SEQ ID NO: 77538 - DNA, 120 bp, synthetic construct; identical to SEQ ID NO: 13362
  source 1..120: mol_type = other DNA

SEQ ID NO: 77539 - DNA, 120 bp, synthetic construct; identical to SEQ ID NO: 47585
  source 1..120: mol_type = other DNA

SEQ ID NO: 77540 - DNA, 120 bp, synthetic construct; identical to SEQ ID NO: 47586
  source 1..120: mol_type = other DNA

SEQ ID NO: 77541 - DNA, 120 bp, synthetic construct; identical to SEQ ID NO: 47587
  source 1..120: mol_type = other DNA

SEQ ID NO: 77542 - DNA, 120 bp, synthetic construct; identical to SEQ ID NO: 13363
  source 1..120: mol_type = other DNA

SEQ ID NO: 77543 - DNA, 120 bp, synthetic construct; identical to SEQ ID NO: 47589
  source 1..120: mol_type = other DNA

SEQ ID NO: 77544 - DNA, 120 bp, synthetic construct; identical to SEQ ID NO: 47590
  source 1..120: mol_type = other DNA

SEQ ID NO: 77545 - DNA, 120 bp, synthetic construct; identical to SEQ ID NO: 47591
  source 1..120: mol_type = other DNA

SEQ ID NO: 77546 - DNA, 120 bp, synthetic construct; identical to SEQ ID NO: 5936
  source 1..120: mol_type = other DNA

SEQ ID NO: 77547 - DNA, 120 bp, synthetic construct; identical to SEQ ID NO: 47593
  source 1..120: mol_type = other DNA

SEQ ID NO: 77548 - DNA, 120 bp, synthetic construct; identical to SEQ ID NO: 47594
  source 1..120: mol_type = other DNA

SEQ ID NO: 77549 - DNA, 120 bp, synthetic construct; identical to SEQ ID NO: 47595
  source 1..120: mol_type = other DNA

SEQ ID NO: 77550 - DNA, 120 bp, synthetic construct; identical to SEQ ID NO: 47596
  source 1..120: mol_type = other DNA

SEQ ID NO: 77551 - DNA, 120 bp, synthetic construct; identical to SEQ ID NO: 13365
  source 1..120: mol_type = other DNA

SEQ ID NO: 77552 - DNA, 120 bp, synthetic construct; identical to SEQ ID NO: 47598
  source 1..120: mol_type = other DNA

SEQ ID NO: 77553 - DNA, 120 bp, synthetic construct; identical to SEQ ID NO: 47599
  source 1..120: mol_type = other DNA

SEQ ID NO: 77554 - DNA, 120 bp, synthetic construct; identical to SEQ ID NO: 47600
  source 1..120: mol_type = other DNA

SEQ ID NO: 77555 - DNA, 120 bp, synthetic construct; identical to SEQ ID NO: 13366
  source 1..120: mol_type = other DNA

SEQ ID NO: 77556 - DNA, 120 bp, synthetic construct; identical to SEQ ID NO: 47602
  source 1..120: mol_type = other DNA

SEQ ID NO: 77557 - DNA, 120 bp, synthetic construct; identical to SEQ ID NO: 47603
  source 1..120: mol_type = other DNA

SEQ ID NO: 77558 - DNA, 120 bp, synthetic construct; identical to SEQ ID NO: 47604
  source 1..120: mol_type = other DNA

SEQ ID NO: 77559 - DNA, 120 bp, synthetic construct; identical to SEQ ID NO: 13367
  source 1..120: mol_type = other DNA

SEQ ID NO: 77560 - DNA, 120 bp, synthetic construct; identical to SEQ ID NO: 47606
  source 1..120: mol_type = other DNA

SEQ ID NO: 77561 - DNA, 120 bp, synthetic construct; identical to SEQ ID NO: 47607
  source 1..120: mol_type = other DNA

SEQ ID NO: 77562 - DNA, 120 bp, synthetic construct; identical to SEQ ID NO: 13368
  source 1..120: mol_type = other DNA

SEQ ID NO: 77563 - DNA, 120 bp, synthetic construct; identical to SEQ ID NO: 47609
  source 1..120: mol_type = other DNA

SEQ ID NO: 77564 - DNA, 120 bp, synthetic construct; identical to SEQ ID NO: 47610
  source 1..120: mol_type = other DNA

SEQ ID NO: 77565 - DNA, 120 bp, synthetic construct; identical to SEQ ID NO: 47611
  source 1..120: mol_type = other DNA

SEQ ID NO: 77566 - DNA, 120 bp, synthetic construct; identical to SEQ ID NO: 47612
  source 1..120: mol_type = other DNA

SEQ ID NO: 77567 - DNA, 120 bp, synthetic construct; identical to SEQ ID NO: 13369
  source 1..120: mol_type = other DNA

SEQ ID NO: 77568 - DNA, 120 bp, synthetic construct; identical to SEQ ID NO: 47614
  source 1..120: mol_type = other DNA

SEQ ID NO: 77569 - DNA, 120 bp, synthetic construct; identical to SEQ ID NO: 47615
  source 1..120: mol_type = other DNA

SEQ ID NO: 77570 - DNA, 120 bp, synthetic construct; identical to SEQ ID NO: 13370
  source 1..120: mol_type = other DNA

SEQ ID NO: 77571 - DNA, 120 bp, synthetic construct; identical to SEQ ID NO: 47617
  source 1..120: mol_type = other DNA

SEQ ID NO: 77572 - DNA, 120 bp, synthetic construct; identical to SEQ ID NO: 47618
  source 1..120: mol_type = other DNA

SEQ ID NO: 77573 - DNA, 120 bp, synthetic construct; identical to SEQ ID NO: 47619
  source 1..120: mol_type = other DNA

SEQ ID NO: 77574 - DNA, 120 bp, synthetic construct; identical to SEQ ID NO: 13371
  source 1..120: mol_type = other DNA

SEQ ID NO: 77575 - DNA, 120 bp, synthetic construct; identical to SEQ ID NO: 47621
  source 1..120: mol_type = other DNA

SEQ ID NO: 77576 - DNA, 120 bp, synthetic construct; identical to SEQ ID NO: 47622
  source 1..120: mol_type = other DNA

SEQ ID NO: 77577 - DNA, 120 bp, synthetic construct; identical to SEQ ID NO: 47623
  source 1..120: mol_type = other DNA

SEQ ID NO: 77578 - DNA, 120 bp, synthetic construct; identical to SEQ ID NO: 13372
  source 1..120: mol_type = other DNA

SEQ ID NO: 77579 - DNA, 120 bp, synthetic construct; identical to SEQ ID NO: 47625
  source 1..120: mol_type = other DNA

SEQ ID NO: 77580 - DNA, 120 bp, synthetic construct; identical to SEQ ID NO: 47626
  source 1..120: mol_type = other DNA

SEQ ID NO: 77581 - DNA, 120 bp, synthetic construct; identical to SEQ ID NO: 47627
  source 1..120: mol_type = other DNA

SEQ ID NO: 77582 - DNA, 120 bp, synthetic construct; identical to SEQ ID NO: 13373
  source 1..120: mol_type = other DNA

SEQ ID NO: 77583 - DNA, 120 bp, synthetic construct; identical to SEQ ID NO: 47629
  source 1..120: mol_type = other DNA

SEQ ID NO: 77584 - DNA, 120 bp, synthetic construct; identical to SEQ ID NO: 47630
  source 1..120: mol_type = other DNA

SEQ ID NO: 77585 - DNA, 120 bp, synthetic construct; identical to SEQ ID NO: 47631
  source 1..120: mol_type = other DNA

SEQ ID NO: 77586 - DNA, 120 bp, synthetic construct; identical to SEQ ID NO: 47632
  source 1..120: mol_type = other DNA

SEQ ID NO: 77587 - DNA, 120 bp, synthetic construct; identical to SEQ ID NO: 13374
  source 1..120: mol_type = other DNA

SEQ ID NO: 77588 - DNA, 120 bp, synthetic construct; identical to SEQ ID NO: 47634
  source 1..120: mol_type = other DNA

SEQ ID NO: 77589 - DNA, 120 bp, synthetic construct; identical to SEQ ID NO: 47635
  source 1..120: mol_type = other DNA

SEQ ID NO: 77590 - DNA, 120 bp, synthetic construct; identical to SEQ ID NO: 47636
  source 1..120: mol_type = other DNA

SEQ ID NO: 77591 - DNA, 120 bp, synthetic construct; identical to SEQ ID NO: 47637
  source 1..120: mol_type = other DNA

SEQ ID NO: 77592 - DNA, 120 bp, synthetic construct; identical to SEQ ID NO: 13375
  source 1..120: mol_type = other DNA

SEQ ID NO: 77593 - DNA, 120 bp, synthetic construct; identical to SEQ ID NO: 47639
  source 1..120: mol_type = other DNA

SEQ ID NO: 77594 - DNA, 120 bp, synthetic construct; identical to SEQ ID NO: 47640
  source 1..120: mol_type = other DNA

SEQ ID NO: 77595 - DNA, 120 bp, synthetic construct; identical to SEQ ID NO: 13376
  source 1..120: mol_type = other DNA

SEQ ID NO: 77596 - DNA, 120 bp, synthetic construct; identical to SEQ ID NO: 47642
  source 1..120: mol_type = other DNA

SEQ ID NO: 77597 - DNA, 120 bp, synthetic construct; identical to SEQ ID NO: 47643
  source 1..120: mol_type = other DNA

SEQ ID NO: 77598 - DNA, 120 bp, synthetic construct; identical to SEQ ID NO: 47644
  source 1..120: mol_type = other DNA

SEQ ID NO: 77599 - DNA, 120 bp, synthetic construct; identical to SEQ ID NO: 47645
  source 1..120: mol_type = other DNA

SEQ ID NO: 77600 - DNA, 120 bp, synthetic construct; identical to SEQ ID NO: 13377
  source 1..120: mol_type = other DNA

SEQ ID NO: 77601 - DNA, 120 bp, synthetic construct; identical to SEQ ID NO: 47647
  source 1..120: mol_type = other DNA

SEQ ID NO: 77602 - DNA, 120 bp, synthetic construct; identical to SEQ ID NO: 47648
  source 1..120: mol_type = other DNA

SEQ ID NO: 77603 - DNA, 120 bp, synthetic construct; identical to SEQ ID NO: 13378
  source 1..120: mol_type = other DNA

SEQ ID NO: 77604 - DNA, 120 bp, synthetic construct; identical to SEQ ID NO: 47650
  source 1..120: mol_type = other DNA

SEQ ID NO: 77605 - DNA, 120 bp, synthetic construct; identical to SEQ ID NO: 47651
  source 1..120: mol_type = other DNA

SEQ ID NO: 77606 - DNA, 120 bp, synthetic construct; identical to SEQ ID NO: 47652
  source 1..120: mol_type = other DNA

SEQ ID NO: 77607 - DNA, 120 bp, synthetic construct; identical to SEQ ID NO: 47653
  source 1..120: mol_type = other DNA

SEQ ID NO: 77608 - DNA, 120 bp, synthetic construct; identical to SEQ ID NO: 13379
  source 1..120: mol_type = other DNA

SEQ ID NO: 77609 - DNA, 120 bp, synthetic construct; identical to SEQ ID NO: 47655
  source 1..120: mol_type = other DNA

SEQ ID NO: 77610 - DNA, 120 bp, synthetic construct; identical to SEQ ID NO: 47656
  source 1..120: mol_type = other DNA

SEQ ID NO: 77611 - DNA, 120 bp, synthetic construct; identical to SEQ ID NO: 13380
  source 1..120: mol_type = other DNA

SEQ ID NO: 77612 - DNA, 120 bp, synthetic construct; identical to SEQ ID NO: 47658
  source 1..120: mol_type = other DNA

SEQ ID NO: 77613 - DNA, 120 bp, synthetic construct; identical to SEQ ID NO: 47659
  source 1..120: mol_type = other DNA

SEQ ID NO: 77614 - DNA, 120 bp, synthetic construct; identical to SEQ ID NO: 47660
  source 1..120: mol_type = other DNA

SEQ ID NO: 77615 - DNA, 120 bp, synthetic construct; identical to SEQ ID NO: 13381
  source 1..120: mol_type = other DNA

SEQ ID NO: 77616 - DNA, 120 bp, synthetic construct; identical to SEQ ID NO: 47662
  source 1..120: mol_type = other DNA

SEQ ID NO: 77617 - DNA, 120 bp, synthetic construct; identical to SEQ ID NO: 47663
  source 1..120: mol_type = other DNA

SEQ ID NO: 77618 - DNA, 120 bp, synthetic construct; identical to SEQ ID NO: 47664
  source 1..120: mol_type = other DNA

SEQ ID NO: 77619 - DNA, 120 bp, synthetic construct; identical to SEQ ID NO: 47665
  source 1..120: mol_type = other DNA

SEQ ID NO: 77620 - DNA, 120 bp, synthetic construct; identical to SEQ ID NO: 13382
  source 1..120: mol_type = other DNA

SEQ ID NO: 77621 - DNA, 120 bp, synthetic construct; identical to SEQ ID NO: 47667
  source 1..120: mol_type = other DNA

SEQ ID NO: 77622 - DNA, 120 bp, synthetic construct; identical to SEQ ID NO: 47668
  source 1..120: mol_type = other DNA

SEQ ID NO: 77623 - DNA, 120 bp, synthetic construct; identical to SEQ ID NO: 13383
  source 1..120: mol_type = other DNA

SEQ ID NO: 77624 - DNA, 120 bp, synthetic construct; identical to SEQ ID NO: 47670
  source 1..120: mol_type = other DNA

SEQ ID NO: 77625 - DNA, 120 bp, synthetic construct; identical to SEQ ID NO: 13384
  source 1..120: mol_type = other DNA

SEQ ID NO: 77626 - DNA, 120 bp, synthetic construct; identical to SEQ ID NO: 47672
  source 1..120: mol_type = other DNA

SEQ ID NO: 77627 - DNA, 120 bp, synthetic construct; identical to SEQ ID NO: 47673
  source 1..120: mol_type = other DNA

SEQ ID NO: 77628 - DNA, 120 bp, synthetic construct; identical to SEQ ID NO: 13385
  source 1..120: mol_type = other DNA

SEQ ID NO: 77629 - DNA, 120 bp, synthetic construct; identical to SEQ ID NO: 47675
  source 1..120: mol_type = other DNA

SEQ ID NO: 77630 - DNA, 120 bp, synthetic construct; identical to SEQ ID NO: 47676
  source 1..120: mol_type = other DNA

SEQ ID NO: 77631 - DNA, 120 bp, synthetic construct; identical to SEQ ID NO: 47677
  source 1..120: mol_type = other DNA

SEQ ID NO: 77632 - DNA, 120 bp, synthetic construct; identical to SEQ ID NO: 13386
  source 1..120: mol_type = other DNA

SEQ ID NO: 77633 - DNA, 120 bp, synthetic construct; identical to SEQ ID NO: 47679
  source 1..120: mol_type = other DNA

SEQ ID NO: 77634 - DNA, 120 bp, synthetic construct; identical to SEQ ID NO: 47680
  source 1..120: mol_type = other DNA

SEQ ID NO: 77635 - DNA, 120 bp, synthetic construct; identical to SEQ ID NO: 47681
  source 1..120: mol_type = other DNA

SEQ ID NO: 77636 - DNA, 120 bp, synthetic construct; identical to SEQ ID NO: 13387
  source 1..120: mol_type = other DNA

SEQ ID NO: 77637 - DNA, 120 bp, synthetic construct; identical to SEQ ID NO: 47683
  source 1..120: mol_type = other DNA

SEQ ID NO: 77638 - DNA, 120 bp, synthetic construct; identical to SEQ ID NO: 47684
  source 1..120: mol_type = other DNA

SEQ ID NO: 77639 - DNA, 120 bp, synthetic construct; identical to SEQ ID NO: 47685
  source 1..120: mol_type = other DNA

SEQ ID NO: 77640 - DNA, 120 bp, synthetic construct; identical to SEQ ID NO: 13388
  source 1..120: mol_type = other DNA

SEQ ID NO: 77641 - DNA, 120 bp, synthetic construct; identical to SEQ ID NO: 47687
  source 1..120: mol_type = other DNA

SEQ ID NO: 77642 - DNA, 120 bp, synthetic construct; identical to SEQ ID NO: 47688
  source 1..120: mol_type = other DNA

SEQ ID NO: 77643 - DNA, 120 bp, synthetic construct; identical to SEQ ID NO: 47689
  source 1..120: mol_type = other DNA

SEQ ID NO: 77644 - DNA, 120 bp, synthetic construct; identical to SEQ ID NO: 47690
  source 1..120: mol_type = other DNA

SEQ ID NO: 77645 - DNA, 120 bp, synthetic construct; identical to SEQ ID NO: 13389
  source 1..120: mol_type = other DNA

SEQ ID NO: 77646 - DNA, 120 bp, synthetic construct; identical to SEQ ID NO: 47692
  source 1..120: mol_type = other DNA

SEQ ID NO: 77647 - DNA, 120 bp, synthetic construct; identical to SEQ ID NO: 47693
  source 1..120: mol_type = other DNA

SEQ ID NO: 77648 - DNA, 120 bp, synthetic construct; identical to SEQ ID NO: 47694
  source 1..120: mol_type = other DNA

SEQ ID NO: 77649 - DNA, 120 bp, synthetic construct; identical to SEQ ID NO: 13390
  source 1..120: mol_type = other DNA

SEQ ID NO: 77650 - DNA, 120 bp, synthetic construct; identical to SEQ ID NO: 47696
  source 1..120: mol_type = other DNA

SEQ ID NO: 77651 - DNA, 120 bp, synthetic construct; identical to SEQ ID NO: 47697
  source 1..120: mol_type = other DNA

SEQ ID NO: 77652 - DNA, 120 bp, synthetic construct; identical to SEQ ID NO: 13391
  source 1..120: mol_type = other DNA

SEQ ID NO: 77653 - DNA, 120 bp, synthetic construct; identical to SEQ ID NO: 47699
  source 1..120: mol_type = other DNA

SEQ ID NO: 77654 - DNA, 120 bp, synthetic construct; identical to SEQ ID NO: 47700
  source 1..120: mol_type = other DNA

SEQ ID NO: 77655 - DNA, 120 bp, synthetic construct; identical to SEQ ID NO: 47701
  source 1..120: mol_type = other DNA

SEQ ID NO: 77656 - DNA, 120 bp, synthetic construct; identical to SEQ ID NO: 13392
  source 1..120: mol_type = other DNA

SEQ ID NO: 77657 - DNA, 120 bp, synthetic construct; identical to SEQ ID NO: 47703
  source 1..120: mol_type = other DNA

SEQ ID NO: 77658 - DNA, 120 bp, synthetic construct; identical to SEQ ID NO: 47704
  source 1..120: mol_type = other DNA

SEQ ID NO: 77659 - DNA, 120 bp, synthetic construct; identical to SEQ ID NO: 47705
  source 1..120: mol_type = other DNA

SEQ ID NO: 77660 - DNA, 120 bp, synthetic construct; identical to SEQ ID NO: 13393
  source 1..120: mol_type = other DNA

SEQ ID NO: 77661 - DNA, 120 bp, synthetic construct; identical to SEQ ID NO: 47707
  source 1..120: mol_type = other DNA

SEQ ID NO: 77662 - DNA, 120 bp, synthetic construct; identical to SEQ ID NO: 47708
  source 1..120: mol_type = other DNA

SEQ ID NO: 77663 - DNA, 120 bp, synthetic construct; identical to SEQ ID NO: 47709
  source 1..120: mol_type = other DNA

SEQ ID NO: 77664 - DNA, 120 bp, synthetic construct; identical to SEQ ID NO: 13394
  source 1..120: mol_type = other DNA

SEQ ID NO: 77665 - DNA, 120 bp, synthetic construct; identical to SEQ ID NO: 47711
  source 1..120: mol_type = other DNA

SEQ ID NO: 77666 - DNA, 120 bp, synthetic construct; identical to SEQ ID NO: 47712
  source 1..120: mol_type = other DNA

SEQ ID NO: 77667 - DNA, 120 bp, synthetic construct; identical to SEQ ID NO: 47713
  source 1..120: mol_type = other DNA

SEQ ID NO: 77668 - DNA, 120 bp, synthetic construct; identical to SEQ ID NO: 13395
  source 1..120: mol_type = other DNA

SEQ ID NO: 77669 - DNA, 120 bp, synthetic construct; identical to SEQ ID NO: 47715
  source 1..120: mol_type = other DNA

SEQ ID NO: 77670 - DNA, 120 bp, synthetic construct; identical to SEQ ID NO: 47716
  source 1..120: mol_type = other DNA

SEQ ID NO: 77671 - DNA, 120 bp, synthetic construct; identical to SEQ ID NO: 47717
  source 1..120: mol_type = other DNA

SEQ ID NO: 77672 - DNA, 120 bp, synthetic construct; identical to SEQ ID NO: 47718
  source 1..120: mol_type = other DNA

SEQ ID NO: 77673 - DNA, 120 bp, synthetic construct; identical to SEQ ID NO: 13396
  source 1..120: mol_type = other DNA

SEQ ID NO: 77674 - DNA, 120 bp, synthetic construct; identical to SEQ ID NO: 47720
  source 1..120: mol_type = other DNA

SEQ ID NO: 77675 - DNA, 120 bp, synthetic construct; identical to SEQ ID NO: 47721
  source 1..120: mol_type = other DNA

SEQ ID NO: 77676 - DNA, 120 bp, synthetic construct; identical to SEQ ID NO: 47722
  source 1..120: mol_type = other DNA

SEQ ID NO: 77677 - DNA, 120 bp, synthetic construct; identical to SEQ ID NO: 13397
  source 1..120: mol_type = other DNA

SEQ ID NO: 77678 - DNA, 120 bp, synthetic construct; identical to SEQ ID NO: 47724
  source 1..120: mol_type = other DNA

SEQ ID NO: 77679 - DNA, 120 bp, synthetic construct; identical to SEQ ID NO: 47725
  source 1..120: mol_type = other DNA

SEQ ID NO: 77680 - DNA, 120 bp, synthetic construct; identical to SEQ ID NO: 47726
  source 1..120: mol_type = other DNA

SEQ ID NO: 77681 - DNA, 120 bp, synthetic construct; identical to SEQ ID NO: 13398
  source 1..120: mol_type = other DNA

SEQ ID NO: 77682 - DNA, 120 bp, synthetic construct; identical to SEQ ID NO: 47728
  source 1..120: mol_type = other DNA

SEQ ID NO: 77683 - DNA, 120 bp, synthetic construct; identical to SEQ ID NO: 47729
  source 1..120: mol_type = other DNA

SEQ ID NO: 77684 - DNA, 120 bp, synthetic construct; identical to SEQ ID NO: 47730
  source 1..120: mol_type = other DNA

SEQ ID NO: 77685 - DNA, 120 bp, synthetic construct; identical to SEQ ID NO: 13399
  source 1..120: mol_type = other DNA

SEQ ID NO: 77686 - DNA, 120 bp, synthetic construct; identical to SEQ ID NO: 47732
  source 1..120: mol_type = other DNA

SEQ ID NO: 77687 - DNA, 120 bp, synthetic construct; identical to SEQ ID NO: 47733
  source 1..120: mol_type = other DNA

SEQ ID NO: 77688 - DNA, 120 bp, synthetic construct; identical to SEQ ID NO: 47734
  source 1..120: mol_type = other DNA

SEQ ID NO: 77689 - DNA, 120 bp, synthetic construct; identical to SEQ ID NO: 47735
  source 1..120: mol_type = other DNA

SEQ ID NO: 77690 - DNA, 120 bp, synthetic construct; identical to SEQ ID NO: 13400
  source 1..120: mol_type = other DNA

SEQ ID NO: 77691 - DNA, 120 bp, synthetic construct; identical to SEQ ID NO: 47737
  source 1..120: mol_type = other DNA

SEQ ID NO: 77692 - DNA, 120 bp, synthetic construct; identical to SEQ ID NO: 47738
  source 1..120: mol_type = other DNA

SEQ ID NO: 77693 - DNA, 120 bp, synthetic construct; identical to SEQ ID NO: 47739
  source 1..120: mol_type = other DNA

SEQ ID NO: 77694 - DNA, 120 bp, synthetic construct; identical to SEQ ID NO: 13401
  source 1..120: mol_type = other DNA

SEQ ID NO: 77695 - DNA, 120 bp, synthetic construct; identical to SEQ ID NO: 47741
  source 1..120: mol_type = other DNA

SEQ ID NO: 77696 - DNA, 120 bp, synthetic construct; identical to SEQ ID NO: 47742
  source 1..120: mol_type = other DNA

SEQ ID NO: 77697 - DNA, 120 bp, synthetic construct; identical to SEQ ID NO: 13402
  source 1..120: mol_type = other DNA

SEQ ID NO: 77698 - DNA, 120 bp, synthetic construct; identical to SEQ ID NO: 47744
  source 1..120: mol_type = other DNA

SEQ ID NO: 77699 - DNA, 120 bp, synthetic construct; identical to SEQ ID NO: 47745
  source 1..120: mol_type = other DNA

SEQ ID NO: 77700 - DNA, 120 bp, synthetic construct; identical to SEQ ID NO: 47746
  source 1..120: mol_type = other DNA

SEQ ID NO: 77701 - DNA, 120 bp, synthetic construct; identical to SEQ ID NO: 47747
  source 1..120: mol_type = other DNA

SEQ ID NO: 77702 - DNA, 120 bp, synthetic construct; identical to SEQ ID NO: 13403
  source 1..120: mol_type = other DNA

SEQ ID NO: 77703 - DNA, 120 bp, synthetic construct; identical to SEQ ID NO: 47749
  source 1..120: mol_type = other DNA

SEQ ID NO: 77704 - DNA, 120 bp, synthetic construct; identical to SEQ ID NO: 47750
  source 1..120: mol_type = other DNA

SEQ ID NO: 77705 - DNA, 120 bp, synthetic construct; identical to SEQ ID NO: 13404
  source 1..120: mol_type = other DNA

SEQ ID NO: 77706 - DNA, 120 bp, synthetic construct; identical to SEQ ID NO: 47752
  source 1..120: mol_type = other DNA

SEQ ID NO: 77707 - DNA, 120 bp, synthetic construct; identical to SEQ ID NO: 47753
  source 1..120: mol_type = other DNA

SEQ ID NO: 77708 - DNA, 120 bp, synthetic construct; identical to SEQ ID NO: 47754
  source 1..120: mol_type = other DNA

SEQ ID NO: 77709 - DNA, 120 bp, synthetic construct; identical to SEQ ID NO: 47755
  source 1..120: mol_type = other DNA

SEQ ID NO: 77710 - DNA, 120 bp, synthetic construct; identical to SEQ ID NO: 13405
  source 1..120: mol_type = other DNA

SEQ ID NO: 77711 - DNA, 120 bp, synthetic construct; identical to SEQ ID NO: 47757
  source 1..120: mol_type = other DNA

SEQ ID NO: 77712 - DNA, 120 bp, synthetic construct; identical to SEQ ID NO: 47758
  source 1..120: mol_type = other DNA

SEQ ID NO: 77713 - DNA, 120 bp, synthetic construct; identical to SEQ ID NO: 47759
  source 1..120: mol_type = other DNA

SEQ ID NO: 77714 - DNA, 120 bp, synthetic construct; identical to SEQ ID NO: 13406
  source 1..120: mol_type = other DNA

SEQ ID NO: 77715 - DNA, 120 bp, synthetic construct; identical to SEQ ID NO: 47761
  source 1..120: mol_type = other DNA

SEQ ID NO: 77716 - DNA, 120 bp, synthetic construct; identical to SEQ ID NO: 47762
  source 1..120: mol_type = other DNA

SEQ ID NO: 77717 - DNA, 120 bp, synthetic construct; identical to SEQ ID NO: 47763
  source 1..120: mol_type = other DNA

SEQ ID NO: 77718 - DNA, 120 bp, synthetic construct; identical to SEQ ID NO: 13407
  source 1..120: mol_type = other DNA

SEQ ID NO: 77719 - DNA, 120 bp, synthetic construct; identical to SEQ ID NO: 47765
  source 1..120: mol_type = other DNA

SEQ ID NO: 77720 - DNA, 120 bp, synthetic construct; identical to SEQ ID NO: 47766
  source 1..120: mol_type = other DNA

SEQ ID NO: 77721 - DNA, 120 bp, synthetic construct; identical to SEQ ID NO: 47767
  source 1..120: mol_type = other DNA

SEQ ID NO: 77722 - DNA, 120 bp, synthetic construct; identical to SEQ ID NO: 13408
  source 1..120: mol_type = other DNA

SEQ ID NO: 77723 - DNA, 120 bp, synthetic construct; identical to SEQ ID NO: 47769
  source 1..120: mol_type = other DNA

SEQ ID NO: 77724 - DNA, 120 bp, synthetic construct; identical to SEQ ID NO: 47770
  source 1..120: mol_type = other DNA

SEQ ID NO: 77725 - DNA, 120 bp, synthetic construct; identical to SEQ ID NO: 47771
  source 1..120: mol_type = other DNA

SEQ ID NO: 77726 - DNA, 120 bp, synthetic construct; identical to SEQ ID NO: 13409
  source 1..120: mol_type = other DNA

SEQ ID NO: 77727 - DNA, 120 bp, synthetic construct; identical to SEQ ID NO: 47773
  source 1..120: mol_type = other DNA

SEQ ID NO: 77728 - DNA, 120 bp, synthetic construct; identical to SEQ ID NO: 47774
  source 1..120: mol_type = other DNA

SEQ ID NO: 77729 - DNA, 120 bp, synthetic construct; identical to SEQ ID NO: 47775
  source 1..120: mol_type = other DNA

SEQ ID NO: 77730 - DNA, 120 bp, synthetic construct; identical to SEQ ID NO: 13410
  source 1..120: mol_type = other DNA

SEQ ID NO: 77731 - DNA, 120 bp, synthetic construct; identical to SEQ ID NO: 47777
  source 1..120: mol_type = other DNA

SEQ ID NO: 77732 - DNA, 120 bp, synthetic construct; identical to SEQ ID NO: 47778
  source 1..120: mol_type = other DNA

SEQ ID NO: 77733 - DNA, 120 bp, synthetic construct; identical to SEQ ID NO: 47779
  source 1..120: mol_type = other DNA

SEQ ID NO: 77734 - DNA, 120 bp, synthetic construct; identical to SEQ ID NO: 47780
  source 1..120: mol_type = other DNA

SEQ ID NO: 77735 - DNA, 120 bp, synthetic construct; identical to SEQ ID NO: 13411
  source 1..120: mol_type = other DNA

SEQ ID NO: 77736 - DNA, 120 bp, synthetic construct; identical to SEQ ID NO: 47782
  source 1..120: mol_type = other DNA

SEQ ID NO: 77737 - DNA, 120 bp, synthetic construct; identical to SEQ ID NO: 13412
  source 1..120: mol_type = other DNA

SEQ ID NO: 77738 - DNA, 120 bp, synthetic construct; identical to SEQ ID NO: 47784
  source 1..120: mol_type = other DNA

SEQ ID NO: 77739 - DNA, 120 bp, synthetic construct; identical to SEQ ID NO: 47785
  source 1..120: mol_type = other DNA

SEQ ID NO: 77740 - DNA, 120 bp, synthetic construct; identical to SEQ ID NO: 13413
  source 1..120: mol_type = other DNA

SEQ ID NO: 77741 - DNA, 120 bp, synthetic construct; identical to SEQ ID NO: 47787
  source 1..120: mol_type = other DNA

SEQ ID NO: 77742 - DNA, 120 bp, synthetic construct; identical to SEQ ID NO: 47788
  source 1..120: mol_type = other DNA

SEQ ID NO: 77743 - DNA, 120 bp, synthetic construct; identical to SEQ ID NO: 47789
  source 1..120: mol_type = other DNA

SEQ ID NO: 77744 - DNA, 120 bp, synthetic construct; identical to SEQ ID NO: 13414
  source 1..120: mol_type = other DNA

SEQ ID NO: 77745 - DNA, 120 bp, synthetic construct; identical to SEQ ID NO: 47791
  source 1..120: mol_type = other DNA

SEQ ID NO: 77746 - DNA, 120 bp, synthetic construct; identical to SEQ ID NO: 47792
  source 1..120: mol_type = other DNA

SEQ ID NO: 77747 - DNA, 120 bp, synthetic construct; identical to SEQ ID NO: 13415
  source 1..120: mol_type = other DNA

SEQ ID NO: 77748 - DNA, 120 bp, synthetic construct; identical to SEQ ID NO: 47794
  source 1..120: mol_type = other DNA

SEQ ID NO: 77749 - DNA, 120 bp, synthetic construct; identical to SEQ ID NO: 47795
  source 1..120: mol_type = other DNA

SEQ ID NO: 77750 - DNA, 120 bp, synthetic construct; identical to SEQ ID NO: 47796
  source 1..120: mol_type = other DNA

SEQ ID NO: 77751 - DNA, 120 bp, synthetic construct; identical to SEQ ID NO: 13416
  source 1..120: mol_type = other DNA

SEQ ID NO: 77752 - DNA, 120 bp, synthetic construct; identical to SEQ ID NO: 47798
  source 1..120: mol_type = other DNA

SEQ ID NO: 77753 - DNA, 120 bp, synthetic construct; identical to SEQ ID NO: 47799
  source 1..120: mol_type = other DNA

SEQ ID NO: 77754 - DNA, 120 bp, synthetic construct; identical to SEQ ID NO: 47800
  source 1..120: mol_type = other DNA

SEQ ID NO: 77755 - DNA, 120 bp, synthetic construct; identical to SEQ ID NO: 13417
  source 1..120: mol_type = other DNA

SEQ ID NO: 77756 - DNA, 120 bp, synthetic construct; identical to SEQ ID NO: 47802
  source 1..120: mol_type = other DNA

SEQ ID NO: 77757 - DNA, 120 bp, synthetic construct; identical to SEQ ID NO: 47803
  source 1..120: mol_type = other DNA

SEQ ID NO: 77758 - DNA, 120 bp, synthetic construct; identical to SEQ ID NO: 47804
  source 1..120: mol_type = other DNA

SEQ ID NO: 77759 - DNA, 120 bp, synthetic construct; identical to SEQ ID NO: 13418
  source 1..120: mol_type = other DNA

SEQ ID NO: 77760 - DNA, 120 bp, synthetic construct; identical to SEQ ID NO: 47806
  source 1..120: mol_type = other DNA

SEQ ID NO: 77761 - DNA, 120 bp, synthetic construct; identical to SEQ ID NO: 47807
  source 1..120: mol_type = other DNA

SEQ ID NO: 77762 - DNA, 120 bp, synthetic construct; identical to SEQ ID NO: 47808
  source 1..120: mol_type = other DNA

SEQ ID NO: 77763 - DNA, 120 bp, synthetic construct; identical to SEQ ID NO: 47809
  source 1..120: mol_type = other DNA

SEQ ID NO: 77764 - DNA, 120 bp, synthetic construct; identical to SEQ ID NO: 13419
  source 1..120: mol_type = other DNA

SEQ ID NO: 77765 - DNA, 120 bp, synthetic construct; identical to SEQ ID NO: 47811
  source 1..120: mol_type = other DNA

SEQ ID NO: 77766 - DNA, 120 bp, synthetic construct; identical to SEQ ID NO: 47812
  source 1..120: mol_type = other DNA

SEQ ID NO: 77767 - DNA, 120 bp, synthetic construct; identical to SEQ ID NO: 47813
  source 1..120: mol_type = other DNA

SEQ ID NO: 77768 - DNA, 120 bp, synthetic construct; identical to SEQ ID NO: 13420
  source 1..120: mol_type = other DNA

SEQ ID NO: 77769 - DNA, 120 bp, synthetic construct; identical to SEQ ID NO: 47815
  source 1..120: mol_type = other DNA

SEQ ID NO: 77770 - DNA, 120 bp, synthetic construct; identical to SEQ ID NO: 47816
  source 1..120: mol_type = other DNA

SEQ ID NO: 77771 - DNA, 120 bp, synthetic construct; identical to SEQ ID NO: 47817
  source 1..120: mol_type = other DNA

SEQ ID NO: 77772 - DNA, 120 bp, synthetic construct; identical to SEQ ID NO: 13421
  source 1..120: mol_type = other DNA

SEQ ID NO: 77773 - DNA, 120 bp, synthetic construct; identical to SEQ ID NO: 47819
  source 1..120: mol_type = other DNA

SEQ ID NO: 77774 - DNA, 120 bp, synthetic construct; identical to SEQ ID NO: 47820
  source 1..120: mol_type = other DNA

SEQ ID NO: 77775 - DNA, 120 bp, synthetic construct; identical to SEQ ID NO: 13422
  source 1..120: mol_type = other DNA

SEQ ID NO: 77776 - DNA, 120 bp, synthetic construct; identical to SEQ ID NO: 47822
  source 1..120: mol_type = other DNA

SEQ ID NO: 77777 - DNA, 120 bp, synthetic construct; identical to SEQ ID NO: 47823
  source 1..120: mol_type = other DNA

SEQ ID NO: 77778 - DNA, 120 bp, synthetic construct; identical to SEQ ID NO: 47824
  source 1..120: mol_type = other DNA

SEQ ID NO: 77779 - DNA, 120 bp, synthetic construct; identical to SEQ ID NO: 47825
  source 1..120: mol_type = other DNA

SEQ ID NO: 77780 - DNA, 120 bp, synthetic construct; identical to SEQ ID NO: 13423
  source 1..120: mol_type = other DNA

SEQ ID NO: 77781 - DNA, 120 bp, synthetic construct; identical to SEQ ID NO: 47827
  source 1..120: mol_type = other DNA

SEQ ID NO: 77782 - DNA, 120 bp, synthetic construct; identical to SEQ ID NO: 47828
  source 1..120: mol_type = other DNA

SEQ ID NO: 77783 - DNA, 120 bp, synthetic construct; identical to SEQ ID NO: 47829
  source 1..120: mol_type = other DNA

SEQ ID NO: 77784 - DNA, 120 bp, synthetic construct; identical to SEQ ID NO: 13424
  source 1..120: mol_type = other DNA

SEQ ID NO: 77785 - DNA, 120 bp, synthetic construct; identical to SEQ ID NO: 47831
  source 1..120: mol_type = other DNA

SEQ ID NO: 77786 - DNA, 120 bp, synthetic construct; identical to SEQ ID NO: 47832
  source 1..120: mol_type = other DNA

SEQ ID NO: 77787 - DNA, 120 bp, synthetic construct; identical to SEQ ID NO: 47833
  source 1..120: mol_type = other DNA

SEQ ID NO: 77788 - DNA, 120 bp, synthetic construct; identical to SEQ ID NO: 47834
  source 1..120: mol_type = other DNA

SEQ ID NO: 77789 - DNA, 120 bp, synthetic construct; identical to SEQ ID NO: 13425
  source 1..120: mol_type = other DNA

SEQ ID NO: 77790 - DNA, 120 bp, synthetic construct; identical to SEQ ID NO: 47836
  source 1..120: mol_type = other DNA

SEQ ID NO: 77791 - DNA, 120 bp, synthetic construct; identical to SEQ ID NO: 47837
  source 1..120: mol_type = other DNA

SEQ ID NO: 77792 - DNA, 120 bp, synthetic construct; identical to SEQ ID NO: 47838
  source 1..120: mol_type = other DNA

SEQ ID NO: 77793 - DNA, 120 bp, synthetic construct; identical to SEQ ID NO: 13426
  source 1..120: mol_type = other DNA

SEQ ID NO: 77794 - DNA, 120 bp, synthetic construct; identical to SEQ ID NO: 47840
  source 1..120: mol_type = other DNA

SEQ ID NO: 77795 - DNA, 120 bp, synthetic construct; identical to SEQ ID NO: 47841
  source 1..120: mol_type = other DNA

SEQ ID NO: 77796 - DNA, 120 bp, synthetic construct; identical to SEQ ID NO: 13427
  source 1..120: mol_type = other DNA

SEQ ID NO: 77797 - DNA, 120 bp, synthetic construct; identical to SEQ ID NO: 47843
  source 1..120: mol_type = other DNA

SEQ ID NO: 77798 - DNA, 120 bp, synthetic construct; identical to SEQ ID NO: 47844
  source 1..120: mol_type = other DNA

SEQ ID NO: 77799 - DNA, 120 bp, synthetic construct; identical to SEQ ID NO: 47845
  source 1..120: mol_type = other DNA

SEQ ID NO: 77800 - DNA, 120 bp, synthetic construct; identical to SEQ ID NO: 13428
  source 1..120: mol_type = other DNA

SEQ ID NO: 77801 - DNA, 120 bp, synthetic construct; identical to SEQ ID NO: 47847
  source 1..120: mol_type = other DNA

SEQ ID NO: 77802 - DNA, 120 bp, synthetic construct; identical to SEQ ID NO: 5996
  source 1..120: mol_type = other DNA

SEQ ID NO: 77803 - DNA, 120 bp, synthetic construct; identical to SEQ ID NO: 47849
  source 1..120: mol_type = other DNA

SEQ ID NO: 77804 - DNA, 120 bp, synthetic construct; identical to SEQ ID NO: 13429
  source 1..120: mol_type = other DNA

SEQ ID NO: 77805 - DNA, 120 bp, synthetic construct; identical to SEQ ID NO: 47851
  source 1..120: mol_type = other DNA

SEQ ID NO: 77806 - DNA, 120 bp, synthetic construct; identical to SEQ ID NO: 47852
  source 1..120: mol_type = other DNA

SEQ ID NO: 77807 - DNA, 120 bp, synthetic construct; identical to SEQ ID NO: 47853
  source 1..120: mol_type = other DNA

SEQ ID NO: 77808 - DNA, 120 bp, synthetic construct; identical to SEQ ID NO: 13430
  source 1..120: mol_type = other DNA

SEQ ID NO: 77809 - DNA, 120 bp, synthetic construct; identical to SEQ ID NO: 47855
  source 1..120: mol_type = other DNA

SEQ ID NO: 77810 - DNA, 120 bp, synthetic construct; identical to SEQ ID NO: 47856
  source 1..120: mol_type = other DNA

SEQ ID NO: 77811 - DNA, 120 bp, synthetic construct; identical to SEQ ID NO: 47857
  source 1..120: mol_type = other DNA

SEQ ID NO: 77812 - DNA, 120 bp, synthetic construct; identical to SEQ ID NO: 47858
  source 1..120: mol_type = other DNA

SEQ ID NO: 77813 - DNA, 120 bp, synthetic construct; identical to SEQ ID NO: 13431
  source 1..120: mol_type = other DNA

SEQ ID NO: 77814 - DNA, 120 bp, synthetic construct; identical to SEQ ID NO: 47860
  source 1..120: mol_type = other DNA

SEQ ID NO: 77815 - DNA, 120 bp, synthetic construct; identical to SEQ ID NO: 47861
  source 1..120: mol_type = other DNA

SEQ ID NO: 77816 - DNA, 120 bp, synthetic construct; identical to SEQ ID NO: 47862
  source 1..120: mol_type = other DNA

SEQ ID NO: 77817 - DNA, 120 bp, synthetic construct; identical to SEQ ID NO: 13432
  source 1..120: mol_type = other DNA

SEQ ID NO: 77818 - DNA, 120 bp, synthetic construct; identical to SEQ ID NO: 47864
  source 1..120: mol_type = other DNA

SEQ ID NO: 77819 - DNA, 120 bp, synthetic construct; identical to SEQ ID NO: 47865
  source 1..120: mol_type = other DNA

SEQ ID NO: 77820 - DNA, 120 bp, synthetic construct; identical to SEQ ID NO: 13433
  source 1..120: mol_type = other DNA

SEQ ID NO: 77821 - DNA, 120 bp, synthetic construct; identical to SEQ ID NO: 47867
  source 1..120: mol_type = other DNA

SEQ ID NO: 77822 - DNA, 120 bp, synthetic construct; identical to SEQ ID NO: 47868
  source 1..120: mol_type = other DNA

SEQ ID NO: 77823 - DNA, 120 bp, synthetic construct; identical to SEQ ID NO: 47869
  source 1..120: mol_type = other DNA

SEQ ID NO: 77824 - DNA, 120 bp, synthetic construct; identical to SEQ ID NO: 13434
  source 1..120: mol_type = other DNA

SEQ ID NO: 77825 - DNA, 120 bp, synthetic construct; identical to SEQ ID NO: 47871
  source 1..120: mol_type = other DNA

SEQ ID NO: 77826 - DNA, 120 bp, synthetic construct; identical to SEQ ID NO: 47872
  source 1..120: mol_type = other DNA

SEQ ID NO: 77827 - DNA, 120 bp, synthetic construct; identical to SEQ ID NO: 47873
  source 1..120: mol_type = other DNA

SEQ ID NO: 77828 - DNA, 120 bp, synthetic construct; identical to SEQ ID NO: 13435
  source 1..120: mol_type = other DNA

SEQ ID NO: 77829 - DNA, 120 bp, synthetic construct; identical to SEQ ID NO: 47875
  source 1..120: mol_type = other DNA

SEQ ID NO: 77830 - DNA, 120 bp, synthetic construct; identical to SEQ ID NO: 47876
  source 1..120: mol_type = other DNA

SEQ ID NO: 77831 - DNA, 120 bp, synthetic construct; identical to SEQ ID NO: 47877
  source 1..120: mol_type = other DNA

SEQ ID NO: 77832 - DNA, 120 bp, synthetic construct; identical to SEQ ID NO: 13436
  source 1..120: mol_type = other DNA

SEQ ID NO: 77833 - DNA, 120 bp, synthetic construct; identical to SEQ ID NO: 47879
  source 1..120: mol_type = other DNA

SEQ ID NO: 77834 - DNA, 120 bp, synthetic construct; identical to SEQ ID NO: 47880
  source 1..120: mol_type = other DNA

SEQ ID NO: 77835 - DNA, 120 bp, synthetic construct; identical to SEQ ID NO: 47881
  source 1..120: mol_type = other DNA

SEQ ID NO: 77836 - DNA, 120 bp, synthetic construct; identical to SEQ ID NO: 47882
  source 1..120: mol_type = other DNA

SEQ ID NO: 77837 - DNA, 120 bp, synthetic construct; identical to SEQ ID NO: 13437
  source 1..120: mol_type = other DNA

SEQ ID NO: 77838 - DNA, 120 bp, synthetic construct; identical to SEQ ID NO: 47884
  source 1..120: mol_type = other DNA

SEQ ID NO: 77839 - DNA, 120 bp, synthetic construct; identical to SEQ ID NO: 47885
  source 1..120: mol_type = other DNA

SEQ ID NO: 77840 - DNA, 120 bp, synthetic construct; identical to SEQ ID NO: 13438
  source 1..120: mol_type = other DNA

SEQ ID NO: 77841 - DNA, 120 bp, synthetic construct; identical to SEQ ID NO: 47887
  source 1..120: mol_type = other DNA

SEQ ID NO: 77842 - DNA, 120 bp, synthetic construct; identical to SEQ ID NO: 47888
  source 1..120: mol_type = other DNA

SEQ ID NO: 77843 - DNA, 120 bp, synthetic construct; identical to SEQ ID NO: 47889
  source 1..120: mol_type = other DNA

SEQ ID NO: 77844 - DNA, 120 bp, synthetic construct; identical to SEQ ID NO: 47890
  source 1..120: mol_type = other DNA

SEQ ID NO: 77845 - DNA, 120 bp, synthetic construct; identical to SEQ ID NO: 13439
  source 1..120: mol_type = other DNA

SEQ ID NO: 77846 - DNA, 120 bp, synthetic construct; identical to SEQ ID NO: 47892
  source 1..120: mol_type = other DNA

SEQ ID NO: 77847 - DNA, 120 bp, synthetic construct; identical to SEQ ID NO: 47893
  source 1..120: mol_type = other DNA

SEQ ID NO: 77848 - DNA, 120 bp, synthetic construct; identical to SEQ ID NO: 47894
  source 1..120: mol_type = other DNA

SEQ ID NO: 77849 - DNA, 120 bp, synthetic construct; identical to SEQ ID NO: 13440
  source 1..120: mol_type = other DNA

SEQ ID NO: 77850 - DNA, 120 bp, synthetic construct; identical to SEQ ID NO: 47896
  source 1..120: mol_type = other DNA

SEQ ID NO: 77851 - DNA, 120 bp, synthetic construct; identical to SEQ ID NO: 47897
  source 1..120: mol_type = other DNA

SEQ ID NO: 77852 - DNA, 120 bp, synthetic construct; identical to SEQ ID NO: 13441
  source 1..120: mol_type = other DNA

SEQ ID NO: 77853 - DNA, 120 bp, synthetic construct; identical to SEQ ID NO: 47899
  source 1..120: mol_type = other DNA

SEQ ID NO: 77854 - DNA, 120 bp, synthetic construct; identical to SEQ ID NO: 47900
  source 1..120: mol_type = other DNA

SEQ ID NO: 77855 - DNA, 120 bp, synthetic construct; identical to SEQ ID NO: 47901
  source 1..120: mol_type = other DNA

SEQ ID NO: 77856 - DNA, 120 bp, synthetic construct; identical to SEQ ID NO: 47902
  source 1..120: mol_type = other DNA

SEQ ID NO: 77857 - DNA, 120 bp, synthetic construct; identical to SEQ ID NO: 13442
  source 1..120: mol_type = other DNA

SEQ ID NO: 77858 - DNA, 120 bp, synthetic construct; identical to SEQ ID NO: 47904
  source 1..120: mol_type = other DNA

SEQ ID NO: 77859 - DNA, 120 bp, synthetic construct; identical to SEQ ID NO: 47905
  source 1..120: mol_type = other DNA

SEQ ID NO: 77860 - DNA, 120 bp, synthetic construct; identical to SEQ ID NO: 47906
  source 1..120: mol_type = other DNA

SEQ ID NO: 77861 - DNA, 120 bp, synthetic construct; identical to SEQ ID NO: 13443
  source 1..120: mol_type = other DNA

SEQ ID NO: 77862 - DNA, 120 bp, synthetic construct; identical to SEQ ID NO: 47908
  source 1..120: mol_type = other DNA

SEQ ID NO: 77863 - DNA, 120 bp, synthetic construct; identical to SEQ ID NO: 47909
  source 1..120: mol_type = other DNA

SEQ ID NO: 77864 - DNA, 120 bp, synthetic construct; identical to SEQ ID NO: 13444
  source 1..120: mol_type = other DNA

SEQ ID NO: 77865 - DNA, 120 bp, synthetic construct; identical to SEQ ID NO: 47911
  source 1..120: mol_type = other DNA

SEQ ID NO: 77866 - DNA, 120 bp, synthetic construct; identical to SEQ ID NO: 47912
  source 1..120: mol_type = other DNA

SEQ ID NO: 77867 - DNA, 120 bp, synthetic construct; identical to SEQ ID NO: 13445
  source 1..120: mol_type = other DNA

SEQ ID NO: 77868 - DNA, 120 bp, synthetic construct; identical to SEQ ID NO: 47914
  source 1..120: mol_type = other DNA

SEQ ID NO: 77869 - DNA, 120 bp, synthetic construct; identical to SEQ ID NO: 47915
  source 1..120: mol_type = other DNA

SEQ ID NO: 77870 - DNA, 120 bp, synthetic construct; identical to SEQ ID NO: 13446
  source 1..120: mol_type = other DNA

SEQ ID NO: 77871 - DNA, 120 bp, synthetic construct; identical to SEQ ID NO: 47917
  source 1..120: mol_type = other DNA

SEQ ID NO: 77872 - DNA, 120 bp, synthetic construct; identical to SEQ ID NO: 47918
  source 1..120: mol_type = other DNA

SEQ ID NO: 77873 - DNA, 120 bp, synthetic construct; identical to SEQ ID NO: 47919
  source 1..120: mol_type = other DNA

SEQ ID NO: 77874 - DNA, 120 bp, synthetic construct; identical to SEQ ID NO: 13447
  source 1..120: mol_type = other DNA

SEQ ID NO: 77875 - DNA, 120 bp, synthetic construct; identical to SEQ ID NO: 47921
  source 1..120: mol_type = other DNA

SEQ ID NO: 77876 - DNA, 120 bp, synthetic construct; identical to SEQ ID NO: 47922
  source 1..120: mol_type = other DNA

SEQ ID NO: 77877 - DNA, 120 bp, synthetic construct; identical to SEQ ID NO: 47923
  source 1..120: mol_type = other DNA

SEQ ID NO: 77878 - DNA, 120 bp, synthetic construct; identical to SEQ ID NO: 47924
  source 1..120: mol_type = other DNA

SEQ ID NO: 77879 - DNA, 120 bp, synthetic construct; identical to SEQ ID NO: 13448
  source 1..120: mol_type = other DNA

SEQ ID NO: 77880 - DNA, 120 bp, synthetic construct; identical to SEQ ID NO: 47926
  source 1..120: mol_type = other DNA

SEQ ID NO: 77881 - DNA, 120 bp, synthetic construct; identical to SEQ ID NO: 47927
  source 1..120: mol_type = other DNA

SEQ ID NO: 77882 - DNA, 120 bp, synthetic construct; identical to SEQ ID NO: 47928
  source 1..120: mol_type = other DNA

SEQ ID NO: 77883 - DNA, 120 bp, synthetic construct; identical to SEQ ID NO: 13449
  source 1..120: mol_type = other DNA

SEQ ID NO: 77884 - DNA, 120 bp, synthetic construct; identical to SEQ ID NO: 47930
  source 1..120: mol_type = other DNA

SEQ ID NO: 77885 - DNA, 120 bp, synthetic construct; identical to SEQ ID NO: 47931
  source 1..120: mol_type = other DNA

SEQ ID NO: 77886 - DNA, 120 bp, synthetic construct; identical to SEQ ID NO: 47932
  source 1..120: mol_type = other DNA

SEQ ID NO: 77887 - DNA, 120 bp, synthetic construct; identical to SEQ ID NO: 13450
  source 1..120: mol_type = other DNA

SEQ ID NO: 77888 - DNA, 120 bp, synthetic construct; identical to SEQ ID NO: 47934
  source 1..120: mol_type = other DNA

SEQ ID NO: 77889 - DNA, 120 bp, synthetic construct; identical to SEQ ID NO: 47935
  source 1..120: mol_type = other DNA

SEQ ID NO: 77890 - DNA, 120 bp, synthetic construct; identical to SEQ ID NO: 47936
  source 1..120: mol_type = other DNA

SEQ ID NO: 77891 - DNA, 120 bp, synthetic construct; identical to SEQ ID NO: 13451
  source 1..120: mol_type = other DNA

SEQ ID NO: 77892 - DNA, 120 bp, synthetic construct; identical to SEQ ID NO: 47938
  source 1..120: mol_type = other DNA

SEQ ID NO: 77893 - DNA, 120 bp, synthetic construct; identical to SEQ ID NO: 47939
  source 1..120: mol_type = other DNA

SEQ ID NO: 77894 - DNA, 120 bp, synthetic construct; identical to SEQ ID NO: 13452
  source 1..120: mol_type = other DNA

SEQ ID NO: 77895 - DNA, 120 bp, synthetic construct; identical to SEQ ID NO: 47941
  source 1..120: mol_type = other DNA

SEQ ID NO: 77896 - DNA, 120 bp, synthetic construct; identical to SEQ ID NO: 47942
  source 1..120: mol_type = other DNA

SEQ ID NO: 77897 - DNA, 120 bp, synthetic construct; identical to SEQ ID NO: 47943
  source 1..120: mol_type = other DNA

SEQ ID NO: 77898 - DNA, 120 bp, synthetic construct; identical to SEQ ID NO: 13453
  source 1..120: mol_type = other DNA

SEQ ID NO: 77899 - DNA, 120 bp, synthetic construct; identical to SEQ ID NO: 47945
  source 1..120: mol_type = other DNA

SEQ ID NO: 77900 - DNA, 120 bp, synthetic construct; identical to SEQ ID NO: 47946
  source 1..120: mol_type = other DNA

SEQ ID NO: 77901 - DNA, 120 bp, synthetic construct; identical to SEQ ID NO: 47947
  source 1..120: mol_type = other DNA

SEQ ID NO: 77902 - DNA, 120 bp, synthetic construct; identical to SEQ ID NO: 47948
  source 1..120: mol_type = other DNA

SEQ ID NO: 77903 - DNA, 120 bp, synthetic construct; identical to SEQ ID NO: 13454
  source 1..120: mol_type = other DNA

SEQ ID NO: 77904 - DNA, 120 bp, synthetic construct; identical to SEQ ID NO: 47950
  source 1..120: mol_type = other DNA

SEQ ID NO: 77905 - DNA, 120 bp, synthetic construct; identical to SEQ ID NO: 47951
  source 1..120: mol_type = other DNA

SEQ ID NO: 77906 - DNA, 120 bp, synthetic construct; identical to SEQ ID NO: 13455
  source 1..120: mol_type = other DNA

SEQ ID NO: 77907 - DNA, 120 bp, synthetic construct; identical to SEQ ID NO: 47953
  source 1..120: mol_type = other DNA

SEQ ID NO: 77908 - DNA, 120 bp, synthetic construct; identical to SEQ ID NO: 47954
  source 1..120: mol_type = other DNA

SEQ ID NO: 77909 - DNA, 120 bp, synthetic construct; identical to SEQ ID NO: 47955
  source 1..120: mol_type = other DNA

SEQ ID NO: 77910 - DNA, 120 bp, synthetic construct; identical to SEQ ID NO: 13456
  source 1..120: mol_type = other DNA

SEQ ID NO: 77911 - DNA, 120 bp, synthetic construct; identical to SEQ ID NO: 47957
  source 1..120: mol_type = other DNA

SEQ ID NO: 77912 - DNA, 120 bp, synthetic construct; identical to SEQ ID NO: 47958
  source 1..120: mol_type = other DNA

SEQ ID NO: 77913 - DNA, 120 bp, synthetic construct; identical to SEQ ID NO: 47959
  source 1..120: mol_type = other DNA

SEQ ID NO: 77914 - DNA, 120 bp, synthetic construct; identical to SEQ ID NO: 47960
  source 1..120: mol_type = other DNA

SEQ ID NO: 77915 - DNA, 120 bp, synthetic construct; identical to SEQ ID NO: 13457
  source 1..120: mol_type = other DNA

SEQ ID NO: 77916 - DNA, 120 bp, synthetic construct; identical to SEQ ID NO: 47962
  source 1..120: mol_type = other DNA

SEQ ID NO: 77917 - DNA, 120 bp, synthetic construct; identical to SEQ ID NO: 47963
  source 1..120: mol_type = other DNA

SEQ ID NO: 77918 - DNA, 120 bp, synthetic construct; identical to SEQ ID NO: 47964
  source 1..120: mol_type = other DNA

SEQ ID NO: 77919 - DNA, 120 bp, synthetic construct; identical to SEQ ID NO: 13458
  source 1..120: mol_type = other DNA

SEQ ID NO: 77920 - DNA, 120 bp, synthetic construct; identical to SEQ ID NO: 47966
  source 1..120: mol_type = other DNA

SEQ ID NO: 77921 - DNA, 120 bp, synthetic construct; identical to SEQ ID NO: 13459
  source 1..120: mol_type = other DNA

SEQ ID NO: 77922 - DNA, 120 bp, synthetic construct; identical to SEQ ID NO: 47968
  source 1..120: mol_type = other DNA

SEQ ID NO: 77923 - DNA, 120 bp, synthetic construct; identical to SEQ ID NO: 47969
  source 1..120: mol_type = other DNA

SEQ ID NO: 77924 - DNA, 120 bp, synthetic construct; identical to SEQ ID NO: 47970
  source 1..120: mol_type = other DNA

SEQ ID NO: 77925 - DNA, 120 bp, synthetic construct; identical to SEQ ID NO: 13460
  source 1..120: mol_type = other DNA

SEQ ID NO: 77926 - DNA, 120 bp, synthetic construct; identical to SEQ ID NO: 47972
  source 1..120: mol_type = other DNA

SEQ ID NO: 77927 - DNA, 120 bp, synthetic construct; identical to SEQ ID NO: 13461
  source 1..120: mol_type = other DNA

SEQ ID NO: 77928 - DNA, 120 bp, synthetic construct; identical to SEQ ID NO: 47974
  source 1..120: mol_type = other DNA

SEQ ID NO: 77929 - DNA, 120 bp, synthetic construct; identical to SEQ ID NO: 47975
  source 1..120: mol_type = other DNA

SEQ ID NO: 77930 - DNA, 120 bp, synthetic construct; identical to SEQ ID NO: 47976
  source 1..120: mol_type = other DNA

SEQ ID NO: 77931 - DNA, 120 bp, synthetic construct; identical to SEQ ID NO: 47977
  source 1..120: mol_type = other DNA

SEQ ID NO: 77932 - DNA, 120 bp, synthetic construct; identical to SEQ ID NO: 13462
  source 1..120: mol_type = other DNA

SEQ ID NO: 77933 - DNA, 120 bp, synthetic construct; identical to SEQ ID NO: 47979
  source 1..120: mol_type = other DNA

SEQ ID NO: 77934 - DNA, 120 bp, synthetic construct; identical to SEQ ID NO: 47980
  source 1..120: mol_type = other DNA

SEQ ID NO: 77935 - DNA, 120 bp, synthetic construct; identical to SEQ ID NO: 13463
  source 1..120: mol_type = other DNA

SEQ ID NO: 77936 - DNA, 120 bp, synthetic construct; identical to SEQ ID NO: 47982
  source 1..120: mol_type = other DNA

SEQ ID NO: 77937 - DNA, 120 bp, synthetic construct; identical to SEQ ID NO: 47983
  source 1..120: mol_type = other DNA

SEQ ID NO: 77938 - DNA, 120 bp, synthetic construct; identical to SEQ ID NO: 47984
  source 1..120: mol_type = other DNA

SEQ ID NO: 77939 - DNA, 120 bp, synthetic construct; identical to SEQ ID NO: 47985
  source 1..120: mol_type = other DNA

SEQ ID NO: 77940 - DNA, 120 bp, synthetic construct; identical to SEQ ID NO: 13464
  source 1..120: mol_type = other DNA

SEQ ID NO: 77941 - DNA, 120 bp, synthetic construct; identical to SEQ ID NO: 47987
  source 1..120: mol_type = other DNA

SEQ ID NO: 77942 - DNA, 120 bp, synthetic construct; identical to SEQ ID NO: 47988
  source 1..120: mol_type = other DNA

SEQ ID NO: 77943 - DNA, 120 bp, synthetic construct; identical to SEQ ID NO: 47989
  source 1..120: mol_type = other DNA

SEQ ID NO: 77944 - DNA, 120 bp, synthetic construct; identical to SEQ ID NO: 13465
  source 1..120: mol_type = other DNA

SEQ ID NO: 77945 - DNA, 120 bp, synthetic construct; identical to SEQ ID NO: 47991
  source 1..120: mol_type = other DNA

SEQ ID NO: 77946 - DNA, 120 bp, synthetic construct; identical to SEQ ID NO: 47992
  source 1..120: mol_type = other DNA

SEQ ID NO: 77947 - DNA, 120 bp, synthetic construct; identical to SEQ ID NO: 47993
  source 1..120: mol_type = other DNA

SEQ ID NO: 77948 - DNA, 120 bp, synthetic construct; identical to SEQ ID NO: 13466
  source 1..120: mol_type = other DNA

SEQ ID NO: 77949 - DNA, 120 bp, synthetic construct; identical to SEQ ID NO: 47995
  source 1..120: mol_type = other DNA

SEQ ID NO: 77950 - DNA, 120 bp, synthetic construct; identical to SEQ ID NO: 47996
  source 1..120: mol_type = other DNA

SEQ ID NO: 77951 - DNA, 120 bp, synthetic construct; identical to SEQ ID NO: 47997
  source 1..120: mol_type = other DNA

SEQ ID NO: 77952 - DNA, 120 bp, synthetic construct; identical to SEQ ID NO: 13467
  source 1..120: mol_type = other DNA

SEQ ID NO: 77953 - DNA, 120 bp, synthetic construct; identical to SEQ ID NO: 47999
  source 1..120: mol_type = other DNA

SEQ ID NO: 77954 - DNA, 120 bp, synthetic construct; identical to SEQ ID NO: 48000
  source 1..120: mol_type = other DNA

SEQ ID NO: 77955 - DNA, 120 bp, synthetic construct; identical to SEQ ID NO: 48001
  source 1..120: mol_type = other DNA

SEQ ID NO: 77956 - DNA, 120 bp, synthetic construct; identical to SEQ ID NO: 13468
  source 1..120: mol_type = other DNA

SEQ ID NO: 77957 - DNA, 120 bp, synthetic construct; identical to SEQ ID NO: 48003
  source 1..120: mol_type = other DNA

SEQ ID NO: 77958 - DNA, 120 bp, synthetic construct; identical to SEQ ID NO: 48004
  source 1..120: mol_type = other DNA

SEQ ID NO: 77959 - DNA, 120 bp, synthetic construct; identical to SEQ ID NO: 48005
  source 1..120: mol_type = other DNA

SEQ ID NO: 77960 - DNA, 120 bp, synthetic construct; identical to SEQ ID NO: 13469
  source 1..120: mol_type = other DNA

SEQ ID NO: 77961 - DNA, 120 bp, synthetic construct; identical to SEQ ID NO: 48007
  source 1..120: mol_type = other DNA

SEQ ID NO: 77962 - DNA, 120 bp, synthetic construct; identical to SEQ ID NO: 48008
  source 1..120: mol_type = other DNA

SEQ ID NO: 77963 - DNA, 120 bp, synthetic construct; identical to SEQ ID NO: 48009
  source 1..120: mol_type = other DNA

SEQ ID NO: 77964 - DNA, 120 bp, synthetic construct; identical to SEQ ID NO: 13470
  source 1..120: mol_type = other DNA

SEQ ID NO: 77965 - DNA, 120 bp, synthetic construct; identical to SEQ ID NO: 48011
  source 1..120: mol_type = other DNA

SEQ ID NO: 77966 - DNA, 120 bp, synthetic construct; identical to SEQ ID NO: 48012
  source 1..120: mol_type = other DNA

SEQ ID NO: 77967 - DNA, 120 bp, synthetic construct; identical to SEQ ID NO: 13471
  source 1..120: mol_type = other DNA

SEQ ID NO: 77968 - DNA, 120 bp, synthetic construct; identical to SEQ ID NO: 48014
  source 1..120: mol_type = other DNA

SEQ ID NO: 77969 - DNA, 120 bp, synthetic construct; identical to SEQ ID NO: 48015
  source 1..120: mol_type = other DNA

SEQ ID NO: 77970 - DNA, 120 bp, synthetic construct; identical to SEQ ID NO: 48016
  source 1..120: mol_type = other DNA

SEQ ID NO: 77971 - DNA, 120 bp, synthetic construct; identical to SEQ ID NO: 13472
  source 1..120: mol_type = other DNA

SEQ ID NO: 77972 - DNA, 120 bp, synthetic construct; identical to SEQ ID NO: 48018
  source 1..120: mol_type = other DNA

SEQ ID NO: 77973 - DNA, 120 bp, synthetic construct; identical to SEQ ID NO: 48019
  source 1..120: mol_type = other DNA

SEQ ID NO: 77974 - DNA, 120 bp, synthetic construct; identical to SEQ ID NO: 48020
  source 1..120: mol_type = other DNA

SEQ ID NO: 77975 - DNA, 120 bp, synthetic construct; identical to SEQ ID NO: 13473
  source 1..120: mol_type = other DNA

SEQ ID NO: 77976 - DNA, 120 bp, synthetic construct; identical to SEQ ID NO: 48022
  source 1..120: mol_type = other DNA

SEQ ID NO: 77977 - DNA, 120 bp, synthetic construct; identical to SEQ ID NO: 48023
  source 1..120: mol_type = other DNA

SEQ ID NO: 77978 - DNA, 120 bp, synthetic construct; identical to SEQ ID NO: 48024
  source 1..120: mol_type = other DNA

SEQ ID NO: 77979 - DNA, 120 bp, synthetic construct; identical to SEQ ID NO: 13474
  source 1..120: mol_type = other DNA

SEQ ID NO: 77980 - DNA, 120 bp, synthetic construct; identical to SEQ ID NO: 48026
  source 1..120: mol_type = other DNA

SEQ ID NO: 77981 - DNA, 120 bp, synthetic construct; identical to SEQ ID NO: 48027
  source 1..120: mol_type = other DNA

SEQ ID NO: 77982 - DNA, 120 bp, synthetic construct; identical to SEQ ID NO: 48028
  source 1..120: mol_type = other DNA

SEQ ID NO: 77983 - DNA, 120 bp, synthetic construct; identical to SEQ ID NO: 13475
  source 1..120: mol_type = other DNA

SEQ ID NO: 77984 - DNA, 120 bp, synthetic construct; identical to SEQ ID NO: 48030
  source 1..120: mol_type = other DNA

SEQ ID NO: 77985 - DNA, 120 bp, synthetic construct; identical to SEQ ID NO: 48031
  source 1..120: mol_type = other DNA

SEQ ID NO: 77986 - DNA, 120 bp, synthetic construct; identical to SEQ ID NO: 13476
  source 1..120: mol_type = other DNA

SEQ ID NO: 77987 - DNA, 120 bp, synthetic construct; identical to SEQ ID NO: 48033
  source 1..120: mol_type = other DNA

SEQ ID NO: 77988 - DNA, 120 bp, synthetic construct; identical to SEQ ID NO: 48034
  source 1..120: mol_type = other DNA

SEQ ID NO: 77989 - DNA, 120 bp, synthetic construct; identical to SEQ ID NO: 13477
  source 1..120: mol_type = other DNA

SEQ ID NO: 77990 - DNA, 120 bp, synthetic construct; identical to SEQ ID NO: 48036
  source 1..120: mol_type = other DNA

SEQ ID NO: 77991 - DNA, 120 bp, synthetic construct; identical to SEQ ID NO: 48037
  source 1..120: mol_type = other DNA

SEQ ID NO: 77992 - DNA, 120 bp, synthetic construct; identical to SEQ ID NO: 13478
  source 1..120: mol_type = other DNA

SEQ ID NO: 77993 - DNA, 120 bp, synthetic construct; identical to SEQ ID NO: 48039
  source 1..120: mol_type = other DNA

SEQ ID NO: 77994 - DNA, 120 bp, synthetic construct; identical to SEQ ID NO: 48040
  source 1..120: mol_type = other DNA

SEQ ID NO: 77995 - DNA, 120 bp, synthetic construct; identical to SEQ ID NO: 13479
  source 1..120: mol_type = other DNA

SEQ ID NO: 77996 - DNA, 120 bp, synthetic construct; identical to SEQ ID NO: 48042
  source 1..120: mol_type = other DNA

SEQ ID NO: 77997 - DNA, 120 bp, synthetic construct; identical to SEQ ID NO: 48043
  source 1..120: mol_type = other DNA

SEQ ID NO: 77998 - DNA, 120 bp, synthetic construct; identical to SEQ ID NO: 48044
  source 1..120: mol_type = other DNA

SEQ ID NO: 77999 - DNA, 120 bp, synthetic construct; identical to SEQ ID NO: 13480
  source 1..120: mol_type = other DNA

SEQ ID NO: 78000 - DNA, 120 bp, synthetic construct; identical to SEQ ID NO: 48046
  source 1..120: mol_type = other DNA

SEQ ID NO: 78001 - DNA, 120 bp, synthetic construct; identical to SEQ ID NO: 48047
  source 1..120: mol_type = other DNA

SEQ ID NO: 78002 - DNA, 120 bp, synthetic construct; identical to SEQ ID NO: 48048
  source 1..120: mol_type = other DNA

SEQ ID NO: 78003 - DNA, 120 bp, synthetic construct; identical to SEQ ID NO: 48049
  source 1..120: mol_type = other DNA

SEQ ID NO: 78004 - DNA, 120 bp, synthetic construct; identical to SEQ ID NO: 13481
  source 1..120: mol_type = other DNA

SEQ ID NO: 78005 - DNA, 120 bp, synthetic construct; identical to SEQ ID NO: 48051
  source 1..120: mol_type = other DNA

SEQ ID NO: 78006 - DNA, 120 bp, synthetic construct; identical to SEQ ID NO: 48052
  source 1..120: mol_type = other DNA

SEQ ID NO: 78007 - DNA, 120 bp, synthetic construct; identical to SEQ ID NO: 13482
  source 1..120: mol_type = other DNA

SEQ ID NO: 78008 - DNA, 120 bp, synthetic construct; identical to SEQ ID NO: 48054
  source 1..120: mol_type = other DNA

SEQ ID NO: 78009 - DNA, 120 bp, synthetic construct; identical to SEQ ID NO: 48055
  source 1..120: mol_type = other DNA

SEQ ID NO: 78010 - DNA, 120 bp, synthetic construct; identical to SEQ ID NO: 48056
  source 1..120: mol_type = other DNA

SEQ ID NO: 78011 - DNA, 120 bp, synthetic construct; identical to SEQ ID NO: 48057
  source 1..120: mol_type = other DNA

SEQ ID NO: 78012 - DNA, 120 bp, synthetic construct; identical to SEQ ID NO: 13483
  source 1..120: mol_type = other DNA

SEQ ID NO: 78013 - DNA, 120 bp, synthetic construct; identical to SEQ ID NO: 48059
  source 1..120: mol_type = other DNA

SEQ ID NO: 78014 - DNA, 120 bp, synthetic construct; identical to SEQ ID NO: 48060
  source 1..120: mol_type = other DNA

SEQ ID NO: 78015 - DNA, 120 bp, synthetic construct; identical to SEQ ID NO: 48061
  source 1..120: mol_type = other DNA

SEQ ID NO: 78016 - DNA, 120 bp, synthetic construct; identical to SEQ ID NO: 13484
  source 1..120: mol_type = other DNA

SEQ ID NO: 78017 - DNA, 120 bp, synthetic construct; identical to SEQ ID NO: 48063
  source 1..120: mol_type = other DNA

SEQ ID NO: 78018 - DNA, 120 bp, synthetic construct; identical to SEQ ID NO: 48064
  source 1..120: mol_type = other DNA

SEQ ID NO: 78019 - DNA, 120 bp, synthetic construct; identical to SEQ ID NO: 48065
  source 1..120: mol_type = other DNA

SEQ ID NO: 78020 - DNA, 120 bp, synthetic construct; identical to SEQ ID NO: 13485
  source 1..120: mol_type = other DNA

SEQ ID NO: 78021 - DNA, 120 bp, synthetic construct; identical to SEQ ID NO: 48067
  source 1..120: mol_type = other DNA

SEQ ID NO: 78022 - DNA, 120 bp, synthetic construct; identical to SEQ ID NO: 48068
  source 1..120: mol_type = other DNA

SEQ ID NO: 78023 - DNA, 120 bp, synthetic construct; identical to SEQ ID NO: 48069
  source 1..120: mol_type = other DNA

SEQ ID NO: 78024 - DNA, 120 bp, synthetic construct; identical to SEQ ID NO: 13486
  source 1..120: mol_type = other DNA

SEQ ID NO: 78025 - DNA, 120 bp, synthetic construct; identical to SEQ ID NO: 48071
  source 1..120: mol_type = other DNA

SEQ ID NO: 78026 - DNA, 120 bp, synthetic construct; identical to SEQ ID NO: 48072
  source 1..120: mol_type = other DNA

SEQ ID NO: 78027 - DNA, 120 bp, synthetic construct; identical to SEQ ID NO: 48073
  source 1..120: mol_type = other DNA

SEQ ID NO: 78028 - DNA, 120 bp, synthetic construct; identical to SEQ ID NO: 48074
  source 1..120: mol_type = other DNA

SEQ ID NO: 78029 - DNA, 120 bp, synthetic construct; identical to SEQ ID NO: 13487
  source 1..120: mol_type = other DNA

SEQ ID NO: 78030 - DNA, 120 bp, synthetic construct; identical to SEQ ID NO: 48076
  source 1..120: mol_type = other DNA

SEQ ID NO: 78031 - DNA, 120 bp, synthetic construct; identical to SEQ ID NO: 48077
  source 1..120: mol_type = other DNA

SEQ ID NO: 78032 - DNA, 120 bp, synthetic construct; identical to SEQ ID NO: 13488
  source 1..120: mol_type = other DNA

SEQ ID NO: 78033 - DNA, 120 bp, synthetic construct; identical to SEQ ID NO: 48079
  source 1..120: mol_type = other DNA

SEQ ID NO: 78034 - DNA, 120 bp, synthetic construct; identical to SEQ ID NO: 48080
  source 1..120: mol_type = other DNA

SEQ ID NO: 78035 - DNA, 120 bp, synthetic construct; identical to SEQ ID NO: 13489
  source 1..120: mol_type = other DNA

SEQ ID NO: 78036 - DNA, 120 bp, synthetic construct; identical to SEQ ID NO: 48082
  source 1..120: mol_type = other DNA

SEQ ID NO: 78037 - DNA, 120 bp, synthetic construct; identical to SEQ ID NO: 48083
  source 1..120: mol_type = other DNA

SEQ ID NO: 78038 - DNA, 120 bp, synthetic construct; identical to SEQ ID NO: 48084
  source 1..120: mol_type = other DNA

SEQ ID NO: 78039 - DNA, 120 bp, synthetic construct; identical to SEQ ID NO: 13490
  source 1..120: mol_type = other DNA

SEQ ID NO: 78040 - DNA, 120 bp, synthetic construct; identical to SEQ ID NO: 48086
  source 1..120: mol_type = other DNA

SEQ ID NO: 78041 - DNA, 120 bp, synthetic construct; identical to SEQ ID NO: 48087
  source 1..120: mol_type = other DNA

SEQ ID NO: 78042 - DNA, 120 bp, synthetic construct; identical to SEQ ID NO: 48088
  source 1..120: mol_type = other DNA

SEQ ID NO: 78043 - DNA, 120 bp, synthetic construct; identical to SEQ ID NO: 13491
  source 1..120: mol_type = other DNA

SEQ ID NO: 78044 - DNA, 120 bp, synthetic construct; identical to SEQ ID NO: 48090
  source 1..120: mol_type = other DNA

SEQ ID NO: 78045 - DNA, 120 bp, synthetic construct; identical to SEQ ID NO: 13492
  source 1..120: mol_type = other DNA

SEQ ID NO: 78046 - DNA, 120 bp, synthetic construct; identical to SEQ ID NO: 48092
  source 1..120: mol_type = other DNA

SEQ ID NO: 78047 - DNA, 120 bp, synthetic construct; identical to SEQ ID NO: 48093
  source 1..120: mol_type = other DNA

SEQ ID NO: 78048 - DNA, 120 bp, synthetic construct; identical to SEQ ID NO: 48094
  source 1..120: mol_type = other DNA

SEQ ID NO: 78049 - DNA, 120 bp, synthetic construct; identical to SEQ ID NO: 13493
  source 1..120: mol_type = other DNA

SEQ ID NO: 78050 - DNA, 120 bp, synthetic construct; identical to SEQ ID NO: 48096
  source 1..120: mol_type = other DNA

SEQ ID NO: 78051 - DNA, 120 bp, synthetic construct; identical to SEQ ID NO: 48097
  source 1..120: mol_type = other DNA

SEQ ID NO: 78052 - DNA, 120 bp, synthetic construct; identical to SEQ ID NO: 48098
  source 1..120: mol_type = other DNA

SEQ ID NO: 78053 - DNA, 120 bp, synthetic construct; identical to SEQ ID NO: 13494
  source 1..120: mol_type = other DNA

SEQ ID NO: 78054 - DNA, 120 bp, synthetic construct; identical to SEQ ID NO: 48100
  source 1..120: mol_type = other DNA

SEQ ID NO: 78055 - DNA, 120 bp, synthetic construct; identical to SEQ ID NO: 48101
  source 1..120: mol_type = other DNA

SEQ ID NO: 78056 - DNA, 120 bp, synthetic construct; identical to SEQ ID NO: 48102
  source 1..120: mol_type = other DNA

SEQ ID NO: 78057 - DNA, 120 bp, synthetic construct; identical to SEQ ID NO: 48103
  source 1..120: mol_type = other DNA

SEQ ID NO: 78058 - DNA, 120 bp, synthetic construct; identical to SEQ ID NO: 13495
  source 1..120: mol_type = other DNA

SEQ ID NO: 78059 - DNA, 120 bp, synthetic construct; identical to SEQ ID NO: 48105
  source 1..120: mol_type = other DNA

SEQ ID NO: 78060 - DNA, 120 bp, synthetic construct; identical to SEQ ID NO: 48106
  source 1..120: mol_type = other DNA

SEQ ID NO: 78061 - DNA, 120 bp, synthetic construct; identical to SEQ ID NO: 48107
  source 1..120: mol_type = other DNA

SEQ ID NO: 78062 - DNA, 120 bp, synthetic construct; identical to SEQ ID NO: 48108
  source 1..120: mol_type = other DNA

SEQ ID NO: 78063 - DNA, 120 bp, synthetic construct; identical to SEQ ID NO: 13496
  source 1..120: mol_type = other DNA

SEQ ID NO: 78064 - DNA, 120 bp, synthetic construct; identical to SEQ ID NO: 48110
  source 1..120: mol_type = other DNA

SEQ ID NO: 78065 - DNA, 120 bp, synthetic construct; identical to SEQ ID NO: 48111
  source 1..120: mol_type = other DNA

SEQ ID NO: 78066 - DNA, 120 bp, synthetic construct; identical to SEQ ID NO: 13497
  source 1..120: mol_type = other DNA

SEQ ID NO: 78067 - DNA, 120 bp, synthetic construct; identical to SEQ ID NO: 48113
  source 1..120: mol_type = other DNA

SEQ ID NO: 78068 - DNA, 120 bp, synthetic construct; identical to SEQ ID NO: 48114
  source 1..120: mol_type = other DNA

SEQ ID NO: 78069 - DNA, 120 bp, synthetic construct; identical to SEQ ID NO: 48115
  source 1..120: mol_type = other DNA

SEQ ID NO: 78070 - DNA, 120 bp, synthetic construct; identical to SEQ ID NO: 48116
  source 1..120: mol_type = other DNA

SEQ ID NO: 78071 - DNA, 120 bp, synthetic construct; identical to SEQ ID NO: 13498
  source 1..120: mol_type = other DNA

SEQ ID NO: 78072 - DNA, 120 bp, synthetic construct; identical to SEQ ID NO: 48118
  source 1..120: mol_type = other DNA

SEQ ID NO: 78073 - DNA, 120 bp, synthetic construct; identical to SEQ ID NO: 48119
  source 1..120: mol_type = other DNA

SEQ ID NO: 78074 - DNA, 120 bp, synthetic construct; identical to SEQ ID NO: 48120
  source 1..120: mol_type = other DNA

SEQ ID NO: 78075 - DNA, 120 bp, synthetic construct; identical to SEQ ID NO: 13499
  source 1..120: mol_type = other DNA

SEQ ID NO: 78076 - DNA, 120 bp, synthetic construct; identical to SEQ ID NO: 48122
  source 1..120: mol_type = other DNA

SEQ ID NO: 78077 - DNA, 120 bp, synthetic construct; identical to SEQ ID NO: 48123
  source 1..120: mol_type = other DNA

SEQ ID NO: 78078 - DNA, 120 bp, synthetic construct; identical to SEQ ID NO: 48124
  source 1..120: mol_type = other DNA

SEQ ID NO: 78079 - DNA, 120 bp, synthetic construct; identical to SEQ ID NO: 48125
  source 1..120: mol_type = other DNA

SEQ ID NO: 78080 - DNA, 120 bp, synthetic construct; identical to SEQ ID NO: 13500
  source 1..120: mol_type = other DNA

SEQ ID NO: 78081 - DNA, 120 bp, synthetic construct; identical to SEQ ID NO: 48127
  source 1..120: mol_type = other DNA

SEQ ID NO: 78082 - DNA, 120 bp, synthetic construct; identical to SEQ ID NO: 48128
  source 1..120: mol_type = other DNA

SEQ ID NO: 78083 - DNA, 120 bp, synthetic construct; identical to SEQ ID NO: 48129
  source 1..120: mol_type = other DNA

SEQ ID NO: 78084 - DNA, 120 bp, synthetic construct; identical to SEQ ID NO: 48130
  source 1..120: mol_type = other DNA

SEQ ID NO: 78085 - DNA, 120 bp, synthetic construct; identical to SEQ ID NO: 13501
  source 1..120: mol_type = other DNA

SEQ ID NO: 78086 - DNA, 120 bp, synthetic construct; identical to SEQ ID NO: 48132
  source 1..120: mol_type = other DNA

SEQ ID NO: 78087 - DNA, 120 bp, synthetic construct; identical to SEQ ID NO: 48133
  source 1..120: mol_type = other DNA

SEQ ID NO: 78088 - DNA, 120 bp, synthetic construct; identical to SEQ ID NO: 13502
  source 1..120: mol_type = other DNA

SEQ ID NO: 78089 - DNA, 120 bp, synthetic construct; identical to SEQ ID NO: 48135
  source 1..120: mol_type = other DNA

SEQ ID NO: 78090 - DNA, 120 bp, synthetic construct; identical to SEQ ID NO: 48136
  source 1..120: mol_type = other DNA

SEQ ID NO: 78091 - DNA, 120 bp, synthetic construct; identical to SEQ ID NO: 48137
  source 1..120: mol_type = other DNA

SEQ ID NO: 78092 - DNA, 120 bp, synthetic construct; identical to SEQ ID NO: 48138
  source 1..120: mol_type = other DNA

SEQ ID NO: 78093 - DNA, 120 bp, synthetic construct; identical to SEQ ID NO: 13503
  source 1..120: mol_type = other DNA

SEQ ID NO: 78094 - DNA, 120 bp, synthetic construct; identical to SEQ ID NO: 48140
  source 1..120: mol_type = other DNA

SEQ ID NO: 78095 - DNA, 120 bp, synthetic construct; identical to SEQ ID NO: 48141
  source 1..120: mol_type = other DNA

SEQ ID NO: 78096 - DNA, 120 bp, synthetic construct; identical to SEQ ID NO: 48142
  source 1..120: mol_type = other DNA

SEQ ID NO: 78097 - DNA, 120 bp, synthetic construct; identical to SEQ ID NO: 48143
  source 1..120: mol_type = other DNA

SEQ ID NO: 78098 - DNA, 120 bp, synthetic construct; identical to SEQ ID NO: 13504
  source 1..120: mol_type = other DNA

SEQ ID NO: 78099 - DNA, 120 bp, synthetic construct; identical to SEQ ID NO: 48145
  source 1..120: mol_type = other DNA

SEQ ID NO: 78100 - DNA, 120 bp, synthetic construct; identical to SEQ ID NO: 48146
  source 1..120: mol_type = other DNA

SEQ ID NO: 78101 - DNA, 120 bp, synthetic construct; identical to SEQ ID NO: 48147
  source 1..120: mol_type = other DNA

SEQ ID NO: 78102 - DNA, 120 bp, synthetic construct; identical to SEQ ID NO: 13505
  source 1..120: mol_type = other DNA

SEQ ID NO: 78103 - DNA, 120 bp, synthetic construct; identical to SEQ ID NO: 48149
  source 1..120: mol_type = other DNA

SEQ ID NO: 78104 - DNA, 120 bp, synthetic construct; identical to SEQ ID NO: 48150
  source 1..120: mol_type = other DNA

SEQ ID NO: 78105 - DNA, 120 bp, synthetic construct; identical to SEQ ID NO: 13506
  source 1..120: mol_type = other DNA

SEQ ID NO: 78106 - DNA, 120 bp, synthetic construct; identical to SEQ ID NO: 48152
  source 1..120: mol_type = other DNA

SEQ ID NO: 78107 - DNA, 120 bp, synthetic construct; identical to SEQ ID NO: 48153
  source 1..120: mol_type = other DNA

SEQ ID NO: 78108 - DNA, 120 bp, synthetic construct; identical to SEQ ID NO: 48154
  source 1..120: mol_type = other DNA

SEQ ID NO: 78109 - DNA, 120 bp, synthetic construct; identical to SEQ ID NO: 13507
  source 1..120: mol_type = other DNA

SEQ ID NO: 78110 - DNA, 120 bp, synthetic construct; identical to SEQ ID NO: 48156
  source 1..120: mol_type = other DNA

SEQ ID NO: 78111 - DNA, 120 bp, synthetic construct; identical to SEQ ID NO: 48157
  source 1..120: mol_type = other DNA

SEQ ID NO: 78112 - DNA, 120 bp, synthetic construct; identical to SEQ ID NO: 48158
  source 1..120: mol_type = other DNA

SEQ ID NO: 78113 - DNA, 120 bp, synthetic construct; identical to SEQ ID NO: 48159
  source 1..120: mol_type = other DNA

SEQ ID NO: 78114 - DNA, 120 bp, synthetic construct; identical to SEQ ID NO: 13508
  source 1..120: mol_type = other DNA

SEQ ID NO: 78115 - DNA, 120 bp, synthetic construct; identical to SEQ ID NO: 48161
  source 1..120: mol_type = other DNA

SEQ ID NO: 78116 - DNA, 120 bp, synthetic construct; identical to SEQ ID NO: 48162
  source 1..120: mol_type = other DNA

SEQ ID NO: 78117 - DNA, 120 bp, synthetic construct; identical to SEQ ID NO: 48163
  source 1..120: mol_type = other DNA

SEQ ID NO: 78118 - DNA, 120 bp, synthetic construct; identical to SEQ ID NO: 13509
  source 1..120: mol_type = other DNA

SEQ ID NO: 78119 - DNA, 120 bp, synthetic construct; identical to SEQ ID NO: 48165
  source 1..120: mol_type = other DNA

SEQ ID NO: 78120 - DNA, 120 bp, synthetic construct; identical to SEQ ID NO: 48166
  source 1..120: mol_type = other DNA

SEQ ID NO: 78121 - DNA, 120 bp, synthetic construct; identical to SEQ ID NO: 48167
  source 1..120: mol_type = other DNA

SEQ ID NO: 78122 - DNA, 120 bp, synthetic construct; identical to SEQ ID NO: 13510
  source 1..120: mol_type = other DNA

SEQ ID NO: 78123 - DNA, 120 bp, synthetic construct; identical to SEQ ID NO: 48169
  source 1..120: mol_type = other DNA

SEQ ID NO: 78124 - DNA, 120 bp, synthetic construct; identical to SEQ ID NO: 48170
  source 1..120: mol_type = other DNA

SEQ ID NO: 78125 - DNA, 120 bp, synthetic construct; identical to SEQ ID NO: 13511
  source 1..120: mol_type = other DNA

SEQ ID NO: 78126 - DNA, 120 bp, synthetic construct; identical to SEQ ID NO: 48172
  source 1..120: mol_type = other DNA

SEQ ID NO: 78127 - DNA, 120 bp, synthetic construct; identical to SEQ ID NO: 48173
  source 1..120: mol_type = other DNA

SEQ ID NO: 78128 - DNA, 120 bp, synthetic construct; identical to SEQ ID NO: 48174
  source 1..120: mol_type = other DNA

SEQ ID NO: 78129 - DNA, 120 bp, synthetic construct; identical to SEQ ID NO: 48175
  source 1..120: mol_type = other DNA

SEQ ID NO: 78130 - DNA, 120 bp, synthetic construct; identical to SEQ ID NO: 13512
  source 1..120: mol_type = other DNA

SEQ ID NO: 78131 - DNA, 120 bp, synthetic construct; identical to SEQ ID NO: 48177
  source 1..120: mol_type = other DNA

SEQ ID NO: 78132 - DNA, 120 bp, synthetic construct; identical to SEQ ID NO: 48178
  source 1..120: mol_type = other DNA

SEQ ID NO: 78133 - DNA, 120 bp, synthetic construct; identical to SEQ ID NO: 48179
  source 1..120: mol_type = other DNA

SEQ ID NO: 78134 - DNA, 120 bp, synthetic construct; identical to SEQ ID NO: 13513
  source 1..120: mol_type = other DNA

SEQ ID NO: 78135 - DNA, 120 bp, synthetic construct; identical to SEQ ID NO: 48181
  source 1..120: mol_type = other DNA

SEQ ID NO: 78136 - DNA, 120 bp, synthetic construct; identical to SEQ ID NO: 48182
  source 1..120: mol_type = other DNA

SEQ ID NO: 78137 - DNA, 120 bp, synthetic construct; identical to SEQ ID NO: 13514
  source 1..120: mol_type = other DNA

SEQ ID NO: 78138 - DNA, 120 bp, synthetic construct; identical to SEQ ID NO: 48184
  source 1..120: mol_type = other DNA

SEQ ID NO: 78139 - DNA, 120 bp, synthetic construct; identical to SEQ ID NO: 48185
  source 1..120: mol_type = other DNA

SEQ ID NO: 78140 - DNA, 120 bp, synthetic construct; identical to SEQ ID NO: 48186
  source 1..120: mol_type = other DNA

SEQ ID NO: 78141 - DNA, 120 bp, synthetic construct; identical to SEQ ID NO: 13515
  source 1..120: mol_type = other DNA

SEQ ID NO: 78142 - DNA, 120 bp, synthetic construct; identical to SEQ ID NO: 48188
  source 1..120: mol_type = other DNA

SEQ ID NO: 78143 - DNA, 120 bp, synthetic construct; identical to SEQ ID NO: 48189
  source 1..120: mol_type = other DNA

SEQ ID NO: 78144 - DNA, 120 bp, synthetic construct; identical to SEQ ID NO: 48190
  source 1..120: mol_type = other DNA

SEQ ID NO: 78145 - DNA, 120 bp, synthetic construct; identical to SEQ ID NO: 13516
  source 1..120: mol_type = other DNA

SEQ ID NO: 78146 - DNA, 120 bp, synthetic construct; identical to SEQ ID NO: 48192
  source 1..120: mol_type = other DNA

SEQ ID NO: 78147 - DNA, 120 bp, synthetic construct; identical to SEQ ID NO: 48193
  source 1..120: mol_type = other DNA

SEQ ID NO: 78148 - DNA, 120 bp, synthetic construct; identical to SEQ ID NO: 48194
  source 1..120: mol_type = other DNA

SEQ ID NO: 78149 - DNA, 120 bp, synthetic construct; identical to SEQ ID NO: 13517
  source 1..120: mol_type = other DNA

SEQ ID NO: 78150 - DNA, 120 bp, synthetic construct; identical to SEQ ID NO: 48196
  source 1..120: mol_type = other DNA

SEQ ID NO: 78151 - DNA, 120 bp, synthetic construct; identical to SEQ ID NO: 48197
  source 1..120: mol_type = other DNA

SEQ ID NO: 78152 - DNA, 120 bp, synthetic construct; identical to SEQ ID NO: 48198
  source 1..120: mol_type = other DNA

SEQ ID NO: 78153 - DNA, 120 bp, synthetic construct; identical to SEQ ID NO: 48199
  source 1..120: mol_type = other DNA

SEQ ID NO: 78154 - DNA, 120 bp, synthetic construct; identical to SEQ ID NO: 13518
  source 1..120: mol_type = other DNA

SEQ ID NO: 78155 - DNA, 120 bp, synthetic construct; identical to SEQ ID NO: 48201
  source 1..120: mol_type = other DNA

SEQ ID NO: 78156 - DNA, 120 bp, synthetic construct; identical to SEQ ID NO: 48202
  source 1..120: mol_type = other DNA

SEQ ID NO: 78157 - DNA, 120 bp, synthetic construct; identical to SEQ ID NO: 48203
  source 1..120: mol_type = other DNA

SEQ ID NO: 78158 - DNA, 120 bp, synthetic construct; identical to SEQ ID NO: 13519
  source 1..120: mol_type = other DNA

SEQ ID NO: 78159 - DNA, 120 bp, synthetic construct; identical to SEQ ID NO: 48205
  source 1..120: mol_type = other DNA

SEQ ID NO: 78160 - DNA, 120 bp, synthetic construct; identical to SEQ ID NO: 48206
  source 1..120: mol_type = other DNA

SEQ ID NO: 78161 - DNA, 120 bp, synthetic construct; identical to SEQ ID NO: 13520
  source 1..120: mol_type = other DNA

SEQ ID NO: 78162 - DNA, 120 bp, synthetic construct; identical to SEQ ID NO: 48208
  source 1..120: mol_type = other DNA

SEQ ID NO: 78163 - DNA, 120 bp, synthetic construct; identical to SEQ ID NO: 48209
  source 1..120: mol_type = other DNA

SEQ ID NO: 78164 - DNA, 120 bp, synthetic construct; identical to SEQ ID NO: 48210
  source 1..120: mol_type = other DNA

SEQ ID NO: 78165 - DNA, 120 bp, synthetic construct; identical to SEQ ID NO: 13521
  source 1..120: mol_type = other DNA

SEQ ID NO: 78166 - DNA, 120 bp, synthetic construct; identical to SEQ ID NO: 48212
  source 1..120: mol_type = other DNA

SEQ ID NO: 78167 - DNA, 120 bp, synthetic construct; identical to SEQ ID NO: 48213
  source 1..120: mol_type = other DNA

SEQ ID NO: 78168 - DNA, 120 bp, synthetic construct; identical to SEQ ID NO: 48214
  source 1..120: mol_type = other DNA

SEQ ID NO: 78169 - DNA, 120 bp, synthetic construct; identical to SEQ ID NO: 13522
  source 1..120: mol_type = other DNA

SEQ ID NO: 78170 - DNA, 120 bp, synthetic construct; identical to SEQ ID NO: 48216
  source 1..120: mol_type = other DNA

SEQ ID NO: 78171 - DNA, 120 bp, synthetic construct; identical to SEQ ID NO: 48217
  source 1..120: mol_type = other DNA

SEQ ID NO: 78172 - DNA, 120 bp, synthetic construct; identical to SEQ ID NO: 48218
  source 1..120: mol_type = other DNA

SEQ ID NO: 78173 - DNA, 120 bp, synthetic construct; identical to SEQ ID NO: 13523
  source 1..120: mol_type = other DNA

SEQ ID NO: 78174 - DNA, 120 bp, synthetic construct; identical to SEQ ID NO: 48220
  source 1..120: mol_type = other DNA

SEQ ID NO: 78175 - DNA, 120 bp, synthetic construct; identical to SEQ ID NO: 48221
  source 1..120: mol_type = other DNA

SEQ ID NO: 78176 - DNA, 120 bp, synthetic construct; identical to SEQ ID NO: 48222
  source 1..120: mol_type = other DNA

SEQ ID NO: 78177 - DNA, 120 bp, synthetic construct; identical to SEQ ID NO: 13524
  source 1..120: mol_type = other DNA

SEQ ID NO: 78178 - DNA, 120 bp, synthetic construct; identical to SEQ ID NO: 48224
  source 1..120: mol_type = other DNA

SEQ ID NO: 78179 - DNA, 120 bp, synthetic construct; identical to SEQ ID NO: 48225
  source 1..120: mol_type = other DNA

SEQ ID NO: 78180 - DNA, 120 bp, synthetic construct; identical to SEQ ID NO: 48226
  source 1..120: mol_type = other DNA

SEQ ID NO: 78181 - DNA, 120 bp, synthetic construct; identical to SEQ ID NO: 13525
  source 1..120: mol_type = other DNA

SEQ ID NO: 78182 - DNA, 120 bp, synthetic construct; identical to SEQ ID NO: 48228
  source 1..120: mol_type = other DNA

SEQ ID NO: 78183 - DNA, 120 bp, synthetic construct; identical to SEQ ID NO: 48229
  source 1..120: mol_type = other DNA

SEQ ID NO: 78184 - DNA, 120 bp, synthetic construct; identical to SEQ ID NO: 48230
  source 1..120: mol_type = other DNA

SEQ ID NO: 78185 - DNA, 120 bp, synthetic construct; identical to SEQ ID NO: 13526
  source 1..120: mol_type = other DNA

SEQ ID NO: 78186 - DNA, 120 bp, synthetic construct; identical to SEQ ID NO: 48232
  source 1..120: mol_type = other DNA

SEQ ID NO: 78187 - DNA, 120 bp, synthetic construct; identical to SEQ ID NO: 48233
  source 1..120: mol_type = other DNA

SEQ ID NO: 78188 - DNA, 120 bp, synthetic construct; identical to SEQ ID NO: 48234
  source 1..120: mol_type = other DNA

SEQ ID NO: 78189 - DNA, 120 bp, synthetic construct; identical to SEQ ID NO: 13527
  source 1..120: mol_type = other DNA

SEQ ID NO: 78190 - DNA, 120 bp, synthetic construct; identical to SEQ ID NO: 48236
  source 1..120: mol_type = other DNA

SEQ ID NO: 78191 - DNA, 120 bp, synthetic construct; identical to SEQ ID NO: 48237
  source 1..120: mol_type = other DNA

SEQ ID NO: 78192 - DNA, 120 bp, synthetic construct; identical to SEQ ID NO: 48238
  source 1..120: mol_type = other DNA

SEQ ID NO: 78193 - DNA, 120 bp, synthetic construct; identical to SEQ ID NO: 48239
  source 1..120: mol_type = other DNA

SEQ ID NO: 78194 - DNA, 120 bp, synthetic construct; identical to SEQ ID NO: 13528
  source 1..120: mol_type = other DNA

SEQ ID NO: 78195 - DNA, 120 bp, synthetic construct; identical to SEQ ID NO: 48241
  source 1..120: mol_type = other DNA

SEQ ID NO: 78196 - DNA, 120 bp, synthetic construct; identical to SEQ ID NO: 48242
  source 1..120: mol_type = other DNA

SEQ ID NO: 78197 - DNA, 120 bp, synthetic construct; identical to SEQ ID NO: 48243
  source 1..120: mol_type = other DNA

SEQ ID NO: 78198 - DNA, 120 bp, synthetic construct; identical to SEQ ID NO: 13529
  source 1..120: mol_type = other DNA

SEQ ID NO: 78199 - DNA, 120 bp, synthetic construct; identical to SEQ ID NO: 48245
  source 1..120: mol_type = other DNA

SEQ ID NO: 78200 - DNA, 120 bp, synthetic construct; identical to SEQ ID NO: 48246
  source 1..120: mol_type = other DNA

SEQ ID NO: 78201 - DNA, 120 bp, synthetic construct; identical to SEQ ID NO: 48247
  source 1..120: mol_type = other DNA

SEQ ID NO: 78202 - DNA, 120 bp, synthetic construct; identical to SEQ ID NO: 13530
  source 1..120: mol_type = other DNA

SEQ ID NO: 78203 - DNA, 120 bp, synthetic construct; identical to SEQ ID NO: 48249
  source 1..120: mol_type = other DNA

SEQ ID NO: 78204 - DNA, 120 bp, synthetic construct; identical to SEQ ID NO: 48250
  source 1..120: mol_type = other DNA

SEQ ID NO: 78205 - DNA, 120 bp, synthetic construct; identical to SEQ ID NO: 13531
  source 1..120: mol_type = other DNA

SEQ ID NO: 78206 - DNA, 120 bp, synthetic construct; identical to SEQ ID NO: 48252
  source 1..120: mol_type = other DNA

SEQ ID NO: 78207 - DNA, 120 bp, synthetic construct; identical to SEQ ID NO: 48253
  source 1..120: mol_type = other DNA

SEQ ID NO: 78208 - DNA, 120 bp, synthetic construct; identical to SEQ ID NO: 48254
  source 1..120: mol_type = other DNA

SEQ ID NO: 78209 - DNA, 120 bp, synthetic construct; identical to SEQ ID NO: 48255
  source 1..120: mol_type = other DNA

SEQ ID NO: 78210 - DNA, 120 bp, synthetic construct; identical to SEQ ID NO: 13532
  source 1..120: mol_type = other DNA

SEQ ID NO: 78211 - DNA, 120 bp, synthetic construct; identical to SEQ ID NO: 48257
  source 1..120: mol_type = other DNA

SEQ ID NO: 78212 - DNA, 120 bp, synthetic construct; identical to SEQ ID NO: 48258
  source 1..120: mol_type = other DNA

SEQ ID NO: 78213 - DNA, 120 bp, synthetic construct; identical to SEQ ID NO: 13533
  source 1..120: mol_type = other DNA

SEQ ID NO: 78214 - DNA, 120 bp, synthetic construct; identical to SEQ ID NO: 48260
  source 1..120: mol_type = other DNA

SEQ ID NO: 78215 - DNA, 120 bp, synthetic construct; identical to SEQ ID NO: 48261
  source 1..120: mol_type = other DNA

SEQ ID NO: 78216 - DNA, 120 bp, synthetic construct; identical to SEQ ID NO: 48262
  source 1..120: mol_type = other DNA

SEQ ID NO: 78217 - DNA, 120 bp, synthetic construct; identical to SEQ ID NO: 13534
  source 1..120: mol_type = other DNA

SEQ ID NO: 78218 - DNA, 120 bp, synthetic construct; identical to SEQ ID NO: 48264
  source 1..120: mol_type = other DNA

SEQ ID NO: 78219 - DNA, 120 bp, synthetic construct; identical to SEQ ID NO: 48265
  source 1..120: mol_type = other DNA

SEQ ID NO: 78220 - DNA, 120 bp, synthetic construct; identical to SEQ ID NO: 48266
  source 1..120: mol_type = other DNA

SEQ ID NO: 78221 - DNA, 120 bp, synthetic construct; identical to SEQ ID NO: 13535
  source 1..120: mol_type = other DNA

SEQ ID NO: 78222 - DNA, 120 bp, synthetic construct; identical to SEQ ID NO: 48268
  source 1..120: mol_type = other DNA

SEQ ID NO: 78223 - DNA, 120 bp, synthetic construct; identical to SEQ ID NO: 48269
  source 1..120: mol_type = other DNA

SEQ ID NO: 78224 - DNA, 120 bp, synthetic construct; identical to SEQ ID NO: 48270
  source 1..120: mol_type = other DNA

SEQ ID NO: 78225 - DNA, 120 bp, synthetic construct; identical to SEQ ID NO: 13536
  source 1..120: mol_type = other DNA

SEQ ID NO: 78226 - DNA, 120 bp, synthetic construct; identical to SEQ ID NO: 48272
  source 1..120: mol_type = other DNA

SEQ ID NO: 78227 - DNA, 120 bp, synthetic construct; identical to SEQ ID NO: 48273
  source 1..120: mol_type = other DNA

SEQ ID NO: 78228 - DNA, 120 bp, synthetic construct; identical to SEQ ID NO: 48274
  source 1..120: mol_type = other DNA

SEQ ID NO: 78229 - DNA, 120 bp, synthetic construct; identical to SEQ ID NO: 13537
  source 1..120: mol_type = other DNA

SEQ ID NO: 78230 - DNA, 120 bp, synthetic construct; identical to SEQ ID NO: 48276
  source 1..120: mol_type = other DNA

SEQ ID NO: 78231 - DNA, 120 bp, synthetic construct; identical to SEQ ID NO: 48277
  source 1..120: mol_type = other DNA

SEQ ID NO: 78232 - DNA, 120 bp, synthetic construct; identical to SEQ ID NO: 48278
  source 1..120: mol_type = other DNA

SEQ ID NO: 78233 - DNA, 120 bp, synthetic construct; identical to SEQ ID NO: 13538
  source 1..120: mol_type = other DNA

SEQ ID NO: 78234 - DNA, 120 bp, synthetic construct; identical to SEQ ID NO: 48280
  source 1..120: mol_type = other DNA

SEQ ID NO: 78235 - DNA, 120 bp, synthetic construct; identical to SEQ ID NO: 48281
  source 1..120: mol_type = other DNA

SEQ ID NO: 78236 - DNA, 120 bp, synthetic construct; identical to SEQ ID NO: 48282
  source 1..120: mol_type = other DNA

SEQ ID NO: 78237 - DNA, 120 bp, synthetic construct; identical to SEQ ID NO: 48283
  source 1..120: mol_type = other DNA

SEQ ID NO: 78238 - DNA, 120 bp, synthetic construct; identical to SEQ ID NO: 13539
  source 1..120: mol_type = other DNA

SEQ ID NO: 78239 - DNA, 120 bp, synthetic construct; identical to SEQ ID NO: 48285
  source 1..120: mol_type = other DNA

SEQ ID NO: 78240 - DNA, 120 bp, synthetic construct; identical to SEQ ID NO: 48286
  source 1..120: mol_type = other DNA

SEQ ID NO: 78241 - DNA, 120 bp, synthetic construct; identical to SEQ ID NO: 13540
  source 1..120: mol_type = other DNA

SEQ ID NO: 78242 - DNA, 120 bp, synthetic construct; identical to SEQ ID NO: 48288
  source 1..120: mol_type = other DNA

SEQ ID NO: 78243 - DNA, 120 bp, synthetic construct; identical to SEQ ID NO: 48289
  source 1..120: mol_type = other DNA

SEQ ID NO: 78244 - DNA, 120 bp, synthetic construct; identical to SEQ ID NO: 48290
  source 1..120: mol_type = other DNA

SEQ ID NO: 78245 - DNA, 120 bp, synthetic construct; identical to SEQ ID NO: 13541
  source 1..120: mol_type = other DNA

SEQ ID NO: 78246 - DNA, 120 bp, synthetic construct; identical to SEQ ID NO: 48292
  source 1..120: mol_type = other DNA

SEQ ID NO: 78247 - DNA, 120 bp, synthetic construct; identical to SEQ ID NO: 48293
  source 1..120: mol_type = other DNA

SEQ ID NO: 78248 - DNA, 120 bp, synthetic construct; identical to SEQ ID NO: 48294
  source 1..120: mol_type = other DNA

SEQ ID NO: 78249 - DNA, 120 bp, synthetic construct; identical to SEQ ID NO: 13542
  source 1..120: mol_type = other DNA

SEQ ID NO: 78250 - DNA, 120 bp, synthetic construct; identical to SEQ ID NO: 48296
  source 1..120: mol_type = other DNA

SEQ ID NO: 78251 - DNA, 120 bp, synthetic construct; identical to SEQ ID NO: 48297
  source 1..120: mol_type = other DNA

SEQ ID NO: 78252 - DNA, 120 bp, synthetic construct; identical to SEQ ID NO: 48298
  source 1..120: mol_type = other DNA

SEQ ID NO: 78253 - DNA, 120 bp, synthetic construct; identical to SEQ ID NO: 48299
  source 1..120: mol_type = other DNA

SEQ ID NO: 78254 - DNA, 120 bp, synthetic construct; identical to SEQ ID NO: 48300
  source 1..120: mol_type = other DNA

SEQ ID NO: 78255 - DNA, 120 bp, synthetic construct; identical to SEQ ID NO: 13543
  source 1..120: mol_type = other DNA

SEQ ID NO: 78256 - DNA, 120 bp, synthetic construct; identical to SEQ ID NO: 48302
  source 1..120: mol_type = other DNA

SEQ ID NO: 78257 - DNA, 120 bp, synthetic construct; identical to SEQ ID NO: 48303
  source 1..120: mol_type = other DNA

SEQ ID NO: 78258 - DNA, 120 bp, synthetic construct; identical to SEQ ID NO: 13544
  source 1..120: mol_type = other DNA

SEQ ID NO: 78259 - DNA, 120 bp, synthetic construct; identical to SEQ ID NO: 48305
  source 1..120: mol_type = other DNA

SEQ ID NO: 78260 - DNA, 120 bp, synthetic construct; identical to SEQ ID NO: 48306
  source 1..120: mol_type = other DNA

SEQ ID NO: 78261 - DNA, 120 bp, synthetic construct; identical to SEQ ID NO: 48307
  source 1..120: mol_type = other DNA

SEQ ID NO: 78262 - DNA, 120 bp, synthetic construct; identical to SEQ ID NO: 48308
  source 1..120: mol_type = other DNA

SEQ ID NO: 78263 - DNA, 120 bp, synthetic construct; identical to SEQ ID NO: 13545
  source 1..120: mol_type = other DNA

SEQ ID NO: 78264 - DNA, 120 bp, synthetic construct; identical to SEQ ID NO: 48310
  source 1..120: mol_type = other DNA

SEQ ID NO: 78265 - DNA, 120 bp, synthetic construct; identical to SEQ ID NO: 48311
  source 1..120: mol_type = other DNA

SEQ ID NO: 78266 - DNA, 120 bp, synthetic construct; identical to SEQ ID NO: 48312
  source 1..120: mol_type = other DNA

SEQ ID NO: 78267 - DNA, 120 bp, synthetic construct; identical to SEQ ID NO: 48313
  source 1..120: mol_type = other DNA

SEQ ID NO: 78268 - DNA, 120 bp, synthetic construct; identical to SEQ ID NO: 13546
  source 1..120: mol_type = other DNA

SEQ ID NO: 78269 - DNA, 120 bp, synthetic construct; identical to SEQ ID NO: 48315
  source 1..120: mol_type = other DNA

SEQ ID NO: 78270 - DNA, 120 bp, synthetic construct; identical to SEQ ID NO: 48316
  source 1..120: mol_type = other DNA

SEQ ID NO: 78271 - DNA, 120 bp, synthetic construct; identical to SEQ ID NO: 48317
  source 1..120: mol_type = other DNA

SEQ ID NO: 78272 - DNA, 120 bp, synthetic construct; identical to SEQ ID NO: 13547
  source 1..120: mol_type = other DNA

SEQ ID NO: 78273 - DNA, 120 bp, synthetic construct; identical to SEQ ID NO: 48319
  source 1..120: mol_type = other DNA

SEQ ID NO: 78274 - DNA, 120 bp, synthetic construct; identical to SEQ ID NO: 48320
  source 1..120: mol_type = other DNA

SEQ ID NO: 78275 - DNA, 120 bp, synthetic construct; identical to SEQ ID NO: 48321
  source 1..120: mol_type = other DNA

SEQ ID NO: 78276 - DNA, 120 bp, synthetic construct; identical to SEQ ID NO: 13548
  source 1..120: mol_type = other DNA

SEQ ID NO: 78277 - DNA, 120 bp, synthetic construct; identical to SEQ ID NO: 48323
  source 1..120: mol_type = other DNA

SEQ ID NO: 78278 - DNA, 120 bp, synthetic construct; identical to SEQ ID NO: 48324
  source 1..120: mol_type = other DNA

SEQ ID NO: 78279 - DNA, 120 bp, synthetic construct; identical to SEQ ID NO: 13549
  source 1..120: mol_type = other DNA

SEQ ID NO: 78280 - DNA, 120 bp, synthetic construct; identical to SEQ ID NO: 48326
  source 1..120: mol_type = other DNA

SEQ ID NO: 78281 - DNA, 120 bp, synthetic construct; identical to SEQ ID NO: 48327
  source 1..120: mol_type = other DNA

SEQ ID NO: 78282 - DNA, 120 bp, synthetic construct; identical to SEQ ID NO: 48328
  source 1..120: mol_type = other DNA

SEQ ID NO: 78283 - DNA, 120 bp, synthetic construct; identical to SEQ ID NO: 13550
  source 1..120: mol_type = other DNA

SEQ ID NO: 78284 - DNA, 120 bp, synthetic construct; identical to SEQ ID NO: 48330
  source 1..120: mol_type = other DNA

SEQ ID NO: 78285 - DNA, 120 bp, synthetic construct; identical to SEQ ID NO: 48331
  source 1..120: mol_type = other DNA

SEQ ID NO: 78286 - DNA, 120 bp, synthetic construct; identical to SEQ ID NO: 48332
  source 1..120: mol_type = other DNA

SEQ ID NO: 78287 - DNA, 120 bp, synthetic construct; identical to SEQ ID NO: 13551
  source 1..120: mol_type = other DNA

SEQ ID NO: 78288 - DNA, 120 bp, synthetic construct; identical to SEQ ID NO: 48334
  source 1..120: mol_type = other DNA

SEQ ID NO: 78289 - DNA, 120 bp, synthetic construct; identical to SEQ ID NO: 48335
  source 1..120: mol_type = other DNA

SEQ ID NO: 78290 - DNA, 120 bp, synthetic construct; identical to SEQ ID NO: 48336
  source 1..120: mol_type = other DNA

SEQ ID NO: 78291 - DNA, 120 bp, synthetic construct; identical to SEQ ID NO: 48337
  source 1..120: mol_type = other DNA

SEQ ID NO: 78292 - DNA, 120 bp, synthetic construct; identical to SEQ ID NO: 13552
  source 1..120: mol_type = other DNA

SEQ ID NO: 78293 - DNA, 120 bp, synthetic construct; identical to SEQ ID NO: 48339
  source 1..120: mol_type = other DNA

SEQ ID NO: 78294 - DNA, 120 bp, synthetic construct; identical to SEQ ID NO: 48340
  source 1..120: mol_type = other DNA

SEQ ID NO: 78295 - DNA, 120 bp, synthetic construct; identical to SEQ ID NO: 13553
  source 1..120: mol_type = other DNA

SEQ ID NO: 78296 - DNA, 120 bp, synthetic construct; identical to SEQ ID NO: 48342
  source 1..120: mol_type = other DNA

SEQ ID NO: 78297 - DNA, 120 bp, synthetic construct; identical to SEQ ID NO: 48343
  source 1..120: mol_type = other DNA

SEQ ID NO: 78298 - DNA, 120 bp, synthetic construct; identical to SEQ ID NO: 48344
  source 1..120: mol_type = other DNA

SEQ ID NO: 78299 - DNA, 120 bp, synthetic construct; identical to SEQ ID NO: 13554
  source 1..120: mol_type = other DNA

SEQ ID NO: 78300 - DNA, 120 bp, synthetic construct; identical to SEQ ID NO: 48346
  source 1..120: mol_type = other DNA

SEQ ID NO: 78301 - DNA, 120 bp, synthetic construct; identical to SEQ ID NO: 48347
  source 1..120: mol_type = other DNA

SEQ ID NO: 78302 - DNA, 120 bp, synthetic construct; identical to SEQ ID NO: 48348
  source 1..120: mol_type = other DNA

SEQ ID NO: 78303 - DNA, 120 bp, synthetic construct; identical to SEQ ID NO: 48349
  source 1..120: mol_type = other DNA

SEQ ID NO: 78304 - DNA, 120 bp, synthetic construct; identical to SEQ ID NO: 13555
  source 1..120: mol_type = other DNA

SEQ ID NO: 78305 - DNA, 120 bp, synthetic construct; identical to SEQ ID NO: 48351
  source 1..120: mol_type = other DNA

SEQ ID NO: 78306 - DNA, 120 bp, synthetic construct; identical to SEQ ID NO: 48352
  source 1..120: mol_type = other DNA

SEQ ID NO: 78307 - DNA, 120 bp, synthetic construct; identical to SEQ ID NO: 48353
  source 1..120: mol_type = other DNA

SEQ ID NO: 78308 - DNA, 120 bp, synthetic construct; identical to SEQ ID NO: 13556
  source 1..120: mol_type = other DNA

SEQ ID NO: 78309 - DNA, 120 bp, synthetic construct; identical to SEQ ID NO: 48355
  source 1..120: mol_type = other DNA

SEQ ID NO: 78310 - DNA, 120 bp, synthetic construct; identical to SEQ ID NO: 48356
  source 1..120: mol_type = other DNA

SEQ ID NO: 78311 - DNA, 120 bp, synthetic construct; identical to SEQ ID NO: 13557
  source 1..120: mol_type = other DNA

SEQ ID NO: 78312 - DNA, 120 bp, synthetic construct; identical to SEQ ID NO: 48358
  source 1..120: mol_type = other DNA

SEQ ID NO: 78313 - DNA, 120 bp, synthetic construct; identical to SEQ ID NO: 48359
  source 1..120: mol_type = other DNA

SEQ ID NO: 78314 - DNA, 120 bp, synthetic construct; identical to SEQ ID NO: 48360
  source 1..120: mol_type = other DNA

SEQ ID NO: 78315 - DNA, 120 bp, synthetic construct; identical to SEQ ID NO: 48361
  source 1..120: mol_type = other DNA

SEQ ID NO: 78316 - DNA, 120 bp, synthetic construct; identical to SEQ ID NO: 13558
  source 1..120: mol_type = other DNA

SEQ ID NO: 78317 - DNA, 120 bp, synthetic construct; identical to SEQ ID NO: 48363
  source 1..120: mol_type = other DNA

SEQ ID NO: 78318 - DNA, 120 bp, synthetic construct; identical to SEQ ID NO: 48364
  source 1..120: mol_type = other DNA

SEQ ID NO: 78319 - DNA, 120 bp, synthetic construct; identical to SEQ ID NO: 48365
  source 1..120: mol_type = other DNA

SEQ ID NO: 78320 - DNA, 120 bp, synthetic construct; identical to SEQ ID NO: 13559
  source 1..120: mol_type = other DNA

SEQ ID NO: 78321 - DNA, 120 bp, synthetic construct; identical to SEQ ID NO: 48367
  source 1..120: mol_type = other DNA

SEQ ID NO: 78322 - DNA, 120 bp, synthetic construct; identical to SEQ ID NO: 48368
  source 1..120: mol_type = other DNA

SEQ ID NO: 78323 - DNA, 120 bp, synthetic construct; identical to SEQ ID NO: 48369
  source 1..120: mol_type = other DNA

SEQ ID NO: 78324 - DNA, 120 bp, synthetic construct; identical to SEQ ID NO: 13560
  source 1..120: mol_type = other DNA

SEQ ID NO: 78325 - DNA, 120 bp, synthetic construct; identical to SEQ ID NO: 48371
  source 1..120: mol_type = other DNA

SEQ ID NO: 78326 - DNA, 120 bp, synthetic construct; identical to SEQ ID NO: 48372
  source 1..120: mol_type = other DNA

SEQ ID NO: 78327 - DNA, 120 bp, synthetic construct; identical to SEQ ID NO: 48373
  source 1..120: mol_type = other DNA

SEQ ID NO: 78328 - DNA, 120 bp, synthetic construct; identical to SEQ ID NO: 13561
  source 1..120: mol_type = other DNA

SEQ ID NO: 78329 - DNA, 120 bp, synthetic construct; identical to SEQ ID NO: 48375
  source 1..120: mol_type = other DNA

SEQ ID NO: 78330 - DNA, 120 bp, synthetic construct; identical to SEQ ID NO: 48376
  source 1..120: mol_type = other DNA

SEQ ID NO: 78331 - DNA, 120 bp, synthetic construct; identical to SEQ ID NO: 13562
  source 1..120: mol_type = other DNA

SEQ ID NO: 78332 - DNA, 120 bp, synthetic construct; identical to SEQ ID NO: 48378
  source 1..120: mol_type = other DNA

SEQ ID NO: 78333 - DNA, 120 bp, synthetic construct; identical to SEQ ID NO: 48379
  source 1..120: mol_type = other DNA

SEQ ID NO: 78334 - DNA, 120 bp, synthetic construct; identical to SEQ ID NO: 48380
  source 1..120: mol_type = other DNA

SEQ ID NO: 78335 - DNA, 120 bp, synthetic construct; identical to SEQ ID NO: 48381
  source 1..120: mol_type = other DNA

SEQ ID NO: 78336 - DNA, 120 bp, synthetic construct; identical to SEQ ID NO: 13563
  source 1..120: mol_type = other DNA

SEQ ID NO: 78337 - DNA, 120 bp, synthetic construct; identical to SEQ ID NO: 48383
  source 1..120: mol_type = other DNA

SEQ ID NO: 78338 - DNA, 120 bp, synthetic construct; identical to SEQ ID NO: 48384
  source 1..120: mol_type = other DNA

SEQ ID NO: 78339 - DNA, 120 bp, synthetic construct; identical to SEQ ID NO: 48385
  source 1..120: mol_type = other DNA

SEQ ID NO: 78340 - DNA, 120 bp, synthetic construct; identical to SEQ ID NO: 13564
  source 1..120: mol_type = other DNA

SEQ ID NO: 78341 - DNA, 120 bp, synthetic construct; identical to SEQ ID NO: 48387
  source 1..120: mol_type = other DNA

SEQ ID NO: 78342 - DNA, 120 bp, synthetic construct; identical to SEQ ID NO: 48388
  source 1..120: mol_type = other DNA

SEQ ID NO: 78343 - DNA, 120 bp, synthetic construct; identical to SEQ ID NO: 13565
  source 1..120: mol_type = other DNA

SEQ ID NO: 78344 - DNA, 120 bp, synthetic construct; identical to SEQ ID NO: 48390
  source 1..120: mol_type = other DNA

SEQ ID NO: 78345 - DNA, 120 bp, synthetic construct; identical to SEQ ID NO: 48391
  source 1..120: mol_type = other DNA

SEQ ID NO: 78346 - DNA, 120 bp, synthetic construct; identical to SEQ ID NO: 48392
  source 1..120: mol_type = other DNA

SEQ ID NO: 78347 - DNA, 120 bp, synthetic construct; identical to SEQ ID NO: 48393
  source 1..120: mol_type = other DNA

SEQ ID NO: 78348 - DNA, 120 bp, synthetic construct; identical to SEQ ID NO: 13566
  source 1..120: mol_type = other DNA

SEQ ID NO: 78349 - DNA, 120 bp, synthetic construct; identical to SEQ ID NO: 48395
  source 1..120: mol_type = other DNA

SEQ ID NO: 78350 - DNA, 120 bp, synthetic construct; identical to SEQ ID NO: 48396
  source 1..120: mol_type = other DNA

SEQ ID NO: 78351 - DNA, 120 bp, synthetic construct; identical to SEQ ID NO: 48397
  source 1..120: mol_type = other DNA

SEQ ID NO: 78352 - DNA, 120 bp, synthetic construct; identical to SEQ ID NO: 13567
  source 1..120: mol_type = other DNA

SEQ ID NO: 78353 - DNA, 120 bp, synthetic construct; identical to SEQ ID NO: 48399
  source 1..120: mol_type = other DNA

SEQ ID NO: 78354 - DNA, 120 bp, synthetic construct; identical to SEQ ID NO: 48400
  source 1..120: mol_type = other DNA

SEQ ID NO: 78355 - DNA, 120 bp, synthetic construct; identical to SEQ ID NO: 48401
  source 1..120: mol_type = other DNA

SEQ ID NO: 78356 - DNA, 120 bp, synthetic construct; identical to SEQ ID NO: 13568
  source 1..120: mol_type = other DNA

SEQ ID NO: 78357 - DNA, 120 bp, synthetic construct; identical to SEQ ID NO: 48403
  source 1..120: mol_type = other DNA

SEQ ID NO: 78358 - DNA, 120 bp, synthetic construct; identical to SEQ ID NO: 48404
  source 1..120: mol_type = other DNA

SEQ ID NO: 78359 - DNA, 120 bp, synthetic construct; identical to SEQ ID NO: 48405
  source 1..120: mol_type = other DNA

SEQ ID NO: 78360 - DNA, 120 bp, synthetic construct; identical to SEQ ID NO: 13569
  source 1..120: mol_type = other DNA

SEQ ID NO: 78361 - DNA, 120 bp, synthetic construct; identical to SEQ ID NO: 48407
  source 1..120: mol_type = other DNA

SEQ ID NO: 78362 - DNA, 120 bp, synthetic construct; identical to SEQ ID NO: 48408
  source 1..120: mol_type = other DNA

SEQ ID NO: 78363 - DNA, 120 bp, synthetic construct; identical to SEQ ID NO: 48409
  source 1..120: mol_type = other DNA

SEQ ID NO: 78364 - DNA, 120 bp, synthetic construct; identical to SEQ ID NO: 13570
  source 1..120: mol_type = other DNA

SEQ ID NO: 78365 - DNA, 120 bp, synthetic construct; identical to SEQ ID NO: 48411
  source 1..120: mol_type = other DNA

SEQ ID NO: 78366 - DNA, 120 bp, synthetic construct; identical to SEQ ID NO: 48412
  source 1..120: mol_type = other DNA

SEQ ID NO: 78367 - DNA, 120 bp, synthetic construct; identical to SEQ ID NO: 48413
  source 1..120: mol_type = other DNA

SEQ ID NO: 78368 - DNA, 120 bp, synthetic construct; identical to SEQ ID NO: 13571
  source 1..120: mol_type = other DNA

SEQ ID NO: 78369 - DNA, 120 bp, synthetic construct; identical to SEQ ID NO: 48415
  source 1..120: mol_type = other DNA

SEQ ID NO: 78370 - DNA, 120 bp, synthetic construct; identical to SEQ ID NO: 48416
  source 1..120: mol_type = other DNA

SEQ ID NO: 78371 - DNA, 120 bp, synthetic construct; identical to SEQ ID NO: 48417
  source 1..120: mol_type = other DNA

SEQ ID NO: 78372 - DNA, 120 bp, synthetic construct; identical to SEQ ID NO: 13572
  source 1..120: mol_type = other DNA

SEQ ID NO: 78373 - DNA, 120 bp, synthetic construct; identical to SEQ ID NO: 48419
  source 1..120: mol_type = other DNA

SEQ ID NO: 78374 - DNA, 120 bp, synthetic construct; identical to SEQ ID NO: 48420
  source 1..120: mol_type = other DNA

SEQ ID NO: 78375 - DNA, 120 bp, synthetic construct; identical to SEQ ID NO: 48421
  source 1..120: mol_type = other DNA

SEQ ID NO: 78376 - DNA, 120 bp, synthetic construct; identical to SEQ ID NO: 13573
  source 1..120: mol_type = other DNA

SEQ ID NO: 78377 - DNA, 120 bp, synthetic construct; identical to SEQ ID NO: 48423
  source 1..120: mol_type = other DNA

SEQ ID NO: 78378 - DNA, 120 bp, synthetic construct; identical to SEQ ID NO: 48424
  source 1..120: mol_type = other DNA

SEQ ID NO: 78379 - DNA, 120 bp, synthetic construct; identical to SEQ ID NO: 48425
  source 1..120: mol_type = other DNA

SEQ ID NO: 78380 - DNA, 120 bp, synthetic construct; identical to SEQ ID NO: 13574
  source 1..120: mol_type = other DNA

SEQ ID NO: 78381 - DNA, 120 bp, synthetic construct; identical to SEQ ID NO: 48427
  source 1..120: mol_type = other DNA

SEQ ID NO: 78382 - DNA, 120 bp, synthetic construct; identical to SEQ ID NO: 48428
  source 1..120: mol_type = other DNA

SEQ ID NO: 78383 - DNA, 120 bp, synthetic construct; identical to SEQ ID NO: 48429
  source 1..120: mol_type = other DNA

SEQ ID NO: 78384 - DNA, 120 bp, synthetic construct; identical to SEQ ID NO: 13575
  source 1..120: mol_type = other DNA

SEQ ID NO: 78385 - DNA, 120 bp, synthetic construct; identical to SEQ ID NO: 48431
  source 1..120: mol_type = other DNA

SEQ ID NO: 78386 - DNA, 120 bp, synthetic construct; identical to SEQ ID NO: 48432
  source 1..120: mol_type = other DNA

SEQ ID NO: 78387 - DNA, 120 bp, synthetic construct; identical to SEQ ID NO: 48433
  source 1..120: mol_type = other DNA

SEQ ID NO: 78388 - DNA, 120 bp, synthetic construct; identical to SEQ ID NO: 13576
  source 1..120: mol_type = other DNA

SEQ ID NO: 78389 - DNA, 120 bp, synthetic construct; identical to SEQ ID NO: 48435
  source 1..120: mol_type = other DNA

SEQ ID NO: 78390 - DNA, 120 bp, synthetic construct; identical to SEQ ID NO: 48436
  source 1..120: mol_type = other DNA

SEQ ID NO: 78391 - DNA, 120 bp, synthetic construct; identical to SEQ ID NO: 48437
  source 1..120: mol_type = other DNA

SEQ ID NO: 78392 - DNA, 120 bp, synthetic construct; identical to SEQ ID NO: 13577
  source 1..120: mol_type = other DNA

SEQ ID NO: 78393 - DNA, 120 bp, synthetic construct; identical to SEQ ID NO: 48439
  source 1..120: mol_type = other DNA

SEQ ID NO: 78394 - DNA, 120 bp, synthetic construct; identical to SEQ ID NO: 48440
  source 1..120: mol_type = other DNA

SEQ ID NO: 78395 - DNA, 120 bp, synthetic construct; identical to SEQ ID NO: 48441
  source 1..120: mol_type = other DNA

SEQ ID NO: 78396 - DNA, 120 bp, synthetic construct; identical to SEQ ID NO: 13578
  source 1..120: mol_type = other DNA

SEQ ID NO: 78397 - DNA, 120 bp, synthetic construct; identical to SEQ ID NO: 48443
  source 1..120: mol_type = other DNA

SEQ ID NO: 78398 - DNA, 120 bp, synthetic construct; identical to SEQ ID NO: 48444
  source 1..120: mol_type = other DNA

SEQ ID NO: 78399 - DNA, 120 bp, synthetic construct; identical to SEQ ID NO: 13579
  source 1..120: mol_type = other DNA

SEQ ID NO: 78400 - DNA, 120 bp, synthetic construct; identical to SEQ ID NO: 48446
  source 1..120: mol_type = other DNA

SEQ ID NO: 78401 - DNA, 120 bp, synthetic construct; identical to SEQ ID NO: 48447
  source 1..120: mol_type = other DNA

SEQ ID NO: 78402 - DNA, 120 bp, synthetic construct; identical to SEQ ID NO: 48448
  source 1..120: mol_type = other DNA

SEQ ID NO: 78403 - DNA, 120 bp, synthetic construct; identical to SEQ ID NO: 13580
  source 1..120: mol_type = other DNA

SEQ ID NO: 78404 - DNA, 120 bp, synthetic construct; identical to SEQ ID NO: 48450
  source 1..120: mol_type = other DNA

SEQ ID NO: 78405 - DNA, 120 bp, synthetic construct; identical to SEQ ID NO: 48451
  source 1..120: mol_type = other DNA

SEQ ID NO: 78406 - DNA, 120 bp, synthetic construct; identical to SEQ ID NO: 48452
  source 1..120: mol_type = other DNA

SEQ ID NO: 78407 - DNA, 120 bp, synthetic construct; identical to SEQ ID NO: 13581
  source 1..120: mol_type = other DNA

SEQ ID NO: 78408 - DNA, 120 bp, synthetic construct; identical to SEQ ID NO: 48454
  source 1..120: mol_type = other DNA

SEQ ID NO: 78409 - DNA, 120 bp, synthetic construct; identical to SEQ ID NO: 48455
  source 1..120: mol_type = other DNA

SEQ ID NO: 78410 - DNA, 120 bp, synthetic construct; identical to SEQ ID NO: 48456
  source 1..120: mol_type = other DNA

SEQ ID NO: 78411 - DNA, 120 bp, synthetic construct; identical to SEQ ID NO: 13582
  source 1..120: mol_type = other DNA

SEQ ID NO: 78412 - DNA, 120 bp, synthetic construct; identical to SEQ ID NO: 48458
  source 1..120: mol_type = other DNA

SEQ ID NO: 78413 - DNA, 120 bp, synthetic construct; identical to SEQ ID NO: 48459
  source 1..120: mol_type = other DNA

SEQ ID NO: 78414 - DNA, 120 bp, synthetic construct; identical to SEQ ID NO: 48460
  source 1..120: mol_type = other DNA

SEQ ID NO: 78415 - DNA, 120 bp, synthetic construct; identical to SEQ ID NO: 48461
  source 1..120: mol_type = other DNA

SEQ ID NO: 78416 - DNA, 120 bp, synthetic construct; identical to SEQ ID NO: 13583
  source 1..120: mol_type = other DNA

SEQ ID NO: 78417 - DNA, 120 bp, synthetic construct; identical to SEQ ID NO: 48463
  source 1..120: mol_type = other DNA

SEQ ID NO: 78418 - DNA, 120 bp, synthetic construct; identical to SEQ ID NO: 48464
  source 1..120: mol_type = other DNA

SEQ ID NO: 78419 - DNA, 120 bp, synthetic construct; identical to SEQ ID NO: 48465
  source 1..120: mol_type = other DNA

SEQ ID NO: 78420 - DNA, 120 bp, synthetic construct; identical to SEQ ID NO: 13584
  source 1..120: mol_type = other DNA

SEQ ID NO: 78421 - DNA, 120 bp, synthetic construct; identical to SEQ ID NO: 48467
  source 1..120: mol_type = other DNA

SEQ ID NO: 78422 - DNA, 120 bp, synthetic construct; identical to SEQ ID NO: 48468
  source 1..120: mol_type = other DNA

SEQ ID NO: 78423 - DNA, 120 bp, synthetic construct; identical to SEQ ID NO: 13585
  source 1..120: mol_type = other DNA

SEQ ID NO: 78424 - DNA, 120 bp, synthetic construct; identical to SEQ ID NO: 48470
  source 1..120: mol_type = other DNA

SEQ ID NO: 78425 - DNA, 120 bp, synthetic construct; identical to SEQ ID NO: 48471
  source 1..120: mol_type = other DNA

SEQ ID NO: 78426 - DNA, 120 bp, synthetic construct; identical to SEQ ID NO: 48472
  source 1..120: mol_type = other DNA

SEQ ID NO: 78427 - DNA, 120 bp, synthetic construct; identical to SEQ ID NO: 48473
  source 1..120: mol_type = other DNA

SEQ ID NO: 78428 - DNA, 120 bp, synthetic construct; identical to SEQ ID NO: 13586
  source 1..120: mol_type = other DNA

SEQ ID NO: 78429 - DNA, 120 bp, synthetic construct; identical to SEQ ID NO: 48475
  source 1..120: mol_type = other DNA

SEQ ID NO: 78430 - DNA, 120 bp, synthetic construct; identical to SEQ ID NO: 48476
  source 1..120: mol_type = other DNA

SEQ ID NO: 78431 - DNA, 120 bp, synthetic construct; identical to SEQ ID NO: 48477
  source 1..120: mol_type = other DNA

SEQ ID NO: 78432 - DNA, 120 bp, synthetic construct; identical to SEQ ID NO: 13587
  source 1..120: mol_type = other DNA

SEQ ID NO: 78433 - DNA, 120 bp, synthetic construct; identical to SEQ ID NO: 48479
  source 1..120: mol_type = other DNA

SEQ ID NO: 78434 - DNA, 120 bp, synthetic construct; identical to SEQ ID NO: 48480
  source 1..120: mol_type = other DNA

SEQ ID NO: 78435 - DNA, 120 bp, synthetic construct; identical to SEQ ID NO: 48481
  source 1..120: mol_type = other DNA

SEQ ID NO: 78436 - DNA, 120 bp, synthetic construct; identical to SEQ ID NO: 13588
  source 1..120: mol_type = other DNA

SEQ ID NO: 78437 - DNA, 120 bp, synthetic construct; identical to SEQ ID NO: 48483
  source 1..120: mol_type = other DNA

SEQ ID NO: 78438 - DNA, 120 bp, synthetic construct; identical to SEQ ID NO: 48484
  source 1..120: mol_type = other DNA

SEQ ID NO: 78439 - DNA, 120 bp, synthetic construct; identical to SEQ ID NO: 13589
  source 1..120: mol_type = other DNA

SEQ ID NO: 78440 - DNA, 120 bp, synthetic construct; identical to SEQ ID NO: 48486
  source 1..120: mol_type = other DNA

SEQ ID NO: 78441 - DNA, 120 bp, synthetic construct; identical to SEQ ID NO: 48487
  source 1..120: mol_type = other DNA

SEQ ID NO: 78442 - DNA, 120 bp, synthetic construct; identical to SEQ ID NO: 48488
  source 1..120: mol_type = other DNA

SEQ ID NO: 78443 - DNA, 120 bp, synthetic construct; identical to SEQ ID NO: 13590
  source 1..120: mol_type = other DNA

SEQ ID NO: 78444 - DNA, 120 bp, synthetic construct; identical to SEQ ID NO: 48490
  source 1..120: mol_type = other DNA

SEQ ID NO: 78445 - DNA, 120 bp, synthetic construct; identical to SEQ ID NO: 48491
  source 1..120: mol_type = other DNA

SEQ ID NO: 78446 - DNA, 120 bp, synthetic construct; identical to SEQ ID NO: 48492
  source 1..120: mol_type = other DNA

SEQ ID NO: 78447 - DNA, 120 bp, synthetic construct; identical to SEQ ID NO: 48493
  source 1..120: mol_type = other DNA

SEQ ID NO: 78448 - DNA, 120 bp, synthetic construct; identical to SEQ ID NO: 13591
  source 1..120: mol_type = other DNA

SEQ ID NO: 78449 - DNA, 120 bp, synthetic construct; identical to SEQ ID NO: 48495
  source 1..120: mol_type = other DNA

SEQ ID NO: 78450 - DNA, 120 bp, synthetic construct; identical to SEQ ID NO: 48496
  source 1..120: mol_type = other DNA

SEQ ID NO: 78451 - DNA, 120 bp, synthetic construct; identical to SEQ ID NO: 13592
  source 1..120: mol_type = other DNA

SEQ ID NO: 78452 - DNA, 120 bp, synthetic construct; identical to SEQ ID NO: 48498
  source 1..120: mol_type = other DNA

SEQ ID NO: 78453 - DNA, 120 bp, synthetic construct; identical to SEQ ID NO: 48499
  source 1..120: mol_type = other DNA

SEQ ID NO: 78454 - DNA, 120 bp, synthetic construct; identical to SEQ ID NO: 48500
  source 1..120: mol_type = other DNA

SEQ ID NO: 78455 - DNA, 120 bp, synthetic construct; identical to SEQ ID NO: 48501
  source 1..120: mol_type = other DNA

SEQ ID NO: 78456 - DNA, 120 bp, synthetic construct; identical to SEQ ID NO: 13593
  source 1..120: mol_type = other DNA

SEQ ID NO: 78457 - DNA, 120 bp, synthetic construct; identical to SEQ ID NO: 48503
  source 1..120: mol_type = other DNA

SEQ ID NO: 78458 - DNA, 120 bp, synthetic construct; identical to SEQ ID NO: 48504
  source 1..120: mol_type = other DNA

SEQ ID NO: 78459 - DNA, 120 bp, synthetic construct; identical to SEQ ID NO: 48505
  source 1..120: mol_type = other DNA

SEQ ID NO: 78460 - DNA, 120 bp, synthetic construct; identical to SEQ ID NO: 13594
  source 1..120: mol_type = other DNA

SEQ ID NO: 78461 - DNA, 120 bp, synthetic construct; identical to SEQ ID NO: 48507
  source 1..120: mol_type = other DNA

SEQ ID NO: 78462 - DNA, 120 bp, synthetic construct; identical to SEQ ID NO: 48508
  source 1..120: mol_type = other DNA

SEQ ID NO: 78463 - DNA, 120 bp, synthetic construct; identical to SEQ ID NO: 48509
  source 1..120: mol_type = other DNA

SEQ ID NO: 78464 - DNA, 120 bp, synthetic construct; identical to SEQ ID NO: 13595
  source 1..120: mol_type = other DNA

SEQ ID NO: 78465 - DNA, 120 bp, synthetic construct; identical to SEQ ID NO: 48511
  source 1..120: mol_type = other DNA

SEQ ID NO: 78466 - DNA, 120 bp, synthetic construct; identical to SEQ ID NO: 48512
  source 1..120: mol_type = other DNA

SEQ ID NO: 78467 - DNA, 120 bp, synthetic construct; identical to SEQ ID NO: 13596
  source 1..120: mol_type = other DNA

SEQ ID NO: 78468 - DNA, 120 bp, synthetic construct; identical to SEQ ID NO: 48514
  source 1..120: mol_type = other DNA

SEQ ID NO: 78469 - DNA, 120 bp, synthetic construct; identical to SEQ ID NO: 48515
  source 1..120: mol_type = other DNA

SEQ ID NO: 78470 - DNA, 120 bp, synthetic construct; identical to SEQ ID NO: 48516
  source 1..120: mol_type = other DNA

SEQ ID NO: 78471 - DNA, 120 bp, synthetic construct; identical to SEQ ID NO: 13597
  source 1..120: mol_type = other DNA

SEQ ID NO: 78472 - DNA, 120 bp, synthetic construct; identical to SEQ ID NO: 48518
  source 1..120: mol_type = other DNA

SEQ ID NO: 78473 - DNA, 120 bp, synthetic construct; identical to SEQ ID NO: 48519
  source 1..120: mol_type = other DNA

SEQ ID NO: 78474 - DNA, 120 bp, synthetic construct; identical to SEQ ID NO: 48520
  source 1..120: mol_type = other DNA

SEQ ID NO: 78475 - DNA, 120 bp, synthetic construct; identical to SEQ ID NO: 13598
  source 1..120: mol_type = other DNA

SEQ ID NO: 78476 - DNA, 120 bp, synthetic construct; identical to SEQ ID NO: 48522
  source 1..120: mol_type = other DNA

SEQ ID NO: 78477 - DNA, 120 bp, synthetic construct; identical to SEQ ID NO: 48523
  source 1..120: mol_type = other DNA

SEQ ID NO: 78478 - DNA, 120 bp, synthetic construct; identical to SEQ ID NO: 48524
  source 1..120: mol_type = other DNA

SEQ ID NO: 78479 - DNA, 120 bp, synthetic construct; identical to SEQ ID NO: 13599
  source 1..120: mol_type = other DNA

SEQ ID NO: 78480 - DNA, 120 bp, synthetic construct; identical to SEQ ID NO: 48526
  source 1..120: mol_type = other DNA

SEQ ID NO: 78481 - DNA, 120 bp, synthetic construct; identical to SEQ ID NO: 48527
  source 1..120: mol_type = other DNA

SEQ ID NO: 78482 - DNA, 120 bp, synthetic construct; identical to SEQ ID NO: 48528
  source 1..120: mol_type = other DNA

SEQ ID NO: 78483 - DNA, 120 bp, synthetic construct; identical to SEQ ID NO: 48529
  source 1..120: mol_type = other DNA

SEQ ID NO: 78484 - DNA, 120 bp, synthetic construct; identical to SEQ ID NO: 13600
  source 1..120: mol_type = other DNA

SEQ ID NO: 78485 - DNA, 120 bp, synthetic construct; identical to SEQ ID NO: 48531
  source 1..120: mol_type = other DNA

SEQ ID NO: 78486 - DNA, 120 bp, synthetic construct; identical to SEQ ID NO: 48532
  source 1..120: mol_type = other DNA

SEQ ID NO: 78487 - DNA, 120 bp, synthetic construct; identical to SEQ ID NO: 48533
  source 1..120: mol_type = other DNA

SEQ ID NO: 78488 - DNA, 120 bp, synthetic construct; identical to SEQ ID NO: 13601
  source 1..120: mol_type = other DNA

SEQ ID NO: 78489 - DNA, 120 bp, synthetic construct; identical to SEQ ID NO: 48535
  source 1..120: mol_type = other DNA

SEQ ID NO: 78490 - DNA, 120 bp, synthetic construct; identical to SEQ ID NO: 48536
  source 1..120: mol_type = other DNA

SEQ ID NO: 78491 - DNA, 120 bp, synthetic construct; identical to SEQ ID NO: 13602
  source 1..120: mol_type = other DNA

SEQ ID NO: 78492 - DNA, 120 bp, synthetic construct; identical to SEQ ID NO: 48538
  source 1..120: mol_type = other DNA

SEQ ID NO: 78493 - DNA, 120 bp, synthetic construct; identical to SEQ ID NO: 48539
  source 1..120: mol_type = other DNA

SEQ ID NO: 78494 - DNA, 120 bp, synthetic construct; identical to SEQ ID NO: 48540
  source 1..120: mol_type = other DNA

SEQ ID NO: 78495 - DNA, 120 bp, synthetic construct; identical to SEQ ID NO: 13603
  source 1..120: mol_type = other DNA

SEQ ID NO: 78496 - DNA, 120 bp, synthetic construct; identical to SEQ ID NO: 48542
  source 1..120: mol_type = other DNA

SEQ ID NO: 78497 - DNA, 120 bp, synthetic construct; identical to SEQ ID NO: 48543
  source 1..120: mol_type = other DNA

SEQ ID NO: 78498 - DNA, 120 bp, synthetic construct; identical to SEQ ID NO: 48544
  source 1..120: mol_type = other DNA

SEQ ID NO: 78499 - DNA, 120 bp, synthetic construct; identical to SEQ ID NO: 13604
  source 1..120: mol_type = other DNA

SEQ ID NO: 78500 - DNA, 120 bp, synthetic construct; identical to SEQ ID NO: 48546
  source 1..120: mol_type = other DNA

SEQ ID NO: 78501 - DNA, 120 bp, synthetic construct; identical to SEQ ID NO: 48547
  source 1..120: mol_type = other DNA

SEQ ID NO: 78502 - DNA, 120 bp, synthetic construct; identical to SEQ ID NO: 48548
  source 1..120: mol_type = other DNA

SEQ ID NO: 78503 - DNA, 120 bp, synthetic construct; identical to SEQ ID NO: 48549
  source 1..120: mol_type = other DNA

SEQ ID NO: 78504 - DNA, 120 bp, synthetic construct; identical to SEQ ID NO: 13605
  source 1..120: mol_type = other DNA

SEQ ID NO: 78505 - DNA, 120 bp, synthetic construct; identical to SEQ ID NO: 48551
  source 1..120: mol_type = other DNA

SEQ ID NO: 78506 - DNA, 120 bp, synthetic construct; identical to SEQ ID NO: 48552
  source 1..120: mol_type = other DNA

SEQ ID NO: 78507 - DNA, 120 bp, synthetic construct; identical to SEQ ID NO: 48553
  source 1..120: mol_type = other DNA

SEQ ID NO: 78508 - DNA, 120 bp, synthetic construct; identical to SEQ ID NO: 13606
  source 1..120: mol_type = other DNA

SEQ ID NO: 78509 - DNA, 120 bp, synthetic construct; identical to SEQ ID NO: 48555
  source 1..120: mol_type = other DNA

SEQ ID NO: 78510 - DNA, 120 bp, synthetic construct; identical to SEQ ID NO: 48556
  source 1..120: mol_type = other DNA

SEQ ID NO: 78511 - DNA, 120 bp, synthetic construct; identical to SEQ ID NO: 13607
  source 1..120: mol_type = other DNA

SEQ ID NO: 78512 - DNA, 120 bp, synthetic construct; identical to SEQ ID NO: 48558
  source 1..120: mol_type = other DNA

SEQ ID NO: 78513 - DNA, 120 bp, synthetic construct; identical to SEQ ID NO: 48559
  source 1..120: mol_type = other DNA

SEQ ID NO: 78514 - DNA, 120 bp, synthetic construct; identical to SEQ ID NO: 48560
  source 1..120: mol_type = other DNA

SEQ ID NO: 78515 - DNA, 120 bp, synthetic construct; identical to SEQ ID NO: 13608
  source 1..120: mol_type = other DNA

SEQ ID NO: 78516 - DNA, 120 bp, synthetic construct; identical to SEQ ID NO: 48562
  source 1..120: mol_type = other DNA

SEQ ID NO: 78517 - DNA, 120 bp, synthetic construct; identical to SEQ ID NO: 48563
  source 1..120: mol_type = other DNA

SEQ ID NO: 78518 - DNA, 120 bp, synthetic construct; identical to SEQ ID NO: 48564
  source 1..120: mol_type = other DNA

SEQ ID NO: 78519 - DNA, 120 bp, synthetic construct; identical to SEQ ID NO: 48565
  source 1..120: mol_type = other DNA

SEQ ID NO: 78520 - DNA, 120 bp, synthetic construct; identical to SEQ ID NO: 13609
  source 1..120: mol_type = other DNA

SEQ ID NO: 78521 - DNA, 120 bp, synthetic construct; identical to SEQ ID NO: 48567
  source 1..120: mol_type = other DNA

SEQ ID NO: 78522 - DNA, 120 bp, synthetic construct; identical to SEQ ID NO: 48568
  source 1..120: mol_type = other DNA

SEQ ID NO: 78523 - DNA, 120 bp, synthetic construct; identical to SEQ ID NO: 13610
  source 1..120: mol_type = other DNA

SEQ ID NO: 78524 - DNA, 120 bp, synthetic construct; identical to SEQ ID NO: 48570
  source 1..120: mol_type = other DNA

SEQ ID NO: 78525 - DNA, 120 bp, synthetic construct; identical to SEQ ID NO: 48571
  source 1..120: mol_type = other DNA

SEQ ID NO: 78526 - DNA, 120 bp, synthetic construct; identical to SEQ ID NO: 48572
  source 1..120: mol_type = other DNA

SEQ ID NO: 78527 - DNA, 120 bp, synthetic construct; identical to SEQ ID NO: 48573
  source 1..120: mol_type = other DNA

SEQ ID NO: 78528 - DNA, 120 bp, synthetic construct; identical to SEQ ID NO: 13611
  source 1..120: mol_type = other DNA

SEQ ID NO: 78529 - DNA, 120 bp, synthetic construct; identical to SEQ ID NO: 48575
  source 1..120: mol_type = other DNA

SEQ ID NO: 78530 - DNA, 120 bp, synthetic construct; identical to SEQ ID NO: 48576
  source 1..120: mol_type = other DNA

SEQ ID NO: 78531 - DNA, 120 bp, synthetic construct; identical to SEQ ID NO: 13612
  source 1..120: mol_type = other DNA

SEQ ID NO: 78532 - DNA, 120 bp, synthetic construct; identical to SEQ ID NO: 48578
  source 1..120: mol_type = other DNA

SEQ ID NO: 78533 - DNA, 120 bp, synthetic construct; identical to SEQ ID NO: 48579
  source 1..120: mol_type = other DNA

SEQ ID NO: 78534 - DNA, 120 bp, synthetic construct; identical to SEQ ID NO: 48580
  source 1..120: mol_type = other DNA

SEQ ID NO: 78535 - DNA, 120 bp, synthetic construct; identical to SEQ ID NO: 48581
  source 1..120: mol_type = other DNA

SEQ ID NO: 78536 - DNA, 120 bp, synthetic construct; identical to SEQ ID NO: 13613
  source 1..120: mol_type = other DNA

SEQ ID NO: 78537 - DNA, 120 bp, synthetic construct; identical to SEQ ID NO: 48583
  source 1..120: mol_type = other DNA

SEQ ID NO: 78538 - DNA, 120 bp, synthetic construct; identical to SEQ ID NO: 48584
  source 1..120: mol_type = other DNA

SEQ ID NO: 78539 - DNA, 120 bp, synthetic construct; identical to SEQ ID NO: 48585
  source 1..120: mol_type = other DNA

SEQ ID NO: 78540 - DNA, 120 bp, synthetic construct; identical to SEQ ID NO: 13614
  source 1..120: mol_type = other DNA

SEQ ID NO: 78541 - DNA, 120 bp, synthetic construct; identical to SEQ ID NO: 48587
  source 1..120: mol_type = other DNA

SEQ ID NO: 78542 - DNA, 120 bp, synthetic construct; identical to SEQ ID NO: 48588
  source 1..120: mol_type = other DNA

SEQ ID NO: 78543 - DNA, 120 bp, synthetic construct; identical to SEQ ID NO: 13615
  source 1..120: mol_type = other DNA

SEQ ID NO: 78544 - DNA, 120 bp, synthetic construct; identical to SEQ ID NO: 48590
  source 1..120: mol_type = other DNA

SEQ ID NO: 78545 - DNA, 120 bp, synthetic construct; identical to SEQ ID NO: 48591
  source 1..120: mol_type = other DNA

SEQ ID NO: 78546 - DNA, 120 bp, synthetic construct; identical to SEQ ID NO: 48592
  source 1..120: mol_type = other DNA

SEQ ID NO: 78547 - DNA, 120 bp, synthetic construct; identical to SEQ ID NO: 48593
  source 1..120: mol_type = other DNA

SEQ ID NO: 78548 - DNA, 120 bp, synthetic construct; identical to SEQ ID NO: 13616
  source 1..120: mol_type = other DNA

SEQ ID NO: 78549 - DNA, 120 bp, synthetic construct; identical to SEQ ID NO: 48595
  source 1..120: mol_type = other DNA

SEQ ID NO: 78550 - DNA, 120 bp, synthetic construct; identical to SEQ ID NO: 48596
  source 1..120: mol_type = other DNA

SEQ ID NO: 78551 - DNA, 120 bp, synthetic construct; identical to SEQ ID NO: 48597
  source 1..120: mol_type = other DNA

SEQ ID NO: 78552 - DNA, 120 bp, synthetic construct; identical to SEQ ID NO: 13617
  source 1..120: mol_type = other DNA

SEQ ID NO: 78553 - DNA, 120 bp, synthetic construct; identical to SEQ ID NO: 48599
  source 1..120: mol_type = other DNA

SEQ ID NO: 78554 - DNA, 120 bp, synthetic construct; identical to SEQ ID NO: 48600
  source 1..120: mol_type = other DNA

SEQ ID NO: 78555 - DNA, 120 bp, synthetic construct; identical to SEQ ID NO: 13618
  source 1..120: mol_type = other DNA

SEQ ID NO: 78556 - DNA, 120 bp, synthetic construct; identical to SEQ ID NO: 48602
  source 1..120: mol_type = other DNA

SEQ ID NO: 78557 - DNA, 120 bp, synthetic construct; identical to SEQ ID NO: 48603
  source 1..120: mol_type = other DNA

SEQ ID NO: 78558 - DNA, 120 bp, synthetic construct; identical to SEQ ID NO: 48604
  source 1..120: mol_type = other DNA

SEQ ID NO: 78559 - DNA, 120 bp, synthetic construct; identical to SEQ ID NO: 48605
  source 1..120: mol_type = other DNA

SEQ ID NO: 78560 - DNA, 120 bp, synthetic construct; identical to SEQ ID NO: 13619
  source 1..120: mol_type = other DNA

SEQ ID NO: 78561 - DNA, 120 bp, synthetic construct; identical to SEQ ID NO: 48607
  source 1..120: mol_type = other DNA

SEQ ID NO: 78562 - DNA, 120 bp, synthetic construct; identical to SEQ ID NO: 48608
  source 1..120: mol_type = other DNA

SEQ ID NO: 78563 - DNA, 120 bp, synthetic construct; identical to SEQ ID NO: 48609
  source 1..120: mol_type = other DNA

SEQ ID NO: 78564 - DNA, 120 bp, synthetic construct; identical to SEQ ID NO: 13620
  source 1..120: mol_type = other DNA

SEQ ID NO: 78565 - DNA, 120 bp, synthetic construct; identical to SEQ ID NO: 48611
  source 1..120: mol_type = other DNA

SEQ ID NO: 78566 - DNA, 120 bp, synthetic construct; identical to SEQ ID NO: 48612
  source 1..120: mol_type = other DNA

SEQ ID NO: 78567 - DNA, 120 bp, synthetic construct; identical to SEQ ID NO: 48613
  source 1..120: mol_type = other DNA

SEQ ID NO: 78568 - DNA, 120 bp, synthetic construct; identical to SEQ ID NO: 13621
  source 1..120: mol_type = other DNA

SEQ ID NO: 78569 - DNA, 120 bp, synthetic construct; identical to SEQ ID NO: 48615
  source 1..120: mol_type = other DNA

SEQ ID NO: 78570 - DNA, 120 bp, synthetic construct; identical to SEQ ID NO: 48616
  source 1..120: mol_type = other DNA

SEQ ID NO: 78571 - DNA, 120 bp, synthetic construct; identical to SEQ ID NO: 48617
  source 1..120: mol_type = other DNA

SEQ ID NO: 78572 - DNA, 120 bp, synthetic construct; identical to SEQ ID NO: 13622
  source 1..120: mol_type = other DNA

SEQ ID NO: 78573 - DNA, 120 bp, synthetic construct; identical to SEQ ID NO: 48619
  source 1..120: mol_type = other DNA

SEQ ID NO: 78574 - DNA, 120 bp, synthetic construct; identical to SEQ ID NO: 48620
  source 1..120: mol_type = other DNA

SEQ ID NO: 78575 - DNA, 120 bp, synthetic construct; identical to SEQ ID NO: 48621
  source 1..120: mol_type = other DNA

SEQ ID NO: 78576 - DNA, 120 bp, synthetic construct; identical to SEQ ID NO: 13623
  source 1..120: mol_type = other DNA

SEQ ID NO: 78577 - DNA, 120 bp, synthetic construct; identical to SEQ ID NO: 48623
  source 1..120: mol_type = other DNA

SEQ ID NO: 78578 - DNA, 120 bp, synthetic construct; identical to SEQ ID NO: 48624
  source 1..120: mol_type = other DNA

SEQ ID NO: 78579 - DNA, 120 bp, synthetic construct; identical to SEQ ID NO: 48625
  source 1..120: mol_type = other DNA

SEQ ID NO: 78580 - DNA, 120 bp, synthetic construct; identical to SEQ ID NO: 13624
  source 1..120: mol_type = other DNA

SEQ ID NO: 78581 - DNA, 120 bp, synthetic construct; identical to SEQ ID NO: 48627
  source 1..120: mol_type = other DNA

SEQ ID NO: 78582 - DNA, 120 bp, synthetic construct; identical to SEQ ID NO: 48628
  source 1..120: mol_type = other DNA

SEQ ID NO: 78583 - DNA, 120 bp, synthetic construct; identical to SEQ ID NO: 48629
  source 1..120: mol_type = other DNA

SEQ ID NO: 78584 - DNA, 120 bp, synthetic construct; identical to SEQ ID NO: 13625
  source 1..120: mol_type = other DNA

SEQ ID NO: 78585 - DNA, 120 bp, synthetic construct; identical to SEQ ID NO: 48631
  source 1..120: mol_type = other DNA

SEQ ID NO: 78586 - DNA, 120 bp, synthetic construct; identical to SEQ ID NO: 48632
  source 1..120: mol_type = other DNA

SEQ ID NO: 78587 - DNA, 120 bp, synthetic construct; identical to SEQ ID NO: 48633
  source 1..120: mol_type = other DNA

SEQ ID NO: 78588 - DNA, 120 bp, synthetic construct; identical to SEQ ID NO: 48634
  source 1..120: mol_type = other DNA

SEQ ID NO: 78589 - DNA, 120 bp, synthetic construct; identical to SEQ ID NO: 13626
  source 1..120: mol_type = other DNA

SEQ ID NO: 78590 - DNA, 120 bp, synthetic construct; identical to SEQ ID NO: 48636
  source 1..120: mol_type = other DNA

SEQ ID NO: 78591 - DNA, 120 bp, synthetic construct; identical to SEQ ID NO: 48637
  source 1..120: mol_type = other DNA

SEQ ID NO: 78592 - DNA, 120 bp, synthetic construct; identical to SEQ ID NO: 48638
  source 1..120: mol_type = other DNA

SEQ ID NO: 78593 - DNA, 120 bp, synthetic construct; identical to SEQ ID NO: 13627
  source 1..120: mol_type = other DNA

SEQ ID NO: 78594 - DNA, 120 bp, synthetic construct; identical to SEQ ID NO: 48640
  source 1..120: mol_type = other DNA

SEQ ID NO: 78595 - DNA, 120 bp, synthetic construct; identical to SEQ ID NO: 48641
  source 1..120: mol_type = other DNA

SEQ ID NO: 78596 - DNA, 120 bp, synthetic construct; identical to SEQ ID NO: 48642
  source 1..120: mol_type = other DNA

SEQ ID NO: 78597 - DNA, 120 bp, synthetic construct; identical to SEQ ID NO: 13628
  source 1..120: mol_type = other DNA

SEQ ID NO: 78598 - DNA, 120 bp, synthetic construct; identical to SEQ ID NO: 48644
  source 1..120: mol_type = other DNA

SEQ ID NO: 78599 - DNA, 120 bp, synthetic construct; identical to SEQ ID NO: 48645
  source 1..120: mol_type = other DNA

SEQ ID NO: 78600 - DNA, 120 bp, synthetic construct; identical to SEQ ID NO: 13629
  source 1..120: mol_type = other DNA

SEQ ID NO: 78601 - DNA, 120 bp, synthetic construct; identical to SEQ ID NO: 48647
  source 1..120: mol_type = other DNA

SEQ ID NO: 78602 - DNA, 120 bp, synthetic construct; identical to SEQ ID NO: 48648
  source 1..120: mol_type = other DNA

SEQ ID NO: 78603 - DNA, 120 bp, synthetic construct; identical to SEQ ID NO: 48649
  source 1..120: mol_type = other DNA

SEQ ID NO: 78604 - DNA, 120 bp, synthetic construct; identical to SEQ ID NO: 13630
  source 1..120: mol_type = other DNA

SEQ ID NO: 78605 - DNA, 120 bp, synthetic construct; identical to SEQ ID NO: 48651
  source 1..120: mol_type = other DNA

SEQ ID NO: 78606 - DNA, 120 bp, synthetic construct; identical to SEQ ID NO: 48652
  source 1..120: mol_type = other DNA

SEQ ID NO: 78607 - DNA, 120 bp, synthetic construct; identical to SEQ ID NO: 48653
  source 1..120: mol_type = other DNA

SEQ ID NO: 78608 - DNA, 120 bp, synthetic construct; identical to SEQ ID NO: 13631
  source 1..120: mol_type = other DNA

SEQ ID NO: 78609 - DNA, 120 bp, synthetic construct; identical to SEQ ID NO: 48655
  source 1..120: mol_type = other DNA

SEQ ID NO: 78610 - DNA, 120 bp, synthetic construct; identical to SEQ ID NO: 48656
  source 1..120: mol_type = other DNA

SEQ ID NO: 78611 - DNA, 120 bp, synthetic construct; identical to SEQ ID NO: 48657
  source 1..120: mol_type = other DNA

SEQ ID NO: 78612 - DNA, 120 bp, synthetic construct; identical to SEQ ID NO: 13632
  source 1..120: mol_type = other DNA

SEQ ID NO: 78613 - DNA, 120 bp, synthetic construct; identical to SEQ ID NO: 48659
  source 1..120: mol_type = other DNA

SEQ ID NO: 78614 - DNA, 120 bp, synthetic construct; identical to SEQ ID NO: 48660
  source 1..120: mol_type = other DNA

SEQ ID NO: 78615 - DNA, 120 bp, synthetic construct; identical to SEQ ID NO: 48661
  source 1..120: mol_type = other DNA

SEQ ID NO: 78616 - DNA, 120 bp, synthetic construct; identical to SEQ ID NO: 13633
  source 1..120: mol_type = other DNA

SEQ ID NO: 78617 - DNA, 120 bp, synthetic construct; identical to SEQ ID NO: 48663
  source 1..120: mol_type = other DNA

SEQ ID NO: 78618 - DNA, 120 bp, synthetic construct; identical to SEQ ID NO: 48664
  source 1..120: mol_type = other DNA

SEQ ID NO: 78619 - DNA, 120 bp, synthetic construct; identical to SEQ ID NO: 48665
  source 1..120: mol_type = other DNA

SEQ ID NO: 78620 - DNA, 120 bp, synthetic construct; identical to SEQ ID NO: 48666
  source 1..120: mol_type = other DNA

SEQ ID NO: 78621 - DNA, 120 bp, synthetic construct; identical to SEQ ID NO: 13634
  source 1..120: mol_type = other DNA

SEQ ID NO: 78622 - DNA, 120 bp, synthetic construct; identical to SEQ ID NO: 48668
  source 1..120: mol_type = other DNA

SEQ ID NO: 78623 - DNA, 120 bp, synthetic construct; identical to SEQ ID NO: 48669
  source 1..120: mol_type = other DNA

SEQ ID NO: 78624 - DNA, 120 bp, synthetic construct; identical to SEQ ID NO: 13635
  source 1..120: mol_type = other DNA

SEQ ID NO: 78625 - DNA, 120 bp, synthetic construct; identical to SEQ ID NO: 48671
  source 1..120: mol_type = other DNA

SEQ ID NO: 78626 - DNA, 120 bp, synthetic construct; identical to SEQ ID NO: 48672
  source 1..120: mol_type = other DNA

SEQ ID NO: 78627 - DNA, 120 bp, synthetic construct; identical to SEQ ID NO: 48673
  source 1..120: mol_type = other DNA

SEQ ID NO: 78628 - DNA, 120 bp, synthetic construct; identical to SEQ ID NO: 48674
  source 1..120: mol_type = other DNA

SEQ ID NO: 78629 - DNA, 120 bp, synthetic construct; identical to SEQ ID NO: 13636
  source 1..120: mol_type = other DNA

SEQ ID NO: 78630 - DNA, 120 bp, synthetic construct; identical to SEQ ID NO: 48676
  source 1..120: mol_type = other DNA

SEQ ID NO: 78631 - DNA, 120 bp, synthetic construct; identical to SEQ ID NO: 48677
  source 1..120: mol_type = other DNA

SEQ ID NO: 78632 - DNA, 120 bp, synthetic construct; identical to SEQ ID NO: 48678
  source 1..120: mol_type = other DNA

SEQ ID NO: 78633 - DNA, 120 bp, synthetic construct; identical to SEQ ID NO: 13637
  source 1..120: mol_type = other DNA

SEQ ID NO: 78634 - DNA, 120 bp, synthetic construct; identical to SEQ ID NO: 48680
  source 1..120: mol_type = other DNA

SEQ ID NO: 78635 - DNA, 120 bp, synthetic construct; identical to SEQ ID NO: 48681
  source 1..120: mol_type = other DNA

SEQ ID NO: 78636 - DNA, 120 bp, synthetic construct; identical to SEQ ID NO: 13638
  source 1..120: mol_type = other DNA

SEQ ID NO: 78637 - DNA, 120 bp, synthetic construct; identical to SEQ ID NO: 48683
  source 1..120: mol_type = other DNA

SEQ ID NO: 78638 - DNA, 120 bp, synthetic construct; identical to SEQ ID NO: 48684
  source 1..120: mol_type = other DNA

SEQ ID NO: 78639 - DNA, 120 bp, synthetic construct; identical to SEQ ID NO: 48685
  source 1..120: mol_type = other DNA

SEQ ID NO: 78640 - DNA, 120 bp, synthetic construct; identical to SEQ ID NO: 48686
  source 1..120: mol_type = other DNA

SEQ ID NO: 78641 - DNA, 120 bp, synthetic construct; identical to SEQ ID NO: 13639
  source 1..120: mol_type = other DNA

SEQ ID NO: 78642 - DNA, 120 bp, synthetic construct; identical to SEQ ID NO: 48688
  source 1..120: mol_type = other DNA

SEQ ID NO: 78643 - DNA, 120 bp, synthetic construct; identical to SEQ ID NO: 48689
  source 1..120: mol_type = other DNA

SEQ ID NO: 78644 - DNA, 120 bp, synthetic construct; identical to SEQ ID NO: 48690
  source 1..120: mol_type = other DNA

SEQ ID NO: 78645 - DNA, 120 bp, synthetic construct; identical to SEQ ID NO: 13640
  source 1..120: mol_type = other DNA

SEQ ID NO: 78646 - DNA, 120 bp, synthetic construct; identical to SEQ ID NO: 48692
  source 1..120: mol_type = other DNA

SEQ ID NO: 78647 - DNA, 120 bp, synthetic construct; identical to SEQ ID NO: 48693
  source 1..120: mol_type = other DNA

SEQ ID NO: 78648 - DNA, 120 bp, synthetic construct; identical to SEQ ID NO: 48694
  source 1..120: mol_type = other DNA

SEQ ID NO: 78649 - DNA, 120 bp, synthetic construct; identical to SEQ ID NO: 13641
  source 1..120: mol_type = other DNA

SEQ ID NO: 78650 - DNA, 120 bp, synthetic construct; identical to SEQ ID NO: 48696
  source 1..120: mol_type = other DNA

SEQ ID NO: 78651 - DNA, 120 bp, synthetic construct; identical to SEQ ID NO: 48697
  source 1..120: mol_type = other DNA

SEQ ID NO: 78652 - DNA, 120 bp, synthetic construct; identical to SEQ ID NO: 48698
  source 1..120: mol_type = other DNA

SEQ ID NO: 78653 - DNA, 120 bp, synthetic construct; identical to SEQ ID NO: 48699
  source 1..120: mol_type = other DNA

SEQ ID NO: 78654 - DNA, 120 bp, synthetic construct; identical to SEQ ID NO: 13642
  source 1..120: mol_type = other DNA

SEQ ID NO: 78655 - DNA, 120 bp, synthetic construct; identical to SEQ ID NO: 48701
  source 1..120: mol_type = other DNA

SEQ ID NO: 78656 - DNA, 120 bp, synthetic construct; identical to SEQ ID NO: 48702
  source 1..120: mol_type = other DNA

SEQ ID NO: 78657 - DNA, 120 bp, synthetic construct; identical to SEQ ID NO: 13643
  source 1..120: mol_type = other DNA

SEQ ID NO: 78658 - DNA, 120 bp, synthetic construct; identical to SEQ ID NO: 48704
  source 1..120: mol_type = other DNA

SEQ ID NO: 78659 - DNA, 120 bp, synthetic construct; identical to SEQ ID NO: 48705
  source 1..120: mol_type = other DNA

SEQ ID NO: 78660 - DNA, 120 bp, synthetic construct; identical to SEQ ID NO: 48706
  source 1..120: mol_type = other DNA

SEQ ID NO: 78661 - DNA, 120 bp, synthetic construct; identical to SEQ ID NO: 13644
  source 1..120: mol_type = other DNA

SEQ ID NO: 78662 - DNA, 120 bp, synthetic construct; identical to SEQ ID NO: 48708
  source 1..120: mol_type = other DNA

SEQ ID NO: 78663 - DNA, 120 bp, synthetic construct; identical to SEQ ID NO: 48709
  source 1..120: mol_type = other DNA

SEQ ID NO: 78664 - DNA, 120 bp, synthetic construct; identical to SEQ ID NO: 48710
  source 1..120: mol_type = other DNA

SEQ ID NO: 78665 - DNA, 120 bp, synthetic construct; identical to SEQ ID NO: 48711
  source 1..120: mol_type = other DNA

SEQ ID NO: 78666 - DNA, 120 bp, synthetic construct; identical to SEQ ID NO: 13645
  source 1..120: mol_type = other DNA

SEQ ID NO: 78667 - DNA, 120 bp, synthetic construct; identical to SEQ ID NO: 48713
  source 1..120: mol_type = other DNA

SEQ ID NO: 78668 - DNA, 120 bp, synthetic construct; identical to SEQ ID NO: 48714
  source 1..120: mol_type = other DNA

SEQ ID NO: 78669 - DNA, 120 bp, synthetic construct; identical to SEQ ID NO: 13646
  source 1..120: mol_type = other DNA

SEQ ID NO: 78670 - DNA, 120 bp, synthetic construct; identical to SEQ ID NO: 48716
  source 1..120: mol_type = other DNA

SEQ ID NO: 78671 - DNA, 120 bp, synthetic construct; identical to SEQ ID NO: 48717
  source 1..120: mol_type = other DNA

SEQ ID NO: 78672 - DNA, 120 bp, synthetic construct; identical to SEQ ID NO: 13647
  source 1..120: mol_type = other DNA

SEQ ID NO: 78673 - DNA, 120 bp, synthetic construct; identical to SEQ ID NO: 48719
  source 1..120: mol_type = other DNA

SEQ ID NO: 78674 - DNA, 120 bp, synthetic construct; identical to SEQ ID NO: 48720
  source 1..120: mol_type = other DNA

SEQ ID NO: 78675 - DNA, 120 bp, synthetic construct; identical to SEQ ID NO: 48721
  source 1..120: mol_type = other DNA

SEQ ID NO: 78676 - DNA, 120 bp, synthetic construct; identical to SEQ ID NO: 13648
  source 1..120: mol_type = other DNA

SEQ ID NO: 78677 - DNA, 120 bp, synthetic construct; identical to SEQ ID NO: 48723
  source 1..120: mol_type = other DNA

SEQ ID NO: 78678 - DNA, 120 bp, synthetic construct; identical to SEQ ID NO: 48724
  source 1..120: mol_type = other DNA

SEQ ID NO: 78679 - DNA, 120 bp, synthetic construct; identical to SEQ ID NO: 48725
  source 1..120: mol_type = other DNA

SEQ ID NO: 78680 - DNA, 120 bp, synthetic construct; identical to SEQ ID NO: 48726
  source 1..120: mol_type = other DNA

SEQ ID NO: 78681 - DNA, 120 bp, synthetic construct; identical to SEQ ID NO: 13649
  source 1..120: mol_type = other DNA

SEQ ID NO: 78682 - DNA, 120 bp, synthetic construct; identical to SEQ ID NO: 48728
  source 1..120: mol_type = other DNA

SEQ ID NO: 78683 - DNA, 120 bp, synthetic construct; identical to SEQ ID NO: 48729
  source 1..120: mol_type = other DNA

SEQ ID NO: 78684 - DNA, 120 bp, synthetic construct; identical to SEQ ID NO: 48730
  source 1..120: mol_type = other DNA

SEQ ID NO: 78685 - DNA, 120 bp, synthetic construct; identical to SEQ ID NO: 48731
  source 1..120: mol_type = other DNA

SEQ ID NO: 78686 - DNA, 120 bp, synthetic construct; identical to SEQ ID NO: 13650
  source 1..120: mol_type = other DNA

SEQ ID NO: 78687 - DNA, 120 bp, synthetic construct; identical to SEQ ID NO: 48733
  source 1..120: mol_type = other DNA

SEQ ID NO: 78688 - DNA, 120 bp, synthetic construct; identical to SEQ ID NO: 48734
  source 1..120: mol_type = other DNA

SEQ ID NO: 78689 - DNA, 120 bp, synthetic construct; identical to SEQ ID NO: 48735
  source 1..120: mol_type = other DNA

SEQ ID NO: 78690 - DNA, 120 bp, synthetic construct; identical to SEQ ID NO: 13651
  source 1..120: mol_type = other DNA

SEQ ID NO: 78691 - DNA, 120 bp, synthetic construct; identical to SEQ ID NO: 48737
  source 1..120: mol_type = other DNA

SEQ ID NO: 78692 - DNA, 120 bp, synthetic construct; identical to SEQ ID NO: 48738
  source 1..120: mol_type = other DNA

SEQ ID NO: 78693 - DNA, 120 bp, synthetic construct; identical to SEQ ID NO: 48739
  source 1..120: mol_type = other DNA

SEQ ID NO: 78694 - DNA, 120 bp, synthetic construct; identical to SEQ ID NO: 13652
  source 1..120: mol_type = other DNA

SEQ ID NO: 78695 - DNA, 120 bp, synthetic construct; identical to SEQ ID NO: 48741
  source 1..120: mol_type = other DNA

SEQ ID NO: 78696 - DNA, 120 bp, synthetic construct; identical to SEQ ID NO: 48742
  source 1..120: mol_type = other DNA

SEQ ID NO: 78697 - DNA, 120 bp, synthetic construct; identical to SEQ ID NO: 13653
  source 1..120: mol_type = other DNA

SEQ ID NO: 78698 - DNA, 120 bp, synthetic construct; identical to SEQ ID NO: 48744
  source 1..120: mol_type = other DNA

SEQ ID NO: 78699 - DNA, 120 bp, synthetic construct; identical to SEQ ID NO: 48745
  source 1..120: mol_type = other DNA

SEQ ID NO: 78700 - DNA, 120 bp, synthetic construct; identical to SEQ ID NO: 48746
  source 1..120: mol_type = other DNA

SEQ ID NO: 78701 - DNA, 120 bp, synthetic construct; identical to SEQ ID NO: 13654
  source 1..120: mol_type = other DNA

SEQ ID NO: 78702 - DNA, 120 bp, synthetic construct; identical to SEQ ID NO: 48748
  source 1..120: mol_type = other DNA

SEQ ID NO: 78703 - DNA, 120 bp, synthetic construct; identical to SEQ ID NO: 48749
  source 1..120: mol_type = other DNA

SEQ ID NO: 78704 - DNA, 120 bp, synthetic construct; identical to SEQ ID NO: 48750
  source 1..120: mol_type = other DNA

SEQ ID NO: 78705 - DNA, 120 bp, synthetic construct; identical to SEQ ID NO: 13655
  source 1..120: mol_type = other DNA

SEQ ID NO: 78706 - DNA, 120 bp, synthetic construct; identical to SEQ ID NO: 48752
  source 1..120: mol_type = other DNA

SEQ ID NO: 78707 - DNA, 120 bp, synthetic construct; identical to SEQ ID NO: 48753
  source 1..120: mol_type = other DNA

SEQ ID NO: 78708 - DNA, 120 bp, synthetic construct; identical to SEQ ID NO: 48754
  source 1..120: mol_type = other DNA

SEQ ID NO: 78709 - DNA, 120 bp, synthetic construct; identical to SEQ ID NO: 48755
  source 1..120: mol_type = other DNA

SEQ ID NO: 78710 - DNA, 120 bp, synthetic construct; identical to SEQ ID NO: 13656
  source 1..120: mol_type = other DNA

SEQ ID NO: 78711 - DNA, 120 bp, synthetic construct; identical to SEQ ID NO: 48757
  source 1..120: mol_type = other DNA

SEQ ID NO: 78712 - DNA, 120 bp, synthetic construct; identical to SEQ ID NO: 48758
  source 1..120: mol_type = other DNA

SEQ ID NO: 78713 - DNA, 120 bp, synthetic construct; identical to SEQ ID NO: 13657
  source 1..120: mol_type = other DNA

SEQ ID NO: 78714 - DNA, 120 bp, synthetic construct; identical to SEQ ID NO: 48760
  source 1..120: mol_type = other DNA

SEQ ID NO: 78715 - DNA, 120 bp, synthetic construct; identical to SEQ ID NO: 48761
  source 1..120: mol_type = other DNA

SEQ ID NO: 78716 - DNA, 120 bp, synthetic construct; identical to SEQ ID NO: 48762
  source 1..120: mol_type = other DNA

SEQ ID NO: 78717 - DNA, 120 bp, synthetic construct; identical to SEQ ID NO: 13658
  source 1..120: mol_type = other DNA

SEQ ID NO: 78718 - DNA, 120 bp, synthetic construct; identical to SEQ ID NO: 48764
  source 1..120: mol_type = other DNA

SEQ ID NO: 78719 - DNA, 120 bp, synthetic construct; identical to SEQ ID NO: 48765
  source 1..120: mol_type = other DNA

SEQ ID NO: 78720 - DNA, 120 bp, synthetic construct; identical to SEQ ID NO: 48766
  source 1..120: mol_type = other DNA

SEQ ID NO: 78721 - DNA, 120 bp, synthetic construct; identical to SEQ ID NO: 48767
  source 1..120: mol_type = other DNA

SEQ ID NO: 78722 - DNA, 120 bp, synthetic construct; identical to SEQ ID NO: 13659
  source 1..120: mol_type = other DNA

SEQ ID NO: 78723 - DNA, 120 bp, synthetic construct; identical to SEQ ID NO: 48769
  source 1..120: mol_type = other DNA

SEQ ID NO: 78724 - DNA, 120 bp, synthetic construct; identical to SEQ ID NO: 48770
  source 1..120: mol_type = other DNA

SEQ ID NO: 78725 - DNA, 120 bp, synthetic construct; identical to SEQ ID NO: 13660
  source 1..120: mol_type = other DNA

SEQ ID NO: 78726 - DNA, 120 bp, synthetic construct; identical to SEQ ID NO: 48772
  source 1..120: mol_type = other DNA

SEQ ID NO: 78727 - DNA, 120 bp, synthetic construct; identical to SEQ ID NO: 48773
  source 1..120: mol_type = other DNA

SEQ ID NO: 78728 - DNA, 120 bp, synthetic construct; identical to SEQ ID NO: 48774
  source 1..120: mol_type = other DNA

SEQ ID NO: 78729 - DNA, 120 bp, synthetic construct; identical to SEQ ID NO: 48775
  source 1..120: mol_type = other DNA

SEQ ID NO: 78730 - DNA, 120 bp, synthetic construct; identical to SEQ ID NO: 13661
  source 1..120: mol_type = other DNA

SEQ ID NO: 78731 - DNA, 120 bp, synthetic construct; identical to SEQ ID NO: 48777
  source 1..120: mol_type = other DNA

SEQ ID NO: 78732 - DNA, 120 bp, synthetic construct; identical to SEQ ID NO: 48778
  source 1..120: mol_type = other DNA

SEQ ID NO: 78733 - DNA, 120 bp, synthetic construct; identical to SEQ ID NO: 48779
  source 1..120: mol_type = other DNA

SEQ ID NO: 78734 - DNA, 120 bp, synthetic construct; identical to SEQ ID NO: 13662
  source 1..120: mol_type = other DNA

SEQ ID NO: 78735 - DNA, 120 bp, synthetic construct; identical to SEQ ID NO: 48781
  source 1..120: mol_type = other DNA

SEQ ID NO: 78736 - DNA, 120 bp, synthetic construct; identical to SEQ ID NO: 48782
  source 1..120: mol_type = other DNA

SEQ ID NO: 78737 - DNA, 120 bp, synthetic construct; identical to SEQ ID NO: 13663
  source 1..120: mol_type = other DNA

SEQ ID NO: 78738 - DNA, 120 bp, synthetic construct; identical to SEQ ID NO: 48784
  source 1..120: mol_type = other DNA

SEQ ID NO: 78739 - DNA, 120 bp, synthetic construct; identical to SEQ ID NO: 48785
  source 1..120: mol_type = other DNA

SEQ ID NO: 78740 - DNA, 120 bp, synthetic construct; identical to SEQ ID NO: 48786
  source 1..120: mol_type = other DNA

SEQ ID NO: 78741 - DNA, 120 bp, synthetic construct; identical to SEQ ID NO: 48787
  source 1..120: mol_type = other DNA

SEQ ID NO: 78742 - DNA, 120 bp, synthetic construct; identical to SEQ ID NO: 13664
  source 1..120: mol_type = other DNA

SEQ ID NO: 78743 - DNA, 120 bp, synthetic construct; identical to SEQ ID NO: 48789
  source 1..120: mol_type = other DNA

SEQ ID NO: 78744 - DNA, 120 bp, synthetic construct; identical to SEQ ID NO: 48790
  source 1..120: mol_type = other DNA

SEQ ID NO: 78745 - DNA, 120 bp, synthetic construct; identical to SEQ ID NO: 48791
  source 1..120: mol_type = other DNA

SEQ ID NO: 78746 - DNA, 120 bp, synthetic construct; identical to SEQ ID NO: 13665
  source 1..120: mol_type = other DNA

SEQ ID NO: 78747 - DNA, 120 bp, synthetic construct; identical to SEQ ID NO: 48793
  source 1..120: mol_type = other DNA

SEQ ID NO: 78748 - DNA, 120 bp, synthetic construct; identical to SEQ ID NO: 48794
  source 1..120: mol_type = other DNA

SEQ ID NO: 78749 - DNA, 120 bp, synthetic construct; identical to SEQ ID NO: 13666
  source 1..120: mol_type = other DNA

SEQ ID NO: 78750 - DNA, 120 bp, synthetic construct; identical to SEQ ID NO: 48796
  source 1..120: mol_type = other DNA

SEQ ID NO: 78751 - DNA, 120 bp, synthetic construct; identical to SEQ ID NO: 48797
  source 1..120: mol_type = other DNA

SEQ ID NO: 78752 - DNA, 120 bp, synthetic construct; identical to SEQ ID NO: 48798
  source 1..120: mol_type = other DNA

SEQ ID NO: 78753 - DNA, 120 bp, synthetic construct; identical to SEQ ID NO: 13667
  source 1..120: mol_type = other DNA

SEQ ID NO: 78754 - DNA, 120 bp, synthetic construct; identical to SEQ ID NO: 48800
  source 1..120: mol_type = other DNA

SEQ ID NO: 78755 - DNA, 120 bp, synthetic construct; identical to SEQ ID NO: 48801
  source 1..120: mol_type = other DNA

SEQ ID NO: 78756 - DNA, 120 bp, synthetic construct; identical to SEQ ID NO: 48802
  source 1..120: mol_type = other DNA

SEQ ID NO: 78757 - DNA, 120 bp, synthetic construct; identical to SEQ ID NO: 13668
  source 1..120: mol_type = other DNA

SEQ ID NO: 78758 - DNA, 120 bp, synthetic construct; identical to SEQ ID NO: 48804
  source 1..120: mol_type = other DNA

SEQ ID NO: 78759 - DNA, 120 bp, synthetic construct; identical to SEQ ID NO: 48805
  source 1..120: mol_type = other DNA

SEQ ID NO: 78760 - DNA, 120 bp, synthetic construct; identical to SEQ ID NO: 48806
  source 1..120: mol_type = other DNA

SEQ ID NO: 78761 - DNA, 120 bp, synthetic construct; identical to SEQ ID NO: 13669
  source 1..120: mol_type = other DNA

SEQ ID NO: 78762 - DNA, 120 bp, synthetic construct; identical to SEQ ID NO: 48808
  source 1..120: mol_type = other DNA

SEQ ID NO: 78763 - DNA, 120 bp, synthetic construct; identical to SEQ ID NO: 48809
  source 1..120: mol_type = other DNA

SEQ ID NO: 78764 - DNA, 120 bp, synthetic construct; identical to SEQ ID NO: 48810
  source 1..120: mol_type = other DNA

SEQ ID NO: 78765 - DNA, 120 bp, synthetic construct; identical to SEQ ID NO: 48811
  source 1..120: mol_type = other DNA

SEQ ID NO: 78766 - DNA, 120 bp, synthetic construct; identical to SEQ ID NO: 13670
  source 1..120: mol_type = other DNA

SEQ ID NO: 78767 - DNA, 120 bp, synthetic construct; identical to SEQ ID NO: 48813
  source 1..120: mol_type = other DNA

SEQ ID NO: 78768 - DNA, 120 bp, synthetic construct; identical to SEQ ID NO: 48814
  source 1..120: mol_type = other DNA

SEQ ID NO: 78769 - DNA, 120 bp, synthetic construct; identical to SEQ ID NO: 48815
  source 1..120: mol_type = other DNA

SEQ ID NO: 78770 - DNA, 120 bp, synthetic construct; identical to SEQ ID NO: 13671
  source 1..120: mol_type = other DNA

SEQ ID NO: 78771 - DNA, 120 bp, synthetic construct; identical to SEQ ID NO: 48817
  source 1..120: mol_type = other DNA

SEQ ID NO: 78772 - DNA, 120 bp, synthetic construct; identical to SEQ ID NO: 48818
  source 1..120: mol_type = other DNA

SEQ ID NO: 78773 - DNA, 120 bp, synthetic construct; identical to SEQ ID NO: 48819
  source 1..120: mol_type = other DNA

SEQ ID NO: 78774 - DNA, 120 bp, synthetic construct; identical to SEQ ID NO: 13672
  source 1..120: mol_type = other DNA

SEQ ID NO: 78775 - DNA, 120 bp, synthetic construct; identical to SEQ ID NO: 48821
  source 1..120: mol_type = other DNA

SEQ ID NO: 78776 - DNA, 120 bp, synthetic construct; identical to SEQ ID NO: 48822
  source 1..120: mol_type = other DNA

SEQ ID NO: 78777 - DNA, 120 bp, synthetic construct; identical to SEQ ID NO: 48823
  source 1..120: mol_type = other DNA

SEQ ID NO: 78778 - DNA, 120 bp, synthetic construct; identical to SEQ ID NO: 13673
  source 1..120: mol_type = other DNA

SEQ ID NO: 78779 - DNA, 120 bp, synthetic construct; identical to SEQ ID NO: 48825
  source 1..120: mol_type = other DNA

SEQ ID NO: 78780 - DNA, 120 bp, synthetic construct; identical to SEQ ID NO: 48826
  source 1..120: mol_type = other DNA

SEQ ID NO: 78781 - DNA, 120 bp, synthetic construct; identical to SEQ ID NO: 13674
  source 1..120: mol_type = other DNA

SEQ ID NO: 78782 - DNA, 120 bp, synthetic construct; identical to SEQ ID NO: 48828
  source 1..120: mol_type = other DNA

SEQ ID NO: 78783 - DNA, 120 bp, synthetic construct; identical to SEQ ID NO: 48829
  source 1..120: mol_type = other DNA

SEQ ID NO: 78784 - DNA, 120 bp, synthetic construct; identical to SEQ ID NO: 48830
  source 1..120: mol_type = other DNA

SEQ ID NO: 78785 - DNA, 120 bp, synthetic construct; identical to SEQ ID NO: 13675
  source 1..120: mol_type = other DNA

SEQ ID NO: 78786 - DNA, 120 bp, synthetic construct; identical to SEQ ID NO: 48832
  source 1..120: mol_type = other DNA

SEQ ID NO: 78787 - DNA, 120 bp, synthetic construct; identical to SEQ ID NO: 48833
  source 1..120: mol_type = other DNA

SEQ ID NO: 78788 - DNA, 120 bp, synthetic construct; identical to SEQ ID NO: 48834
  source 1..120: mol_type = other DNA

SEQ ID NO: 78789 - DNA, 120 bp, synthetic construct; identical to SEQ ID NO: 48835
  source 1..120: mol_type = other DNA

SEQ ID NO: 78790 - DNA, 120 bp, synthetic construct; identical to SEQ ID NO: 13676
  source 1..120: mol_type = other DNA

SEQ ID NO: 78791 - DNA, 120 bp, synthetic construct; identical to SEQ ID NO: 48837
  source 1..120: mol_type = other DNA

SEQ ID NO: 78792 - DNA, 120 bp, synthetic construct; identical to SEQ ID NO: 48838
  source 1..120: mol_type = other DNA

SEQ ID NO: 78793 - DNA, 120 bp, synthetic construct; identical to SEQ ID NO: 13677
  source 1..120: mol_type = other DNA

SEQ ID NO: 78794 - DNA, 120 bp, synthetic construct; identical to SEQ ID NO: 48840
  source 1..120: mol_type = other DNA

SEQ ID NO: 78795 - DNA, 120 bp, synthetic construct; identical to SEQ ID NO: 48841
  source 1..120: mol_type = other DNA

SEQ ID NO: 78796 - DNA, 120 bp, synthetic construct; identical to SEQ ID NO: 48842
  source 1..120: mol_type = other DNA

SEQ ID NO: 78797 - DNA, 120 bp, synthetic construct; identical to SEQ ID NO: 48843
  source 1..120: mol_type = other DNA

SEQ ID NO: 78798 - DNA, 120 bp, synthetic construct; identical to SEQ ID NO: 13678
  source 1..120: mol_type = other DNA

SEQ ID NO: 78799 - DNA, 120 bp, synthetic construct; identical to SEQ ID NO: 48845
  source 1..120: mol_type = other DNA

SEQ ID NO: 78800 - DNA, 120 bp, synthetic construct; identical to SEQ ID NO: 48846
  source 1..120: mol_type = other DNA

SEQ ID NO: 78801 - DNA, 120 bp, synthetic construct; identical to SEQ ID NO: 48847
  source 1..120: mol_type = other DNA

SEQ ID NO: 78802 - DNA, 120 bp, synthetic construct; identical to SEQ ID NO: 13679
  source 1..120: mol_type = other DNA

SEQ ID NO: 78803 - DNA, 120 bp, synthetic construct; identical to SEQ ID NO: 48849
  source 1..120: mol_type = other DNA

SEQ ID NO: 78804 - DNA, 120 bp, synthetic construct; identical to SEQ ID NO: 48850
  source 1..120: mol_type = other DNA

SEQ ID NO: 78805 - DNA, 120 bp, synthetic construct; identical to SEQ ID NO: 48851
  source 1..120: mol_type = other DNA

SEQ ID NO: 78806 - DNA, 120 bp, synthetic construct; identical to SEQ ID NO: 13680
  source 1..120: mol_type = other DNA

SEQ ID NO: 78807 - DNA, 120 bp, synthetic construct; identical to SEQ ID NO: 48853
  source 1..120: mol_type = other DNA

SEQ ID NO: 78808 - DNA, 120 bp, synthetic construct; identical to SEQ ID NO: 48854
  source 1..120: mol_type = other DNA

SEQ ID NO: 78809 - DNA, 120 bp, synthetic construct; identical to SEQ ID NO: 48855
  source 1..120: mol_type = other DNA

SEQ ID NO: 78810 - DNA, 120 bp, synthetic construct; identical to SEQ ID NO: 48856
  source 1..120: mol_type = other DNA

SEQ ID NO: 78811 - DNA, 120 bp, synthetic construct; identical to SEQ ID NO: 13681
  source 1..120: mol_type = other DNA

SEQ ID NO: 78812 - DNA, 120 bp, synthetic construct; identical to SEQ ID NO: 48858
  source 1..120: mol_type = other DNA

SEQ ID NO: 78813 - DNA, 120 bp, synthetic construct; identical to SEQ ID NO: 48859
  source 1..120: mol_type = other DNA

SEQ ID NO: 78814 - DNA, 120 bp, synthetic construct; identical to SEQ ID NO: 48860
  source 1..120: mol_type = other DNA

SEQ ID NO: 78815 - DNA, 120 bp, synthetic construct; identical to SEQ ID NO: 13682
  source 1..120: mol_type = other DNA

SEQ ID NO: 78816 - DNA, 120 bp, synthetic construct; identical to SEQ ID NO: 48862
  source 1..120: mol_type = other DNA

SEQ ID NO: 78817 - DNA, 120 bp, synthetic construct; identical to SEQ ID NO: 48863
  source 1..120: mol_type = other DNA

SEQ ID NO: 78818 - DNA, 120 bp, synthetic construct; identical to SEQ ID NO: 48864
  source 1..120: mol_type = other DNA

SEQ ID NO: 78819 - DNA, 120 bp, synthetic construct; identical to SEQ ID NO: 13683
  source 1..120: mol_type = other DNA

SEQ ID NO: 78820 - DNA, 120 bp, synthetic construct; identical to SEQ ID NO: 48866
  source 1..120: mol_type = other DNA

SEQ ID NO: 78821 - DNA, 120 bp, synthetic construct; identical to SEQ ID NO: 48867
  source 1..120: mol_type = other DNA

SEQ ID NO: 78822 - DNA, 120 bp, synthetic construct; identical to SEQ ID NO: 48868
  source 1..120: mol_type = other DNA

SEQ ID NO: 78823 - DNA, 120 bp, synthetic construct; identical to SEQ ID NO: 48869
  source 1..120: mol_type = other DNA

SEQ ID NO: 78824 - DNA, 120 bp, synthetic construct; identical to SEQ ID NO: 13684
  source 1..120: mol_type = other DNA

SEQ ID NO: 78825 - DNA, 120 bp, synthetic construct; identical to SEQ ID NO: 48871
  source 1..120: mol_type = other DNA

SEQ ID NO: 78826 - DNA, 120 bp, synthetic construct; identical to SEQ ID NO: 48872
  source 1..120: mol_type = other DNA

SEQ ID NO: 78827 - DNA, 120 bp, synthetic construct; identical to SEQ ID NO: 48873
  source 1..120: mol_type = other DNA

SEQ ID NO: 78828 - DNA, 120 bp, synthetic construct; identical to SEQ ID NO: 13685
  source 1..120: mol_type = other DNA

SEQ ID NO: 78829 - DNA, 120 bp, synthetic construct; identical to SEQ ID NO: 48875
  source 1..120: mol_type = other DNA

SEQ ID NO: 78830 - DNA, 120 bp, synthetic construct; identical to SEQ ID NO: 48876
  source 1..120: mol_type = other DNA

SEQ ID NO: 78831 - DNA, 120 bp, synthetic construct; identical to SEQ ID NO: 48877
  source 1..120: mol_type = other DNA

SEQ ID NO: 78832 - DNA, 120 bp, synthetic construct; identical to SEQ ID NO: 13686
  source 1..120: mol_type = other DNA

SEQ ID NO: 78833 - DNA, 120 bp, synthetic construct; identical to SEQ ID NO: 48879
  source 1..120: mol_type = other DNA

SEQ ID NO: 78834 - DNA, 120 bp, synthetic construct; identical to SEQ ID NO: 48880
  source 1..120: mol_type = other DNA

SEQ ID NO: 78835 - DNA, 120 bp, synthetic construct; identical to SEQ ID NO: 13687
  source 1..120: mol_type = other DNA

SEQ ID NO: 78836 - DNA, 120 bp, synthetic construct; identical to SEQ ID NO: 48882
  source 1..120: mol_type = other DNA

SEQ ID NO: 78837 - DNA, 120 bp, synthetic construct; identical to SEQ ID NO: 48883
  source 1..120: mol_type = other DNA

SEQ ID NO: 78838 - DNA, 120 bp, synthetic construct; identical to SEQ ID NO: 48884
  source 1..120: mol_type = other DNA

SEQ ID NO: 78839 - DNA, 120 bp, synthetic construct; identical to SEQ ID NO: 48885
  source 1..120: mol_type = other DNA

SEQ ID NO: 78840 - DNA, 120 bp, synthetic construct; identical to SEQ ID NO: 13688
  source 1..120: mol_type = other DNA

SEQ ID NO: 78841 - DNA, 120 bp, synthetic construct; identical to SEQ ID NO: 48887
  source 1..120: mol_type = other DNA

SEQ ID NO: 78842 - DNA, 120 bp, synthetic construct; identical to SEQ ID NO: 48888
  source 1..120: mol_type = other DNA

SEQ ID NO: 78843 - DNA, 120 bp, synthetic construct; identical to SEQ ID NO: 48889
  source 1..120: mol_type = other DNA

SEQ ID NO: 78844 - DNA, 120 bp, synthetic construct; identical to SEQ ID NO: 13689
  source 1..120: mol_type = other DNA

SEQ ID NO: 78845 - DNA, 120 bp, synthetic construct; identical to SEQ ID NO: 48891
  source 1..120: mol_type = other DNA

SEQ ID NO: 78846 - DNA, 120 bp, synthetic construct; identical to SEQ ID NO: 48892
  source 1..120: mol_type = other DNA

SEQ ID NO: 78847 - DNA, 120 bp, synthetic construct; identical to SEQ ID NO: 48893
  source 1..120: mol_type = other DNA

SEQ ID NO: 78848 - DNA, 120 bp, synthetic construct; identical to SEQ ID NO: 48894
  source 1..120: mol_type = other DNA

SEQ ID NO: 78849 - DNA, 120 bp, synthetic construct; identical to SEQ ID NO: 13690
  source 1..120: mol_type = other DNA

SEQ ID NO: 78850 - DNA, 120 bp, synthetic construct; identical to SEQ ID NO: 48896
  source 1..120: mol_type = other DNA

SEQ ID NO: 78851 - DNA, 120 bp, synthetic construct; identical to SEQ ID NO: 48897
  source 1..120: mol_type = other DNA

SEQ ID NO: 78852 - DNA, 120 bp, synthetic construct; identical to SEQ ID NO: 48898
  source 1..120: mol_type = other DNA

SEQ ID NO: 78853 - DNA, 120 bp, synthetic construct; identical to SEQ ID NO: 13691
  source 1..120: mol_type = other DNA

SEQ ID NO: 78854 - DNA, 120 bp, synthetic construct; identical to SEQ ID NO: 48900
  source 1..120: mol_type = other DNA

SEQ ID NO: 78855 - DNA, 120 bp, synthetic construct; identical to SEQ ID NO: 48901
  source 1..120: mol_type = other DNA

SEQ ID NO: 78856 - DNA, 120 bp, synthetic construct; identical to SEQ ID NO: 48902
  source 1..120: mol_type = other DNA

SEQ ID NO: 78857 - DNA, 120 bp, synthetic construct; identical to SEQ ID NO: 48903
  source 1..120: mol_type = other DNA

SEQ ID NO: 78858 - DNA, 120 bp, synthetic construct; identical to SEQ ID NO: 13692
  source 1..120: mol_type = other DNA

SEQ ID NO: 78859 - DNA, 120 bp, synthetic construct; identical to SEQ ID NO: 48905
  source 1..120: mol_type = other DNA

SEQ ID NO: 78860 - DNA, 120 bp, synthetic construct; identical to SEQ ID NO: 13693
  source 1..120: mol_type = other DNA

SEQ ID NO: 78861 - DNA, 120 bp, synthetic construct; identical to SEQ ID NO: 48907
  source 1..120: mol_type = other DNA

SEQ ID NO: 78862 - DNA, 120 bp, synthetic construct; identical to SEQ ID NO: 48908
  source 1..120: mol_type = other DNA

SEQ ID NO: 78863 - DNA, 120 bp, synthetic construct; identical to SEQ ID NO: 48909
  source 1..120: mol_type = other DNA

SEQ ID NO: 78864 - DNA, 120 bp, synthetic construct; identical to SEQ ID NO: 48910
  source 1..120: mol_type = other DNA

SEQ ID NO: 78865 - DNA, 120 bp, synthetic construct; identical to SEQ ID NO: 13694
  source 1..120: mol_type = other DNA

SEQ ID NO: 78866 - DNA, 120 bp, synthetic construct; identical to SEQ ID NO: 48912
  source 1..120: mol_type = other DNA

SEQ ID NO: 78867 - DNA, 120 bp, synthetic construct; identical to SEQ ID NO: 48913
  source 1..120: mol_type = other DNA

SEQ ID NO: 78868 - DNA, 120 bp, synthetic construct; identical to SEQ ID NO: 13695
  source 1..120: mol_type = other DNA

SEQ ID NO: 78869 - DNA, 120 bp, synthetic construct; identical to SEQ ID NO: 48915
  source 1..120: mol_type = other DNA

SEQ ID NO: 78870 - DNA, 120 bp, synthetic construct; identical to SEQ ID NO: 48916
  source 1..120: mol_type = other DNA

SEQ ID NO: 78871 - DNA, 120 bp, synthetic construct; identical to SEQ ID NO: 48917
  source 1..120: mol_type = other DNA

SEQ ID NO: 78872 - DNA, 120 bp, synthetic construct; identical to SEQ ID NO: 13696
  source 1..120: mol_type = other DNA

SEQ ID NO: 78873 - DNA, 120 bp, synthetic construct; identical to SEQ ID NO: 48919
  source 1..120: mol_type = other DNA

SEQ ID NO: 78874 - DNA, 120 bp, synthetic construct; identical to SEQ ID NO: 48920
  source 1..120: mol_type = other DNA

SEQ ID NO: 78875 - DNA, 120 bp, synthetic construct; identical to SEQ ID NO: 13697
  source 1..120: mol_type = other DNA

SEQ ID NO: 78876 - DNA, 120 bp, synthetic construct; identical to SEQ ID NO: 48922
  source 1..120: mol_type = other DNA

SEQ ID NO: 78877 - DNA, 120 bp, synthetic construct; identical to SEQ ID NO: 48923
  source 1..120: mol_type = other DNA

SEQ ID NO: 78878 - DNA, 120 bp, synthetic construct; identical to SEQ ID NO: 48924
  source 1..120: mol_type = other DNA

SEQ ID NO: 78879 - DNA, 120 bp, synthetic construct; identical to SEQ ID NO: 13698
  source 1..120: mol_type = other DNA

SEQ ID NO: 78880 - DNA, 120 bp, synthetic construct; identical to SEQ ID NO: 48926
  source 1..120: mol_type = other DNA

SEQ ID NO: 78881 - DNA, 120 bp, synthetic construct; identical to SEQ ID NO: 48927
  source 1..120: mol_type = other DNA

SEQ ID NO: 78882 - DNA, 120 bp, synthetic construct; identical to SEQ ID NO: 48928
  source 1..120: mol_type = other DNA

SEQ ID NO: 78883 - DNA, 120 bp, synthetic construct; identical to SEQ ID NO: 13699
  source 1..120: mol_type = other DNA

SEQ ID NO: 78884 - DNA, 120 bp, synthetic construct; identical to SEQ ID NO: 48930
  source 1..120: mol_type = other DNA

SEQ ID NO: 78885 - DNA, 120 bp, synthetic construct; identical to SEQ ID NO: 48931
  source 1..120: mol_type = other DNA

SEQ ID NO: 78886 - DNA, 120 bp, synthetic construct; identical to SEQ ID NO: 48932
  source 1..120: mol_type = other DNA

SEQ ID NO: 78887 - DNA, 120 bp, synthetic construct; identical to SEQ ID NO: 13700
  source 1..120: mol_type = other DNA

SEQ ID NO: 78888 - DNA, 120 bp, synthetic construct; identical to SEQ ID NO: 48934
  source 1..120: mol_type = other DNA

SEQ ID NO: 78889 - DNA, 120 bp, synthetic construct; identical to SEQ ID NO: 48935
  source 1..120: mol_type = other DNA

SEQ ID NO: 78890 - DNA, 120 bp, synthetic construct; identical to SEQ ID NO: 48936
  source 1..120: mol_type = other DNA

SEQ ID NO: 78891 - DNA, 120 bp, synthetic construct; identical to SEQ ID NO: 48937
  source 1..120: mol_type = other DNA

SEQ ID NO: 78892 - DNA, 120 bp, synthetic construct; identical to SEQ ID NO: 13701
  source 1..120: mol_type = other DNA

SEQ ID NO: 78893 - DNA, 120 bp, synthetic construct; identical to SEQ ID NO: 48939
  source 1..120: mol_type = other DNA

SEQ ID NO: 78894 - DNA, 120 bp, synthetic construct; identical to SEQ ID NO: 48940
  source 1..120: mol_type = other DNA

SEQ ID NO: 78895 - DNA, 120 bp, synthetic construct; identical to SEQ ID NO: 48941
  source 1..120: mol_type = other DNA

SEQ ID NO: 78896 - DNA, 120 bp, synthetic construct; identical to SEQ ID NO: 13702
  source 1..120: mol_type = other DNA

SEQ ID NO: 78897 - DNA, 120 bp, synthetic construct; identical to SEQ ID NO: 48943
  source 1..120: mol_type = other DNA

SEQ ID NO: 78898 - DNA, 120 bp, synthetic construct; identical to SEQ ID NO: 48944
  source 1..120: mol_type = other DNA

SEQ ID NO: 78899 - DNA, 120 bp, synthetic construct; identical to SEQ ID NO: 13703
  source 1..120: mol_type = other DNA

SEQ ID NO: 78900 - DNA, 120 bp, synthetic construct; identical to SEQ ID NO: 48946
  source 1..120: mol_type = other DNA

SEQ ID NO: 78901 - DNA, 120 bp, synthetic construct; identical to SEQ ID NO: 48947
  source 1..120: mol_type = other DNA

SEQ ID NO: 78902 - DNA, 120 bp, synthetic construct; identical to SEQ ID NO: 48948
  source 1..120: mol_type = other DNA

SEQ ID NO: 78903 - DNA, 120 bp, synthetic construct; identical to SEQ ID NO: 13704
  source 1..120: mol_type = other DNA

SEQ ID NO: 78904 - DNA, 120 bp, synthetic construct; identical to SEQ ID NO: 48950
  source 1..120: mol_type = other DNA

SEQ ID NO: 78905 - DNA, 120 bp, synthetic construct; identical to SEQ ID NO: 48951
  source 1..120: mol_type = other DNA

SEQ ID NO: 78906 - DNA, 120 bp, synthetic construct; identical to SEQ ID NO: 48952
  source 1..120: mol_type = other DNA

SEQ ID NO: 78907 - DNA, 120 bp, synthetic construct; identical to SEQ ID NO: 13705
  source 1..120: mol_type = other DNA

SEQ ID NO: 78908 - DNA, 120 bp, synthetic construct; identical to SEQ ID NO: 48954
  source 1..120: mol_type = other DNA

SEQ ID NO: 78909 - DNA, 120 bp, synthetic construct; identical to SEQ ID NO: 48955
  source 1..120: mol_type = other DNA

SEQ ID NO: 78910 - DNA, 120 bp, synthetic construct; identical to SEQ ID NO: 48956
  source 1..120: mol_type = other DNA

SEQ ID NO: 78911 - DNA, 120 bp, synthetic construct; identical to SEQ ID NO: 13706
  source 1..120: mol_type = other DNA

SEQ ID NO: 78912 - DNA, 120 bp, synthetic construct; identical to SEQ ID NO: 48958
  source 1..120: mol_type = other DNA

SEQ ID NO: 78913 - DNA, 120 bp, synthetic construct; identical to SEQ ID NO: 48959
  source 1..120: mol_type = other DNA

SEQ ID NO: 78914 - DNA, 120 bp, synthetic construct; identical to SEQ ID NO: 48960
  source 1..120: mol_type = other DNA

SEQ ID NO: 78915 - DNA, 120 bp, synthetic construct; identical to SEQ ID NO: 13707
  source 1..120: mol_type = other DNA

SEQ ID NO: 78916 - DNA, 120 bp, synthetic construct; identical to SEQ ID NO: 48962
  source 1..120: mol_type = other DNA

SEQ ID NO: 78917 - DNA, 120 bp, synthetic construct; identical to SEQ ID NO: 48963
  source 1..120: mol_type = other DNA

SEQ ID NO: 78918 - DNA, 120 bp, synthetic construct; identical to SEQ ID NO: 48964
  source 1..120: mol_type = other DNA

SEQ ID NO: 78919 - DNA, 120 bp, synthetic construct; identical to SEQ ID NO: 48965
  source 1..120: mol_type = other DNA

SEQ ID NO: 78920 - DNA, 120 bp, synthetic construct; identical to SEQ ID NO: 13708
  source 1..120: mol_type = other DNA

SEQ ID NO: 78921 - DNA, 120 bp, synthetic construct; identical to SEQ ID NO: 48967
  source 1..120: mol_type = other DNA

SEQ ID NO: 78922 - DNA, 120 bp, synthetic construct; identical to SEQ ID NO: 48968
  source 1..120: mol_type = other DNA

SEQ ID NO: 78923 - DNA, 120 bp, synthetic construct; identical to SEQ ID NO: 48969
  source 1..120: mol_type = other DNA

SEQ ID NO: 78924 - DNA, 120 bp, synthetic construct; identical to SEQ ID NO: 13709
  source 1..120: mol_type = other DNA

SEQ ID NO: 78925 - DNA, 120 bp, synthetic construct; identical to SEQ ID NO: 48971
  source 1..120: mol_type = other DNA

SEQ ID NO: 78926 - DNA, 120 bp, synthetic construct; identical to SEQ ID NO: 48972
  source 1..120: mol_type = other DNA

SEQ ID NO: 78927 - DNA, 120 bp, synthetic construct; identical to SEQ ID NO: 48973
  source 1..120: mol_type = other DNA

SEQ ID NO: 78928 - DNA, 120 bp, synthetic construct; identical to SEQ ID NO: 13710
  source 1..120: mol_type = other DNA

SEQ ID NO: 78929 - DNA, 120 bp, synthetic construct; identical to SEQ ID NO: 48975
  source 1..120: mol_type = other DNA

SEQ ID NO: 78930 - DNA, 120 bp, synthetic construct; identical to SEQ ID NO: 48976
  source 1..120: mol_type = other DNA

SEQ ID NO: 78931 - DNA, 120 bp, synthetic construct; identical to SEQ ID NO: 48977
  source 1..120: mol_type = other DNA

SEQ ID NO: 78932 - DNA, 120 bp, synthetic construct; identical to SEQ ID NO: 13711
  source 1..120: mol_type = other DNA

SEQ ID NO: 78933 - DNA, 120 bp, synthetic construct; identical to SEQ ID NO: 48979
  source 1..120: mol_type = other DNA

SEQ ID NO: 78934 - DNA, 120 bp, synthetic construct; identical to SEQ ID NO: 48980
  source 1..120: mol_type = other DNA

SEQ ID NO: 78935 - DNA, 120 bp, synthetic construct; identical to SEQ ID NO: 48981
  source 1..120: mol_type = other DNA

SEQ ID NO: 78936 - DNA, 120 bp, synthetic construct; identical to SEQ ID NO: 48982
  source 1..120: mol_type = other DNA

SEQ ID NO: 78937 - DNA, 120 bp, synthetic construct; identical to SEQ ID NO: 13712
  source 1..120: mol_type = other DNA

SEQ ID NO: 78938 - DNA, 120 bp, synthetic construct; identical to SEQ ID NO: 48984
  source 1..120: mol_type = other DNA

SEQ ID NO: 78939 - DNA, 120 bp, synthetic construct; identical to SEQ ID NO: 48985
  source 1..120: mol_type = other DNA

SEQ ID NO: 78940 - DNA, 120 bp, synthetic construct; identical to SEQ ID NO: 13713
  source 1..120: mol_type = other DNA

SEQ ID NO: 78941 - DNA, 120 bp, synthetic construct; identical to SEQ ID NO: 48987
  source 1..120: mol_type = other DNA

SEQ ID NO: 78942 - DNA, 120 bp, synthetic construct; identical to SEQ ID NO: 48988
  source 1..120: mol_type = other DNA

SEQ ID NO: 78943 - DNA, 120 bp, synthetic construct; identical to SEQ ID NO: 48989
  source 1..120: mol_type = other DNA

SEQ ID NO: 78944 - DNA, 120 bp, synthetic construct; identical to SEQ ID NO: 48990
  source 1..120: mol_type = other DNA

SEQ ID NO: 78945 - DNA, 120 bp, synthetic construct; identical to SEQ ID NO: 13714
  source 1..120: mol_type = other DNA

SEQ ID NO: 78946 - DNA, 120 bp, synthetic construct; identical to SEQ ID NO: 48992
  source 1..120: mol_type = other DNA

SEQ ID NO: 78947 - DNA, 120 bp, synthetic construct; identical to SEQ ID NO: 48993
  source 1..120: mol_type = other DNA

SEQ ID NO: 78948 - DNA, 120 bp, synthetic construct; identical to SEQ ID NO: 48994
  source 1..120: mol_type = other DNA

SEQ ID NO: 78949 - DNA, 120 bp, synthetic construct; identical to SEQ ID NO: 13715
  source 1..120: mol_type = other DNA

SEQ ID NO: 78950 - DNA, 120 bp, synthetic construct; identical to SEQ ID NO: 48996
  source 1..120: mol_type = other DNA

SEQ ID NO: 78951 - DNA, 120 bp, synthetic construct; identical to SEQ ID NO: 48997
  source 1..120: mol_type = other DNA

SEQ ID NO: 78952 - DNA, 120 bp, synthetic construct; identical to SEQ ID NO: 48998
  source 1..120: mol_type = other DNA

SEQ ID NO: 78953 - DNA, 120 bp, synthetic construct; identical to SEQ ID NO: 48999
  source 1..120: mol_type = other DNA

SEQ ID NO: 78954 - DNA, 120 bp, synthetic construct; identical to SEQ ID NO: 6261
  source 1..120: mol_type = other DNA

SEQ ID NO: 78955 - DNA, 120 bp, synthetic construct; identical to SEQ ID NO: 49001
  source 1..120: mol_type = other DNA

SEQ ID NO: 78956 - DNA, 120 bp, synthetic construct; identical to SEQ ID NO: 49002
  source 1..120: mol_type = other DNA

SEQ ID NO: 78957 - DNA, 120 bp, synthetic construct; identical to SEQ ID NO: 49003
  source 1..120: mol_type = other DNA

SEQ ID NO: 78958 - DNA, 120 bp, synthetic construct; identical to SEQ ID NO: 13717
  source 1..120: mol_type = other DNA

SEQ ID NO: 78959 - DNA, 120 bp, synthetic construct; identical to SEQ ID NO: 49005
  source 1..120: mol_type = other DNA

SEQ ID NO: 78960 - DNA, 120 bp, synthetic construct; identical to SEQ ID NO: 49006
  source 1..120: mol_type = other DNA

SEQ ID NO: 78961 - DNA, 120 bp, synthetic construct; identical to SEQ ID NO: 49007
  source 1..120: mol_type = other DNA

SEQ ID NO: 78962 - DNA, 120 bp, synthetic construct; identical to SEQ ID NO: 13718
  source 1..120: mol_type = other DNA

SEQ ID NO: 78963 - DNA, 120 bp, synthetic construct; identical to SEQ ID NO: 49009
  source 1..120: mol_type = other DNA

SEQ ID NO: 78964 - DNA, 120 bp, synthetic construct; identical to SEQ ID NO: 49010
  source 1..120: mol_type = other DNA

SEQ ID NO: 78965 - DNA, 120 bp, synthetic construct; identical to SEQ ID NO: 49011
  source 1..120: mol_type = other DNA

SEQ ID NO: 78966 - DNA, 120 bp, synthetic construct; identical to SEQ ID NO: 49012
  source 1..120: mol_type = other DNA

SEQ ID NO: 78967 - DNA, 120 bp, synthetic construct; identical to SEQ ID NO: 13719
  source 1..120: mol_type = other DNA

SEQ ID NO: 78968 - DNA, 120 bp, synthetic construct; identical to SEQ ID NO: 49014
  source 1..120: mol_type = other DNA

SEQ ID NO: 78969 - DNA, 120 bp, synthetic construct; identical to SEQ ID NO: 49015
  source 1..120: mol_type = other DNA

SEQ ID NO: 78970 - DNA, 120 bp, synthetic construct; identical to SEQ ID NO: 49016
  source 1..120: mol_type = other DNA

SEQ ID NO: 78971 - DNA, 120 bp, synthetic construct; identical to SEQ ID NO: 49017
  source 1..120: mol_type = other DNA

SEQ ID NO: 78972 - DNA, 120 bp, synthetic construct; identical to SEQ ID NO: 13720
  source 1..120: mol_type = other DNA

SEQ ID NO: 78973 - DNA, 120 bp, synthetic construct; identical to SEQ ID NO: 49019
  source 1..120: mol_type = other DNA

SEQ ID NO: 78974 - DNA, 120 bp, synthetic construct; identical to SEQ ID NO: 49020
  source 1..120: mol_type = other DNA

SEQ ID NO: 78975 - DNA, 120 bp, synthetic construct; identical to SEQ ID NO: 49021
  source 1..120: mol_type = other DNA

SEQ ID NO: 78976 - DNA, 120 bp, synthetic construct; identical to SEQ ID NO: 13721
  source 1..120: mol_type = other DNA

SEQ ID NO: 78977 - DNA, 120 bp, synthetic construct; identical to SEQ ID NO: 49023
  source 1..120: mol_type = other DNA

SEQ ID NO: 78978 - DNA, 120 bp, synthetic construct; identical to SEQ ID NO: 49024
  source 1..120: mol_type = other DNA

SEQ ID NO: 78979 - DNA, 120 bp, synthetic construct; identical to SEQ ID NO: 13722
  source 1..120: mol_type = other DNA

SEQ ID NO: 78980 - DNA, 120 bp, synthetic construct; identical to SEQ ID NO: 49026
  source 1..120: mol_type = other DNA

SEQ ID NO: 78981 - DNA, 120 bp, synthetic construct; identical to SEQ ID NO: 49027
  source 1..120: mol_type = other DNA

SEQ ID NO: 78982 - DNA, 120 bp, synthetic construct; identical to SEQ ID NO: 13723
  source 1..120: mol_type = other DNA

SEQ ID NO: 78983 - DNA, 120 bp, synthetic construct; identical to SEQ ID NO: 49029
  source 1..120: mol_type = other DNA

SEQ ID NO: 78984 - DNA, 120 bp, synthetic construct; identical to SEQ ID NO: 49030
  source 1..120: mol_type = other DNA

SEQ ID NO: 78985 - DNA, 120 bp, synthetic construct; identical to SEQ ID NO: 49031
  source 1..120: mol_type = other DNA

SEQ ID NO: 78986 - DNA, 120 bp, synthetic construct; identical to SEQ ID NO: 13724
  source 1..120: mol_type = other DNA

SEQ ID NO: 78987 - DNA, 120 bp, synthetic construct; identical to SEQ ID NO: 49033
  source 1..120: mol_type = other DNA

SEQ ID NO: 78988 - DNA, 120 bp, synthetic construct; identical to SEQ ID NO: 49034
  source 1..120: mol_type = other DNA

SEQ ID NO: 78989 - DNA, 120 bp, synthetic construct; identical to SEQ ID NO: 49035
  source 1..120: mol_type = other DNA

SEQ ID NO: 78990 - DNA, 120 bp, synthetic construct; identical to SEQ ID NO: 49036
  source 1..120: mol_type = other DNA

SEQ ID NO: 78991 - DNA, 120 bp, synthetic construct; identical to SEQ ID NO: 13725
  source 1..120: mol_type = other DNA

SEQ ID NO: 78992 - DNA, 120 bp, synthetic construct; identical to SEQ ID NO: 49038
  source 1..120: mol_type = other DNA

SEQ ID NO: 78993 - DNA, 120 bp, synthetic construct; identical to SEQ ID NO: 49039
  source 1..120: mol_type = other DNA

SEQ ID NO: 78994 - DNA, 120 bp, synthetic construct; identical to SEQ ID NO: 49040
  source 1..120: mol_type = other DNA

SEQ ID NO: 78995 - DNA, 120 bp, synthetic construct; identical to SEQ ID NO: 13726
  source 1..120: mol_type = other DNA

SEQ ID NO: 78996 - DNA, 120 bp, synthetic construct; identical to SEQ ID NO: 49042
  source 1..120: mol_type = other DNA

SEQ ID NO: 78997 - DNA, 120 bp, synthetic construct; identical to SEQ ID NO: 49043
  source 1..120: mol_type = other DNA

SEQ ID NO: 78998 - DNA, 120 bp, synthetic construct; identical to SEQ ID NO: 49044
  source 1..120: mol_type = other DNA

SEQ ID NO: 78999 - DNA, 120 bp, synthetic construct; identical to SEQ ID NO: 13727
  source 1..120: mol_type = other DNA

SEQ ID NO: 79000 - DNA, 120 bp, synthetic construct; identical to SEQ ID NO: 49046
  source 1..120: mol_type = other DNA

SEQ ID NO: 79001 - DNA, 120 bp, synthetic construct; identical to SEQ ID NO: 49047
  source 1..120: mol_type = other DNA

SEQ ID NO: 79002 - DNA, 120 bp, synthetic construct; identical to SEQ ID NO: 49048
  source 1..120: mol_type = other DNA

SEQ ID NO: 79003 - DNA, 120 bp, synthetic construct; identical to SEQ ID NO: 49049
  source 1..120: mol_type = other DNA

SEQ ID NO: 79004 - DNA, 120 bp, synthetic construct; identical to SEQ ID NO: 13728
  source 1..120: mol_type = other DNA

SEQ ID NO: 79005 - DNA, 120 bp, synthetic construct; identical to SEQ ID NO: 49051
  source 1..120: mol_type = other DNA

SEQ ID NO: 79006 - DNA, 120 bp, synthetic construct; identical to SEQ ID NO: 49052
  source 1..120: mol_type = other DNA

SEQ ID NO: 79007 - DNA, 120 bp, synthetic construct; identical to SEQ ID NO: 13729
  source 1..120: mol_type = other DNA

SEQ ID NO: 79008 - DNA, 120 bp, synthetic construct; identical to SEQ ID NO: 49054
  source 1..120: mol_type = other DNA

SEQ ID NO: 79009 - DNA, 120 bp, synthetic construct; identical to SEQ ID NO: 49055
  source 1..120: mol_type = other DNA

SEQ ID NO: 79010 - DNA, 120 bp, synthetic construct; identical to SEQ ID NO: 49056
  source 1..120: mol_type = other DNA

SEQ ID NO: 79011 - DNA, 120 bp, synthetic construct; identical to SEQ ID NO: 13730
  source 1..120: mol_type = other DNA

SEQ ID NO: 79012 - DNA, 120 bp, synthetic construct; identical to SEQ ID NO: 49058
  source 1..120: mol_type = other DNA

SEQ ID NO: 79013 - DNA, 120 bp, synthetic construct; identical to SEQ ID NO: 49059
  source 1..120: mol_type = other DNA

SEQ ID NO: 79014 - DNA, 120 bp, synthetic construct; identical to SEQ ID NO: 49060
  source 1..120: mol_type = other DNA

SEQ ID NO: 79015 - DNA, 120 bp, synthetic construct; identical to SEQ ID NO: 13731
  source 1..120: mol_type = other DNA

SEQ ID NO: 79016 - DNA, 120 bp, synthetic construct; identical to SEQ ID NO: 49062
  source 1..120: mol_type = other DNA

SEQ ID NO: 79017 - DNA, 120 bp, synthetic construct; identical to SEQ ID NO: 49063
  source 1..120: mol_type = other DNA

SEQ ID NO: 79018 - DNA, 120 bp, synthetic construct; identical to SEQ ID NO: 49064
  source 1..120: mol_type = other DNA

SEQ ID NO: 79019 - DNA, 120 bp, synthetic construct; identical to SEQ ID NO: 13732
  source 1..120: mol_type = other DNA

SEQ ID NO: 79020 - DNA, 120 bp, synthetic construct; identical to SEQ ID NO: 49066
  source 1..120: mol_type = other DNA

SEQ ID NO: 79021 - DNA, 120 bp, synthetic construct; identical to SEQ ID NO: 49067
  source 1..120: mol_type = other DNA

SEQ ID NO: 79022 - DNA, 120 bp, synthetic construct; identical to SEQ ID NO: 49068
  source 1..120: mol_type = other DNA

SEQ ID NO: 79023 - DNA, 120 bp, synthetic construct; identical to SEQ ID NO: 13733
  source 1..120: mol_type = other DNA

SEQ ID NO: 79024 - DNA, 120 bp, synthetic construct; identical to SEQ ID NO: 49070
  source 1..120: mol_type = other DNA

SEQ ID NO: 79025 - DNA, 120 bp, synthetic construct; identical to SEQ ID NO: 49071
  source 1..120: mol_type = other DNA

SEQ ID NO: 79026 - DNA, 120 bp, synthetic construct; identical to SEQ ID NO: 49072
  source 1..120: mol_type = other DNA

SEQ ID NO: 79027 - DNA, 120 bp, synthetic construct; identical to SEQ ID NO: 13734
  source 1..120: mol_type = other DNA

SEQ ID NO: 79028 - DNA, 120 bp, synthetic construct; identical to SEQ ID NO: 49074
  source 1..120: mol_type = other DNA

SEQ ID NO: 79029 - DNA, 120 bp, synthetic construct; identical to SEQ ID NO: 49075
  source 1..120: mol_type = other DNA

SEQ ID NO: 79030 - DNA, 120 bp, synthetic construct; identical to SEQ ID NO: 49076
  source 1..120: mol_type = other DNA

SEQ ID NO: 79031 - DNA, 120 bp, synthetic construct; identical to SEQ ID NO: 13735
  source 1..120: mol_type = other DNA

SEQ ID NO: 79032 - DNA, 120 bp, synthetic construct; identical to SEQ ID NO: 49078
  source 1..120: mol_type = other DNA

SEQ ID NO: 79033 - DNA, 120 bp, synthetic construct; identical to SEQ ID NO: 49079
  source 1..120: mol_type = other DNA

SEQ ID NO: 79034 - DNA, 120 bp, synthetic construct; identical to SEQ ID NO: 49080
  source 1..120: mol_type = other DNA

SEQ ID NO: 79035 - DNA, 120 bp, synthetic construct; identical to SEQ ID NO: 13736
  source 1..120: mol_type = other DNA

SEQ ID NO: 79036 - DNA, 120 bp, synthetic construct; identical to SEQ ID NO: 49082
  source 1..120: mol_type = other DNA

SEQ ID NO: 79037 - DNA, 120 bp, synthetic construct; identical to SEQ ID NO: 49083
  source 1..120: mol_type = other DNA

SEQ ID NO: 79038 - DNA, 120 bp, synthetic construct; identical to SEQ ID NO: 49084
  source 1..120: mol_type = other DNA

SEQ ID NO: 79039 - DNA, 120 bp, synthetic construct; identical to SEQ ID NO: 13737
  source 1..120: mol_type = other DNA

SEQ ID NO: 79040 - DNA, 120 bp, synthetic construct; identical to SEQ ID NO: 49086
  source 1..120: mol_type = other DNA

SEQ ID NO: 79041 - DNA, 120 bp, synthetic construct; identical to SEQ ID NO: 49087
  source 1..120: mol_type = other DNA

SEQ ID NO: 79042 - DNA, 120 bp, synthetic construct; identical to SEQ ID NO: 13738
  source 1..120: mol_type = other DNA

SEQ ID NO: 79043 - DNA, 120 bp, synthetic construct; identical to SEQ ID NO: 49089
  source 1..120: mol_type = other DNA

SEQ ID NO: 79044 - DNA, 120 bp, synthetic construct; identical to SEQ ID NO: 49090
  source 1..120: mol_type = other DNA

SEQ ID NO: 79045 - DNA, 120 bp, synthetic construct; identical to SEQ ID NO: 49091
  source 1..120: mol_type = other DNA

SEQ ID NO: 79046 - DNA, 120 bp, synthetic construct; identical to SEQ ID NO: 49092
  source 1..120: mol_type = other DNA

SEQ ID NO: 79047 - DNA, 120 bp, synthetic construct; identical to SEQ ID NO: 13739
  source 1..120: mol_type = other DNA

SEQ ID NO: 79048 - DNA, 120 bp, synthetic construct; identical to SEQ ID NO: 49094
  source 1..120: mol_type = other DNA

SEQ ID NO: 79049 - DNA, 120 bp, synthetic construct; identical to SEQ ID NO: 49095
  source 1..120: mol_type = other DNA

SEQ ID NO: 79050 - DNA, 120 bp, synthetic construct; identical to SEQ ID NO: 13740
  source 1..120: mol_type = other DNA

SEQ ID NO: 79051 - DNA, 120 bp, synthetic construct; identical to SEQ ID NO: 49097
  source 1..120: mol_type = other DNA

SEQ ID NO: 79052 - DNA, 120 bp, synthetic construct; identical to SEQ ID NO: 49098
  source 1..120: mol_type = other DNA

SEQ ID NO: 79053 - DNA, 120 bp, synthetic construct; identical to SEQ ID NO: 49099
  source 1..120: mol_type = other DNA

SEQ ID NO: 79054 - DNA, 120 bp, synthetic construct; identical to SEQ ID NO: 13741
  source 1..120: mol_type = other DNA

SEQ ID NO: 79055 - DNA, 120 bp, synthetic construct; identical to SEQ ID NO: 49101
  source 1..120: mol_type = other DNA

SEQ ID NO: 79056 - DNA, 120 bp, synthetic construct; identical to SEQ ID NO: 49102
  source 1..120: mol_type = other DNA

SEQ ID NO: 79057 - DNA, 120 bp, synthetic construct; identical to SEQ ID NO: 49103
  source 1..120: mol_type = other DNA

SEQ ID NO: 79058 - DNA, 120 bp, synthetic construct; identical to SEQ ID NO: 13742
  source 1..120: mol_type = other DNA

SEQ ID NO: 79059 - DNA, 120 bp, synthetic construct; identical to SEQ ID NO: 49105
  source 1..120: mol_type = other DNA

SEQ ID NO: 79060 - DNA, 120 bp, synthetic construct; identical to SEQ ID NO: 49106
  source 1..120: mol_type = other DNA

SEQ ID NO: 79061 - DNA, 120 bp, synthetic construct; identical to SEQ ID NO: 49107
  source 1..120: mol_type = other DNA

SEQ ID NO: 79062 - DNA, 120 bp, synthetic construct; identical to SEQ ID NO: 49108
  source 1..120: mol_type = other DNA

SEQ ID NO: 79063 - DNA, 120 bp, synthetic construct; identical to SEQ ID NO: 13743
  source 1..120: mol_type = other DNA

SEQ ID NO: 79064 - DNA, 120 bp, synthetic construct; identical to SEQ ID NO: 49110
  source 1..120: mol_type = other DNA

SEQ ID NO: 79065 - DNA, 120 bp, synthetic construct; identical to SEQ ID NO: 49111
  source 1..120: mol_type = other DNA

SEQ ID NO: 79066 - DNA, 120 bp, synthetic construct; identical to SEQ ID NO: 49112
  source 1..120: mol_type = other DNA

SEQ ID NO: 79067 - DNA, 120 bp, synthetic construct; identical to SEQ ID NO: 49113
  source 1..120: mol_type = other DNA

SEQ ID NO: 79068 - DNA, 120 bp, synthetic construct; identical to SEQ ID NO: 13744
  source 1..120: mol_type = other DNA

SEQ ID NO: 79069 - DNA, 120 bp, synthetic construct; identical to SEQ ID NO: 49115
  source 1..120: mol_type = other DNA

SEQ ID NO: 79070 - DNA, 120 bp, synthetic construct; identical to SEQ ID NO: 49116
  source 1..120: mol_type = other DNA

SEQ ID NO: 79071 - DNA, 120 bp, synthetic construct; identical to SEQ ID NO: 13745
  source 1..120: mol_type = other DNA

SEQ ID NO: 79072 - DNA, 120 bp, synthetic construct; identical to SEQ ID NO: 49118
  source 1..120: mol_type = other DNA

SEQ ID NO: 79073 - DNA, 120 bp, synthetic construct; identical to SEQ ID NO: 49119
  source 1..120: mol_type = other DNA

SEQ ID NO: 79074 - DNA, 120 bp, synthetic construct; identical to SEQ ID NO: 49120
  source 1..120: mol_type = other DNA

SEQ ID NO: 79075 - DNA, 120 bp, synthetic construct; identical to SEQ ID NO: 49121
  source 1..120: mol_type = other DNA

SEQ ID NO: 79076 - DNA, 120 bp, synthetic construct; identical to SEQ ID NO: 13746
  source 1..120: mol_type = other DNA

SEQ ID NO: 79077 - DNA, 120 bp, synthetic construct; identical to SEQ ID NO: 49123
  source 1..120: mol_type = other DNA

SEQ ID NO: 79078 - DNA, 120 bp, synthetic construct; identical to SEQ ID NO: 13747
  source 1..120: mol_type = other DNA

SEQ ID NO: 79079 - DNA, 120 bp, synthetic construct; identical to SEQ ID NO: 49125
  source 1..120: mol_type = other DNA

SEQ ID NO: 79080 - DNA, 120 bp, synthetic construct; identical to SEQ ID NO: 49126
  source 1..120: mol_type = other DNA

SEQ ID NO: 79081 - DNA, 120 bp, synthetic construct; identical to SEQ ID NO: 49127
  source 1..120: mol_type = other DNA

SEQ ID NO: 79082 - DNA, 120 bp, synthetic construct; identical to SEQ ID NO: 13748
  source 1..120: mol_type = other DNA

SEQ ID NO: 79083 - DNA, 120 bp, synthetic construct; identical to SEQ ID NO: 49129
  source 1..120: mol_type = other DNA

SEQ ID NO: 79084 - DNA, 120 bp, synthetic construct; identical to SEQ ID NO: 49130
  source 1..120: mol_type = other DNA

SEQ ID NO: 79085 - DNA, 120 bp, synthetic construct; identical to SEQ ID NO: 49131
  source 1..120: mol_type = other DNA

SEQ ID NO: 79086 - DNA, 120 bp, synthetic construct; identical to SEQ ID NO: 13749
  source 1..120: mol_type = other DNA

SEQ ID NO: 79087 - DNA, 120 bp, synthetic construct; identical to SEQ ID NO: 49133
  source 1..120: mol_type = other DNA

SEQ ID NO: 79088 - DNA, 120 bp, synthetic construct; identical to SEQ ID NO: 49134
  source 1..120: mol_type = other DNA

SEQ ID NO: 79089 - DNA, 120 bp, synthetic construct; identical to SEQ ID NO: 49135
  source 1..120: mol_type = other DNA

SEQ ID NO: 79090 - DNA, 120 bp, synthetic construct; identical to SEQ ID NO: 13750
  source 1..120: mol_type = other DNA

SEQ ID NO: 79091 - DNA, 120 bp, synthetic construct; identical to SEQ ID NO: 49137
  source 1..120: mol_type = other DNA

SEQ ID NO: 79092 - DNA, 120 bp, synthetic construct; identical to SEQ ID NO: 49138
  source 1..120: mol_type = other DNA

SEQ ID NO: 79093 - DNA, 120 bp, synthetic construct; identical to SEQ ID NO: 49139
  source 1..120: mol_type = other DNA

SEQ ID NO: 79094 - DNA, 120 bp, synthetic construct; identical to SEQ ID NO: 13751
  source 1..120: mol_type = other DNA

SEQ ID NO: 79095 - DNA, 120 bp, synthetic construct; identical to SEQ ID NO: 49141
  source 1..120: mol_type = other DNA

SEQ ID NO: 79096 - DNA, 120 bp, synthetic construct; identical to SEQ ID NO: 49142
  source 1..120: mol_type = other DNA

SEQ ID NO: 79097 - DNA, 120 bp, synthetic construct; identical to SEQ ID NO: 49143
  source 1..120: mol_type = other DNA

SEQ ID NO: 79098 - DNA, 120 bp, synthetic construct; identical to SEQ ID NO: 13752
  source 1..120: mol_type = other DNA

SEQ ID NO: 79099 - DNA, 120 bp, synthetic construct; identical to SEQ ID NO: 49145
  source 1..120: mol_type = other DNA

SEQ ID NO: 79100 - DNA, 120 bp, synthetic construct; identical to SEQ ID NO: 49146
  source 1..120: mol_type = other DNA

SEQ ID NO: 79101 - DNA, 120 bp, synthetic construct; identical to SEQ ID NO: 49147
  source 1..120: mol_type = other DNA

SEQ ID NO: 79102 - DNA, 120 bp, synthetic construct; identical to SEQ ID NO: 49148
  source 1..120: mol_type = other DNA

SEQ ID NO: 79103 - DNA, 120 bp, synthetic construct; identical to SEQ ID NO: 13753
  source 1..120: mol_type = other DNA

SEQ ID NO: 79104 - DNA, 120 bp, synthetic construct; identical to SEQ ID NO: 49150
  source 1..120: mol_type = other DNA

SEQ ID NO: 79105 - DNA, 120 bp, synthetic construct; identical to SEQ ID NO: 49151
  source 1..120: mol_type = other DNA

SEQ ID NO: 79106 - DNA, 120 bp, synthetic construct; identical to SEQ ID NO: 49152
  source 1..120: mol_type = other DNA

SEQ ID NO: 79107 - DNA, 120 bp, synthetic construct; identical to SEQ ID NO: 13754
  source 1..120: mol_type = other DNA

SEQ ID NO: 79108 - DNA, 120 bp, synthetic construct; identical to SEQ ID NO: 49154
  source 1..120: mol_type = other DNA

SEQ ID NO: 79109 - DNA, 120 bp, synthetic construct; identical to SEQ ID NO: 49155
  source 1..120: mol_type = other DNA

SEQ ID NO: 79110 - DNA, 120 bp, synthetic construct; identical to SEQ ID NO: 49156
  source 1..120: mol_type = other DNA

SEQ ID NO: 79111 - DNA, 120 bp, synthetic construct; identical to SEQ ID NO: 13755
  source 1..120: mol_type = other DNA

SEQ ID NO: 79112 - DNA, 120 bp, synthetic construct; identical to SEQ ID NO: 49158
  source 1..120: mol_type = other DNA

SEQ ID NO: 79113 - DNA, 120 bp, synthetic construct; identical to SEQ ID NO: 49159
  source 1..120: mol_type = other DNA

SEQ ID NO: 79114 - DNA, 120 bp, synthetic construct; identical to SEQ ID NO: 49160
  source 1..120: mol_type = other DNA

SEQ ID NO: 79115 - DNA, 120 bp, synthetic construct; identical to SEQ ID NO: 13756
  source 1..120: mol_type = other DNA

SEQ ID NO: 79116 - DNA, 120 bp, synthetic construct; identical to SEQ ID NO: 49162
  source 1..120: mol_type = other DNA

SEQ ID NO: 79117 - DNA, 120 bp, synthetic construct; identical to SEQ ID NO: 49163
  source 1..120: mol_type = other DNA

SEQ ID NO: 79118 - DNA, 120 bp, synthetic construct; identical to SEQ ID NO: 49164
  source 1..120: mol_type = other DNA

SEQ ID NO: 79119 - DNA, 120 bp, synthetic construct; identical to SEQ ID NO: 13757
  source 1..120: mol_type = other DNA

SEQ ID NO: 79120 - DNA, 120 bp, synthetic construct; identical to SEQ ID NO: 49166
  source 1..120: mol_type = other DNA

SEQ ID NO: 79121 - DNA, 120 bp, synthetic construct; identical to SEQ ID NO: 49167
  source 1..120: mol_type = other DNA

SEQ ID NO: 79122 - DNA, 120 bp, synthetic construct; identical to SEQ ID NO: 13758
  source 1..120: mol_type = other DNA

SEQ ID NO: 79123 - DNA, 120 bp, synthetic construct; identical to SEQ ID NO: 49169
  source 1..120: mol_type = other DNA

SEQ ID NO: 79124 - DNA, 120 bp, synthetic construct; identical to SEQ ID NO: 49170
  source 1..120: mol_type = other DNA

SEQ ID NO: 79125 - DNA, 120 bp, synthetic construct; identical to SEQ ID NO: 49171
  source 1..120: mol_type = other DNA

SEQ ID NO: 79126 - DNA, 120 bp, synthetic construct; identical to SEQ ID NO: 13759
  source 1..120: mol_type = other DNA

SEQ ID NO: 79127 - DNA, 120 bp, synthetic construct; identical to SEQ ID NO: 49173
  source 1..120: mol_type = other DNA

SEQ ID NO: 79128 - DNA, 120 bp, synthetic construct; identical to SEQ ID NO: 49174
  source 1..120: mol_type = other DNA

SEQ ID NO: 79129 - DNA, 120 bp, synthetic construct; identical to SEQ ID NO: 49175
  source 1..120: mol_type = other DNA

SEQ ID NO: 79130 - DNA, 120 bp, synthetic construct; identical to SEQ ID NO: 13760
  source 1..120: mol_type = other DNA

SEQ ID NO: 79131 - DNA, 120 bp, synthetic construct; identical to SEQ ID NO: 49177
  source 1..120: mol_type = other DNA

SEQ ID NO: 79132 - DNA, 120 bp, synthetic construct; identical to SEQ ID NO: 49178
  source 1..120: mol_type = other DNA

SEQ ID NO: 79133 - DNA, 120 bp, synthetic construct; identical to SEQ ID NO: 49179
  source 1..120: mol_type = other DNA

SEQ ID NO: 79134 - DNA, 120 bp, synthetic construct; identical to SEQ ID NO: 49180
  source 1..120: mol_type = other DNA

SEQ ID NO: 79135 - DNA, 120 bp, synthetic construct; identical to SEQ ID NO: 13761
  source 1..120: mol_type = other DNA

SEQ ID NO: 79136 - DNA, 120 bp, synthetic construct; identical to SEQ ID NO: 49182
  source 1..120: mol_type = other DNA

SEQ ID NO: 79137 - DNA, 120 bp, synthetic construct; identical to SEQ ID NO: 49183
  source 1..120: mol_type = other DNA

SEQ ID NO: 79138 - DNA, 120 bp, synthetic construct; identical to SEQ ID NO: 49184
  source 1..120: mol_type = other DNA

SEQ ID NO: 79139 - DNA, 120 bp, synthetic construct; identical to SEQ ID NO: 13762
  source 1..120: mol_type = other DNA

SEQ ID NO: 79140 - DNA, 120 bp, synthetic construct; identical to SEQ ID NO: 49186
  source 1..120: mol_type = other DNA

SEQ ID NO: 79141 - DNA, 120 bp, synthetic construct; identical to SEQ ID NO: 49187
  source 1..120: mol_type = other DNA

SEQ ID NO: 79142 - DNA, 120 bp, synthetic construct; identical to SEQ ID NO: 49188
  source 1..120: mol_type = other DNA

SEQ ID NO: 79143 - DNA, 120 bp, synthetic construct; identical to SEQ ID NO: 49189
  source 1..120: mol_type = other DNA

SEQ ID NO: 79144 - DNA, 120 bp, synthetic construct; identical to SEQ ID NO: 13763
  source 1..120: mol_type = other DNA

SEQ ID NO: 79145 - DNA, 120 bp, synthetic construct; identical to SEQ ID NO: 49191
  source 1..120: mol_type = other DNA

SEQ ID NO: 79146 - DNA, 120 bp, synthetic construct; identical to SEQ ID NO: 49192
  source 1..120: mol_type = other DNA

SEQ ID NO: 79147 - DNA, 120 bp, synthetic construct; identical to SEQ ID NO: 49193
  source 1..120: mol_type = other DNA

SEQ ID NO: 79148 - DNA, 120 bp, synthetic construct; identical to SEQ ID NO: 13764
  source 1..120: mol_type = other DNA

SEQ ID NO: 79149 - DNA, 120 bp, synthetic construct; identical to SEQ ID NO: 49195
  source 1..120: mol_type = other DNA

SEQ ID NO: 79150 - DNA, 120 bp, synthetic construct; identical to SEQ ID NO: 49196
  source 1..120: mol_type = other DNA

SEQ ID NO: 79151 - DNA, 120 bp, synthetic construct; identical to SEQ ID NO: 49197
  source 1..120: mol_type = other DNA

SEQ ID NO: 79152 - DNA, 120 bp, synthetic construct; identical to SEQ ID NO: 49198
  source 1..120: mol_type = other DNA

SEQ ID NO: 79153 - DNA, 120 bp, synthetic construct; identical to SEQ ID NO: 13765
  source 1..120: mol_type = other DNA

SEQ ID NO: 79154 - DNA, 120 bp, synthetic construct; identical to SEQ ID NO: 49200
  source 1..120: mol_type = other DNA

SEQ ID NO: 79155 - DNA, 120 bp, synthetic construct; identical to SEQ ID NO: 49201
  source 1..120: mol_type = other DNA

SEQ ID NO: 79156 - DNA, 120 bp, synthetic construct; identical to SEQ ID NO: 13766
  source 1..120: mol_type = other DNA

SEQ ID NO: 79157 - DNA, 120 bp, synthetic construct; identical to SEQ ID NO: 49203
  source 1..120: mol_type = other DNA

SEQ ID NO: 79158 - DNA, 120 bp, synthetic construct; identical to SEQ ID NO: 49204
  source 1..120: mol_type = other DNA

SEQ ID NO: 79159 - DNA, 120 bp, synthetic construct; identical to SEQ ID NO: 49205
  source 1..120: mol_type = other DNA

SEQ ID NO: 79160 - DNA, 120 bp, synthetic construct; identical to SEQ ID NO: 13767
  source 1..120: mol_type = other DNA

SEQ ID NO: 79161 - DNA, 120 bp, synthetic construct; identical to SEQ ID NO: 49207
  source 1..120: mol_type = other DNA

SEQ ID NO: 79162 - DNA, 120 bp, synthetic construct; identical to SEQ ID NO: 49208
  source 1..120: mol_type = other DNA

SEQ ID NO: 79163 - DNA, 120 bp, synthetic construct; identical to SEQ ID NO: 49209
  source 1..120: mol_type = other DNA

SEQ ID NO: 79164 - DNA, 120 bp, synthetic construct; identical to SEQ ID NO: 13768
  source 1..120: mol_type = other DNA

SEQ ID NO: 79165 - DNA, 120 bp, synthetic construct; identical to SEQ ID NO: 49211
  source 1..120: mol_type = other DNA

SEQ ID NO: 79166 - DNA, 120 bp, synthetic construct; identical to SEQ ID NO: 49212
  source 1..120: mol_type = other DNA

SEQ ID NO: 79167 - DNA, 120 bp, synthetic construct; identical to SEQ ID NO: 49213
  source 1..120: mol_type = other DNA

SEQ ID NO: 79168 - DNA, 120 bp, synthetic construct; identical to SEQ ID NO: 13769
  source 1..120: mol_type = other DNA

SEQ ID NO: 79169 - DNA, 120 bp, synthetic construct; identical to SEQ ID NO: 49215
  source 1..120: mol_type = other DNA

SEQ ID NO: 79170 - DNA, 120 bp, synthetic construct; identical to SEQ ID NO: 49216
  source 1..120: mol_type = other DNA

SEQ ID NO: 79171 - DNA, 120 bp, synthetic construct; identical to SEQ ID NO: 49217
  source 1..120: mol_type = other DNA

SEQ ID NO: 79172 - DNA, 120 bp, synthetic construct; identical to SEQ ID NO: 49218
  source 1..120: mol_type = other DNA

SEQ ID NO: 79173 - DNA, 120 bp, synthetic construct; identical to SEQ ID NO: 13770
  source 1..120: mol_type = other DNA

SEQ ID NO: 79174 - DNA, 120 bp, synthetic construct; identical to SEQ ID NO: 49220
  source 1..120: mol_type = other DNA

SEQ ID NO: 79175 - DNA, 120 bp, synthetic construct; identical to SEQ ID NO: 49221
  source 1..120: mol_type = other DNA

SEQ ID NO: 79176 - DNA, 120 bp, synthetic construct; identical to SEQ ID NO: 13771
  source 1..120: mol_type = other DNA

SEQ ID NO: 79177 - DNA, 120 bp, synthetic construct; identical to SEQ ID NO: 49223
  source 1..120: mol_type = other DNA

SEQ ID NO: 79178 - DNA, 120 bp, synthetic construct; identical to SEQ ID NO: 49224
  source 1..120: mol_type = other DNA

SEQ ID NO: 79179 - DNA, 120 bp, synthetic construct; identical to SEQ ID NO: 49225
  source 1..120: mol_type = other DNA

SEQ ID NO: 79180 - DNA, 120 bp, synthetic construct; identical to SEQ ID NO: 49226
  source 1..120: mol_type = other DNA

SEQ ID NO: 79181 - DNA, 120 bp, synthetic construct; identical to SEQ ID NO: 13772
  source 1..120: mol_type = other DNA

SEQ ID NO: 79182 - DNA, 120 bp, synthetic construct; identical to SEQ ID NO: 49228
  source 1..120: mol_type = other DNA

SEQ ID NO: 79183 - DNA, 120 bp, synthetic construct; identical to SEQ ID NO: 49229
  source 1..120: mol_type = other DNA

SEQ ID NO: 79184 - DNA, 120 bp, synthetic construct; identical to SEQ ID NO: 49230
  source 1..120: mol_type = other DNA

SEQ ID NO: 79185 - DNA, 120 bp, synthetic construct; identical to SEQ ID NO: 13773
  source 1..120: mol_type = other DNA

SEQ ID NO: 79186 - DNA, 120 bp, synthetic construct; identical to SEQ ID NO: 49232
  source 1..120: mol_type = other DNA

SEQ ID NO: 79187 - DNA, 120 bp, synthetic construct; identical to SEQ ID NO: 49233
  source 1..120: mol_type = other DNA

SEQ ID NO: 79188 - DNA, 120 bp, synthetic construct; identical to SEQ ID NO: 13774
  source 1..120: mol_type = other DNA

SEQ ID NO: 79189 - DNA, 120 bp, synthetic construct; identical to SEQ ID NO: 49235
  source 1..120: mol_type = other DNA

SEQ ID NO: 79190 - DNA, 120 bp, synthetic construct; identical to SEQ ID NO: 49236
  source 1..120: mol_type = other DNA

SEQ ID NO: 79191 - DNA, 120 bp, synthetic construct; identical to SEQ ID NO: 49237
  source 1..120: mol_type = other DNA

SEQ ID NO: 79192 - DNA, 120 bp, synthetic construct; identical to SEQ ID NO: 13775
  source 1..120: mol_type = other DNA

SEQ ID NO: 79193 - DNA, 120 bp, synthetic construct; identical to SEQ ID NO: 49239
  source 1..120: mol_type = other DNA

SEQ ID NO: 79194 - DNA, 120 bp, synthetic construct; identical to SEQ ID NO: 49240
  source 1..120: mol_type = other DNA

SEQ ID NO: 79195 - DNA, 120 bp, synthetic construct; identical to SEQ ID NO: 49241
  source 1..120: mol_type = other DNA

SEQ ID NO: 79196 - DNA, 120 bp, synthetic construct; identical to SEQ ID NO: 49242
  source 1..120: mol_type = other DNA

SEQ ID NO: 79197 - DNA, 120 bp, synthetic construct; identical to SEQ ID NO: 13776
  source 1..120: mol_type = other DNA

SEQ ID NO: 79198 - DNA, 120 bp, synthetic construct; identical to SEQ ID NO: 49244
  source 1..120: mol_type = other DNA

SEQ ID NO: 79199 - DNA, 120 bp, synthetic construct; identical to SEQ ID NO: 49245
  source 1..120: mol_type = other DNA

SEQ ID NO: 79200 - DNA, 120 bp, synthetic construct; identical to SEQ ID NO: 49246
  source 1..120: mol_type = other DNA

SEQ ID NO: 79201 - DNA, 120 bp, synthetic construct; identical to SEQ ID NO: 13777
  source 1..120: mol_type = other DNA

SEQ ID NO: 79202 - DNA, 120 bp, synthetic construct; identical to SEQ ID NO: 49248
  source 1..120: mol_type = other DNA

SEQ ID NO: 79203 - DNA, 120 bp, synthetic construct; identical to SEQ ID NO: 49249
  source 1..120: mol_type = other DNA

SEQ ID NO: 79204 - DNA, 120 bp, synthetic construct; identical to SEQ ID NO: 49250
  source 1..120: mol_type = other DNA

SEQ ID NO: 79205 - DNA, 120 bp, synthetic construct; identical to SEQ ID NO: 13778
  source 1..120: mol_type = other DNA

SEQ ID NO: 79206 - DNA, 120 bp, synthetic construct; identical to SEQ ID NO: 49252
  source 1..120: mol_type = other DNA

SEQ ID NO: 79207 - DNA, 120 bp, synthetic construct; identical to SEQ ID NO: 49253
  source 1..120: mol_type = other DNA

SEQ ID NO: 79208 - DNA, 120 bp, synthetic construct; identical to SEQ ID NO: 13779
  source 1..120: mol_type = other DNA

SEQ ID NO: 79209 - DNA, 120 bp, synthetic construct; identical to SEQ ID NO: 49255
  source 1..120: mol_type = other DNA

SEQ ID NO: 79210 - DNA, 120 bp, synthetic construct; identical to SEQ ID NO: 49256
  source 1..120: mol_type = other DNA

SEQ ID NO: 79211 - DNA, 120 bp, synthetic construct; identical to SEQ ID NO: 49257
  source 1..120: mol_type = other DNA

SEQ ID NO: 79212 - DNA, 120 bp, synthetic construct; identical to SEQ ID NO: 49258
  source 1..120: mol_type = other DNA

SEQ ID NO: 79213 - DNA, 120 bp, synthetic construct; identical to SEQ ID NO: 13780
  source 1..120: mol_type = other DNA

SEQ ID NO: 79214 - DNA, 120 bp, synthetic construct; identical to SEQ ID NO: 49260
  source 1..120: mol_type = other DNA

SEQ ID NO: 79215 - DNA, 120 bp, synthetic construct; identical to SEQ ID NO: 49261
  source 1..120: mol_type = other DNA

SEQ ID NO: 79216 - DNA, 120 bp, synthetic construct; identical to SEQ ID NO: 13781
  source 1..120: mol_type = other DNA

SEQ ID NO: 79217 - DNA, 120 bp, synthetic construct; identical to SEQ ID NO: 49263
  source 1..120: mol_type = other DNA

SEQ ID NO: 79218 - DNA, 120 bp, synthetic construct; identical to SEQ ID NO: 49264
  source 1..120: mol_type = other DNA

SEQ ID NO: 79219 - DNA, 120 bp, synthetic construct; identical to SEQ ID NO: 49265
  source 1..120: mol_type = other DNA

SEQ ID NO: 79220 - DNA, 120 bp, synthetic construct; identical to SEQ ID NO: 13782
  source 1..120: mol_type = other DNA

SEQ ID NO: 79221 - DNA, 120 bp, synthetic construct; identical to SEQ ID NO: 49267
  source 1..120: mol_type = other DNA

SEQ ID NO: 79222 - DNA, 120 bp, synthetic construct; identical to SEQ ID NO: 49268
  source 1..120: mol_type = other DNA

SEQ ID NO: 79223 - DNA, 120 bp, synthetic construct; identical to SEQ ID NO: 49269
  source 1..120: mol_type = other DNA

SEQ ID NO: 79224 - DNA, 120 bp, synthetic construct; identical to SEQ ID NO: 49270
  source 1..120: mol_type = other DNA

SEQ ID NO: 79225 - DNA, 120 bp, synthetic construct; identical to SEQ ID NO: 13783
  source 1..120: mol_type = other DNA

SEQ ID NO: 79226 - DNA, 120 bp, synthetic construct; identical to SEQ ID NO: 49272
  source 1..120: mol_type = other DNA

SEQ ID NO: 79227 - DNA, 120 bp, synthetic construct; identical to SEQ ID NO: 49273
  source 1..120: mol_type = other DNA

SEQ ID NO: 79228 - DNA, 120 bp, synthetic construct; identical to SEQ ID NO: 49274
  source 1..120: mol_type = other DNA

SEQ ID NO: 79229 - DNA, 120 bp, synthetic construct; identical to SEQ ID NO: 13784
  source 1..120: mol_type = other DNA

SEQ ID NO: 79230 - DNA, 120 bp, synthetic construct; identical to SEQ ID NO: 49276
  source 1..120: mol_type = other DNA

SEQ ID NO: 79231 - DNA, 120 bp, synthetic construct; identical to SEQ ID NO: 49277
  source 1..120: mol_type = other DNA

SEQ ID NO: 79232 - DNA, 120 bp, synthetic construct; identical to SEQ ID NO: 49278
  source 1..120: mol_type = other DNA

SEQ ID NO: 79233 - DNA, 120 bp, synthetic construct; identical to SEQ ID NO: 13785
  source 1..120: mol_type = other DNA

SEQ ID NO: 79234 - DNA, 120 bp, synthetic construct; identical to SEQ ID NO: 49280
  source 1..120: mol_type = other DNA

SEQ ID NO: 79235 - DNA, 120 bp, synthetic construct; identical to SEQ ID NO: 49281
  source 1..120: mol_type = other DNA

SEQ ID NO: 79236 - DNA, 120 bp, synthetic construct; identical to SEQ ID NO: 49282
  source 1..120: mol_type = other DNA

SEQ ID NO: 79237 - DNA, 120 bp, synthetic construct; identical to SEQ ID NO: 13786
  source 1..120: mol_type = other DNA

SEQ ID NO: 79238 - DNA, 120 bp, synthetic construct; identical to SEQ ID NO: 49284
  source 1..120: mol_type = other DNA

SEQ ID NO: 79239 - DNA, 120 bp, synthetic construct; identical to SEQ ID NO: 49285
  source 1..120: mol_type = other DNA

SEQ ID NO: 79240 - DNA, 120 bp, synthetic construct; identical to SEQ ID NO: 49286
  source 1..120: mol_type = other DNA

SEQ ID NO: 79241 - DNA, 120 bp, synthetic construct; identical to SEQ ID NO: 13787
  source 1..120: mol_type = other DNA

SEQ ID NO: 79242 - DNA, 120 bp, synthetic construct; identical to SEQ ID NO: 49288
  source 1..120: mol_type = other DNA

SEQ ID NO: 79243 - DNA, 120 bp, synthetic construct; identical to SEQ ID NO: 49289
  source 1..120: mol_type = other DNA

SEQ ID NO: 79244 - DNA, 120 bp, synthetic construct; identical to SEQ ID NO: 13788
  source 1..120: mol_type = other DNA

SEQ ID NO: 79245 - DNA, 120 bp, synthetic construct; identical to SEQ ID NO: 49291
  source 1..120: mol_type = other DNA

SEQ ID NO: 79246 - DNA, 120 bp, synthetic construct; identical to SEQ ID NO: 49292
  source 1..120: mol_type = other DNA

SEQ ID NO: 79247 - DNA, 120 bp, synthetic construct; identical to SEQ ID NO: 49293
  source 1..120: mol_type = other DNA

SEQ ID NO: 79248 - DNA, 120 bp, synthetic construct; identical to SEQ ID NO: 13789
  source 1..120: mol_type = other DNA

SEQ ID NO: 79249 - DNA, 120 bp, synthetic construct; identical to SEQ ID NO: 49295
  source 1..120: mol_type = other DNA

SEQ ID NO: 79250 - DNA, 120 bp, synthetic construct; identical to SEQ ID NO: 49296
  source 1..120: mol_type = other DNA

SEQ ID NO: 79251 - DNA, 120 bp, synthetic construct; identical to SEQ ID NO: 49297
  source 1..120: mol_type = other DNA

SEQ ID NO: 79252 - DNA, 120 bp, synthetic construct; identical to SEQ ID NO: 13790
  source 1..120: mol_type = other DNA

SEQ ID NO: 79253 - DNA, 120 bp, synthetic construct; identical to SEQ ID NO: 49299
  source 1..120: mol_type = other DNA

SEQ ID NO: 79254 - DNA, 120 bp, synthetic construct; identical to SEQ ID NO: 49300
  source 1..120: mol_type = other DNA

SEQ ID NO: 79255 - DNA, 120 bp, synthetic construct; identical to SEQ ID NO: 49301
  source 1..120: mol_type = other DNA

SEQ ID NO: 79256 - DNA, 120 bp, synthetic construct; identical to SEQ ID NO: 49302
  source 1..120: mol_type = other DNA

SEQ ID NO: 79257 - DNA, 120 bp, synthetic construct; identical to SEQ ID NO: 13791
  source 1..120: mol_type = other DNA

SEQ ID NO: 79258 - DNA, 120 bp, synthetic construct; identical to SEQ ID NO: 49304
  source 1..120: mol_type = other DNA

SEQ ID NO: 79259 - DNA, 120 bp, synthetic construct; identical to SEQ ID NO: 49305
  source 1..120: mol_type = other DNA

SEQ ID NO: 79260 - DNA, 120 bp, synthetic construct; identical to SEQ ID NO: 49306
  source 1..120: mol_type = other DNA

SEQ ID NO: 79261 - DNA, 120 bp, synthetic construct; identical to SEQ ID NO: 13792
  source 1..120: mol_type = other DNA

SEQ ID NO: 79262 - DNA, 120 bp, synthetic construct; identical to SEQ ID NO: 49308
  source 1..120: mol_type = other DNA

SEQ ID NO: 79263 - DNA, 120 bp, synthetic construct; identical to SEQ ID NO: 49309
  source 1..120: mol_type = other DNA

SEQ ID NO: 79264 - DNA, 120 bp, synthetic construct; identical to SEQ ID NO: 13793
  source 1..120: mol_type = other DNA

SEQ ID NO: 79265 - DNA, 120 bp, synthetic construct; identical to SEQ ID NO: 49311
  source 1..120: mol_type = other DNA

SEQ ID NO: 79266 - DNA, 120 bp, synthetic construct; identical to SEQ ID NO: 49312
  source 1..120: mol_type = other DNA

SEQ ID NO: 79267 - DNA, 120 bp, synthetic construct; identical to SEQ ID NO: 49313
  source 1..120: mol_type = other DNA

SEQ ID NO: 79268 - DNA, 120 bp, synthetic construct; identical to SEQ ID NO: 49314
  source 1..120: mol_type = other DNA

SEQ ID NO: 79269 - DNA, 120 bp, synthetic construct; identical to SEQ ID NO: 13794
  source 1..120: mol_type = other DNA

SEQ ID NO: 79270 - DNA, 120 bp, synthetic construct; identical to SEQ ID NO: 49316
  source 1..120: mol_type = other DNA

SEQ ID NO: 79271 - DNA, 120 bp, synthetic construct; identical to SEQ ID NO: 49317
  source 1..120: mol_type = other DNA

SEQ ID NO: 79272 - DNA, 120 bp, synthetic construct; identical to SEQ ID NO: 49318
  source 1..120: mol_type = other DNA

SEQ ID NO: 79273 - DNA, 120 bp, synthetic construct; identical to SEQ ID NO: 13795
  source 1..120: mol_type = other DNA

SEQ ID NO: 79274 - DNA, 120 bp, synthetic construct; identical to SEQ ID NO: 49320
  source 1..120: mol_type = other DNA

SEQ ID NO: 79275 - DNA, 120 bp, synthetic construct; identical to SEQ ID NO: 49321
  source 1..120: mol_type = other DNA

SEQ ID NO: 79276 - DNA, 120 bp, synthetic construct; identical to SEQ ID NO: 49322
  source 1..120: mol_type = other DNA

SEQ ID NO: 79277 - DNA, 120 bp, synthetic construct; identical to SEQ ID NO: 13796
  source 1..120: mol_type = other DNA

SEQ ID NO: 79278 - DNA, 120 bp, synthetic construct; identical to SEQ ID NO: 49324
  source 1..120: mol_type = other DNA

SEQ ID NO: 79279 - DNA, 120 bp, synthetic construct; identical to SEQ ID NO: 49325
  source 1..120: mol_type = other DNA

SEQ ID NO: 79280 - DNA, 120 bp, synthetic construct; identical to SEQ ID NO: 13797
  source 1..120: mol_type = other DNA

SEQ ID NO: 79281 - DNA, 120 bp, synthetic construct; identical to SEQ ID NO: 49327
  source 1..120: mol_type = other DNA

SEQ ID NO: 79282 - DNA, 120 bp, synthetic construct; identical to SEQ ID NO: 49328
  source 1..120: mol_type = other DNA

SEQ ID NO: 79283 - DNA, 120 bp, synthetic construct; identical to SEQ ID NO: 49329
  source 1..120: mol_type = other DNA

SEQ ID NO: 79284 - DNA, 120 bp, synthetic construct; identical to SEQ ID NO: 13798
  source 1..120: mol_type = other DNA

SEQ ID NO: 79285 - DNA, 120 bp, synthetic construct; identical to SEQ ID NO: 49331
  source 1..120: mol_type = other DNA

SEQ ID NO: 79286 - DNA, 120 bp, synthetic construct; identical to SEQ ID NO: 49332
  source 1..120: mol_type = other DNA

SEQ ID NO: 79287 - DNA, 120 bp, synthetic construct; identical to SEQ ID NO: 49333
  source 1..120: mol_type = other DNA

SEQ ID NO: 79288 - DNA, 120 bp, synthetic construct; identical to SEQ ID NO: 49334
  source 1..120: mol_type = other DNA

SEQ ID NO: 79289 - DNA, 120 bp, synthetic construct; identical to SEQ ID NO: 13799
  source 1..120: mol_type = other DNA

SEQ ID NO: 79290 - DNA, 120 bp, synthetic construct; identical to SEQ ID NO: 49336
  source 1..120: mol_type = other DNA

SEQ ID NO: 79291 - DNA, 120 bp, synthetic construct; identical to SEQ ID NO: 49337
  source 1..120: mol_type = other DNA

SEQ ID NO: 79292 - DNA, 120 bp, synthetic construct; identical to SEQ ID NO: 13800
  source 1..120: mol_type = other DNA

SEQ ID NO: 79293 - DNA, 120 bp, synthetic construct; identical to SEQ ID NO: 49339
  source 1..120: mol_type = other DNA

SEQ ID NO: 79294 - DNA, 120 bp, synthetic construct; identical to SEQ ID NO: 49340
  source 1..120: mol_type = other DNA

SEQ ID NO: 79295 - DNA, 120 bp, synthetic construct; identical to SEQ ID NO: 49341
  source 1..120: mol_type = other DNA

SEQ ID NO: 79296 - DNA, 120 bp, synthetic construct; identical to SEQ ID NO: 49342
  source 1..120: mol_type = other DNA

SEQ ID NO: 79297 - DNA, 120 bp, synthetic construct; identical to SEQ ID NO: 13801
  source 1..120: mol_type = other DNA

SEQ ID NO: 79298 - DNA, 120 bp, synthetic construct; identical to SEQ ID NO: 49344
  source 1..120: mol_type = other DNA

SEQ ID NO: 79299 - DNA, 120 bp, synthetic construct; identical to SEQ ID NO: 49345
  source 1..120: mol_type = other DNA

SEQ ID NO: 79300 - DNA, 120 bp, synthetic construct; identical to SEQ ID NO: 13802
  source 1..120: mol_type = other DNA

SEQ ID NO: 79301 - DNA, 120 bp, synthetic construct; identical to SEQ ID NO: 49347
  source 1..120: mol_type = other DNA

SEQ ID NO: 79302 - DNA, 120 bp, synthetic construct; identical to SEQ ID NO: 49348
  source 1..120: mol_type = other DNA

SEQ ID NO: 79303 - DNA, 120 bp, synthetic construct; identical to SEQ ID NO: 49349
  source 1..120: mol_type = other DNA

SEQ ID NO: 79304 - DNA, 120 bp, synthetic construct; identical to SEQ ID NO: 13803
  source 1..120: mol_type = other DNA

SEQ ID NO: 79305 - DNA, 120 bp, synthetic construct; identical to SEQ ID NO: 49351
  source 1..120: mol_type = other DNA

SEQ ID NO: 79306 - DNA, 120 bp, synthetic construct; identical to SEQ ID NO: 49352
  source 1..120: mol_type = other DNA

SEQ ID NO: 79307 - DNA, 120 bp, synthetic construct; identical to SEQ ID NO: 49353
  source 1..120: mol_type = other DNA

SEQ ID NO: 79308 - DNA, 120 bp, synthetic construct; identical to SEQ ID NO: 49354
  source 1..120: mol_type = other DNA

SEQ ID NO: 79309 - DNA, 120 bp, synthetic construct; identical to SEQ ID NO: 13804
  source 1..120: mol_type = other DNA

SEQ ID NO: 79310 - DNA, 120 bp, synthetic construct; identical to SEQ ID NO: 49356
  source 1..120: mol_type = other DNA

SEQ ID NO: 79311 - DNA, 120 bp, synthetic construct; identical to SEQ ID NO: 49357
  source 1..120: mol_type = other DNA

SEQ ID NO: 79312 - DNA, 120 bp, synthetic construct; identical to SEQ ID NO: 13805
  source 1..120: mol_type = other DNA

SEQ ID NO: 79313 - DNA, 120 bp, synthetic construct; identical to SEQ ID NO: 49359
  source 1..120: mol_type = other DNA

SEQ ID NO: 79314 - DNA, 120 bp, synthetic construct; identical to SEQ ID NO: 49360
  source 1..120: mol_type = other DNA

SEQ ID NO: 79315 - DNA, 120 bp, synthetic construct; identical to SEQ ID NO: 49361
  source 1..120: mol_type = other DNA

SEQ ID NO: 79316 - DNA, 120 bp, synthetic construct; identical to SEQ ID NO: 13806
  source 1..120: mol_type = other DNA

SEQ ID NO: 79317 - DNA, 120 bp, synthetic construct; identical to SEQ ID NO: 49363
  source 1..120: mol_type = other DNA

SEQ ID NO: 79318 - DNA, 120 bp, synthetic construct; identical to SEQ ID NO: 49364
  source 1..120: mol_type = other DNA

SEQ ID NO: 79319 - DNA, 120 bp, synthetic construct; identical to SEQ ID NO: 49365
  source 1..120: mol_type = other DNA

SEQ ID NO: 79320 - DNA, 120 bp, synthetic construct; identical to SEQ ID NO: 13807
  source 1..120: mol_type = other DNA

SEQ ID NO: 79321 - DNA, 120 bp, synthetic construct; identical to SEQ ID NO: 49367
  source 1..120: mol_type = other DNA

SEQ ID NO: 79322 - DNA, 120 bp, synthetic construct; identical to SEQ ID NO: 49368
  source 1..120: mol_type = other DNA

SEQ ID NO: 79323 - DNA, 120 bp, synthetic construct; identical to SEQ ID NO: 49369
  source 1..120: mol_type = other DNA

SEQ ID NO: 79324 - DNA, 120 bp, synthetic construct; identical to SEQ ID NO: 49370
  source 1..120: mol_type = other DNA

SEQ ID NO: 79325 - DNA, 120 bp, synthetic construct; identical to SEQ ID NO: 13808
  source 1..120: mol_type = other DNA

SEQ ID NO: 79326 - DNA, 120 bp, synthetic construct; identical to SEQ ID NO: 49372
  source 1..120: mol_type = other DNA

SEQ ID NO: 79327 - DNA, 120 bp, synthetic construct; identical to SEQ ID NO: 49373
  source 1..120: mol_type = other DNA

SEQ ID NO: 79328 - DNA, 120 bp, synthetic construct; identical to SEQ ID NO: 49374
  source 1..120: mol_type = other DNA

SEQ ID NO: 79329 - DNA, 120 bp, synthetic construct; identical to SEQ ID NO: 13809
  source 1..120: mol_type = other DNA

SEQ ID NO: 79330 - DNA, 120 bp, synthetic construct; identical to SEQ ID NO: 49376
  source 1..120: mol_type = other DNA

SEQ ID NO: 79331 - DNA, 120 bp, synthetic construct; identical to SEQ ID NO: 49377
  source 1..120: mol_type = other DNA

SEQ ID NO: 79332 - DNA, 120 bp, synthetic construct; identical to SEQ ID NO: 49378
  source 1..120: mol_type = other DNA

SEQ ID NO: 79333 - DNA, 120 bp, synthetic construct; identical to SEQ ID NO: 13810
  source 1..120: mol_type = other DNA

SEQ ID NO: 79334 - DNA, 120 bp, synthetic construct; identical to SEQ ID NO: 49380
  source 1..120: mol_type = other DNA

SEQ ID NO: 79335 - DNA, 120 bp, synthetic construct; identical to SEQ ID NO: 49381
  source 1..120: mol_type = other DNA

SEQ ID NO: 79336 - DNA, 120 bp, synthetic construct; identical to SEQ ID NO: 49382
  source 1..120: mol_type = other DNA

SEQ ID NO: 79337 - DNA, 120 bp, synthetic construct; identical to SEQ ID NO: 13811
  source 1..120: mol_type = other DNA

SEQ ID NO: 79338 - DNA, 120 bp, synthetic construct; identical to SEQ ID NO: 49384
  source 1..120: mol_type = other DNA

SEQ ID NO: 79339 - DNA, 120 bp, synthetic construct; identical to SEQ ID NO: 49385
  source 1..120: mol_type = other DNA

SEQ ID NO: 79340 - DNA, 120 bp, synthetic construct; identical to SEQ ID NO: 13812
  source 1..120: mol_type = other DNA

SEQ ID NO: 79341 - DNA, 120 bp, synthetic construct; identical to SEQ ID NO: 49387
  source 1..120: mol_type = other DNA

SEQ ID NO: 79342 - DNA, 120 bp, synthetic construct; identical to SEQ ID NO: 49388
  source 1..120: mol_type = other DNA

SEQ ID NO: 79343 - DNA, 120 bp, synthetic construct; identical to SEQ ID NO: 49389
  source 1..120: mol_type = other DNA

SEQ ID NO: 79344 - DNA, 120 bp, synthetic construct; identical to SEQ ID NO: 13813
  source 1..120: mol_type = other DNA

SEQ ID NO: 79345 - DNA, 120 bp, synthetic construct; identical to SEQ ID NO: 13814
  source 1..120: mol_type = other DNA

SEQ ID NO: 79346 - DNA, 120 bp, synthetic construct; identical to SEQ ID NO: 49392
  source 1..120: mol_type = other DNA

SEQ ID NO: 79347 - DNA, 120 bp, synthetic construct; identical to SEQ ID NO: 49393
  source 1..120: mol_type = other DNA

SEQ ID NO: 79348 - DNA, 120 bp, synthetic construct; identical to SEQ ID NO: 49394
  source 1..120: mol_type = other DNA

SEQ ID NO: 79349 - DNA, 120 bp, synthetic construct; identical to SEQ ID NO: 13815
  source 1..120: mol_type = other DNA

SEQ ID NO: 79350 - DNA, 120 bp, synthetic construct; identical to SEQ ID NO: 49396
  source 1..120: mol_type = other DNA

SEQ ID NO: 79351 - DNA, 120 bp, synthetic construct; identical to SEQ ID NO: 49397
  source 1..120: mol_type = other DNA

SEQ ID NO: 79352 - DNA, 120 bp, synthetic construct; identical to SEQ ID NO: 49398
  source 1..120: mol_type = other DNA

SEQ ID NO: 79353 - DNA, 120 bp, synthetic construct; identical to SEQ ID NO: 13816
  source 1..120: mol_type = other DNA

SEQ ID NO: 79354 - DNA, 120 bp, synthetic construct; identical to SEQ ID NO: 49400
  source 1..120: mol_type = other DNA

SEQ ID NO: 79355 - DNA, 120 bp, synthetic construct; identical to SEQ ID NO: 13817
  source 1..120: mol_type = other DNA

SEQ ID NO: 79356 - DNA, 120 bp, synthetic construct; identical to SEQ ID NO: 49402
  source 1..120: mol_type = other DNA

SEQ ID NO: 79357 - DNA, 120 bp, synthetic construct; identical to SEQ ID NO: 49403
  source 1..120: mol_type = other DNA

SEQ ID NO: 79358 - DNA, 120 bp, synthetic construct; identical to SEQ ID NO: 49404
  source 1..120: mol_type = other DNA

SEQ ID NO: 79359 - DNA, 120 bp, synthetic construct; identical to SEQ ID NO: 13818
  source 1..120: mol_type = other DNA

SEQ ID NO: 79360 - DNA, 120 bp, synthetic construct; identical to SEQ ID NO: 49406
  source 1..120: mol_type = other DNA

SEQ ID NO: 79361 - DNA, 120 bp, synthetic construct; identical to SEQ ID NO: 49407
  source 1..120: mol_type = other DNA

SEQ ID NO: 79362 - DNA, 120 bp, synthetic construct; identical to SEQ ID NO: 13819
  source 1..120: mol_type = other DNA

SEQ ID NO: 79363 - DNA, 120 bp, synthetic construct; identical to SEQ ID NO: 49409
  source 1..120: mol_type = other DNA

SEQ ID NO: 79364 - DNA, 120 bp, synthetic construct; identical to SEQ ID NO: 49410
  source 1..120: mol_type = other DNA

SEQ ID NO: 79365 - DNA, 120 bp, synthetic construct; identical to SEQ ID NO: 13820
  source 1..120: mol_type = other DNA

SEQ ID NO: 79366 - DNA, 120 bp, synthetic construct; identical to SEQ ID NO: 49412
  source 1..120: mol_type = other DNA

SEQ ID NO: 79367 - DNA, 120 bp, synthetic construct; identical to SEQ ID NO: 49413
  source 1..120: mol_type = other DNA

SEQ ID NO: 79368 - DNA, 120 bp, synthetic construct; identical to SEQ ID NO: 49414
  source 1..120: mol_type = other DNA

SEQ ID NO: 79369 - DNA, 120 bp, synthetic construct; identical to SEQ ID NO: 13821
  source 1..120: mol_type = other DNA

SEQ ID NO: 79370 - DNA, 120 bp, synthetic construct; identical to SEQ ID NO: 49416
  source 1..120: mol_type = other DNA

SEQ ID NO: 79371 - DNA, 120 bp, synthetic construct; identical to SEQ ID NO: 49417
  source 1..120: mol_type = other DNA

SEQ ID NO: 79372 - DNA, 120 bp, synthetic construct; identical to SEQ ID NO: 49418
  source 1..120: mol_type = other DNA

SEQ ID NO: 79373 - DNA, 120 bp, synthetic construct; identical to SEQ ID NO: 13822
  source 1..120: mol_type = other DNA

SEQ ID NO: 79374 - DNA, 120 bp, synthetic construct; identical to SEQ ID NO: 49420
  source 1..120: mol_type = other DNA

SEQ ID NO: 79375 - DNA, 120 bp, synthetic construct; identical to SEQ ID NO: 49421
  source 1..120: mol_type = other DNA

SEQ ID NO: 79376 - DNA, 120 bp, synthetic construct; identical to SEQ ID NO: 49422
  source 1..120: mol_type = other DNA

SEQ ID NO: 79377 - DNA, 120 bp, synthetic construct; identical to SEQ ID NO: 13823
  source 1..120: mol_type = other DNA

SEQ ID NO: 79378 - DNA, 120 bp, synthetic construct; identical to SEQ ID NO: 49424
  source 1..120: mol_type = other DNA

SEQ ID NO: 79379 - DNA, 120 bp, synthetic construct; identical to SEQ ID NO: 49425
  source 1..120: mol_type = other DNA

SEQ ID NO: 79380 - DNA, 120 bp, synthetic construct; identical to SEQ ID NO: 49426
  source 1..120: mol_type = other DNA

SEQ ID NO: 79381 - DNA, 120 bp, synthetic construct; identical to SEQ ID NO: 49427
  source 1..120: mol_type = other DNA

SEQ ID NO: 79382 - DNA, 120 bp, synthetic construct; identical to SEQ ID NO: 13824
  source 1..120: mol_type = other DNA

SEQ ID NO: 79383 - DNA, 120 bp, synthetic construct; identical to SEQ ID NO: 49429
  source 1..120: mol_type = other DNA

SEQ ID NO: 79384 - DNA, 120 bp, synthetic construct; identical to SEQ ID NO: 49430
  source 1..120: mol_type = other DNA

SEQ ID NO: 79385 - DNA, 120 bp, synthetic construct; identical to SEQ ID NO: 49431
  source 1..120: mol_type = other DNA

SEQ ID NO: 79386 - DNA, 120 bp, synthetic construct; identical to SEQ ID NO: 13825
  source 1..120: mol_type = other DNA

SEQ ID NO: 79387 - DNA, 120 bp, synthetic construct; identical to SEQ ID NO: 49433
  source 1..120: mol_type = other DNA

SEQ ID NO: 79388 - DNA, 120 bp, synthetic construct; identical to SEQ ID NO: 49434
  source 1..120: mol_type = other DNA

SEQ ID NO: 79389 - DNA, 120 bp, synthetic construct; identical to SEQ ID NO: 13826
  source 1..120: mol_type = other DNA

SEQ ID NO: 79390 - DNA, 120 bp, synthetic construct; identical to SEQ ID NO: 49436
  source 1..120: mol_type = other DNA

SEQ ID NO: 79391 - DNA, 120 bp, synthetic construct; identical to SEQ ID NO: 49437
  source 1..120: mol_type = other DNA

SEQ ID NO: 79392 - DNA, 120 bp, synthetic construct; identical to SEQ ID NO: 49438
  source 1..120: mol_type = other DNA

SEQ ID NO: 79393 - DNA, 120 bp, synthetic construct; identical to SEQ ID NO: 13827
  source 1..120: mol_type = other DNA

SEQ ID NO: 79394 - DNA, 120 bp, synthetic construct; identical to SEQ ID NO: 49440
  source 1..120: mol_type = other DNA

SEQ ID NO: 79395 - DNA, 120 bp, synthetic construct; identical to SEQ ID NO: 49441
  source 1..120: mol_type = other DNA

SEQ ID NO: 79396 - DNA, 120 bp, synthetic construct; identical to SEQ ID NO: 49442
  source 1..120: mol_type = other DNA

SEQ ID NO: 79397 - DNA, 120 bp, synthetic construct; identical to SEQ ID NO: 49443
  source 1..120: mol_type = other DNA

SEQ ID NO: 79398 - DNA, 120 bp, synthetic construct; identical to SEQ ID NO: 13828
  source 1..120: mol_type = other DNA

SEQ ID NO: 79399 - DNA, 120 bp, synthetic construct; identical to SEQ ID NO: 49445
  source 1..120: mol_type = other DNA

SEQ ID NO: 79400 - DNA, 120 bp, synthetic construct; identical to SEQ ID NO: 49446
  source 1..120: mol_type = other DNA

SEQ ID NO: 79401 - DNA, 120 bp, synthetic construct; identical to SEQ ID NO: 13829
  source 1..120: mol_type = other DNA

SEQ ID NO: 79402 - DNA, 120 bp, synthetic construct; identical to SEQ ID NO: 49448
  source 1..120: mol_type = other DNA

SEQ ID NO: 79403 - DNA, 120 bp, synthetic construct; identical to SEQ ID NO: 49449
  source 1..120: mol_type = other DNA

SEQ ID NO: 79404 - DNA, 120 bp, synthetic construct; identical to SEQ ID NO: 49450
  source 1..120: mol_type = other DNA

SEQ ID NO: 79405 - DNA, 120 bp, synthetic construct; identical to SEQ ID NO: 49451
  source 1..120: mol_type = other DNA

SEQ ID NO: 79406 - DNA, 120 bp, synthetic construct; identical to SEQ ID NO: 13830
  source 1..120: mol_type = other DNA

SEQ ID NO: 79407 - DNA, 120 bp, synthetic construct; identical to SEQ ID NO: 49453
  source 1..120: mol_type = other DNA

SEQ ID NO: 79408 - DNA, 120 bp, synthetic construct; identical to SEQ ID NO: 49454
  source 1..120: mol_type = other DNA

SEQ ID NO: 79409 - DNA, 120 bp, synthetic construct; identical to SEQ ID NO: 13831
  source 1..120: mol_type = other DNA

SEQ ID NO: 79410 - DNA, 120 bp, synthetic construct; identical to SEQ ID NO: 49456
  source 1..120: mol_type = other DNA

SEQ ID NO: 79411 - DNA, 120 bp, synthetic construct; identical to SEQ ID NO: 49457
  source 1..120: mol_type = other DNA

SEQ ID NO: 79412 - DNA, 120 bp, synthetic construct; identical to SEQ ID NO: 49458
  source 1..120: mol_type = other DNA

SEQ ID NO: 79413 - DNA, 120 bp, synthetic construct; identical to SEQ ID NO: 49459
  source 1..120: mol_type = other DNA

SEQ ID NO: 79414 - DNA, 120 bp, synthetic construct; identical to SEQ ID NO: 13832
  source 1..120: mol_type = other DNA

SEQ ID NO: 79415 - DNA, 120 bp, synthetic construct; identical to SEQ ID NO: 49461
  source 1..120: mol_type = other DNA

SEQ ID NO: 79416 - DNA, 120 bp, synthetic construct; identical to SEQ ID NO: 49462
  source 1..120: mol_type = other DNA

SEQ ID NO: 79417 - DNA, 120 bp, synthetic construct; identical to SEQ ID NO: 13833
  source 1..120: mol_type = other DNA

SEQ ID NO: 79418 - DNA, 120 bp, synthetic construct; identical to SEQ ID NO: 49464
  source 1..120: mol_type = other DNA

SEQ ID NO: 79419 - DNA, 120 bp, synthetic construct; identical to SEQ ID NO: 49465
  source 1..120: mol_type = other DNA

SEQ ID NO: 79420 - DNA, 120 bp, synthetic construct; identical to SEQ ID NO: 49466
  source 1..120: mol_type = other DNA

SEQ ID NO: 79421 - DNA, 120 bp, synthetic construct; identical to SEQ ID NO: 13834
  source 1..120: mol_type = other DNA

SEQ ID NO: 79422 - DNA, 120 bp, synthetic construct; identical to SEQ ID NO: 49468
  source 1..120: mol_type = other DNA

SEQ ID NO: 79423 - DNA, 120 bp, synthetic construct; identical to SEQ ID NO: 49469
  source 1..120: mol_type = other DNA

SEQ ID NO: 79424 - DNA, 120 bp, synthetic construct; identical to SEQ ID NO: 49470
  source 1..120: mol_type = other DNA

SEQ ID NO: 79425 - DNA, 120 bp, synthetic construct; identical to SEQ ID NO: 49471
  source 1..120: mol_type = other DNA

SEQ ID NO: 79426 - DNA, 120 bp, synthetic construct; identical to SEQ ID NO: 13835
  source 1..120: mol_type = other DNA

SEQ ID NO: 79427 - DNA, 120 bp, synthetic construct; identical to SEQ ID NO: 49473
  source 1..120: mol_type = other DNA

SEQ ID NO: 79428 - DNA, 120 bp, synthetic construct; identical to SEQ ID NO: 49474
  source 1..120: mol_type = other DNA

SEQ ID NO: 79429 - DNA, 120 bp, synthetic construct; identical to SEQ ID NO: 13836
  source 1..120: mol_type = other DNA

SEQ ID NO: 79430 - DNA, 120 bp, synthetic construct; identical to SEQ ID NO: 49476
  source 1..120: mol_type = other DNA

SEQ ID NO: 79431 - DNA, 120 bp, synthetic construct; identical to SEQ ID NO: 49477
  source 1..120: mol_type = other DNA

SEQ ID NO: 79432 - DNA, 120 bp, synthetic construct; identical to SEQ ID NO: 49478
  source 1..120: mol_type = other DNA

SEQ ID NO: 79433 - DNA, 120 bp, synthetic construct; identical to SEQ ID NO: 13837
  source 1..120: mol_type = other DNA

SEQ ID NO: 79434 - DNA, 120 bp, synthetic construct; identical to SEQ ID NO: 49480
  source 1..120: mol_type = other DNA

SEQ ID NO: 79435 - DNA, 120 bp, synthetic construct; identical to SEQ ID NO: 49481
  source 1..120: mol_type = other DNA

SEQ ID NO: 79436 - DNA, 120 bp, synthetic construct; identical to SEQ ID NO: 49482
  source 1..120: mol_type = other DNA

SEQ ID NO: 79437 - DNA, 120 bp, synthetic construct; identical to SEQ ID NO: 49483
  source 1..120: mol_type = other DNA

SEQ ID NO: 79438 - DNA, 120 bp, synthetic construct; identical to SEQ ID NO: 13838
  source 1..120: mol_type = other DNA

SEQ ID NO: 79439 - DNA, 120 bp, synthetic construct; identical to SEQ ID NO: 49485
  source 1..120: mol_type = other DNA

SEQ ID NO: 79440 - DNA, 120 bp, synthetic construct; identical to SEQ ID NO: 49486
  source 1..120: mol_type = other DNA

SEQ ID NO: 79441 - DNA, 120 bp, synthetic construct; identical to SEQ ID NO: 13839
  source 1..120: mol_type = other DNA

SEQ ID NO: 79442 - DNA, 120 bp, synthetic construct; identical to SEQ ID NO: 49488
  source 1..120: mol_type = other DNA

SEQ ID NO: 79443 - DNA, 120 bp, synthetic construct; identical to SEQ ID NO: 49489
  source 1..120: mol_type = other DNA

SEQ ID NO: 79444 - DNA, 120 bp, synthetic construct; identical to SEQ ID NO: 49490
  source 1..120: mol_type = other DNA

SEQ ID NO: 79445 - DNA, 120 bp, synthetic construct; identical to SEQ ID NO: 13840
  source 1..120: mol_type = other DNA

SEQ ID NO: 79446 - DNA, 120 bp, synthetic construct; identical to SEQ ID NO: 49492
  source 1..120: mol_type = other DNA

SEQ ID NO: 79447 - DNA, 120 bp, synthetic construct; identical to SEQ ID NO: 49493
  source 1..120: mol_type = other DNA

SEQ ID NO: 79448 - DNA, 120 bp, synthetic construct; identical to SEQ ID NO: 49494
  source 1..120: mol_type = other DNA

SEQ ID NO: 79449 - DNA, 120 bp, synthetic construct; identical to SEQ ID NO: 13841
  source 1..120: mol_type = other DNA

SEQ ID NO: 79450 - DNA, 120 bp, synthetic construct; identical to SEQ ID NO: 49496
  source 1..120: mol_type = other DNA

SEQ ID NO: 79451 - DNA, 120 bp, synthetic construct; identical to SEQ ID NO: 49497
  source 1..120: mol_type = other DNA

SEQ ID NO: 79452 - DNA, 120 bp, synthetic construct; identical to SEQ ID NO: 49498
  source 1..120: mol_type = other DNA

SEQ ID NO: 79453 - DNA, 120 bp, synthetic construct; identical to SEQ ID NO: 49499
  source 1..120: mol_type = other DNA

SEQ ID NO: 79454 - DNA, 120 bp, synthetic construct; identical to SEQ ID NO: 13842
  source 1..120: mol_type = other DNA

SEQ ID NO: 79455 - DNA, 120 bp, synthetic construct; identical to SEQ ID NO: 13843
  source 1..120: mol_type = other DNA

SEQ ID NO: 79456 - DNA, 120 bp, synthetic construct; identical to SEQ ID NO: 49502
  source 1..120: mol_type = other DNA

SEQ ID NO: 79457 - DNA, 120 bp, synthetic construct; identical to SEQ ID NO: 49503
  source 1..120: mol_type = other DNA

SEQ ID NO: 79458 - DNA, 120 bp, synthetic construct; identical to SEQ ID NO: 49504
  source 1..120: mol_type = other DNA

SEQ ID NO: 79459 - DNA, 120 bp, synthetic construct; identical to SEQ ID NO: 49505
  source 1..120: mol_type = other DNA

SEQ ID NO: 79460 - DNA, 120 bp, synthetic construct; identical to SEQ ID NO: 13844
  source 1..120: mol_type = other DNA

SEQ ID NO: 79461 - DNA, 120 bp, synthetic construct; identical to SEQ ID NO: 49507
  source 1..120: mol_type = other DNA

SEQ ID NO: 79462 - DNA, 120 bp, synthetic construct; identical to SEQ ID NO: 49508
  source 1..120: mol_type = other DNA

SEQ ID NO: 79463 - DNA, 120 bp, synthetic construct; identical to SEQ ID NO: 13845
  source 1..120: mol_type = other DNA

SEQ ID NO: 79464 - DNA, 120 bp, synthetic construct; identical to SEQ ID NO: 49510
  source 1..120: mol_type = other DNA

SEQ ID NO: 79465 - DNA, 120 bp, synthetic construct; identical to SEQ ID NO: 49511
  source 1..120: mol_type = other DNA

SEQ ID NO: 79466 - DNA, 120 bp, synthetic construct; identical to SEQ ID NO: 49512
  source 1..120: mol_type = other DNA

SEQ ID NO: 79467 - DNA, 120 bp, synthetic construct; identical to SEQ ID NO: 49513
  source 1..120: mol_type = other DNA

SEQ ID NO: 79468 - DNA, 120 bp, synthetic construct; identical to SEQ ID NO: 13846
  source 1..120: mol_type = other DNA

SEQ ID NO: 79469 - DNA, 120 bp, synthetic construct; identical to SEQ ID NO: 49515
  source 1..120: mol_type = other DNA

SEQ ID NO: 79470 - DNA, 120 bp, synthetic construct; identical to SEQ ID NO: 49516
  source 1..120: mol_type = other DNA

SEQ ID NO: 79471 - DNA, 120 bp, synthetic construct; identical to SEQ ID NO: 49517
  source 1..120: mol_type = other DNA

SEQ ID NO: 79472 - DNA, 120 bp, synthetic construct; identical to SEQ ID NO: 13847
  source 1..120: mol_type = other DNA

SEQ ID NO: 79473 - DNA, 120 bp, synthetic construct; identical to SEQ ID NO: 49519
  source 1..120: mol_type = other DNA

SEQ ID NO: 79474 - DNA, 120 bp, synthetic construct; identical to SEQ ID NO: 13848
  source 1..120: mol_type = other DNA

SEQ ID NO: 79475 - DNA, 120 bp, synthetic construct; identical to SEQ ID NO: 49521
  source 1..120: mol_type = other DNA

SEQ ID NO: 79476 - DNA, 120 bp, synthetic construct; identical to SEQ ID NO: 49522
  source 1..120: mol_type = other DNA

SEQ ID NO: 79477 - DNA, 120 bp, synthetic construct; identical to SEQ ID NO: 49523
  source 1..120: mol_type = other DNA

SEQ ID NO: 79478 - DNA, 120 bp, synthetic construct; identical to SEQ ID NO: 49524
  source 1..120: mol_type = other DNA

SEQ ID NO: 79479 - DNA, 120 bp, synthetic construct; identical to SEQ ID NO: 49525
  source 1..120: mol_type = other DNA

SEQ ID NO: 79480 - DNA, 120 bp, synthetic construct; identical to SEQ ID NO: 49526
  source 1..120: mol_type = other DNA

SEQ ID NO: 79481 - DNA, 120 bp, synthetic construct; identical to SEQ ID NO: 49527
  source 1..120: mol_type = other DNA

SEQ ID NO: 79482 - DNA, 120 bp, synthetic construct; identical to SEQ ID NO: 13849
  source 1..120: mol_type = other DNA

SEQ ID NO: 79483 - DNA, 120 bp, synthetic construct; identical to SEQ ID NO: 49529
  source 1..120: mol_type = other DNA

SEQ ID NO: 79484 - DNA, 120 bp, synthetic construct; identical to SEQ ID NO: 49530
  source 1..120: mol_type = other DNA

SEQ ID NO: 79485 - DNA, 120 bp, synthetic construct; identical to SEQ ID NO: 49531
  source 1..120: mol_type = other DNA

SEQ ID NO: 79486 - DNA, 120 bp, synthetic construct; identical to SEQ ID NO: 13850
  source 1..120: mol_type = other DNA

SEQ ID NO: 79487 - DNA, 120 bp, synthetic construct; identical to SEQ ID NO: 49533
  source 1..120: mol_type = other DNA

SEQ ID NO: 79488 - DNA, 120 bp, synthetic construct; identical to SEQ ID NO: 49534
  source 1..120: mol_type = other DNA

SEQ ID NO: 79489 - DNA, 120 bp, synthetic construct; identical to SEQ ID NO: 13851
  source 1..120: mol_type = other DNA

SEQ ID NO: 79490 - DNA, 120 bp, synthetic construct; identical to SEQ ID NO: 49536
  source 1..120: mol_type = other DNA

SEQ ID NO: 79491 - DNA, 120 bp, synthetic construct; identical to SEQ ID NO: 49537
  source 1..120: mol_type = other DNA

SEQ ID NO: 79492 - DNA, 120 bp, synthetic construct; identical to SEQ ID NO: 49538
  source 1..120: mol_type = other DNA

SEQ ID NO: 79493 - DNA, 120 bp, synthetic construct; identical to SEQ ID NO: 49539
  source 1..120: mol_type = other DNA

SEQ ID NO: 79494 - DNA, 120 bp, synthetic construct; identical to SEQ ID NO: 13852
  source 1..120: mol_type = other DNA

SEQ ID NO: 79495 - DNA, 120 bp, synthetic construct; identical to SEQ ID NO: 49541
  source 1..120: mol_type = other DNA

SEQ ID NO: 79496 - DNA, 120 bp, synthetic construct; identical to SEQ ID NO: 49542
  source 1..120: mol_type = other DNA

SEQ ID NO: 79497 - DNA, 120 bp, synthetic construct; identical to SEQ ID NO: 49543
  source 1..120: mol_type = other DNA

SEQ ID NO: 79498 - DNA, 120 bp, synthetic construct; identical to SEQ ID NO: 13853
  source 1..120: mol_type = other DNA

SEQ ID NO: 79499 - DNA, 120 bp, synthetic construct; identical to SEQ ID NO: 49545
  source 1..120: mol_type = other DNA

SEQ ID NO: 79500 - DNA, 120 bp, synthetic construct; identical to SEQ ID NO: 49546
  source 1..120: mol_type = other DNA

SEQ ID NO: 79501 - DNA, 120 bp, synthetic construct; identical to SEQ ID NO: 49547
  source 1..120: mol_type = other DNA

SEQ ID NO: 79502 - DNA, 120 bp, synthetic construct; identical to SEQ ID NO: 13854
  source 1..120: mol_type = other DNA

SEQ ID NO: 79503 - DNA, 120 bp, synthetic construct; identical to SEQ ID NO: 49549
  source 1..120: mol_type = other DNA

SEQ ID NO: 79504 - DNA, 120 bp, synthetic construct; identical to SEQ ID NO: 49550
  source 1..120: mol_type = other DNA

SEQ ID NO: 79505 - DNA, 120 bp, synthetic construct; identical to SEQ ID NO: 13855
  source 1..120: mol_type = other DNA

SEQ ID NO: 79506 - DNA, 120 bp, synthetic construct; identical to SEQ ID NO: 49552
  source 1..120: mol_type = other DNA

SEQ ID NO: 79507 - DNA, 120 bp, synthetic construct; identical to SEQ ID NO: 49553
  source 1..120: mol_type = other DNA

SEQ ID NO: 79508 - DNA, 120 bp, synthetic construct; identical to SEQ ID NO: 49554
  source 1..120: mol_type = other DNA

SEQ ID NO: 79509 - DNA, 120 bp, synthetic construct; identical to SEQ ID NO: 13856
  source 1..120: mol_type = other DNA

SEQ ID NO: 79510 - DNA, 120 bp, synthetic construct; identical to SEQ ID NO: 49556
  source 1..120: mol_type = other DNA

SEQ ID NO: 79511 - DNA, 120 bp, synthetic construct; identical to SEQ ID NO: 49557
  source 1..120: mol_type = other DNA

SEQ ID NO: 79512 - DNA, 120 bp, synthetic construct; identical to SEQ ID NO: 49558
  source 1..120: mol_type = other DNA

SEQ ID NO: 79513 - DNA, 120 bp, synthetic construct; identical to SEQ ID NO: 49559
  source 1..120: mol_type = other DNA

SEQ ID NO: 79514 - DNA, 120 bp, synthetic construct; identical to SEQ ID NO: 13857
  source 1..120: mol_type = other DNA

SEQ ID NO: 79515 - DNA, 120 bp, synthetic construct; identical to SEQ ID NO: 49561
  source 1..120: mol_type = other DNA

SEQ ID NO: 79516 - DNA, 120 bp, synthetic construct; identical to SEQ ID NO: 49562
  source 1..120: mol_type = other DNA

SEQ ID NO: 79517 - DNA, 120 bp, synthetic construct; identical to SEQ ID NO: 6391
  source 1..120: mol_type = other DNA

SEQ ID NO: 79518 - DNA, 120 bp, synthetic construct; identical to SEQ ID NO: 49564
  source 1..120: mol_type = other DNA

SEQ ID NO: 79519 - DNA, 120 bp, synthetic construct; identical to SEQ ID NO: 49565
  source 1..120: mol_type = other DNA

SEQ ID NO: 79520 - DNA, 120 bp, synthetic construct; identical to SEQ ID NO: 49566
  source 1..120: mol_type = other DNA

SEQ ID NO: 79521 - DNA, 120 bp, synthetic construct; identical to SEQ ID NO: 13859
  source 1..120: mol_type = other DNA

SEQ ID NO: 79522 - DNA, 120 bp, synthetic construct; identical to SEQ ID NO: 49568
  source 1..120: mol_type = other DNA

SEQ ID NO: 79523 - DNA, 120 bp, synthetic construct; identical to SEQ ID NO: 49569
  source 1..120: mol_type = other DNA

SEQ ID NO: 79524 - DNA, 120 bp, synthetic construct; identical to SEQ ID NO: 49570
  source 1..120: mol_type = other DNA

SEQ ID NO: 79525 - DNA, 120 bp, synthetic construct; identical to SEQ ID NO: 13860
  source 1..120: mol_type = other DNA

SEQ ID NO: 79526 - DNA, 120 bp, synthetic construct; identical to SEQ ID NO: 49572
  source 1..120: mol_type = other DNA

SEQ ID NO: 79527 - DNA, 120 bp, synthetic construct; identical to SEQ ID NO: 49573
  source 1..120: mol_type = other DNA

SEQ ID NO: 79528 - DNA, 120 bp, synthetic construct; identical to SEQ ID NO: 49574
  source 1..120: mol_type = other DNA

SEQ ID NO: 79529 - DNA, 120 bp, synthetic construct; identical to SEQ ID NO: 49575
  source 1..120: mol_type = other DNA

SEQ ID NO: 79530 - DNA, 120 bp, synthetic construct; identical to SEQ ID NO: 13861
  source 1..120: mol_type = other DNA

SEQ ID NO: 79531 - DNA, 120 bp, synthetic construct; identical to SEQ ID NO: 49577
  source 1..120: mol_type = other DNA

SEQ ID NO: 79532 - DNA, 120 bp, synthetic construct; identical to SEQ ID NO: 49578
  source 1..120: mol_type = other DNA

SEQ ID NO: 79533 - DNA, 120 bp, synthetic construct; identical to SEQ ID NO: 49579
  source 1..120: mol_type = other DNA

SEQ ID NO: 79534 - DNA, 120 bp, synthetic construct; identical to SEQ ID NO: 13862
  source 1..120: mol_type = other DNA

SEQ ID NO: 79535 - DNA, 120 bp, synthetic construct; identical to SEQ ID NO: 49581
  source 1..120: mol_type = other DNA

SEQ ID NO: 79536 - DNA, 120 bp, synthetic construct; identical to SEQ ID NO: 49582
  source 1..120: mol_type = other DNA

SEQ ID NO: 79537 - DNA, 120 bp, synthetic construct; identical to SEQ ID NO: 49583
  source 1..120: mol_type = other DNA

SEQ ID NO: 79538 - DNA, 120 bp, synthetic construct; identical to SEQ ID NO: 13863
  source 1..120: mol_type = other DNA

SEQ ID NO: 79539 - DNA, 120 bp, synthetic construct; identical to SEQ ID NO: 49585
  source 1..120: mol_type = other DNA

SEQ ID NO: 79540 - DNA, 120 bp, synthetic construct; identical to SEQ ID NO: 49586
  source 1..120: mol_type = other DNA

SEQ ID NO: 79541 - DNA, 120 bp, synthetic construct; identical to SEQ ID NO: 49587
  source 1..120: mol_type = other DNA

SEQ ID NO: 79542 - DNA, 120 bp, synthetic construct; identical to SEQ ID NO: 13864
  source 1..120: mol_type = other DNA

SEQ ID NO: 79543 - DNA, 120 bp, synthetic construct; identical to SEQ ID NO: 49589
  source 1..120: mol_type = other DNA

SEQ ID NO: 79544 - DNA, 120 bp, synthetic construct; identical to SEQ ID NO: 49590
  source 1..120: mol_type = other DNA

SEQ ID NO: 79545 - DNA, 120 bp, synthetic construct; identical to SEQ ID NO: 13865
  source 1..120: mol_type = other DNA

SEQ ID NO: 79546 - DNA, 120 bp, synthetic construct; identical to SEQ ID NO: 49592
  source 1..120: mol_type = other DNA

SEQ ID NO: 79547 - DNA, 120 bp, synthetic construct; identical to SEQ ID NO: 49593
  source 1..120: mol_type = other DNA

SEQ ID NO: 79548 - DNA, 120 bp, synthetic construct; identical to SEQ ID NO: 49594
  source 1..120: mol_type = other DNA

SEQ ID NO: 79549 - DNA, 120 bp, synthetic construct; identical to SEQ ID NO: 13866
  source 1..120: mol_type = other DNA

SEQ ID NO: 79550 - DNA, 120 bp, synthetic construct; identical to SEQ ID NO: 49596
  source 1..120: mol_type = other DNA

SEQ ID NO: 79551 - DNA, 120 bp, synthetic construct; identical to SEQ ID NO: 49597
  source 1..120: mol_type = other DNA

SEQ ID NO: 79552 - DNA, 120 bp, synthetic construct; identical to SEQ ID NO: 49598
  source 1..120: mol_type = other DNA

SEQ ID NO: 79553 - DNA, 120 bp, synthetic construct; identical to SEQ ID NO: 13867
  source 1..120: mol_type = other DNA

SEQ ID NO: 79554 - DNA, 120 bp, synthetic construct; identical to SEQ ID NO: 49600
  source 1..120: mol_type = other DNA

SEQ ID NO: 79555 - DNA, 120 bp, synthetic construct; identical to SEQ ID NO: 49601
  source 1..120: mol_type = other DNA

SEQ ID NO: 79556 - DNA, 120 bp, synthetic construct; identical to SEQ ID NO: 49602
  source 1..120: mol_type = other DNA

SEQ ID NO: 79557 - DNA, 120 bp, synthetic construct; identical to SEQ ID NO: 13868
  source 1..120: mol_type = other DNA

SEQ ID NO: 79558 - DNA, 120 bp, synthetic construct; identical to SEQ ID NO: 49604
  source 1..120: mol_type = other DNA

SEQ ID NO: 79559 - DNA, 120 bp, synthetic construct; identical to SEQ ID NO: 49605
  source 1..120: mol_type = other DNA

SEQ ID NO: 79560 - DNA, 120 bp, synthetic construct; identical to SEQ ID NO: 49606
  source 1..120: mol_type = other DNA

SEQ ID NO: 79561 - DNA, 120 bp, synthetic construct; identical to SEQ ID NO: 49607
  source 1..120: mol_type = other DNA

SEQ ID NO: 79562 - DNA, 120 bp, synthetic construct; identical to SEQ ID NO: 13869
  source 1..120: mol_type = other DNA

SEQ ID NO: 79563 - DNA, 120 bp, synthetic construct; identical to SEQ ID NO: 49609
  source 1..120: mol_type = other DNA

SEQ ID NO: 79564 - DNA, 120 bp, synthetic construct; identical to SEQ ID NO: 49610
  source 1..120: mol_type = other DNA

SEQ ID NO: 79565 - DNA, 120 bp, synthetic construct; identical to SEQ ID NO: 49611
  source 1..120: mol_type = other DNA

SEQ ID NO: 79566 - DNA, 120 bp, synthetic construct; identical to SEQ ID NO: 13870
  source 1..120: mol_type = other DNA

SEQ ID NO: 79567 - DNA, 120 bp, synthetic construct; identical to SEQ ID NO: 49613
  source 1..120: mol_type = other DNA

SEQ ID NO: 79568 - DNA, 120 bp, synthetic construct; identical to SEQ ID NO: 49614
  source 1..120: mol_type = other DNA

SEQ ID NO: 79569 - DNA, 120 bp, synthetic construct; identical to SEQ ID NO: 13871
  source 1..120: mol_type = other DNA

SEQ ID NO: 79570 - DNA, 120 bp, synthetic construct; identical to SEQ ID NO: 49616
  source 1..120: mol_type = other DNA

SEQ ID NO: 79571 - DNA, 120 bp, synthetic construct; identical to SEQ ID NO: 49617
  source 1..120: mol_type = other DNA

SEQ ID NO: 79572 - DNA, 120 bp, synthetic construct; identical to SEQ ID NO: 49618
  source 1..120: mol_type = other DNA

SEQ ID NO: 79573 - DNA, 120 bp, synthetic construct; identical to SEQ ID NO: 13872
  source 1..120: mol_type = other DNA

SEQ ID NO: 79574 - DNA, 120 bp, synthetic construct; identical to SEQ ID NO: 49620
  source 1..120: mol_type = other DNA

SEQ ID NO: 79575 - DNA, 120 bp, synthetic construct; identical to SEQ ID NO: 49621
  source 1..120: mol_type = other DNA

SEQ ID NO: 79576 - DNA, 120 bp, synthetic construct; identical to SEQ ID NO: 49622
  source 1..120: mol_type = other DNA

SEQ ID NO: 79577 - DNA, 120 bp, synthetic construct; identical to SEQ ID NO: 49623
  source 1..120: mol_type = other DNA

SEQ ID NO: 79578 - DNA, 120 bp, synthetic construct; identical to SEQ ID NO: 13873
  source 1..120: mol_type = other DNA

SEQ ID NO: 79579 - DNA, 120 bp, synthetic construct; identical to SEQ ID NO: 49625
  source 1..120: mol_type = other DNA

SEQ ID NO: 79580 - DNA, 120 bp, synthetic construct; identical to SEQ ID NO: 49626
  source 1..120: mol_type = other DNA

SEQ ID NO: 79581 - DNA, 120 bp, synthetic construct; identical to SEQ ID NO: 49627
  source 1..120: mol_type = other DNA

SEQ ID NO: 79582 - DNA, 120 bp, synthetic construct; identical to SEQ ID NO: 13874
  source 1..120: mol_type = other DNA

SEQ ID NO: 79583 - DNA, 120 bp, synthetic construct; identical to SEQ ID NO: 49629
  source 1..120: mol_type = other DNA

SEQ ID NO: 79584 - DNA, 120 bp, synthetic construct; identical to SEQ ID NO: 49630
  source 1..120: mol_type = other DNA

SEQ ID NO: 79585 - DNA, 120 bp, synthetic construct; identical to SEQ ID NO: 13875
  source 1..120: mol_type = other DNA

SEQ ID NO: 79586 - DNA, 120 bp, synthetic construct; identical to SEQ ID NO: 49632
  source 1..120: mol_type = other DNA

SEQ ID NO: 79587 - DNA, 120 bp, synthetic construct; identical to SEQ ID NO: 49633
  source 1..120: mol_type = other DNA

SEQ ID NO: 79588 - DNA, 120 bp, synthetic construct; identical to SEQ ID NO: 49634
  source 1..120: mol_type = other DNA

SEQ ID NO: 79589 - DNA, 120 bp, synthetic construct; identical to SEQ ID NO: 49635
  source 1..120: mol_type = other DNA

SEQ ID NO: 79590 - DNA, 120 bp, synthetic construct; identical to SEQ ID NO: 13876
  source 1..120: mol_type = other DNA

SEQ ID NO: 79591 - DNA, 120 bp, synthetic construct; identical to SEQ ID NO: 49637
  source 1..120: mol_type = other DNA

SEQ ID NO: 79592 - DNA, 120 bp, synthetic construct; identical to SEQ ID NO: 49638
  source 1..120: mol_type = other DNA

SEQ ID NO: 79593 - DNA, 120 bp, synthetic construct; identical to SEQ ID NO: 13877
  source 1..120: mol_type = other DNA

SEQ ID NO: 79594 - DNA, 120 bp, synthetic construct; identical to SEQ ID NO: 49640
  source 1..120: mol_type = other DNA

SEQ ID NO: 79595 - DNA, 120 bp, synthetic construct; identical to SEQ ID NO: 49641
  source 1..120: mol_type = other DNA

SEQ ID NO: 79596 - DNA, 120 bp, synthetic construct; identical to SEQ ID NO: 49642
  source 1..120: mol_type = other DNA

SEQ ID NO: 79597 - DNA, 120 bp, synthetic construct; identical to SEQ ID NO: 13878
  source 1..120: mol_type = other DNA

SEQ ID NO: 79598 - DNA, 120 bp, synthetic construct; identical to SEQ ID NO: 49644
  source 1..120: mol_type = other DNA

SEQ ID NO: 79599 - DNA, 120 bp, synthetic construct; identical to SEQ ID NO: 49645
  source 1..120: mol_type = other DNA

SEQ ID NO: 79600 - DNA, 120 bp, synthetic construct; identical to SEQ ID NO: 49646
  source 1..120: mol_type = other DNA

SEQ ID NO: 79601 - DNA, 120 bp, synthetic construct; identical to SEQ ID NO: 13879
  source 1..120: mol_type = other DNA

SEQ ID NO: 79602 - DNA, 120 bp, synthetic construct; identical to SEQ ID NO: 49648
  source 1..120: mol_type = other DNA

SEQ ID NO: 79603 - DNA, 120 bp, synthetic construct; identical to SEQ ID NO: 49649
  source 1..120: mol_type = other DNA

SEQ ID NO: 79604 - DNA, 120 bp, synthetic construct; identical to SEQ ID NO: 49650
  source 1..120: mol_type = other DNA

SEQ ID NO: 79605 - DNA, 120 bp, synthetic construct; identical to SEQ ID NO: 13880
  source 1..120: mol_type = other DNA

SEQ ID NO: 79606 - DNA, 120 bp, synthetic construct; identical to SEQ ID NO: 49652
  source 1..120: mol_type = other DNA

SEQ ID NO: 79607 - DNA, 120 bp, synthetic construct; identical to SEQ ID NO: 49653
  source 1..120: mol_type = other DNA

SEQ ID NO: 79608 - DNA, 120 bp, synthetic construct; identical to SEQ ID NO: 49654
  source 1..120: mol_type = other DNA

SEQ ID NO: 79609 - DNA, 120 bp, synthetic construct; identical to SEQ ID NO: 49655
  source 1..120: mol_type = other DNA

SEQ ID NO: 79610 - DNA, 120 bp, synthetic construct; identical to SEQ ID NO: 13881
  source 1..120: mol_type = other DNA

SEQ ID NO: 79611 - DNA, 120 bp, synthetic construct; identical to SEQ ID NO: 49657
  source 1..120: mol_type = other DNA

SEQ ID NO: 79612 - DNA, 120 bp, synthetic construct; identical to SEQ ID NO: 49658
  source 1..120: mol_type = other DNA

SEQ ID NO: 79613 - DNA, 120 bp, synthetic construct; identical to SEQ ID NO: 49659
  source 1..120: mol_type = other DNA

SEQ ID NO: 79614 - DNA, 120 bp, synthetic construct; identical to SEQ ID NO: 13882
  source 1..120: mol_type = other DNA

SEQ ID NO: 79615 - DNA, 120 bp, synthetic construct; identical to SEQ ID NO: 49661
  source 1..120: mol_type = other DNA

SEQ ID NO: 79616 - DNA, 120 bp, synthetic construct; identical to SEQ ID NO: 49662
  source 1..120: mol_type = other DNA

SEQ ID NO: 79617 - DNA, 120 bp, synthetic construct; identical to SEQ ID NO: 13883
  source 1..120: mol_type = other DNA

SEQ ID NO: 79618 - DNA, 120 bp, synthetic construct; identical to SEQ ID NO: 49664
  source 1..120: mol_type = other DNA

SEQ ID NO: 79619 - DNA, 120 bp, synthetic construct; identical to SEQ ID NO: 49665
  source 1..120: mol_type = other DNA

SEQ ID NO: 79620 - DNA, 120 bp, synthetic construct; identical to SEQ ID NO: 49666
  source 1..120: mol_type = other DNA

SEQ ID NO: 79621 - DNA, 120 bp, synthetic construct; identical to SEQ ID NO: 49667
  source 1..120: mol_type = other DNA

SEQ ID NO: 79622 - DNA, 120 bp, synthetic construct; identical to SEQ ID NO: 13884
  source 1..120: mol_type = other DNA

SEQ ID NO: 79623 - DNA, 120 bp, synthetic construct; identical to SEQ ID NO: 49669
  source 1..120: mol_type = other DNA

SEQ ID NO: 79624 - DNA, 120 bp, synthetic construct; identical to SEQ ID NO: 49670
  source 1..120: mol_type = other DNA

SEQ ID NO: 79625 - DNA, 120 bp, synthetic construct; identical to SEQ ID NO: 13885
  source 1..120: mol_type = other DNA

SEQ ID NO: 79626 - DNA, 120 bp, synthetic construct; identical to SEQ ID NO: 49672
  source 1..120: mol_type = other DNA

SEQ ID NO: 79627 - DNA, 120 bp, synthetic construct; identical to SEQ ID NO: 49673
  source 1..120: mol_type = other DNA

SEQ ID NO: 79628 - DNA, 120 bp, synthetic construct; identical to SEQ ID NO: 49674
  source 1..120: mol_type = other DNA

SEQ ID NO: 79629 - DNA, 120 bp, synthetic construct; identical to SEQ ID NO: 49675
  source 1..120: mol_type = other DNA

SEQ ID NO: 79630 - DNA, 120 bp, synthetic construct; identical to SEQ ID NO: 13886
  source 1..120: mol_type = other DNA

SEQ ID NO: 79631 - DNA, 120 bp, synthetic construct; identical to SEQ ID NO: 49677
  source 1..120: mol_type = other DNA

SEQ ID NO: 79632 - DNA, 120 bp, synthetic construct; identical to SEQ ID NO: 49678
  source 1..120: mol_type = other DNA

SEQ ID NO: 79633 - DNA, 120 bp, synthetic construct; identical to SEQ ID NO: 13887
  source 1..120: mol_type = other DNA

SEQ ID NO: 79634 - DNA, 120 bp, synthetic construct; identical to SEQ ID NO: 49680
  source 1..120: mol_type = other DNA

SEQ ID NO: 79635 - DNA, 120 bp, synthetic construct; identical to SEQ ID NO: 49681
  source 1..120: mol_type = other DNA

SEQ ID NO: 79636 - DNA, 120 bp, synthetic construct; identical to SEQ ID NO: 49682
  source 1..120: mol_type = other DNA

SEQ ID NO: 79637 - DNA, 120 bp, synthetic construct; identical to SEQ ID NO: 49683
  source 1..120: mol_type = other DNA

SEQ ID NO: 79638 - DNA, 120 bp, synthetic construct; identical to SEQ ID NO: 13888
  source 1..120: mol_type = other DNA

SEQ ID NO: 79639 - DNA, 120 bp, synthetic construct; identical to SEQ ID NO: 49685
  source 1..120: mol_type = other DNA

SEQ ID NO: 79640 - DNA, 120 bp, synthetic construct; identical to SEQ ID NO: 49686
  source 1..120: mol_type = other DNA

SEQ ID NO: 79641 - DNA, 120 bp, synthetic construct; identical to SEQ ID NO: 13889
  source 1..120: mol_type = other DNA

SEQ ID NO: 79642 - DNA, 120 bp, synthetic construct; identical to SEQ ID NO: 49688
  source 1..120: mol_type = other DNA

SEQ ID NO: 79643 - DNA, 120 bp, synthetic construct; identical to SEQ ID NO: 49689
  source 1..120: mol_type = other DNA

SEQ ID NO: 79644 - DNA, 120 bp, synthetic construct; identical to SEQ ID NO: 49690
  source 1..120: mol_type = other DNA

SEQ ID NO: 79645 - DNA, 120 bp, synthetic construct; identical to SEQ ID NO: 49691
  source 1..120: mol_type = other DNA

SEQ ID NO: 79646 - DNA, 120 bp, synthetic construct; identical to SEQ ID NO: 13890
  source 1..120: mol_type = other DNA

SEQ ID NO: 79647 - DNA, 120 bp, synthetic construct; identical to SEQ ID NO: 49693
  source 1..120: mol_type = other DNA

SEQ ID NO: 79648 - DNA, 120 bp, synthetic construct; identical to SEQ ID NO: 49694
  source 1..120: mol_type = other DNA

SEQ ID NO: 79649 - DNA, 120 bp, synthetic construct; identical to SEQ ID NO: 49695
  source 1..120: mol_type = other DNA

SEQ ID NO: 79650 - DNA, 120 bp, synthetic construct; identical to SEQ ID NO: 13891
  source 1..120: mol_type = other DNA

SEQ ID NO: 79651 - DNA, 120 bp, synthetic construct; identical to SEQ ID NO: 49697
  source 1..120: mol_type = other DNA

SEQ ID NO: 79652 - DNA, 120 bp, synthetic construct; identical to SEQ ID NO: 49698
  source 1..120: mol_type = other DNA

SEQ ID NO: 79653 - DNA, 120 bp, synthetic construct; identical to SEQ ID NO: 49699
  source 1..120: mol_type = other DNA

SEQ ID NO: 79654 - DNA, 120 bp, synthetic construct; identical to SEQ ID NO: 13892
  source 1..120: mol_type = other DNA

SEQ ID NO: 79655 - DNA, 120 bp, synthetic construct; identical to SEQ ID NO: 49701
  source 1..120: mol_type = other DNA

SEQ ID NO: 79656 - DNA, 120 bp, synthetic construct; identical to SEQ ID NO: 49702
  source 1..120: mol_type = other DNA

SEQ ID NO: 79657 - DNA, 120 bp, synthetic construct; identical to SEQ ID NO: 13893
  source 1..120: mol_type = other DNA

SEQ ID NO: 79658 - DNA, 120 bp, synthetic construct; identical to SEQ ID NO: 49704
  source 1..120: mol_type = other DNA

SEQ ID NO: 79659 - DNA, 120 bp, synthetic construct; identical to SEQ ID NO: 49705
  source 1..120: mol_type = other DNA

SEQ ID NO: 79660 - DNA, 120 bp, synthetic construct; identical to SEQ ID NO: 49706
  source 1..120: mol_type = other DNA

SEQ ID NO: 79661 - DNA, 120 bp, synthetic construct; identical to SEQ ID NO: 13894
  source 1..120: mol_type = other DNA

SEQ ID NO: 79662 - DNA, 120 bp, synthetic construct; identical to SEQ ID NO: 49708
  source 1..120: mol_type = other DNA

SEQ ID NO: 79663 - DNA, 120 bp, synthetic construct; identical to SEQ ID NO: 49709
  source 1..120: mol_type = other DNA

SEQ ID NO: 79664 - DNA, 120 bp, synthetic construct; identical to SEQ ID NO: 49710
  source 1..120: mol_type = other DNA

SEQ ID NO: 79665 - DNA, 120 bp, synthetic construct; identical to SEQ ID NO: 13895
  source 1..120: mol_type = other DNA

SEQ ID NO: 79666 - DNA, 120 bp, synthetic construct; identical to SEQ ID NO: 49712
  source 1..120: mol_type = other DNA

SEQ ID NO: 79667 - DNA, 120 bp, synthetic construct; identical to SEQ ID NO: 49713
  source 1..120: mol_type = other DNA

SEQ ID NO: 79668 - DNA, 120 bp, synthetic construct; identical to SEQ ID NO: 49714
  source 1..120: mol_type = other DNA

SEQ ID NO: 79669 - DNA, 120 bp, synthetic construct; identical to SEQ ID NO: 13896
  source 1..120: mol_type = other DNA

SEQ ID NO: 79670 - DNA, 120 bp, synthetic construct; identical to SEQ ID NO: 49716
  source 1..120: mol_type = other DNA

SEQ ID NO: 79671 - DNA, 120 bp, synthetic construct; identical to SEQ ID NO: 49717
  source 1..120: mol_type = other DNA

SEQ ID NO: 79672 - DNA, 120 bp, synthetic construct; identical to SEQ ID NO: 49718
  source 1..120: mol_type = other DNA

SEQ ID NO: 79673 - DNA, 120 bp, synthetic construct; identical to SEQ ID NO: 13897
  source 1..120: mol_type = other DNA

SEQ ID NO: 79674 - DNA, 120 bp, synthetic construct; identical to SEQ ID NO: 49720
  source 1..120: mol_type = other DNA

SEQ ID NO: 79675 - DNA, 120 bp, synthetic construct; identical to SEQ ID NO: 49721
  source 1..120: mol_type = other DNA

SEQ ID NO: 79676 - DNA, 120 bp, synthetic construct; identical to SEQ ID NO: 49722
  source 1..120: mol_type = other DNA

SEQ ID NO: 79677 - DNA, 120 bp, synthetic construct; identical to SEQ ID NO: 49723
  source 1..120: mol_type = other DNA

SEQ ID NO: 79678 - DNA, 120 bp, synthetic construct; identical to SEQ ID NO: 13898
  source 1..120: mol_type = other DNA

SEQ ID NO: 79679 - DNA, 120 bp, synthetic construct; identical to SEQ ID NO: 49725
  source 1..120: mol_type = other DNA

SEQ ID NO: 79680 - DNA, 120 bp, synthetic construct; identical to SEQ ID NO: 49726
  source 1..120: mol_type = other DNA

SEQ ID NO: 79681 - DNA, 120 bp, synthetic construct; identical to SEQ ID NO: 13899
  source 1..120: mol_type = other DNA

SEQ ID NO: 79682 - DNA, 120 bp, synthetic construct; identical to SEQ ID NO: 49728
  source 1..120: mol_type = other DNA

SEQ ID NO: 79683 - DNA, 120 bp, synthetic construct; identical to SEQ ID NO: 49729
  source 1..120: mol_type = other DNA

SEQ ID NO: 79684 - DNA, 120 bp, synthetic construct; identical to SEQ ID NO: 49730
  source 1..120: mol_type = other DNA

SEQ ID NO: 79685 - DNA, 120 bp, synthetic construct; identical to SEQ ID NO: 13900
  source 1..120: mol_type = other DNA

SEQ ID NO: 79686 - DNA, 120 bp, synthetic construct; identical to SEQ ID NO: 49732
  source 1..120: mol_type = other DNA

SEQ ID NO: 79687 - DNA, 120 bp, synthetic construct; identical to SEQ ID NO: 49733
  source 1..120: mol_type = other DNA

SEQ ID NO: 79688 - DNA, 120 bp, synthetic construct; identical to SEQ ID NO: 49734
  source 1..120: mol_type = other DNA

SEQ ID NO: 79689 - DNA, 120 bp, synthetic construct; identical to SEQ ID NO: 49735
  source 1..120: mol_type = other DNA

SEQ ID NO: 79690 - DNA, 120 bp, synthetic construct; identical to SEQ ID NO: 13901
  source 1..120: mol_type = other DNA

SEQ ID NO: 79691 - DNA, 120 bp, synthetic construct; identical to SEQ ID NO: 49737
  source 1..120: mol_type = other DNA

SEQ ID NO: 79692 - DNA, 120 bp, synthetic construct; identical to SEQ ID NO: 49738
  source 1..120: mol_type = other DNA

SEQ ID NO: 79693 - DNA, 120 bp, synthetic construct; identical to SEQ ID NO: 13902
  source 1..120: mol_type = other DNA

SEQ ID NO: 79694 - DNA, 120 bp, synthetic construct; identical to SEQ ID NO: 49740
  source 1..120: mol_type = other DNA

SEQ ID NO: 79695 - DNA, 120 bp, synthetic construct; identical to SEQ ID NO: 49741
  source 1..120: mol_type = other DNA

SEQ ID NO: 79696 - DNA, 120 bp, synthetic construct; identical to SEQ ID NO: 49742
  source 1..120: mol_type = other DNA

SEQ ID NO: 79697 - DNA, 120 bp, synthetic construct; identical to SEQ ID NO: 13903
  source 1..120: mol_type = other DNA

SEQ ID NO: 79698 - DNA, 120 bp, synthetic construct; identical to SEQ ID NO: 49744
  source 1..120: mol_type = other DNA

SEQ ID NO: 79699 - DNA, 120 bp, synthetic construct; identical to SEQ ID NO: 49745
  source 1..120: mol_type = other DNA

SEQ ID NO: 79700 - DNA, 120 bp, synthetic construct; identical to SEQ ID NO: 49746
  source 1..120: mol_type = other DNA

SEQ ID NO: 79701 - DNA, 120 bp, synthetic construct; identical to SEQ ID NO: 13904
  source 1..120: mol_type = other DNA

SEQ ID NO: 79702 - DNA, 120 bp, synthetic construct; identical to SEQ ID NO: 49748
  source 1..120: mol_type = other DNA

SEQ ID NO: 79703 - DNA, 120 bp, synthetic construct; identical to SEQ ID NO: 49749
  source 1..120: mol_type = other DNA

SEQ ID NO: 79704 - DNA, 120 bp, synthetic construct; identical to SEQ ID NO: 49750
  source 1..120: mol_type = other DNA

SEQ ID NO: 79705 - DNA, 120 bp, synthetic construct; identical to SEQ ID NO: 13905
  source 1..120: mol_type = other DNA

SEQ ID NO: 79706 - DNA, 120 bp, synthetic construct; identical to SEQ ID NO: 49752
  source 1..120: mol_type = other DNA

SEQ ID NO: 79707 - DNA, 120 bp, synthetic construct; identical to SEQ ID NO: 49753
  source 1..120: mol_type = other DNA

SEQ ID NO: 79708 - DNA, 120 bp, synthetic construct; identical to SEQ ID NO: 49754
  source 1..120: mol_type = other DNA

SEQ ID NO: 79709 - DNA, 120 bp, synthetic construct; identical to SEQ ID NO: 49755
  source 1..120: mol_type = other DNA

SEQ ID NO: 79710 - DNA, 120 bp, synthetic construct; identical to SEQ ID NO: 13906
  source 1..120: mol_type = other DNA

SEQ ID NO: 79711 - DNA, 120 bp, synthetic construct; identical to SEQ ID NO: 49757
  source 1..120: mol_type = other DNA

SEQ ID NO: 79712 - DNA, 120 bp, synthetic construct; identical to SEQ ID NO: 49758
  source 1..120: mol_type = other DNA

SEQ ID NO: 79713 - DNA, 120 bp, synthetic construct; identical to SEQ ID NO: 49759
  source 1..120: mol_type = other DNA

SEQ ID NO: 79714 - DNA, 120 bp, synthetic construct; identical to SEQ ID NO: 13907
  source 1..120: mol_type = other DNA

SEQ ID NO: 79715 - DNA, 120 bp, synthetic construct; identical to SEQ ID NO: 49761
  source 1..120: mol_type = other DNA

SEQ ID NO: 79716 - DNA, 120 bp, synthetic construct; identical to SEQ ID NO: 49762
  source 1..120: mol_type = other DNA

SEQ ID NO: 79717 - DNA, 120 bp, synthetic construct; identical to SEQ ID NO: 13908
  source 1..120: mol_type = other DNA

SEQ ID NO: 79718 - DNA, 120 bp, synthetic construct; identical to SEQ ID NO: 49764
  source 1..120: mol_type = other DNA

SEQ ID NO: 79719 - DNA, 120 bp, synthetic construct; identical to SEQ ID NO: 49765
  source 1..120: mol_type = other DNA

SEQ ID NO: 79720 - DNA, 120 bp, synthetic construct; identical to SEQ ID NO: 49766
  source 1..120: mol_type = other DNA

SEQ ID NO: 79721 - DNA, 120 bp, synthetic construct; identical to SEQ ID NO: 49767
  source 1..120: mol_type = other DNA

SEQ ID NO: 79722 - DNA, 120 bp, synthetic construct; identical to SEQ ID NO: 13909
  source 1..120: mol_type = other DNA

SEQ ID NO: 79723 - DNA, 120 bp, synthetic construct; identical to SEQ ID NO: 49769
  source 1..120: mol_type = other DNA

SEQ ID NO: 79724 - DNA, 120 bp, synthetic construct; identical to SEQ ID NO: 49770
  source 1..120: mol_type = other DNA

SEQ ID NO: 79725 - DNA, 120 bp, synthetic construct; identical to SEQ ID NO: 13910
  source 1..120: mol_type = other DNA

SEQ ID NO: 79726 - DNA, 120 bp, synthetic construct; identical to SEQ ID NO: 49772
  source 1..120: mol_type = other DNA

SEQ ID NO: 79727 - DNA, 120 bp, synthetic construct; identical to SEQ ID NO: 49773
  source 1..120: mol_type = other DNA

SEQ ID NO: 79728 - DNA, 120 bp, synthetic construct; identical to SEQ ID NO: 49774
  source 1..120: mol_type = other DNA

SEQ ID NO: 79729 - DNA, 120 bp, synthetic construct; identical to SEQ ID NO: 49775
  source 1..120: mol_type = other DNA

SEQ ID NO: 79730 - DNA, 120 bp, synthetic construct; identical to SEQ ID NO: 13911
  source 1..120: mol_type = other DNA

SEQ ID NO: 79731 - DNA, 120 bp, synthetic construct; identical to SEQ ID NO: 49777
  source 1..120: mol_type = other DNA

SEQ ID NO: 79732 - DNA, 120 bp, synthetic construct; identical to SEQ ID NO: 49778
  source 1..120: mol_type = other DNA

SEQ ID NO: 79733 - DNA, 120 bp, synthetic construct; identical to SEQ ID NO: 49779
  source 1..120: mol_type = other DNA

SEQ ID NO: 79734 - DNA, 120 bp, synthetic construct; identical to SEQ ID NO: 13912
  source 1..120: mol_type = other DNA

SEQ ID NO: 79735 - DNA, 120 bp, synthetic construct; identical to SEQ ID NO: 49781
  source 1..120: mol_type = other DNA

SEQ ID NO: 79736 - DNA, 120 bp, synthetic construct; identical to SEQ ID NO: 49782
  source 1..120: mol_type = other DNA

SEQ ID NO: 79737 - DNA, 120 bp, synthetic construct; identical to SEQ ID NO: 13913
  source 1..120: mol_type = other DNA

SEQ ID NO: 79738 - DNA, 120 bp, synthetic construct; identical to SEQ ID NO: 49784
  source 1..120: mol_type = other DNA

SEQ ID NO: 79739 - DNA, 120 bp, synthetic construct; identical to SEQ ID NO: 49785
  source 1..120: mol_type = other DNA

SEQ ID NO: 79740 - DNA, 120 bp, synthetic construct; identical to SEQ ID NO: 49786
  source 1..120: mol_type = other DNA

SEQ ID NO: 79741 - DNA, 120 bp, synthetic construct; identical to SEQ ID NO: 13914
  source 1..120: mol_type = other DNA

SEQ ID NO: 79742 - DNA, 120 bp, synthetic construct; identical to SEQ ID NO: 49788
  source 1..120: mol_type = other DNA

SEQ ID NO: 79743 - DNA, 120 bp, synthetic construct; identical to SEQ ID NO: 49789
  source 1..120: mol_type = other DNA

SEQ ID NO: 79744 - DNA, 120 bp, synthetic construct; identical to SEQ ID NO: 49790
  source 1..120: mol_type = other DNA

SEQ ID NO: 79745 - DNA, 120 bp, synthetic construct; identical to SEQ ID NO: 13915
  source 1..120: mol_type = other DNA

SEQ ID NO: 79746 - DNA, 120 bp, synthetic construct; identical to SEQ ID NO: 49792
  source 1..120: mol_type = other DNA

SEQ ID NO: 79747 - DNA, 120 bp, synthetic construct; identical to SEQ ID NO: 49793
  source 1..120: mol_type = other DNA

SEQ ID NO: 79748 - DNA, 120 bp, synthetic construct; identical to SEQ ID NO: 49794
  source 1..120: mol_type = other DNA

SEQ ID NO: 79749 - DNA, 120 bp, synthetic construct; identical to SEQ ID NO: 49795
  source 1..120: mol_type = other DNA

SEQ ID NO: 79750 - DNA, 120 bp, synthetic construct; identical to SEQ ID NO: 13916
  source 1..120: mol_type = other DNA

SEQ ID NO: 79751 - DNA, 120 bp, synthetic construct; identical to SEQ ID NO: 49797
  source 1..120: mol_type = other DNA

SEQ ID NO: 79752 - DNA, 120 bp, synthetic construct; identical to SEQ ID NO: 49798
  source 1..120: mol_type = other DNA

SEQ ID NO: 79753 - DNA, 120 bp, synthetic construct; identical to SEQ ID NO: 49799
  source 1..120: mol_type = other DNA

SEQ ID NO: 79754 - DNA, 120 bp, synthetic construct; identical to SEQ ID NO: 13917
  source 1..120: mol_type = other DNA

SEQ ID NO: 79755 - DNA, 120 bp, synthetic construct; identical to SEQ ID NO: 49801
  source 1..120: mol_type = other DNA

SEQ ID NO: 79756 - DNA, 120 bp, synthetic construct; identical to SEQ ID NO: 49802
  source 1..120: mol_type = other DNA

SEQ ID NO: 79757 - DNA, 120 bp, synthetic construct; identical to SEQ ID NO: 13918
  source 1..120: mol_type = other DNA

SEQ ID NO: 79758 - DNA, 120 bp, synthetic construct; identical to SEQ ID NO: 49804
  source 1..120: mol_type = other DNA

SEQ ID NO: 79759 - DNA, 120 bp, synthetic construct; identical to SEQ ID NO: 49805
  source 1..120: mol_type = other DNA

SEQ ID NO: 79760 - DNA, 120 bp, synthetic construct; identical to SEQ ID NO: 49806
  source 1..120: mol_type = other DNA

SEQ ID NO: 79761 - DNA, 120 bp, synthetic construct; identical to SEQ ID NO: 49807
  source 1..120: mol_type = other DNA

SEQ ID NO: 79762 - DNA, 120 bp, synthetic construct; identical to SEQ ID NO: 13919
  source 1..120: mol_type = other DNA

SEQ ID NO: 79763 - DNA, 120 bp, synthetic construct; identical to SEQ ID NO: 49809
  source 1..120: mol_type = other DNA

SEQ ID NO: 79764 - DNA, 120 bp, synthetic construct; identical to SEQ ID NO: 49810
  source 1..120: mol_type = other DNA

SEQ ID NO: 79765 - DNA, 120 bp, synthetic construct; identical to SEQ ID NO: 49811
  source 1..120: mol_type = other DNA

SEQ ID NO: 79766 - DNA, 120 bp, synthetic construct; identical to SEQ ID NO: 13920
  source 1..120: mol_type = other DNA

SEQ ID NO: 79767 - DNA, 120 bp, synthetic construct; identical to SEQ ID NO: 49813
  source 1..120: mol_type = other DNA

SEQ ID NO: 79768 - DNA, 120 bp, synthetic construct; identical to SEQ ID NO: 49814
  source 1..120: mol_type = other DNA

SEQ ID NO: 79769 - DNA, 120 bp, synthetic construct; identical to SEQ ID NO: 49815
  source 1..120: mol_type = other DNA

SEQ ID NO: 79770 - DNA, 120 bp, synthetic construct; identical to SEQ ID NO: 13921
  source 1..120: mol_type = other DNA

SEQ ID NO: 79771 - DNA, 120 bp, synthetic construct; identical to SEQ ID NO: 49817
  source 1..120: mol_type = other DNA

SEQ ID NO: 79772 - DNA, 120 bp, synthetic construct; identical to SEQ ID NO: 49818
  source 1..120: mol_type = other DNA

SEQ ID NO: 79773 - DNA, 120 bp, synthetic construct; identical to SEQ ID NO: 13922
  source 1..120: mol_type = other DNA

SEQ ID NO: 79774 - DNA, 120 bp, synthetic construct; identical to SEQ ID NO: 49820
  source 1..120: mol_type = other DNA

SEQ ID NO: 79775 - DNA, 120 bp, synthetic construct; identical to SEQ ID NO: 49821
  source 1..120: mol_type = other DNA

SEQ ID NO: 79776 - DNA, 120 bp, synthetic construct; identical to SEQ ID NO: 49822
  source 1..120: mol_type = other DNA

SEQ ID NO: 79777 - DNA, 120 bp, synthetic construct; identical to SEQ ID NO: 49823
  source 1..120: mol_type = other DNA

SEQ ID NO: 79778 - DNA, 120 bp, synthetic construct; identical to SEQ ID NO: 13923
  source 1..120: mol_type = other DNA

SEQ ID NO: 79779 - DNA, 120 bp, synthetic construct; identical to SEQ ID NO: 49825
  source 1..120: mol_type = other DNA

SEQ ID NO: 79780 - DNA, 120 bp, synthetic construct; identical to SEQ ID NO: 49826
  source 1..120: mol_type = other DNA

SEQ ID NO: 79781 - DNA, 120 bp, synthetic construct; identical to SEQ ID NO: 13924
  source 1..120: mol_type = other DNA

SEQ ID NO: 79782 - DNA, 120 bp, synthetic construct; identical to SEQ ID NO: 49828
  source 1..120: mol_type = other DNA

SEQ ID NO: 79783 - DNA, 120 bp, synthetic construct; identical to SEQ ID NO: 49829
  source 1..120: mol_type = other DNA

SEQ ID NO: 79784 - DNA, 120 bp, synthetic construct; identical to SEQ ID NO: 49830
  source 1..120: mol_type = other DNA

SEQ ID NO: 79785 - DNA, 120 bp, synthetic construct; identical to SEQ ID NO: 13925
  source 1..120: mol_type = other DNA

SEQ ID NO: 79786 - DNA, 120 bp, synthetic construct; identical to SEQ ID NO: 49832
  source 1..120: mol_type = other DNA

SEQ ID NO: 79787 - DNA, 120 bp, synthetic construct; identical to SEQ ID NO: 49833
  source 1..120: mol_type = other DNA

SEQ ID NO: 79788 - DNA, 120 bp, synthetic construct; identical to SEQ ID NO: 49834
  source 1..120: mol_type = other DNA

SEQ ID NO: 79789 - DNA, 120 bp, synthetic construct; identical to SEQ ID NO: 13926
  source 1..120: mol_type = other DNA

SEQ ID NO: 79790 - DNA, 120 bp, synthetic construct; identical to SEQ ID NO: 49836
  source 1..120: mol_type = other DNA

SEQ ID NO: 79791 - DNA, 120 bp, synthetic construct; identical to SEQ ID NO: 49837
  source 1..120: mol_type = other DNA

SEQ ID NO: 79792 - DNA, 120 bp, synthetic construct; identical to SEQ ID NO: 49838
  source 1..120: mol_type = other DNA

SEQ ID NO: 79793 - DNA, 120 bp, synthetic construct; identical to SEQ ID NO: 13927
  source 1..120: mol_type = other DNA

SEQ ID NO: 79794 - DNA, 120 bp, synthetic construct; identical to SEQ ID NO: 49840
  source 1..120: mol_type = other DNA

SEQ ID NO: 79795 - DNA, 120 bp, synthetic construct; identical to SEQ ID NO: 49841
  source 1..120: mol_type = other DNA

SEQ ID NO: 79796 - DNA, 120 bp, synthetic construct; identical to SEQ ID NO: 49842
  source 1..120: mol_type = other DNA

SEQ ID NO: 79797 - DNA, 120 bp, synthetic construct; identical to SEQ ID NO: 13928
  source 1..120: mol_type = other DNA

SEQ ID NO: 79798 - DNA, 120 bp, synthetic construct; identical to SEQ ID NO: 49844
  source 1..120: mol_type = other DNA

SEQ ID NO: 79799 - DNA, 120 bp, synthetic construct; identical to SEQ ID NO: 49845
  source 1..120: mol_type = other DNA

SEQ ID NO: 79800 - DNA, 120 bp, synthetic construct; identical to SEQ ID NO: 49846
  source 1..120: mol_type = other DNA

SEQ ID NO: 79801 - DNA, 120 bp, synthetic construct; identical to SEQ ID NO: 49847
  source 1..120: mol_type = other DNA

SEQ ID NO: 79802 - DNA, 120 bp, synthetic construct; identical to SEQ ID NO: 13929
  source 1..120: mol_type = other DNA

SEQ ID NO: 79803 - DNA, 120 bp, synthetic construct; identical to SEQ ID NO: 49849
  source 1..120: mol_type = other DNA

SEQ ID NO: 79804 - DNA, 120 bp, synthetic construct; identical to SEQ ID NO: 49850
  source 1..120: mol_type = other DNA

SEQ ID NO: 79805 - DNA, 120 bp, synthetic construct; identical to SEQ ID NO: 49851
  source 1..120: mol_type = other DNA

SEQ ID NO: 79806 - DNA, 120 bp, synthetic construct; identical to SEQ ID NO: 13930
  source 1..120: mol_type = other DNA

SEQ ID NO: 79807 - DNA, 120 bp, synthetic construct; identical to SEQ ID NO: 49853
  source 1..120: mol_type = other DNA

SEQ ID NO: 79808 - DNA, 120 bp, synthetic construct; identical to SEQ ID NO: 49854
  source 1..120: mol_type = other DNA

SEQ ID NO: 79809 - DNA, 120 bp, synthetic construct; identical to SEQ ID NO: 13931
  source 1..120: mol_type = other DNA

SEQ ID NO: 79810 - DNA, 120 bp, synthetic construct; identical to SEQ ID NO: 49856
  source 1..120: mol_type = other DNA

SEQ ID NO: 79811 - DNA, 120 bp, synthetic construct; identical to SEQ ID NO: 49857
  source 1..120: mol_type = other DNA

SEQ ID NO: 79812 - DNA, 120 bp, synthetic construct; identical to SEQ ID NO: 49858
  source 1..120: mol_type = other DNA

SEQ ID NO: 79813 - DNA, 120 bp, synthetic construct; identical to SEQ ID NO: 49859
  source 1..120: mol_type = other DNA

SEQ ID NO: 79814 - DNA, 120 bp, synthetic construct; identical to SEQ ID NO: 49860
  source 1..120: mol_type = other DNA

SEQ ID NO: 79815 - DNA, 120 bp, synthetic construct; identical to SEQ ID NO: 13932
  source 1..120: mol_type = other DNA

SEQ ID NO: 79816 - DNA, 120 bp, synthetic construct; identical to SEQ ID NO: 49862
  source 1..120: mol_type = other DNA

SEQ ID NO: 79817 - DNA, 120 bp, synthetic construct; identical to SEQ ID NO: 49863
  source 1..120: mol_type = other DNA

SEQ ID NO: 79818 - DNA, 120 bp, synthetic construct; identical to SEQ ID NO: 13933
  source 1..120: mol_type = other DNA

SEQ ID NO: 79819 - DNA, 120 bp, synthetic construct; identical to SEQ ID NO: 49865
  source 1..120: mol_type = other DNA

SEQ ID NO: 79820 - DNA, 120 bp, synthetic construct; identical to SEQ ID NO: 49866
  source 1..120: mol_type = other DNA

SEQ ID NO: 79821 - DNA, 120 bp, synthetic construct; identical to SEQ ID NO: 49867
  source 1..120: mol_type = other DNA

SEQ ID NO: 79822 - DNA, 120 bp, synthetic construct; identical to SEQ ID NO: 49868
  source 1..120: mol_type = other DNA

SEQ ID NO: 79823 - DNA, 120 bp, synthetic construct; identical to SEQ ID NO: 13934
  source 1..120: mol_type = other DNA

SEQ ID NO: 79824 - DNA, 120 bp, synthetic construct; identical to SEQ ID NO: 49870
  source 1..120: mol_type = other DNA

SEQ ID NO: 79825 - DNA, 120 bp, synthetic construct; identical to SEQ ID NO: 6462
  source 1..120: mol_type = other DNA

SEQ ID NO: 79826 - DNA, 120 bp, synthetic construct; identical to SEQ ID NO: 49872
  source 1..120: mol_type = other DNA

SEQ ID NO: 79827 - DNA, 120 bp, synthetic construct; identical to SEQ ID NO: 13935
  source 1..120: mol_type = other DNA

SEQ ID NO: 79828 - DNA, 120 bp, synthetic construct; identical to SEQ ID NO: 49874
  source 1..120: mol_type = other DNA

SEQ ID NO: 79829 - DNA, 120 bp, synthetic construct; identical to SEQ ID NO: 49875
  source 1..120: mol_type = other DNA

SEQ ID NO: 79830 - DNA, 120 bp, synthetic construct; identical to SEQ ID NO: 49876
  source 1..120: mol_type = other DNA

SEQ ID NO: 79831 - DNA, 120 bp, synthetic construct; identical to SEQ ID NO: 13936
  source 1..120: mol_type = other DNA

SEQ ID NO: 79832 - DNA, 120 bp, synthetic construct; identical to SEQ ID NO: 49878
  source 1..120: mol_type = other DNA

SEQ ID NO: 79833 - DNA, 120 bp, synthetic construct; identical to SEQ ID NO: 49879
  source 1..120: mol_type = other DNA

SEQ ID NO: 79834 - DNA, 120 bp, synthetic construct; identical to SEQ ID NO: 13937
  source 1..120: mol_type = other DNA

SEQ ID NO: 79835 - DNA, 120 bp, synthetic construct; identical to SEQ ID NO: 49881
  source 1..120: mol_type = other DNA

SEQ ID NO: 79836 - DNA, 120 bp, synthetic construct; identical to SEQ ID NO: 49882
  source 1..120: mol_type = other DNA

SEQ ID NO: 79837 - DNA, 120 bp, synthetic construct; identical to SEQ ID NO: 49883
  source 1..120: mol_type = other DNA

SEQ ID NO: 79838 - DNA, 120 bp, synthetic construct; identical to SEQ ID NO: 13938
  source 1..120: mol_type = other DNA

SEQ ID NO: 79839 - DNA, 120 bp, synthetic construct; identical to SEQ ID NO: 49885
  source 1..120: mol_type = other DNA

SEQ ID NO: 79840 - DNA, 120 bp, synthetic construct; identical to SEQ ID NO: 49886
  source 1..120: mol_type = other DNA

SEQ ID NO: 79841 - DNA, 120 bp, synthetic construct; identical to SEQ ID NO: 49887
  source 1..120: mol_type = other DNA

SEQ ID NO: 79842 - DNA, 120 bp, synthetic construct; identical to SEQ ID NO: 49888
  source 1..120: mol_type = other DNA

SEQ ID NO: 79843 - DNA, 120 bp, synthetic construct; identical to SEQ ID NO: 13939
  source 1..120: mol_type = other DNA

SEQ ID NO: 79844 - DNA, 120 bp, synthetic construct; identical to SEQ ID NO: 49890
  source 1..120: mol_type = other DNA

SEQ ID NO: 79845 - DNA, 120 bp, synthetic construct; identical to SEQ ID NO: 49891
  source 1..120: mol_type = other DNA

SEQ ID NO: 79846 - DNA, 120 bp, synthetic construct; identical to SEQ ID NO: 13940
  source 1..120: mol_type = other DNA

SEQ ID NO: 79847 - DNA, 120 bp, synthetic construct; identical to SEQ ID NO: 49893
  source 1..120: mol_type = other DNA

SEQ ID NO: 79848 - DNA, 120 bp, synthetic construct; identical to SEQ ID NO: 49894
  source 1..120: mol_type = other DNA

SEQ ID NO: 79849 - DNA, 120 bp, synthetic construct; identical to SEQ ID NO: 49895
  source 1..120: mol_type = other DNA

SEQ ID NO: 79850 - DNA, 120 bp, synthetic construct; identical to SEQ ID NO: 13941
  source 1..120: mol_type = other DNA

SEQ ID NO: 79851 - DNA, 120 bp, synthetic construct; identical to SEQ ID NO: 49897
  source 1..120: mol_type = other DNA

SEQ ID NO: 79852 - DNA, 120 bp, synthetic construct; identical to SEQ ID NO: 49898
  source 1..120: mol_type = other DNA

SEQ ID NO: 79853 - DNA, 120 bp, synthetic construct; identical to SEQ ID NO: 49899
  source 1..120: mol_type = other DNA

SEQ ID NO: 79854 - DNA, 120 bp, synthetic construct; identical to SEQ ID NO: 49900
  source 1..120: mol_type = other DNA

SEQ ID NO: 79855 - DNA, 120 bp, synthetic construct; identical to SEQ ID NO: 13942
  source 1..120: mol_type = other DNA

SEQ ID NO: 79856 - DNA, 120 bp, synthetic construct; identical to SEQ ID NO: 49902
  source 1..120: mol_type = other DNA

SEQ ID NO: 79857 - DNA, 120 bp, synthetic construct; identical to SEQ ID NO: 49903
  source 1..120: mol_type = other DNA

SEQ ID NO: 79858 - DNA, 120 bp, synthetic construct; identical to SEQ ID NO: 49904
  source 1..120: mol_type = other DNA

SEQ ID NO: 79859 - DNA, 120 bp, synthetic construct; identical to SEQ ID NO: 13943
  source 1..120: mol_type = other DNA

SEQ ID NO: 79860 - DNA, 120 bp, synthetic construct; identical to SEQ ID NO: 49906
  source 1..120: mol_type = other DNA

SEQ ID NO: 79861 - DNA, 120 bp, synthetic construct; identical to SEQ ID NO: 49907
  source 1..120: mol_type = other DNA

SEQ ID NO: 79862 - DNA, 120 bp, synthetic construct; identical to SEQ ID NO: 13944
  source 1..120: mol_type = other DNA

SEQ ID NO: 79863 - DNA, 120 bp, synthetic construct; identical to SEQ ID NO: 49909
  source 1..120: mol_type = other DNA

SEQ ID NO: 79864 - DNA, 120 bp, synthetic construct; identical to SEQ ID NO: 49910
  source 1..120: mol_type = other DNA

SEQ ID NO: 79865 - DNA, 120 bp, synthetic construct; identical to SEQ ID NO: 49911
  source 1..120: mol_type = other DNA

SEQ ID NO: 79866 - DNA, 120 bp, synthetic construct; identical to SEQ ID NO: 13945
  source 1..120: mol_type = other DNA

SEQ ID NO: 79867 - DNA, 120 bp, synthetic construct; identical to SEQ ID NO: 49913
  source 1..120: mol_type = other DNA

SEQ ID NO: 79868 - DNA, 120 bp, synthetic construct; identical to SEQ ID NO: 49914
  source 1..120: mol_type = other DNA

SEQ ID NO: 79869 - DNA, 120 bp, synthetic construct; identical to SEQ ID NO: 49915
  source 1..120: mol_type = other DNA

SEQ ID NO: 79870 - DNA, 120 bp, synthetic construct; identical to SEQ ID NO: 13946
  source 1..120: mol_type = other DNA

SEQ ID NO: 79871 - DNA, 120 bp, synthetic construct; identical to SEQ ID NO: 49917
  source 1..120: mol_type = other DNA

SEQ ID NO: 79872 - DNA, 120 bp, synthetic construct; identical to SEQ ID NO: 49918
  source 1..120: mol_type = other DNA

SEQ ID NO: 79873 - DNA, 120 bp, synthetic construct; identical to SEQ ID NO: 49919
  source 1..120: mol_type = other DNA

SEQ ID NO: 79874 - DNA, 120 bp, synthetic construct; identical to SEQ ID NO: 13947
  source 1..120: mol_type = other DNA

SEQ ID NO: 79875 - DNA, 120 bp, synthetic construct; identical to SEQ ID NO: 49921
  source 1..120: mol_type = other DNA

SEQ ID NO: 79876 - DNA, 120 bp, synthetic construct; identical to SEQ ID NO: 49922
  source 1..120: mol_type = other DNA

SEQ ID NO: 79877 - DNA, 120 bp, synthetic construct; identical to SEQ ID NO: 49923
  source 1..120: mol_type = other DNA

SEQ ID NO: 79878 - DNA, 120 bp, synthetic construct; identical to SEQ ID NO: 49924
  source 1..120: mol_type = other DNA

SEQ ID NO: 79879 - DNA, 120 bp, synthetic construct; identical to SEQ ID NO: 13948
  source 1..120: mol_type = other DNA

SEQ ID NO: 79880 - DNA, 120 bp, synthetic construct; identical to SEQ ID NO: 49926
  source 1..120: mol_type = other DNA

SEQ ID NO: 79881 - DNA, 120 bp, synthetic construct; identical to SEQ ID NO: 49927
  source 1..120: mol_type = other DNA

SEQ ID NO: 79882 - DNA, 120 bp, synthetic construct; identical to SEQ ID NO: 13949
  source 1..120: mol_type = other DNA

SEQ ID NO: 79883 - DNA, 120 bp, synthetic construct; identical to SEQ ID NO: 49929
  source 1..120: mol_type = other DNA

SEQ ID NO: 79884 - DNA, 120 bp, synthetic construct; identical to SEQ ID NO: 49930
  source 1..120: mol_type = other DNA

SEQ ID NO: 79885 - DNA, 120 bp, synthetic construct; identical to SEQ ID NO: 49931
  source 1..120: mol_type = other DNA

SEQ ID NO: 79886 - DNA, 120 bp, synthetic construct; identical to SEQ ID NO: 49932
  source 1..120: mol_type = other DNA

SEQ ID NO: 79887 - DNA, 120 bp, synthetic construct; identical to SEQ ID NO: 13950
  source 1..120: mol_type = other DNA

SEQ ID NO: 79888 - DNA, 120 bp, synthetic construct; identical to SEQ ID NO: 49934
  source 1..120: mol_type = other DNA

SEQ ID NO: 79889 - DNA, 120 bp, synthetic construct; identical to SEQ ID NO: 49935
  source 1..120: mol_type = other DNA

SEQ ID NO: 79890 - DNA, 120 bp, synthetic construct; identical to SEQ ID NO: 49936
  source 1..120: mol_type = other DNA

SEQ ID NO: 79891 - DNA, 120 bp, synthetic construct; identical to SEQ ID NO: 13951
  source 1..120: mol_type = other DNA

SEQ ID NO: 79892 - DNA, 120 bp, synthetic construct; identical to SEQ ID NO: 49938
  source 1..120: mol_type = other DNA

SEQ ID NO: 79893 - DNA, 120 bp, synthetic construct; identical to SEQ ID NO: 49939
  source 1..120: mol_type = other DNA

SEQ ID NO: 79894 - DNA, 120 bp, synthetic construct; identical to SEQ ID NO: 13952
  source 1..120: mol_type = other DNA

SEQ ID NO: 79895 - DNA, 120 bp, synthetic construct; identical to SEQ ID NO: 49941
  source 1..120: mol_type = other DNA

SEQ ID NO: 79896 - DNA, 120 bp, synthetic construct; identical to SEQ ID NO: 49942
  source 1..120: mol_type = other DNA

SEQ ID NO: 79897 - DNA, 120 bp, synthetic construct; identical to SEQ ID NO: 49943
  source 1..120: mol_type = other DNA

SEQ ID NO: 79898 - DNA, 120 bp, synthetic construct; identical to SEQ ID NO: 13953
  source 1..120: mol_type = other DNA

SEQ ID NO: 79899 - DNA, 120 bp, synthetic construct; identical to SEQ ID NO: 49945
  source 1..120: mol_type = other DNA

SEQ ID NO: 79900 - DNA, 120 bp, synthetic construct; identical to SEQ ID NO: 49946
  source 1..120: mol_type = other DNA

SEQ ID NO: 79901 - DNA, 120 bp, synthetic construct; identical to SEQ ID NO: 49947
  source 1..120: mol_type = other DNA

SEQ ID NO: 79902 - DNA, 120 bp, synthetic construct; identical to SEQ ID NO: 13954
  source 1..120: mol_type = other DNA

SEQ ID NO: 79903 - DNA, 120 bp, synthetic construct; identical to SEQ ID NO: 49949
  source 1..120: mol_type = other DNA

SEQ ID NO: 79904 - DNA, 120 bp, synthetic construct; identical to SEQ ID NO: 49950
  source 1..120: mol_type = other DNA

SEQ ID NO: 79905 - DNA, 120 bp, synthetic construct; identical to SEQ ID NO: 49951
  source 1..120: mol_type = other DNA

SEQ ID NO: 79906 - DNA, 120 bp, synthetic construct; identical to SEQ ID NO: 13955
  source 1..120: mol_type = other DNA

SEQ ID NO: 79907 - DNA, 120 bp, synthetic construct; identical to SEQ ID NO: 49953
  source 1..120: mol_type = other DNA

SEQ ID NO: 79908 - DNA, 120 bp, synthetic construct; identical to SEQ ID NO: 49954
  source 1..120: mol_type = other DNA

SEQ ID NO: 79909 - DNA, 120 bp, synthetic construct; identical to SEQ ID NO: 49955
  source 1..120: mol_type = other DNA

SEQ ID NO: 79910 - DNA, 120 bp, synthetic construct; identical to SEQ ID NO: 49956
  source 1..120: mol_type = other DNA

SEQ ID NO: 79911 - DNA, 120 bp, synthetic construct; identical to SEQ ID NO: 13956
  source 1..120: mol_type = other DNA

SEQ ID NO: 79912 - DNA, 120 bp, synthetic construct; identical to SEQ ID NO: 49958
  source 1..120: mol_type = other DNA

SEQ ID NO: 79913 - DNA, 120 bp, synthetic construct; identical to SEQ ID NO: 49959
  source 1..120: mol_type = other DNA

SEQ ID NO: 79914 - DNA, 120 bp, synthetic construct; identical to SEQ ID NO: 49960
  source 1..120: mol_type = other DNA

SEQ ID NO: 79915 - DNA, 120 bp, synthetic construct; identical to SEQ ID NO: 13957
  source 1..120: mol_type = other DNA

SEQ ID NO: 79916 - DNA, 120 bp, synthetic construct; identical to SEQ ID NO: 49962
  source 1..120: mol_type = other DNA

SEQ ID NO: 79917 - DNA, 120 bp, synthetic construct; identical to SEQ ID NO: 49963
  source 1..120: mol_type = other DNA

SEQ ID NO: 79918 - DNA, 120 bp, synthetic construct; identical to SEQ ID NO: 49964
  source 1..120: mol_type = other DNA

SEQ ID NO: 79919 - DNA, 120 bp, synthetic construct; identical to SEQ ID NO: 13958
  source 1..120: mol_type = other DNA

SEQ ID NO: 79920 - DNA, 120 bp, synthetic construct; identical to SEQ ID NO: 49966
  source 1..120: mol_type = other DNA

SEQ ID NO: 79921 - DNA, 120 bp, synthetic construct; identical to SEQ ID NO: 49967
  source 1..120: mol_type = other DNA

SEQ ID NO: 79922 - DNA, 120 bp, synthetic construct; identical to SEQ ID NO: 13959
  source 1..120: mol_type = other DNA

SEQ ID NO: 79923 - DNA, 120 bp, synthetic construct; identical to SEQ ID NO: 49969
  source 1..120: mol_type = other DNA

SEQ ID NO: 79924 - DNA, 120 bp, synthetic construct; identical to SEQ ID NO: 49970
  source 1..120: mol_type = other DNA

SEQ ID NO: 79925 - DNA, 120 bp, synthetic construct; identical to SEQ ID NO: 49971
  source 1..120: mol_type = other DNA

SEQ ID NO: 79926 - DNA, 120 bp, synthetic construct; identical to SEQ ID NO: 49972
  source 1..120: mol_type = other DNA

SEQ ID NO: 79927 - DNA, 120 bp, synthetic construct; identical to SEQ ID NO: 13960
  source 1..120: mol_type = other DNA

SEQ ID NO: 79928 - DNA, 120 bp, synthetic construct; identical to SEQ ID NO: 49974
  source 1..120: mol_type = other DNA

SEQ ID NO: 79929 - DNA, 120 bp, synthetic construct; identical to SEQ ID NO: 49975
  source 1..120: mol_type = other DNA

SEQ ID NO: 79930 - DNA, 120 bp, synthetic construct; identical to SEQ ID NO: 13961
  source 1..120: mol_type = other DNA

SEQ ID NO: 79931 - DNA, 120 bp, synthetic construct; identical to SEQ ID NO: 49977
  source 1..120: mol_type = other DNA

SEQ ID NO: 79932 - DNA, 120 bp, synthetic construct; identical to SEQ ID NO: 49978
  source 1..120: mol_type = other DNA

SEQ ID NO: 79933 - DNA, 120 bp, synthetic construct; identical to SEQ ID NO: 49979
  source 1..120: mol_type = other DNA

SEQ ID NO: 79934 - DNA, 120 bp, synthetic construct; identical to SEQ ID NO: 13962
  source 1..120: mol_type = other DNA

SEQ ID NO: 79935 - DNA, 120 bp, synthetic construct; identical to SEQ ID NO: 49981
  source 1..120: mol_type = other DNA

SEQ ID NO: 79936 - DNA, 120 bp, synthetic construct; identical to SEQ ID NO: 49982
  source 1..120: mol_type = other DNA

SEQ ID NO: 79937 - DNA, 120 bp, synthetic construct; identical to SEQ ID NO: 49983
  source 1..120: mol_type = other DNA

SEQ ID NO: 79938 - DNA, 120 bp, synthetic construct; identical to SEQ ID NO: 13963
  source 1..120: mol_type = other DNA

SEQ ID NO: 79939 - DNA, 120 bp, synthetic construct; identical to SEQ ID NO: 49985
  source 1..120: mol_type = other DNA

SEQ ID NO: 79940 - DNA, 120 bp, synthetic construct; identical to SEQ ID NO: 49986
  source 1..120: mol_type = other DNA

SEQ ID NO: 79941 - DNA, 120 bp, synthetic construct; identical to SEQ ID NO: 49987
  source 1..120: mol_type = other DNA

SEQ ID NO: 79942 - DNA, 120 bp, synthetic construct; identical to SEQ ID NO: 49988
  source 1..120: mol_type = other DNA

SEQ ID NO: 79943 - DNA, 120 bp, synthetic construct; identical to SEQ ID NO: 49989
  source 1..120: mol_type = other DNA

SEQ ID NO: 79944 - DNA, 120 bp, synthetic construct; identical to SEQ ID NO: 13964
  source 1..120: mol_type = other DNA

SEQ ID NO: 79945 - DNA, 120 bp, synthetic construct; identical to SEQ ID NO: 49991
  source 1..120: mol_type = other DNA

SEQ ID NO: 79946 - DNA, 120 bp, synthetic construct; identical to SEQ ID NO: 49992
  source 1..120: mol_type = other DNA

SEQ ID NO: 79947 - DNA, 120 bp, synthetic construct; identical to SEQ ID NO: 49993
  source 1..120: mol_type = other DNA

SEQ ID NO: 79948 - DNA, 120 bp, synthetic construct; identical to SEQ ID NO: 13965
  source 1..120: mol_type = other DNA

SEQ ID NO: 79949 - DNA, 120 bp, synthetic construct; identical to SEQ ID NO: 49995
  source 1..120: mol_type = other DNA

SEQ ID NO: 79950 - DNA, 120 bp, synthetic construct; identical to SEQ ID NO: 49996
  source 1..120: mol_type = other DNA

SEQ ID NO: 79951 - DNA, 120 bp, synthetic construct; identical to SEQ ID NO: 13966
  source 1..120: mol_type = other DNA

SEQ ID NO: 79952 - DNA, 120 bp, synthetic construct; identical to SEQ ID NO: 49998
  source 1..120: mol_type = other DNA

SEQ ID NO: 79953 - DNA, 120 bp, synthetic construct; identical to SEQ ID NO: 49999
  source 1..120: mol_type = other DNA

SEQ ID NO: 79954 - DNA, 120 bp, synthetic construct; identical to SEQ ID NO: 50000
  source 1..120: mol_type = other DNA

SEQ ID NO: 79955 - DNA, 120 bp, synthetic construct; identical to SEQ ID NO: 13967
  source 1..120: mol_type = other DNA

SEQ ID NO: 79956 - DNA, 120 bp, synthetic construct; identical to SEQ ID NO: 50002
  source 1..120: mol_type = other DNA

SEQ ID NO: 79957 - DNA, 120 bp, synthetic construct; identical to SEQ ID NO: 50003
  source 1..120: mol_type = other DNA

SEQ ID NO: 79958 - DNA, 120 bp, synthetic construct; identical to SEQ ID NO: 50004
  source 1..120: mol_type = other DNA

SEQ ID NO: 79959 - DNA, 120 bp, synthetic construct; identical to SEQ ID NO: 50005
  source 1..120: mol_type = other DNA

SEQ ID NO: 79960 - DNA, 120 bp, synthetic construct; identical to SEQ ID NO: 13968
  source 1..120: mol_type = other DNA

SEQ ID NO: 79961 - DNA, 120 bp, synthetic construct; identical to SEQ ID NO: 50007
  source 1..120: mol_type = other DNA

SEQ ID NO: 79962 - DNA, 120 bp, synthetic construct; identical to SEQ ID NO: 50008
  source 1..120: mol_type = other DNA

SEQ ID NO: 79963 - DNA, 120 bp, synthetic construct; identical to SEQ ID NO: 13969
  source 1..120: mol_type = other DNA

SEQ ID NO: 79964 - DNA, 120 bp, synthetic construct; identical to SEQ ID NO: 50010
  source 1..120: mol_type = other DNA

SEQ ID NO: 79965 - DNA, 120 bp, synthetic construct; identical to SEQ ID NO: 50011
  source 1..120: mol_type = other DNA

SEQ ID NO: 79966 - DNA, 120 bp, synthetic construct; identical to SEQ ID NO: 50012
  source 1..120: mol_type = other DNA

SEQ ID NO: 79967 - DNA, 120 bp, synthetic construct; identical to SEQ ID NO: 50013
  source 1..120: mol_type = other DNA

SEQ ID NO: 79968 - DNA, 120 bp, synthetic construct; identical to SEQ ID NO: 13970
  source 1..120: mol_type = other DNA

SEQ ID NO: 79969 - DNA, 120 bp, synthetic construct; identical to SEQ ID NO: 50015
  source 1..120: mol_type = other DNA

SEQ ID NO: 79970 - DNA, 120 bp, synthetic construct; identical to SEQ ID NO: 50016
  source 1..120: mol_type = other DNA

SEQ ID NO: 79971 - DNA, 120 bp, synthetic construct; identical to SEQ ID NO: 50017
  source 1..120: mol_type = other DNA

SEQ ID NO: 79972 - DNA, 120 bp, synthetic construct; identical to SEQ ID NO: 50018
  source 1..120: mol_type = other DNA

SEQ ID NO: 79973 - DNA, 120 bp, synthetic construct; identical to SEQ ID NO: 13971
  source 1..120: mol_type = other DNA

SEQ ID NO: 79974 - DNA, 120 bp, synthetic construct; identical to SEQ ID NO: 50020
  source 1..120: mol_type = other DNA

SEQ ID NO: 79975 - DNA, 120 bp, synthetic construct; identical to SEQ ID NO: 50021
  source 1..120: mol_type = other DNA

SEQ ID NO: 79976 - DNA, 120 bp, synthetic construct; identical to SEQ ID NO: 50022
  source 1..120: mol_type = other DNA

SEQ ID NO: 79977 - DNA, 120 bp, synthetic construct; identical to SEQ ID NO: 13972
  source 1..120: mol_type = other DNA

SEQ ID NO: 79978 - DNA, 120 bp, synthetic construct; identical to SEQ ID NO: 50024
  source 1..120: mol_type = other DNA

SEQ ID NO: 79979 - DNA, 120 bp, synthetic construct; identical to SEQ ID NO: 50025
  source 1..120: mol_type = other DNA

SEQ ID NO: 79980 - DNA, 120 bp, synthetic construct; identical to SEQ ID NO: 50026
  source 1..120: mol_type = other DNA

SEQ ID NO: 79981 - DNA, 120 bp, synthetic construct; identical to SEQ ID NO: 13973
  source 1..120: mol_type = other DNA

SEQ ID NO: 79982 - DNA, 120 bp, synthetic construct; identical to SEQ ID NO: 50028
  source 1..120: mol_type = other DNA

SEQ ID NO: 79983 - DNA, 120 bp, synthetic construct; identical to SEQ ID NO: 50029
  source 1..120: mol_type = other DNA

SEQ ID NO: 79984 - DNA, 120 bp, synthetic construct; identical to SEQ ID NO: 50030
  source 1..120: mol_type = other DNA

SEQ ID NO: 79985 - DNA, 120 bp, synthetic construct; identical to SEQ ID NO: 13974
  source 1..120: mol_type = other DNA

SEQ ID NO: 79986 - DNA, 120 bp, synthetic construct; identical to SEQ ID NO: 50032
  source 1..120: mol_type = other DNA

SEQ ID NO: 79987 - DNA, 120 bp, synthetic construct; identical to SEQ ID NO: 50033
  source 1..120: mol_type = other DNA

SEQ ID NO: 79988 - DNA, 120 bp, synthetic construct; identical to SEQ ID NO: 50034
  source 1..120: mol_type = other DNA

SEQ ID NO: 79989 - DNA, 120 bp, synthetic construct; identical to SEQ ID NO: 13975
  source 1..120: mol_type = other DNA

SEQ ID NO: 79990 - DNA, 120 bp, synthetic construct; identical to SEQ ID NO: 50036
  source 1..120: mol_type = other DNA

SEQ ID NO: 79991 - DNA, 120 bp, synthetic construct; identical to SEQ ID NO: 50037
  source 1..120: mol_type = other DNA

SEQ ID NO: 79992 - DNA, 120 bp, synthetic construct; identical to SEQ ID NO: 50038
  source 1..120: mol_type = other DNA

SEQ ID NO: 79993 - DNA, 120 bp, synthetic construct; identical to SEQ ID NO: 13976
  source 1..120: mol_type = other DNA

SEQ ID NO: 79994 - DNA, 120 bp, synthetic construct; identical to SEQ ID NO: 50040
  source 1..120: mol_type = other DNA

SEQ ID NO: 79995 - DNA, 120 bp, synthetic construct; identical to SEQ ID NO: 50041
  source 1..120: mol_type = other DNA

SEQ ID NO: 79996 - DNA, 120 bp, synthetic construct; identical to SEQ ID NO: 50042
  source 1..120: mol_type = other DNA

SEQ ID NO: 79997 - DNA, 120 bp, synthetic construct; identical to SEQ ID NO: 13977
  source 1..120: mol_type = other DNA

SEQ ID NO: 79998 - DNA, 120 bp, synthetic construct; identical to SEQ ID NO: 50044
  source 1..120: mol_type = other DNA

SEQ ID NO: 79999 - DNA, 120 bp, synthetic construct; identical to SEQ ID NO: 50045
  source 1..120: mol_type = other DNA

SEQ ID NO: 80000 - DNA, 120 bp, synthetic construct; identical to SEQ ID NO: 50046
  source 1..120: mol_type = other DNA

SEQ ID NO: 80001 - DNA, 120 bp, synthetic construct; identical to SEQ ID NO: 50047
  source 1..120: mol_type = other DNA

SEQ ID NO: 80002 - DNA, 120 bp, synthetic construct; identical to SEQ ID NO: 13978
  source 1..120: mol_type = other DNA

SEQ ID NO: 80003 - DNA, 120 bp, synthetic construct; identical to SEQ ID NO: 50049
  source 1..120: mol_type = other DNA

SEQ ID NO: 80004 - DNA, 120 bp, synthetic construct; identical to SEQ ID NO: 50050
  source 1..120: mol_type = other DNA

SEQ ID NO: 80005 - DNA, 120 bp, synthetic construct; identical to SEQ ID NO: 50051
  source 1..120: mol_type = other DNA

SEQ ID NO: 80006 - DNA, 120 bp, synthetic construct; identical to SEQ ID NO: 13979
  source 1..120: mol_type = other DNA

SEQ ID NO: 80007 - DNA, 120 bp, synthetic construct; identical to SEQ ID NO: 50053
  source 1..120: mol_type = other DNA

SEQ ID NO: 80008 - DNA, 120 bp, synthetic construct; identical to SEQ ID NO: 50054
  source 1..120: mol_type = other DNA

SEQ ID NO: 80009 - DNA, 120 bp, synthetic construct; identical to SEQ ID NO: 50055
  source 1..120: mol_type = other DNA

SEQ ID NO: 80010 - DNA, 120 bp, synthetic construct; identical to SEQ ID NO: 50056
  source 1..120: mol_type = other DNA

SEQ ID NO: 80011 - DNA, 120 bp, synthetic construct; identical to SEQ ID NO: 13980
  source 1..120: mol_type = other DNA

SEQ ID NO: 80012 - DNA, 120 bp, synthetic construct; identical to SEQ ID NO: 50058
  source 1..120: mol_type = other DNA

SEQ ID NO: 80013 - DNA, 120 bp, synthetic construct; identical to SEQ ID NO: 50059
  source 1..120: mol_type = other DNA

SEQ ID NO: 80014 - DNA, 120 bp, synthetic construct; identical to SEQ ID NO: 13981
  source 1..120: mol_type = other DNA

SEQ ID NO: 80015 - DNA, 120 bp, synthetic construct; identical to SEQ ID NO: 50061
  source 1..120: mol_type = other DNA

SEQ ID NO: 80016 - DNA, 120 bp, synthetic construct; identical to SEQ ID NO: 50062
  source 1..120: mol_type = other DNA

SEQ ID NO: 80017 - DNA, 120 bp, synthetic construct; identical to SEQ ID NO: 50063
  source 1..120: mol_type = other DNA

SEQ ID NO: 80018 - DNA, 120 bp, synthetic construct; identical to SEQ ID NO: 13982
  source 1..120: mol_type = other DNA

SEQ ID NO: 80019 - DNA, 120 bp, synthetic construct; identical to SEQ ID NO: 50065
  source 1..120: mol_type = other DNA

SEQ ID NO: 80020 - DNA, 120 bp, synthetic construct; identical to SEQ ID NO: 50066
  source 1..120: mol_type = other DNA

SEQ ID NO: 80021 - DNA, 120 bp, synthetic construct; identical to SEQ ID NO: 13983
  source 1..120: mol_type = other DNA

SEQ ID NO: 80022 - DNA, 120 bp, synthetic construct; identical to SEQ ID NO: 50068
  source 1..120: mol_type = other DNA

SEQ ID NO: 80023 - DNA, 120 bp, synthetic construct; identical to SEQ ID NO: 50069
  source 1..120: mol_type = other DNA

SEQ ID NO: 80024 - DNA, 120 bp, synthetic construct; identical to SEQ ID NO: 13984
  source 1..120: mol_type = other DNA

SEQ ID NO: 80025 - DNA, 120 bp, synthetic construct; identical to SEQ ID NO: 6508
  source 1..120: mol_type = other DNA

SEQ ID NO: 80026 - DNA, 120 bp, synthetic construct; identical to SEQ ID NO: 50072
  source 1..120: mol_type = other DNA

SEQ ID NO: 80027 - DNA, 120 bp, synthetic construct; identical to SEQ ID NO: 13985
  source 1..120: mol_type = other DNA

SEQ ID NO: 80028 - DNA, 120 bp, synthetic construct; identical to SEQ ID NO: 50074
  source 1..120: mol_type = other DNA

SEQ ID NO: 80029 - DNA, 120 bp, synthetic construct; identical to SEQ ID NO: 50075
  source 1..120: mol_type = other DNA

SEQ ID NO: 80030 - DNA, 120 bp, synthetic construct; identical to SEQ ID NO: 50076
  source 1..120: mol_type = other DNA

SEQ ID NO: 80031 - DNA, 120 bp, synthetic construct; identical to SEQ ID NO: 13986
  source 1..120: mol_type = other DNA

SEQ ID NO: 80032 - DNA, 120 bp, synthetic construct; identical to SEQ ID NO: 50078
  source 1..120: mol_type = other DNA

SEQ ID NO: 80033 - DNA, 120 bp, synthetic construct; identical to SEQ ID NO: 50079
  source 1..120: mol_type = other DNA

SEQ ID NO: 80034 - DNA, 120 bp, synthetic construct; identical to SEQ ID NO: 13987
  source 1..120: mol_type = other DNA

SEQ ID NO: 80035 - DNA, 120 bp, synthetic construct; identical to SEQ ID NO: 50081
  source 1..120: mol_type = other DNA

SEQ ID NO: 80036 - DNA, 120 bp, synthetic construct; identical to SEQ ID NO: 50082
  source 1..120: mol_type = other DNA

SEQ ID NO: 80037 - DNA, 120 bp, synthetic construct; identical to SEQ ID NO: 50083
  source 1..120: mol_type = other DNA

SEQ ID NO: 80038 - DNA, 120 bp, synthetic construct; identical to SEQ ID NO: 13988
  source 1..120: mol_type = other DNA

SEQ ID NO: 80039 - DNA, 120 bp, synthetic construct; identical to SEQ ID NO: 50085
  source 1..120: mol_type = other DNA

SEQ ID NO: 80040 - DNA, 120 bp, synthetic construct; identical to SEQ ID NO: 50086
  source 1..120: mol_type = other DNA

SEQ ID NO: 80041 - DNA, 120 bp, synthetic construct; identical to SEQ ID NO: 50087
  source 1..120: mol_type = other DNA

SEQ ID NO: 80042 - DNA, 120 bp, synthetic construct; identical to SEQ ID NO: 13989
  source 1..120: mol_type = other DNA

SEQ ID NO: 80043 - DNA, 120 bp, synthetic construct; identical to SEQ ID NO: 50089
  source 1..120: mol_type = other DNA

SEQ ID NO: 80044 - DNA, 120 bp, synthetic construct; identical to SEQ ID NO: 50090
  source 1..120: mol_type = other DNA

SEQ ID NO: 80045 - DNA, 120 bp, synthetic construct; identical to SEQ ID NO: 50091
  source 1..120: mol_type = other DNA

SEQ ID NO: 80046 - DNA, 120 bp, synthetic construct; identical to SEQ ID NO: 50092
  source 1..120: mol_type = other DNA

SEQ ID NO: 80047 - DNA, 120 bp, synthetic construct; identical to SEQ ID NO: 13990
  source 1..120: mol_type = other DNA

SEQ ID NO: 80048 - DNA, 120 bp, synthetic construct; identical to SEQ ID NO: 50094
  source 1..120: mol_type = other DNA

SEQ ID NO: 80049 - DNA, 120 bp, synthetic construct; identical to SEQ ID NO: 50095
  source 1..120: mol_type = other DNA

SEQ ID NO: 80050 - DNA, 120 bp, synthetic construct; identical to SEQ ID NO: 50096
  source 1..120: mol_type = other DNA

SEQ ID NO: 80051 - DNA, 120 bp, synthetic construct; identical to SEQ ID NO: 13991
  source 1..120: mol_type = other DNA

SEQ ID NO: 80052 - DNA, 120 bp, synthetic construct; identical to SEQ ID NO: 50098
  source 1..120: mol_type = other DNA

SEQ ID NO: 80053 - DNA, 120 bp, synthetic construct; identical to SEQ ID NO: 50099
  source 1..120: mol_type = other DNA

SEQ ID NO: 80054 - DNA, 120 bp, synthetic construct; identical to SEQ ID NO: 50100
  source 1..120: mol_type = other DNA

SEQ ID NO: 80055 - DNA, 120 bp, synthetic construct; identical to SEQ ID NO: 13992
  source 1..120: mol_type = other DNA

SEQ ID NO: 80056 - DNA, 120 bp, synthetic construct; identical to SEQ ID NO: 50102
  source 1..120: mol_type = other DNA

SEQ ID NO: 80057 - DNA, 120 bp, synthetic construct; identical to SEQ ID NO: 50103
  source 1..120: mol_type = other DNA

SEQ ID NO: 80058 - DNA, 120 bp, synthetic construct; identical to SEQ ID NO: 50104
  source 1..120: mol_type = other DNA

SEQ ID NO: 80059 - DNA, 120 bp, synthetic construct; identical to SEQ ID NO: 13993
  source 1..120: mol_type = other DNA

SEQ ID NO: 80060 - DNA, 120 bp, synthetic construct; identical to SEQ ID NO: 50106
  source 1..120: mol_type = other DNA

SEQ ID NO: 80061 - DNA, 120 bp, synthetic construct; identical to SEQ ID NO: 50107
  source 1..120: mol_type = other DNA

SEQ ID NO: 80062 - DNA, 120 bp, synthetic construct; identical to SEQ ID NO: 13994
  source 1..120: mol_type = other DNA

SEQ ID NO: 80063 - DNA, 120 bp, synthetic construct; identical to SEQ ID NO: 50109
  source 1..120: mol_type = other DNA

SEQ ID NO: 80064 - DNA, 120 bp, synthetic construct; identical to SEQ ID NO: 50110
  source 1..120: mol_type = other DNA

SEQ ID NO: 80065 - DNA, 120 bp, synthetic construct; identical to SEQ ID NO: 50111
  source 1..120: mol_type = other DNA

SEQ ID NO: 80066 - DNA, 120 bp, synthetic construct; identical to SEQ ID NO: 50112
  source 1..120: mol_type = other DNA

SEQ ID NO: 80067 - DNA, 120 bp, synthetic construct; identical to SEQ ID NO: 13995
  source 1..120: mol_type = other DNA

SEQ ID NO: 80068 - DNA, 120 bp, synthetic construct; identical to SEQ ID NO: 50114
  source 1..120: mol_type = other DNA

SEQ ID NO: 80069 - DNA, 120 bp, synthetic construct; identical to SEQ ID NO: 50115
  source 1..120: mol_type = other DNA

SEQ ID NO: 80070 - DNA, 120 bp, synthetic construct; identical to SEQ ID NO: 13996
  source 1..120: mol_type = other DNA

SEQ ID NO: 80071 - DNA, 120 bp, synthetic construct; identical to SEQ ID NO: 50117
  source 1..120: mol_type = other DNA

SEQ ID NO: 80072 - DNA, 120 bp, synthetic construct; identical to SEQ ID NO: 50118
  source 1..120: mol_type = other DNA

SEQ ID NO: 80073 - DNA, 120 bp, synthetic construct; identical to SEQ ID NO: 50119
  source 1..120: mol_type = other DNA

SEQ ID NO: 80074 - DNA, 120 bp, synthetic construct; identical to SEQ ID NO: 13997
  source 1..120: mol_type = other DNA

SEQ ID NO: 80075 - DNA, 120 bp, synthetic construct; identical to SEQ ID NO: 50121
  source 1..120: mol_type = other DNA

SEQ ID NO: 80076 - DNA, 120 bp, synthetic construct; identical to SEQ ID NO: 50122
  source 1..120: mol_type = other DNA

SEQ ID NO: 80077 - DNA, 120 bp, synthetic construct; identical to SEQ ID NO: 50123
  source 1..120: mol_type = other DNA

SEQ ID NO: 80078 - DNA, 120 bp, synthetic construct; identical to SEQ ID NO: 13998
  source 1..120: mol_type = other DNA

SEQ ID NO: 80079 - DNA, 120 bp, synthetic construct; identical to SEQ ID NO: 50125
  source 1..120: mol_type = other DNA

SEQ ID NO: 80080 - DNA, 120 bp, synthetic construct; identical to SEQ ID NO: 50126
  source 1..120: mol_type = other DNA

SEQ ID NO: 80081 - DNA, 120 bp, synthetic construct; identical to SEQ ID NO: 50127
  source 1..120: mol_type = other DNA

SEQ ID NO: 80082 - DNA, 120 bp, synthetic construct; identical to SEQ ID NO: 50128
  source 1..120: mol_type = other DNA

SEQ ID NO: 80083 - DNA, 120 bp, synthetic construct; identical to SEQ ID NO: 13999
  source 1..120: mol_type = other DNA

SEQ ID NO: 80084 - DNA, 120 bp, synthetic construct; identical to SEQ ID NO: 50130
  source 1..120: mol_type = other DNA

SEQ ID NO: 80085 - DNA, 120 bp, synthetic construct; identical to SEQ ID NO: 50131
  source 1..120: mol_type = other DNA

SEQ ID NO: 80086 - DNA, 120 bp, synthetic construct; identical to SEQ ID NO: 50132
  source 1..120: mol_type = other DNA

SEQ ID NO: 80087 - DNA, 120 bp, synthetic construct; identical to SEQ ID NO: 14000
  source 1..120: mol_type = other DNA

SEQ ID NO: 80088 - DNA, 120 bp, synthetic construct; identical to SEQ ID NO: 50134
  source 1..120: mol_type = other DNA

SEQ ID NO: 80089 - DNA, 120 bp, synthetic construct; identical to SEQ ID NO: 50135
  source 1..120: mol_type = other DNA

SEQ ID NO: 80090 - DNA, 120 bp, synthetic construct; identical to SEQ ID NO: 50136
  source 1..120: mol_type = other DNA

SEQ ID NO: 80091 - DNA, 120 bp, synthetic construct; identical to SEQ ID NO: 14001
  source 1..120: mol_type = other DNA

SEQ ID NO: 80092 - DNA, 120 bp, synthetic construct; identical to SEQ ID NO: 50138
  source 1..120: mol_type = other DNA

SEQ ID NO: 80093 - DNA, 120 bp, synthetic construct; identical to SEQ ID NO: 50139
  source 1..120: mol_type = other DNA

SEQ ID NO: 80094 - DNA, 120 bp, synthetic construct; identical to SEQ ID NO: 14002
  source 1..120: mol_type = other DNA

SEQ ID NO: 80095 - DNA, 120 bp, synthetic construct; identical to SEQ ID NO: 50141
  source 1..120: mol_type = other DNA

SEQ ID NO: 80096 - DNA, 120 bp, synthetic construct; identical to SEQ ID NO: 50142
  source 1..120: mol_type = other DNA

SEQ ID NO: 80097 - DNA, 120 bp, synthetic construct; identical to SEQ ID NO: 50143
  source 1..120: mol_type = other DNA

SEQ ID NO: 80098 - DNA, 120 bp, synthetic construct; identical to SEQ ID NO: 14003
  source 1..120: mol_type = other DNA

SEQ ID NO: 80099 - DNA, 120 bp, synthetic construct; identical to SEQ ID NO: 50145
  source 1..120: mol_type = other DNA

SEQ ID NO: 80100 - DNA, 120 bp, synthetic construct; identical to SEQ ID NO: 50146
  source 1..120: mol_type = other DNA

SEQ ID NO: 80101 - DNA, 120 bp, synthetic construct; identical to SEQ ID NO: 50147
  source 1..120: mol_type = other DNA

SEQ ID NO: 80102 - DNA, 120 bp, synthetic construct; identical to SEQ ID NO: 14004
  source 1..120: mol_type = other DNA

SEQ ID NO: 80103 - DNA, 120 bp, synthetic construct; identical to SEQ ID NO: 50149
  source 1..120: mol_type = other DNA

SEQ ID NO: 80104 - DNA, 120 bp, synthetic construct; identical to SEQ ID NO: 50150
  source 1..120: mol_type = other DNA

SEQ ID NO: 80105 - DNA, 120 bp, synthetic construct; identical to SEQ ID NO: 50151
  source 1..120: mol_type = other DNA

SEQ ID NO: 80106 - DNA, 120 bp, synthetic construct; identical to SEQ ID NO: 14005
  source 1..120: mol_type = other DNA

SEQ ID NO: 80107 - DNA, 120 bp, synthetic construct; identical to SEQ ID NO: 50153
  source 1..120: mol_type = other DNA

SEQ ID NO: 80108 - DNA, 120 bp, synthetic construct; identical to SEQ ID NO: 50154
  source 1..120: mol_type = other DNA

SEQ ID NO: 80109 - DNA, 120 bp, synthetic construct; identical to SEQ ID NO: 50155
  source 1..120: mol_type = other DNA

SEQ ID NO: 80110 - DNA, 120 bp, synthetic construct; identical to SEQ ID NO: 14006
  source 1..120: mol_type = other DNA

SEQ ID NO: 80111 - DNA, 120 bp, synthetic construct; identical to SEQ ID NO: 50157
  source 1..120: mol_type = other DNA

SEQ ID NO: 80112 - DNA, 120 bp, synthetic construct; identical to SEQ ID NO: 50158
  source 1..120: mol_type = other DNA

SEQ ID NO: 80113 - DNA, 120 bp, synthetic construct; identical to SEQ ID NO: 50159
  source 1..120: mol_type = other DNA

SEQ ID NO: 80114 - DNA, 120 bp, synthetic construct; identical to SEQ ID NO: 14007
  source 1..120: mol_type = other DNA

SEQ ID NO: 80115 - DNA, 120 bp, synthetic construct; identical to SEQ ID NO: 50161
  source 1..120: mol_type = other DNA

SEQ ID NO: 80116 - DNA, 120 bp, synthetic construct; identical to SEQ ID NO: 50162
  source 1..120: mol_type = other DNA

SEQ ID NO: 80117 - DNA, 120 bp, synthetic construct; identical to SEQ ID NO: 50163
  source 1..120: mol_type = other DNA

SEQ ID NO: 80118 - DNA, 120 bp, synthetic construct; identical to SEQ ID NO: 50164
  source 1..120: mol_type = other DNA

SEQ ID NO: 80119 - DNA, 120 bp, synthetic construct; identical to SEQ ID NO: 14008
  source 1..120: mol_type = other DNA

SEQ ID NO: 80120 - DNA, 120 bp, synthetic construct; identical to SEQ ID NO: 50166
  source 1..120: mol_type = other DNA

SEQ ID NO: 80121 - DNA, 120 bp, synthetic construct; identical to SEQ ID NO: 50167
  source 1..120: mol_type = other DNA

SEQ ID NO: 80122 - DNA, 120 bp, synthetic construct; identical to SEQ ID NO: 50168
  source 1..120: mol_type = other DNA

SEQ ID NO: 80123 - DNA, 120 bp, synthetic construct; identical to SEQ ID NO: 50169
  source 1..120: mol_type = other DNA

SEQ ID NO: 80124 - DNA, 120 bp, synthetic construct; identical to SEQ ID NO: 14009
  source 1..120: mol_type = other DNA

SEQ ID NO: 80125 - DNA, 120 bp, synthetic construct; identical to SEQ ID NO: 50171
  source 1..120: mol_type = other DNA

SEQ ID NO: 80126 - DNA, 120 bp, synthetic construct; identical to SEQ ID NO: 50172
  source 1..120: mol_type = other DNA

SEQ ID NO: 80127 - DNA, 120 bp, synthetic construct; identical to SEQ ID NO: 14010
  source 1..120: mol_type = other DNA

SEQ ID NO: 80128 - DNA, 120 bp, synthetic construct; identical to SEQ ID NO: 50174
  source 1..120: mol_type = other DNA

SEQ ID NO: 80129 - DNA, 120 bp, synthetic construct; identical to SEQ ID NO: 50175
  source 1..120: mol_type = other DNA

SEQ ID NO: 80130 - DNA, 120 bp, synthetic construct; identical to SEQ ID NO: 50176
  source 1..120: mol_type = other DNA

SEQ ID NO: 80131 - DNA, 120 bp, synthetic construct; identical to SEQ ID NO: 14011
  source 1..120: mol_type = other DNA

SEQ ID NO: 80132 - DNA, 120 bp, synthetic construct; identical to SEQ ID NO: 50178
  source 1..120: mol_type = other DNA

SEQ ID NO: 80133 - DNA, 120 bp, synthetic construct; identical to SEQ ID NO: 50179
  source 1..120: mol_type = other DNA

SEQ ID NO: 80134 - DNA, 120 bp, synthetic construct; identical to SEQ ID NO: 50180
  source 1..120: mol_type = other DNA

SEQ ID NO: 80135 - DNA, 120 bp, synthetic construct; identical to SEQ ID NO: 14012
  source 1..120: mol_type = other DNA

SEQ ID NO: 80136 - DNA, 120 bp, synthetic construct; identical to SEQ ID NO: 50182
  source 1..120: mol_type = other DNA

SEQ ID NO: 80137 - DNA, 120 bp, synthetic construct; identical to SEQ ID NO: 50183
  source 1..120: mol_type = other DNA

SEQ ID NO: 80138 - DNA, 120 bp, synthetic construct; identical to SEQ ID NO: 50184
  source 1..120: mol_type = other DNA

SEQ ID NO: 80139 - DNA, 120 bp, synthetic construct; identical to SEQ ID NO: 50185
  source 1..120: mol_type = other DNA

SEQ ID NO: 80140 - DNA, 120 bp, synthetic construct; identical to SEQ ID NO: 14013
  source 1..120: mol_type = other DNA

SEQ ID NO: 80141 - DNA, 120 bp, synthetic construct; identical to SEQ ID NO: 50187
  source 1..120: mol_type = other DNA

SEQ ID NO: 80142 - DNA, 120 bp, synthetic construct; identical to SEQ ID NO: 50188
  source 1..120: mol_type = other DNA

SEQ ID NO: 80143 - DNA, 120 bp, synthetic construct; identical to SEQ ID NO: 50189
  source 1..120: mol_type = other DNA

SEQ ID NO: 80144 - DNA, 120 bp, synthetic construct; identical to SEQ ID NO: 14014
  source 1..120: mol_type = other DNA

SEQ ID NO: 80145 - DNA, 120 bp, synthetic construct; identical to SEQ ID NO: 50191
  source 1..120: mol_type = other DNA

SEQ ID NO: 80146 - DNA, 120 bp, synthetic construct; identical to SEQ ID NO: 50192
  source 1..120: mol_type = other DNA

SEQ ID NO: 80147 - DNA, 120 bp, synthetic construct; identical to SEQ ID NO: 50193
  source 1..120: mol_type = other DNA

SEQ ID NO: 80148 - DNA, 120 bp, synthetic construct; identical to SEQ ID NO: 50194
  source 1..120: mol_type = other DNA

SEQ ID NO: 80149 - DNA, 120 bp, synthetic construct; identical to SEQ ID NO: 14015
  source 1..120: mol_type = other DNA

SEQ ID NO: 80150 - DNA, 120 bp, synthetic construct; identical to SEQ ID NO: 50196
  source 1..120: mol_type = other DNA

SEQ ID NO: 80151 - DNA, 120 bp, synthetic construct; identical to SEQ ID NO: 50197
  source 1..120: mol_type = other DNA

SEQ ID NO: 80152 - DNA, 120 bp, synthetic construct; identical to SEQ ID NO: 50198
  source 1..120: mol_type = other DNA

SEQ ID NO: 80153 - DNA, 120 bp, synthetic construct; identical to SEQ ID NO: 14016
  source 1..120: mol_type = other DNA

SEQ ID NO: 80154 - DNA, 120 bp, synthetic construct; identical to SEQ ID NO: 50200
  source 1..120: mol_type = other DNA

SEQ ID NO: 80155 - DNA, 120 bp, synthetic construct; identical to SEQ ID NO: 50201
  source 1..120: mol_type = other DNA

SEQ ID NO: 80156 - DNA, 120 bp, synthetic construct; identical to SEQ ID NO: 14017
  source 1..120: mol_type = other DNA

SEQ ID NO: 80157 - DNA, 120 bp, synthetic construct; identical to SEQ ID NO: 50203
  source 1..120: mol_type = other DNA

SEQ ID NO: 80158 - DNA, 120 bp, synthetic construct; identical to SEQ ID NO: 50204
  source 1..120: mol_type = other DNA

SEQ ID NO: 80159 - DNA, 120 bp, synthetic construct; identical to SEQ ID NO: 50205
  source 1..120: mol_type = other DNA

SEQ ID NO: 80160 - DNA, 120 bp, synthetic construct; identical to SEQ ID NO: 14018
  source 1..120: mol_type = other DNA

SEQ ID NO: 80161 - DNA, 120 bp, synthetic construct; identical to SEQ ID NO: 50207
  source 1..120: mol_type = other DNA

SEQ ID NO: 80162 - DNA, 120 bp, synthetic construct; identical to SEQ ID NO: 50208
  source 1..120: mol_type = other DNA

SEQ ID NO: 80163 - DNA, 120 bp, synthetic construct; identical to SEQ ID NO: 50209
  source 1..120: mol_type = other DNA

SEQ ID NO: 80164 - DNA, 120 bp, synthetic construct; identical to SEQ ID NO: 14019
  source 1..120: mol_type = other DNA

SEQ ID NO: 80165 - DNA, 120 bp, synthetic construct; identical to SEQ ID NO: 50211
  source 1..120: mol_type = other DNA

SEQ ID NO: 80166 - DNA, 120 bp, synthetic construct; identical to SEQ ID NO: 50212
  source 1..120: mol_type = other DNA

SEQ ID NO: 80167 - DNA, 120 bp, synthetic construct; identical to SEQ ID NO: 50213
  source 1..120: mol_type = other DNA

SEQ ID NO: 80168 - DNA, 120 bp, synthetic construct; identical to SEQ ID NO: 14020
  source 1..120: mol_type = other DNA

SEQ ID NO: 80169 - DNA, 120 bp, synthetic construct; identical to SEQ ID NO: 50215
  source 1..120: mol_type = other DNA

SEQ ID NO: 80170 - DNA, 120 bp, synthetic construct; identical to SEQ ID NO: 50216
  source 1..120: mol_type = other DNA

SEQ ID NO: 80171 - DNA, 120 bp, synthetic construct; identical to SEQ ID NO: 50217
  source 1..120: mol_type = other DNA

SEQ ID NO: 80172 - DNA, 120 bp, synthetic construct; identical to SEQ ID NO: 14021
  source 1..120: mol_type = other DNA

SEQ ID NO: 80173 - DNA, 120 bp, synthetic construct; identical to SEQ ID NO: 50219
  source 1..120: mol_type = other DNA

SEQ ID NO: 80174 - DNA, 120 bp, synthetic construct; identical to SEQ ID NO: 50220
  source 1..120: mol_type = other DNA

SEQ ID NO: 80175 - DNA, 120 bp, synthetic construct; identical to SEQ ID NO: 50221
  source 1..120: mol_type = other DNA

SEQ ID NO: 80176 - DNA, 120 bp, synthetic construct; identical to SEQ ID NO: 50222
  source 1..120: mol_type = other DNA

SEQ ID NO: 80177 - DNA, 120 bp, synthetic construct; identical to SEQ ID NO: 14022
  source 1..120: mol_type = other DNA

SEQ ID NO: 80178 - DNA, 120 bp, synthetic construct; identical to SEQ ID NO: 50224
  source 1..120: mol_type = other DNA

SEQ ID NO: 80179 - DNA, 120 bp, synthetic construct; identical to SEQ ID NO: 50225
  source 1..120: mol_type = other DNA

SEQ ID NO: 80180 - DNA, 120 bp, synthetic construct; identical to SEQ ID NO: 50226
  source 1..120: mol_type = other DNA

SEQ ID NO: 80181 - DNA, 120 bp, synthetic construct; identical to SEQ ID NO: 14023
  source 1..120: mol_type = other DNA

SEQ ID NO: 80182 - DNA, 120 bp, synthetic construct; identical to SEQ ID NO: 50228
  source 1..120: mol_type = other DNA

SEQ ID NO: 80183 - DNA, 120 bp, synthetic construct; identical to SEQ ID NO: 50229
  source 1..120: mol_type = other DNA

SEQ ID NO: 80184 - DNA, 120 bp, synthetic construct; identical to SEQ ID NO: 14024
  source 1..120: mol_type = other DNA

SEQ ID NO: 80185 - DNA, 120 bp, synthetic construct; identical to SEQ ID NO: 50231
  source 1..120: mol_type = other DNA

SEQ ID NO: 80186 - DNA, 120 bp, synthetic construct; identical to SEQ ID NO: 50232
  source 1..120: mol_type = other DNA

SEQ ID NO: 80187 - DNA, 120 bp, synthetic construct; identical to SEQ ID NO: 50233
  source 1..120: mol_type = other DNA

SEQ ID NO: 80188 - DNA, 120 bp, synthetic construct; identical to SEQ ID NO: 14025
  source 1..120: mol_type = other DNA

SEQ ID NO: 80189 - DNA, 120 bp, synthetic construct; identical to SEQ ID NO: 50235
  source 1..120: mol_type = other DNA

SEQ ID NO: 80190 - DNA, 120 bp, synthetic construct; identical to SEQ ID NO: 50236
  source 1..120: mol_type = other DNA

SEQ ID NO: 80191 - DNA, 120 bp, synthetic construct; identical to SEQ ID NO: 50237
  source 1..120: mol_type = other DNA

SEQ ID NO: 80192 - DNA, 120 bp, synthetic construct; identical to SEQ ID NO: 14026
  source 1..120: mol_type = other DNA

SEQ ID NO: 80193 - DNA, 120 bp, synthetic construct; identical to SEQ ID NO: 50239
  source 1..120: mol_type = other DNA

SEQ ID NO: 80194 - DNA, 120 bp, synthetic construct; identical to SEQ ID NO: 50240
  source 1..120: mol_type = other DNA

SEQ ID NO: 80195 - DNA, 120 bp, synthetic construct; identical to SEQ ID NO: 50241
  source 1..120: mol_type = other DNA

SEQ ID NO: 80196 - DNA, 120 bp, synthetic construct; identical to SEQ ID NO: 14027
  source 1..120: mol_type = other DNA

SEQ ID NO: 80197 - DNA, 120 bp, synthetic construct; identical to SEQ ID NO: 50243
  source 1..120: mol_type = other DNA

SEQ ID NO: 80198 - DNA, 120 bp, synthetic construct; identical to SEQ ID NO: 50244
  source 1..120: mol_type = other DNA

SEQ ID NO: 80199 - DNA, 120 bp, synthetic construct; identical to SEQ ID NO: 50245
  source 1..120: mol_type = other DNA

SEQ ID NO: 80200 - DNA, 120 bp, synthetic construct; identical to SEQ ID NO: 50246
  source 1..120: mol_type = other DNA

SEQ ID NO: 80201 - DNA, 120 bp, synthetic construct; identical to SEQ ID NO: 14028
  source 1..120: mol_type = other DNA

SEQ ID NO: 80202 - DNA, 120 bp, synthetic construct; identical to SEQ ID NO: 50248
  source 1..120: mol_type = other DNA

SEQ ID NO: 80203 - DNA, 120 bp, synthetic construct; identical to SEQ ID NO: 50249
  source 1..120: mol_type = other DNA

SEQ ID NO: 80204 - DNA, 120 bp, synthetic construct; identical to SEQ ID NO: 50250
  source 1..120: mol_type = other DNA

SEQ ID NO: 80205 - DNA, 120 bp, synthetic construct; identical to SEQ ID NO: 50251
  source 1..120: mol_type = other DNA

SEQ ID NO: 80206 - DNA, 120 bp, synthetic construct; identical to SEQ ID NO: 14029
  source 1..120: mol_type = other DNA

SEQ ID NO: 80207 - DNA, 120 bp, synthetic construct; identical to SEQ ID NO: 50253
  source 1..120: mol_type = other DNA

SEQ ID NO: 80208 - DNA, 120 bp, synthetic construct; identical to SEQ ID NO: 50254
  source 1..120: mol_type = other DNA

SEQ ID NO: 80209 - DNA, 120 bp, synthetic construct; identical to SEQ ID NO: 50255
  source 1..120: mol_type = other DNA

SEQ ID NO: 80210 - DNA, 120 bp, synthetic construct; identical to SEQ ID NO: 14030
  source 1..120: mol_type = other DNA

SEQ ID NO: 80211 - DNA, 120 bp, synthetic construct; identical to SEQ ID NO: 50257
  source 1..120: mol_type = other DNA

SEQ ID NO: 80212 - DNA, 120 bp, synthetic construct; identical to SEQ ID NO: 50258
  source 1..120: mol_type = other DNA

SEQ ID NO: 80213 - DNA, 120 bp, synthetic construct; identical to SEQ ID NO: 14031
  source 1..120: mol_type = other DNA

SEQ ID NO: 80214 - DNA, 120 bp, synthetic construct; identical to SEQ ID NO: 50260
  source 1..120: mol_type = other DNA

SEQ ID NO: 80215 - DNA, 120 bp, synthetic construct; identical to SEQ ID NO: 50261
  source 1..120: mol_type = other DNA

SEQ ID NO: 80216 - DNA, 120 bp, synthetic construct; identical to SEQ ID NO: 50262
  source 1..120: mol_type = other DNA

SEQ ID NO: 80217 - DNA, 120 bp, synthetic construct; identical to SEQ ID NO: 14032
  source 1..120: mol_type = other DNA

SEQ ID NO: 80218 - DNA, 120 bp, synthetic construct; identical to SEQ ID NO: 50264
  source 1..120: mol_type = other DNA

SEQ ID NO: 80219 - DNA, 120 bp, synthetic construct; identical to SEQ ID NO: 50265
  source 1..120: mol_type = other DNA

SEQ ID NO: 80220 - DNA, 120 bp, synthetic construct; identical to SEQ ID NO: 50266
  source 1..120: mol_type = other DNA

SEQ ID NO: 80221 - DNA, 120 bp, synthetic construct; identical to SEQ ID NO: 50267
  source 1..120: mol_type = other DNA

SEQ ID NO: 80222 - DNA, 120 bp, synthetic construct; identical to SEQ ID NO: 14033
  source 1..120: mol_type = other DNA

SEQ ID NO: 80223 - DNA, 120 bp, synthetic construct; identical to SEQ ID NO: 50269
  source 1..120: mol_type = other DNA

SEQ ID NO: 80224 - DNA, 120 bp, synthetic construct; identical to SEQ ID NO: 50270
  source 1..120: mol_type = other DNA

SEQ ID NO: 80225 - DNA, 120 bp, synthetic construct; identical to SEQ ID NO: 50271
  source 1..120: mol_type = other DNA

SEQ ID NO: 80226 - DNA, 120 bp, synthetic construct; identical to SEQ ID NO: 14034
  source 1..120: mol_type = other DNA

SEQ ID NO: 80227 - DNA, 120 bp, synthetic construct; identical to SEQ ID NO: 50273
  source 1..120: mol_type = other DNA

SEQ ID NO: 80228 - DNA, 120 bp, synthetic construct; identical to SEQ ID NO: 50274
  source 1..120: mol_type = other DNA

SEQ ID NO: 80229 - DNA, 120 bp, synthetic construct; identical to SEQ ID NO: 14035
  source 1..120: mol_type = other DNA

SEQ ID NO: 80230 - DNA, 120 bp, synthetic construct; identical to SEQ ID NO: 50276
  source 1..120: mol_type = other DNA

SEQ ID NO: 80231 - DNA, 120 bp, synthetic construct; identical to SEQ ID NO: 50277
  source 1..120: mol_type = other DNA

SEQ ID NO: 80232 - DNA, 120 bp, synthetic construct; identical to SEQ ID NO: 50278
  source 1..120: mol_type = other DNA

SEQ ID NO: 80233 - DNA, 120 bp, synthetic construct; identical to SEQ ID NO: 50279
  source 1..120: mol_type = other DNA

SEQ ID NO: 80234 - DNA, 120 bp, synthetic construct; identical to SEQ ID NO: 14036
  source 1..120: mol_type = other DNA

SEQ ID NO: 80235 - DNA, 120 bp, synthetic construct; identical to SEQ ID NO: 50281
  source 1..120: mol_type = other DNA

SEQ ID NO: 80236 - DNA, 120 bp, synthetic construct; identical to SEQ ID NO: 50282
  source 1..120: mol_type = other DNA

SEQ ID NO: 80237 - DNA, 120 bp, synthetic construct; identical to SEQ ID NO: 14037
  source 1..120: mol_type = other DNA

SEQ ID NO: 80238 - DNA, 120 bp, synthetic construct; identical to SEQ ID NO: 50284
  source 1..120: mol_type = other DNA

SEQ ID NO: 80239 - DNA, 120 bp, synthetic construct; identical to SEQ ID NO: 50285
  source 1..120: mol_type = other DNA

SEQ ID NO: 80240 - DNA, 120 bp, synthetic construct; identical to SEQ ID NO: 50286
  source 1..120: mol_type = other DNA

SEQ ID NO: 80241 - DNA, 120 bp, synthetic construct; identical to SEQ ID NO: 14038
  source 1..120: mol_type = other DNA

SEQ ID NO: 80242 - DNA, 120 bp, synthetic construct; identical to SEQ ID NO: 50288
  source 1..120: mol_type = other DNA

SEQ ID NO: 80243 - DNA, 120 bp, synthetic construct; identical to SEQ ID NO: 50289
  source 1..120: mol_type = other DNA

SEQ ID NO: 80244 - DNA, 120 bp, synthetic construct; identical to SEQ ID NO: 50290
  source 1..120: mol_type = other DNA

SEQ ID NO: 80245 - DNA, 120 bp, synthetic construct; identical to SEQ ID NO: 14039
  source 1..120: mol_type = other DNA

SEQ ID NO: 80246 - DNA, 120 bp, synthetic construct; identical to SEQ ID NO: 50292
  source 1..120: mol_type = other DNA

SEQ ID NO: 80247 - DNA, 120 bp, synthetic construct; identical to SEQ ID NO: 50293
  source 1..120: mol_type = other DNA

SEQ ID NO: 80248 - DNA, 120 bp, synthetic construct; identical to SEQ ID NO: 50294
  source 1..120: mol_type = other DNA

SEQ ID NO: 80249 - DNA, 120 bp, synthetic construct; identical to SEQ ID NO: 50295
  source 1..120: mol_type = other DNA

SEQ ID NO: 80250 - DNA, 120 bp, synthetic construct; identical to SEQ ID NO: 14040
  source 1..120: mol_type = other DNA

SEQ ID NO: 80251 - DNA, 120 bp, synthetic construct; identical to SEQ ID NO: 50297
  source 1..120: mol_type = other DNA

SEQ ID NO: 80252 - DNA, 120 bp, synthetic construct; identical to SEQ ID NO: 50298
  source 1..120: mol_type = other DNA

SEQ ID NO: 80253 - DNA, 120 bp, synthetic construct; identical to SEQ ID NO: 50299
  source 1..120: mol_type = other DNA

SEQ ID NO: 80254 - DNA, 120 bp, synthetic construct; identical to SEQ ID NO: 14041
  source 1..120: mol_type = other DNA

SEQ ID NO: 80255 - DNA, 120 bp, synthetic construct; identical to SEQ ID NO: 50301
  source 1..120: mol_type = other DNA

SEQ ID NO: 80256 - DNA, 120 bp, synthetic construct; identical to SEQ ID NO: 50302
  source 1..120: mol_type = other DNA

SEQ ID NO: 80257 - DNA, 120 bp, synthetic construct; identical to SEQ ID NO: 14042
  source 1..120: mol_type = other DNA

SEQ ID NO: 80258 - DNA, 120 bp, synthetic construct; identical to SEQ ID NO: 50304
  source 1..120: mol_type = other DNA

SEQ ID NO: 80259 - DNA, 120 bp, synthetic construct; identical to SEQ ID NO: 50305
  source 1..120: mol_type = other DNA

SEQ ID NO: 80260 - DNA, 120 bp, synthetic construct; identical to SEQ ID NO: 50306
  source 1..120: mol_type = other DNA

SEQ ID NO: 80261 - DNA, 120 bp, synthetic construct; identical to SEQ ID NO: 50307
  source 1..120: mol_type = other DNA

SEQ ID NO: 80262 - DNA, 120 bp, synthetic construct; identical to SEQ ID NO: 14043
  source 1..120: mol_type = other DNA

SEQ ID NO: 80263 - DNA, 120 bp, synthetic construct; identical to SEQ ID NO: 50309
  source 1..120: mol_type = other DNA

SEQ ID NO: 80264 - DNA, 120 bp, synthetic construct; identical to SEQ ID NO: 50310
  source 1..120: mol_type = other DNA

SEQ ID NO: 80265 - DNA, 120 bp, synthetic construct; identical to SEQ ID NO: 14044
  source 1..120: mol_type = other DNA

SEQ ID NO: 80266 - DNA, 120 bp, synthetic construct; identical to SEQ ID NO: 50312
  source 1..120: mol_type = other DNA

SEQ ID NO: 80267 - DNA, 120 bp, synthetic construct; identical to SEQ ID NO: 50313
  source 1..120: mol_type = other DNA

SEQ ID NO: 80268 - DNA, 120 bp, synthetic construct; identical to SEQ ID NO: 50314
  source 1..120: mol_type = other DNA

SEQ ID NO: 80269 - DNA, 120 bp, synthetic construct; identical to SEQ ID NO: 14045
  source 1..120: mol_type = other DNA

SEQ ID NO: 80270 - DNA, 120 bp, synthetic construct; identical to SEQ ID NO: 50316
  source 1..120: mol_type = other DNA

SEQ ID NO: 80271 - DNA, 120 bp, synthetic construct; identical to SEQ ID NO: 50317
  source 1..120: mol_type = other DNA

SEQ ID NO: 80272 - DNA, 120 bp, synthetic construct; identical to SEQ ID NO: 50318
  source 1..120: mol_type = other DNA

SEQ ID NO: 80273 - DNA, 120 bp, synthetic construct; identical to SEQ ID NO: 50319
  source 1..120: mol_type = other DNA

SEQ ID NO: 80274 - DNA, 120 bp, synthetic construct; identical to SEQ ID NO: 14046
  source 1..120: mol_type = other DNA

SEQ ID NO: 80275 - DNA, 120 bp, synthetic construct; identical to SEQ ID NO: 50321
  source 1..120: mol_type = other DNA

SEQ ID NO: 80276 - DNA, 120 bp, synthetic construct; identical to SEQ ID NO: 50322
  source 1..120: mol_type = other DNA

SEQ ID NO: 80277 - DNA, 120 bp, synthetic construct; identical to SEQ ID NO: 50323
  source 1..120: mol_type = other DNA

SEQ ID NO: 80278 - DNA, 120 bp, synthetic construct; identical to SEQ ID NO: 14047
  source 1..120: mol_type = other DNA

SEQ ID NO: 80279 - DNA, 120 bp, synthetic construct; identical to SEQ ID NO: 50325
  source 1..120: mol_type = other DNA

SEQ ID NO: 80280 - DNA, 120 bp, synthetic construct; identical to SEQ ID NO: 50326
  source 1..120: mol_type = other DNA

SEQ ID NO: 80281 - DNA, 120 bp, synthetic construct; identical to SEQ ID NO: 50327
  source 1..120: mol_type = other DNA

SEQ ID NO: 80282 - DNA, 120 bp, synthetic construct; identical to SEQ ID NO: 14048
  source 1..120: mol_type = other DNA

SEQ ID NO: 80283 - DNA, 120 bp, synthetic construct; identical to SEQ ID NO: 50329
  source 1..120: mol_type = other DNA

SEQ ID NO: 80284 - DNA, 120 bp, synthetic construct; identical to SEQ ID NO: 50330
  source 1..120: mol_type = other DNA

SEQ ID NO: 80285 - DNA, 120 bp, synthetic construct; identical to SEQ ID NO: 14049
  source 1..120: mol_type = other DNA

SEQ ID NO: 80286 - DNA, 120 bp, synthetic construct; identical to SEQ ID NO: 50332
  source 1..120: mol_type = other DNA

SEQ ID NO: 80287 - DNA, 120 bp, synthetic construct; identical to SEQ ID NO: 50333
  source 1..120: mol_type = other DNA

SEQ ID NO: 80288 - DNA, 120 bp, synthetic construct; identical to SEQ ID NO: 50334
  source 1..120: mol_type = other DNA

SEQ ID NO: 80289 - DNA, 120 bp, synthetic construct; identical to SEQ ID NO: 14050
  source 1..120: mol_type = other DNA

SEQ ID NO: 80290 - DNA, 120 bp, synthetic construct; identical to SEQ ID NO: 50336
  source 1..120: mol_type = other DNA

SEQ ID NO: 80291 - DNA, 120 bp, synthetic construct; identical to SEQ ID NO: 50337
  source 1..120: mol_type = other DNA

SEQ ID NO: 80292 - DNA, 120 bp, synthetic construct; identical to SEQ ID NO: 50338
  source 1..120: mol_type = other DNA

SEQ ID NO: 80293 - DNA, 120 bp, synthetic construct; identical to SEQ ID NO: 50339
  source 1..120: mol_type = other DNA

SEQ ID NO: 80294 - DNA, 120 bp, synthetic construct; identical to SEQ ID NO: 14051
  source 1..120: mol_type = other DNA

SEQ ID NO: 80295 - DNA, 120 bp, synthetic construct; identical to SEQ ID NO: 50341
  source 1..120: mol_type = other DNA

SEQ ID NO: 80296 - DNA, 120 bp, synthetic construct; identical to SEQ ID NO: 50342
  source 1..120: mol_type = other DNA

SEQ ID NO: 80297 - DNA, 120 bp, synthetic construct; identical to SEQ ID NO: 50343
  source 1..120: mol_type = other DNA

SEQ ID NO: 80298 - DNA, 120 bp, synthetic construct; identical to SEQ ID NO: 14052
  source 1..120: mol_type = other DNA

SEQ ID NO: 80299 - DNA, 120 bp, synthetic construct; identical to SEQ ID NO: 50345
  source 1..120: mol_type = other DNA

SEQ ID NO: 80300 - DNA, 120 bp, synthetic construct; identical to SEQ ID NO: 50346
  source 1..120: mol_type = other DNA

SEQ ID NO: 80301 - DNA, 120 bp, synthetic construct; identical to SEQ ID NO: 14053
  source 1..120: mol_type = other DNA

SEQ ID NO: 80302 - DNA, 120 bp, synthetic construct; identical to SEQ ID NO: 50348
  source 1..120: mol_type = other DNA

SEQ ID NO: 80303 - DNA, 120 bp, synthetic construct; identical to SEQ ID NO: 50349
  source 1..120: mol_type = other DNA

SEQ ID NO: 80304 - DNA, 120 bp, synthetic construct; identical to SEQ ID NO: 50350
  source 1..120: mol_type = other DNA

SEQ ID NO: 80305 - DNA, 120 bp, synthetic construct; identical to SEQ ID NO: 50351
  source 1..120: mol_type = other DNA

SEQ ID NO: 80306 - DNA, 120 bp, synthetic construct; identical to SEQ ID NO: 14054
  source 1..120: mol_type = other DNA

SEQ ID NO: 80307 - DNA, 120 bp, synthetic construct; identical to SEQ ID NO: 50353
  source 1..120: mol_type = other DNA

SEQ ID NO: 80308 - DNA, 120 bp, synthetic construct; identical to SEQ ID NO: 50354
  source 1..120: mol_type = other DNA

SEQ ID NO: 80309 - DNA, 120 bp, synthetic construct; identical to SEQ ID NO: 50355
  source 1..120: mol_type = other DNA

SEQ ID NO: 80310 - DNA, 120 bp, synthetic construct; identical to SEQ ID NO: 14055
  source 1..120: mol_type = other DNA

SEQ ID NO: 80311 - DNA, 120 bp, synthetic construct; identical to SEQ ID NO: 50357
  source 1..120: mol_type = other DNA

SEQ ID NO: 80312 - DNA, 120 bp, synthetic construct; identical to SEQ ID NO: 50358
  source 1..120: mol_type = other DNA

SEQ ID NO: 80313 - DNA, 120 bp, synthetic construct; identical to SEQ ID NO: 14056
  source 1..120: mol_type = other DNA

SEQ ID NO: 80314 - DNA, 120 bp, synthetic construct; identical to SEQ ID NO: 50360
  source 1..120: mol_type = other DNA

SEQ ID NO: 80315 - DNA, 120 bp, synthetic construct; identical to SEQ ID NO: 50361
  source 1..120: mol_type = other DNA

SEQ ID NO: 80316 - DNA, 120 bp, synthetic construct; identical to SEQ ID NO: 50362
  source 1..120: mol_type = other DNA

SEQ ID NO: 80317 - DNA, 120 bp, synthetic construct; identical to SEQ ID NO: 50363
  source 1..120: mol_type = other DNA

SEQ ID NO: 80318 - DNA, 120 bp, synthetic construct; identical to SEQ ID NO: 14057
  source 1..120: mol_type = other DNA

SEQ ID NO: 80319 - DNA, 120 bp, synthetic construct; identical to SEQ ID NO: 50365
  source 1..120: mol_type = other DNA

SEQ ID NO: 80320 - DNA, 120 bp, synthetic construct; identical to SEQ ID NO: 50366
  source 1..120: mol_type = other DNA

SEQ ID NO: 80321 - DNA, 120 bp, synthetic construct; identical to SEQ ID NO: 50367
  source 1..120: mol_type = other DNA

SEQ ID NO: 80322 - DNA, 120 bp, synthetic construct; identical to SEQ ID NO: 14058
  source 1..120: mol_type = other DNA

SEQ ID NO: 80323 - DNA, 120 bp, synthetic construct; identical to SEQ ID NO: 50369
  source 1..120: mol_type = other DNA

SEQ ID NO: 80324 - DNA, 120 bp, synthetic construct; identical to SEQ ID NO: 50370
  source 1..120: mol_type = other DNA

SEQ ID NO: 80325 - DNA, 120 bp, synthetic construct; identical to SEQ ID NO: 50371
  source 1..120: mol_type = other DNA

SEQ ID NO: 80326 - DNA, 120 bp, synthetic construct; identical to SEQ ID NO: 14059
  source 1..120: mol_type = other DNA

SEQ ID NO: 80327 - DNA, 120 bp, synthetic construct; identical to SEQ ID NO: 50373
  source 1..120: mol_type = other DNA

SEQ ID NO: 80328 - DNA, 120 bp, synthetic construct; identical to SEQ ID NO: 50374
  source 1..120: mol_type = other DNA

SEQ ID NO: 80329 - DNA, 120 bp, synthetic construct; identical to SEQ ID NO: 14060
  source 1..120: mol_type = other DNA

SEQ ID NO: 80330 - DNA, 120 bp, synthetic construct; identical to SEQ ID NO: 50376
  source 1..120: mol_type = other DNA

SEQ ID NO: 80331 - DNA, 120 bp, synthetic construct; identical to SEQ ID NO: 50377
  source 1..120: mol_type = other DNA

SEQ ID NO: 80332 - DNA, 120 bp, synthetic construct; identical to SEQ ID NO: 50378
  source 1..120: mol_type = other DNA

SEQ ID NO: 80333 - DNA, 120 bp, synthetic construct; identical to SEQ ID NO: 14061
  source 1..120: mol_type = other DNA

SEQ ID NO: 80334 - DNA, 120 bp, synthetic construct; identical to SEQ ID NO: 50380
  source 1..120: mol_type = other DNA

SEQ ID NO: 80335 - DNA, 120 bp, synthetic construct; identical to SEQ ID NO: 50381
  source 1..120: mol_type = other DNA

SEQ ID NO: 80336 - DNA, 120 bp, synthetic construct; identical to SEQ ID NO: 50382
  source 1..120: mol_type = other DNA

SEQ ID NO: 80337 - DNA, 120 bp, synthetic construct; identical to SEQ ID NO: 50383
  source 1..120: mol_type = other DNA

SEQ ID NO: 80338 - DNA, 120 bp, synthetic construct; identical to SEQ ID NO: 14062
  source 1..120: mol_type = other DNA

SEQ ID NO: 80339 - DNA, 120 bp, synthetic construct; identical to SEQ ID NO: 50385
  source 1..120: mol_type = other DNA

SEQ ID NO: 80340 - DNA, 120 bp, synthetic construct; identical to SEQ ID NO: 50386
  source 1..120: mol_type = other DNA

SEQ ID NO: 80341 - DNA, 120 bp, synthetic construct; identical to SEQ ID NO: 14063
  source 1..120: mol_type = other DNA

SEQ ID NO: 80342 - DNA, 120 bp, synthetic construct; identical to SEQ ID NO: 50388
  source 1..120: mol_type = other DNA

SEQ ID NO: 80343 - DNA, 120 bp, synthetic construct; identical to SEQ ID NO: 50389
  source 1..120: mol_type = other DNA

SEQ ID NO: 80344 - DNA, 120 bp, synthetic construct; identical to SEQ ID NO: 50390
  source 1..120: mol_type = other DNA

SEQ ID NO: 80345 - DNA, 120 bp, synthetic construct; identical to SEQ ID NO: 50391
  source 1..120: mol_type = other DNA

SEQ ID NO: 80346 - DNA, 120 bp, synthetic construct; identical to SEQ ID NO: 14064
  source 1..120: mol_type = other DNA

SEQ ID NO: 80347 - DNA, 120 bp, synthetic construct; identical to SEQ ID NO: 50393
  source 1..120: mol_type = other DNA

SEQ ID NO: 80348 - DNA, 120 bp, synthetic construct; identical to SEQ ID NO: 50394
  source 1..120: mol_type = other DNA

SEQ ID NO: 80349 - DNA, 120 bp, synthetic construct; identical to SEQ ID NO: 50395
  source 1..120: mol_type = other DNA

SEQ ID NO: 80350 - DNA, 120 bp, synthetic construct; identical to SEQ ID NO: 14065
  source 1..120: mol_type = other DNA

SEQ ID NO: 80351 - DNA, 120 bp, synthetic construct; identical to SEQ ID NO: 50397
  source 1..120: mol_type = other DNA

SEQ ID NO: 80352 - DNA, 120 bp, synthetic construct; identical to SEQ ID NO: 50398
  source 1..120: mol_type = other DNA

SEQ ID NO: 80353 - DNA, 120 bp, synthetic construct; identical to SEQ ID NO: 14066
  source 1..120: mol_type = other DNA

SEQ ID NO: 80354 - DNA, 120 bp, synthetic construct; identical to SEQ ID NO: 50400
  source 1..120: mol_type = other DNA

SEQ ID NO: 80355 - DNA, 120 bp, synthetic construct; identical to SEQ ID NO: 50401
  source 1..120: mol_type = other DNA

SEQ ID NO: 80356 - DNA, 120 bp, synthetic construct; identical to SEQ ID NO: 50402
  source 1..120: mol_type = other DNA

SEQ ID NO: 80357 - DNA, 120 bp, synthetic construct; identical to SEQ ID NO: 50403
  source 1..120: mol_type = other DNA

SEQ ID NO: 80358 - DNA, 120 bp, synthetic construct; identical to SEQ ID NO: 14067
  source 1..120: mol_type = other DNA

SEQ ID NO: 80359 - DNA, 120 bp, synthetic construct; identical to SEQ ID NO: 50405
  source 1..120: mol_type = other DNA

SEQ ID NO: 80360 - DNA, 120 bp, synthetic construct; identical to SEQ ID NO: 50406
  source 1..120: mol_type = other DNA

SEQ ID NO: 80361 - DNA, 120 bp, synthetic construct; identical to SEQ ID NO: 14068
  source 1..120: mol_type = other DNA

SEQ ID NO: 80362 - DNA, 120 bp, synthetic construct; identical to SEQ ID NO: 50408
  source 1..120: mol_type = other DNA

SEQ ID NO: 80363 - DNA, 120 bp, synthetic construct; identical to SEQ ID NO: 50409
  source 1..120: mol_type = other DNA

SEQ ID NO: 80364 - DNA, 120 bp, synthetic construct; identical to SEQ ID NO: 50410
  source 1..120: mol_type = other DNA

SEQ ID NO: 80365 - DNA, 120 bp, synthetic construct; identical to SEQ ID NO: 50411
  source 1..120: mol_type = other DNA

SEQ ID NO: 80366 - DNA, 120 bp, synthetic construct; identical to SEQ ID NO: 14069
  source 1..120: mol_type = other DNA

SEQ ID NO: 80367 - DNA, 120 bp, synthetic construct; identical to SEQ ID NO: 50413
  source 1..120: mol_type = other DNA

SEQ ID NO: 80368 - DNA, 120 bp, synthetic construct; identical to SEQ ID NO: 50414
  source 1..120: mol_type = other DNA

SEQ ID NO: 80369 - DNA, 120 bp, synthetic construct; identical to SEQ ID NO: 14070
  source 1..120: mol_type = other DNA

SEQ ID NO: 80370 - DNA, 120 bp, synthetic construct; identical to SEQ ID NO: 50416
  source 1..120: mol_type = other DNA

SEQ ID NO: 80371 - DNA, 120 bp, synthetic construct; identical to SEQ ID NO: 50417
  source 1..120: mol_type = other DNA

SEQ ID NO: 80372 - DNA, 120 bp, synthetic construct; identical to SEQ ID NO: 50418
  source 1..120: mol_type = other DNA

SEQ ID NO: 80373 - DNA, 120 bp, synthetic construct; identical to SEQ ID NO: 50419
  source 1..120: mol_type = other DNA

SEQ ID NO: 80374 - DNA, 120 bp, synthetic construct; identical to SEQ ID NO: 14071
  source 1..120: mol_type = other DNA

SEQ ID NO: 80375 - DNA, 120 bp, synthetic construct; identical to SEQ ID NO: 50421
  source 1..120: mol_type = other DNA

SEQ ID NO: 80376 - DNA, 120 bp, synthetic construct; identical to SEQ ID NO: 50422
  source 1..120: mol_type = other DNA

SEQ ID NO: 80377 - DNA, 120 bp, synthetic construct; identical to SEQ ID NO: 14072
  source 1..120: mol_type = other DNA

SEQ ID NO: 80378 - DNA, 120 bp, synthetic construct; identical to SEQ ID NO: 50424
  source 1..120: mol_type = other DNA

SEQ ID NO: 80379 - DNA, 120 bp, synthetic construct; identical to SEQ ID NO: 50425
  source 1..120: mol_type = other DNA

SEQ ID NO: 80380 - DNA, 120 bp, synthetic construct; identical to SEQ ID NO: 50426
  source 1..120: mol_type = other DNA

SEQ ID NO: 80381 - DNA, 120 bp, synthetic construct; identical to SEQ ID NO: 14073
  source 1..120: mol_type = other DNA

SEQ ID NO: 80382 - DNA, 120 bp, synthetic construct; identical to SEQ ID NO: 50428
  source 1..120: mol_type = other DNA

SEQ ID NO: 80383 - DNA, 120 bp, synthetic construct; identical to SEQ ID NO: 50429
  source 1..120: mol_type = other DNA

SEQ ID NO: 80384 - DNA, 120 bp, synthetic construct; identical to SEQ ID NO: 50430
  source 1..120: mol_type = other DNA

SEQ ID NO: 80385 - DNA, 120 bp, synthetic construct; identical to SEQ ID NO: 50431
  source 1..120: mol_type = other DNA

SEQ ID NO: 80386 - DNA, 120 bp, synthetic construct; identical to SEQ ID NO: 14074
  source 1..120: mol_type = other DNA

SEQ ID NO: 80387 - DNA, 120 bp, synthetic construct; identical to SEQ ID NO: 50433
  source 1..120: mol_type = other DNA

SEQ ID NO: 80388 - DNA, 120 bp, synthetic construct; identical to SEQ ID NO: 50434
  source 1..120: mol_type = other DNA

SEQ ID NO: 80389 - DNA, 120 bp, synthetic construct; identical to SEQ ID NO: 14075
  source 1..120: mol_type = other DNA

SEQ ID NO: 80390 - DNA, 120 bp, synthetic construct; identical to SEQ ID NO: 50436
  source 1..120: mol_type = other DNA

SEQ ID NO: 80391 - DNA, 120 bp, synthetic construct; identical to SEQ ID NO: 50437
  source 1..120: mol_type = other DNA

SEQ ID NO: 80392 - DNA, 120 bp, synthetic construct; identical to SEQ ID NO: 50438
  source 1..120: mol_type = other DNA

SEQ ID NO: 80393 - DNA, 120 bp, synthetic construct; identical to SEQ ID NO: 50439
  source 1..120: mol_type = other DNA

SEQ ID NO: 80394 - DNA, 120 bp, synthetic construct; identical to SEQ ID NO: 14076
  source 1..120: mol_type = other DNA

SEQ ID NO: 80395 - DNA, 120 bp, synthetic construct; identical to SEQ ID NO: 50441
  source 1..120: mol_type = other DNA

SEQ ID NO: 80396 - DNA, 120 bp, synthetic construct; identical to SEQ ID NO: 50442
  source 1..120: mol_type = other DNA

SEQ ID NO: 80397 - DNA, 120 bp, synthetic construct; identical to SEQ ID NO: 50443
  source 1..120: mol_type = other DNA

SEQ ID NO: 80398 - DNA, 120 bp, synthetic construct; identical to SEQ ID NO: 14077
  source 1..120: mol_type = other DNA

SEQ ID NO: 80399 - DNA, 120 bp, synthetic construct; identical to SEQ ID NO: 50445
  source 1..120: mol_type = other DNA

SEQ ID NO: 80400 - DNA, 120 bp, synthetic construct; identical to SEQ ID NO: 50446
  source 1..120: mol_type = other DNA

SEQ ID NO: 80401 - DNA, 120 bp, synthetic construct; identical to SEQ ID NO: 14078
  source 1..120: mol_type = other DNA

SEQ ID NO: 80402 - DNA, 120 bp, synthetic construct; identical to SEQ ID NO: 50448
  source 1..120: mol_type = other DNA

SEQ ID NO: 80403 - DNA, 120 bp, synthetic construct; identical to SEQ ID NO: 50449
  source 1..120: mol_type = other DNA

SEQ ID NO: 80404 - DNA, 120 bp, synthetic construct; identical to SEQ ID NO: 50450
  source 1..120: mol_type = other DNA

SEQ ID NO: 80405 - DNA, 120 bp, synthetic construct; identical to SEQ ID NO: 14079
  source 1..120: mol_type = other DNA

SEQ ID NO: 80406 - DNA, 120 bp, synthetic construct; identical to SEQ ID NO: 50452
  source 1..120: mol_type = other DNA

SEQ ID NO: 80407 - DNA, 120 bp, synthetic construct; identical to SEQ ID NO: 50453
  source 1..120: mol_type = other DNA

SEQ ID NO: 80408 - DNA, 120 bp, synthetic construct; identical to SEQ ID NO: 50454
  source 1..120: mol_type = other DNA

SEQ ID NO: 80409 - DNA, 120 bp, synthetic construct; identical to SEQ ID NO: 50455
  source 1..120: mol_type = other DNA

SEQ ID NO: 80410 - DNA, 120 bp, synthetic construct; identical to SEQ ID NO: 14080
  source 1..120: mol_type = other DNA

SEQ ID NO: 80411 - DNA, 120 bp, synthetic construct; identical to SEQ ID NO: 50457
  source 1..120: mol_type = other DNA

SEQ ID NO: 80412 - DNA, 120 bp, synthetic construct; identical to SEQ ID NO: 50458
  source 1..120: mol_type = other DNA

SEQ ID NO: 80413 - DNA, 120 bp, synthetic construct; identical to SEQ ID NO: 14081
  source 1..120: mol_type = other DNA

SEQ ID NO: 80414 - DNA, 120 bp, synthetic construct; identical to SEQ ID NO: 50460
  source 1..120: mol_type = other DNA

SEQ ID NO: 80415 - DNA, 120 bp, synthetic construct; identical to SEQ ID NO: 50461
  source 1..120: mol_type = other DNA

SEQ ID NO: 80416 - DNA, 120 bp, synthetic construct; identical to SEQ ID NO: 50462
  source 1..120: mol_type = other DNA

SEQ ID NO: 80417 - DNA, 120 bp, synthetic construct; identical to SEQ ID NO: 14082
  source 1..120: mol_type = other DNA

SEQ ID NO: 80418 - DNA, 120 bp, synthetic construct; identical to SEQ ID NO: 50464
  source 1..120: mol_type = other DNA

SEQ ID NO: 80419 - DNA, 120 bp, synthetic construct; identical to SEQ ID NO: 50465
  source 1..120: mol_type = other DNA

SEQ ID NO: 80420 - DNA, 120 bp, synthetic construct; identical to SEQ ID NO: 50466
  source 1..120: mol_type = other DNA

SEQ ID NO: 80421 - DNA, 120 bp, synthetic construct; identical to SEQ ID NO: 14083
  source 1..120: mol_type = other DNA

SEQ ID NO: 80422 - DNA, 120 bp, synthetic construct; identical to SEQ ID NO: 50468
  source 1..120: mol_type = other DNA

SEQ ID NO: 80423 - DNA, 120 bp, synthetic construct; identical to SEQ ID NO: 50469
  source 1..120: mol_type = other DNA

SEQ ID NO: 80424 - DNA, 120 bp, synthetic construct; identical to SEQ ID NO: 50470
  source 1..120: mol_type = other DNA

SEQ ID NO: 80425 - DNA, 120 bp, synthetic construct; identical to SEQ ID NO: 14084
  source 1..120: mol_type = other DNA

SEQ ID NO: 80426 - DNA, 120 bp, synthetic construct; identical to SEQ ID NO: 50472
  source 1..120: mol_type = other DNA

SEQ ID NO: 80427 - DNA, 120 bp, synthetic construct; identical to SEQ ID NO: 50473
  source 1..120: mol_type = other DNA

SEQ ID NO: 80428 - DNA, 120 bp, synthetic construct; identical to SEQ ID NO: 50474
  source 1..120: mol_type = other DNA

SEQ ID NO: 80429 - DNA, 120 bp, synthetic construct; identical to SEQ ID NO: 50475
  source 1..120: mol_type = other DNA

SEQ ID NO: 80430 - DNA, 120 bp, synthetic construct; identical to SEQ ID NO: 14085
  source 1..120: mol_type = other DNA

SEQ ID NO: 80431 - DNA, 120 bp, synthetic construct; identical to SEQ ID NO: 50477
  source 1..120: mol_type = other DNA

SEQ ID NO: 80432 - DNA, 120 bp, synthetic construct; identical to SEQ ID NO: 50478
  source 1..120: mol_type = other DNA

SEQ ID NO: 80433 - DNA, 120 bp, synthetic construct; identical to SEQ ID NO: 14086
  source 1..120: mol_type = other DNA

SEQ ID NO: 80434 - DNA, 120 bp, synthetic construct; identical to SEQ ID NO: 50480
  source 1..120: mol_type = other DNA

SEQ ID NO: 80435 - DNA, 120 bp, synthetic construct; identical to SEQ ID NO: 50481
  source 1..120: mol_type = other DNA

SEQ ID NO: 80436 - DNA, 120 bp, synthetic construct; identical to SEQ ID NO: 50482
  source 1..120: mol_type = other DNA

SEQ ID NO: 80437 - DNA, 120 bp, synthetic construct; identical to SEQ ID NO: 14087
  source 1..120: mol_type = other DNA

SEQ ID NO: 80438 - DNA, 120 bp, synthetic construct; identical to SEQ ID NO: 50484
  source 1..120: mol_type = other DNA

SEQ ID NO: 80439 - DNA, 120 bp, synthetic construct; identical to SEQ ID NO: 50485
  source 1..120: mol_type = other DNA

SEQ ID NO: 80440 - DNA, 120 bp, synthetic construct; identical to SEQ ID NO: 50486
  source 1..120: mol_type = other DNA

SEQ ID NO: 80441 - DNA, 120 bp, synthetic construct; identical to SEQ ID NO: 50487
  source 1..120: mol_type = other DNA

SEQ ID NO: 80442 - DNA, 120 bp, synthetic construct; identical to SEQ ID NO: 14088
  source 1..120: mol_type = other DNA

SEQ ID NO: 80443 - DNA, 120 bp, synthetic construct; identical to SEQ ID NO: 50489
  source 1..120: mol_type = other DNA

SEQ ID NO: 80444 - DNA, 120 bp, synthetic construct; identical to SEQ ID NO: 50490
  source 1..120: mol_type = other DNA

SEQ ID NO: 80445 - DNA, 120 bp, synthetic construct; identical to SEQ ID NO: 14089
  source 1..120: mol_type = other DNA

SEQ ID NO: 80446 - DNA, 120 bp, synthetic construct; identical to SEQ ID NO: 50492
  source 1..120: mol_type = other DNA

SEQ ID NO: 80447 - DNA, 120 bp, synthetic construct; identical to SEQ ID NO: 50493
  source 1..120: mol_type = other DNA

SEQ ID NO: 80448 - DNA, 120 bp, synthetic construct; identical to SEQ ID NO: 50494
  source 1..120: mol_type = other DNA

SEQ ID NO: 80449 - DNA, 120 bp, synthetic construct; identical to SEQ ID NO: 14090
  source 1..120: mol_type = other DNA

SEQ ID NO: 80450 - DNA, 120 bp, synthetic construct; identical to SEQ ID NO: 50496
  source 1..120: mol_type = other DNA

SEQ ID NO: 80451 - DNA, 120 bp, synthetic construct; identical to SEQ ID NO: 50497
  source 1..120: mol_type = other DNA

SEQ ID NO: 80452 - DNA, 120 bp, synthetic construct; identical to SEQ ID NO: 50498
  source 1..120: mol_type = other DNA

SEQ ID NO: 80453 - DNA, 120 bp, synthetic construct; identical to SEQ ID NO: 50499
  source 1..120: mol_type = other DNA

SEQ ID NO: 80454 - DNA, 120 bp, synthetic construct; identical to SEQ ID NO: 14091
  source 1..120: mol_type = other DNA

SEQ ID NO: 80455 - DNA, 120 bp, synthetic construct; identical to SEQ ID NO: 50501
  source 1..120: mol_type = other DNA

SEQ ID NO: 80456 - DNA, 120 bp, synthetic construct; identical to SEQ ID NO: 50502
  source 1..120: mol_type = other DNA

SEQ ID NO: 80457 - DNA, 120 bp, synthetic construct; identical to SEQ ID NO: 50503
  source 1..120: mol_type = other DNA

SEQ ID NO: 80458 - DNA, 120 bp, synthetic construct; identical to SEQ ID NO: 50504
  source 1..120: mol_type = other DNA

SEQ ID NO: 80459 - DNA, 120 bp, synthetic construct; identical to SEQ ID NO: 14092
  source 1..120: mol_type = other DNA

SEQ ID NO: 80460 - DNA, 120 bp, synthetic construct; identical to SEQ ID NO: 50506
  source 1..120: mol_type = other DNA

SEQ ID NO: 80461 - DNA, 120 bp, synthetic construct; identical to SEQ ID NO: 50507
  source 1..120: mol_type = other DNA

SEQ ID NO: 80462 - DNA, 120 bp, synthetic construct; identical to SEQ ID NO: 50508
  source 1..120: mol_type = other DNA

SEQ ID NO: 80463 - DNA, 120 bp, synthetic construct; identical to SEQ ID NO: 14093
  source 1..120: mol_type = other DNA

SEQ ID NO: 80464 - DNA, 120 bp, synthetic construct; identical to SEQ ID NO: 50510
  source 1..120: mol_type = other DNA

SEQ ID NO: 80465 - DNA, 120 bp, synthetic construct; identical to SEQ ID NO: 50511
  source 1..120: mol_type = other DNA

SEQ ID NO: 80466 - DNA, 120 bp, synthetic construct; identical to SEQ ID NO: 14094
  source 1..120: mol_type = other DNA

SEQ ID NO: 80467 - DNA, 120 bp, synthetic construct; identical to SEQ ID NO: 50513
  source 1..120: mol_type = other DNA

SEQ ID NO: 80468 - DNA, 120 bp, synthetic construct; identical to SEQ ID NO: 50514
  source 1..120: mol_type = other DNA

SEQ ID NO: 80469 - DNA, 120 bp, synthetic construct; identical to SEQ ID NO: 50515
  source 1..120: mol_type = other DNA

SEQ ID NO: 80470 - DNA, 120 bp, synthetic construct; identical to SEQ ID NO: 50516
  source 1..120: mol_type = other DNA

SEQ ID NO: 80471 - DNA, 120 bp, synthetic construct; identical to SEQ ID NO: 14095
  source 1..120: mol_type = other DNA

SEQ ID NO: 80472 - DNA, 120 bp, synthetic construct; identical to SEQ ID NO: 50518
  source 1..120: mol_type = other DNA

SEQ ID NO: 80473 - DNA, 120 bp, synthetic construct; identical to SEQ ID NO: 50519
  source 1..120: mol_type = other DNA

SEQ ID NO: 80474 - DNA, 120 bp, synthetic construct; identical to SEQ ID NO: 14096
  source 1..120: mol_type = other DNA

SEQ ID NO: 80475 - DNA, 120 bp, synthetic construct; identical to SEQ ID NO: 50521
  source 1..120: mol_type = other DNA

SEQ ID NO: 80476 - DNA, 120 bp, synthetic construct; identical to SEQ ID NO: 50522
  source 1..120: mol_type = other DNA

SEQ ID NO: 80477 - DNA, 120 bp, synthetic construct; identical to SEQ ID NO: 50523
  source 1..120: mol_type = other DNA

SEQ ID NO: 80478 - DNA, 120 bp, synthetic construct; identical to SEQ ID NO: 50524
  source 1..120: mol_type = other DNA

SEQ ID NO: 80479 - DNA, 120 bp, synthetic construct; identical to SEQ ID NO: 14097
  source 1..120: mol_type = other DNA

SEQ ID NO: 80480 - DNA, 120 bp, synthetic construct; identical to SEQ ID NO: 50526
  source 1..120: mol_type = other DNA

SEQ ID NO: 80481 - DNA, 120 bp, synthetic construct; identical to SEQ ID NO: 50527
  source 1..120: mol_type = other DNA

SEQ ID NO: 80482 - DNA, 120 bp, synthetic construct; identical to SEQ ID NO: 50528
  source 1..120: mol_type = other DNA

SEQ ID NO: 80483 - DNA, 120 bp, synthetic construct; identical to SEQ ID NO: 14098
  source 1..120: mol_type = other DNA

SEQ ID NO: 80484 - DNA, 120 bp, synthetic construct; identical to SEQ ID NO: 50530
  source 1..120: mol_type = other DNA

SEQ ID NO: 80485 - DNA, 120 bp, synthetic construct; identical to SEQ ID NO: 50531
  source 1..120: mol_type = other DNA

SEQ ID NO: 80486 - DNA, 120 bp, synthetic construct; identical to SEQ ID NO: 50532
  source 1..120: mol_type = other DNA

SEQ ID NO: 80487 - DNA, 120 bp, synthetic construct; identical to SEQ ID NO: 14099
  source 1..120: mol_type = other DNA

SEQ ID NO: 80488 - DNA, 120 bp, synthetic construct; identical to SEQ ID NO: 50534
  source 1..120: mol_type = other DNA

SEQ ID NO: 80489 - DNA, 120 bp, synthetic construct; identical to SEQ ID NO: 50535
  source 1..120: mol_type = other DNA

SEQ ID NO: 80490 - DNA, 120 bp, synthetic construct; identical to SEQ ID NO: 14100
  source 1..120: mol_type = other DNA

SEQ ID NO: 80491 - DNA, 120 bp, synthetic construct; identical to SEQ ID NO: 50537
  source 1..120: mol_type = other DNA

SEQ ID NO: 80492 - DNA, 120 bp, synthetic construct; identical to SEQ ID NO: 50538
  source 1..120: mol_type = other DNA

SEQ ID NO: 80493 - DNA, 120 bp, synthetic construct; identical to SEQ ID NO: 50539
  source 1..120: mol_type = other DNA

SEQ ID NO: 80494 - DNA, 120 bp, synthetic construct; identical to SEQ ID NO: 14101
  source 1..120: mol_type = other DNA

SEQ ID NO: 80495 - DNA, 120 bp, synthetic construct; identical to SEQ ID NO: 50541
  source 1..120: mol_type = other DNA

SEQ ID NO: 80496 - DNA, 120 bp, synthetic construct; identical to SEQ ID NO: 50542
  source 1..120: mol_type = other DNA

SEQ ID NO: 80497 - DNA, 120 bp, synthetic construct; identical to SEQ ID NO: 50543
  source 1..120: mol_type = other DNA

SEQ ID NO: 80498 - DNA, 120 bp, synthetic construct; identical to SEQ ID NO: 50544
  source 1..120: mol_type = other DNA

SEQ ID NO: 80499 - DNA, 120 bp, synthetic construct; identical to SEQ ID NO: 14102
  source 1..120: mol_type = other DNA

SEQ ID NO: 80500 - DNA, 120 bp, synthetic construct; identical to SEQ ID NO: 50546
  source 1..120: mol_type = other DNA

SEQ ID NO: 80501 - DNA, 120 bp, synthetic construct; identical to SEQ ID NO: 50547
  source 1..120: mol_type = other DNA

SEQ ID NO: 80502 - DNA, 120 bp, synthetic construct; identical to SEQ ID NO: 14103
  source 1..120: mol_type = other DNA

SEQ ID NO: 80503 - DNA, 120 bp, synthetic construct; identical to SEQ ID NO: 50549
  source 1..120: mol_type = other DNA

SEQ ID NO: 80504 - DNA, 120 bp, synthetic construct; identical to SEQ ID NO: 50550
  source 1..120: mol_type = other DNA

SEQ ID NO: 80505 - DNA, 120 bp, synthetic construct; identical to SEQ ID NO: 50551
  source 1..120: mol_type = other DNA

SEQ ID NO: 80506 - DNA, 120 bp, synthetic construct; identical to SEQ ID NO: 50552
  source 1..120: mol_type = other DNA

SEQ ID NO: 80507 - DNA, 120 bp, synthetic construct; identical to SEQ ID NO: 14104
  source 1..120: mol_type = other DNA

SEQ ID NO: 80508 - DNA, 120 bp, synthetic construct; identical to SEQ ID NO: 50554
  source 1..120: mol_type = other DNA

SEQ ID NO: 80509 - DNA, 120 bp, synthetic construct; identical to SEQ ID NO: 50555
  source 1..120: mol_type = other DNA

SEQ ID NO: 80510 - DNA, 120 bp, synthetic construct; identical to SEQ ID NO: 50556
  source 1..120: mol_type = other DNA

SEQ ID NO: 80511 - DNA, 120 bp, synthetic construct; identical to SEQ ID NO: 6620
  source 1..120: mol_type = other DNA

SEQ ID NO: 80512 - DNA, 120 bp, synthetic construct; identical to SEQ ID NO: 50558
  source 1..120: mol_type = other DNA

SEQ ID NO: 80513 - DNA, 120 bp, synthetic construct; identical to SEQ ID NO: 50559
  source 1..120: mol_type = other DNA

SEQ ID NO: 80514 - DNA, 120 bp, synthetic construct; identical to SEQ ID NO: 14106
  source 1..120: mol_type = other DNA

SEQ ID NO: 80515 - DNA, 120 bp, synthetic construct; identical to SEQ ID NO: 50561
  source 1..120: mol_type = other DNA

SEQ ID NO: 80516 - DNA, 120 bp, synthetic construct; identical to SEQ ID NO: 50562
  source 1..120: mol_type = other DNA

SEQ ID NO: 80517 - DNA, 120 bp, synthetic construct; identical to SEQ ID NO: 50563
  source 1..120: mol_type = other DNA

SEQ ID NO: 80518 - DNA, 120 bp, synthetic construct; identical to SEQ ID NO: 14107
  source 1..120: mol_type = other DNA

SEQ ID NO: 80519 - DNA, 120 bp, synthetic construct; identical to SEQ ID NO: 50565
  source 1..120: mol_type = other DNA

SEQ ID NO: 80520 - DNA, 120 bp, synthetic construct; identical to SEQ ID NO: 50566
  source 1..120: mol_type = other DNA

SEQ ID NO: 80521 - DNA, 120 bp, synthetic construct; identical to SEQ ID NO: 50567
  source 1..120: mol_type = other DNA

SEQ ID NO: 80522 - DNA, 120 bp, synthetic construct; identical to SEQ ID NO: 14108
  source 1..120: mol_type = other DNA

SEQ ID NO: 80523 - DNA, 120 bp, synthetic construct; identical to SEQ ID NO: 50569
  source 1..120: mol_type = other DNA

SEQ ID NO: 80524 - DNA, 120 bp, synthetic construct; identical to SEQ ID NO: 50570
  source 1..120: mol_type = other DNA

SEQ ID NO: 80525 - DNA, 120 bp, synthetic construct; identical to SEQ ID NO: 50571
  source 1..120: mol_type = other DNA

SEQ ID NO: 80526 - DNA, 120 bp, synthetic construct; identical to SEQ ID NO: 14109
  source 1..120: mol_type = other DNA

SEQ ID NO: 80527 - DNA, 120 bp, synthetic construct; identical to SEQ ID NO: 50573
  source 1..120: mol_type = other DNA

SEQ ID NO: 80528 - DNA, 120 bp, synthetic construct; identical to SEQ ID NO: 50574
  source 1..120: mol_type = other DNA

SEQ ID NO: 80529 - DNA, 120 bp, synthetic construct; identical to SEQ ID NO: 50575
  source 1..120: mol_type = other DNA

SEQ ID NO: 80530 - DNA, 120 bp, synthetic construct; identical to SEQ ID NO: 14110
  source 1..120: mol_type = other DNA

SEQ ID NO: 80531 - DNA, 120 bp, synthetic construct; identical to SEQ ID NO: 50577
  source 1..120: mol_type = other DNA

SEQ ID NO: 80532 - DNA, 120 bp, synthetic construct; identical to SEQ ID NO: 50578
  source 1..120: mol_type = other DNA

SEQ ID NO: 80533 - DNA, 120 bp, synthetic construct; identical to SEQ ID NO: 50579
  source 1..120: mol_type = other DNA

SEQ ID NO: 80534 - DNA, 120 bp, synthetic construct; identical to SEQ ID NO: 50580
  source 1..120: mol_type = other DNA

SEQ ID NO: 80535 - DNA, 120 bp, synthetic construct; identical to SEQ ID NO: 14111
  source 1..120: mol_type = other DNA

SEQ ID NO: 80536 - DNA, 120 bp, synthetic construct; identical to SEQ ID NO: 50582
  source 1..120: mol_type = other DNA

SEQ ID NO: 80537 - DNA, 120 bp, synthetic construct; identical to SEQ ID NO: 50583
  source 1..120: mol_type = other DNA

SEQ ID NO: 80538 - DNA, 120 bp, synthetic construct; identical to SEQ ID NO: 14112
  source 1..120: mol_type = other DNA

SEQ ID NO: 80539 - DNA, 120 bp, synthetic construct; identical to SEQ ID NO: 50585
  source 1..120: mol_type = other DNA

SEQ ID NO: 80540 - DNA, 120 bp, synthetic construct; identical to SEQ ID NO: 50586
  source 1..120: mol_type = other DNA

SEQ ID NO: 80541 - DNA, 120 bp, synthetic construct; identical to SEQ ID NO: 50587
  source 1..120: mol_type = other DNA

SEQ ID NO: 80542 - DNA, 120 bp, synthetic construct; identical to SEQ ID NO: 14113
  source 1..120: mol_type = other DNA

SEQ ID NO: 80543 - DNA, 120 bp, synthetic construct; identical to SEQ ID NO: 50589
  source 1..120: mol_type = other DNA

SEQ ID NO: 80544 - DNA, 120 bp, synthetic construct; identical to SEQ ID NO: 50590
  source 1..120: mol_type = other DNA

SEQ ID NO: 80545 - DNA, 120 bp, synthetic construct; identical to SEQ ID NO: 50591
  source 1..120: mol_type = other DNA

SEQ ID NO: 80546 - DNA, 120 bp, synthetic construct; identical to SEQ ID NO: 50592
  source 1..120: mol_type = other DNA

SEQ ID NO: 80547 - DNA, 120 bp, synthetic construct; identical to SEQ ID NO: 14114
  source 1..120: mol_type = other DNA

SEQ ID NO: 80548 - DNA, 120 bp, synthetic construct; identical to SEQ ID NO: 50594
  source 1..120: mol_type = other DNA

SEQ ID NO: 80549 - DNA, 120 bp, synthetic construct; identical to SEQ ID NO: 50595
  source 1..120: mol_type = other DNA

SEQ ID NO: 80550 - DNA, 120 bp, synthetic construct; identical to SEQ ID NO: 14115
  source 1..120: mol_type = other DNA

SEQ ID NO: 80551 - DNA, 120 bp, synthetic construct; identical to SEQ ID NO: 50597
  source 1..120: mol_type = other DNA

SEQ ID NO: 80552 - DNA, 120 bp, synthetic construct; identical to SEQ ID NO: 50598
  source 1..120: mol_type = other DNA

SEQ ID NO: 80553 - DNA, 120 bp, synthetic construct; identical to SEQ ID NO: 50599
  source 1..120: mol_type = other DNA

SEQ ID NO: 80554 - DNA, 120 bp, synthetic construct; identical to SEQ ID NO: 14116
  source 1..120: mol_type = other DNA

SEQ ID NO: 80555 - DNA, 120 bp, synthetic construct; identical to SEQ ID NO: 50601
  source 1..120: mol_type = other DNA

SEQ ID NO: 80556 - DNA, 120 bp, synthetic construct; identical to SEQ ID NO: 50602
  source 1..120: mol_type = other DNA

SEQ ID NO: 80557 - DNA, 120 bp, synthetic construct; identical to SEQ ID NO: 50603
  source 1..120: mol_type = other DNA

SEQ ID NO: 80558 - DNA, 120 bp, synthetic construct; identical to SEQ ID NO: 50604
  source 1..120: mol_type = other DNA

SEQ ID NO: 80559 - DNA, 120 bp, synthetic construct; identical to SEQ ID NO: 14117
  source 1..120: mol_type = other DNA

SEQ ID NO: 80560 - DNA, 120 bp, synthetic construct; identical to SEQ ID NO: 50606
  source 1..120: mol_type = other DNA

SEQ ID NO: 80561 - DNA, 120 bp, synthetic construct; identical to SEQ ID NO: 50607
  source 1..120: mol_type = other DNA

SEQ ID NO: 80562 - DNA, 120 bp, synthetic construct; identical to SEQ ID NO: 50608
  source 1..120: mol_type = other DNA

SEQ ID NO: 80563 - DNA, 120 bp, synthetic construct; identical to SEQ ID NO: 14118
  source 1..120: mol_type = other DNA

SEQ ID NO: 80564 - DNA, 120 bp, synthetic construct; identical to SEQ ID NO: 50610
  source 1..120: mol_type = other DNA

SEQ ID NO: 80565 - DNA, 120 bp, synthetic construct; identical to SEQ ID NO: 50611
  source 1..120: mol_type = other DNA

SEQ ID NO: 80566 - DNA, 120 bp, synthetic construct; identical to SEQ ID NO: 50612
  source 1..120: mol_type = other DNA

SEQ ID NO: 80567 - DNA, 120 bp, synthetic construct; identical to SEQ ID NO: 14119
  source 1..120: mol_type = other DNA

SEQ ID NO: 80568 - DNA, 120 bp, synthetic construct; identical to SEQ ID NO: 50614
  source 1..120: mol_type = other DNA

SEQ ID NO: 80569 - DNA, 120 bp, synthetic construct; identical to SEQ ID NO: 50615
  source 1..120: mol_type = other DNA

SEQ ID NO: 80570 - DNA, 120 bp, synthetic construct; identical to SEQ ID NO: 50616
  source 1..120: mol_type = other DNA

SEQ ID NO: 80571 - DNA, 120 bp, synthetic construct; identical to SEQ ID NO: 14120
  source 1..120: mol_type = other DNA

SEQ ID NO: 80572 - DNA, 120 bp, synthetic construct; identical to SEQ ID NO: 50618
  source 1..120: mol_type = other DNA

SEQ ID NO: 80573 - DNA, 120 bp, synthetic construct; identical to SEQ ID NO: 50619
  source 1..120: mol_type = other DNA

SEQ ID NO: 80574 - DNA, 120 bp, synthetic construct; identical to SEQ ID NO: 14121
  source 1..120: mol_type = other DNA

SEQ ID NO: 80575 - DNA, 120 bp, synthetic construct; identical to SEQ ID NO: 50621
  source 1..120: mol_type = other DNA

SEQ ID NO: 80576 - DNA, 120 bp, synthetic construct; identical to SEQ ID NO: 50622
  source 1..120: mol_type = other DNA

SEQ ID NO: 80577 - DNA, 120 bp, synthetic construct; identical to SEQ ID NO: 50623
  source 1..120: mol_type = other DNA

SEQ ID NO: 80578 - DNA, 120 bp, synthetic construct; identical to SEQ ID NO: 50624
  source 1..120: mol_type = other DNA

SEQ ID NO: 80579 - DNA, 120 bp, synthetic construct; identical to SEQ ID NO: 14122
  source 1..120: mol_type = other DNA

SEQ ID NO: 80580 - DNA, 120 bp, synthetic construct; identical to SEQ ID NO: 50626
  source 1..120: mol_type = other DNA

SEQ ID NO: 80581 - DNA, 120 bp, synthetic construct; identical to SEQ ID NO: 50627
  source 1..120: mol_type = other DNA

SEQ ID NO: 80582 - DNA, 120 bp, synthetic construct; identical to SEQ ID NO: 14123
  source 1..120: mol_type = other DNA

SEQ ID NO: 80583 - DNA, 120 bp, synthetic construct; identical to SEQ ID NO: 50629
  source 1..120: mol_type = other DNA

SEQ ID NO: 80584 - DNA, 120 bp, synthetic construct; identical to SEQ ID NO: 50630
  source 1..120: mol_type = other DNA

SEQ ID NO: 80585 - DNA, 120 bp, synthetic construct; identical to SEQ ID NO: 50631
  source 1..120: mol_type = other DNA

SEQ ID NO: 80586 - DNA, 120 bp, synthetic construct; identical to SEQ ID NO: 14124
  source 1..120: mol_type = other DNA

SEQ ID NO: 80587 - DNA, 120 bp, synthetic construct; identical to SEQ ID NO: 50633
  source 1..120: mol_type = other DNA

SEQ ID NO: 80588 - DNA, 120 bp, synthetic construct; identical to SEQ ID NO: 50634
  source 1..120: mol_type = other DNA

SEQ ID NO: 80589 - DNA, 120 bp, synthetic construct; identical to SEQ ID NO: 50635
  source 1..120: mol_type = other DNA

SEQ ID NO: 80590 - DNA, 120 bp, synthetic construct; identical to SEQ ID NO: 14125
  source 1..120: mol_type = other DNA

SEQ ID NO: 80591 - DNA, 120 bp, synthetic construct; identical to SEQ ID NO: 50637
  source 1..120: mol_type = other DNA

SEQ ID NO: 80592 - DNA, 120 bp, synthetic construct; identical to SEQ ID NO: 50638
  source 1..120: mol_type = other DNA

SEQ ID NO: 80593 - DNA, 120 bp, synthetic construct; identical to SEQ ID NO: 50639
  source 1..120: mol_type = other DNA

SEQ ID NO: 80594 - DNA, 120 bp, synthetic construct; identical to SEQ ID NO: 50640
  source 1..120: mol_type = other DNA

SEQ ID NO: 80595 - DNA, 120 bp, synthetic construct; identical to SEQ ID NO: 14126
  source 1..120: mol_type = other DNA

SEQ ID NO: 80596 - DNA, 120 bp, synthetic construct; identical to SEQ ID NO: 50642
  source 1..120: mol_type = other DNA

SEQ ID NO: 80597 - DNA, 120 bp, synthetic construct; identical to SEQ ID NO: 50643
  source 1..120: mol_type = other DNA

SEQ ID NO: 80598 - DNA, 120 bp, synthetic construct; identical to SEQ ID NO: 50644
  source 1..120: mol_type = other DNA

SEQ ID NO: 80599 - DNA, 120 bp, synthetic construct; identical to SEQ ID NO: 14127
  source 1..120: mol_type = other DNA

SEQ ID NO: 80600 - DNA, 120 bp, synthetic construct; identical to SEQ ID NO: 50646
  source 1..120: mol_type = other DNA

SEQ ID NO: 80601 - DNA, 120 bp, synthetic construct; identical to SEQ ID NO: 50647
  source 1..120: mol_type = other DNA

SEQ ID NO: 80602 - DNA, 120 bp, synthetic construct; identical to SEQ ID NO: 14128
  source 1..120: mol_type = other DNA

SEQ ID NO: 80603 - DNA, 120 bp, synthetic construct; identical to SEQ ID NO: 50649
  source 1..120: mol_type = other DNA

SEQ ID NO: 80604 - DNA, 120 bp, synthetic construct; identical to SEQ ID NO: 50650
  source 1..120: mol_type = other DNA

SEQ ID NO: 80605 - DNA, 120 bp, synthetic construct; identical to SEQ ID NO: 50651
  source 1..120: mol_type = other DNA

SEQ ID NO: 80606 - DNA, 120 bp, synthetic construct; identical to SEQ ID NO: 50652
  source 1..120: mol_type = other DNA

SEQ ID NO: 80607 - DNA, 120 bp, synthetic construct; identical to SEQ ID NO: 14129
  source 1..120: mol_type = other DNA

SEQ ID NO: 80608 - DNA, 120 bp, synthetic construct; identical to SEQ ID NO: 50654
  source 1..120: mol_type = other DNA

SEQ ID NO: 80609 - DNA, 120 bp, synthetic construct; identical to SEQ ID NO: 50655
  source 1..120: mol_type = other DNA

SEQ ID NO: 80610 - DNA, 120 bp, synthetic construct; identical to SEQ ID NO: 50656
  source 1..120: mol_type = other DNA

SEQ ID NO: 80611 - DNA, 120 bp, synthetic construct; identical to SEQ ID NO: 14130
  source 1..120: mol_type = other DNA

SEQ ID NO: 80612 - DNA, 120 bp, synthetic construct; identical to SEQ ID NO: 50658
  source 1..120: mol_type = other DNA

SEQ ID NO: 80613 - DNA, 120 bp, synthetic construct; identical to SEQ ID NO: 50659
  source 1..120: mol_type = other DNA

SEQ ID NO: 80614 - DNA, 120 bp, synthetic construct; identical to SEQ ID NO: 50660
  source 1..120: mol_type = other DNA

SEQ ID NO: 80615 - DNA, 120 bp, synthetic construct; identical to SEQ ID NO: 14131
  source 1..120: mol_type = other DNA

SEQ ID NO: 80616 - DNA, 120 bp, synthetic construct; identical to SEQ ID NO: 50662
  source 1..120: mol_type = other DNA

SEQ ID NO: 80617 - DNA, 120 bp, synthetic construct; identical to SEQ ID NO: 50663
  source 1..120: mol_type = other DNA

SEQ ID NO: 80618 - DNA, 120 bp, synthetic construct; identical to SEQ ID NO: 50664
  source 1..120: mol_type = other DNA

SEQ ID NO: 80619 - DNA, 120 bp, synthetic construct; identical to SEQ ID NO: 50665
  source 1..120: mol_type = other DNA

SEQ ID NO: 80620 - DNA, 120 bp, synthetic construct; identical to SEQ ID NO: 14132
  source 1..120: mol_type = other DNA

SEQ ID NO: 80621 - DNA, 120 bp, synthetic construct; identical to SEQ ID NO: 50667
  source 1..120: mol_type = other DNA

SEQ ID NO: 80622 - DNA, 120 bp, synthetic construct; identical to SEQ ID NO: 50668
  source 1..120: mol_type = other DNA

SEQ ID NO: 80623 - DNA, 120 bp, synthetic construct; identical to SEQ ID NO: 14133
  source 1..120: mol_type = other DNA

SEQ ID NO: 80624 - DNA, 120 bp, synthetic construct; identical to SEQ ID NO: 50670
  source 1..120: mol_type = other DNA

SEQ ID NO: 80625 - DNA, 120 bp, synthetic construct; identical to SEQ ID NO: 50671
  source 1..120: mol_type = other DNA

SEQ ID NO: 80626 - DNA, 120 bp, synthetic construct; identical to SEQ ID NO: 50672
  source 1..120: mol_type = other DNA

SEQ ID NO: 80627 - DNA, 120 bp, synthetic construct; identical to SEQ ID NO: 50673
  source 1..120: mol_type = other DNA

SEQ ID NO: 80628 - DNA, 120 bp, synthetic construct; identical to SEQ ID NO: 14134
  source 1..120: mol_type = other DNA

SEQ ID NO: 80629 - DNA, 120 bp, synthetic construct; identical to SEQ ID NO: 50675
  source 1..120: mol_type = other DNA

SEQ ID NO: 80630 - DNA, 120 bp, synthetic construct; identical to SEQ ID NO: 50676
  source 1..120: mol_type = other DNA

SEQ ID NO: 80631 - DNA, 120 bp, synthetic construct; identical to SEQ ID NO: 50677
  source 1..120: mol_type = other DNA

SEQ ID NO: 80632 - DNA, 120 bp, synthetic construct; identical to SEQ ID NO: 50678
  source 1..120: mol_type = other DNA

SEQ ID NO: 80633 - DNA, 120 bp, synthetic construct; identical to SEQ ID NO: 14135
  source 1..120: mol_type = other DNA

SEQ ID NO: 80634 - DNA, 120 bp, synthetic construct; identical to SEQ ID NO: 50680
  source 1..120: mol_type = other DNA

SEQ ID NO: 80635 - DNA, 120 bp, synthetic construct; identical to SEQ ID NO: 50681
  source 1..120: mol_type = other DNA

SEQ ID NO: 80636 - DNA, 120 bp, synthetic construct; identical to SEQ ID NO: 50682
  source 1..120: mol_type = other DNA

SEQ ID NO: 80637 - DNA, 120 bp, synthetic construct; identical to SEQ ID NO: 14136
  source 1..120: mol_type = other DNA

SEQ ID NO: 80638 - DNA, 120 bp, synthetic construct; identical to SEQ ID NO: 50684
  source 1..120: mol_type = other DNA

SEQ ID NO: 80639 - DNA, 120 bp, synthetic construct; identical to SEQ ID NO: 50685
  source 1..120: mol_type = other DNA

SEQ ID NO: 80640 - DNA, 120 bp, synthetic construct; identical to SEQ ID NO: 50686
  source 1..120: mol_type = other DNA

SEQ ID NO: 80641 - DNA, 120 bp, synthetic construct; identical to SEQ ID NO: 50687
  source 1..120: mol_type = other DNA

SEQ ID NO: 80642 - DNA, 120 bp, synthetic construct; identical to SEQ ID NO: 14137
  source 1..120: mol_type = other DNA

SEQ ID NO: 80643 - DNA, 120 bp, synthetic construct; identical to SEQ ID NO: 50689
  source 1..120: mol_type = other DNA

SEQ ID NO: 80644 - DNA, 120 bp, synthetic construct; identical to SEQ ID NO: 50690
  source 1..120: mol_type = other DNA

SEQ ID NO: 80645 - DNA, 120 bp, synthetic construct; identical to SEQ ID NO: 50691
  source 1..120: mol_type = other DNA

SEQ ID NO: 80646 - DNA, 120 bp, synthetic construct; identical to SEQ ID NO: 14138
  source 1..120: mol_type = other DNA

SEQ ID NO: 80647 - DNA, 120 bp, synthetic construct; identical to SEQ ID NO: 50693
  source 1..120: mol_type = other DNA

SEQ ID NO: 80648 - DNA, 120 bp, synthetic construct; identical to SEQ ID NO: 50694
  source 1..120: mol_type = other DNA

SEQ ID NO: 80649 - DNA, 120 bp, synthetic construct; identical to SEQ ID NO: 50695
  source 1..120: mol_type = other DNA

SEQ ID NO: 80650 - DNA, 120 bp, synthetic construct; identical to SEQ ID NO: 14139
  source 1..120: mol_type = other DNA

SEQ ID NO: 80651 - DNA, 120 bp, synthetic construct; identical to SEQ ID NO: 50697
  source 1..120: mol_type = other DNA

SEQ ID NO: 80652 - DNA, 120 bp, synthetic construct; identical to SEQ ID NO: 50698
  source 1..120: mol_type = other DNA

SEQ ID NO: 80653 - DNA, 120 bp, synthetic construct; identical to SEQ ID NO: 50699
  source 1..120: mol_type = other DNA

SEQ ID NO: 80654 - DNA, 120 bp, synthetic construct; identical to SEQ ID NO: 14140
  source 1..120: mol_type = other DNA

SEQ ID NO: 80655 - DNA, 120 bp, synthetic construct; identical to SEQ ID NO: 50701
  source 1..120: mol_type = other DNA

SEQ ID NO: 80656 - DNA, 120 bp, synthetic construct; identical to SEQ ID NO: 50702
  source 1..120: mol_type = other DNA

SEQ ID NO: 80657 - DNA, 120 bp, synthetic construct; identical to SEQ ID NO: 50703
  source 1..120: mol_type = other DNA

SEQ ID NO: 80658 - DNA, 120 bp, synthetic construct; identical to SEQ ID NO: 14141
  source 1..120: mol_type = other DNA

SEQ ID NO: 80659 - DNA, 120 bp, synthetic construct; identical to SEQ ID NO: 50705
  source 1..120: mol_type = other DNA

SEQ ID NO: 80660 - DNA, 120 bp, synthetic construct; identical to SEQ ID NO: 50706
  source 1..120: mol_type = other DNA

SEQ ID NO: 80661 - DNA, 120 bp, synthetic construct; identical to SEQ ID NO: 50707
  source 1..120: mol_type = other DNA

SEQ ID NO: 80662 - DNA, 120 bp, synthetic construct; identical to SEQ ID NO: 14142
  source 1..120: mol_type = other DNA

SEQ ID NO: 80663 - DNA, 120 bp, synthetic construct; identical to SEQ ID NO: 50709
  source 1..120: mol_type = other DNA

SEQ ID NO: 80664 - DNA, 120 bp, synthetic construct; identical to SEQ ID NO: 50710
  source 1..120: mol_type = other DNA

SEQ ID NO: 80665 - DNA, 120 bp, synthetic construct; identical to SEQ ID NO: 14143
  source 1..120: mol_type = other DNA

SEQ ID NO: 80666 - DNA, 120 bp, synthetic construct; identical to SEQ ID NO: 50712
  source 1..120: mol_type = other DNA

SEQ ID NO: 80667 - DNA, 120 bp, synthetic construct; identical to SEQ ID NO: 50713
  source 1..120: mol_type = other DNA

SEQ ID NO: 80668 - DNA, 120 bp, synthetic construct; identical to SEQ ID NO: 50714
  source 1..120: mol_type = other DNA

SEQ ID NO: 80669 - DNA, 120 bp, synthetic construct; identical to SEQ ID NO: 50715
  source 1..120: mol_type = other DNA

SEQ ID NO: 80670 - DNA, 120 bp, synthetic construct; identical to SEQ ID NO: 14144
  source 1..120: mol_type = other DNA

SEQ ID NO: 80671 - DNA, 120 bp, synthetic construct; identical to SEQ ID NO: 50717
  source 1..120: mol_type = other DNA

SEQ ID NO: 80672 - DNA, 120 bp, synthetic construct; identical to SEQ ID NO: 50718
  source 1..120: mol_type = other DNA

SEQ ID NO: 80673 - DNA, 120 bp, synthetic construct; identical to SEQ ID NO: 14145
  source 1..120: mol_type = other DNA

SEQ ID NO: 80674 - DNA, 120 bp, synthetic construct; identical to SEQ ID NO: 50720
  source 1..120: mol_type = other DNA

SEQ ID NO: 80675 - DNA, 120 bp, synthetic construct; identical to SEQ ID NO: 50721
  source 1..120: mol_type = other DNA

SEQ ID NO: 80676 - DNA, 120 bp, synthetic construct; identical to SEQ ID NO: 14146
  source 1..120: mol_type = other DNA

SEQ ID NO: 80677 - DNA, 120 bp, synthetic construct; identical to SEQ ID NO: 50723
  source 1..120: mol_type = other DNA

SEQ ID NO: 80678 - DNA, 120 bp, synthetic construct; identical to SEQ ID NO: 50724
  source 1..120: mol_type = other DNA

SEQ ID NO: 80679 - DNA, 120 bp, synthetic construct; identical to SEQ ID NO: 14147
  source 1..120: mol_type = other DNA

SEQ ID NO: 80680 - DNA, 120 bp, synthetic construct; identical to SEQ ID NO: 50726
  source 1..120: mol_type = other DNA

SEQ ID NO: 80681 - DNA, 120 bp, synthetic construct; identical to SEQ ID NO: 50727
  source 1..120: mol_type = other DNA

SEQ ID NO: 80682 - DNA, 120 bp, synthetic construct; identical to SEQ ID NO: 50728
  source 1..120: mol_type = other DNA

SEQ ID NO: 80683 - DNA, 120 bp, synthetic construct; identical to SEQ ID NO: 50729
  source 1..120: mol_type = other DNA

SEQ ID NO: 80684 - DNA, 120 bp, synthetic construct; identical to SEQ ID NO: 14148
  source 1..120: mol_type = other DNA

SEQ ID NO: 80685 - DNA, 120 bp, synthetic construct; identical to SEQ ID NO: 50731
  source 1..120: mol_type = other DNA

SEQ ID NO: 80686 - DNA, 120 bp, synthetic construct; identical to SEQ ID NO: 14149
  source 1..120: mol_type = other DNA

SEQ ID NO: 80687 - DNA, 120 bp, synthetic construct; identical to SEQ ID NO: 50733
  source 1..120: mol_type = other DNA

SEQ ID NO: 80688 - DNA, 120 bp, synthetic construct; identical to SEQ ID NO: 50734
  source 1..120: mol_type = other DNA

SEQ ID NO: 80689 - DNA, 120 bp, synthetic construct; identical to SEQ ID NO: 50735
  source 1..120: mol_type = other DNA

SEQ ID NO: 80690 - DNA, 120 bp, synthetic construct; identical to SEQ ID NO: 14150
  source 1..120: mol_type = other DNA

SEQ ID NO: 80691 - DNA, 120 bp, synthetic construct; identical to SEQ ID NO: 50737
  source 1..120: mol_type = other DNA

SEQ ID NO: 80692 - DNA, 120 bp, synthetic construct; identical to SEQ ID NO: 50738
  source 1..120: mol_type = other DNA

SEQ ID NO: 80693 - DNA, 120 bp, synthetic construct; identical to SEQ ID NO: 14151
  source 1..120: mol_type = other DNA

SEQ ID NO: 80694 - DNA, 120 bp, synthetic construct; identical to SEQ ID NO: 50740
  source 1..120: mol_type = other DNA

SEQ ID NO: 80695 - DNA, 120 bp, synthetic construct; identical to SEQ ID NO: 50741
  source 1..120: mol_type = other DNA

SEQ ID NO: 80696 - DNA, 120 bp, synthetic construct; identical to SEQ ID NO: 50742
  source 1..120: mol_type = other DNA

SEQ ID NO: 80697 - DNA, 120 bp, synthetic construct; identical to SEQ ID NO: 14152
  source 1..120: mol_type = other DNA

SEQ ID NO: 80698 - DNA, 120 bp, synthetic construct; identical to SEQ ID NO: 14153
  source 1..120: mol_type = other DNA

SEQ ID NO: 80699 - DNA, 120 bp, synthetic construct; identical to SEQ ID NO: 50745
  source 1..120: mol_type = other DNA

SEQ ID NO: 80700 - DNA, 120 bp, synthetic construct; identical to SEQ ID NO: 14154
  source 1..120: mol_type = other DNA

SEQ ID NO: 80701 - DNA, 120 bp, synthetic construct; identical to SEQ ID NO: 50747
  source 1..120: mol_type = other DNA

SEQ ID NO: 80702 - DNA, 120 bp, synthetic construct; identical to SEQ ID NO: 50748
  source 1..120: mol_type = other DNA

SEQ ID NO: 80703 - DNA, 120 bp, synthetic construct; identical to SEQ ID NO: 50749
  source 1..120: mol_type = other DNA

SEQ ID NO: 80704 - DNA, 120 bp, synthetic construct; identical to SEQ ID NO: 14155
  source 1..120: mol_type = other DNA

SEQ ID NO: 80705 - DNA, 120 bp, synthetic construct; identical to SEQ ID NO: 50751
  source 1..120: mol_type = other DNA

SEQ ID NO: 80706 - DNA, 120 bp, synthetic construct; identical to SEQ ID NO: 14156
  source 1..120: mol_type = other DNA

SEQ ID NO: 80707 - DNA, 120 bp, synthetic construct; identical to SEQ ID NO: 50753
  source 1..120: mol_type = other DNA

SEQ ID NO: 80708 - DNA, 120 bp, synthetic construct; identical to SEQ ID NO: 50754
  source 1..120: mol_type = other DNA

SEQ ID NO: 80709 - DNA, 120 bp, synthetic construct; identical to SEQ ID NO: 14157
  source 1..120: mol_type = other DNA

SEQ ID NO: 80710 - DNA, 120 bp, synthetic construct; identical to SEQ ID NO: 50756
  source 1..120: mol_type = other DNA

SEQ ID NO: 80711 - DNA, 120 bp, synthetic construct; identical to SEQ ID NO: 50757
  source 1..120: mol_type = other DNA

SEQ ID NO: 80712 - DNA, 120 bp, synthetic construct; identical to SEQ ID NO: 50758
  source 1..120: mol_type = other DNA

SEQ ID NO: 80713 - DNA, 120 bp, synthetic construct; identical to SEQ ID NO: 50759
  source 1..120: mol_type = other DNA

SEQ ID NO: 80714 - DNA, 120 bp, synthetic construct; identical to SEQ ID NO: 14158
  source 1..120: mol_type = other DNA

SEQ ID NO: 80715 - DNA, 120 bp, synthetic construct; identical to SEQ ID NO: 50761
  source 1..120: mol_type = other DNA

SEQ ID NO: 80716 - DNA, 120 bp, synthetic construct; identical to SEQ ID NO: 50762
  source 1..120: mol_type = other DNA

SEQ ID NO: 80717 - DNA, 120 bp, synthetic construct; identical to SEQ ID NO: 6670
  source 1..120: mol_type = other DNA

SEQ ID NO: 80718 - DNA, 120 bp, synthetic construct; identical to SEQ ID NO: 14159
  source 1..120: mol_type = other DNA

SEQ ID NO: 80719 - DNA, 120 bp, synthetic construct; identical to SEQ ID NO: 50765
  source 1..120: mol_type = other DNA

SEQ ID NO: 80720 - DNA, 120 bp, synthetic construct; identical to SEQ ID NO: 50766
  source 1..120: mol_type = other DNA

SEQ ID NO: 80721 - DNA, 120 bp, synthetic construct; identical to SEQ ID NO: 50767
  source 1..120: mol_type = other DNA

SEQ ID NO: 80722 - DNA, 120 bp, synthetic construct; identical to SEQ ID NO: 14160
  source 1..120: mol_type = other DNA

SEQ ID NO: 80723 - DNA, 120 bp, synthetic construct; identical to SEQ ID NO: 50769
  source 1..120: mol_type = other DNA

SEQ ID NO: 80724 - DNA, 120 bp, synthetic construct; identical to SEQ ID NO: 50770
  source 1..120: mol_type = other DNA

SEQ ID NO: 80725 - DNA, 120 bp, synthetic construct; identical to SEQ ID NO: 50771
  source 1..120: mol_type = other DNA

SEQ ID NO: 80726 - DNA, 120 bp, synthetic construct; identical to SEQ ID NO: 14161
  source 1..120: mol_type = other DNA

SEQ ID NO: 80727 - DNA, 120 bp, synthetic construct; identical to SEQ ID NO: 50773
  source 1..120: mol_type = other DNA

SEQ ID NO: 80728 - DNA, 120 bp, synthetic construct; identical to SEQ ID NO: 50774
  source 1..120: mol_type = other DNA

SEQ ID NO: 80729 - DNA, 120 bp, synthetic construct; identical to SEQ ID NO: 50775
  source 1..120: mol_type = other DNA

SEQ ID NO: 80730 - DNA, 120 bp, synthetic construct; identical to SEQ ID NO: 50776
  source 1..120: mol_type = other DNA

SEQ ID NO: 80731 - DNA, 120 bp, synthetic construct; identical to SEQ ID NO: 14162
  source 1..120: mol_type = other DNA

SEQ ID NO: 80732 - DNA, 120 bp, synthetic construct; identical to SEQ ID NO: 50778
  source 1..120: mol_type = other DNA

SEQ ID NO: 80733 - DNA, 120 bp, synthetic construct; identical to SEQ ID NO: 50779
  source 1..120: mol_type = other DNA

SEQ ID NO: 80734 - DNA, 120 bp, synthetic construct; identical to SEQ ID NO: 50780
  source 1..120: mol_type = other DNA

SEQ ID NO: 80735 - DNA, 120 bp, synthetic construct; identical to SEQ ID NO: 14163
  source 1..120: mol_type = other DNA

SEQ ID NO: 80736 - DNA, 120 bp, synthetic construct; identical to SEQ ID NO: 50782
  source 1..120: mol_type = other DNA

SEQ ID NO: 80737 - DNA, 120 bp, synthetic construct; identical to SEQ ID NO: 50783
  source 1..120: mol_type = other DNA

SEQ ID NO: 80738 - DNA, 120 bp, synthetic construct; identical to SEQ ID NO: 50784
  source 1..120: mol_type = other DNA

SEQ ID NO: 80739 - DNA, 120 bp, synthetic construct; identical to SEQ ID NO: 14164
  source 1..120: mol_type = other DNA

SEQ ID NO: 80740 - DNA, 120 bp, synthetic construct; identical to SEQ ID NO: 50786
  source 1..120: mol_type = other DNA

SEQ ID NO: 80741 - DNA, 120 bp, synthetic construct; identical to SEQ ID NO: 50787
  source 1..120: mol_type = other DNA

SEQ ID NO: 80742 - DNA, 120 bp, synthetic construct; identical to SEQ ID NO: 50788
  source 1..120: mol_type = other DNA

SEQ ID NO: 80743 - DNA, 120 bp, synthetic construct; identical to SEQ ID NO: 14165
  source 1..120: mol_type = other DNA

SEQ ID NO: 80744 - DNA, 120 bp, synthetic construct; identical to SEQ ID NO: 50790
  source 1..120: mol_type = other DNA

SEQ ID NO: 80745 - DNA, 120 bp, synthetic construct; identical to SEQ ID NO: 50791
  source 1..120: mol_type = other DNA

SEQ ID NO: 80746 - DNA, 120 bp, synthetic construct; identical to SEQ ID NO: 14166
  source 1..120: mol_type = other DNA

SEQ ID NO: 80747 - DNA, 120 bp, synthetic construct; identical to SEQ ID NO: 50793
  source 1..120: mol_type = other DNA

SEQ ID NO: 80748 - DNA, 120 bp, synthetic construct; identical to SEQ ID NO: 50794
  source 1..120: mol_type = other DNA

SEQ ID NO: 80749 - DNA, 120 bp, synthetic construct; identical to SEQ ID NO: 50795
  source 1..120: mol_type = other DNA

SEQ ID NO: 80750 - DNA, 120 bp, synthetic construct; identical to SEQ ID NO: 50796
  source 1..120: mol_type = other DNA

SEQ ID NO: 80751 - DNA, 120 bp, synthetic construct; identical to SEQ ID NO: 14167
  source 1..120: mol_type = other DNA

SEQ ID NO: 80752 - DNA, 120 bp, synthetic construct; identical to SEQ ID NO: 50798
  source 1..120: mol_type = other DNA

SEQ ID NO: 80753 - DNA, 120 bp, synthetic construct; identical to SEQ ID NO: 50799
  source 1..120: mol_type = other DNA

SEQ ID NO: 80754 - DNA, 120 bp, synthetic construct; identical to SEQ ID NO: 14168
  source 1..120: mol_type = other DNA

SEQ ID NO: 80755 - DNA, 120 bp, synthetic construct; identical to SEQ ID NO: 50801
  source 1..120: mol_type = other DNA

SEQ ID NO: 80756 - DNA, 120 bp, synthetic construct; identical to SEQ ID NO: 50802
  source 1..120: mol_type = other DNA

SEQ ID NO: 80757 - DNA, 120 bp, synthetic construct; identical to SEQ ID NO: 50803
  source 1..120: mol_type = other DNA

SEQ ID NO: 80758 - DNA, 120 bp, synthetic construct; identical to SEQ ID NO: 50804
  source 1..120: mol_type = other DNA

SEQ ID NO: 80759 - DNA, 120 bp, synthetic construct; identical to SEQ ID NO: 14169
  source 1..120: mol_type = other DNA

SEQ ID NO: 80760 - DNA, 120 bp, synthetic construct; identical to SEQ ID NO: 50806
  source 1..120: mol_type = other DNA

SEQ ID NO: 80761 - DNA, 120 bp, synthetic construct; identical to SEQ ID NO: 50807
  source 1..120: mol_type = other DNA

SEQ ID NO: 80762 - DNA, 120 bp, synthetic construct; identical to SEQ ID NO: 50808
  source 1..120: mol_type = other DNA

SEQ ID NO: 80763 - DNA, 120 bp, synthetic construct; identical to SEQ ID NO: 14170
  source 1..120: mol_type = other DNA

SEQ ID NO: 80764 - DNA, 120 bp, synthetic construct; identical to SEQ ID NO: 50810
  source 1..120: mol_type = other DNA

SEQ ID NO: 80765 - DNA, 120 bp, synthetic construct; identical to SEQ ID NO: 50811
  source 1..120: mol_type = other DNA

SEQ ID NO: 80766 - DNA, 120 bp, synthetic construct; identical to SEQ ID NO: 50812
  source 1..120: mol_type = other DNA

SEQ ID NO: 80767 - DNA, 120 bp, synthetic construct; identical to SEQ ID NO: 50813
  source 1..120: mol_type = other DNA

SEQ ID NO: 80768 - DNA, 120 bp, synthetic construct; identical to SEQ ID NO: 14171
  source 1..120: mol_type = other DNA

SEQ ID NO: 80769 - DNA, 120 bp, synthetic construct; identical to SEQ ID NO: 50815
  source 1..120: mol_type = other DNA

SEQ ID NO: 80770 - DNA, 120 bp, synthetic construct; identical to SEQ ID NO: 50816
  source 1..120: mol_type = other DNA

SEQ ID NO: 80771 - DNA, 120 bp, synthetic construct; identical to SEQ ID NO: 14172
  source 1..120: mol_type = other DNA

SEQ ID NO: 80772 - DNA, 120 bp, synthetic construct; identical to SEQ ID NO: 50818
  source 1..120: mol_type = other DNA

SEQ ID NO: 80773 - DNA, 120 bp, synthetic construct; identical to SEQ ID NO: 50819
  source 1..120: mol_type = other DNA

SEQ ID NO: 80774 - DNA, 120 bp, synthetic construct; identical to SEQ ID NO: 50820
  source 1..120: mol_type = other DNA

SEQ ID NO: 80775 - DNA, 120 bp, synthetic construct; identical to SEQ ID NO: 50821
  source 1..120: mol_type = other DNA

SEQ ID NO: 80776 - DNA, 120 bp, synthetic construct; identical to SEQ ID NO: 14173
  source 1..120: mol_type = other DNA

SEQ ID NO: 80777 - DNA, 120 bp, synthetic construct; identical to SEQ ID NO: 50823
  source 1..120: mol_type = other DNA

SEQ ID NO: 80778 - DNA, 120 bp, synthetic construct; identical to SEQ ID NO: 50824
  source 1..120: mol_type = other DNA

SEQ ID NO: 80779 - DNA, 120 bp, synthetic construct; identical to SEQ ID NO: 50825
  source 1..120: mol_type = other DNA

SEQ ID NO: 80780 - DNA, 120 bp, synthetic construct; identical to SEQ ID NO: 14174
  source 1..120: mol_type = other DNA

SEQ ID NO: 80781 - DNA, 120 bp, synthetic construct; identical to SEQ ID NO: 50827
  source 1..120: mol_type = other DNA

SEQ ID NO: 80782 - DNA, 120 bp, synthetic construct; identical to SEQ ID NO: 50828
  source 1..120: mol_type = other DNA

SEQ ID NO: 80783 - DNA, 120 bp, synthetic construct; identical to SEQ ID NO: 50829
  source 1..120: mol_type = other DNA

SEQ ID NO: 80784 - DNA, 120 bp, synthetic construct; identical to SEQ ID NO: 14175
  source 1..120: mol_type = other DNA

SEQ ID NO: 80785 - DNA, 120 bp, synthetic construct; identical to SEQ ID NO: 50831
  source 1..120: mol_type = other DNA

SEQ ID NO: 80786 - DNA, 120 bp, synthetic construct; identical to SEQ ID NO: 50832
  source 1..120: mol_type = other DNA

SEQ ID NO: 80787 - DNA, 120 bp, synthetic construct; identical to SEQ ID NO: 50833
  source 1..120: mol_type = other DNA

SEQ ID NO: 80788 - DNA, 120 bp, synthetic construct; identical to SEQ ID NO: 14176
  source 1..120: mol_type = other DNA

SEQ ID NO: 80789 - DNA, 120 bp, synthetic construct; identical to SEQ ID NO: 50835
  source 1..120: mol_type = other DNA

SEQ ID NO: 80790 - DNA, 120 bp, synthetic construct; identical to SEQ ID NO: 50836
  source 1..120: mol_type = other DNA

SEQ ID NO: 80791 - DNA, 120 bp, synthetic construct; identical to SEQ ID NO: 50837
  source 1..120: mol_type = other DNA

SEQ ID NO: 80792 - DNA, 120 bp, synthetic construct; identical to SEQ ID NO: 14177
  source 1..120: mol_type = other DNA

SEQ ID NO: 80793 - DNA, 120 bp, synthetic construct; identical to SEQ ID NO: 50839
  source 1..120: mol_type = other DNA

SEQ ID NO: 80794 - DNA, 120 bp, synthetic construct; identical to SEQ ID NO: 50840
  source 1..120: mol_type = other DNA

SEQ ID NO: 80795 - DNA, 120 bp, synthetic construct; identical to SEQ ID NO: 14178
  source 1..120: mol_type = other DNA

SEQ ID NO: 80796 - DNA, 120 bp, synthetic construct; identical to SEQ ID NO: 50842
  source 1..120: mol_type = other DNA

SEQ ID NO: 80797 - DNA, 120 bp, synthetic construct; identical to SEQ ID NO: 50843
  source 1..120: mol_type = other DNA

SEQ ID NO: 80798 - DNA, 120 bp, synthetic construct; identical to SEQ ID NO: 50844
  source 1..120: mol_type = other DNA

SEQ ID NO: 80799 - DNA, 120 bp, synthetic construct; identical to SEQ ID NO: 50845
  source 1..120: mol_type = other DNA

SEQ ID NO: 80800 - DNA, 120 bp, synthetic construct; identical to SEQ ID NO: 14179
  source 1..120: mol_type = other DNA

SEQ ID NO: 80801 - DNA, 120 bp, synthetic construct; identical to SEQ ID NO: 50847
  source 1..120: mol_type = other DNA

SEQ ID NO: 80802 - DNA, 120 bp, synthetic construct; identical to SEQ ID NO: 50848
  source 1..120: mol_type = other DNA

SEQ ID NO: 80803 - DNA, 120 bp, synthetic construct; identical to SEQ ID NO: 14180
  source 1..120: mol_type = other DNA

SEQ ID NO: 80804 - DNA, 120 bp, synthetic construct; identical to SEQ ID NO: 50850
  source 1..120: mol_type = other DNA

SEQ ID NO: 80805 - DNA, 120 bp, synthetic construct; identical to SEQ ID NO: 50851
  source 1..120: mol_type = other DNA

SEQ ID NO: 80806 - DNA, 120 bp, synthetic construct; identical to SEQ ID NO: 50852
  source 1..120: mol_type = other DNA

SEQ ID NO: 80807 - DNA, 120 bp, synthetic construct; identical to SEQ ID NO: 50853
  source 1..120: mol_type = other DNA

SEQ ID NO: 80808 - DNA, 120 bp, synthetic construct; identical to SEQ ID NO: 14181
  source 1..120: mol_type = other DNA

SEQ ID NO: 80809 - DNA, 120 bp, synthetic construct; identical to SEQ ID NO: 50855
  source 1..120: mol_type = other DNA

SEQ ID NO: 80810 - DNA, 120 bp, synthetic construct; identical to SEQ ID NO: 50856
  source 1..120: mol_type = other DNA

SEQ ID NO: 80811 - DNA, 120 bp, synthetic construct; identical to SEQ ID NO: 50857
  source 1..120: mol_type = other DNA

SEQ ID NO: 80812 - DNA, 120 bp, synthetic construct; identical to SEQ ID NO: 14182
  source 1..120: mol_type = other DNA

SEQ ID NO: 80813 - DNA, 120 bp, synthetic construct; identical to SEQ ID NO: 50859
  source 1..120: mol_type = other DNA

SEQ ID NO: 80814 - DNA, 120 bp, synthetic construct; identical to SEQ ID NO: 50860
  source 1..120: mol_type = other DNA

SEQ ID NO: 80815 - DNA, 120 bp, synthetic construct; identical to SEQ ID NO: 50861
  source 1..120: mol_type = other DNA

SEQ ID NO: 80816 - DNA, 120 bp, synthetic construct; identical to SEQ ID NO: 14183
  source 1..120: mol_type = other DNA

SEQ ID NO: 80817 - DNA, 120 bp, synthetic construct; identical to SEQ ID NO: 50863
  source 1..120: mol_type = other DNA

SEQ ID NO: 80818 - DNA, 120 bp, synthetic construct; identical to SEQ ID NO: 50864
  source 1..120: mol_type = other DNA

SEQ ID NO: 80819 - DNA, 120 bp, synthetic construct; identical to SEQ ID NO: 14184
  source 1..120: mol_type = other DNA

SEQ ID NO: 80820 - DNA, 120 bp, synthetic construct; identical to SEQ ID NO: 50866
  source 1..120: mol_type = other DNA

SEQ ID NO: 80821 - DNA, 120 bp, synthetic construct; identical to SEQ ID NO: 50867
  source 1..120: mol_type = other DNA

SEQ ID NO: 80822 - DNA, 120 bp, synthetic construct; identical to SEQ ID NO: 50868
  source 1..120: mol_type = other DNA

SEQ ID NO: 80823 - DNA, 120 bp, synthetic construct; identical to SEQ ID NO: 50869
  source 1..120: mol_type = other DNA

SEQ ID NO: 80824 - DNA, 120 bp, synthetic construct; identical to SEQ ID NO: 14185
  source 1..120: mol_type = other DNA

SEQ ID NO: 80825 - DNA, 120 bp, synthetic construct; identical to SEQ ID NO: 50871
  source 1..120: mol_type = other DNA

SEQ ID NO: 80826 - DNA, 120 bp, synthetic construct; identical to SEQ ID NO: 50872
  source 1..120: mol_type = other DNA

SEQ ID NO: 80827 - DNA, 120 bp, synthetic construct; identical to SEQ ID NO: 14186
  source 1..120: mol_type = other DNA

SEQ ID NO: 80828 - DNA, 120 bp, synthetic construct; identical to SEQ ID NO: 50874
  source 1..120: mol_type = other DNA

SEQ ID NO: 80829 - DNA, 120 bp, synthetic construct; identical to SEQ ID NO: 50875
  source 1..120: mol_type = other DNA

SEQ ID NO: 80830 - DNA, 120 bp, synthetic construct; identical to SEQ ID NO: 50876
  source 1..120: mol_type = other DNA

SEQ ID NO: 80831 - DNA, 120 bp, synthetic construct; identical to SEQ ID NO: 14187
  source 1..120: mol_type = other DNA

SEQ ID NO: 80832 - DNA, 120 bp, synthetic construct; identical to SEQ ID NO: 50878
  source 1..120: mol_type = other DNA

SEQ ID NO: 80833 - DNA, 120 bp, synthetic construct; identical to SEQ ID NO: 50879
  source 1..120: mol_type = other DNA

SEQ ID NO: 80834 - DNA, 120 bp, synthetic construct; identical to SEQ ID NO: 50880
  source 1..120: mol_type = other DNA

SEQ ID NO: 80835 - DNA, 120 bp, synthetic construct; identical to SEQ ID NO: 50881
  source 1..120: mol_type = other DNA

SEQ ID NO: 80836 - DNA, 120 bp, synthetic construct; identical to SEQ ID NO: 14188
  source 1..120: mol_type = other DNA

SEQ ID NO: 80837 - DNA, 120 bp, synthetic construct; identical to SEQ ID NO: 50883
  source 1..120: mol_type = other DNA

SEQ ID NO: 80838 - DNA, 120 bp, synthetic construct; identical to SEQ ID NO: 50884
  source 1..120: mol_type = other DNA

SEQ ID NO: 80839 - DNA, 120 bp, synthetic construct; identical to SEQ ID NO: 50885
  source 1..120: mol_type = other DNA

SEQ ID NO: 80840 - DNA, 120 bp, synthetic construct; identical to SEQ ID NO: 50886
  source 1..120: mol_type = other DNA

SEQ ID NO: 80841 - DNA, 120 bp, synthetic construct; identical to SEQ ID NO: 14189
  source 1..120: mol_type = other DNA

SEQ ID NO: 80842 - DNA, 120 bp, synthetic construct; identical to SEQ ID NO: 50888
  source 1..120: mol_type = other DNA

SEQ ID NO: 80843 - DNA, 120 bp, synthetic construct; identical to SEQ ID NO: 50889
  source 1..120: mol_type = other DNA

SEQ ID NO: 80844 - DNA, 120 bp, synthetic construct; identical to SEQ ID NO: 50890
  source 1..120: mol_type = other DNA

SEQ ID NO: 80845 - DNA, 120 bp, synthetic construct; identical to SEQ ID NO: 14190
  source 1..120: mol_type = other DNA

SEQ ID NO: 80846 - DNA, 120 bp, synthetic construct; identical to SEQ ID NO: 50892
  source 1..120: mol_type = other DNA

SEQ ID NO: 80847 - DNA, 120 bp, synthetic construct; identical to SEQ ID NO: 50893
  source 1..120: mol_type = other DNA

SEQ ID NO: 80848 - DNA, 120 bp, synthetic construct; identical to SEQ ID NO: 50894
  source 1..120: mol_type = other DNA

SEQ ID NO: 80849 - DNA, 120 bp, synthetic construct; identical to SEQ ID NO: 14191
  source 1..120: mol_type = other DNA

SEQ ID NO: 80850 - DNA, 120 bp, synthetic construct; identical to SEQ ID NO: 50896
  source 1..120: mol_type = other DNA

SEQ ID NO: 80851 - DNA, 120 bp, synthetic construct; identical to SEQ ID NO: 50897
  source 1..120: mol_type = other DNA

SEQ ID NO: 80852 - DNA, 120 bp, synthetic construct; identical to SEQ ID NO: 14192
  source 1..120: mol_type = other DNA

SEQ ID NO: 80853 - DNA, 120 bp, synthetic construct; identical to SEQ ID NO: 50899
  source 1..120: mol_type = other DNA

SEQ ID NO: 80854 - DNA, 120 bp, synthetic construct; identical to SEQ ID NO: 50900
  source 1..120: mol_type = other DNA

SEQ ID NO: 80855 - DNA, 120 bp, synthetic construct; identical to SEQ ID NO: 50901
  source 1..120: mol_type = other DNA

SEQ ID NO: 80856 - DNA, 120 bp, synthetic construct; identical to SEQ ID NO: 14193
  source 1..120: mol_type = other DNA

SEQ ID NO: 80857 - DNA, 120 bp, synthetic construct; identical to SEQ ID NO: 50903
  source 1..120: mol_type = other DNA

SEQ ID NO: 80858 - DNA, 120 bp, synthetic construct; identical to SEQ ID NO: 50904
  source 1..120: mol_type = other DNA

SEQ ID NO: 80859 - DNA, 120 bp, synthetic construct; identical to SEQ ID NO: 50905
  source 1..120: mol_type = other DNA

SEQ ID NO: 80860 - DNA, 120 bp, synthetic construct; identical to SEQ ID NO: 50906
  source 1..120: mol_type = other DNA

SEQ ID NO: 80861 - DNA, 120 bp, synthetic construct; identical to SEQ ID NO: 14194
  source 1..120: mol_type = other DNA

SEQ ID NO: 80862 - DNA, 120 bp, synthetic construct; identical to SEQ ID NO: 50908
  source 1..120: mol_type = other DNA

SEQ ID NO: 80863 - DNA, 120 bp, synthetic construct; identical to SEQ ID NO: 50909
  source 1..120: mol_type = other DNA

SEQ ID NO: 80864 - DNA, 120 bp, synthetic construct; identical to SEQ ID NO: 14195
  source 1..120: mol_type = other DNA

SEQ ID NO: 80865 - DNA, 120 bp, synthetic construct; identical to SEQ ID NO: 50911
  source 1..120: mol_type = other DNA

SEQ ID NO: 80866 - DNA, 120 bp, synthetic construct; identical to SEQ ID NO: 50912
  source 1..120: mol_type = other DNA

SEQ ID NO: 80867 - DNA, 120 bp, synthetic construct; identical to SEQ ID NO: 50913
  source 1..120: mol_type = other DNA

SEQ ID NO: 80868 - DNA, 120 bp, synthetic construct; identical to SEQ ID NO: 50914
  source 1..120: mol_type = other DNA

SEQ ID NO: 80869 - DNA, 120 bp, synthetic construct; identical to SEQ ID NO: 14196
  source 1..120: mol_type = other DNA

SEQ ID NO: 80870 - DNA, 120 bp, synthetic construct; identical to SEQ ID NO: 50916
  source 1..120: mol_type = other DNA

SEQ ID NO: 80871 - DNA, 120 bp, synthetic construct; identical to SEQ ID NO: 50917
  source 1..120: mol_type = other DNA

SEQ ID NO: 80872 - DNA, 120 bp, synthetic construct; identical to SEQ ID NO: 50918
  source 1..120: mol_type = other DNA

SEQ ID NO: 80873 - DNA, 120 bp, synthetic construct; identical to SEQ ID NO: 14197
  source 1..120: mol_type = other DNA

SEQ ID NO: 80874 - DNA, 120 bp, synthetic construct; identical to SEQ ID NO: 50920
  source 1..120: mol_type = other DNA

SEQ ID NO: 80875 - DNA, 120 bp, synthetic construct; identical to SEQ ID NO: 50921
  source 1..120: mol_type = other DNA

SEQ ID NO: 80876 - DNA, 120 bp, synthetic construct; identical to SEQ ID NO: 14198
  source 1..120: mol_type = other DNA

SEQ ID NO: 80877 - DNA, 120 bp, synthetic construct; identical to SEQ ID NO: 50923
  source 1..120: mol_type = other DNA

SEQ ID NO: 80878 - DNA, 120 bp, synthetic construct; identical to SEQ ID NO: 50924
  source 1..120: mol_type = other DNA

SEQ ID NO: 80879 - DNA, 120 bp, synthetic construct; identical to SEQ ID NO: 50925
  source 1..120: mol_type = other DNA

SEQ ID NO: 80880 - DNA, 120 bp, synthetic construct; identical to SEQ ID NO: 50926
  source 1..120: mol_type = other DNA

SEQ ID NO: 80881 - DNA, 120 bp, synthetic construct; identical to SEQ ID NO: 14199
  source 1..120: mol_type = other DNA

SEQ ID NO: 80882 - DNA, 120 bp, synthetic construct; identical to SEQ ID NO: 50928
  source 1..120: mol_type = other DNA

SEQ ID NO: 80883 - DNA, 120 bp, synthetic construct; identical to SEQ ID NO: 50929
  source 1..120: mol_type = other DNA

SEQ ID NO: 80884 - DNA, 120 bp, synthetic construct; identical to SEQ ID NO: 50930
  source 1..120: mol_type = other DNA

SEQ ID NO: 80885 - DNA, 120 bp, synthetic construct; identical to SEQ ID NO: 14200
  source 1..120: mol_type = other DNA

SEQ ID NO: 80886 - DNA, 120 bp, synthetic construct; identical to SEQ ID NO: 50932
  source 1..120: mol_type = other DNA

SEQ ID NO: 80887 - DNA, 120 bp, synthetic construct; identical to SEQ ID NO: 50933
  source 1..120: mol_type = other DNA

SEQ ID NO: 80888 - DNA, 120 bp, synthetic construct; identical to SEQ ID NO: 50934
  source 1..120: mol_type = other DNA

SEQ ID NO: 80889 - DNA, 120 bp, synthetic construct; identical to SEQ ID NO: 14201
  source 1..120: mol_type = other DNA

SEQ ID NO: 80890 - DNA, 120 bp, synthetic construct; identical to SEQ ID NO: 50936
  source 1..120: mol_type = other DNA

SEQ ID NO: 80891 - DNA, 120 bp, synthetic construct; identical to SEQ ID NO: 6710
  source 1..120: mol_type = other DNA

SEQ ID NO: 80892 - DNA, 120 bp, synthetic construct; identical to SEQ ID NO: 14202
  source 1..120: mol_type = other DNA

SEQ ID NO: 80893 - DNA, 120 bp, synthetic construct; identical to SEQ ID NO: 50939
  source 1..120: mol_type = other DNA

SEQ ID NO: 80894 - DNA, 120 bp, synthetic construct; identical to SEQ ID NO: 50940
  source 1..120: mol_type = other DNA

SEQ ID NO: 80895 - DNA, 120 bp, synthetic construct; identical to SEQ ID NO: 50941
  source 1..120: mol_type = other DNA

SEQ ID NO: 80896 - DNA, 120 bp, synthetic construct; identical to SEQ ID NO: 14203
  source 1..120: mol_type = other DNA

SEQ ID NO: 80897 - DNA, 120 bp, synthetic construct; identical to SEQ ID NO: 50943
  source 1..120: mol_type = other DNA

SEQ ID NO: 80898 - DNA, 120 bp, synthetic construct; identical to SEQ ID NO: 50944
  source 1..120: mol_type = other DNA

SEQ ID NO: 80899 - DNA, 120 bp, synthetic construct; identical to SEQ ID NO: 50945
  source 1..120: mol_type = other DNA

SEQ ID NO: 80900 - DNA, 120 bp, synthetic construct; identical to SEQ ID NO: 14204
  source 1..120: mol_type = other DNA

SEQ ID NO: 80901 - DNA, 120 bp, synthetic construct; identical to SEQ ID NO: 50947
  source 1..120: mol_type = other DNA

SEQ ID NO: 80902 - DNA, 120 bp, synthetic construct; identical to SEQ ID NO: 50948
  source 1..120: mol_type = other DNA

SEQ ID NO: 80903 - DNA, 120 bp, synthetic construct; identical to SEQ ID NO: 50949
  source 1..120: mol_type = other DNA

SEQ ID NO: 80904 - DNA, 120 bp, synthetic construct; identical to SEQ ID NO: 50950
  source 1..120: mol_type = other DNA

SEQ ID NO: 80905 - DNA, 120 bp, synthetic construct; identical to SEQ ID NO: 14205
  source 1..120: mol_type = other DNA

SEQ ID NO: 80906 - DNA, 120 bp, synthetic construct; identical to SEQ ID NO: 50952
  source 1..120: mol_type = other DNA

SEQ ID NO: 80907 - DNA, 120 bp, synthetic construct; identical to SEQ ID NO: 50953
  source 1..120: mol_type = other DNA

SEQ ID NO: 80908 - DNA, 120 bp, synthetic construct; identical to SEQ ID NO: 50954
  source 1..120: mol_type = other DNA

SEQ ID NO: 80909 - DNA, 120 bp, synthetic construct; identical to SEQ ID NO: 14206
  source 1..120: mol_type = other DNA

SEQ ID NO: 80910 - DNA, 120 bp, synthetic construct; identical to SEQ ID NO: 50956
  source 1..120: mol_type = other DNA

SEQ ID NO: 80911 - DNA, 120 bp, synthetic construct; identical to SEQ ID NO: 50957
  source 1..120: mol_type = other DNA

SEQ ID NO: 80912 - DNA, 120 bp, synthetic construct; identical to SEQ ID NO: 50958
  source 1..120: mol_type = other DNA

SEQ ID NO: 80913 - DNA, 120 bp, synthetic construct; identical to SEQ ID NO: 14207
  source 1..120: mol_type = other DNA

SEQ ID NO: 80914 - DNA, 120 bp, synthetic construct; identical to SEQ ID NO: 50960
  source 1..120: mol_type = other DNA

SEQ ID NO: 80915 - DNA, 120 bp, synthetic construct; identical to SEQ ID NO: 50961
  source 1..120: mol_type = other DNA

SEQ ID NO: 80916 - DNA, 120 bp, synthetic construct; identical to SEQ ID NO: 50962
  source 1..120: mol_type = other DNA

SEQ ID NO: 80917 - DNA, 120 bp, synthetic construct; identical to SEQ ID NO: 14208
  source 1..120: mol_type = other DNA

SEQ ID NO: 80918 - DNA, 120 bp, synthetic construct; identical to SEQ ID NO: 50964
  source 1..120: mol_type = other DNA

SEQ ID NO: 80919 - DNA, 120 bp, synthetic construct; identical to SEQ ID NO: 50965
  source 1..120: mol_type = other DNA

SEQ ID NO: 80920 - DNA, 120 bp, synthetic construct; identical to SEQ ID NO: 50966
  source 1..120: mol_type = other DNA

SEQ ID NO: 80921 - DNA, 120 bp, synthetic construct; identical to SEQ ID NO: 14209
  source 1..120: mol_type = other DNA

SEQ ID NO: 80922 - DNA, 120 bp, synthetic construct; identical to SEQ ID NO: 50968
  source 1..120: mol_type = other DNA

SEQ ID NO: 80923 - DNA, 120 bp, synthetic construct; identical to SEQ ID NO: 50969
  source 1..120: mol_type = other DNA

SEQ ID NO: 80924 - DNA, 120 bp, synthetic construct; identical to SEQ ID NO: 50970
  source 1..120: mol_type = other DNA

SEQ ID NO: 80925 - DNA, 120 bp, synthetic construct; identical to SEQ ID NO: 14210
  source 1..120: mol_type = other DNA

SEQ ID NO: 80926 - DNA, 120 bp, synthetic construct; identical to SEQ ID NO: 50972
  source 1..120: mol_type = other DNA

SEQ ID NO: 80927 - DNA, 120 bp, synthetic construct; identical to SEQ ID NO: 50973
  source 1..120: mol_type = other DNA

SEQ ID NO: 80928 - DNA, 120 bp, synthetic construct; identical to SEQ ID NO: 14211
  source 1..120: mol_type = other DNA

SEQ ID NO: 80929 - DNA, 120 bp, synthetic construct; identical to SEQ ID NO: 50975
  source 1..120: mol_type = other DNA

SEQ ID NO: 80930 - DNA, 120 bp, synthetic construct; identical to SEQ ID NO: 50976
  source 1..120: mol_type = other DNA

SEQ ID NO: 80931 - DNA, 120 bp, synthetic construct; identical to SEQ ID NO: 50977
  source 1..120: mol_type = other DNA

SEQ ID NO: 80932 - DNA, 120 bp, synthetic construct; identical to SEQ ID NO: 50978
  source 1..120: mol_type = other DNA

SEQ ID NO: 80933 - DNA, 120 bp, synthetic construct; identical to SEQ ID NO: 14212
  source 1..120: mol_type = other DNA

SEQ ID NO: 80934 - DNA, 120 bp, synthetic construct; identical to SEQ ID NO: 50980
  source 1..120: mol_type = other DNA

SEQ ID NO: 80935 - DNA, 120 bp, synthetic construct; identical to SEQ ID NO: 50981
  source 1..120: mol_type = other DNA

SEQ ID NO: 80936 - DNA, 120 bp, synthetic construct; identical to SEQ ID NO: 50982
  source 1..120: mol_type = other DNA

SEQ ID NO: 80937 - DNA, 120 bp, synthetic construct; identical to SEQ ID NO: 14213
  source 1..120: mol_type = other DNA

SEQ ID NO: 80938 - DNA, 120 bp, synthetic construct; identical to SEQ ID NO: 50984
  source 1..120: mol_type = other DNA

SEQ ID NO: 80939 - DNA, 120 bp, synthetic construct; identical to SEQ ID NO: 50985
  source 1..120: mol_type = other DNA

SEQ ID NO: 80940 - DNA, 120 bp, synthetic construct; identical to SEQ ID NO: 14214
  source 1..120: mol_type = other DNA

SEQ ID NO: 80941 - DNA, 120 bp, synthetic construct; identical to SEQ ID NO: 50987
  source 1..120: mol_type = other DNA

SEQ ID NO: 80942 - DNA, 120 bp, synthetic construct; identical to SEQ ID NO: 50988
  source 1..120: mol_type = other DNA

SEQ ID NO: 80943 - DNA, 120 bp, synthetic construct; identical to SEQ ID NO: 50989
  source 1..120: mol_type = other DNA

SEQ ID NO: 80944 - DNA, 120 bp, synthetic construct; identical to SEQ ID NO: 14215
  source 1..120: mol_type = other DNA

SEQ ID NO: 80945 - DNA, 120 bp, synthetic construct; identical to SEQ ID NO: 50991
  source 1..120: mol_type = other DNA

SEQ ID NO: 80946 - DNA, 120 bp, synthetic construct; identical to SEQ ID NO: 50992
  source 1..120: mol_type = other DNA

SEQ ID NO: 80947 - DNA, 120 bp, synthetic construct; identical to SEQ ID NO: 50993
  source 1..120: mol_type = other DNA

SEQ ID NO: 80948 - DNA, 120 bp, synthetic construct; identical to SEQ ID NO: 14216
  source 1..120: mol_type = other DNA

SEQ ID NO: 80949 - DNA, 120 bp, synthetic construct; identical to SEQ ID NO: 50995
  source 1..120: mol_type = other DNA

SEQ ID NO: 80950 - DNA, 120 bp, synthetic construct; identical to SEQ ID NO: 50996
  source 1..120: mol_type = other DNA

SEQ ID NO: 80951 - DNA, 120 bp, synthetic construct; identical to SEQ ID NO: 50997
  source 1..120: mol_type = other DNA

SEQ ID NO: 80952 - DNA, 120 bp, synthetic construct; identical to SEQ ID NO: 50998
  source 1..120: mol_type = other DNA

SEQ ID NO: 80953 - DNA, 120 bp, synthetic construct; identical to SEQ ID NO: 14217
  source 1..120: mol_type = other DNA

SEQ ID NO: 80954 - DNA, 120 bp, synthetic construct; identical to SEQ ID NO: 51000
  source 1..120: mol_type = other DNA

SEQ ID NO: 80955 - DNA, 120 bp, synthetic construct; identical to SEQ ID NO: 51001
  source 1..120: mol_type = other DNA

SEQ ID NO: 80956 - DNA, 120 bp, synthetic construct; identical to SEQ ID NO: 14218
  source 1..120: mol_type = other DNA

SEQ ID NO: 80957 - DNA, 120 bp, synthetic construct; identical to SEQ ID NO: 51003
  source 1..120: mol_type = other DNA

SEQ ID NO: 80958 - DNA, 120 bp, synthetic construct; identical to SEQ ID NO: 51004
  source 1..120: mol_type = other DNA

SEQ ID NO: 80959 - DNA, 120 bp, synthetic construct; identical to SEQ ID NO: 51005
  source 1..120: mol_type = other DNA

SEQ ID NO: 80960 - DNA, 120 bp, synthetic construct; identical to SEQ ID NO: 51006
  source 1..120: mol_type = other DNA

SEQ ID NO: 80961 - DNA, 120 bp, synthetic construct; identical to SEQ ID NO: 14219
  source 1..120: mol_type = other DNA

SEQ ID NO: 80962 - DNA, 120 bp, synthetic construct; identical to SEQ ID NO: 51008
  source 1..120: mol_type = other DNA

SEQ ID NO: 80963 - DNA, 120 bp, synthetic construct; identical to SEQ ID NO: 51009
  source 1..120: mol_type = other DNA

SEQ ID NO: 80964 - DNA, 120 bp, synthetic construct; identical to SEQ ID NO: 14220
  source 1..120: mol_type = other DNA

SEQ ID NO: 80965 - DNA, 120 bp, synthetic construct; identical to SEQ ID NO: 51011
  source 1..120: mol_type = other DNA

SEQ ID NO: 80966 - DNA, 120 bp, synthetic construct; identical to SEQ ID NO: 51012
  source 1..120: mol_type = other DNA

SEQ ID NO: 80967 - DNA, 120 bp, synthetic construct; identical to SEQ ID NO: 51013
  source 1..120: mol_type = other DNA

SEQ ID NO: 80968 - DNA, 120 bp, synthetic construct; identical to SEQ ID NO: 51014
  source 1..120: mol_type = other DNA

SEQ ID NO: 80969 - DNA, 120 bp, synthetic construct; identical to SEQ ID NO: 14221
  source 1..120: mol_type = other DNA

SEQ ID NO: 80970 - DNA, 120 bp, synthetic construct; identical to SEQ ID NO: 51016
  source 1..120: mol_type = other DNA

SEQ ID NO: 80971 - DNA, 120 bp, synthetic construct; identical to SEQ ID NO: 51017
  source 1..120: mol_type = other DNA

SEQ ID NO: 80972 - DNA, 120 bp, synthetic construct; identical to SEQ ID NO: 14222
  source 1..120: mol_type = other DNA

SEQ ID NO: 80973 - DNA, 120 bp, synthetic construct; identical to SEQ ID NO: 51019
  source 1..120: mol_type = other DNA

SEQ ID NO: 80974 - DNA, 120 bp, synthetic construct; identical to SEQ ID NO: 51020
  source 1..120: mol_type = other DNA

SEQ ID NO: 80975 - DNA, 120 bp, synthetic construct; identical to SEQ ID NO: 51021
  source 1..120: mol_type = other DNA

SEQ ID NO: 80976 - DNA, 120 bp, synthetic construct; identical to SEQ ID NO: 14223
  source 1..120: mol_type = other DNA

SEQ ID NO: 80977 - DNA, 120 bp, synthetic construct; identical to SEQ ID NO: 51023
  source 1..120: mol_type = other DNA

SEQ ID NO: 80978 - DNA, 120 bp, synthetic construct; identical to SEQ ID NO: 51024
  source 1..120: mol_type = other DNA

SEQ ID NO: 80979 - DNA, 120 bp, synthetic construct; identical to SEQ ID NO: 51025
  source 1..120: mol_type = other DNA

SEQ ID NO: 80980 - DNA, 120 bp, synthetic construct; identical to SEQ ID NO: 14224
  source 1..120: mol_type = other DNA

SEQ ID NO: 80981 - DNA, 120 bp, synthetic construct; identical to SEQ ID NO: 51027
  source 1..120: mol_type = other DNA

SEQ ID NO: 80982 - DNA, 120 bp, synthetic construct; identical to SEQ ID NO: 51028
  source 1..120: mol_type = other DNA

SEQ ID NO: 80983 - DNA, 120 bp, synthetic construct; identical to SEQ ID NO: 51029
  source 1..120: mol_type = other DNA

SEQ ID NO: 80984 - DNA, 120 bp, synthetic construct; identical to SEQ ID NO: 51030
  source 1..120: mol_type = other DNA

SEQ ID NO: 80985 - DNA, 120 bp, synthetic construct; identical to SEQ ID NO: 14225
  source 1..120: mol_type = other DNA

SEQ ID NO: 80986 - DNA, 120 bp, synthetic construct; identical to SEQ ID NO: 51032
  source 1..120: mol_type = other DNA

SEQ ID NO: 80987 - DNA, 120 bp, synthetic construct; identical to SEQ ID NO: 51033
  source 1..120: mol_type = other DNA

SEQ ID NO: 80988 - DNA, 120 bp, synthetic construct; identical to SEQ ID NO: 51034
  source 1..120: mol_type = other DNA

SEQ ID NO: 80989 - DNA, 120 bp, synthetic construct; identical to SEQ ID NO: 14226
  source 1..120: mol_type = other DNA

SEQ ID NO: 80990 - DNA, 120 bp, synthetic construct; identical to SEQ ID NO: 51036
  source 1..120: mol_type = other DNA

SEQ ID NO: 80991 - DNA, 120 bp, synthetic construct; identical to SEQ ID NO: 51037
  source 1..120: mol_type = other DNA

SEQ ID NO: 80992 - DNA, 120 bp, synthetic construct; identical to SEQ ID NO: 14227
  source 1..120: mol_type = other DNA

SEQ ID NO: 80993 - DNA, 120 bp, synthetic construct; identical to SEQ ID NO: 51039
  source 1..120: mol_type = other DNA

SEQ ID NO: 80994 - DNA, 120 bp, synthetic construct; identical to SEQ ID NO: 51040
  source 1..120: mol_type = other DNA

SEQ ID NO: 80995 - DNA, 120 bp, synthetic construct; identical to SEQ ID NO: 51041
  source 1..120: mol_type = other DNA

SEQ ID NO: 80996 - DNA, 120 bp, synthetic construct; identical to SEQ ID NO: 14228
  source 1..120: mol_type = other DNA

SEQ ID NO: 80997 - DNA, 120 bp, synthetic construct; identical to SEQ ID NO: 51043
  source 1..120: mol_type = other DNA

SEQ ID NO: 80998 - DNA, 120 bp, synthetic construct; identical to SEQ ID NO: 51044
  source 1..120: mol_type = other DNA

SEQ ID NO: 80999 - DNA, 120 bp, synthetic construct; identical to SEQ ID NO: 51045
  source 1..120: mol_type = other DNA

SEQ ID NO: 81000 - DNA, 120 bp, synthetic construct; identical to SEQ ID NO: 51046
  source 1..120: mol_type = other DNA

SEQ ID NO: 81001 - DNA, 120 bp, synthetic construct; identical to SEQ ID NO: 14229
  source 1..120: mol_type = other DNA

SEQ ID NO: 81002 - DNA, 120 bp, synthetic construct; identical to SEQ ID NO: 51048
  source 1..120: mol_type = other DNA

SEQ ID NO: 81003 - DNA, 120 bp, synthetic construct; identical to SEQ ID NO: 51049
  source 1..120: mol_type = other DNA

SEQ ID NO: 81004 - DNA, 120 bp, synthetic construct; identical to SEQ ID NO: 14230
  source 1..120: mol_type = other DNA

SEQ ID NO: 81005 - DNA, 120 bp, synthetic construct; identical to SEQ ID NO: 51051
  source 1..120: mol_type = other DNA

SEQ ID NO: 81006 - DNA, 120 bp, synthetic construct; identical to SEQ ID NO: 51052
  source 1..120: mol_type = other DNA

SEQ ID NO: 81007 - DNA, 120 bp, synthetic construct; identical to SEQ ID NO: 51053
  source 1..120: mol_type = other DNA

SEQ ID NO: 81008 - DNA, 120 bp, synthetic construct; identical to SEQ ID NO: 51054
  source 1..120: mol_type = other DNA

SEQ ID NO: 81009 - DNA, 120 bp, synthetic construct; identical to SEQ ID NO: 14231
  source 1..120: mol_type = other DNA

SEQ ID NO: 81010 - DNA, 120 bp, synthetic construct; identical to SEQ ID NO: 51056
  source 1..120: mol_type = other DNA

SEQ ID NO: 81011 - DNA, 120 bp, synthetic construct; identical to SEQ ID NO: 51057
  source 1..120: mol_type = other DNA

SEQ ID NO: 81012 - DNA, 120 bp, synthetic construct; identical to SEQ ID NO: 14232
  source 1..120: mol_type = other DNA

SEQ ID NO: 81013 - DNA, 120 bp, synthetic construct; identical to SEQ ID NO: 51059
  source 1..120: mol_type = other DNA

SEQ ID NO: 81014 - DNA, 120 bp, synthetic construct; identical to SEQ ID NO: 51060
  source 1..120: mol_type = other DNA

SEQ ID NO: 81015 - DNA, 120 bp, synthetic construct; identical to SEQ ID NO: 51061
  source 1..120: mol_type = other DNA

SEQ ID NO: 81016 - DNA, 120 bp, synthetic construct; identical to SEQ ID NO: 51062
  source 1..120: mol_type = other DNA

SEQ ID NO: 81017 - DNA, 120 bp, synthetic construct; identical to SEQ ID NO: 14233
  source 1..120: mol_type = other DNA

SEQ ID NO: 81018 - DNA, 120 bp, synthetic construct; identical to SEQ ID NO: 51064
  source 1..120: mol_type = other DNA

SEQ ID NO: 81019 - DNA, 120 bp, synthetic construct; identical to SEQ ID NO: 51065
  source 1..120: mol_type = other DNA

SEQ ID NO: 81020 - DNA, 120 bp, synthetic construct; identical to SEQ ID NO: 51066
  source 1..120: mol_type = other DNA

SEQ ID NO: 81021 - DNA, 120 bp, synthetic construct; identical to SEQ ID NO: 14234
  source 1..120: mol_type = other DNA

SEQ ID NO: 81022 - DNA, 120 bp, synthetic construct; identical to SEQ ID NO: 6740
  source 1..120: mol_type = other DNA

SEQ ID NO: 81023 - DNA, 120 bp, synthetic construct; identical to SEQ ID NO: 51069
  source 1..120: mol_type = other DNA

SEQ ID NO: 81024 - DNA, 120 bp, synthetic construct; identical to SEQ ID NO: 51070
  source 1..120: mol_type = other DNA

SEQ ID NO: 81025 - DNA, 120 bp, synthetic construct; identical to SEQ ID NO: 14235
  source 1..120: mol_type = other DNA

SEQ ID NO: 81026 - DNA, 120 bp, synthetic construct; identical to SEQ ID NO: 51072
  source 1..120: mol_type = other DNA

SEQ ID NO: 81027 - DNA, 120 bp, synthetic construct; identical to SEQ ID NO: 51073
  source 1..120: mol_type = other DNA

SEQ ID NO: 81028 - DNA, 120 bp, synthetic construct; identical to SEQ ID NO: 51074
  source 1..120: mol_type = other DNA

SEQ ID NO: 81029 - DNA, 120 bp, synthetic construct; identical to SEQ ID NO: 14236
  source 1..120: mol_type = other DNA

SEQ ID NO: 81030 - DNA, 120 bp, synthetic construct; identical to SEQ ID NO: 51076
  source 1..120: mol_type = other DNA

SEQ ID NO: 81031 - DNA, 120 bp, synthetic construct; identical to SEQ ID NO: 51077
  source 1..120: mol_type = other DNA

SEQ ID NO: 81032 - DNA, 120 bp, synthetic construct; identical to SEQ ID NO: 14237
  source 1..120: mol_type = other DNA

SEQ ID NO: 81033 - DNA, 120 bp, synthetic construct; identical to SEQ ID NO: 51079
  source 1..120: mol_type = other DNA

SEQ ID NO: 81034 - DNA, 120 bp, synthetic construct; identical to SEQ ID NO: 51080
  source 1..120: mol_type = other DNA

SEQ ID NO: 81035 - DNA, 120 bp, synthetic construct; identical to SEQ ID NO: 51081
  source 1..120: mol_type = other DNA

SEQ ID NO: 81036 - DNA, 120 bp, synthetic construct; identical to SEQ ID NO: 14238
  source 1..120: mol_type = other DNA

SEQ ID NO: 81037 - DNA, 120 bp, synthetic construct; identical to SEQ ID NO: 51083
  source 1..120: mol_type = other DNA

SEQ ID NO: 81038 - DNA, 120 bp, synthetic construct; identical to SEQ ID NO: 51084
  source 1..120: mol_type = other DNA

SEQ ID NO: 81039 - DNA, 120 bp, synthetic construct; identical to SEQ ID NO: 51085
  source 1..120: mol_type = other DNA

SEQ ID NO: 81040 - DNA, 120 bp, synthetic construct; identical to SEQ ID NO: 51086
  source 1..120: mol_type = other DNA

SEQ ID NO: 81041 - DNA, 120 bp, synthetic construct; identical to SEQ ID NO: 14239
  source 1..120: mol_type = other DNA

SEQ ID NO: 81042 - DNA, 120 bp, synthetic construct; identical to SEQ ID NO: 51088
  source 1..120: mol_type = other DNA

SEQ ID NO: 81043 - DNA, 120 bp, synthetic construct; identical to SEQ ID NO: 51089
  source 1..120: mol_type = other DNA

SEQ ID NO: 81044 - DNA, 120 bp, synthetic construct; identical to SEQ ID NO: 51090
  source 1..120: mol_type = other DNA
